United States Patent Application Publication US 2026/0103690 A1 - sequence listing, part 45

SEQ ID NO: 213934 - protein, 364 aa, unidentified
MAVSGLSPKELTKEAPNIMLHVGLDLSRRRLDFDLLCEDGSRIERGAAPPDADGLRGLVRRVDVYQEPVCAAIESMNGARFVHDRLEELGWQVELADAQKVKGLAPLACKTDRIDAWVLAELSRRDLVPAIWLPSPTVRQERERARWRLHLVRHRTALKNRVHATLIAFGKPCPVSDLFGSRGRQLLARLDLPDPWAQTVSASLSLIEDLDVQITDCERELRVLGADHEYVPLLMSAPGIAWVLGYTIAAEIGDINRFASPTKLCGYTGLCPRVNQSGEHDHRGSITKNGPKYLRWALIEAALHAVCSPVYRERYKRTATRLGRQRGNKVARVAIARKLAEAIWYMLTRSQSFAPAGATTPLAA

SEQ ID NO: 213935 - protein, 357 aa, unidentified
MPRSTTHPRIAVAGIDIGKNTFHVVGHDKSGAIVLRQKWSRGQVQSRFANMPPCLIGMEACVGAHHLARKLTALGHTARLMPARYVRAYAKGQKNDFNDGEAIAEAVQRPTMKFVAVKTVDQLDLQALHRVRERLVSQRTGIINQMRAFLLERGVAVRQGIRFLRAELPNVLAARSDVLSPRMLRIIESLAGDWRSLDARIDRLTEEIKTIAATDVDCRRTMSVPGIGPIISSATVAAIGKGDVFSKGRDFAAWLGIVPRQISTGDRTILGRISKRGNRYLRVLFVQAAWVVLAKPQMWERYGLLAWIAAAKRRMHPNVLAVALANKLARITWAVLAKGRNFEMTRKSKSNAAPQPA

SEQ ID NO: 213936 - protein, 341 aa, unidentified
MMIIGCDFHPRFQQIAFIDRETGECGERRLNHPEEAEQFYRSLIGRQVLIGAEATGNFRWFRHLMDELGHEFLLGDATAIRAACPRRQKTDKRDARHILNMLVEDRFPVVWQPSVENDHVRQLLLHRCRMVRMRTKVKNQLDSMAKNEGVLSSRVWSARRRSQLEALPLPGWYAHRRADLLGLLDELDKRIKPLDEAVCEAAEDNQEARLLMTHPGVGPIVSLAYVLTIGDWRRFPRGKQVGSYLGLIPVEESSGSKRRLGQVSKQGSSLVRWLLVEAATTAQRYDASWHRQYVRLSMTKHHGVAKVAIAHKLAVRLYWMLRSGDDYSKVMERGSHAGQSV

SEQ ID NO: 213937 - protein, 391 aa, unidentified
MVCVGIDVAKDKHDCCILDSDGTIRADCITIPNNMDGFKQLLQTIRDCTKKSDKIKVGLEATGHYSYNILGFLLDNDLAVYVMNPLHTNLYRKSLSLRKTKTDRVDARTIATMLLSDVDLKSYTDTAYHNEELKSLTRYRFDKVRERAKLKQSVSRLVTILFPELEKLVPSLHIASVYALLSEYPGAKQISEIHLTKLTNLLATASKGRYGKDKAIQIRDAARTSIGSVMPAKFLELKHTIKLIRELTSEIDEIEVSIQKIMDELNPPILSIPGVGIQSAAMILAEIGDFSNFESPDKILAYAGCSPSTYQSGKLTNCYAHMEKRGSRYLRYALYNATKYVCHWNPVFAEYLAKKRAEGKHYNVALSHATKKLVRLIYALQKSGKAYLVAV

SEQ ID NO: 213938 - protein, 417 aa, unidentified
MEIVYSRCSGLDVHKETVVACVSIREGGKVQKEVQTFRTMTSDLLALHDWLIAHKVTHVAMESTGVYWRPVFNLLEGSFKVLLVNAAHVKAVPGRKTDVKDCEWIADLLAHGLLKGSFIPPEPIRDLRDLTRYRKSLSDERVREVNRLQKLLKSANIKLSSVATDVMGISGKAMLEALVGGNTDPEALADLARGKLRKKFPLLREALQGRFRPHHRFLLEQILSHIDFLDEAIESVSQEVEDRIRPFLKEITLLTTMAGVKQRVAENVISEIGVDMSYFPTHRHLASWTGLCPGNNESAGKRKSGKTRKGDRWLKRFLLEAAWAVSRTEGTYLWALYHRLARRRGKKKAIVAVAHAMVVIAYHILKDKVPYHELGADHFDRLNITHIKHHLVKRLEGIGFKVTLPGRCLIEAKLFST

SEQ ID NO: 213939 - protein, 390 aa, unidentified
MRSVGLDLGTRKIALCEVEGGKVIRRATVESVKELEPLLGPGSGPARVAFEASRSAWAVHAELCGWGHDVKMIDTTRVKQIGIGQHGKKNDAIDAECLAMAVEKGQVPEAHVLSVRRQRLRHLMMSRRALVETRTTMVTTIRGIATSEGVRLARCEPENFVAMLKRQELPATLTAMVMPLAEVVATVERQLCELDARVYEACADERAAQCMMTVPGVGAVVAGMFLSVIDDAKRFRSARQVTSYLGLVPRENSSGTTGQRLGSITKQGNRYLRALLIQAAWHMVRQKNTDNPLAFWGLSVAARRGRKIAVVAVARRLAAILWALWRRGVAYDPAHIAQLCAAGLDLSAEVQASQAEGFRRVEAKVKLGTSVLKRRTKNADAIRSTTMSTA

SEQ ID NO: 213940 - protein, 371 aa, unidentified
MKQESAVFVGLDASKLKISVALAEDGRQGEVRFLGDIEHTPEAVRRLVTKLAGKYRRLLFCYEAGPTGYGLQRQICALGPDCAVVAPSLIPKRPGERVKTNRRDALTLARLHRAGELTAIWVPDPGHEAVRDLVRARDAAMEDLREKRQPLQAFLLRHGRIYPGLRPWTQVHARWLSNLSFAHPAQYLVLREYRQAIEDAEARLERLTQQVSEVVSSWSMAPVVEAYQAMRGVAFLTAVTFVAEIGDVRRFETPRQRMASLGLVPSERSTGEQVRRGSITKAGNPRARRVLIEGAWTYRYPARLSRPLQVRQESLPKTVRAIAWKAQLRLCARYRRLMAAGKRQTLVTTAIAREMAAFLWAIGHAVEPRSA

SEQ ID NO: 213941 - protein, 400 aa, unidentified
MNAVGIDVSKGKSTVVVMRPFGEVVAEPFEVSHTDAELSELACFLGKLPGETRIVMEYTGNYWQPIAKVLYNAGLFVCVVNALLIYKYGNNSIRKGKTDKLDAVKIANYCLDRWANLERYTPADQIRQILKTCRRQYDQYIKLKVNLKNNLISLLDGTFPGVNTLFKSAPRDTDGHEKWVDFAENFWHRECVCMKSEKAFTNQYRKWCAKTGYRFSVEKAVAIYAHASSQVNTLPMSDAIKLLVTHAAVQLNTIIKTISTIQHEMLTLASQLPEYPIVMRMFGVGPVLGPQLMAEIGDVRRFDRKQSLVAFAGVDAPPCQSGAFDSKKRHISKRGSPRLRKTLFQVMSTLIQHAPADDPVFQFLDRKRQEGKHYYVYMTAAANKFLRIYYGTVTAYLEKL

SEQ ID NO: 213942 - protein, 312 aa, unidentified
MSQKENFIGIDVSKHQLDVAVIPSGDSISFTNNEDGISFLLGFIKPFSPTLIVLEATGGLETSVVGALAADGLPVVVINPRQIRDFAKATGRLAKTDSIDAQVIACFGEAIRPEIRPLKTLEARKLDALNTRRRQIVEMLTAEKNRLGSAPQWIRKDIQNHITWLEKRLKKANGDLNKAIKKSPLWRENEGILQSMPGVGPVLSTSLLSDLPELGTLNRKQIAALVGVAPLNRDSGLFRGRRTIWGGRANVRAVLYMSTLAAVRCNPKIKAFYNRLSNAGKVHKAAMTACMRKLLTILNAMIKNRMYWCADF

SEQ ID NO: 213943 - protein, 350 aa, unidentified
MVVVGADVHKRTHTFVAVDEVGRKITEMTVPATTAGHANAVMWARERFGAEVVWAIEDCRHLSARLERDLLGFGHKVVRVPPKLMAQSRASARTRGKSDPIDALAVARAYLREPDLPIASHDDVSRELKLLVDRREVLVAQRTATINRLLWRVHELDPERAPKARSLDLAKHRRLLGDWLTAVPGLVAELARDELADITRLTETINELGKRIGERVRAVAPALLALPGCGELTAAKLIGETAGVTRFKSEAAFARHAGVAPVPVWSGNTAGRVRMTRSGNRQLNAALHRIAVTQIRLDGLGQAYYRKRLAAGDSNPEALRCLKRRLSRVVFARLHTDQQNRIQPCQPAAA

SEQ ID NO: 213944 - protein, 318 aa, unidentified
MKYYAGLDVSQQTTSICIVDEEGETVAERKVASCPEAISEALEPFAVTRAGLETGPLSVWLWNGLKERGVPIVCMDARHANAALKMMPAKTDRSDAIGLAQIVRTGWCKSVHVKSTASHEARALLATRSQFVRTRCDLENQIRGVLRTFGILFGKRVGGFAKRAEEIIDGELDASPTIQAVVEALMRARANILEQIRHLEAKVRLIARQNKVVRRLMSVPGVGVITALGFAATIDDPTRFKRSSSAGAYLGLTPRIYASGETMRSGRVSKRGDDFLRRSLYEAANALLTRIPRFSALKSWGLRIARRGSYRKARAGCI

SEQ ID NO: 213945 - protein, 285 aa, unidentified
MTTPEIFVGIDISKNRLDVAVTPGNQTMAYPNNEDGIQKLVKRLKTLNPLTILLEATGGYEFFLVAALREAKLPACSINPKLVRNFARSAGIAAKTDHLDAQVLALFACRMRPQPRPLPQAQQQELQHLMTRRRQLLGILLMEKNRLDPAPFPRVQQSIQRTIDSLEAQLADLNRDIDDFFRQNSWWVDLEKALSTQTGVGHLTLLGVVAYLPELGRLSRKEVASLAGLAPFNRDSGQWRGQRHIEGGRNPLRQALYMAALSASRFDPVISAFYRMFQTTNHITD

SEQ ID NO: 213946 - protein, 339 aa, unidentified
MRYYCGIDLHAKQCFLCVIDEEERILLKKALPNSLELILQLLGAFASKPSVAVESTLNWYWLVDGLQEAGYEVKLAHTLGLHMITGAKVKTDRRDALSLARLLRLGAIPQAYIYPKEKRPIRDLLRTRSRMVSLRANAYGTLRRILMQYGHSSAVIKKFAEEQICRHFDHPAIQASCQLELERVRLYSREIAILEDYILHTVADQPVFDLLQTIPGVGKILALTIYYEVGDIGRFEDPRSFCSYSRVVPGAANSAGVVSRGKGSKQGNPYLKWAFTQAALYAVRFNAGIRKFRQAHLARRRSKSRKIVSLSIVAHKLAIAAYYVIKGQEPFKQELMFGQ

SEQ ID NO: 213947 - protein, 326 aa, unidentified
MASMTSAIPTAQPDRVVIGGIDTHKDIDVAALLDCAGMVLGTAEFPTTRAGYWQLLGWMGSAGHLGRVGVEGTGSCGAGICRQLSAAGVEVVEVNRPDRSQRRRRGKSDALDAAAAAEAACGGQRLAIPKSRDGQVEALRVLRLTRASAVKAGTKALQLLQQLIVTAPEQLPDQVGELPRMELIGCCAAWRPHSHDAADPSVATRIALKKLARRYLQLAEEISDSDTLLDGLVTDLAPQLIAVTGIGTDTAGQFLLTAGDNPERVHSEPAFAMLCGVAPLPASSGKTQRHRLNRAGIGKPTGLCTSSPPPGTLRPPHPGVSEEEDR

SEQ ID NO: 213948 - protein, 428 aa, unidentified
MSGKETVQAEPEFVAFVGIDWADQKHVWCLQAANSAQQEDGELEHKPEVVEAWVSELCRRFGYGPIAVAVEQVKGALVYMLRKYECLHLYPVPSTMSASMREALYPSGAKDDPRDADMLLELLVLHRDKLRRLTPDNEATRRVQNLVEERRKLVEEKTAQLNRLTGYLKVYFPQMLEWFAKLDSKLVCDFLERWPSLEELQKVPSAELKKFFRHRRGRHGELTEWRMQGIGQATPAIRDRAVIEAKQTVVQVIAQLLRTLLEGIATLERKIAEAAEVHPDFFIFQSLPGAGAALAPRLLAAFGSQRDRYSSAEEVQKYSGIAPVTERSGKKKWVHFRWACSKFLRQSFHEWAGHSIAQSVWARAYYQRQRERGKEHHAAVRALAFKWIRIVFRCWQDRVAYDETRYLAVLTKRGSHLTSAFVDVAVSM

SEQ ID NO: 213949 - protein, 340 aa, unidentified
MENTNQNQNTLWIIGIDVSKESLDVCLINNTDGQLFNGKFNNNLSGFRNFKAWCKTHSCECNGQSLSCLEHTGLYTRQLVHYLLSRQVNVWLESSLHIKRSMGLVRGKSDAIDAQRIARFAFAHQAEAKPLNLSGLTLEKLKDLNANRNRLMKAIQSLQVSTKELRQVDVESGKTIERINREAVHGLEKSLNAVEEKISEFIKADENLSKQFDLITTVNGVGKIMALLLLIYTQGCTKIIDGRKLACYSGVAPFEYRSGTSITGRTGVSKFANNALKRVLHMAAISSVQHNPELNEYYKRKTAQGKSKMAVINAVRNKLLHRIVAVIKRGTPYQTTFKKV

SEQ ID NO: 213950 - protein, 384 aa, unidentified
MKVVCGLDVHKDSVFCCILCANGEKIQHKFGVLTEELVTLRDLMVSEGVEECAMESTSIYWIPIWRVLEGSVKLHLVNPYFIKQLPGKKSDVNDAEWIATCLSKELIASSFVPDDKIQRLRQYDRRIFDLNASISRNLVKLDQCIQRCNIRISNYISTTDSKGYRSIVKLISQGVTDAEVLVKELHGRTINRHGRETLVKALTGVVSETDIDIIKQLVEEIELQQRHKDEAQQKMTALCMEWFPQEVENLQTIPGVKERSATSIIAEIGTDMTHFQTPKKLVSWVGLRPRNEESAGKIKARGITHGNRFVRKTMIECSWGAARMKDLFFAEFSYRQCIERRKNKMKVQVAIARKILVAVWYVLSQGTQYIKPTDHYTAAHMTAV

SEQ ID NO: 213951 - protein, 407 aa, unidentified
MKHVIALDVSKGISTIAIYNGYRQCEFEGELYHTRIDFEQLHLRIKEITALDGQAPEIVFEATGVYSKSVEKFLRDHGHTYCRMNPLEANLQMASMRRHKTDISDAHELAKTHFKLERETTYVQNDYYEQMRAITRYYDEIEEELILLRNRMHAILHISFPELERLITPSSALFLNFVQLYPHPALLLAHSKTIIKNRLKSNTRKKLSLERAEKIAILLLEAAKNSYPAIEPTDIRCNQVRDYAQRIADLIEKKDQLVKQMVMMSEGRKEYTVLRSFPGIGDTTACRLIGELGDIRRFKNAKQLNAYVGIDIMRYQSGNTQYRDRINKRGNKKLRKILFFMICTMLMAKGKPNHLVDYYYKLKTQPQRKPHKVAIVACINKFLKVTFQLLTHGILYDYESALPAQKS

SEQ ID NO: 213952 - protein, 429 aa, unidentified
MNDVTDSLALFRKMKASVRGSEKYLLVGIDVAKNKHHAFFGTPNGRTLRKNMVFDNNLKGFENLRGLAGDLKSQHGLAEIVYGLEPTASYHKPLAEYLLRQKEQVVYVSNVAVVKNRGLLDGRWDKNDKKDAANVADLLSQSRCLFYELPQEDLRELRSLIGFRIKLKKEEHALKMRLRNNVFAQFFPELDQLYIKAGQPDDLILSIAEHCLDPREIAAMEFDAFLKLITQRKIRIEQEKRLRELWEIAGKSVGCLVHDAARWEAKSLVTQLKSVRETVKGNEQLMAKTAKQFAEYECLLSIPGFGPIVSAMVLAAIGNPCRFQNQGQVVRLAGLDLSAERSGKKSNSVKPVISKQGKSALRYALVQAAMVASTANPVIRNYFSKLIKGRELERGINLKMKVKLAAKLLIVAWTLMKKREQFKASCFTG

SEQ ID NO: 213953 - protein, 348 aa, unidentified
MLADELDYVVGVDTHLDEHVLAVVAAPSGAVLARRAVRANARGYSAALRFAGEAAIGARVWAIEGTGSYGAGLARYLAGRGETVLEISRMPRAERRLRGKDDSLDAARTARAALASETLALPRSGQRREALRLLLIARRSAVDVRREALGQLRGVIVTAPDGLREQLRGLSVGRLLERCSRFRRSSSASPDELATRIVLRSLARRIDAATLEAAQLEHEILGHVRALAPRLLDEPGVGPIVAAQLIVAWSHHGRLRSEAAFARLAGVAPIPASSGQTTRHRLSRGGDRQLNRALHTIVVHRRQHDPTTKDYIAQRIAEGKTRRDATRLLKRYLARHLYRLLQQEPLMT

SEQ ID NO: 213954 - protein, 482 aa, unidentified
MKKRNIYQNQSQELLTLFEEAGNSAKVMCVPIDYAKTDHVVMFCNGHGDIVRKPFSVKNSPLGVDYLTDQVIRSCKSRGINKRHIFFGGEDVGSFAANFVTTLRSQGWLVAGVNAHDAKKQRANLQASTDRLDLMGIASMLLNRRANSCPAQSGIYWNLRTVVRHRQKLVKLTTEVRNRIHAVVDRLFPGYLDEEKSGISPFSKSSLWLMQARFSTPQIRRRKRSTLIKGLRKLGAKNPEFAAAKLQQYAAQVLKPQQEYIATLQFSLAQHVKHFSCLQDNIDQLEKEMAVGLAQTQGAFLTSFRGIGIVLASGVTSEIGNPYEQAPLNNLVSYAGIIPRIKQTGGPQGESYSGKVAKRCNRILKNYVVQSASHLGLHGPQELMADYKRREAAGQHADFGMGRRFLRIAMCLMRTSQIYLPHRLREPEAKLQERADYYLMNWPNLHEKWRKSGALEVAFDKNMPLGQWRNIVQHLYGIKLAL

SEQ ID NO: 213955 - protein, 355 aa, unidentified
MDDLKYIGMDVHSATTTIAVQDSRGRLVMEATVATQAAALSDFLRGLRGRLWLTFEEGNWAAWLTQVLTPQVEKLIVCNPRRNASLKQGNKSDPLDARELAHLLQANLLKPVYHEADGAPTLQELARAYTTCVSDTTRVMNRIKARYRARGILCSGSRVYRPRFRQAWFEQLTDPGARQRVELLYAQLDLLQELRKKARQALRTEARRDPAYALLRTVPGIGPVRAALLLALLRTPFRFRTKRQLWTYAGLGLVTRDTGQYQIVGGQIIRRQRPARVRGLNPQHNRELKEIFKSAALAATRPSSLLHAFYQQRLDQGMRPHLARLTLARKIASLTLTLWKKGERFNAHALTSQAE

SEQ ID NO: 213956 - protein, 361 aa, unidentified
MSESMALVGLDVHRAQTVAAVLDPVNGELRVQRLRGEPDHVVPDFLEELDRPVRAVYEAGPTGFVLARVAEERGLDVRVVAPGSIPRASGDRVKTDRRDAKRLVRLFAAGELSFAFVPSETDERFRDLVRRVEDARKDLMRSRHRLSKFLLRRGVRFPCKAWTQPHEQWLLTLRFDDALSQATFVDYLSAVQALAQRRRALIWVLEEAVPNSSHARVVERLRCFRGIDTLTAAGLCAEVGDFRRFAKPALLSGFLGVVPSEYTSDDKRVQGQITKAGPANARRLLVEAAHHYCHRPAVGLGLAARQDGQDPRVVQIAWRAQRRLHERWIHLGQRRGKLAGTVAIACARELAAFCWEAATLD

SEQ ID NO: 213957 - protein, 396 aa, unidentified
MICFGIDVSKGKSTITAISSDGEIVFPTVSVDHSQDQILRLVNQIKELESSEEVRVVCESTGYYHWPVVNTLLQANIWVTVLNPIITNRFSKNSLRNPKTDKIDSVKIATYGLMYWHTLKCSPQFGEIFDELKTYSRQYYQYLSLRIKARINLMSILDHTMPGIQSLLKEESCSHKLTDFVEQFWHFDNITKHRLKTFTNMYHDFCTKKGYIFHSSKAETIYNLAKNSIPFLPCTPSTKVLVQEAVNSLRFQEESTVLILTHMSDLAKQLPEYSIVISMPGIGDALATRFIAEIGDVRRFNNKHSLVAYAGIDAPPFQSGSYEGKNRHISKKGNKYLRKTGYEMMKCITSTMLESGTDEVYDYICRKRAEGFPYKKACIAGLNKFLRMYYGKVMAE

SEQ ID NO: 213958 - protein, 412 aa, unidentified
MKDLLEISCGLDVHKEKIVACILTGPLGKPTRSEIREFSTLIPDMIALRNWIVSKNCHHVAMESTGIYWMPIYEILEDAFYGDITLLVVNARHMKNVPGKKTDMRDSEWISTLLRAGLLNGSFIPEKRIREFRDLNRYRKSVIRDITSQKNRIEKFLQSSGFRLSSFISDIFGASGRNIILHLIEHGQIDKTALDSCLKTKTRNRIDEILMSVNGTLSEHQKAFLRILMTHYDSLKKHLAEIETSLEEDMAPFTLQVEQLNSIYGISTTASCAIIAEIGIDMKPFKTAEHICSWAGLCPGNNESAGKRKSTSVTKGNPYIKSMLCEIAWVIAGKRNTYLSAWYWRIKQKKGAKKAIVALARKLLVIIYTMLKQGTLFDESCFETRRKHCEQKQLSRYIRELEKHGYHVEAQS

SEQ ID NO: 213959 - protein, 353 aa, unidentified
MSNYITIGMDLGNRKHTVCAINGAGEVLWRNEVTNTPEALKPFFEENAGATVAMETGLCCRWISALAKRCGCEVLVGNARKLAPIWQSMQKSDKNDAFMIAKLARFDRGLFRPVSLRDDERHELVQILELREVAVSQRTQAVNSVRGLCKAMGVFIPDCDATRFHKVAKDAIPRDLAWKFMPMLRQLKETAETIRRYDVMLKRYASDHFGEEVALASTIPGIGPVTSCAFVALVGDAKRFGKARDAGVYFGLTPARDQSGDRDAPKRVTKAGSKMMRRLLVTAANYVMRTSSPDTAIKRHGMRICARGGKIAKRKAKVAIARKLAVVMLAMLRSGRPYEDRLAANVPAKPDAA

SEQ ID NO: 213960 - protein, 415 aa, unidentified
MELVVERAAGLDVGKDEVVACIRVPAVGVGQGRGRRRQEVRTYPTFTSSLETLADWLQTEGVTQVVMEATGQYWKPIWYVLEERGFKLLLVNARHVKILPGRKTDVGDAAWLCELLECGLLRGSFVPPPAIRQLRDLTRYRKRLIQAHTAEVQRIQKTLEDAGIKLDSVATDVLGVSGRAILKALVAGERDPKTLAELAKGKLRKKLPQLRQALRGRFGDHHALLVGLALDHLEHLEAAIARLDARVDEVIAPFAVARDRLDTITGVGKRAAECIIAEVGVDMSVFPTASHLASWAGRCPGNNVTGGKRRSGRPTKGNRWLGEVLTECAWAAARSRDSYLAAQFWRLARRIGKKKAAVAVGHSILVIAWHLLTEDCNYHELGGDFFIRRDSDRARQRAVAQLQALGYQVTLQPAA

SEQ ID NO: 213961 - protein, 355 aa, unidentified
MTSTKYIGMDVHLESISIAVMNSVGKVVMECVIETKASTILQFIQGLRGDLHVTFEEGTWAAWLYDLLKPHVTEVVVWNPRKIALLKDGSKSDRIDARKLAEQLYMNKIKSVYHGEHGLRTLKELARSYLTISKDLTRVMNRLKALYRSWGIPCAGNEVYAPRHRAEWLGKISEAGVRRRAEHYYQQLDVLRLLRQEVRRDLLLEAKKHKAWKLLRQIPGIGPIRAALIIAILQTPHRFRTKRQLWTYSGLGLETHDSAQYCVVEGQLQRSKKPVTLRGLNKNHNHDLKDIFKGAAMRASTAAGPLRDFYEALLAKGRRPTMARLTLARKIAAITLIVWKKEVRFDANDLKPQAA

SEQ ID NO: 213962 - protein, 362 aa, unidentified
MRIIGCDLHARQQTLAMLDTTTGEVVKMTLTHEGNNVREFYSTLPRPVRVGIEATGSMQWFVNLMEELGIECQVGNPAVIRAAEPRKQKHDRRDADLILTLLVENRFPAIWLPSKELQDLRALLRHRHQWVRMRTRIQNALQAIALANGLRRGPSLWSRDGQNTIASLPLAPHTAHRRSELQAMYVKFESDIEKLNQRVEEQAGQRSGARLLMTHPGVGPITALATDVFLGDPRRFTDGKALASYVGIIPREYSSGGRQKFGGLSKQGNPLLRFLWGEAGAHAVRRDPELQRFYRRKLVQKGLGKARVAVARKLGIRLWIMLRNEINYNEFCRRGQKEQNSGVACAGMPGTRYGATSHRPVD

SEQ ID NO: 213963 - protein, 401 aa, unidentified
MDLHKAQHTAVIINCWNERLAEIQIENKPSAFEELMKFVKKHTPKGLTPVYGLEDTGGNGRSIAVHLVENKQIVKEVNSALSFNERMSNATTQKSDSWDAFCIAKVLLARLDELPDANPQDIYWTIGQVVARRSAIVKHAATLKNQLHQQLSYHYPSYKKFFCDIDGKAALAFWEKYPAPHHLSSVGAEELAEYLRKASHNTCSTRKAEDILELVSKDGETKRNYQASRDFLVANMVQDMKRSRELIKQTEEQLRQVLVETDFKLQSMDGISTVTAAELIAEIGDIRRFSNADKLARFAGIAPVRFSSGGKGKDQASGQGNRVLNAIFHNLAVQQIQVAKGKNKTQRNPLMYEFYQRKLAEGKTKKQALICVMRRLVNIIYSMMKHKTEYRAATLTERPAS

SEQ ID NO: 213964 - protein, 342 aa, unidentified
MIKVSTIGLDLAKNVFQVHGISDDGTVVIRRRLRRAEVVPFFSRLPPCLIGMEACATSHYWARELGGLGHEIRIIPPRYVKPYVKRGKNDALDAEAICEAVQRPSMRFVPLKTAEQQGALVIHKTRDLLVRQRAILVNALRSHLAEFGIVVAKDIGNAPQLAAVVRDKTDRRVPTTARSALVTVVDSIDALSRRIKVLETRIRHWHRANLASQRLATIPGIGPITATAIAATVPDPKAFRSGRHFAAWLGLTPRQNSTGGKERLGGISKQGNCYIRRLLFIGAVGVVRYARRRSPLEEWIRRLLERRPTRLVTIALANKLARIAWAVLAHDQNYHPRQPVAA

SEQ ID NO: 213965 - protein, 488 aa, unidentified
MAHSANTEFSSPAVAPARKAGRVHAHCARLRSPYAAQDKPFTSGSTNPDRKGCDILLKINYMSTLFVGIDVSSKSNAVYAMDFEENKYISSSFGNNQPGADELADMIAKCMQKHKNLDTIIVALESTSVYSVHIANFLSTCETLMPYKPYVFCVNPKATSNYRKSYIGMEKTDPIDAFLIADFARVGRTKKLEPWRGGQFIALKRLTRHRMHLSECITREKTYMVSNLYLKFSELQLLEGDNKPFSNIYGATSSAILTEFLSPQEIIDLSEEELLSFLAEKSRNRISDISRTSELLRKAARDSYRLDQCMYEPLNISLASSFNCIQAYQKEIKLIEQAIEKCINGMNPNAFLILKSIPGIGPVWASGMLSEIGDITAFHSSDALAKYAGLYWLKNDSGDFISEDNQVSKVGNPYLRYYLGEAANSVRKHVPEYTEYYAKKYAEVTKHQHKRALALTSRKLVRLVFGLLVKNQLYTGEKLDTQSNINKN

SEQ ID NO: 213966 - protein, 409 aa, unidentified
MEIIVARQSALDVHKAQVTACVRVPGADGRRVQLVEQFATTVPGLLVLADWLKAHVVTNVVMEATGDYWKPVWHMLEGDFELMLVNARDVKQVPGRKTDVSDAAWLCQLAEAGLLRASFVPPKPIRDLRLLTRYRRTQIAERRREAQRLHKALEDTGIKLDCVATDILGKSGRAMLDALISGTTDPELLAELARGKLRKKIPALRDALQGRFEPLHALLIGAILAHLDFLDEQITGLSQAIEEQMRPFAAAVELLCTIPGVAQRTAEVILAEIGTDMTVFPTAGHLASWAGQCPGNDQSAGKRRSGRTRKGSKHLNAALKDASMAAMRTNDSYLQALYRRKKPQAGHGRAIGAVKHSIICACWHMLSTGEIYTDLGGDHYARRNPERQTKRLVAQLERLGHTVTLQEAA

SEQ ID NO: 213967 - protein, 293 aa, unidentified
MNNNNTLYVGLDVHKESITVAYAINSEPVELMGKIGTSPTDIQNLCKRLRSKSSQVSIVYEAGPCGYGLYRRLVKSGFDCMVCAPSLIPKKPGERVKTDRRDAIRLVRSLRAGDLSAVYVPGIEDEAFRDLARAWASARDDLRHARQRLKSFLLVHGGHYVGRADWGPAHRRWLSKYSFESPWRQLAFDEHRRTIEDRQAQCERLESALKEAVTEWRLYPVVEALQAMRGIQFITAVGLISELGDLTRFEHPRQLMSWFGITPSEYSSGGSRHQGSITKAGNSYARKLLVEAA

SEQ ID NO: 213968 - protein, 347 aa, unidentified
MFTKRTSVGLDVHARSVVAAAIDGVTGEVFRDRLTPGNEEVINWVRSLPGPSAVTYEAGPTGFGLSRAFTAAGIRCEIVAPSKIQRPAGDRVKTDARDAMHLAKLLRLDEIVAVTVPSVEQEAARDLVRAREDVRGDLMRARHRVSKLLLRQGIVYYGGQAWTGTHLVWLRAQHFDTPGLQLAFDAEHEAVLQAVARRDRLDAAIVAMAAASEFTPVVHRLGCLRGISTLTAFGLAVEVGDWDRLTGSRIGAYLGLVPTESSSGGSRSQGSITKTGNTHARRLLVEAAWHHRKPYRTPGATMAARWELAPAAARARGHAGNPLPSLCVVRSRCVELAPVSARAQWSL

SEQ ID NO: 213969 - protein, 352 aa, unidentified
MDKVNKMDFTGQPIYVGMDVHKKSWSVSIHTEHFEHKTFSQPPEVEKLVNYLHRTFPGGTYHSVYEAGFSGFWIHDRLREEGIHCMVVNPADVPTKDKERAGKADPVDCRKLARSLRNGDIKGIYVPPRVKVEDRNLVRTRQSMVRKQTRCKNQIRAILFFYGIVIPEDSHWSKRFINWIETIRMEKTSGDLALKAHLEELKHLRQIIANLNRAILALSRTDEYQPDVLLLKTVPGISTLTAMTLLTELYDISRFSSLDKLASYAGLIPSIRSSGETEHTMGITYRRNAILRAILIEASWVAVRKDPALMMAFNKFALRMKKTNAIVHIARKLLNRIRYVLKNKQRYVPAVI

SEQ ID NO: 213970 - protein, 352 aa, unidentified
MALPTLPDPQVLVTLGVDTHADSHVAAALDQAGRLLGTRTTSTTPTGYAALLGWATRFGTVDRIGVEGTGSYGAGLARWLRAHGQLVIEVDRPDRAARRRQGKADDLDAHAAARAVQAGTATGQPKAGDGTVEMIRSLRLARRSAVKARTQAANQLNALLVTAPDCLRAQLRRLPPAELVTTAARLRPATKPATPTDAAKLALRSIARRWRQLTQEITALDAQLERLVAMTAPTLVAITGVGTQTAAALLVAAGDNPERLRSEAAFAHLCGVAPIPASSGKTTRHRLNRGGNREANWALYLIAVGRMAWHGPTRAYLERRTKEGKSKAEIIRCLKRHIARELYGVLVSQPAT

SEQ ID NO: 213971 - protein, 406 aa, unidentified
MRIIGMDIHRVAAEAVALLEGHLTKLGRIPMTRDSLEAFARKELTHDDHVVVEATGNAAAVVEVLAPYVDRVVIANPKQVRLIAYAKIKTDAIDAAVLAKLYATGFLPEVWVPDQRTMALRRQVARRTQLVRQRVRLKNLIQSILHAHLIPPCPHLNLVGISGRRWIAAQMVPADERAAIERHLAQIDLIQGSLKEVEADIAREAMSDPIIRRLMTLPGVDMTVASGVAAAVGDIRRFADPTRLVSYLGLNPSVRQSGEGSAYHGRITKQGRGQARGMLVEAAWAVARSPGPLRAFFQRVASRRGKHIAAVATARKLAMIIWHMLTKSTDYIWTRPALLARKFRSIELRAGLPTSHAKRGSAYDYNIPAKRAEERARVESAEKEYTRFTSRWRAKPRSRHSKASAT

SEQ ID NO: 213972 - protein, 421 aa, unidentified
MPTTLCAGGDIHQETLQLRTIDKSDGHEVGQVLTVKNNRPGAEQAIAHLVQVLTQHGYTHLELGLEATGLFWLPFFNHLQQSPALKPFQPTWVCFNPKLVARFKEGVTLSEIKDDEQDALAVAERLRFGHLPTTYVPSQDYLALRMLTRYRYRLSRQIAQEKLRALTRVFLKASEWHRGQPFSDVWGATSATLLTEFTTTEIAAMPLPQLTELIQEYGRKHFDDPQATARHVQRTLQNSFPVPPDLDAALTTVLQIAWAHIRDLEKLMHRLDREIAQRMERIPNPLLSVQGLGPVITAGIVAEIADIQRFPDQPQLAKFVGLVWRKHASGQFTAEETRLAKMGNVYLRYYLVEGANLMRQHNLEYKAYYQRKFAEVPKHQHKRALVLTARKLIRLVFALLTKNQSYVRPQAKSDQEAAPTA

SEQ ID NO: 213973 - protein, 347 aa, unidentified
MKKVTVIGMDLGDKNHKAVVLDPEGVEALRQEVSNTPEEVRLFLKRFTDAILVIETGTHCRWISRLAKELGVRVVVGNARKLRMIWQSTRKNDWNDACMLAKLGHADPGLLAPVNLREDECQTLLRLVNARDLLVRHRAGIVNLVRGTCKAEGDRLAECGTESFARLEYEVPATLREVTKPLFALLREVTKKIALYDKLLANRLAKHHQEDAALVQAIPGVGPVTAAAFLASVGEPQTFGKARDAGAYFGLVPRQSQSGESDRQLRISKAGNAQVRRLLVVSANYILGPFAPDSDLRRHGLRIAERGGKNARRRAKVAVARKLAVVMMTLLQNRQAYRPLMEVEQAA

SEQ ID NO: 213974 - protein, 341 aa, unidentified
MENTPQFQPYLWILGIDVSKESIDACLIRQADGQLFESKFHNNVSGFRHLKAWCKQMQCECDQQTLCCMEHTGLYTRLLVHYLLSRSVAVWLESSLQIKRSQGLVRGKSDKIDAQRIAKYARLHQNRSQIMEISALTLEKLKDLQANRRRLMKALQTIRTSAEELKQFDAPNAKLIDKVNREAIRGLEKSLDKVDEQILTFIREDESLKQKYDLMLSVKGVGKVLASLLLVYTHGFNRLADGRKIACYSGVAPFVYESGTSIKGKTGVSKFANGELKRVLHMAAISSVQHNSELHEYYKRKVEEGKNKMSVINAVRNKLLHRIVAVIKRGTPYEVKLKNSL

SEQ ID NO: 213975 - protein, 388 aa, unidentified
MNYVGIDISKYKHDCFVLSDFGEIVNEGFSFSNNAEGFMQLQAELERYGEGNARIGFEATGNYGINLKLFLEKMGVDYMEINPHLISKHIKGNTLRRTKTDKLDAKAIAGYIVSKEYRPHTTSFYPKFALKQLTRFRSSLVATRTRYLIALTNILDCVFPEFKPFFGNKFSVTALYILTHYPSSQAIANMNVKSFDILRRKSRGKFSMDKFVKLKILAKNTVGVFDECYRIELETLLDLHSQLDAKIEEVEKQIAKIIENINPPTLSIKGVGTFSAAVIVSEFGDFSRFENPNKMLSFAGLEPGYFQSGTSEHNGRMVKRGSPHLRCALMNCSRSILLYNETFNAYYQKKIAEGKAHNVAVSHVAKKLVRLIFTLETKGEMFNPTLLR

SEQ ID NO: 213976 - protein, 408 aa, unidentified
MNAVGIDVSKGKSMVAALRPMGEVALLPQEFLHTGVGLEQMAYAILALGEDTRVVMEATGRYHEPVAAALHEYGIYVCVLNPLYIKQSGGGSIRKVKTDKADAMKIAKYGLDNWVDLREYTPMDTVRQQLKLCSRQYNLYMKTVVSLQNNLISLTDKTFPGVNELFSSPERADGHQKWVDFVMTFWHCDCICRVSEKAFTERYQKWCKRKGYHFSEEKALDIYAESCGHFTTLPKNDNTKLLITTAAQQLLAGKTTLAALRAEMTRLALQLPEYETVRAMYGVGETTAAQLMAEIGDVRRFPRRSSIVGFAGVDPAVDQSGKHETQSTSTTKRGSPHLRKTLYQIVCTYLRKAPADEPMYQFLDKKRAEGKPYFVYMTAAQNKFLRIYYARVKECLEAFDAQQGTSQG

SEQ ID NO: 213977 - protein, 309 aa, unidentified
MDIVVGIDVSKDRLDVAVAPSGLAFAVVNTQAGIDELVARLQSVKADVVALEATGGFETPAVAGLSSAGLPVIVVNAAQVRAYAHAIGRKAKTDPIDAALIAAFVMATRPTLRPLKDAETQALSALVARRRQIVQMIVAEENRARMALAKETQKSIRRLLSALRHELESLDADLDDHIRKSPLWRVRESLLTSVPGVGQATARTLMAEMPELGSLDRRQIASLAGLAPWTRQSGTWKGKSFTGGGRGKVRSALFMAALVASRHNPVLKAFRERLVAAGKPKIVAIVATMRKLLTILNAIIRDQKPWKSA

SEQ ID NO: 213978 - protein, 345 aa, unidentified
MAGKVTETPVVGGGGAHKNLHVAAVVDQNNKVLGTQFFSTTRQGYRQMLAWMTSFGALKRIGVECTGTYGSGLLRYLQNAGLEVLEVTAPDRMERRKRGKSDTIDAECAAHAVFSGIRTVTPKTCNGMIESLRVLKTCRKTAISARRVALQIIHSNIISAPDELREQLRNMTRMQLIRTLGSWRPDASEYRNVTNVYRISLKSLARRYLELHDEIADLDVMIAAIVDELAPELIKRNAIGYESASQLLITAGDNPQRLRSESGFAALCGVSPVPVSSGKTNRYRLNRGGDRAANSALHIIAIGRLRTDDKTKEYVARRVAEGHTKMESIRCLKRYISREVYTLTA

SEQ ID NO: 213979 - protein, 336 aa, unidentified
MTNVKNFVGIDVSKNYFDAAILKNLGKQEFIHERFACDPDGLKSFAKWLKEHIAAAEETQTVICMEHTGIYNWPVTKFLEDKQYVLCIEMAMQIKLSLGIQRGKNDKLDAKRIAEYACVQQAKLKQWLPSGRLIEKLQHLMAARDRIVRVIKVIEVPLNEFKAVGNKEMFELLNKTQKPILTKMKKALCDIESQIKKTINEDDTIKALYKTVTSVKGIGEVIGAYLLIYTKGFTIMVDKKKLGSYAGVVPFEHSSGKTIRKKSKTDKMTNAVLRRNLCMGAKSAMQWDPEIKAYAERKMKEGKTYAWCITAVSNKLLARVVSCVKNQKEYVEKKVA

SEQ ID NO: 213980 - protein, 355 aa, unidentified
MNQEKYIGMDVHQATISVAVVDGKGKLIMECILETKADTVLEFLRGLRGTVSVTFEEGTSAAWLHDLMKPHVAHLVVCDPRKNALLKDGSKSDRIDARKLAELLRGNQLHSVYHGEHGVRTLKELGRSYQTLTTDVTRVMSRIKALYRSWAIPCSGTTVYARRHRAEWLAKIPQPGVRLRAERLYQQLDLLQPVRQEARGDLLRESRKHDAVKRLRQIPAIGPIRAALLVAWLQTPHRFRTKRQLWAYSGFAIETHDSGEYRYVRGKIQRNRERITVRGLNDNHNHDLKNLFKGAALSASTHPGPLRDFYAALVEKGMRPTMARLTLARKIAAITLTIWKKGVSFDAQQLHRQAA

SEQ ID NO: 213981 - protein, 338 aa, unidentified
MPMHTVGIDIAKSVFHLVALDEKGSVVLKKKFSRSQLLVYTANLQTEVVGMEACCGAHFLARALVAQGHAVKLMPAEYVRPYVKSNKNDSIDAEAIGEAVLRPTMRFVPLKTEEQLDLQALHRVRERWIQRRVALTNQLRGFLLERGFPIRVGSQHLRKTLPALLEDAENGLSGRFRTILSALREEWGELEAKISTVTEEISRISRSNEGCKRLMGIPGIGPIISTALVAAVGNAAAFRTGRDMASWLGLVPRQHSSGGKTKLLGISKRGNQYLRKLLVEGARAAFARLNRSQHSFGPWMDALEARKHTHVAVVALANKIARIAWAVLTTGQQYRAAT

SEQ ID NO: 213982 - protein, 356 aa, unidentified
MSYDVKYIGMDVHKEAIVIAVLNEGGKLVMESVIETKASSILQFLHGLRGELHVTWEEGTWAAWLYDLLQPQVQHIVVCNPRRNALLKEGSKSDKVDARKLAELLRSGMLRPVYHGENGLRTLRELGRSYQTIGKDLTRVMNRLKALYRGWGIPCAGTRVYAARSREEWLSKIPQAGVRRRAELLYQQLDGLQILRRNVRPEFLAESRKHKAAKLLRQIPCIGPIRAARLIALMQTPHRFRSKRQLWTYSGLGVETHDSAQFRFVRGQLQRATKPQQIRGLNRNHNHEMKEIFKSAATRASCGRGPFHDFYAGLLAKGMKPEMARLTLARKIAAITLTLWKKEERFDAEQLKTQAA

SEQ ID NO: 213983 - protein, 349 aa, unidentified
MRFIIGCDFHPGYQQIAMLDTQTGEVVERSLAHENKEEVRKFYAGWPEPARVGIEASGSSQWFERLLVELGHQVWIGDAAKIRRMENRKQKTDRRDALLLLDLLRQGRFPSIWVPTPAERDARQLLLHRHKWVRMRTQVKNQLQAMAMSQGVRKKKKLWSVAGRAELEKLSLPPWTHRRRHDLLQLLDDMQPGILELDRDVTEQAAARPEARRLMTHPGVGPVTALAFVLTMGPVDRFSRGKKVSSYLGLIPSEDSSGGRQRLGHISKQGNAFLRGLLVEAAQSAVRHEPEMRRQYRRLAQKKGRAVAKVAMARKLAVRLYWMLRGGKDYAQLVQVRVQDSSSHSVVEV

SEQ ID NO: 213984 - protein, 439 aa, unidentified
MARTENALAGGRPAKRRRASARRSGAGRPPAAKSAPEKAALNQTQRSASCEALVVRDTNNLNRAFSGTGSTRNKRLAVDRATLGGLHSAAQRDRGQPHELNPNSRSHRARPRASSSPHAQGRDAFMNALTSVGIDVSKATLEVALAPEAKPFSVANERSGIDKLQDKLPAPGTCLITLEGSGGYERLVIAELLDRGHHVAPVNPRQVRDFAKGLGILAKTDEIDACVLARFGQVVGPRSLEKPTGSQTELQQLVERRRQLISLRTAELNRRQQATSKRTIRSIDAVLKTLDRQITTLEADIAALVEQHADWKQKADLLTSAPGVGDVTAMTLLADLPELGQLNRERIAALVGLAPYAADSGTITGVRSIRGGRADVRNTLYMAALAGLRCNPVLKAFYERLIASGKQAKKALTACARKLLVILNTMLKTNSPWKAPHAL

SEQ ID NO: 213985 - protein, 346 aa, unidentified
MEQIIRIGMDTSKHIFQLHGVDAAEQPVLRKRLGRKQMVAFFAKLPPSVIGMEACGAAHYWAREFGKLGHEVRLIAPQHVKPYVKRNKNDGRDAEGLCEAMSRPTMRFVPVKTAEQQAALMLAGQREQMVARRTQLGNMIRGYAAEFGVTEAKGLDKIEPLLARVAQDECVPALARELFAVQGREYVQLQVELKAIEIKLRAWHRANADSRRLAEIPGVGAIGATGLVMKTPDPRAFPSGRHFAAWIRLTLKDHSTAGRTRLGKITRAGDERLRSVLVAGATAVIKQAKQGRGHPSPWLLALLKRKPAKLAAVALANKIARIAWKLMVTGESYDGARMLGASASAA

SEQ ID NO: 213986 - protein, 377 aa, unidentified
MHSENIAAYVGLDVHKETLAVAIAAPERLGEVRYYGTINNEAQAVRRLFQKLQGLYGNILSCYEAGPCGFGLYHQLTAMNIKCQVIAPSRIPKSPTDRIKNDHRDAISLARLLRAGELTPVWIPDLTHEAMRDLIRARAAAKRDSRVARQRILSMLLRTDKDYAGKHWTGKHRTWLANQSFSQPSQQIAFQHYCQSLEQIEDRILQLDQEISRLLPEWSLCNLVCQLQALKGVGQLIAITLVAELGDFSRFSNPKQLMAFLGLVPGEYSSGNSIRPRGITKVGNSELRRLLYEAAWSYRTPAKVGAWLIYYRPDSVTQYSKDIAWKAQQRLCSRYRSLTAKGKKSQVAITAVARELTGFMWDIALAAQSSFSQQKQN

SEQ ID NO: 213987 - protein, 350 aa, unidentified
MTISHYIGFDVHKKSVSYCVKTKDGTIVEEGRLPATHEVLRQWAGQRPEPWHGAMEATLFSGWIYDVLQPFAAVLQMGHPARMKAIFAGKKKNDKLDARKIADLVRVNLLPACYVGPAEMRELRRMLRYRNLVVAQAVQMKNRMSGMLMEVGAEYSKRRLHGKEYFNELLDQLEEVPESVKDLLRLSRGSLDMFETVQRQLLDRLQKEPLLLKRVELLRSIRGVGEVTALSWALEICDPRRFPSIDDAVSYCGLTSALKESAGKQQRGPISKQRNAHLQTVLIEAAKLAPRWNPQLAAIHERELERGHRNRATLEVARKLVAYLLAVDKSGQPFQIRTTPTTETEAQQVA

SEQ ID NO: 213988 - protein, 315 aa, unidentified
MAMRVTLEKPIIGVDVAKNELVIYHDQYDRLEAIPNTKVAITQWLKALASSCAIAIEATNVYHVLFADAAHEAGCDVYMVDGYQLSHYRKGVNIRAKTDAQDARLLARHLKNELDELRPWIPASPLYRQLLSLFRRRAALVQARTGLVQSWTNEPFLRTAFANQVNSMKRFEALVEKKIRDVLQEAGLMRQVNRCMKVEGIGFLTAARLVTSFQRGEFSGANAFIAFLGLDLRVSKSGQSDGPRRLTKRGDPEARRLLHNAAMSGSRTPAWKPFYEEQRKRGFSTTQALVMLSRKLARVVFALLKNQSEYQTKVA

SEQ ID NO: 213989 - protein, 456 aa, unidentified
MSKRKQQKRKAINFDVLEQINLSAAGIDIGAEEIYVCVPAGRDEERLRVFPTFTADLHGLAKWLVACGVETVAMESTSIYWIPLYDILEGCGIEVCLVNARHLKNVAGRKTDVADSEWLYQLHTYGLLRASFQPPDDIRALRTLARHRDMLVSYRAAHIQHMQKALELMNVKLTYVLSDITGVTGMTIIRAILQGEHEPEVLAQYRDTKCKRSQEEIAKALTGNYRREHLFALQQAVELYDMYGQQIVALDAQLEAMYAQMQPPDEDISTTPPTPRRAKRRKNQANFDLATSLYQMAGVDLTRIDGIDALTAQSVLTEVGLDMSQWRTEKHFTSWLGLCPNNQITGGKVKRRRTNKTDNRAATALRLAAQSLACSQSALGAFYRRIKARHGAPKAIVATAHKLARLIYHLLKNRVDYVDPGADHYNEQQRERAIKRLQKQATRFGFRLESLATPLG

SEQ ID NO: 213990 - protein, 355 aa, unidentified
MIDEHPEREVFAGVDTHTDTHHAAVVDPLGRPVADQEFPATTQGYRALLTWLGTFGQVQAVGVECTGSYGAGLTTVLTASGLVVVEVNVPDRGTRHSRGKSDPIDAYVAARAAASGRAQAIPKSRTGTVEALRQLRVTRASAIKARTQAINQLIGLRVTTPEPLRQTLAGLTRAALVNSCLRLRPGPDLGDPVHASRFALRQLARRIRRLTEEIDEVDEHLSVLTAAAAPELVALFGVGTGTAGQLLVTAGDNPERLRSEAAFAALCGAAPVPASSGRTDRHRLSRGGDRQANRALHMIAVVRMRYCPRTRAYVARRVQQGLTKKDIIRCLKRFIAREVYHALNQPRARHAISTT

SEQ ID NO: 213991 - protein, 321 aa, unidentified
METWVGIDISKDTFDAAWIMDGKKNHLKLENGSSGFKRLLNEVPAGSRFAMEATGEYHLNCARYLSSRGNPVAVFNPFAVKMHMQSDLRRCKNDRADAYSIAKFAAEKNTVCWSCPTDDEIRLKHLDAVIDNLQKQIRQSKNVLHSLTQVNLSDDQAISIIKKTISSLETLMERARNRQLEMVKTSRKEEIALACSIPGIGLETSLKFFTHVGNIERFGSSRSLISWIGLTPRNAQSGTSIHKNGSISRMGCTRLRGQFYMCAVVAIKYNPDCRSFYTRLKESGKPSKVALIAVANKLLRQLYAVLTKKEAYVPNFCTKAS

SEQ ID NO: 213992 - protein, 453 aa, unidentified
MPVMGVPEQIEDEEHEQRLERVAAIDVAKASGKVCTRLPHASKAGKRVTLVWDVAATTNAICELAAHLVEQRIERVVLESTSDYWRPFFYVLEAAGLCVWLVNANDVKQVSGRPKTDKLDAVWLAKLNERGMLRPSFVPPADIRRLRDYTRLRLDLTRERTRHKQRMEKLLEDALIKLSTVATDIFGKSGRDMIEALIAGKNDPKQLAELARGRMRVKHAALVQALDGRFDAHHADLARILLEQVDGLDSQIQRLTATIDELIAAMPAASDQHRAHTDTDTGGGGSEQRTTLSAIARLDEVPGIAEHTAQVIIAELGLDMAQFPTAGHLVSWAKLSPRTIQSGPRTRGGKTGKGNPYLKGILGEAATAAAKTNTFLGERYRRLVKRRGKLKALVAVARSILVIVWYLLSDPTVRFRDLGPDFHTRRVNTDRKIRNLVHQLEVLGHTVTLQPAT

SEQ ID NO: 213993 - protein, 430 aa, unidentified
MEQIPQQPIVKAELEPEFAAFVAIDWADQKHYWSLKVAGQPALQRGHLDNTPEAVEVWIMELHLRFVGRPLAVALEQRRGALAVMLSKYAHVHLYPVHPTTLAKFREAWYPSRSKSDPIDADLLLEILTAHRSRLRRLDPDTVEMRLVQTLVENRRKLVDERTTISNRLTDLLKLYFPQILGWFDEVTSVVVGDLLEQWPSLQELQQAKPAKLENFLRAHHCLEIPERLQQIRQAIPATYDRALMDSAPLLVTAWVRQIAVLRESIRQLEKRISEQAAQQQDWHIFQSLPGAGAALAPRLMAALGTQRDRYASASELHCFSGIAPVKEASGNTQWVHFRRACPKFLRQTFHEWAGCSIAQCEWAKAYYQQQKARGKKHHAAVRALAFKWMRILYRCWKDRQPYREEIYLASLAKRRTALVAALAKRVQMP

SEQ ID NO: 213994 - protein, 378 aa, unidentified
MNEFIKFIGLDVHKETISVAVADSEGLGGELRFIGAIANTEEALGKLVKQLKKGNVKLKFCYEAGCCGFVIQRYLSKLGHDCQVIAPSLIPKKAGDRVKTDRRDSLMLARLYRAGELTPIWIPDGAHEALRDLVRAREDMKHLQKQAKQRLSAFLLRHGKSYSGKSNWTLTHFRWLETVKFEHPAQHIVMQEYIDTIHDMTKRVKSLDVQMEVAAQASPAWKVIEALMALRGINLLTAITVMAEIGDLRRFMSAGQLMKFLGLVPSEHSSGPTQHRGHITKAGNSHVRRVLIESAWTYRFAARKTAILQRRAEQTPQAVQDIAWKGQVRLCNRYQQLLGRGKLKVQVCTAVARELAGFIWAIGQAVPIAKQDLSQVVR

SEQ ID NO: 213995 - protein, 428 aa, unidentified
MSQRDYSRQVAKRQRIKKSTLIVGVDIGKAFNAVGFMDKDGNVLNSCPKLYNSREGFEECINLIEGLKAKHHLKDVLIGMEPTGHYWRKLAYFAKDHGYEVRFVRTTALKHHREIDESSSAKSDRRDALTIANITREGKYIDTVIEDGPLRQLRTLSKARERLLRYSVSAKNSLHAALDDYFPELHEMFWSMGSRSLWAILEQSPFPQDVLLMKESTLKELIAQSSRKKAGSAQKAKALCDAAQNSIGVKQIGGADRYRIEMCLEEVKRTVMTLKNIDMQLKRMLKEIPSAPYLMSIPGIGPLSAAVFLGEIGDPVNFHNARQLVKYAGYDPQESDSGSRIGRRFISKKGRWLLRKYLFFMSMRVVVLSKYFQEYYLRKLETKNRFGQHPRRKEMLCAVVIKLIKVIFALLRDKRGFEDLAPVALAAA

SEQ ID NO: 213996 - protein, 317 aa, unidentified
MNTKNNQNEINVGVDTGKTQLDIYIRPLDIYFTVENNDGGIKHAIKTLKKHPITRVTIEATGRLEHPFIMACAQANIPFVVANPVNIKRFAGAIGQKAKTDKLDAQLIAHFGEAIKPPLSSLKPEQMRLMSDLLSRRRQLMDMQTMEKNRSQIMPKTISSLIKPILTALKNQIEKVDLKLQKLIKECDEYKVKNDIIQSVPGVGNVVAFNLLSDMPELGCVNNKEAASLVGVAPFNRESGAYQGKRMIRGGRPKIRTAMYMAMMSAIQCNPKFKAIYHRLVAAGKPKKVAIIACIRKLIVIINSMVRDGVMWDPKMV

SEQ ID NO: 213997 - protein, 386 aa, unidentified
MQKLNDLSRSLTALEPDGTLIAVIEMSLSSWLVAGIVPGVERQPLKKLAVDESALLKLLHRWREEAEKAGRRIERIAVAFEAGRDGFWLARWLKVRGIEAYVIHASSVAVSREHRRAKTDRLDTELLKRSFLGWLRGERDHCKMVEIPTMKDEDAKRPNREHDSLIGERSRIVNRMKAALVRLGIRGFNPKLKRASTRLDGLRTPEGEPIPPNALAELRRDMERRRLVNNQIRQIEEERLKRIEQAPCDGPHVMVRLLARVMGVGIETADMLVHEVLSRNMRDRRAVARYAGLTGSPDESGRKRREKGLARSGNVRVRRGMIQLAWRFLLHQKNSALTKWFRSRTENARGTRKPMIVALARKLLIALWRLVREGIVPDGVVLRAAQ

SEQ ID NO: 213998 - protein, 381 aa, unidentified
MQTKLYVGLDLHSNNTYVGVLDSKERRVLKGKFPNKLEVLLAVLEPHKERIVGVVVESTFNWYWLVDGLMDNGYKVHLAHPAAFKQYSGLKYTNDEHDAFFLAKMLKLGILPEGHIMPREERQLRDLLRKRLKLVRQSSTHILSFKSLVSRNLGISMPSNEIKKLEDDEVNDMFENEHLALSAKVNIAAMNNLKWQIYEIRNSLLKAVKIKPQFEKLLTVPGIGNILAMTIALETGDIKRFPSVGDFASYCRCVASKRLSNNKSKGENNRKNGNKYLSYAFVEAAQKARRYCPPAQSFFMRKTIKTNKIVATKALAHKLARACYYIMHDQVDFDITKIFGKPFKVDKGCAREPKRGLGYQPSAPIGMSGAATKQDDHIFVK

SEQ ID NO: 213999 - protein, 332 aa, unidentified
MSAVVSGLDVHKEYTYATILGPDGEKLAQGRMPNEEVSSFLKPYRVERVAMEATTSIAPLYRELTGEGYDVTVSHPKKTRYIAEARIKTDRVDSRALAELLRLNSLPESYMPPPYIAMLREKVRRRAFLVRQQSKLKVKIRSVLVYEGVRPPKEYGLFTRKGVEWLRGLGLEPVESYLRMMAPLKEEIRLLSLKLRHLAAGDEEVRLLTTIPGVGYYIALLVKAEIGDIARFRTGDQLASYAGLAPSTHSSGGVTHHGRITKEGSRWLRWAMVEAAHVHFRFDSPVTRAYHRIAERRGKGKAAVAAARMLLLVCRSVLKNRRPYYNPVHGQA

SEQ ID NO: 214000 - protein, 343 aa, unidentified
MQAVTTIGLDIAKSVFQVHGVDAHGKMVVRRQLKRRYVLAFFKKLSPCVVGIEACATSHHWSRELQALGHTVRLMPPAYVKPYLKRQKNDAADAEAICEAVVRPNMRFVATKTAEQQSCLMLHRTRHLFVRQQNAVINSIRAHLAELGVVAPVGRNGVEELLDVVADPNDDRVPEVARDCVAALGAQLRMLKAQILEFDRRIMAWHRSNETSKRLDEIPGVGPALATALVASVADPRAFRSGRDFSAWVGLVPKQNSSGGKEKLGSITKRGDRYLRNLFAAGALAVIRYAKIHGAKHRPWLTALLSRRPTKVAAVALANKIARMAWAMMSKGERYREPAALAA

SEQ ID NO: 214001 - protein, 399 aa, unidentified
MEQSTRFIGMDVHKDTIVVAVTATGDIGKATAYGTFPNTTAALEKLVRRLRQAGDGPLKFCYEAGPCGYGVHRTLTKLGEDCVVVAPSMIPRKSGDRQKNDRRDAASLAVLHRGGLLTAIWVPDAAHEAMRDLIRARLAAVRAVRAARQQLSAFLLRHGRLYPGNRKPWTKAHRGWLADQSFAQPAQQIVLEESIDVVRLGEQRRDRVDDYLRAQIPNWSLFPLVRNLCALRGLDTIASAGLAAAIGDPSRFASASNFMAYIGLTPSEHSSGTQRHLGAITKTGDVHARTLLIEAAHCYRFPARIARHKLAAVDTVPDAVRVTAWKAQTRLCQRYRRMMAKGKPRQLVVTAIARELAGFVWAIACITSDAPAKTPASEGVWSDQPSHDQRFVTQRFRAA

SEQ ID NO: 214002 - protein, 409 aa, unidentified
MLKIVYPNCCGIDVHKTFVVAVIAITNNQGITEYHRKRFSTFTNGLTQLRDWLEYYSCFDVCMESTGKYWIPVFNILEEQTNVCLAHPKYVKAIRGKKTDKKDAQWIADLFKHDLVASSFIPPLKIRQLRDLFRYRMKLTQLQVGEKNRYQNCLTWSNLQIASVVSNVFGKSAQAIIKSILDNPQDKPNIEQLVHKRMKNKVQDLEIAMEGALTSEQAEKIRVIKAHYDALAICKEDLEQMIRELGQDYQHQVKLIQTVPGFKEDLSALRIISEIGCDMTVFDSAAKLCSWAGLVPANNESAGKKFSTRISKGGKYLKPFLVQVANAVVKSDKHPELRNKYLKLKKRRGHRKAISAICRRLLVSVYQVLRKQEDYNPVLQGLTEIRNPDKTMSVQDAVRFAQQHGFNVA

SEQ ID NO: 214003 - protein, 324 aa, unidentified
MNRNFLGIDIAKAKFDVALLRGERSWHRQFPNKPQGFEELQAWLSKLGVTDLHACMEATSTYGLALATFLYEQDYTVSVVNPFQVKHFAHSELRRTKTDKVDAALIARFCRALHPEPWQPQPPELSALQAFVRRLEALQAMHTQEKNRLQVPGMIEPVQASIRVILEALEVEIATIQRQIEDHLCQYPQLKEQRDLLTSIPGIGETTANVILSEIGDVKMYESARQVAAHAGLTPAQRQSGSSVHGKTSLSKRGDARLRKALYWPAIVALRANPILRRFAERQREMGKAKMVIIAAAMRKLLHLAFGVLKNNKPFDPNYQPFRP

SEQ ID NO: 214004 - protein, 370 aa, unidentified
MLFLGIDLHTNCFTCCYLDQEGGKRLETFELKLEGLERFFATLTKDTHVLVEATINTFAFVERFQDRVAQVVIANTHKLKIISFTDKKTDKVDAEKLARVIKTQVLSGEQQASPVMIPSHLVQNLRSLFSTYQPLLRKQIVSTKNRIHSLYAQNLMPFTKKYIFGKNSRALLREITMEPTLSYQINFLFDELEHLEWKTDQFVEKILVTAHPFIHEIELLTSMSGISTFTAAAIMADIETVERFPNAKAFTSYLRSTPRIESSNTKTIIKSTNKAGRKLSIVLLSQSLNHFRDADPFLKAWNDRLCEFKRKGVVRMGLCRKAFAQIYQMLKKDEPHRYSNTVLHNRKMNEYRLFLRSYGITPKELRKDSA

SEQ ID NO: 214005 - protein, 450 aa, unidentified
MENKPASERARKRLTQHLEQINLYAAGIDIGSENHYVAVPEGLDDEPVRNFSCFTGDLEKMADWLVRIGIQTVAMESTGIYWIPAFEILEERGLKVLLVNARHVKNVSGRKTDVLDCQWLQQLHTYGLLEGAFRPEDDIVGFRAYVRQRGTLVRYASSHIQHMQKAMRQMNLLLDNVVTDITGKTGMTIIRAILSGQRNPEELAGYRDRRCKKSAQEIAKSLHGHYRDEHLFALRQSVELYDTYTMKIQACDEAIEQQLKRLEGRGDPAQLTKGKGSKPANTPAFDVRNELYRMSGVDITRIDGISEITALKVLSETGVDMMRWKSQKHFASWLGLSPGNKVSGGKILNSKTKRTTNRAAAALRMAAFTLSNSKSALGAYYRRMRSRHGSPKAITATAHKLARLIYSMLTNGTEYVDQGQDYYERQYQDRVLKNLKRTAKQMGLTLVPAS

SEQ ID NO: 214006 - protein, 409 aa, unidentified
MERIIERGCGLDVHKKSIAACVRLPGAEGQRTQEVRTFGTTATELLALRDWLQGHGVTHVAMESTGVYWKPVFYVLEEALTCVLVNPVHMRQVPGRKTDVQDCAWIAQLLEHGLLRGSFVPPVPMRELRDLTRYRKTIVQERSRAINRLHKVLEDADIKLASVATDVLGVSGRAMLDALVGGTTDPDALADLARGALRKKLPALRQALSGRFRAHHAFLLSQILAHIDYVEEAIEAISQQVGLLLAPFTEDLERVSTIPGVKQRTAEVVIAEIGVDMSVFPSAGHLASWAALCPGNNESAGKHRSGKTRRGNPWLRTALTEAALGAIRHGRGALAARYRRIMRHRGHKKAVIAVAHAMLVAIYHMLTRHTPYQDLSDDYYDRRHAERAKHRALQTLERQGYRVSLEPAV

SEQ ID NO: 214007 - protein, 410 aa, unidentified
MELLHRRCCGLDVHKETVVACLRLVSDGKVTTEVRTFQTTTSDLLRLSEWLAANDCTHVAMEATGVYWKPVWHILADGEFELVLANAAHVKNVPGRKTDVNDAMWLAELLAHGLIRASFVPDAQTQEMRNLLRTRKQLVREQSSHVLRVQKTLEDANIKLDSVLSDLMGKSGRAMIEALIAGETNPVKLASLADRRVKASPVEFREALRGRVTKHHRFLLRLHLNQIDALDAAMATVDAQVEANLGPFRTAVELLMSIPGIKNLGAHVIVSEIGIDMSRFPSDAHLISWAGICPRNDESAGKRRSNRLRKGAPWLKTTLVQCSWAAVKKKDSYLQAQFYRIKARRGPKKAIMAVAASILTALYHMLKDGTMYKDLGCNHFDRRSTDQQKKRLVRRLVDLGYAVEIKPLAA

SEQ ID NO: 214008 - protein, 363 aa, unidentified
MFTERTSVGLDVHARSVAAAAIDGVTGELVQTKLTPSHEHIQSWIQDLPGPVAVTYEAGPTGFGLHRHLMAAGVRCLVAAPSKLQKPSGDRVKTDARDAVHLARLLRLDEVTAVAIPSADQEAARDLVRAREDCRGDLMRARHRLSKLLLRHGIVYYDGDAWTRKHDAWLRHDALPQLSDRATRLAFDSDYDTVLVTKARRDRLDAAIEEMAANSEFTPLVRRLGCLRGVSTLTGFALAVEIGDWHRFTGNSIGSFVGLVPSEYSSGTSRVQGSITKTGNTHVRRLLVEAAWHHRARYIVGKTMRDRWDLAPAPARARGDEGNRRLHQRWVKFIDRRKKPTIANVAIARELAGWCWSLAVLEG

SEQ ID NO: 214009 - protein, 342 aa, unidentified
MKNLIIGVDLAAKVIQVCVYADKKVQSNREMTPKQFSAYLSNLSPSLVVFEACASSNYWNQIATSLGHTSKLISSRLVKAVRQNQKTDKNDALAIIQASQLPEVTFVSGKTNSQQQAQSMLKLREQAVKQRTALKNQLIGLMREFNLPVSRNHQGFTQSIEMILEDADNELTADFRHMLKVSLDLYLVLCEAIDTYDHSLDQWIRSIQECQKLMKIEGIGKLNAVHLYIALASGELGQFKKGKDVSACIGLTPLQHSSGGKAKLGHIDKRKNSTLRSLLITGAMSVVQQVVKRDAKTKKEQWLQALVVRRGKKCAAVALANKTVRTAFAMLKSDTEYRASML

SEQ ID NO: 214010 - protein, 402 aa, unidentified
MAYDFVIGVDVGKYFHHACVLDPQGRQVLSKRINQHEGSLRKLFGQFLADDASVLVIVDQPNNIGRLTVAVAQDMGVDVRYLPGLALRQLSRIHVGNSKTDVRDAYVIAHAGLNLPDSLRSVDRVEDVFIQLKVLNGIDEDLARAYTRLINQMRSALVGTYPAFEHVLRGQMIHRKWILHLLAKYGGPTKIRRIGRTRLKAFARKHRARNPEPVIDAMLAAIHEQTVSIVGAEYAELGVAMSATDALAKLEHRKEIEAQVLKLILDIPQTEILLSMPGIGPRSAAQILMTVGDMSDFPDAAHLASYAGLSPRTNQSGTSIMSNSPNRAGNKKLKNALWQSSFASIRFHERSRQFYERKRKEGKRHNAAVVALARRRLNVLFAMMRNGELYRDISTVQEAAAA

SEQ ID NO: 214011 - protein, 349 aa, unidentified
MTIVGCDLHTRKQQVAVLHTDTGEVVEQELLHAGDAVEQFYRTLPRPVTVGIESTGYALWFHELMQHLGHTLLVGEAAKIRAMVVRKTKTDRRDAQHLLDLLKHDRFPAVWIPDPATRDLRALVTHRMRLVRMRTMVKNGLHAIAMNRRLTLGPSLWSQRGLAQLQGLALAPHTTQRRDESLQLLTWLTARIAALDDRVAAAAQADPGARLLLTHPGVGPLTALTTVLVLGPVARFPDSKHVVSYTGLAPAVHASADTCRLGQITKQGSPLLRFVLGQAGLIAAHAEVDLTRHYRTLLRRRGRPKAIVAIARKLLVRLYIMLRDQMDYEEFRRRGRTPRRQEVPPPALA

SEQ ID NO: 214012 - protein, 391 aa, unidentified
MVCVGIDVAKDKHDCCILDSEGTVLADCFTIPNNMDGFKKLLQTIQNCTQKTDKIKVGLEATGHYSYNILGFLLDNGLPTYVINPLHTNLYRKSLSLRKTKTDRVDARTIATMLLSDVDLKSYTDTAYHNEELKSLTRYRFDKVCERGQLKQSVSRLVTILFPELEQLVPSLHIASVYSLLSEYPGAKQISEVHLTKLTNLLATASKGRYGKDKAIQIRDAARVSIGSVMPAKSLELKHTIKLIQELTSEIDEIEDSIQQIMDDLHPPILSIPGMGIHSAAMILAEIGDFSNFESPDKILAYAGCSPSTYQSGKLTNCYAHMEKRGSRYLRYALYNATKYVCYWNPVFAEYLAKKRAEGKHYNVALSHATKKLVRLIYALQKSGKAYLTAA

SEQ ID NO: 214013 - protein, 416 aa, unidentified
MYNEVTSAKSTVVPSSIRINRGGIVMIYVGIDVAKDKHDCCIISSEGEIIADVFTIPNNMDGFDLLLIRIKSALVELDKVKVGLEATGHYSYNILGYLLDKGLATYVINPLHANLYRKSLSLRRTKTDRVDARTIAAMMMSDVSLKPYTDTSYHNEELKSLTRYRFDKVRERAKLKQSVSRLVTILFPELEKLVPTLHLASVRALLSDCPGAKQMASAHLTHLTSLLHTSSKGRYGKEKAIEIRDAARKSIGSSMPAKSLELKHTICLMDTLDAEIGEIENEIKRIMDGIASPILTIPGISYRMGAMILAEIGDFAMFSSPDKILAYAGLSPSTYQSGQLTSSYARMEKRGSRYLRYALFNATKFVCIWDATFAAYLAKKRSEGKHYNVAISHAAKKLVRVIYHLQRTGQAYVSAA

SEQ ID NO: 214014 - protein, 348 aa, unidentified
MYYAGIDYHKHYSVVSIQNAQGQIVQEERMDHAYPEGFRRLFRECPEPVSVVYESTVNWSWLYEILKPLRNVSSVTLANPFKVRLIAEAQIKTDKISARALATLLRLNVVPVCHIPDQKTRRRKEVLRQRSYWVKMRTAVRCRVHQIVGRQHNLSMPQVTDLFGRKGRAALDKALLPEPEDSLLEQNLNVLDALDDEIGDNEKLIRKAGKADHATKILSSIPGIALILANVIATETDGIARFRDSPHYTSYSGLSPTVHSSGGKTRTGRMVPQCNRWLKWAYVEAAWVAVGCSPYFGGLYRHQRSRGKQANTAITIVARRMCHIAYQLLTEDRMYEERPFSPAALVKG

SEQ ID NO: 214015 - protein, 377 aa, unidentified
MQRLKFVGLDVHADTIAAAVAEKEGEARSLGIIPNRVESIRKLVRKLGPIEQLRFCYEAGPTGYALYWQLTAMGAPCEVVAPTLVPVKAGDRVKTDRRDALKLARHYRAGDLTAVWVPDAAHEALRDLVRAREAAKKDQLRARHRLSKFLLRHGRRPPVGINSWTVKYLEWVQREVHFAERAQEVTLLDYLHEVEHAAARIERLEQAIDEAAQSVPPPMRAVIAALQALRGIAKISAVTVVAELGNVTRFTGARQLMAYGGIVASEDSSGERIHRGNITKTGNAHLRRVVVEAAWAYRHRPSIGATLRKRQEPVSEKVKEISWKAQQRLHGRYMKLTLKGKNKGVVITAVARELLGFLWAIGRQAEAEQKESISRVA

SEQ ID NO: 214016 - protein, 425 aa, unidentified
MNQDNQSFAAFIGLDKSDKKINVTLQRCSAARSERSIIQGSAEALHAWVAALCARFPHQRVAICVEQPAAGLIHALMGYDFVVLFPINPVTLARYREAFTPSRAKDDPTDADLLCELVAQHREQLKVWQPDDICTRKLRHLTQARRSSVNMRTRLSNQLKALLKGYFPQALELCGDDLTTPLACAFLQKWSSLQQLKKARPETIRRFYYAQNARRGDVIEKRLALIAQAVALTNDPALIESSIVTLQALTLGLRAVHTAIARFDREIARTFTQHPDASLFAALPGSGTVYSARLLAAFGSRRERFESAEALLNFSGIAPVLKRSGQTTIVHRRYARPIFLHQSFIEYANESIRHSLWARAFYQMHKAAQQSHWVIIRALAYKWIRILFRCWQERTPYDELRYLKSLQKRRSPLLQYLAQPNTQTV

SEQ ID NO: 214017 - protein, 373 aa, unidentified
MPRYSTAFGMDVHLRSTTVCALDAETGEAVTRRFRGNPWGEVAEWMSGFPGPSLAAYESGYLGFAPQRELSGLGVDCVVAAVSKVPRSAADLSSKNDRNDAARMAKAILSHDVTPVWVPSPEIEGLRDLAAAHDAATARLAAAKQRLLAFLARRGYVYGGTTPAGNPRKYWTYGFLRWLDGIHPADDGGIRALAALRNEVEAADETREALLAEYRAAVAAGPLSAEVEALQSIKGCGFALAAAFASEVGDFSRFRSGRQVTSYFGLAPKQRSSADSVRLGGISGAGNALVRKLAVEGSWCYAQAGHQPKLMPKGSGVPLEIRMHGRKGSERLLRRREGMLERGMPQAKANAATAAELVRWLWALGTMCREGAE

SEQ ID NO: 214018 - protein, 304 aa, unidentified
MFGIGIDVSKATLDVVVHGEQFRQFSNDKRGFVRLIRWLKTWPIKQVVLEASGGYERAALDVLHAAGLPMVRINPARARRFAQGTGRAAKTDRLDATVLAQMAHLLPLTRYVPPAPWQQRLAEFAQCRRHLVQMRVSEMQRLRRLVDPDLIAMKQRHIAQLSDDLKQLDKAIAEQLEGQPGWKNIGALKGVGPILISTLACELPELGSLGSKAIASLAGLAPMNRESGTWQGQRRISGGRAVVREALYMAALTAIRYEPGLRAFYAGLKAKGKASKVALVAVMRKMLVILNARKRDAEVALGCP

SEQ ID NO: 214019 - protein, 302 aa, unidentified
MVIASSLPVVGLDVSKATLAVCYQVNDQIKHLEVSNTKAGFQQLVKACGGQCQFVMEATGTYNLALAYYLHEQGGQVAVLNPLVIRRFIQMHLGKGKSDRKDAQWLLRYGQQQPLKVWQPDEAVLVECRQLEQVNEQLIKQKNMISNSLEALQHQPIVSKLASKRLQQMLKTLTQQVAAVEAELLALLERRFAQEMTLLCSIPGIGRKTAGMLLLFAGGFTHFDNYRQIIALAGLSPREHTSGTSIRGKVRITKMGGGLIRGKLFMCSLFATSSSNKLLPSSNRACPTKLILARNWSKPLKF

SEQ ID NO: 214020 - protein, 409 aa, unidentified
MHPKQRHIYIGVDIHKNTHTAVILNCWHEKLAAIEFDNKPAAFPSLMMCVNKHLGEGLTPVFGLEDVGGNGRTLAVFLVEQQYRVKEINPALSSLKRKSYPMTKKNDHWDAECVAKLLLDEWDVLPDAKPQDNYWILSQLVLRRDALAKRVVVLKNQLHAQLSYHYPSYRTFFSEIDGDAAMMFWETYPCPAVLEGVSETELQVELRKHSRSLSNEKAAFILRCVQADGVVKREYQSEHNFLIRSHVRELKECQSELTKVDGRIAERMKAFGYKLNTMTGIDNVTAAAFVAEIGDVQRFQSADKLAKYAGVAPITFGSGGQSKDLVSKQGNRQLHSLFWSLAIRQVHVSRTGKATNPVFLAYYLRKQQEGKSKKGALVCIMRRLVNIIYGMMKNKTAYVIGNVPEKEVA

SEQ ID NO: 214021 - protein, 519 aa, unidentified
MAKGKRYKRRQHLHNVKGRRFTDEIRNLDLEKVLVIPIDGGKNAHKALVANYFGDILVDTFEFPNSKSGVFMFDSIVKTVSQKVEAQRVVPGLEYTGHYCENLMYSLTQLGYDTIPINPYSVSCQRNGQLNWCKTDEIDLCAIGQVIIDNQGTETKLGTGLYYNLQIAERMRRDEVRKQASLKTQIRCIVDRVFPGLQKANIFSDFWGKASLLLLEYYPTPWDITRLGIRNLAEFFQKHNTKLGVTTATRLVKLAQDSLTRNPQDLEMHLLNLQFKLKDLRHARERIQLIEIETAKYLARTPGFLLLSIPYVNVASASEFVGETGAIANFVKNTKVIKLAGLNPRKFQTGEYEFEHGGVTKQGRASLRYIVSVISQDLLNGNDYFIAFYNRLVNEKGKNERLAKTAVGNKFIRIACVMMRDKKLFNPPTWTGRYLTDNPVAKFEKFLKERQAKDVFDILKPIILGWIPKKSIVAKESTRTKFEGGGFQALPESLVSVGDILPRVMKSISTRSTNVSSVK

SEQ ID NO: 214022 - protein, 338 aa, unidentified
MGLYCGVDLHSTNSYLAVLNEQLQPVLSRRVPNRLDAVLGALEPFREQVQAIAVESTFNWYWLVDGLMEAGYQVQLVNTSAVRQYEGLKYVDDRHDARWLARLLHLGILPTGHIYPKKERALRDLLRRRAFLVRQRTASMLSVKNLFSRNTGSQVPFNELKRLTPEQVEEQFSDPYLALAITSNLAVVRVINEEISRIEKTVLKKAKLRPEFKLLESIPGIGQTLALTIMYEAGSMARFADAGHFCSYCRCVPSQHLSNGKLKGTGNVRNGNPYLSWAFTEAAHFAIRFEPRAKRFYERKKVRTSELVALRTVSHKLARASFHVLHDQAPFQPEQAFG

SEQ ID NO: 214023 - protein, 396 aa, unidentified
MRNDVTIYVGIDFSKEKFNACLLMDQGVMGESEFPNTKTGYLKLTKWVKNTSELGRSFDSSLVLFCGEHTGTCSIGLCEYLYAKGMKIWLESALKIKYGSGLKRIKDDKADAEMIAYYAKRFYEPGSCALFEPDSADLKTLRTLYQFRNRVVCDRVAIGNRISSGAFDCSTLVRNRMVKHHKEAQKDEKDIEKEMVKLMETSEELASNYQILISFKGIGPITAAALIIYTSNFKKFDNPRKFACYCGIAPFGKQSGTSINTKPHVSRFAHIGIKAAMVQACKSAMQHNAVIKAYAQRLYAKGKHEGIVMNNVKNKVMHIIFKMIQTQTLWEQEYQQKHTKECKPIPGKNGIGATEAAPIINATLKTSSSVVECTFLEKHSFQKNSKKTSSFSCVET

SEQ ID NO: 214024 - protein, 339 aa, unidentified
MNITTIGIDLAKNSFSIAGANKHGKVVLRKTLSRPKLLAFTAQMPSCLIGMEACSGAHHWGREFLKQGHQVRIMAAKFIAPYRKGGKNDNNDAQAICETLGRQDIWSVPIKTPDQQAVLCIHRVRQGLVRERTAMINQLRGLLSEFGIIMPKGRYPAQKTIGGVLEDADNGLPMLARRIIDNLWQRIKQANEQIHEYDRELAQLVKDSPVAKRIMTIPGIGEQTASGVVASVPDPKMFKDGRNFAAWLGLVPRQYTTGGKIKLGRITKQGDQYLRTCLVHGARAVIAHLGDKQDRVSCWVRELIARRGYLRAVVALAARNARLIWTLMMKQEEYRAMPA

SEQ ID NO: 214025 - protein, 343 aa, unidentified
MKITTAGVDIAKRLFQVHGVDERGTPMLRKQLKRSQVLSFFANLTPCVIGIEACCGAHHWARQLQKLGHTVKLMAAQFVKPYVKTNKNDMADAEAICEAVNRPTMRFVPMKNDEQQAVLALHRARQGFVRARTAQANQIRRLLAEYGVIIPQGIRQIRIRLPGILEDGENDLPDLFRRLLQRLGEHLKQLDLQVSELDSQILLWHRQHEGSCRLAQIPGIGPLTASALVASIGDAKSFENSRQLAAWMGLVPRQHSSGGKTLLLGISKRGDGYLRTLLVHGARSVLRVAERKAGYGTSWIAGLVKRRRPNIAAVALANKNARIVWALLRHERNYDARYQATAA

SEQ ID NO: 214026 - protein, 404 aa, unidentified
MGVAGSSIPIDRRLEGYHHAIRNIPKAVLGIDVGKSSHWACLVTREGEVALNRRVRNSEGDLDGLFSQVACDTIVVVDQCRNIGLLAISRARLAGLDVAYLPGLAAHQAARLFAGDAKTDERDALVIAKTALGIPDALLPVPEPDEALEAARSLAAQRSHMVTCATRDKNRLRSILLESCPAFEALADLGDRHWLNMLEKLGGPWGCIDAGKPAFGAVTKGANRARMDAAWNAAMASTRPSKRRVDAENPQVRMLARRIREALEEADGIDREIAALPAGDGTYECLVTIPGIGPRTASELVIGVNIEDFPDHDHLASYCGIAPRNRQSGTSISSVSASRQGNRRLKNLLIFSCNSLVRSENRFGEYYRACRGRGMCHGEALKAVARKRLKVIYAIMRDKVPYSA

SEQ ID NO: 214027 - protein, 343 aa, unidentified
MSNIIRIGMDTSKSEFQLHGVDSQEKPVLKKKLRRAKVLGFFAKLEPTKVGIEACGASHYWARELVAIGHEVVLLPPQYVKPYVKRGKNDAADAEAICEAMSRPTMRFVPVKSQEQQAAQMLIGLRDGLVRRRTQLSNMIRGYGAEFGLTAAKGLVRVEPLLARIAQDEGLPALAKELFDTLGQEYARLQAQLRKIEAKLMAWHRHNEMSRRLAQVPSIGPVIATAMAIKVPDPKAFRSGRDLAAWIGLTPKDHSTAGRTRQGVITRAGDEKLRSMLVVGAMALIQQVKRGRGHPSPWLVELLARKKPKLAAVALANKTARIAWKLMVSGEHYMPQPGTRELA

SEQ ID NO: 214028 - protein, 404 aa, unidentified
MDLAPIYRCAVGLDVHQAQITVCVLSEGADGEVVAEVREFGGFKRERRAMAAWVAGFQPDVVVMESTGIYWKSPYAALEQAGIRALVVNARHVKRVPGRKTDIADAQWLAILARAGLLTGGFVPPANFRELRLIARQLQRLTGIRAGEKNRVHKVLTDGGIRLSVVVSDLHGQSAWAMVKALAAGETPEQVLCHASTRLRASAQELLDALDGELSEAHRFVLAELVDHVEDLDRRIACFRDRLLAGLAPQQGLLCALQTLPGFDELGAALLLVEIGDDMQAFGKPEKLAAWAGVCPGNHESAGKRQSGKQRKGNPYVRRLLCEAAHAASRTRCALAEKYKALQVRRGRKRAIFALAHKLLKLVFVLIDRGDYYRDATVDYEALSVARNAPRWIKMLRKHGYLAA

SEQ ID NO: 214029 - protein, 369 aa, unidentified
MKFVGIDLHTNRFTCCYLSDNSKEKQTETFDLNLEGLNSFYSTLNKETYVLVEATINTFSFVALFKDMVKEVIIANTYQLKSVGVPGKKTDKLDAAKLAEKLKAEIISGVQQIVPVTIPSKEIRDLRALFATYRALRKKIGQTKNRIHSLLKENLYPFTKEYIFGKKARIEIRKISSDYLLSFQINLLMDTLEHLEETIDKLVVEINKAGAPFMPQIEILTSMTGISVITAIAVIADIIDVSRFRNSKHFASYLRSAPRVESSNDKTVIKSTTKAGRKLSITLISQSLNHFRNENEKLCRFYERAKIYKKKGIIRMALCRRVITEIYQMLKKQEYHYFYNPVLHEKKMSEYSKFLLKENIIFQGFSKAA

SEQ ID NO: 214030 - protein, 463 aa, unidentified
MKHSTKKHEAKQPKGRKSFPIINPNAAGIDIGSGEHYVAVPEDRDDQPIRKFGCFTSDIEAMADWLGECRIDTVVMESTGVYWIPTFQILETRGFQVILVNARQVANVPGRKTDVSDCEWLQRLHTYGLLSGSFRPDDSVCVLRSYWRHRDNLIRYASAHIQHMQKALTEMNIQLHKVISDITGVTGMRIIGAIIDGERELVKLAEMKDHRIKSSADTIARALQGDYRQEHLFALKQALQLYEFYQQQIAECDREIEAYLRQFDSKVDLESNPLPPNKKTRRKPYKNEPDFDLRTHLYRIAGVDFTQIDGLDVTTVQTILSEVGLDPGDFPRYKNFTSWLGLCPNNRITGGRIKSSRTRKVANRAAKAFRLAAQSLANSKSALGAFYRRIRARLGAPDAITATAHKLARIFYHLWTTGESYQDPGIDYYEQKHKERTIRNMQKRANLLGYEITLTPIADNLVT

SEQ ID NO: 214031 - protein, 430 aa, unidentified
MEKLRMHSAGIDIGSRQVFVSIEGQPVKAFETFTSDLEILSTYLLSHKVATVAMEATGSYWYVLYDILLDAGLDIWLVDGRQTRQVPGRKTDVKDCQWIQQLHSYGLLNRCYVPDALIKELRSYERLREDHIRSAAVHVQHMQKALIEMNIRLPEVLSQVQGASGTALITAILDGERDRYKLLSLCHKSVRKNKGEALLKALEGHYTPQGLFALDQAYKGYLFYQGQIQACDTQMQQVLEKTNKDLPPGTNSTNRKPIRHNKPQIDGLGDHLLKIFAGRDATQLPGITDYNWLQLYSEIGADLSKWPSEKHFTSWLGLSPGQHNSGKRNKSKSKGKPMVGQLFKEMAHGLLNSKYIGLGAFAKRLRGRKGPSIAIKATARKLAVQYWRLMVKGIDYVEKGIENYELMLKQQKQRLLQRLAVELNVDLVPI

SEQ ID NO: 214032 - protein, 478 aa, unidentified
MAKNKKIKKRNVNSLHLIQPNAAGIDVGATEIYIAVPDDRDRESVRRFETFTENLHEAAAWLKSCKIESVAMESTGVYWIPIFQILEAYGLEVFLVNARHVKNVPGRKTDVLDCQWIQYLHSVGLLRGSFRPDQEICAVRSLLRHRDNMVKAASSHVQHMQKALTQMNLQIHNVISNICGVTGLAIMDAILAGERDPEKLADLRNSRIRADKNTIIKSLVGDYRKEHLFTLKQALASYHHYCRLIEECDIEIEKLLREFESRIDPDKDTPEPLKKIHRKPQGNEPKFDLKKHMHRILGTDLTKIDGISVLTTHVIFSEIGPDLSKFPTVQHFCSWLGLCPNNKISGGRVLSSHTRPGTNRVAQALRIASQSLWNSQSYLGDYFRRMRARHGAPKAITATAHKLARIVYHLIKNQKPFDETLFAEQEAHHKRRLEQKLKKQAKYLGFQLVPVDPSCVVYLEEELMLRTILDMGLEKSKD

SEQ ID NO: 214033 - protein, 350 aa, unidentified
MQIIGVDLHTRQQTVAMLNVETGEIVEKTLPHEGDTVREFYSTLTGATRVGIEATGSMQWFLELMEELEIDCQVGHPAKIRAAEPRKQKHDRRDAALVLQLLVENRFPSIWMPSREQRDVRSLILYRHQWVRIRTRIQNALQAIALSHGLRRGSSLWSEAGQQAIASLPLTRYTAERRTALQSLYGHLREQIEDLDRKVEELAWQRPQARRLMTHPGVGPITALATETFLGEPKRFVDGKAVASYVGLIPSEHSSGGRQRLGGLSKQGNPLLRFLWCEAVGHAVRKDAELQRFYQHKLVQKGLGKAKVAAARKLGIRLWILLRDQIDYQEFCRRGQLRQKHGGAHAGMPA

SEQ ID NO: 214034 - protein, 368 aa, unidentified
MGNEAKRFVGIDLSKRTYEAVAITINPQTIIRWNGKLDLRGRKCLLDKLHSGDTIALEAGTASFKIAKEIQSKQGVMVVVLNAANVAIIHASLKKTDKEDALKLARLIEKYSPEELPVVPIPTDQEMERRALVAHETRFRQDRVRLINRLHAVFLRAGFPDHTKRQLGIAASREKLIVSELDGFNLVEAMNLDHMIVEYEKILEDLDKQINDTVVACGEDAEILLSIPGFGIKTTMAVLAYAGDMRRFENPSQLVNYIGFSPRLYASGDIERSGSITKRGNPQVRWLLIQSAWCMVQSKAANPLKDRFDAMLKRGKAKSVAIVALARKLLELVFILLTRREKYRFIDPSLYAIKLRRAGFNLVGAGIG

SEQ ID NO: 214035 - protein, 322 aa, unidentified
MSVSVLGIDIAKQKFDVALLVEGKTKHKTCKNSAEGFEMLRLWLEKQGVQEVHACMEATGNYGEDLAIFLHEADHIVSIVNPARIKGFAQSELLRTKTDKLDAALIARFWLAMKPAPWIPPSPEIRSLRALVRRVDSLIDMRSQEKNRISTAHQSVSLLIKEHIAYLDQEIEKIRKQIADLIGKDPNLKRKKDLLDSIPAIGKVTIPHILAELDDLEKFNHVSELVAFIGLAPKETLSGSSIKGKPRLCKIGHARLRKALYMPALVSIQCNPVMIAFYNRLKDKGKNGKVIVCAIMRKLVHVIFGVLKSGKKYDPNFKPVAA

SEQ ID NO: 214036 - protein, 317 aa, unidentified
MEAEEKTVRFVGIDVAKNRVDVHVRPDGARFGCATDSAGLAELIRRLGPLAPRLIVLEASGGYEGVVLAALAEAGLPVAAVNPLQIRRFAGAIGKLAKTDTIDAAVIAHFAEAVRPEPRALPNDLTLRLRELLARRHQLVVMGQAEGQRLDKVEQRIAQRSCRTVLRALEAERKRIEAAIDKLVQSSPLWRAKENLMRTVPGVGPTVARVFIAHLPELGTLDRHKVAALAGVAPINRDSGQYRCKRRIHGGRVHLRAPLYMACLVAVRHNPPLRTFYSRLKQAGKPTRVAIVATMRKLLIILNAMLRDNTPWTEVHA

SEQ ID NO: 214037 - protein, 334 aa, unidentified
MADYYFGIDVSKGTLDVALLKEGTILSTHVIENSQRAIQIFFQTYSKQFQLAGDQAWACMEHTGIYNYLLLEVLEKQKFKISVEPALQIIKSQGMTRGKSDVIDAKRIAQYAYKNRGELKIWRPQRLTIQKIKALLSQRSRLVKVKYQLQTPIQEAAGFLNSEIVKTLKSSAKATLKAIEKDIQRLEAQIDDLVHFDKKLSIQYQRATSVTGIGPITALHMIVASGEFEQIKKPKQFACHVGVAPFEHTSGTSIRGRTRVSKMADLSLKKLLHMAALSAIQCEGEMKNYYSRKVIEGKNRMSVINAVRNKLISRVFVCINQNRDYEKNYIHTLV

SEQ ID NO: 214038 - protein, 480 aa, unidentified
MAKRAVQHADLKAVPMLLNESLYVGIDIGKAKHVAGFLSKTLLERHERFEACPALVFENSREGFRLLIERIRSLAPLEHIFVLMERTGHYHRTLEQYLQELDITVYVMHVQSRSTGMLKTDKRDALTLANQLYNQLELGVQVPNKLQLIRRVVPPTQAAAELRGLIRHRYELIHESTRRKNKLTAICDELFPELVRVVKDPNGQVALALRERFPTPAALATVSLTTLQQIRGGARSFSDAKLLELQRQAAQSIGIKEVARLRGLVLEQTQLIKELQMLQEHIQQLDKEIGGIVEHAREGQILLSFPGIGPIMAATSIAAIGSIHNFPSAAALKSYFGWAPVVAQSGSTLDHTRLTHGGARTMKHMLFLAVFQAIRLKDNEWARLYERLVKTKCPFDERTQSYLGKTRVIGRVAGQMTEAIYALLKRDAELLSKVPPSQDPPPPLLSDPEVHRQHHLGHYRPLKSTPPPNTITLLHPFPAE

SEQ ID NO: 214039 - protein, 350 aa, unidentified
MIAINKDIIATIGVDLGKNTFHICAMNDKGTILLRERLTRAALPKRLANIPPCRIGMEACAGSHHIGRQLTALGHDVRLMPAKYVKPFLKSHKNDYRDAEAIAEAVQRPTMRFVPFKSDEQLDLQALHRVRSRLVGQRTAVINQIRAFLLEHGVAVRQGPGALRLALPSILAQRTDVLSPRIIHLIEDLTGDWRRFDERIADVTREIEQLAKQDQYCKGLMGVPGVGPMTASAMVAAIGDGAAFSRGRDFAAWLGLVPKQISTGDRTILGGISRRGNRYLRTLFIQGARSVLQRSDGWEKKSFGRWLIAASKRLHKNVLAAALANKLARIAWAVLYNAREYDTALAPKAT

SEQ ID NO: 214040 - protein, 361 aa, unidentified
MTASNIVGVDPHRKTYTATVLDSRGGELGHAHFPNTRQGHDAGLAWAAGLGPADRWGVEGASGLGRHLAEFLVAAGCDVRDVPPHRTAVHQRGRHEGKSDRLDSHRVAAETQTNPRLARAFKHAVSAAPDSVRDRIALWHNARTSLTKVRVQLLGELDALVHDLPEDLRTQLRPAKTVSARVNSLRRLDTTGVTDTTVALRLRLIGHRVAMLRDVLEQDKAATAELTTLVDETNSTLTELVGIAPRAAAEIIVEVGDIRRFTEAGFARFNGTAPIPASSGEGENAPVRHRLSRGGNRRLNAAIYRIAMIQLRYEPRARQIHDQARAHGHTRREAMRVLKRHLSDAIYRTMLRDARRAGDLT

SEQ ID NO: 214041 - protein, 385 aa, unidentified
MAQTLSHPIALDYDSTLVLAIELSNTSWVLAAQVPGLPRVKAKQSIEPTAEALLAAVDRYRDRARAAGKTVQRVVATYEASWSGFWLARWLARRGVETHVVQPSSVPLDRRARRAKSDGIDAELLLRTLLAWLRGEPRVCSMVPIPDEADEDERRRVREREDLVAERVSLVNRIGAVLATLGVRDYNPLRRDRRERLDAIRTALGDPLPPHARARILRMLDRLELVCAQIAELERERDAVLDEEAPGKAEEMIQQLAGLRGIGVQSATVLVREAFVREFANGKALGSYAGLTATPFSSGGTEREQGIDKAGNRRLRTVMIELAWLWQRYQPGSAQVIWFRERVGGTGKRMRKVMVVAMARRLLIALWRFATLGVVPEGAVMKPVS

SEQ ID NO: 214042 - protein, 363 aa, unidentified
MIESTTVTVGLDVHTRSIRLAAVRAEVLLDERTLPYDEEAVVRLLRQWPAVRCCYEAGPTGFGLYRHLVEQGIECAVVAPGLVPQRPGDRIKTDPRDARKLARLHAGGLLEPIYVPSPALEAARDLVRAREDARLDRMRDRHRLSKFCLRHGRLLPTSGWTVLRRKWLGEQRFQHAAEQITFDTYLHAVDLVDARVEQLERAIRELAEQGPWSELVARLRCLRGVDTLTAIGLVAEIGDFGRFKTAEEFMAFVGLVPSEHSSGEKRRQGSITKVGNSHVRRLLVESAWHARRRPTVGYELSRRQRGQDAAVIERAWRCQQRLYQRWQRMAGRGKPHQKIVVACARELAGFVWAIATDQPLRQP

SEQ ID NO: 214043 - protein, 362 aa, unidentified
MKSITIIAFDQHAATTVAAVLLPGQRTPALHSLTSDSATILKFIARIRRTYPEVQCCYEAGPCGFELQRACAAAEVACEVIAPALIPRRTGDRVKTDRRDASQLAVLYRAGALTAIHVPTEQEEAVRDLLRCREDIRGDLLRARHRLGKFLLRHGRRFTATKSTWSLRHHAWLRAQTWPLPALTQTHEAYLRAGDEAVARLRAVEAQLQDLVRLEPLRTRVQRLRCFRGMDDITALTIAAELGDARRFPSARGLMAYVGLIPSEHSSGPRRARGAITKTGNAHVRRVLVEAAWHYRHHPFIGKQLRRRQREGPETARITAWRAQQRLYRRYQRLAARGKPKQHVVTAIARELTGFVWATLTH

SEQ ID NO: 214044 - protein, 331 aa, unidentified
MKIKETIGIDVSKLTIDVTVHSNKAYCKFENTVKDFKKMVNWVFKQSPFSPENVLFVFEHTGLYSHRLAVYLTKENISFLMVPGLEIKRSLGIVRGKDDRVDSRLIARYGYRLRDEITPCKLPSKELKSLKTLLALRETKVKQRSGDKALLKEYKLVYIRKDNEIVFKILEKSIKSLSKYISEIEQEMDKVVKSDQGLKNQYELVTSIKGVGPQIALYTIVLTEGFTKFKTHRQFASYCGVAPFPNVSGTSIRGKTKVSNLANKKMKSLLDLGAKGSLQYNLEIKTFYERRLELGKSKMSTINIIRNKLIARMFAVIKRNSPYVDFMKYAA

SEQ ID NO: 214045 - protein, 310 aa, unidentified
MEMITVGIDVSRDRLDVAVRPSGEVFSVDRKAAGLDELVVRLRQLAPHIVALEATGGYETIVAAALASAGLPVVIVNPAQVRAFAKALGQRAKTDPIDAAVIAHFAEATRPEVRPLPDEATQMLADLVARRRQIIEMIGAERQRESRMTRRSLKADIARMIRLLEKELSKLDRELDDVVRGTPAWREKEDLLASVPGVGPVIARTMIAEMPELGRLNRREIAALAGLAPFTRQSGRWRGKSFIGGGRTTVRTALFMGAFVAVRFNPLLKRFFDRLLAAGKPRNVALIAVARKLLTILNAMVRDNTRWQNA

SEQ ID NO: 214046 - protein, 354 aa, unidentified
MMIIGCDYHPGFQQIAFLDTESGELQERRLQHREEAERFYRDLAAQAVRVRVGMEASGQARWFEQLLTELQVELWIGDAAQIRSKRVRKQKTDRQDAQLMLRLLLEDRFPRIWVPSWENRDLRQLLWHRHRMVQARTRVMNQLQAVALNEGLRRKKGLWREAGRKQLESFRLAPWASRRRHDLLGLVDQLNPMIAELTQAIEQEVENSPEAQRLTTHPGVGPVTALAFVLIIGRAERFQSGKQIASYLGLVPAEESSGDRQRLGHISKQGNTLLRFLLVEAAQVTVRSDSEWRRKFFHLAMRRGRKIAKVAMARRLAVRRSWLWRNAGDYEQLKKFSPHAGQPGTGVGVQSNTE

SEQ ID NO: 214047 - protein, 310 aa, unidentified
MGESFVGIDVSKDHLDIAALPEDRRWRVTNDDAGVSALVAALVPLAPACVVVEATGGYETAMVTTLALAGVPVAVVNPRQVRDFAKGLQRLAKTDAIDAWVLARFGEVTRPAPRPLDDAATLDLSALVHRRRQLVEMLVAEKNRRSVARPAVRRRLEVHIAWLAREVATADTEIATRIRQSPVWREREQLLRSVPGVGPGTASLLLTGLPELGDASPRQLAALVGVAPFNADSGRWRGQRRIWGGRADVRAGLYMAALAAIRCNPVLKTFYQRLRTTGKAPKVALVAVMHKLLTVLNAIVRREQPWALPA

SEQ ID NO: 214048 - protein, 346 aa, unidentified
MEQYVGLDVSLKMTAICIVDRAGKIQREGTVASDPAAIAAFVRQHAPNVARIGLETGATSTWLWTELRKLELPIICIDARHAKAALKMQINKSDRNDAVGIARIMQCGWYKEVRVKSLDSHAIKALLVSRALLVKIKRDLENQVRGLLKNLGLVIGRTKMNAFVVRTAELTEDQPELAVAIEPLLKAREAVEKQIADLDRKAMRLARSDVQIRRFMTVPGIGPITALCYLATIDDPTRFKRSRSVGAYVGLTSRRFASGEVDWTGRISKCGDIMMRSYLYEAAGVLLTRVAKWSVLKAWGMRVAKRSGLRKAKVAVARKLAVILHRMWIDGTEFKWSSKEEAVQPA

SEQ ID NO: 214049 - protein, 408 aa, unidentified
MKITCGIDWAEAHHDVAVLDAGGQVVGRRKIDTGVTGFGELMSLLAEQTDDPRSVPVAIETDKNLIVVALQAAGLTVFPINPRAVARYRERHGQSGKKSDPGDAALLADVLRTDGHQHRPLPTISNAGLAVKALARQHQEAIWALHQTNNRLRSVLLEFYPQALQAFPNLKHKAAVAVLAAAPTPGLGAKLTARKLVALLHGCGRRNDTALVEQVLADLKTPALRQSAPVEAALGHTVVGLLGVISAMQAAVGQLEQALATEFDKHPMAPVLRSAPGLGPILAARVLAEVGDDPTRFASAGGLRAFAGTAPVTRASGKSRRVLARRVRNKRLGDACHWWAFATLTKSAGARAHYDRRRAAGDRHNAALRNLANKLIGRLWWCLHNDRPWDEQTAWNTTTAATPTSRAA

SEQ ID NO: 214050 - protein, 451 aa, unidentified
MAKAKKRKHRKLERNLPVMRPNAAGIDIGATEIFVAVPADRDTESVRPFPTFTQDLHELADWLQRCRVDTVAMESTGVYWIPLFQILEGRGIEVHLVNAQHVHHVPGRKSDVMDCQWLQYLHSVGLLRASFRPEQAVCEIRSLMRHRENLVQMACVHVQHMQKSLDQMNLQIHHVISDITGVTGTAIVDAIVAGETNPEELAKLRNYRIKASMETVRKSLVGDYRPEHIFTLKQSLTAYRYYQQLIADCDREIQERIERFQNHADPSAPAESCDKSSLTTNSTFDLRTHLERIFGVDLTLVPGFDVLRIQTVFSELGVDLSGQFPTEDAFSSWLNLSPKDGFSAGRRIRGPKIKTKNRVTQVFRMAAQSLHNSQSYLGHYYRSQRARHGAPKATKNTAHKLARIFFHLVTTHQPYDETVFAKLEARNHQRQFRKLQSLAKQMGYSLVAATT

SEQ ID NO: 214051 - protein, 341 aa, unidentified
MDASNRSAIDSPVGVGIDVSKHAWDVHILPNPLHPHGKSLSLKTDSDALKTLLKELHPLQAQALIVIEATGGYERTLFASLAEHHPVSIINPQRARSLATALGVAAKSDPIDARVLALFAQKVQPRPSTPPSPQQAELDALVTRRRQLIDLRTAETNRSMQTTSRKARKSIKKVLDLLEFQIDEIEEAIAELIQSDDDWAKKAELLATTPGIADATASTLVAELPELGQLNRARIASLVGVAPYAKDSGKSRGQRACRGGRSSVRTALYMATFAGIRWNPVIRAHYKSLRARGKKFKVAMTACMRKLLTILNTMVRTNQPWNPRTSAEPSRAPVANTSVLS

SEQ ID NO: 214052 - protein, 372 aa, unidentified
MLDTTTFVGLDVHARSIKAVSLDVMTGEVRCATFGYDAGAVAEWVRSVDPRARCVYESGVTGFDLQKRLSGLGVDCVVGAVSKMIKPSADRRRKNDRNDAARMAKAILAHDISPVWIPSPEVEGIRDLAGAYDGATARLATAKQRLLAFLAKRGFVYGGTTPAGNPRKYWTYDFLRWLDKVRPEDDGGVRTLAALRNEVEAAAEARADLLSEYGAAVDASPIAAEVAALQSIKGCAFALAAAFSAEVGDFTRFRSGRRVTAYFGLAPSQRSSGDSVRLGGISGAGNALVRKLAVEGSWCYAAARHQPKLMPRDTGVPLEIRVHGRKGSERLLRRREEMLARGMPAAKANAATAAELVRWLWALGMMCREGAE

SEQ ID NO: 214053 - protein, 459 aa, unidentified
MKRRGRRTKGMEEAHPFAGMSQINKDAAGVDIGAEEIVVCVAGDETTQIVKAFGNYSVDLQNIGKWLHEHQIKTIAMESTGVYWIPLFEELERQGFECLLISSRSLRRVPGRKSDTLREDAQWIQTLHSYGLLESSFRPQGELVALRTLLRHRAQLLEHRSPHIQHMQKALLQMNVQLSQALSDVTGESGLTIIRAIVAGERDPQKLAVLRDRKCKKSAEEIGKALTGTWRTEHLFIVKQSLEMYDFYTRQVEVCDAEIDRMYALTRPEWTGGELKPLPEKKRNSHSKNAPQKQAEIRQHLKRISGVDLSVVDGFGVSLAQTVIMEVGTDMSKFPSEKHFCSWLGLAPKHEISGAKVLKNKTLKTKNRAGQAFRMAAQSVKRADCVFGSLYRRLKGRLDKAQATVATAHAIARVVYRMLKYKVEYETIDIEEYEAKYKEQQIKYMRKKAAKLGFQLVPA

SEQ ID NO: 214054 - protein, 414 aa, unidentified
MEMVHPRCAGLDVSKRDAKVCVRVAGVGRAKAVSTVTTWGAMTRQVLALRDHLVAEGVTLVVMEATGDYWKPFYFLLEDGPFEVMLVNARHVKNLPGRKSDVSDAAWLAQLGAHGLVRGSFVPPEPIRQLRDLTRTRTAVTRERAREIQRLEKLLEDAGIKLSSVASDISGVSGRLMLQALVDGERDPGRLADLAKRRLRSKIPELAEALNGRFGEHHGFLVKIHTDLIDQHTRAIEDLTARIEVVIEPFRGARDLMITIPGISTMVADVIIAETGVDMSRFPTAGHLASWAGTCPGSNESAGRVKSTTTRPGNPYLKGVLGIAAMSAAKSHDTYLAAKYRRVAARRGPIKAIVALEHAMLIALWHMLRHGEFYNEPGGDFYTRRDPDKAKNRAIDQLKKLGYDVTVTVQQAAG

SEQ ID NO: 214055 - protein, 408 aa, unidentified
MNPLFVGIDVSSKNNVAYLMKPDGSKHSSFSVQNNLGGAKLLSERIVSALGSMQLERVVIGLEATSIYGDSLVYALREDGRLGRFQRKIHVLNPKQVRKFKEAYSDLPKNDWVDAFVIADHLRFGRINREVYMDDYRYKALQTLTRARFDVIQNLTREKQRFANYLFLKCSGMAQDKDIQNTSATTIALMEHFETVDDLANADLEELTAFITETGRGKFADPDATAKAVRAAAKGSYRLPKTVNDTVNQAMAVSIASMRALKGQVKVLDKAIEQQFEIIPNTLTSIPGIGKVYSAGIIAEIGDIHRFDSQASVAKYAGLVWNRSQSGDFEAEHSRMIKSGNRYLRYYLLEAANSVRRCDSEFRRYYDLKFKEVNKYQHKRALALTARKLVRLVFRLLKDNRLYIPPES

SEQ ID NO: 214056 - protein, 344 aa, unidentified
MSEAIIIGLDIAKYVFHAHGVDGRGRAIFSKRITRRKLLDFFVAQPSCTVALEACGGAHHWARLLTQLGHEVRLIPPAYVKPFVKRQKNDAIDAEAICEAAQRPSMRFVAVKSEQQQAAGLVFRTRDLLVRQRTQLINAIRGHLTEYGWIAPKGPSHVAMLAELLEEEEMASSLPEAARAMFRLMLDTLAGLGSKIADLDKEIARRAREDEVSRRLMTVPGIGPISATAIAALAPPAETFAKGRDFAAWLGLTPLQRSTGGKQKLGATSKMGERTLRRLLIIGSSAIVLQASKRGAPKGSWLEQMLARKPRMLVTVALANKMARIVWALLVKQENYRALVAAKA

SEQ ID NO: 214057 - protein, 381 aa, unidentified
MKIFVGIDIAKLNHFAAAISSDGEIILEPFKFTNDADGFQLLVSKLESFDKNSIIIGLESTAHYGDNLVRYLVAEFYQVCVLNPIKTCQMRKNNVRKTKTDKVDTFVIAKTLMMQDDLRFITFFDLDMMDLKALGRFRQKTIKQRTRLKIQLTTYVDQVFPEIQYFFKSGLHQNAVYALLKEAPSPKEIASMHMTHLANLLKVNSHGHFTKEQSKELRVLAQKSVGANDSAISIQITQTIQQIELLDSQLEKIEAEMTDIMKFNDSVIMTIPGIGYINGGMILGEIGDIHRFSNPNKLLAFAGLDPSVYQSGNFQAKTTRMSKRGSRVLRYALVNAAWNVVRNNATFKAYYDAKRAEGRSHYNAPWSLCRQACQSHLEDAH

SEQ ID NO: 214058 - protein, 395 aa, unidentified
MYSLWVGADVSKDFFSASGLGAEGKERFSGTYEMNSHGFSEFLKVLSTHGERLDQMIVAMESTGCYHINLFSFLSSQGIRTVVVNPLLISNFAKLSLRKTKTDKKDTLTIARFLLDHHEEISQLSLSQDHQDLRDLSRERESLCHLISATKVEIKRVLRTTFPELESIGNLYTGVMLRFLQQYPSARLVRGAKRKAIAKALRGPYVGDKLTFTAEDIVQAAQSSVAVVSPAKEIIVQGKIATLLHLQERLEELTKLLTDLCKATRVEDLKILQSIKGVGPNTAVPFLAEVGEVKNFTSSKKLIAYAGLDPSIHQSGKFMGASKLSKRGNRHLRRAIYLMTTSVVSQNIFFKAYFLRRKKEELPPQKALFAVAHKLIRVIFAMLSQRTCFKVKEAI

SEQ ID NO: 214059 - protein, 341 aa, unidentified
MYYIGLDIHKKTISYCVKDQGGQICVEGVIPATRADLDRWMGGLPQPWTAAMEATMFTGWIYDHLVPHAPVKVAHPLMLRAIAAAKKKNDRIDAGKLADCLRCDFLPECYMASSEIRERRRTLRYRNLLVRQTVQCKNKIAQMLMEAGVSYTKEKLHQRGYFHQLLANNKEIDESLRPLLRLSRENIVRLRRTEAALVRSLKRDPLLADRVKRLTSIPAVGPITALTWALELGDVKRFPSIKQVISYCGLCGAEVSSAGTTKRTPISKQRNRHLQTVLVEAAHMAPRLNPNMALLYEKEAQKGNRNRATLAVARKLVAYLLAVDRGERTFVTNQNHSSAAA

SEQ ID NO: 214060 - protein, 333 aa, unidentified
MRYLGVDLHTNSFTVCVRTQTGREQLKTFSLKGIGEFLSRLKRDDLVAVESTGNTGYFVEQISESVKKVVVVDPKKSTKKTDANDAKNLALFLSKDLLPEARMKTGLEKDLSKLVSTRATLVKHRTSLVNTIHNLMNAEGLKAKKETLTTRKGLQKALEAMKKEFVSVIIEKQIVVLIKQIEGLNEGIKELDQDISEKGKDLKGHKSLSSIKGIGDKAATTLLTVIGNVKDFDNEKKLAAYFGIVPRMRQSNDTTHYGRITKEGSKIGRTTLVQCTLVSIRYSPYLRNFYERIKHNRGSGKAIIATSRKLLNIIYTTLKNDWVFEDFANFVIA

SEQ ID NO: 214061 - protein, 413 aa, unidentified
MSEPIYDVFCGIDVGKTSHHAVALAPDGQRLCGTDLPQDESRIRCLLEDLALHGRVLVVVDQPRNIGALPVAVARECGVDIAYLPGLRMRRIADLYPGRSKTDARDAFVIADAARTLPDTLLRIDEQNDVVEGLRLLAGFDADLASEENRLVNRIRSVLLSVHPALERTIGRQMHRPVGPGLLAKFGGPEGFTAATRQTLDESARAFAPRLWKKITDEIVDALVQQSVTVPGADKADFVIRTLARHLLEVRRARAELAEQFETELGKHPDGPILMSLPGVGCRTAVTMLVEISSIDRFANAGHLAVYAGVAPRTHRSGTSIKGEHHRYGGNSRLKRAMYFSAFAALRDPLSRTYYDRKRSEGKNHRSALICLARRRSNVLYATLSNGSTYTPITQQAGPSDELTTRAGDRNAA

SEQ ID NO: 214062 - protein, 375 aa, unidentified
MLPPSWVLMPIPYMEFTPMVAQSTCLPAGQHACVGVDLHKDTMMNCTLIRGSGEISWRKISCKNREQVVEFFRALPRPHTVAIEAVGFYRWLWELLEPIVDQLVLADATQARAVAGRRLKTDREDAANVAELLAAGRLPLAYAPPLDVQILRDWTRQRNRLSRAHARALHGVKSILNSNNRPGPARLSAARLSGYLAAYQARLPERHVRMLWQHQRQLSLLEEEIGLCEREIVSHLQASQLAPVAELLQTAPGVGPVVAATVLAEIGDFTRFPDARAIGRYAGLTPRLFASGGKARHGAICKTGPSDLRWVLQQAAWTAIRCDERIKSQWFRMSRTAGRKGAAVAIARKLLVSLWHMACRNQPYQPLGGDRRQAA

SEQ ID NO: 214063 - protein, 307 aa, unidentified
MNKAVVYVGVDVSKAYLDVAWAERSRRFANNKSGLSALMKWIQQSAVHLICEASGGYERGLLEAAEQNAIKLSLVQANRVRQYARAAGILAKTDEVDARVLCAFGSALQPKALAPLSAQQKQLRELETHRRHYSRMLTAEQNRLAQLKDKELQRLTRRLLAALKKQMAAIEARIATLIAQDQALDEKAQKLTSIVGVGTRTAVLLLAQMPELGTLNRAQVAALAGLAPFNRDSGTLRGKRTIFGGRRALRSGLYMAALVAARRNRILRDFYQRLRTKGKPHKVALTAVMRKLLLALNQTLKPTPCFD

SEQ ID NO: 214064 - protein, 372 aa, unidentified
MEQPSRLFIGLDVSKLKISVAVADGERGGEVRFFGDIPSDPASVSSIVQKLAKRGAKLHFCYEAGPTGYELYRQLTAMGHDCVVVAPALIPRRSGDRVKTNRRDAVSLARLHRAGELTAVWVPDRGHEAMRDLVRAREAAHEAQKRARQQLQSFLLRHGRVYSGRSSWSLAHRRWISTLTFEHPAHFIVLQEYCQAIEDAEVRLKRLTDLIAETVRSWTMAPVVEAYQALRGVSLMAAVVFVAEIGDIRRFENPRQLMAFLGLVPSESSTGEHVKRGGITKAGNSRARRMLVEGAWAYRFPARVSRSKQAQLEGLSRAVREIAWKGQLRLCSRYRTMILSGKHKAIAITAIAREMAAFLWAIGQEVQPAHHA

SEQ ID NO: 214065 - protein, 347 aa, unidentified
MNFYTQQHKQYCGIDLHARAMYVCILDQSGTIRVHKNLPTTPEAFLRVIAPYRDDLVVGVECIFTWYWLADLCAKEGITFVLGHALYMKAIHGGKAKNDKIDAHKIAVLLRGGMLPQAYVYPAEMRATRDLLRRRCHLVRKRAELLAHIHNTNSQYNLPEIGKKLAYKAKREGVEEHFPDPSVRKTIEVDVSLIDHYDQLLGEVELYITRTAKTHDVQTFARLQSVPGIGQILALVILYEIQDIARFPRVQDFVSYCRLVKCAKESGGKRLGTSGKKIGNVHLRWAFAEAAVLFLRHNQPGKEYFAKLEHKHGKAKALTVLAHKLARAVYYMLTREQAFDLNRFVSA

SEQ ID NO: 214066 - protein, 391 aa, unidentified
MTDSNATLTKRHDAYLGLDVGKESHWGFLVDRDGEVLMSRRVTNTEAALDAALAACPADTLVVVDQHRNIGALAVRRARLAGMPVAYLPGSAEHELAKSFPGIAKTDARDAQVIARSALGMPQTLRPVPEEDPALAGVRIMSAQVATVVKDRTACANALHSRLLESCPAFELSCEMCEPWCAGLLSELGGPWNMLDAGRRRFLSCARRNGAPRGKADALWSSIGGERPPESAVRAEEGYVRMLASRIVADNEAEERLKADIDAELSGCETYRNLLTVPGVGPKTAAQLVASVNIENFESHDKLASYCGLTPATQQSGKSINYDRPHKGGNKTLKNLLMFSCNSLARSKSPLGAYFRKCLERMDYKHALKAVARKRIKVIFAVMRDGVPYAA

SEQ ID NO: 214067 - protein, 430 aa, unidentified
MQEKQTDVTKELNYAAFIGLDWSDKKHDVYLHVCATGEEESKVIASTPEALDEWILQLRERFESRPVAICLEQARGVLVYMLMAHDFITLYPINPAMSAKYRQAFTPSHAKDDPTDARIMMELLLHHRDRLSAWKPDNVQTRMLARLCEERRAAVNLRTKLVQKLNAKLKMYYPQALTLVGENLSSTLACDFLQKWPSLAEVKKAKPAKVRAFYYGHNCRSESLIQERIKLATTAKAATTDEAILIPLVASVKMLARLIRDLDPAIKDFDEQIKVLFAQHPDAAIFGNLPGAGDALAPRLLVSFGSDRDRYSSAAEVQQFSGIAPVTERSGQRQWVHRRWQCSKFTLQSFHEFAQHSMGWSVWAKAYYQFYKSKGKKHNTIVRSLAFKWIRIIFACWKEHRPYDEARYLETLQRRGSPLCQHLDLPALVA

SEQ ID NO: 214068 - protein, 416 aa, unidentified
MKREQKTREVRYIGLDVHKHYITVGGMNTEQEIVLRARDVEMERFQRWAQENLRETDEVVLEATTNTWEVYDSIVPLVRRVVVAHPAEVKQIANSRVKTDNQDVIRLLRLLIADLVPEVWVPPLEVRELRAMISYRWRLVKMSTAIQNRMHSLLHRHNLQAPDGKIDTGENREWWEKLKLSELETLRLKQELKTLRLVREHIVEVEAELGRLSTSERWGDQAVYLMQIPGVGIIVTMTILSAIGDIQRFESPRKLVGYAGLGAGVHDSGQKHREKGITKFGRKELRWALVEASWQAVRSNPRWRAQYDELSKRKHPNQAIVAIARKLLVTVWYLLNKHESYNGSSDEDLAYKMLTWAWHMDKRALNGMTNQQFAKYGLIRLGRGEDLTRIVKGGLPRRIAPKEEVLALKPNLQRPL

SEQ ID NO: 214069 - protein, 454 aa, unidentified
MRKPRVIPDEDHEVVYERVAAVDVAKASGVVCMRLPDPARPGRYSNQIWDNVPAARARITELGRELLRHQVQMVTLESTSDYWRIWYYVLESIGLAVQLVSASQARNLKGRPKTDKLDAMWLARLTQWGMLRPSFVPPAAIRQVRDFTRARTDLVHERTRVLQRLEKLLEDAMVKITSVVSDGMKAKSAVAMVAALVAGERDPRAIADLAKGSLRGKRDALAEALDGMFDSHHGVIAQALLDQVAFLDQRITQMEAGAIAALAQVTESWGVDADGETGPGRGTGPDSRVLAAVYRLAEIPGVSVWLAIVIIAEIGLNMALFPTPAHLVSWMGLCRSAAQSGTRRGKGKPKKGNSYARAAAGQAAIGAAGTATFLGERYARIARRRGGAIAQVAVARSIMIIVWHLLADPAARYRDLGPDWHAAHVNRDKKIRNHIRGLQALGLTVAVTDGEHAA

SEQ ID NO: 214070 - protein, 343 aa, unidentified
MYFIGIDVSTKESALCILDSNGKIVRETKLPSDPEIIARFIADTGLAIERIGLETGCTAAWLFAGLQRYGWPVICIDARHAAAALQAGFRNKNDRNDARGIADLMRVNKYRPVWVKSPEAQRQGRLLTARATLQSQLVALENTIRGLLRQEGIGLTDRRTAFEAAVREVIAEDRLLHAALHPLLETRNAVLCQRAALDRQILLIVRADPVCRLLMTAPGVGALVALTFKVAVDDPGRFSRSRNVGAHFGLTPREHSSGELRYQGRISKMGDHEVRRLLYVAASRMLRRDAALWCPLKAWAVRLAQRVGIRRARVALARKLAVVLHAMWSDGQVFQWRRTEASA

SEQ ID NO: 214071 - protein, 343 aa, unidentified
MSMVRVTGGVDTHADVHVAAAVDHNGGVLGIEAFPADPGGFEDLAGWLASYGEIDRIGVEGTGSWGVGLSRFLTEIGIETVEVDRPNRQTRRKQGKSDPTDAVAAARAALSGSASVTPKSRNGPVEQMRVLLVARRSARQQRIQTLNQLRHLVFTAPEPIRARFKDRYKTGLVTEAASMRPRKGSDPIAFTTNTVIRDLARRIKALNAEMASIDKTLAELIGGTAPSLLELHGVGIDTAASLLVTAGDNPERLRSEASWAHLCGVTPIPASSGKVTRYRLNRGGDRQANAALYRIVLTRMSSDDETRRYVTRRRAEGRSTAEIMRCLKRYVARQTYRHLPAAS

SEQ ID NO: 214072 - protein, 320 aa, unidentified
MSQIVIGVDIAKKKFDVASLSDGKYKHKTFTNNEQGFANFVSWLLTLFSNDKPLVCMEATGAYSIPLADFMVSQGYPVSVVNPAKIKAFAKSELSRAKTDKADAKLIARYAFTMHPPLWTPPPQNIRVLQALVRRVEHLLEMIQMERNRLDTANANITDSITTVLATLETELEATRKAIHDHIDNDPELKRRHDLLITIPGIGEASIAHLLVVLSDHHGFLTAKQAVAFAGLAPALRQSGQWTGKTHLAKSGDPALRKALYMPALVAWRHNPLLRIFCQRLKANGKNGKAIACAAMRKLIHLSFAILKSGEPFDPLFAAK

SEQ ID NO: 214073 - protein, 379 aa, unidentified
MTMATDTRDVCCAALELSKTGWVCAFAAPGAGRAAVYKMKAGDTERLLGVLNNGKTKAERELGRPVDVVLCHEVGYDGFWLARLLIARGVRVVVFDPASFLMPRRGRRAKTDRLDAEGMTRTLRAWLGGNHEAAREVQIPSVEQEDAKRIERERKTLVEERTSLVGRIKGLLALHGIWLAGKRIGQGLRAQLGALKTGDGRRLGPFLRGEIERLLMRYDILCQQITEVETQRKAALNGAAGQFPNANKVRVLSTLGGVGETTATVLVAEVYHRTFATRRHLASFLGLSPSPYSSGDVERDQGINKAGNKLARQTLVELAWFWLRYQPDSKLSLWWRERFGAKGARARKIGIVALARKLAIALWRFVEAGVVPDGATLKA

SEQ ID NO: 214074 - protein, 347 aa, unidentified
MLHAGLDLSRKRLDFCLLDELGGRVEVGVAPPDGDGLAGLVRRVGERHGQPVRAAIESMNGARFVHDRLERLGWEVEIADAARVKGLAPLACKTDRIDAWVLAELSRRELVPAIWLPRFELRQERERARWRLFLVGKRSSLKHRVHAQLLAFGHPCPVSDLFGVRGRELLDRLEFPEPWRGNVLAAVRMIDELDEEIGGIEKELRALGADHGYVPLLMTVPGIAWVLGYTIASEIGDISRFASATKLTGYTGLCPRVYQSGGTDRRGPLTHAGPRYLRWALMEAATHACRHELYRDRYQQTKRRLGKQRGAKVAQVELARKLSQAIWYMLTRNQPFAPVGATPALAA

SEQ ID NO: 214075 - protein, 387 aa, unidentified
MTVRTVSNPPAATHGETVRCLFAIELSKQSWVIGFITPLSTRIRRRILSGGDWKGLLELIEEVRARVSREMGRPVEVMSCYEAGYDGFWLHRQLEAHGVRNYVIDPASLQVDRRLRRVKTDRIDTERLLRSLMAYLRGEPKVWSVVRIPSVAEEDARRLHRERDRLICERVQHVNRIKGLCALQGIYDFHPLRPQAMPRLEQLRTAQGGALPPRLKSEIKRELHRLALVVEMIATLEAERDAIVEDEASTHVNAEKIQALHKLKAIGPEFAAVLVGEIFHRDFNNRRQLASYVGYAPSPFQSGNVAHDQGISKAGNRKGRTTGIELAWLWLRYQPDSDLSVWFRARVGTVKGRIRRIAIVALARKLLVALWRYLETGLVPRGAVLKG

SEQ ID NO: 214076 - protein, 424 aa, unidentified
MAGPSTGFTCENERMARVTAADVVWVGIDAGKSSHHAAAVGAGGKRLWSVKVANGQQPIEELIGRAAKSAGDGEVRWAVDLVSPAAALLLAILLASGQKVVYVPGRVVHGMAQVFRGEGKTDAKDARVIADTARMRGDLAELTAADELVVELTRLTSYRADVMADWVRGVNRLRDLLTSIFPALEASFDYSTRSALILLTGYCTPGGIRQAGPGAVAAYLREHGAWAKGIDTMAATAARAAEQQTVALPGEATTALLVKKLARQLLDLDREIKDTDKLLTSRFRDHPQARIIESLPGMGPILGAQFLVATDGRALQAFASPGRLASYAGLVPVPKDSGRVAGNYHRPRRYHRPLRNVFFMMALSSLRTEGPSKAFYQRKRDENKIHTQALLALARRLVDVLWALLRDNRAYSPIPPSQVTAIAA

SEQ ID NO: 214077 - protein, 359 aa, unidentified
MNTIVALTHSFVIGVDTHAKTHTYAVLASNGEHLGTEAFPNTHAGRARAINWAGRRTGGDLGALWVIEGAGSYGAQIARQTARAGYQVVEAARMGRAGRRGIGKSDPIDARRIAAAVLPLPEEQLRTPRMDEGVRAAAQILLTSRDELTSERTRAVNALTALVRIADLGIDARRPLGARQIGEIARWRPREEDLAATTARTEAVRLAKRILALDTEIADNMNRIGELVDASPAASLPEETGIGPVTAATVLVAWSHPGRVRDEAAFAALAGVSPIPASSGNTTRHRLNRGGDRRLNRALNVIAMVRMVHHPQTRAYVDRRRTEGKTDREIRRCLKRYLARRLYRHLNNAAAAELGVDGT

SEQ ID NO: 214078 - protein, 350 aa, unidentified
MELHTIGIDLGKTVFHLVGLNLCGEVVVRKKFSRKQLLHFTANLQVKLIGMEACGGSHFLGRALREQGHEVRLMPAQYVKPYVKTNKSDYIDAEAIAEAVGRPKMRFVPIKTDDQLDLQSLHRVRERWVMRRTAVINQIRGLLLERGITLRQGRGHVDAALPGILEDASALLSGALRLLLAQLKLELDHLQMRIDEADAMIKKAAGENEACRRLVAIPGIGPVTATAIIAAIGNGAAFKKGRGFSAWLGIVPGEYTTGGKQKLLGISKRGNSYLRRLFMQGARAVLQQSAKQSYGLRAWLAQLTARTHSNVAAVALANKLARMAWAVLAKNEHYRPPMLVGAATAGLACR

SEQ ID NO: 214079 - protein, 339 aa, unidentified
MWYSGIDQHKQFCVITTYGAEGLRVKQARVASTALALQQYVAEFPGPHKAVVESTGGWYWLADTLAAVGVELVLAHATRLKAIAAAKVKTDQVDSDTLALLLRADLIPVAHMIAPAQRGPRDLMRTRLRLVEKSVSAQNSIDRLLEKFNVATVAELAEDYQLQARCHTAQLQLLEEQIATLERALHPYLLPHDDVQRLLWIPGLGKVNAFTIYTEIDGITRFPSARQFFSYSRLVPGAANSGGRTRHRSGSKAGNRYLKLAFSHAGIRAVQYYPEIRAFFKGKARKKPIRIARTLVALELARIVYHVLSTHEDFNGQFKGRVLGHRKHAQWPRRASPPA

SEQ ID NO: 214080 - protein, 331 aa, unidentified
MKNFSIIGIDVSKLVLDVFILPSKYHFQVENAPAGFAQLLEISCTRLNVSRDQLYFCFENTGRYSRMLAVFLEQSGIVFSQIPALDIKASKGISRGKTDKADAKDIALYGWRKKDELKPTKLNSAETSELRQLISLRDKLIKHRTAYKNSIKDIQDCYFEGETKFIRDTHKKMIEHLNEQIKQVEIRMDTIINSMAEWEKNFILIQSVRGIGPVIARYLIIFTENFTRFPNYRKFACYAGIAPFEYASGNSIRGRTRVHPCANKQLKSLLNMAAMNAIQIPGEYKQYYQRRQKEGKNNMSTLNIIRNKLLARIFAVVKRQTPYVDLYKFAA

SEQ ID NO: 214081 - protein, 425 aa, unidentified
MKITRIAEKINLNQVMDISVDVHKDTLNFFFTSAGKEYTDLCSNRTDVIQRRIIKYKQIAKEHGMSNLRIVCEPTGQYQNSLLRTARRNGCLTCYVNAESVKKFRVVETNDTGKTDIKDPRVISTLAGLNKVIRHRMIGEDYLMLRKLGKIYDETDVEIVRLKGRLNKLMVELFCDYSFKKDFLYSNSGLALIKKYGCNPYRIVKSGFNRFGKTMRHAAPRIQGSTLKRLFEDAQSSVLNELPTGYIEVLQTRFYQLFGDYLNQQKRKEEIVEKMIGILDRLREKDPNIPPPTPGVISAKNIARLLGETGPISDFSSCRKLMRYFGLNIRMRQSGKYQGQNKITKKGRPLGRKVVDNIVLPLVKQGCLYGDYYHVKKEKEKRPGNKAMTIIMRNFLKKFYGWYKSGKAFDEKRFFDSKSLYLKAA

SEQ ID NO: 214082 - protein, 382 aa, unidentified
MPAYADPTPKPISADTIFLAFELSGTSWLVALHAPEADKVERHRLPAGVAAEVLGLIARTKARVTRRLGTTPRVACCYEAGRDGFWLHRVLEAEGIASHVMDPTSLQVDRRARRAKTDRLDAQALLRALMAWSRGERQVCSMVRPPSPEHEDERRLSRERGTLLKERLRLSNRIKGLCAAQGIYDYEPLGADRRERLARLVTGDGRALPGRLAAEIGRQLDCLELVLRHLAEVEAVRDARAAQARKEGGSKLAALLRLKGIGPEVATVLELEVFHRHFANRRDVAAYAGLAPSPYASGGTSREQGISKAGNRRARKALIELAWLWLRHQPESALARWYRDRVGTATGRVKRIAIVALARKLLVAIWRYVETGLVPAEAAVRT

SEQ ID NO: 214083 - protein, 352 aa, unidentified
MIVLGADTHKRSHTIAAVSAPAGELVGEQTVQVGAKGFAALVLWARELGSERVWALEDCRHVSGSFERFLIERGERVVRLTTKLMADSRRRARGRGKSDSIDAIAVARAALREGLDALPAAQLQGPELDLRLLVDHRERLVRQRVALNNTLQWHLHDLWPELQLPGSSLFYGTWGPRVARRLARAEQTMRVRIARDELRRIRELSHTITALEAEIAQLVAQIAPHLLAEPGLGPLTAAKLVGEIAGVGRFASDAKLARAAGVAPIPVSSGNTNRHRLDRGGNRQINATIHRIAVTRLRCHAETQDYIARKRAEGKSTKEAIRCLKRHLARRIWHLLQPPHPGQGTPPPPSIS

SEQ ID NO: 214084 - protein, 343 aa, unidentified
MEESRELVVGVDTHKDSHSAAFVDELGGVVASTDVGANQRGYAQLLEWARCWSRQRTWVVEGTGSYGAGLASFLARCGEVVYEGDRPQRRKRGAAGKSDRLDAIKVAREALARKHHALPRQRGNREAVRVLLSTREGVVTASRQALNQLYALVVTAPEPVRQRLIRLRGEHLVAACIRLRCTAGDVETKVTTRVLRQVARRIRTLQAEAADYEVQLEKLVLETVPTLLAEPGVGAITAAQLLVSWSHAGRIRNENAFAAMAGVAPVPASSGRVVRHRLNRQGDRRLNRALHVVAICRSSFHAPTKNYIARRTAEGKSTREIRRCLKRYLARRFFRLLQGLDNL

SEQ ID NO: 214085 - protein, 402 aa, unidentified
MRIETQPQDHPTAPGSEPGTVLVSFELSQSRWVLTVRAPGSTKLSRFTVPARDTEKVLSLLTTQRQQVERRTGRPVRIVSIYEAGLDGFWLHRWLETQGVESHVVDAASMLGPQRRRKPKTDRIDGEKLLRSLAAWLGGEAGVCSMVVPPSVAQEDIRRLSRERGELVAERTKLSNRVGGLLANQGIAGFKPLKKAAWQVLRTLRTGDGRELPPHLRTTIERILQRLELLSDQIKAAEAERDALLRAARVNAAPDRVPEAATAASPEMAAAPLLLRLRGIGPEFSTVLPLECLNREFDNRRQVAAFAGIAPTPWASGRTEREQGISKAGNRRLRAILIELAWSWQRHQPDSALTQWFHKRIKGQSGRVKRIAIVALARKLLIALWRYGKHGVVPQGAVLKAA

SEQ ID NO: 214086 - protein, 355 aa, unidentified
MTSTKYIGLDVHKESISIAVLNSAGKVVMECVIETKASTLLQFIHGLRGDVHLAFEEGTWAGWLYDLLKPHVTELVVCNPRKNALLKEGSKSDRIDAHKLAELLYMSKLSSVYHGEHGLRMLKELSRSYLTISKDLGRVMNRLKALYRSWAIPCAGTQVYAPHYRSEWLSKIREAGVRRRAELYYQQLDALRLVRQQARKELLAEARKHRATKLLRQIPGIGPLRAAHLVALMQTPHRFRTKRQLWTYSGLGLETHDSAQYRVVEGQLQRSKKPVTLRGLNDNHNHDLKDIFKGAAMRASTAVGPLHDFYEALLAKGRKPTMARLTLARKIAAITLIVWKKEVRFDANYLKQQAA

SEQ ID NO: 214087 - protein, 341 aa, unidentified
MGDFIGLDVSLKDTAVSIRRNGKRIWRGKCASDPQALAALIRKHAPDVERVVFETGPLSIWFYHALSAEGLPAVCIDARHAKAALDMAPNKTDANDADGLAHLAEVGFYRVVRVKGFDSMLTRTLVAARGQLLKTVVQLSNQIRGLMKTFGLVVPKGAGRVFDGHVRRLLADQPALARIMLPLLEAWRSLRTRAADLERQLLASSRGNAASVLLMSIPGVGAVTASSYVAAVEDPANFKSSRSVGAWLGLTTRRYQSGEVDYDGHISRRGDAHLRALLYEAATTILTRVHADSALRTWGLALRGKVGFKRATIAVARKLAVIMHSMLKSGQPFDRQASAAA

SEQ ID NO: 214088 - protein, 294 aa, unidentified
MSHDVKYIGMDVHKEAIVIAVQNESGKLVMESVIETKASSILQFLHGLRGELHVTWEEGTWAAWLYDLLQPQVQHIVVCNPRRNALLKEGSKSDKVDAGKLADLLRTGMLRPVYHGENGLRTLRELGRSYQTISKDLTRVMNRLKALYRGWGIPCAGTQVYAARAREEWLSKLPQAGVRRRADLLYQQLDGLQALRREVRPEFLAESRKHKAAKLLRQIPCIGPIRAARLIGLMQTPHRFRSKRQLWTYSGLGVETHDSAQYSFVRGQLQRSKKPQQVRGLNDPATLCCTSITL

SEQ ID NO: 214089 - protein, 323 aa, unidentified
MGNGSYSIGIDVSKAKLDVAVIGFGDRKAVLECQAENSHAACGELAARLAPYAGSVTVIEATAGYHYAPAFALRDAGFQVKVINPIITGKFVSSGIRKTKTDKADALLLARIGILEPGLADYTEDGRQIRLKQLSKAVAGLKGQHRSLEQKANHLRHLGGAGSAEVIRALGCVMRTVERETGKLARALVKLAAPEVETISSIAGVGEETAAVIAAELGDVARFAGKSQAVAFSGLDPTVRESGTSVRGRSRISKRGSGTLRHALFQGAWGLMMHNPHFRAFYERKRAEGKHYFAILCAMARKLLILVYTMLKNDTLYDPVKFA

SEQ ID NO: 214090 - protein, 418 aa, unidentified
MADVMIGIDPHKSSHTAVAIGAGEERLGELRVRACPSQASELLVWAREWPGRAWAIEGAAGLGCLLAQQLVAAGERVVDVPPKLAARVRLLQSGHTSKNDPNDAYSVAVAALRSKAWRPVVAEDHAVVLKIWAKRHRDLARARNQVCCRLHAVLCDLVPGGIRREISAGKAARILEQVTPSGPAAMARCELAAEFLADLRRLDAQLREANKKLAAAVRASGTSLTGLFGVGPVIAGTVIGDVRQVFRFLDRDHFASWNGTAPVEVSSGDRKKVYRLSLRGNRRVNHAIHMAAISQIRHKSSDGRAFYDKKVAEGKTHKEALRALKRRISDAIYAALVADAREATSCPKGPGGQPGNHSASRAAGSHPAHRHFGQATPGPATTIRPGATAGPAPSQPNAALHRQAAHAASASEKPRPTV

SEQ ID NO: 214091 - protein, 343 aa, unidentified
MKHHAGLDVSVKETSVCIVDEDGKVCREMKVPSHPEDLARALKDGVWCLERVGLEAGPLSQWLFSGLAEAGLPVVCIETRHAKAFLRAQVNKSDRNDARGIAQMMRVNLFRPVHVKTLTSQKRRALLTARKLLQEKAIAVDNDIRGLLRNFGLKVGPVGASKFEARIRELIEGERELAEIIESLLEARRKLRELFAVLHHKLLTIVRDDVVCRRLMTVPGIGPVVSMAFTATIDVPARFKSSKAVGAALGLAPVLNQSGESKRIGRISLCGDGMARTLLYEAAQVMLTRTTTWSWLKAWGMKVAARRGLQKGIVALARRLAVVLHRMWVNGTEFRWTREVPSI

SEQ ID NO: 214092 - protein, 343 aa, unidentified
MRHYAGLDVSVKETSVCIVDESGKVCRETKVPSHPEDLARALHDRAWCLERVGLEAGPLSQWLFSGLAATGLPVVCIETRHTKAFLQAQVNKSDRNDARGIAQMMRVNLFRPVHVKTLTSQKRRALLTARKLLQEKALAVDNDIRGLLRNFGLKVGPIGASRFETRTRELVDGMPELAEIIDPLLEARRKLRELFAVLHHKLLVIVRDDTVCRRLMTVPGIGPVVSMAFTATIDVPARFKSSKAVGAALGLTPILNQSGESKRLGRVSLCGDGMTRTLLYEAAQVMLTRTTKWSWLKAWAMKVAARRGIQKAIVALARRLAVILHRIWVSGTDFRWTREVQST

SEQ ID NO: 214093 - protein, 453 aa, unidentified
MAQRNRSVSLKPGKSRQALTLTHPNAAGIDIGSVSHFVAVPPDRDDEPVREFASFTVDLHRLADWLEACGIDTVAMESTGVYWIALFEVLDARGFTVLLVNARHVKNVSGRKSDVLDCQWLQQLMSYGLLRGAFRPADAVCVLRSYSRQREMLLCSQARHVQHMQKALVQMNIQLSTVISDVAGATGQRILRAILAGERNGRALAELRDARIQASADEIAKSLQGNWREEHLFALKQAVALFDFYATQLVECDEVIENQLIALAVHADTPMPGKKRSRARNEPRFDLRERLFQMCGVDLTRIDGINVTTALVVMSEIGMDMTRFETVKHFTSWLGLCPGTKITGGKLLSGKTKRSANRAAQALRLAAAALRTSKSALGAYFRRMCSRMDKPKAITAAAHKLARLIYTLLTKGQEYTDQGQDYFEERYRQRVLHNLTQRAAKMGLRVVPADAVA

SEQ ID NO: 214094 - protein, 350 aa, unidentified
MKRKHFIGLDVHCQFCELAVVSESGRQVHRQRCATTIPELVKAIEAVRSPRYVALEESALADWLWRNLAGHADEIMVCDPRRNYWISQAGDKDDPLDAEKLAQLLRGGYLKPVHHPESVERTIFKQHVALYYDRVRQRVRTANRIGAVLRQYGVFVKEADFATAEQRQGLLGHLPPSRLLHQNLQLLWHGYGVTAKQVDLMRRRLIKRARQEEVIRRFVAVPGVKWIRAATFFVYLDTPWRFHSKPALWKYMCLGLERRHSGNGPMRVQLVRQANRCLKQVMLGAARSAVAAGSNPFADQERRWLQHGIPAPESRRNTARSLGAVLWGMWKNGNAYHPEWVGKVNAVGTV

SEQ ID NO: 214095 - protein, 319 aa, unidentified
MTLAHPIAGIDISSTTLDVAVLHVDGSFKASSAANSKPAARKLARQLASSGVRLVVIEATGGYELIIMAALAGEDVPVARVNPRQVRHFAKGIGRLAKTDPIDARVLATFGERARPRVTTLPSAQEARLKALSLRRRQLVEARVAEKNHLGMILEKDIKAGVQRMIETLEEEIERIEDAIAQQIAACQPMRERRDLLESIPCIAAATSATVIAELPELGQRSTSVLKALVGVAPFNADSGGIKGERHIQGGRAPLRQALYMAAQTGYRCNPLLKPFYARLREKGKSHKQAIIACIGKLLSIMNAIIKTAQPFNAKFATA

SEQ ID NO: 214096 - protein, 325 aa, unidentified
MKNIIIGIDISKKTLDICIKENQLVKHLNIENKVPAIKRFLKAYTKENVLIAMENTGRYNWTLFEVLEPFKFRVYVISPLHLKKSIGITRGKNDKIDALRICNFIEKNHEETPQWSPSPQAIKQIKVLLTERALRIKMKKQLTGYQHDYKLMKSIKLDKHLLKLNEQLIKSIDAQIKGIEDNIEQIISDDQKLKQQYQLIKSVPGVGKVLAWVFLSKTDGFTSITNPRKMACYSGVVPFDFQSGTSIKKRPGVSMLADKTIKSTLHLGAMSAIRHSNDLQTYYQRKVEEGKNKMSVLNAVRNKIIHRVFAVIKNQRPYQKDLVLS

SEQ ID NO: 214097 - protein, 347 aa, unidentified
MQFYTKQHPFYCGIDLHARTMYLCILDQAGETLLHRNMTATPEALLKAIAPYRAQIVLAAECMFPWYWLADLCAEHSIPFVLGHALYMKAIHGGKAKNDKIDAHKIAVLLRGGMLPQAYVYPAAMRATRDLLRRRMPLARKRGELLAHVQNTNSQYNLPAIGKKIAYKANRDGVAERVADPAVQKSIEVDLALITYYDALLRDVELSIVNTAKHHDANTLYLLQTVPGIGKILSLVLLYEIHDIARFPRVQDFASYCRLVKCAKESAGKRSGTSGTKIGNAHLKWAFSEAAVLFLRDNPAGQKWLTRLEKKHSKGKALTILAHKLARAIYYMLKRQTVFDLETFLHA

SEQ ID NO: 214098 - protein, 344 aa, unidentified
MNYCGIDLGKKSSYFHIVDGERKTVTAGKFPNNVGAIRKVFANRERLKIVVEASCKAFWMADRLKELGHEVVVVDPGRTKAIGAARIKHDKLDARILAELCQTGLLAAVDIPTQEQRMARLPFTSRDTLVRSRTLMSNSVQSILDGEGVELPTRWTGGFSNVIRSAIPRMPPAMVPIVERLLRGIDELSKLIDECDKEVEQVAERDPDIKLLRTVPGVGPLCAAAFVHVIRDPGRFKSSRFVAAYLGLVPSLYESGQTSVKGGITKHGNCQLRCLLHICATALMRTKRDTALKRWAVGLSTRIGRKKAKSAIARKLATILWAMWRRRTPFEARLPVPQPAAQVA

SEQ ID NO: 214099 - protein, 392 aa, unidentified
MKIVHPICCGVDVHKKMIVATIATTDKSGVTHYTVETFSTLNHGLFSFRTWLTDHNCFDVCMESTGKYWIPVFNILEQGGIRVLLTHPMYVRAIKGKKTDKKDSKWIADLFKHDLVRSSFIPRQEIRALRELGRYRYKLVCMRSSERNRYQDCMTISNIGLASVLTDPFGKTATDIMKHVLSSEVFDVNHCEKLIYKSAKKKTELILESIRDCRIESDQRFKMNEVNSHMEYLDHSILRTEAELYTRMTPFMHIVEHLANQLPGISKLSASLIIAEIGDDMSIFESAKHLVSWAGLAPTNNQSAGKKKSVRISKAGQFLKPLLVQCALAAVKSKKEPYFAVKYQRIKKRRGHKKAIIAIARMMLTCIYHLIETGESFNPSDYEQTHKPTPRK

SEQ ID NO: 214100 - protein, 373 aa, unidentified
MPKYSTAFGMDVHLRSTTVCALDADTGEAVTRRFPGNPWGEIAGWMDGFPGPSLAAYESGYLGFAPQRELAGLGVECVVAAVSKIPRSAADSASKNDRNDAARMAKAILAHDISPVWVPSPEVEGIRDLAGAYDGATARLATAKQRLLAFLAKRGFAYGGTTPAGNPRKYWTYDFLRWLDKVRPEDDGGVRTLAALRNEVEAAAEARADLLSEYRAAADASPIAAEVAALQSIKGCAFALAAAFSAEVGDFTRFRSGRQVTAYFGLAPSQRSSGDSVRLGGISGAGNALVRKLAVEGSWCYAAARHQPKLMPRDTGVPLEIRMHGRKGSERLLRRREEMLARGMPQAKANAATAAELVRWLWALGMMCREGAE

SEQ ID NO: 214101 - protein, 348 aa, unidentified
MEMVGGLDLHRSQITFRTVDLRTGEVKRGKIYPGAREAVREWLERFEAGTDAHFALEGTTGWRFVAEEIQRRGFVAHLADPAELSTLRGPKRRAKTDHADCELMVNLLLEGRLPESWIPPAHILELRALVRLRKTLLDQRTEWQQRLQAQLFHQGVVAGLRLRAPQDRQRLTGEEMSPAGRQTMGTGLVMLDDFDAQLEPLSAQLVALARTQPGCRALEHELYGVGWLTAVAVVAELGDCRRFRSADQAVRSSGLDITVYESNGKRPGGHLARQGPQVLRWALFEAAQCAARKSSPDHDYYLKVRDRIDHNRACLSVARKLCRRACHILRDLGDAAMAPPASQEPKAA

SEQ ID NO: 214102 - protein, 340 aa, unidentified
MQQLLKHKDMKYKEVVGIDVSKLTIDAHHHQSNVHARFDNNSKGFRKLSTWMKKYSVGSVNELLVCFEVTGLYSLNLASFLSQKSIDYVMENAIQIKRSMGLTRGKADKVDAKRIAEYAYMRKDALKLTVLPTSEIIKLQNLLALRERMIKQKAGYQASLGEYKRVFIQKHEKDFFQMLNSLIVALKKQIQKAEKALLEIIESISTLKKQYDLLTSITGIGIILASNILVTTVCFNKFDNSRKYACYCGTAPFEYSSGTSIRGRTKVSQMANKKMKALFNLAARSAIQHDPELKLYFRKRMDNGANGMSTINIIRNKIIHRVFAVIKRGTPYVTLTHNGI

SEQ ID NO: 214103 - protein, 356 aa, unidentified
MKNTMKYVGLDVHPSTVSVAVLDAEGKLILQSILATHAAAILDFVHGVRGSLQVTFEEGTQSAWLYDLLVRHVAKVVVCNPRKNALLKAGNKSDQIDARKLAELLRAGLLSPVYHGENSYRILQELVRSYTTLTEDTTRIMARLKALYRSHAVVCGGKKPYGKRHRQEWLQQVRQPGLASRAQRLYDQLDAVQTLRRAAKHEMLAESQKSGAYRLLASIPYLGPVRASILMARAQVPNRFRSKRQFWAYCGLALETRSSAEYHVVQGQVQRSRKPVFIRGLNLNHNHDLKNVFKGAATAASIHDGPLRQFYDRLLAKGMKPELARVTLARKIAAMALILWKKGESFDPKYLMLPAA

SEQ ID NO: 214104 - protein, 455 aa, unidentified
MPKKTTSDRPELKTVNVSAAAIDIGSKMHMAAVNPACTEVPVRSFSTFTQDLHELADWFTACGVTSVAMESTGVYWIPVYEILEQRGFEVILVNARYAKNVPGRKTDVSDAAWLRQLHSYGLLRGSFRPDAEIATLRAYLRQRERLVEYAAAHIQHMQKALMEMNLQLHHVVTDITGATGMRIIRAIVAGERNPDVLATYRDVRCHSSTETIHAALVGNDRHEHVFALTQSLELYDVYQAKMLDCDRKLEVLIAALNNKGEKPVGKLSKPRIKTKQVNAPTFDVRTALYGVLGVDLTEIHGLGPSLALKLVGECGTDLRAWPSAKHFTSWLCLAPGNKVTGGKVLSSRTRRSSSRAAALLRLAATTVGWSDTALGAFYRRLSARAGKSKAVTATARKIAVLFYNTLRHGMSYRDPGAEHYEQQYRSRVLANLQRRAKSLGFVLQAIPGNANPAVS

SEQ ID NO: 214105 - protein, 325 aa, unidentified
MYVGLDLHKSYSEFAVMDVAGNLLRQVRVENDLEKMREFSESIPAKSSLVIESSSTWYWAHRLLSERHNVTLSNPIKNKAIASAKVKTDKIDSVMLATLLRGGFVAECYVPSNGTIDLRELVRFRANLVRERTKMKNQIHAYLLQNNISIGASPFSKGFVEELKKVENPRVQAYLRLVESLDREIREASTTIREKAKSDPDAILLMSIPGISFFSALLIVSEISEIGRFEDSSSLVGYSGLAPSTHSSGGKTYYGPIMKSGSKYLRWLMGQCARAHMRAEPDGTVATFYARIKRKKGDQKAIVAASAKLLKIVYWVLKEKRAYHS

SEQ ID NO: 214106 - protein, 503 aa, unidentified
MTSRGRFVAMKKPTHQSSQSIYRNQNATIRAIFDGASSPRKVLCVALDYAKAKHVALCCDGNGDILKRPFPVDNTADGVSYLCEQIDATARRRQIARRGIFFGGEDEPSYVANFATALRGRGYVVARVNAWEAKENRENFLASTDNLDLLGIAKTLLSRRARLTGNGGEEGSDSYREIRDLLRARRGLVRAQTSASNRIHALADQLFPGFLDSSKSGVTPFTEASLELMRERFSAPQVARRQQPALAKFLRGHHSRQAEETAGKILALARGALPPEAGRVPAMQKTLTATADLYACLRRNSNNLRTDAALALAGTPYAMLTSIPGIGFILAAGIAGELGSPKKLPCTDSLCAYSGIVPRVSQSGGPDMPAQHGPTGPRCNRILKDWVVQSAQKIALYGPPELKERMAKWQANGQHAAFAGARRYLRLLRTLVISEVPYIEPTGRGPAVAPEARATACKQTWKVLVAKWRTIPGWREAAFAEDRPLGFWRRVAMEMHGIDLRLE

SEQ ID NO: 214107 - protein, 316 aa, unidentified
MSYIHFIGIDVSKEWFDVAVHGAKAAKPQRFQNCGEGFAAFASCFAKLLPHALVVLESTGGYEIELIAALLRDGVSVHRADPRAASYFIRSLGKRGKTDQLDALALARYGAERHASLRLCRVCEASQEELQALLSRRADLVAMRVAEQNRRQHPRYDRFASLKGSLNTMLAVLNAELAELESQITALIEQSPAMTAKYDIMTGVKGIGKQTAFSLLASMPELGTLTRRQAASLAGCAPHPRDSGKTQGYRATRGGRGGVKRSLFMAAMAARRFNLDLRLFYERLIGNGKKPMVAITAIMRKLIVILNAKLRDYAHA

SEQ ID NO: 214108 - protein, 323 aa, unidentified
MKPQPSENSKGVWVGIDVAKRSCDAARDNSPVSRTFECSRSGLQELVRWLKTAAVAGVVLEATGGYERPVVEVLHRAGMPVSVVNPRQVRDFAKASGQLAKTDVLDARVLARYGKVFEPAAQGPVSPENQRLSALLLRREQLVKMKVAEQARLESLTDKTVRKWIKAHIRTLEKAIKRAMKEVQELMSTPALETASQRLQSVPAVGPIVSSTLIAELPELGRLTRREIAALVGVAPLNRDSGQHRGHRRIWGGRSRVRRLLYMSVVVGIRHNPVISAQYQHLLDAGKAKKVAITACMRKLLVILNAMLRDNKDWSPPQITQRN

SEQ ID NO: 214109 - protein, 349 aa, unidentified
MEEVSIIGLDIAKSVFHAHGADASGRMIFSRRLTRAKLLKFFADQPSCVVALEACGGAHHWAREITAIGHEVKLIPPAYVKPFVKRSKSDAIDAEAICEAAQRPSMRYAAIKTEQQQAAGMVFRTRDLLVRQRTQLINAIRGHLGEFGWVAPKGPSHVTALVGQLDESEELGASLPEAARAMFVAMAEQLEQLSKQVALLDKEIAKRAREDASARQLMTIPGVGPITATAILALAPPPENFAKGRDFAAWLGLTPRQHSTGGKERLGSISKMGERTLRRLLIIGSSAVVLHASKRGAAKGSWLEQMLERKPRMLVTVALANKTARIIWAVLMKNEDYKQDYKAPVAAAA

SEQ ID NO: 214110 - protein, 339 aa, unidentified
MNVVIGVDPHKASHTAVAIDEAENEVSSVKVRATRRQVEQLVRWAEPFEKRRWAIESAGGTGYLLAQQLVAQGEEVLDVPATLAARIRVLATSRSNKNDPNDAHSIAVAAFRAPSLRSVEAADHSQVLRILAKRNVDLGSHRTRVVCRLHALLAELAPGGIAKELYASDAERSLANITTQTPAEQVRHDMAFELLDDVRRLDDQTKASHRRIRLAIKASGTSLTEIYGVGPIVAAQLIGYAGDVRRFSNRDAFASYNGTAPVEFASGGRVVHRVSQRGNRRLNHALHMGAVTQIRNPGTEGRIYFDRKLAEGKTKKEALRALKRQISNAVYRQLLFDAR

SEQ ID NO: 214111 - protein, 453 aa, unidentified
MAKKAKKMHTKKGVELKIVNPNAAGIDIADTEMQVCVPSDRDGENNRRFGSFTRDLDEICGWLKACDIDTAAMEATGIYWIPLFFKLKGSGIDVILVNAHEVKNISEKKTDEADAEWLMLLHTYGLLKASYQPDNEARQVRNLARHRGNLLKASAKEVQHMQKAMEQMNIKLSNVLSDIVGKSGKAIVEAILSGNHDPESLAGLADGRCKRSKEDIALSLEGTWEDDHLFELKQPYELYQYLQRQVEECDHKIEAMLMSYAAIVETDMAGFEKCGKAVCKKNAVAFDVERYGYAIWGINPMTIPGMSVSSVLQLIGELGHNFVDKFDTSEKFCKWCNIVPNNRISGGKLLSSRVPKRKNPVGQVFRLCANALKDAKNPMGFYFRRIKSRGGHMQAIVATAHKIAKIFYVMVKNKCAFDETKVGLDEKELLTMKIKRTQRALDRLNAKLYATVC

SEQ ID NO: 214112 - protein, 321 aa, unidentified
MDAPEHAAAAAIVVGIDVSKAALDVALRPGRDAWRCANDEAGIAELLDQLRPLGPSLIVLEATGGLERLVVAALALAGLPVAVVNPRQVRDFAKATGQLAKTDALDAAVLAHFAEAIRPEPRPLPDAQSQALEALVERRRQVVGMLTAERNRLQQALPPVRPKVAEHIAWLEQALKELDRELDQRLRASPVWRERDQLLRSVPGVGPTVSRTVLAHLPELGQGSVKHIATLVGLAPLNRDSGAWRGTRAIWGGRRQVRAALYMAALVGVRHNPVLRAFYGQLIARGKPKKVALTACMHKLLIILHAVLRDRTPWQPTPLAT

SEQ ID NO: 214113 - protein, 414 aa, unidentified
MTKILYVGLDVHKESIVVATAAQGDTEVELYGQIGGTLEALDKLIKKLAKPGIELRFVYEAGPCGYVIYRHLVKGRYHCEVIAPSLIPTKASDRVKTDRRDARQLARLFRAGELTAIYVPDEEDEAVRDLVRARERAVSDQRKGRQRLKGFLLPLGHRDKGQADWSAAHLRYLATIKLSHAAQQIAFQEYLEAITVATERLARLTHAVEAALPGWKREPIVRALMSLRGVALINGMTLVAEAGDLTRFESPTQLMSYFGLTPSEYSSGEKRQQGGITKAGNGACRRALVEAAHQYRIAPRVSPAMQKRQEGQSQEVRAIAWKAQQRLHERYQVLSGRHKKVVVIMAALARELCGFVWAIACQVSAPHKVKMRVKITPQEVPAPAPKTAAARPTSRKSASTKRAYQLDAKKKFKK

SEQ ID NO: 214114 - protein, 352 aa, unidentified
MDRYVGLDVHAESCSMGVLGPSGKRLKSMVVETNGQALLEAMRSIPGRIHLCLEEGTQSAWLHELLSPHVEELVVVMPGESKGAKDDLRDAWMRAEELRTGTIETRVYKAPQHLAALRNAVRAYGFAVRDVVRAKNRLKSAFLSRGITTDAGIYDPERRRKQLQKLSLPHRQLADWLGRQLDKLVPLRDEAEEWLLKESKTHPIIRTLATAPGMGPIRTAQLVAIAANPERFRTRRQFWSYSGLSIVTRSSADWVRGKDKGWERSQVQQTRGLTRKRHPLLKSVFKGAATTVIAQLSDHPLHKDYERMLEAGIKPNLAKLTLARRIAATVLSMWKHKEAYDPERHQGVTDKA

SEQ ID NO: 214115 - protein, 369 aa, unidentified
MGDRITYVGLDVHKDGIVVALAEDGLRGEIRDYGRIANTPAALQRLVRKVGKEGVELRFCYEAGPCGYGIQRQLSASGYDCVVVAPSLIPKRPGDRIKTDRRDAAGLAKLHRADELTAVWVPDPGHEAMRDLVRARLDAVRALRRARQQLSGFLLRQGCHYGRPAWTKLHRRWLAGLKFEQAVHHIVLEDYIATVEAAQVRRDRLTAQIEAMLPDWTLAPVVAALQTMRGMALVNAATLIAELGDLARFANPRQLMAYLGLVPCEHSSGASVRRGGLTKAGNSAARRLLIEAAWCYRFPARLSRELLLRQEAQPKPIREIAWKAQLRLCARYRKLARAGKPANVVTAAIARELLGFVWAIARQVPPAAG

SEQ ID NO: 214116 - protein, 326 aa, unidentified
MYFLGIDVSKNKLDCSLILDVSTNKRRAKSINNSPAGISELLTWCVKHQVAVQEIHAVMEGTGVYHETAALALTDAGVTVSIVNPAQVKDFGRGLGVRTKTDGVDSFVLARFGALLNPKPWIPPAKEARTLQALLSRREAISQDLQRERNRLEKADATDTPQLIRQSIVDSIAFMENQLTKLQQDIDDHINNHPQLKADRELMISIPAVGPQVSNHLLAVMHNHQFQSAEQLAAYLGLVPVERQSGTSIKGRPRLSKAGPAHIRAILYMAAIVGIRHNPHIKALYQRLQERGKTKMSSLGAAMRKLVHLCFGVLKTRKPYQANYAI

SEQ ID NO: 214117 - protein, 389 aa, unidentified
MWFCGIDVAKHKHVALVVDEKGVVVKSAFAFTNDRDGFDALLAVLASLGGSVSIAMEATGHYWLALYDELTRQAYPVSVLNPLQIAAYRRSGIRKVKSDTVDAFWIADYARIATPAATAQDIPTLLQLRELSRFRFGLTEQIGDLKRQILTILDRVFPEYEALFSTVFLKSSRELLKEAVTADEIASFDLEELSQLLQTSSRGRFGTEKAMALQAAAQRSVGVSFLADAIRIKMRCLLEQIELLEQHRMQLDAELAALMVQLPQHITSIPGIGPVTGAAILAEIGDVQRFERVEQLVAYAGIDPSVYQSGQFQATQAHMSKRGSPYLRHALWLAAGMAIQHDTELRAYYQAKRAAGKAHGIVLGAICRKLLARVYIVLKEQRPYVIREC

SEQ ID NO: 214118 - protein, 314 aa, unidentified
MRVSKSIVGVDVAKAELVIYLADPDLLTSITNEKPAIKRWLKTLPGPTAIAVEATNIYHVDLVELAYESGHDVYIIDGFQLSNYRKGVGGRSKTDASDARLLGRFLKNEGEDLRPWTPPPAVYGKLQSLLRRRASLIQAKTSLTQSWANDTSLKAVFATFVKSIDRLDLLVQKKLKEVLREAGLLEEVARCQAIEGIGFLTATALVMAYNRGDFTSGDSYIAFLGMDLRVSDSGQKNGRRYLTKRGCSEVRRLLHNAAMSACRSNAWKEFYNHHLNCGKATTQVLVMLSRKLARIAFALMKNQSEYQPKGAVIA

SEQ ID NO: 214119 - protein, 338 aa, unidentified
MKLYGAIDLHSNNAVCGLIDTQDKVKMRRKTRCELDEVLDAFGPFKKDVCGIAVESTFNWYWLVDGLMDAGYRVHLVNTCAVKQYKGLKHTDDDTDTFWLAHLLRLGILPTGHIYAKETRSLRDLLRKRSQLVHLRTTNILSIHNLYSRNTGARLATNAVKHLTRERLEQRFGDENLVLAIDSNRRIVQALDEQIGVLEQAVLAQAELDPRYRYLLSVEGVGKILALTIMLETGDIARFEKVGNFTSYCRCVDSTRWSNGKKKGKGNTKNGNRFLSWAFVEAANFAVRYHERAKRYYQRKMAATKRVVAIKALAHKLARASYTVMRDQVPFDPNKMYG

SEQ ID NO: 214120 - protein, 339 aa, unidentified
MTRYIGIDLHTNNLTACYYDGKDYKFSTYETNTLGLSDFISTLRKTDLLAVESTGNSNYFYKNVIKSVKEIKVVSPGQFNVIRTSVKKTDKNDAKALAFYLSKDMLPESRVKTDAQLQVSRISSSREQLVKTRTSLINKLHGIFNSLGYKLKKETLTTKKGLNSLLEYNLDDLTMIEVKIFKSQVEHLNQGIKEIDVLLCQAGQKLDGFESIKSIKGIGEKSASILLSHIGDVNDFSSADKLASYFGIVPRVSNSNETEKTGRITKRGNKLARTTLVQCTLIAIRYSSYLGDFYRKIKQKKSAGKAIIATARKFLKTIYLTIKNNWIFEDFGIYKIKSV

SEQ ID NO: 214121 - protein, 389 aa, unidentified
MYLIAFDISKYKHDCVIMNEFGNVTTPWFTFNNDYEGFMLFKSVYDSLDHTQVIRIGLEATGHYGNNLKHFLTSIGLSYMEFNPILTDSFRKATSVRKRKTDKVDVEVIANMLRSFDYKETPPNDDFYQTLKDLTRYRTKISKQTAVEKTRLINILDKLFPEFTKILDPFSVTGTYVLTNYPNPKSILNADLKELFEILYKSSKHHFKLDRFQALIISAANTVGNYSSSYEFLLNETIENINTLTNQQKRVEKEITRLLEPINSPLLRIKGLGINTAAILIAEFQNFENFNYSKQVISFAGLDTSIKQSGTMNVIGKMTKRGSKYIRRAIIFTMMPLMNSQPKFKEYYQKKRKEGKKKTCAQTHLAKKFLRIIFHLVKNNLEFDPLLVK

SEQ ID NO: 214122 - protein, 356 aa, unidentified
MAPIYIGVDFHARQQTICYLKTETGELVISELKHQNKEQVRAFYQQFQEPVIVGLEASGYSPWFEALLEQLGCEVWLGHATEIRRRARWRQKNDRRDAELIWDLMVHDEFPRLHQPALSSREVLRMLRYRQKLIKLRTMTKNSLQAIALQAGLAKGPQLFTAAGQEQFKAAEMSPVLQWQRDHWFELLKPFNQQLLETVVWFKAQSKDDVQIQRLLTHPGIGLLTALGILHTLQPVSRFRNARKVAAYVGFDPVERSSAERQHFLGISKAGSRMLRYLLVEAVQTAVRHDEDLKRFYKRLAERRGRPKAKVAAARKLLIRAYIMLRDEIDYAEFRRRAVAARLARHGQGPTKCPRY

SEQ ID NO: 214123 - protein, 347 aa, unidentified
MNFYNNIHPYYCGIDLHARSLYVCIIDQDGNTCVHKEISADPNKLAILLEPYIGNIVVGVECMHCWYWVADFCEDLGVDFILGHALYMKAIHGGKAKNDRIDSFKIANLIRGGNFPLAYVYPKEMRATRDLLRRRMKIVRHGADLKAHVVNTTSQYNLPPNKVNLKNVSAREQLKSTFPERSVQKNIDLDMIILDCYAEQLSKVEWYIETQARQHKPIHLHLLKSISGIGRILSLTIIYEIGNIDRFESVQKFASYARLVKCKAESAGKSYGTQGNKIGNAHLKWAFSEAAVLYLRGNKNAQNYLLKLQKRMSKAKALSALAHKLGRCVYFMLKNETVFDENKFLKS

SEQ ID NO: 214124 - protein, 307 aa, unidentified
MYVGIDVAKDRLDVHVRPSGEAFAVARDGEGLAQLTARLDALAPRLVVLEATGGFEVTVAAALAAARLPLAVVNPRQIRDFARATGKLAKTDALDAAAIAHFAEAVRPEPRPVADQQARALGELVARRRQVVEMIVAENHRRRQLTQRRLLRRLDRHLTVLQQELTEIERELDDSIRGTPAWRESDDLLKSVPGIGDATARTLLAELPELGTLDRKRIAALVGVAPLNRDSGKMRGRRTTWGGRATVRAALYMAALVASRHNPVIARFYARLRQAGKPAKVALTACMRKLLVILNAILRDRRPWQNA

SEQ ID NO: 214125 - protein, 417 aa, unidentified
MDTTYSKVAGLDVHQKSIQCAVRCIQETGKLVKQARSFGTMTRDLRALADYLEAWGVTHLALEATGVLWKPVWNILEGRFTLLLVNPRHLKKVPGRKTDVSDAEWIAQLLQHGLLRGSFVPPRPIRDLRDLTRHRTQLGGEHTRVANRIHKLLEDANLKLSAVATNILGKSGRAMLAELLEGNEDPGQLAELALGRLRAKLPQLRLALEGHCTEHHRFQLRQLWEHLDYLEQQHECLSRRIGQLLDAVLPTQHQQHLDAIPGVNRTTIENVVAEIGVDMAVFPDADHLSSWTGICPGNEESAGKRRRSRIRKGNQWLRSTLTEAAWAASHSRHSYLAAQYRHLAARRGKKRALVAVGHTILVIIYHLLKDNVEYKDLGADFFDRLHPDRLRRHLVKRLEGLGYDVTLASHQPDPPAA

SEQ ID NO: 214126 - protein, 312 aa, unidentified
MSQNTSILYVGLDVAKLSLQLHLAGRFHALGNDSKGHAQFLKLLRNHPDAHVICEATGGYEQPVVRALQAADIRVTVAEAGRVRYFARAQGQRAKSDPIDAAVLTEFGRTFKPAPTPAASARQLRLADVTQRRRQLIHARTAEHNRAEHYTDPLCLRQDRQFQKLLEKQIDECDQLILTLIAEDADLAQKAKRLQAIPGVGPVVAATVLAEMPELGKLNAETAAALAGVAPYDRDSGKFKGNRHISGGRRPVRCALYMATLSAVRHDRIIKEFYTRLRAAGKKPLVALTACMRKLVVLMNHLLKNHEFQLAN

SEQ ID NO: 214127 - protein, 339 aa, unidentified
MKKRYMGVDLHRNCFTVYTRQEDGSGESREWTIRELKAFAKTVKTNDEVAVEATGNTRLFTEALKDRGRRIVVVNPHQFQVISRSVKKTDEHDAKVLAEFLAKGMLPEVRMKDEVHARVASLGQTRDKLVKLRTTLKNKVNNLLAARGVLIRKESLSSEKGLVEVLAAPVSELEHMELEILVEEIRHLNASIAKVEALLRDQGPKLPGWENLTSIKGIGTTGATILLSTIGNVADFADEGKLAAYFGIVPRVSNSNETERSGRITKQGCKLGRTVLVQCALIATRYSPYLQAYYRRIAAARGTGKAIIALARKFLGVIYKTLKNNWIFEDFPRFVLANG

SEQ ID NO: 214128 - protein, 354 aa, unidentified
MNTIKYIGIDVHKATSVFAVRNHRGKIVNETILETEPTAIIDYLKSQRGALWVTFEEGTYSHWLYDIIQPQVAKVIVCDPRKNKLDGNKNDKIDARRLAELLRLNALKAVYHGQHNMQPLKELARSYLSLKQDSTRVRNRLKAIYRGRGIRCQGTSLYHPKNRQEWLEKLNGTGARRRAERLLKQLQSIEELLIEAQKELIRESRKHPSHKILRQIPGFGPIRVALLMAFVMTPHRFRNKRQFWTYTGFSVISRSSAEYEITQGALKRTKRKPLPRGLNRNYNRVLKNVFKGAALTAAYRGPFKKLFDQRVANGTEPNIALVTMARKIASITLALWKKGESFDIERHLLSEQTT

SEQ ID NO: 214129 - protein, 346 aa, unidentified
MHYIGMDCHITTLDFAVVNEAGRLVKANSVATGVKGFMKFVKTVPPPRTIYMEEGTLAAWALETCVRFREKLVITDAKKNHWIGSSGQKDDAIDALKLAQLARGGYIKEIHHPVGQRRRFRELMTAYHDTVRSTTRIKNKIKARFRQNGIQCTGATVYLETYREEWKDKLPQEATPLLILDGLWRQLEQSEQTEEGLLAAARAQSKQYPEIKLFKDIPGIGFISAATISAILETPYRFADKRKVWMYAGLGIMTKSSGGKVYSEKLSTDYNHLLKYTLKQAAEAAIRAKDNPFRHKYLDMTLLHGIAPHRAKLTIARDMLATMWAMWRKGEKYRPEIREKAAYKQG

SEQ ID NO: 214130 - protein, 425 aa, unidentified
MHSNTNYKINQVTENTLVIGIDIAKKKHYACAIDERGRVLQKSFPFSQSREGFDAFYEKVLALRATHEKSEILVGFEPTGHYWMNLAAYLTLHGIPFVMVNPHHVNRSKELDDNLQTKNDQKDALVIARLMRDGRFSYPRILEGVEAELRNGATLRSKIQEDLNALQNRIIRWIDRFFPEFMTVFKDFGKMAYAALEMTPLPSDIQGKTPEELLFMYRQVKGMKSPQLPKAKQLVEVAQHSIGLTEGLVMARIEIATLLTQYKLMRSQIDTLTEQLSKLAKEMTDYEYLNSVPGISDVTIVELLSEVGSLTQYEHPRQLIKLAGLTLRENSSGQHKGQKRISKRGRRKLRALLFRVMMPLLRHNEAFKKLHEYYTTRSINPLRKKQSIVVLCGKLLKILHTLCKKKVYFDVSHMMKDLNSLVKAA

SEQ ID NO: 214131 - protein, 339 aa, unidentified
MKLYSGMDLHSTNTYTAIMDENRKRVIDQRLANQPKVILGFLEPYRADLEGIVIESTYNWYWLVDLLQENGYRVHLANPSAIQQYSGLKYVDDRHDAFWLADLLRLSLLREGYIYPKEVRPIRDLLRKRSHLGRLRTSLLLSAQNIVLRNQAIKVASEDIKKLTTDLLTPHLQESEELFLTGKISKELIDAFTRQIKAIEAWVMKRLQPNKLFSNLLTIPGVGEILAMTILLETGCITRFPKVGNYVSYCRLVASQRTSNDKVKGKGNDHNGNKYLAWAFSEAAEHARRHYPMCRSFYNRKLNQKNATVAHCALARKLSRAAYYIQKDQVVFDETRLFC

SEQ ID NO: 214132 - protein, 477 aa, unidentified
MQQTQRSPFARTIPPHGGQLSRKERHKLARQIKSDNVTLEIVHGNAAGIDVGKDTHYVAVPPDRDAKPVQSFDSCTEGLQQMVAWLKKCGITSVALQSTGVYWIALYDVLQEADFEVYLVNARYTKSLPGRKSDVQESQWLMKLHTYGLLPNSFRPPQAIRWLRSYWRQRQNHVRSAATCLHRMDKVLIEMNVRLSSAVTDLSGATGLAIVQAIVKGERDPEKLAAYRDPRVKATQAEIARQLQGNWQEDLLFRLGQELEAYRFYQTLITQCDQELAKLLRAFPDRSAGVALAEETRKGRRKKKRGNAPQFDLRQLLYLMSGVDLARIDGIDVLTAMTVVAEAGYDMSPWPTADHFVSWLRLAPDNRISGDKIIGKGRTPTQNRLSQALKMAASSLKASKTYLGAQYRRLRARRGPAIAVKAMAAKLARLVYNMLRHGMEYVDRGTEFYEQQQRERRVYALTKNAAQLGFQLVPAAR

SEQ ID NO: 214133 - protein, 344 aa, unidentified
MNNTIVGVDLAKEVIQVCIYTNQRVRSNKEMTTSEFLTFLANLKSAIVVFEACSTSNYWKQKASCLGHDARLISPKLVNSVRQNQKTDKNDALAIVQAALLPDVNFISGKNIEQQQLQSIMRFRELAIRQKTALSNQLKGLLLELNIRVSSRRGGLKGVIQSTLEDGENDLSFEFRSALKMAWAQYSTLLKSIAHYEETLAKISTKHSECKRLLKLEGVSTINAVNLYIVLGCQPEMFNKGKDASACIGLTPIQYSSGGKAKLGSIGKYVKNSMLRSNLVVGAMAAINRIITREAKTKKEAWIQALVARRGKRCAAVALANKTVRTAFAMLTQGTEYKAELISA

SEQ ID NO: 214134 - protein, 454 aa, unidentified
MKILALDLGKFNSVCCFFDSKTRKPKFITTPTKREHINSIFQDAKADLVVMEACGPSGWINDLAQEHGHETLVCSTNEEAWRWANVKRKTDRDDALKLARMSAMGELKGVHTPSLKHREFRSLVKYRKTLDGRINKTKNAIRAWFVNHGIEIASGEKAWHTGREHINSFRKPLAQCGPEELWKGELDIELTILDSLTEQLSGVVKKLEAIGKTDERIKRVQTIPGVGPRTAEILVACLDDPHRFENGRQVSAYFGLVPRQYQSGETDRNGRITKRGNPLARTILVECAWASLRYNPWAKGVYERICGKQKTRKKKAAIALARKIAVIAWAMLRDEKDWEPKQMIRVTESFGRMSPALKESLQNMKPKENADQRKSRLRKEARAAREAAESHASKTIEQEPVKQRTTRPAKPAASKRKPTQSPATRSSRSTSQPNEKRQTKTSKPRRARKPVSRD

SEQ ID NO: 214135 - protein, 411 aa, unidentified
MNNTLFVGIDISKRSNVATFMNCEGKVVGRLTFSNNGSGADRLVAKILSYYEKEDFEAIRIGMENTSVYSKNLVWFLYEHEALNEHKLSIIPLNAIMVANYKKSFLDMDKDDITDSFAIADFIRIRPGLLPFKLDDRQEALKILTRSRYNYVQALSRMKSQFLTRLFLSFSEMEAGKPFYSIFSKTSLSLLEEEFTLDELAEKPIPELVEFLQEKGGGKFQNPEEIAKVLKKAASSSYRVPAMVRESLNRTMASDMEIMRILENEIHNCDKNIEKLMKSVPAILVSIPGIGPVLAAGIMSEIGDISRFQKQESLGKMAGFKWKRNQSGKKESEDKAAVLSGNKKLRYYLVEAANRVRIHDPVFEAYYRKKYAESKTHAHKRALILTARKLVRVIFYLLKENKLYKPDVGIS

SEQ ID NO: 214136 - protein, 369 aa, unidentified
MEEYNAFIGLDVHKDSISVAIADAGRDGELRMYGTIVNSPDAVSRLMRKLVQRHGKIEVTYEAGPCGYGIYRQLTEMGICCRIVAPSHTPKRPGERVKNDTRDALMLARLLRAGELTYVWVPDATHEAMRDLVRARQVASQDVRAARALIRMFLLKHGLYCKSKAWCLRYRKWLTSLKFDHTAQKFALQSYINRLEQAEARKAEIEDQMADLIPDWALAPVVHALQVFKGIGMVIATTLAAEIGDFSRFASPRKLMAYLGLVPSEYSSGSKQRPGGITKAGNKIARVMLVEAAWAYKWPPKVGVDLMLKRQDYSQELKDIGWKAQVRLNKRFRRLEGRGKRSTVAAAAVARELVGFIWATAISAMPKTA

SEQ ID NO: 214137 - protein, 341 aa, unidentified
MDKELYFGVDVSKKTLDLAYYDGETIDWKNAHIQVSNDDAGFKKIGSWVAKVGKDFDTFLFCMEYTGLYNQNFRLWLESKEYIYGMVEPRKMHRFEPDLDDDQRSLDRIKTDELDAFRIAIYCEQNHKKILRNPSKLPSPVYFKLKRLLAERKQNTKQSTLYKQQLHDICAYDTDLSVERKKLLLKNMKENQKAIDKEIDSYMQEDANISKNYNLLTSIPGIGRIIALETIVLTENFTAISNPRKYACYIGIAPFKKESGTSVRKRTSVSKKGFSEAKADLSIAVLSAIKNNPSTRDYWIRKRKEKCGGIVLNAVKFKLVLRMFAVIKRGTPYVETDAYKN

SEQ ID NO: 214138 - protein, 414 aa, unidentified
MLKIVYPICCGMDVHKSFVVACIATTNERGVTTYKSKRFSTFTGDLRRCAAWLAENNCKDVCMESTGKYWIPLYNILERTCNIVLAHPKYVKAIRGKKTDKRDAKWIADIFKHDLVTGSFIPLADIRQLRDLVRYRWKLTSFTTGEKNRAQNCLTVSNFKLDDVFSDVFGKAAFAITTRILNNPAEKITDVSNFRTKGMKATDEQVLAAVDGAMCEEQAEKLRIIRSHMDSLHLCKLNLESLILATAEKYLPQLNLVMTAPGIQSFAAIGIISEIGVDMSVFPTSKHLCSWAGLTPQNNESAGKKKTTRIGRAGAYIKPLLVQCALCAIRAKQFPEVRNRYLALKKRRGHKKAIIAIARILLTAIYNMLKKNEPYNPELYRKGDRPPTHREVSVGEAIFILQRQGYLVTAPPTP

SEQ ID NO: 214139 - protein, 320 aa, unidentified
MTQIGTLVGIDVSKKKLDWCIRGVAKATVENSVSGCRALAEALKLHNVEMAVIEASGGYQKTVENALRKAGFAVLTFNPKRVRDFAKAAGRRAKTDPIDADTIAWFGEVFRQETVIARDADREELADLMSERQGFVDMKTQCENRGEHKRSALGEKLRRGTLERIERCIAELDKAIAAKIAKTESLAEDAKLLLSVPGLGDTAVAALLAWLPELGRMRSTKIAALVGVAPFDDKSGERKGVQHIAGGRRDLRNLLFMPVMGAATRHNPILKRYYQRLIAQGKEAKVALIACMHKLLRILNIMLARRQSWNPPPLATGAVA

SEQ ID NO: 214140 - protein, 370 aa, unidentified
MKETITSFVGLDVHKDSIAIAVAQAGRQAPRFVGTVTPELASVCKALRRVANAQHTLVVYEAGPCGYGLARHLNAHGYCCEVIAPARISRSPAEQRVKTDRRDALLLARESRAGNLVPVVMPDERDEAIRDLSRTREDVCTARLRARQQLKAMLLRHGRSYQGKTSWTLAHERNLSTVSFAHPAQDIAFAEYRQAVKDSHERLARLTEALRTQSSQWRMNPLVHGLMSLRGFDFVGAITFIAEIGDPRRFANAPALMAYLGLVPSESSSGLTRHQGSITKTGNKHARRILIEAAWNYRHSARISRVLEVRQQGQPKIVRDIAWHAQLRLTKRYRHLAIGRRLPPNKVSVAIARELAGFIWDIARQVKPLP

SEQ ID NO: 214141 - protein, 377 aa, unidentified
MKSIVYVGIDVHKDSYTLVCLKPNLEGEDQIFGTMKIQSDYHRVLQYLERMQKILGEDVEFICAYEAGCMGYSLYHQLTGKGVKCFIIAPTSLLREKSRRIKTDKRDAINIAKSLAYGTGRHVHVPSAEDEMVQQYIRMRDDHRKIFKSLKQQILALCLRSGNNYSGMTNWTKAHLEWLLKLELDWLLRETLDEYLATYGQLSDKLAAFERRIEELAKSDRYREDVGKLSCFVGIKTYSALAILVETGDFERFPSAGKYAAYLGLVPGERTSDEDRNVTGITKSGNSHLRRILIESSQSLCKGAVGYKSRALKIRQKGNSSQTIAYADRCNERLRRKYYQMMRKGKNRNVSVTAIARELACFIWGMMTANTKARDAA

SEQ ID NO: 214142 - protein, 337 aa, unidentified
MSVYVGIDVHRKRSQVAVVAEDGQMQVNKNVVNGSEPFLRLIGDLPAGTPVAFEAAFGWGWLVQLLEDYGFDPHLVHPLRCKAIASARLKNDKVDAAILAQLLRADLLPEAWIAPAEVRQLRALLRHRASLVRLGTQQRNRIHAVAADHGYDRSASYWTGPGRGWLAELELPAASREIVGDCLAVIDGLAPVIDRIDGELRRYAKADPRVKVLTTLPGVGQFTALMMLAEIGDITRFPSARKLASWAGLTPTVRGSDLTVRHGHISKQGSAWLRWVLNQAAQTAKRSPEFAAAYAAIARRRGKKIATIAIARKLLTRAWHLLSDMQATSTDEPPRRP

SEQ ID NO: 214143 - protein, 388 aa, unidentified
MRQFKGSAQAAVDYNSTIIGALELSEKKWVLAVQLPGVDRHSRHMLDACGDSLASFVERLKARCTSAGRKIARVILTHEAGRDGFWLARFLTRQGIEVHVMQPSSLPVDRRARRAKTDKIDVEMLLRTLMAWLRGEPRVCSMVPIPSEADEEARRANREREDLTKERRSIVNKIDGILATLGIKGYKALRRDRRGQLNCVRQPGGDPIPKKAKARIERLLDRLELVLKLIDHVESARDDVLKKGAPANESERMIRSLTALRSIGPDIATLLVREAFVRQFRNRRALAGYVGLGGTPFSSGGSEREQGIGKDGNRRVRAAMVELAWTWLRWQPDSALSVWFRARVGAMGGGRIRKIMIVALARKLLVALWRYLKDGVIPEGANVKVAVA

SEQ ID NO: 214144 - protein, 354 aa, unidentified
MTRATKYVGLDVHQATTVISVREDSGRVLARSVVATDARLLLEYLGGLRGAVQVALEEGTQAQWLHDVLAPVVDRVVVCNRRGESKHGNKADQADADELSDLLRCGRLRAVYHGSPDRLTLKELARAYESLVEDATRVMSRLKALFRARGIPTRGKQLYDPAHRAAWLAKLPDPGAGLRAEMLFTQLTTLATLRPKAKRALVTEAQRDPHWAVLRTVPFLGPVRVAQLLAVAQTPWRFRTKRQLWAYAGLAVVTRTTAQYEIRDARPVRRRRAPLTRGLNRNHNRVMKRVFMGAATAAAQRDAELRAWYEGRLAQGMREEMARLTLARKLAALTLRLWKTGEVYDATQLTVHVR

SEQ ID NO: 214145 - protein, 421 aa, unidentified
MLKIHRFNCAGLDVHKNLIVATIGITDKKTRVTEYIQKDFSSLNYDLYNLKNWLIEHKCFDVCMESTGKYWIPVFNILETESKMNIVLVHPKYVKAIKGKKTDKKDSKWICDLFKHDLLKSSFIPPKDIRELRDLSRYRFKLICMRTSERNRYQNSMTVSNIALASVVSDPFGKTAKAIMNEVLSTEAIDEAKITKLIHGSCRNKDKIIESLKNSKIEPDQRFKMTEIQSHMNELDKHIEAVEIEIIKRASRYFDNFIHITEIDGIQLMSAILIISEIGVDMTQFETDKQLCCWAGVSPANNESAGKKKSVRISKAGQYLRPVLVQCALAAIRKKNSYFGQKYTRIKKRRGHKKAIIAIARMMLVSIYHMILTGEKFNPSDYESFKDPKPQREKNNYTVETALDFLKSQGFDVSSIQEIPK

SEQ ID NO: 214146 - protein, 323 aa, unidentified
MENIALIGIDLGKNSFHIHCQDRRGKAVYRKKFTRPKLIEFLATCPATTIAMEACGGSHFMARKLEELGHSPKLISPQFVRPFVKSNKNDFVDAEAICEAASRPSMRFVQPRTESQQAMRALHRVRESLVQDKVKTTNQMHAFLLEFGISVPRGAAVISRLSTILEDNSLPLYLSQLLLKLQQHYHYLVEQIKDLESQLKRKLDEDEVGQRLLSIPCVGTLTASTISTEIGDGKQYASSRDFAAATGLVPRQYSTGGRTTLLGISKRGNKRSELCWFNVPGIHTKTGTPVWQIGRLGQGFTVPEKQLCRHLCSGKQAGQNSWP

SEQ ID NO: 214147 - protein, 399 aa, unidentified
MGNYAGVDWAAEKHDVLVQDETGEELFAGSFAHDEQGLRSLCRTLVRLKVQLVAIERPDGLLVERLLDAGLRLLALHPNQVAAARPRFRTAGGQSDRFDAFVLCELARTDSHRFRALEPDSDQTKALRALTRAREDLVQTKVALTHQLRAELERFWPGPIGLFKDLDSRISLAFLERYPSPLDAKSLGEKRLAAFLAGAGYSGRKPAGELLARLRAAPENRAGQAELNTRRRIVRALVDTLKPLVAQIKELEREIVIAIREHPDGAIFLSLFKHPRSVITAAELLAEIGDCRGRYPTRDTLAADAGQAAVAIESGKRKNAAFRWACNKRLRDAFCTLADSTRHHNPWRTPCTPTLAPATSTPARSAPSAAPGAVSCGNAGRTGPRTTPPVTAACNSMSG

SEQ ID NO: 214148 - protein, 409 aa, unidentified
MNSTVLPASVQPNIDCNYIGLDVHSDNVVVCVRRNILKVGGELQGKTIKLKKVSICDSQDSLTQLLSEYADGQQHVMTAESTFNWYWLADIAEEHGWNFRLADPCTVSQANIKAANDETDAQYLAERLRMGSLKSTTVLPRALRGARDLTRHRMRVMQEVSEKKIRLSNLYHNHCAHPLHGKQLQDLQFAYEENGIDAVLASGISGNGSELIIADLLAGLHDAQMRLERIEAQVYERLDQIDTYREGRLLLKNSMKGCGDVLSAVIITEIGDISRFRTMGEFVSYCRLAPASKLSNGKSKGQGNAKNGNAYLSWALTELATLMARYNKSIQHYLERKVKKTAYASLAYGHLPQSSLVVCIKCYVRRRRSTCFLPSEAPTPKSQARQGPKPKNPHRGKQQRNRPGQRSRA

SEQ ID NO: 214149 - protein, 327 aa, unidentified
MKYVGIDVHKKMCQAAVLNEDGALLDELRFPNDLNGIEEFAGKLTTFRDDVKAVVESTGNLWIQIHDRLEEHGFDVALSNLGKTRLIAEAKVKTDKVDARTLASLLRADMIPTCYVPGEELRSRRELLRHRLNLVKIRTGVKNRIHGLLDKHGLRMPEATPFSKGNIAWLRERSLGFMDDAILRSDLALLETVGEQVERIEEKIATLAAEERQARLLMTMTGVGYFTAMLILSEVGDIDRFRSDKAFASWMGLAPSVHQSRERTRIGGVSGPGNKRLRWALVECAQAAVRYDPRFRGLHERCRGVGALGVPWWLWLTRWLGSCTSCW

SEQ ID NO: 214150 - protein, 365 aa, unidentified
MKKSSTVAAASKKNIDQKLTIGLDLGDRSSWYCVLNEAGEVISEQKLGTTPKAMKEVFAAMPRSRIALETGMHSPWVSRLLSELGHEVIVAHARNVRLIGESRRKDDRLDARTLARLARIDPQLLSPVKHRSAQAQADLTVIRARASLVRARTALVNAARGLTKSYGERLRGCNPRNMDTEKAQTLSPELQAALGPLLQALESLSERIAEYNQQIEAIAQQSYPQTALLKQIKGVGTLIALTYMLTLEDPHRFRKSRDAGCYLGLQPGRRNSGQSEPQMHISKEGDPYLRTLLVQGAHHILGPFGADSDLRRWGLRLAERGGKAGKKRAIIATARKLAVLLHRLWVSGEVYEPLRNTKRTVSVAA

SEQ ID NO: 214151 - protein, 397 aa, unidentified
MYIVGIDIAKRKHEAAVIDGEGAVIIKPFSFTNNCSGYNRLLAMLTKAKLPLDEVSFAMEATGHYWLALFTRLQKEGFRVQVINPVQTNSIRSFYIRQAKTDPRDALLIAEVIRFGHFSESTLHPENIYELRELCRGRHAIVSMQADVKRKVIALLDQVFPEYETAFTNLFGDTSMAILQTCPTPKELSEMPLEELCHLIEVSSHKRFRMAKARELQELARNSFGFAMAGDVFSTMIRLYAKHLDFLKQQVREMDRKIAEIMETLDTPITTITGIGPTLGAYILSEIGDISRFSSAAKLAAYAGIDPTMRQSGEYNGVRNRMSKRGSPYLRHAIWLAASSAVLHDPALKLYFQKKRDEGKPYMASVGHACRKMVSIIYAVMRDNKAYTPCIPNEISA

SEQ ID NO: 214152 - protein, 399 aa, unidentified
MGSTQTRREALNALEVQERRTTMKDRSTDDGSVTVGLDVGDKHSHVCVLDATGAVIEESRIRTTVEAVRRRFSGMSATRVALETGTHSNWIADELSSLHHEVVVANARKLRAIYQSDRKDDRTDAQMLARLARADPKLLAPIQPRTASVRHDLELLRSRAALVEARTKLVNHARGVAKSAGQRLRTCSAESFYKLELPPELHAALTPVLAVIEAMTAQVRGFDKDVMRLGRDSYPQAGLLRQVPGVGPVTSLCFVLTLEDPARFKKSRDVGAYLGLVPRRAQSGARDPKLRITKAGDRMLRSLLVQNAHYILGPFGPDCDLRRFGEHIAKGGGKCAKRRALVAVARKLAVLLHRLWRSAEVYEPLRTPDKQQRRRTRLAAVTTKQQPQQTSAAAEGCAA

SEQ ID NO: 214153 - protein, 344 aa, unidentified
MWIIGCDYHPSFQQIAFVDQTTGEYGDLRLEHKGGEAEKFYRSLTGQQVRVGVEATGGMRWFERLLGELGIELWVGDPARIRAAAARKPKTDKEDARLLQRLLLEKRFPRIWVPTVQQRDARQLVLHRHRLVQTRTRAKNQLQDMARNEGLYAKRRVWSQTGQKELMALPLSPWATVRRQDWQELLGELNRRIDPLDRALQQEAAQRPEVQLLMTHPGVGPVIATAFVVTIGEPRRFQTSKQLAAYLGLVPIENSSGKGRQRLGHITKQGNSLLRGLLTEAAHIASRRDPEWRRKYMRLAMKKNRSIAAVAVARCLAVRLWWMWKLGLDYGQMKESRSHAEQLV

SEQ ID NO: 214154 - protein, 333 aa, unidentified
MKHWIGIDVSSATLDFALLDEHGVHLESLQVSNGRTAVMTLMNSWKKRYGVDTGECLVCLEPTGHYTLMLLNLIVEQHWHAWLAHPLDIQKSMGIKRVKNDKVDALRIAQYARTFREKTRLFTAQNLKLDKLKHLLTRRQHLVRVRAMYKKHLSDLNRYMDKDIKKAFDQLDKRLIVASDRAVIRVEQLIMAQIKADDITSEQYNLLLTIPGVGPQLASYLIALTDGFHRFTNPRELACHAGVAPFERSSGSSIRGRTQVSHQANKILKTMLHMAALANVQREGELKVYFQRKVSEGKKPILVVNAVRNKIIHCVCAVIRNNRPYEQRQLVQN

SEQ ID NO: 214155 - protein, 422 aa, unidentified
MNSLTDNAFTAYVGIDWADSKHDICVQAAHDQQREFDCIAHKVDQIDQWAQSLHKRFGGVIAVALELSKGPIVYALQKYDFFVIFPVNPSTLAKYREAFTPSRAKDDPTDAELALDLLVRHPERFTPLKPQSVEMRTLVCLVEQRRSLVNDKIRITNQLRSALKQYYPQMLEWFAHLDTVLVCDFITRWPTLTQVKRARKNTLEKFFHTHNMRFAHVLDARLKSIKAATPLTLDAAVVTPYSLQALVLTDQLRVSLQGIHRYDDEIAELAPKHPDYSLFSALPGAGPSLAPRLLVAFGEQRERFDSAAALQKYSGIAPVTERSGKKHWVHWRWQCPTFLRQTFVEWAAQTINKSFWAGAYYRQQRDKGCTYQAAVRALAFKWIRILYRCWQTRIPYNESVYLNALKHRGSPLLNPSTTVKMT

SEQ ID NO: 214156 - protein, 482 aa, unidentified
MKPEPRNKTQKVTERRTPSHWQEMNRKQRRETMRKIQSDELRLEVVHPNAAGIDIGKESHSVAVVPDRDSQPVRRFGCTTAELRAMADWLKQCGIQTVAMQSTGVYWIAVFDILEEAGFEVCLVNARDTKNLPGRKSDVQESQWLMKLHTYGLLRNSFRPPQEIRTLRTYWRQRNDLVQSAGRHIQRMQKVLTQMNVQLANVLSDISGVTGQAIIKAILAGERDPHKLAALRHPRVEASEEQIVRYLEGNWQEDLLFVLPQEQDGYEFCQGQMAECDRHLDQYRHAREDRSQGVPLPEETRKGRQRTKKGNAPQLDLRSESFRMSGADLTQIDGIDVMTATTILSETGWDMSKWPDEKHFVSWLRLCPDNRISGNKIIGKGRLPTNNRACIALRMAASTLRTSQTYLGTQFRRLRTKLGAPIAIKAMAAKLARLVYRMLRQGKKYVDLGMKFYEAQQRHKQIRYLKRKAAELGFKIVEAPAA

SEQ ID NO: 214157 - protein, 435 aa, unidentified
MSRQNPDPNPNPSTLSAPVFAAFIGLDWGDEKHALSLCAAGSTTLERTTLEQTPEALADWANALRTRFPNGRIAVCLEQARGALLAAMLPYEHLVPYPVNPKSLARFRQALYPSRSKNDPVDGDLLLELILKHRDRLRPWRPDTVQTRQIALANEQRRHFIDHRTALTNQLTAHLKAIFPQALQLVGEVLASSMATDFLKKWPTLQALQKVSPSVLRKFYYGHNSRSEALMTQRLHRVKNALALTQDPALLAVHSLAIQTLAAQLQALRPFLDQFDEQIAQLFAAHPDVALFESLPGAGAALAPRLLAALGTDRDRFESAVAVSCYSGIAPVTEQSGKTQHWVHLRWSCPKFLRQSWHEFANASRRFSPWARACYEHLRTKMDHHEAVRKLAYKWQRIVWRMWQQRQPYDEARYLGSLQQRGLEIYARLPAQTSG

SEQ ID NO: 214158 - protein, 404 aa, unidentified
MIFVGDDWSEDHHDVCLMDQAGKRLASRRLPEGLTGIRQLHELIAEHAEEPDQVVIGIETDRGLWAGALAAAGYQVFAVNPLAVARYRDRHHVSGGKSDASDAKLLADLVRTDRHNHRPIAGDSLDAEAIKVLARAHQSLIWARTRHTNAMRSALREYYPAALLAFENLAHGDALGVLGRAPTPEQGAHLDLPAIQSALKRGGRKRNIAARAREIRAALRSEQLAAPAPVAAAFGATTRAAVGIIAELNRQIAELETSLAEHFETHPDADIYRSLPGLGVVLGARVLGEFGDDPNRYTDAKSRRNYAGTSPLTVASGKKRAVLARHVRNRRLYDAIDQWALGAINNSPGARAFYDQHRAAGDLHHQALRALGNRLVGILHGCLRHHTLYSEHTAWAHRQTTQAA

SEQ ID NO: 214159 - protein, 331 aa, unidentified
MFPVGIDVSKDTLDLCMLYDGIKGRVKTRNIKNDRSAVENISRWLRLQHCGSEDVHVVMEATGVYHERLATALHDAGFYVSLANPHRSREFARGMGIMTKTDKVDAFMLACYALLKKPHRWEPPAADIRHLSALLRRRDVILADAVREENRLEKYQSTDTPADVVSSCIRMAQLLREEVKSIERQIKAHIKASPDLKRDYALLTSIKSVGPQLGMHMLVVLRSHHFESADQAAAFLGVVPVEKRSGTSVRGRPRMSKIGPPQLRAKLYMSALCGKIHNKRMRTVYEEMCLRGKPKMVAIGALMRKLVHWCYGVLKTGTAYNDGGPRAALNT

SEQ ID NO: 214160 - protein, 331 aa, unidentified
MSVYAGLDIGAYTVDLVTRQADKVSKAKRYKQTPEGHNALIAQLKKAKPVRIVMEATGIYYFDLAIALAEAGLPVAVINPKSFRHFAELKLQTSKTDAIDSDLLAEYGQRMVPALWTPPDQHHQALRSLGRQINRLVGCRAQAKNRLHALRATRATPDLLIEDEQDGIATLERRIERLRQAAQSLLAEAPALQRGYQHLLAAKGVGEATALSILAELCVLPRSLKSGQISRQAGLDVRQHQSGTSVHRPARISKAGNVYLRSALYMPALSAVRYDRHARAFYETLVARGKKKVQALVAVMRKYLTGLWACLKTDTPFESARLFQTDGLQKA

SEQ ID NO: 214161 - protein, 366 aa, unidentified
MKKISTVQVFSNEILKEQKLTIGVDLGDRWSFYCVLDEAGKIILEQKVPATPEAMKQTFGKIPRSLIALETGTHSPWVSRLLTELGHEVIVAHAQKVQLITKSNRKDDRHDARTLARLARIDPELLGPVRHRSARAQIHLTVIRARAELVSARTALVNAARGLVKSYGERLPKCGTQQVSRELAAGLSAELRDVLEPLLKEIESLNERIQEYDERMEKIAKEVYPEVSLLQQVKGVGTQIALTYVLTIEDPYRFSKSREVGCFLGLKPGRRDSGESEPQKGISKEGDRYLRTMMVQGAHYILGPFGEDSDLRRWGLKLAERGGKNAKKRAVVAVARKLAILLHRLWVSGEVYEPLRNSQKAVRAVA

SEQ ID NO: 214162 - protein, 479 aa, unidentified
MIRSVGIDLSRTGNHQVCCLDEQARPCDSFSFDSTLEGLEKFEKRVFLEGATPTIVFEPTGLAWIPMAAYLRARHPDCQLVKARLQKVAALRRYLHSRAKSDRVDGVTLAKMPFIDAEQLDEAYLPPAEYHALQRLTRQRERLMKSITIRKNRIGSIINGYLPGLRKAFTDEWSDRARLFYRQLLNPFTVVRDGKDAFETLFVSAKTKGAVTESHRVYQLCQKLVEFYEKSRAAGMINEDFFDNLQDEISCELRLMETEEAEVERVSGRIEELYRHLHPSDHLRTIPGIGVRTAQVFLAVIGDPNRFRNQSAFANWTGVVPGARQSADSEGKGLRMTKAGPAMMKRALYQAGDIARRYDPQLADLYYREMVQHGKTHLQAMGAVMSHLAARILAVLQEDRPYELRDNQDRPISKMEAIGLIQQFKVPEETRQARRRRKPNEGRLSGRRTREAAEAPQSAPLIPPPKIVYCAEELQSTAN

SEQ ID NO: 214163 - protein, 432 aa, unidentified
MKSYRIAGIDVHKKMLAVVIADVCGGGEFQFERRKFGTTPGELHVLAQWLVQQQVEEVVMESTAQYWRPVWEGLEQFWQPAMRNREQSAKMSGTLHLCQAQSNRAPRGRKRDFPDAERLVKRLVAEELTLSFVPEPDLRLLRTVTRRRYQLSRAMVMFQNQLESLLEQAHIKVSGLVSDLLGCSARRMLKALSEGADDPAALAAMADRRLRATAEQLQDALGACKDMNPHYRRLLKLALAELQMVETHIQELDQQAMELLHEHQHVVRRIAAVPGFGVASAMQMIAEVGVEAANFARAKNLVSWVGVCPGDQESAGKSQSTRSPKGNRHMRRLLNQAAHAAVKVKGSIFELTFNHHMRRPVRPMQYKSAIWAVAHRLCRLLWLLLSKRVDYEERGPAVSAQSQRVRTSRMIRALTKLGYRIEAGPAAQPVHA

SEQ ID NO: 214164 - protein, 461 aa, unidentified
MAGKNAVESSEGRNQLQGLPVIRPSVAGIDLGSERHWVCAPTLDRSGREIASFGATTPELIRMAEWLKARQVESVAMESTGVYWIAPHEVLEAQGLQVLLVDTRQLARVPGRDKKTDPTDCEWIQRLHSCGLLRGSFRPEEAVCMLRTLVRDKGNLVAERGDWVRRMQKSLDQMNVRVHRAVSDIDGVTGMAILRAIAGGERDAQKLAQLRDRRCNKTEAEIAEQLSGHWREDHLFSLQQALKMYDAVQERIAAYEKEILRKLGDMEREDQRGQTPPPAQNASKAKTIKQRGQGPKREALYRVSGVDITQIDAIGVETVEVVLSEYGPDLSCFPTEKQFVSHITLAPHVAKSGGKPVKKKKRNSASTRVAAALRMAALSLRHSQTALGAYYRKIARRIGGDVAVFATARKLAILIYRLLRWGQPYVDVGAAAYENRYREERIRSLMAKAKELGYQVTPVAA

SEQ ID NO: 214165 - protein, 380 aa, unidentified
MPEAVIGLDVGKSSHWACVATRDGEVLLSAPVANREDDLDSLFGRFPDALVVVDQSRNIGALALARARAAGMSAAYLPGLAAHGAARLFAGDAKTDERDAMVIAKTALGIPDALLPVGDPGPTIAAARTLAAQRNFLTCENTRNKNRLRSILLESCPAFEALVDLSDGPQLRLMASLGGAWSVADAGPRRAAALTRGAARGKIEALVRSTTSSTRPDASVVAAEDRAVKLLARRISENSAEIEAITAEISALLEGDDTYRCLLTVPGIGPKTASELAISIDIEDFPSHDRLASYCGLAPRNRQSGTSISSVTASRQGNKRLKNLLIFSCNCLTRTEGRWGDYYTRCRERGMSHGKALKALARKRLKVIYAVMRDRVPYAA

SEQ ID NO: 214166 - protein, 352 aa, unidentified
MVKGNSGMTVGIDIGDRYSHLCVLDEHGELAERARVATTRTAMEGWFSRPARCRVVLEACCHSPWLSRLLDSLGYEVVVANPRQLKLIFKSKRKNDPIDSERLARLGRVDTELLSPIRHRSEDVQRDLHVLKSRDVLVGTRTRLVSHIRSVVKSLGGRVPLKVRAETFHAKAAEHVPAGLLPSVEPLLRALACIDAEIKELDKQIHRLCLESYPETAILRQVTGVGEIVALTFVLVIEDPKRFENSRDVPAYLGLVPRQWQSGAVDRNLHITKAGDRFLRKLLVQSANYILGPFGPDCDLRRWGQQLAERGGRGGSKRARVGVARKLSVLLHHLWATGQVYKPVLSPSAVAA

SEQ ID NO: 214167 - protein, 314 aa, unidentified
MPDQTFVGIDVSKTRLDVAMLPSGEVFAVDNTAPGLTELLIRLSEAQPQLIVLEATGGLEQAAMLALHDAGLPVTVLNPRQVRHFSRALGKHAKTDRLDAVLLARFAQTLQPEAQVPGDGSQRALEALLARRRQVVELLTMERNRLHSSRDSYVQQDLHEVITYLEGRREHLDQALQEAVQHDPKFQATYSVLTSTPGVGPVMALTLLAQLPELGSLSGQKMANLVGVAPLNRDSGTSRGHRGIWGGRAEVRQVLYMSAVSAVRCNPTLKTVFDRLVEKGKPKKVALVACMRKLLVYLNAMVRDQAPWQAQPAA

SEQ ID NO: 214168 - protein, 353 aa, unidentified
MHTHQQSTEPVATIGLDIGKNTFHLVGLDRRGAIAMRIKVSRNQLVRRLVNLPPCLIGLEAGSGSHHIARQIQSLGHDVRLIPAQYVKPFLKGHKNDYRDAEAIAEAVQRPTMNFVAIKTPEQSDLLSLHRVRSRLVRQRTAIINQIRGFLIERGITVRQGPGPLRKVLPEVLSSPPEALSPRLLHLISELDQDWRRLDDRLEVLSGEIESLSENDAACQRLMTVPGIGPIISSAVVAAIGTGSGFKQGRDFAAWLGLVPKQESTGDRTKLGRISKRGNKYLRTLFVQAAHVVLERRPAAAMRALWPWIAQASKRLAHRNLLAIALANKLARIAWAVLARGRDYEPRITPNAP

SEQ ID NO: 214169 - protein, 295 aa, unidentified
MDQIIRIGMDTSKHIFQLHGVDAAEQVVLRRKLRRSQVLSFFAKLPPTVIGMEACGAAHYWARELRKLGHEVKLMAPQHVKAYVKRNKNDGRDAEGLCEAMSRPTMQFVPVKSEEQQAALMLAGVREQLIARRTQLCNAIRGYAAEFGLTAAKGLDKIEPLLAWIAQDKTLPAMARELLALQGKDYARLQIELKAIEARLMAWHRANADSRRLAQIPGIGPIGATTLVMKTPDPRAFPSSRHFAAWLGLTPKDHSTAGKTRLGKITRAGDERLRSVLERDGSSLNRLGIPKSEGF

SEQ ID NO: 214170 - protein, 359 aa, unidentified
MVKYRKKTKIRKLDSITCDDKAYVGLDVHKRSIHGAVRINGKQISTFVMPAKKDAVIKTLEPLAAGLEKIVYEAGPTGYSLARSLQEIGWPIEVIAPGKIPKEANQGSKSDRLDCKKLAEFAEKNLLKAVAIPTEQEEADRQLTRLRDHLKKKDKRTKQQIKSFLLQHGLKEPNGLSNWSQCGIDELAELELNSELRFVLDIFLEELKDLKNHLKITHNRIKQITKAERFEKKIALLKTHPGVGPQTSIKFLTEVYQPGRFTEYTQVARYTGLAPRVRQSGEKRREGPLIKAGQAPLRCMLIQAAWAWVRYDPHAAMVYRRLLKNTGKTQKAITGIARRLAVDLWCMLMRNEVFRTAAV

SEQ ID NO: 214171 - protein, 375 aa, unidentified
MKKVRWVGLDVHADSIAVAVAERTGDVRSLGQIPNRPESLRKLMKKLGPADSVRACYEAGPTGYVIYWQLTTLGVHCEVVAPTLVPTKAGDRVKTDRRDAEKLARCYRAGDLTAVWVPDAAHEALRDLVRAREAAKKDQLRARHRLGKFLLRQGRRPPTGMTAWTQRHLAWIQTTVHFEQPAQEATLLDYLHEVEHAAGRIDRLERGIDAAVHTAPARMRAVIDALQALRGIALVSAVTIVAAVGELSRFARAPQVMGYSGMGAREDSSGGRTRRGGITKTGNAHLRRIVIEAAWAYRHRPSVGGALRKRQATLSDEVKAIAWKAQHRLHGRYRTLLGRGKNQQQVVTAVGRELLGFIWAIGVAVEQRTPHAIAA

SEQ ID NO: 214172 - protein, 302 aa, unidentified
MEHYAGIDVSLESASLCVVDATGRIIREAKVASEPDVLIAWFRGLEFAVTRIGLEAGPLSQWLYAGMREAGLTVELLEIRHVRDAFKAMPVKTDRKDARGIAQLMRLGWFRPVHCKSLLAQEVRALLTARKLLQTKNHDVEMSLRGVLHGFGLKVGPTTPRTFATRIRELVAGHPTLSTAAEALLAARSTLFEQWQQLEKRLRSLAREDHRVRLLTTVPGVGAIVGLTYVSAIDDPGRFRSSKAVGAHFGLTPKKYQSGETDVTGRISKIGDGGVRTALYEAANVILTRPVKGSTLKSWGCV

SEQ ID NO: 214173 - protein, 377 aa, unidentified
MKALQRVLPYSGQNPSLRKELQRCMEYFIGCDAHKKFSLFVSMNGEGEYGRAIRVAHERSAYRAFLAGLPAGSKIALETSGSYYWIVDEMERAGHKPQLAHALTAKRRMEGRHKTDERDARGLAMLLRNGTLPRVWIPPGELRDQREMLRLRMSLVQSRTQLKNRIHGCLLRYNLTVAAQDLYGAGGRKELAARVTELPPWTRQSVLEQLETIDHLQMQIEDCEQHLEELLEENAGRDLLTTLPGVGKVLSAVLALEIGDIGRFPSAGDLVSYAGLVPSARESASRKRKGECPRDCNLYLKWAYVEAANVIATRQQQWGGKHVVQLYQRVKQSTKIHGKAAVAVARHLAEASYWMLKRQKVYREPQRARAAHSSTQG

SEQ ID NO: 214174 - protein, 454 aa, unidentified
MSKRQKRSPLRGLAPTPVLEPNAAGVDIGATEIYIAVPADRDAQPVRRFATFTEDLIAAADWLKRCGIETVAMESTGVYWIPLFQMLEARGFRVSLVNPRHSKNVPGRKSDVCDCQWLQYLHAVGLLRASFQPEAQVCAVRSLMRYRESLVEMAAVHLQHMQKALDQMNLQLHHVISDLSGTTGMAILDAILAGERDPRRLARLRDARIRADEATIRKSLVGDYRREHLFTLGQSVVAYRQYQQLLGACDVEIEQMLEEFTDGTGPGAPPLPQPKDRHKPRRNELKFDLRGHLYRIFGVDLTAVPGIQAQTAHMLLSEVGRDLSAFPNAAAFASWMGLCPDNRVSGGKVLSAHTRKVKNRLAKALRLAAQSLFRSQSWLGQFYRRMRAKLGAPKAITAAAHKLARILFHLLTTHQPYDESVFAQQEIQNKQRMQRRLQQQAKAHGFQLVEIKAT

SEQ ID NO: 214175 - protein, 387 aa, unidentified
MQTKTPATTVETTVRDHSNTLFASLELSKAKWLVTANSPGEEKFSTYVVAGGDGALLLVLLARLKAKAEQRRGVAVKVVVIQEAGLDGFWIHRLLVQSGIESYVVEAASIAVARRHRRAKTDAIDGVSLLRTLMAWARGERRVCSMVRPPSPEEEDQRRLSRERGTLLKERIQHTNRIKGLLSGQGIRGYDPLKPDRLDRLDALRTGDGRPLPERLKAEIRRELARIDVVATQLATVERARDALVRTQTTEPTNPSALLIKLKGVGIEFASLVWLEGLFRSFTNRRQVAAYAGLAPSPWQSGGTDRDQGISKAGNHRLRRVMIELAWFWLRHQPDSALSRWFRNRVGTAKGRVRRIAIVALARKLLVALWRYVTQGIVPEGATLKAA

SEQ ID NO: 214176 - protein, 367 aa, unidentified
MKKHTTMNKPVSATDVSVCTTVAVDLAKKVFQVAGEDALGQLAYEQRIKSREAFQVFLQKLPEGVTVLMETGPGAQAWARLLQAQGNPVRILPAQRVAEHRSGAKNDRNDAHAILRAGRDSSIASVPVKSVAALAMQAWHRVRRGYVRRRTAMGNQIRGLLLEQGIALAQGDVGLKQGVTRVLEDARQPLPALLRELIDEMLNEWQRLGERIAALTGRLEACAAADPTAKRLMTVRGIGPITATALLAKQVEPERFANARQFAAYFGIVPDQHSSGQKVRLGKMTKRGDAYVRSLMVVGSHAVLKQLRPDSEHPDDRRLQRWLQRLGRKGAAVRLANRNLRIAWVLLCSEQTYQRKPNACREMEMSH

SEQ ID NO: 214177 - protein, 395 aa, unidentified
MDRMFVGVDISKDSFSAAGLDAEGNECFSGVYSMDSGGFGKFLEIVNVRCPDRQKVLAAMESTGCYHINLFSFLTTQGIHAVVINPLLIANFAKRSLRKTKTDKKDARTIAKFLMENRKEISQLSISQDLQDLRDLARERESISHLISATKVEIKRVLRTTFPELESIADIYTRVMLRFLQAYPSARLVKAAKPKVLAQVLRQPYVGNKLTFSAEDILRAAQSSVATASPAKEIILKGKIATLLHLQERLDEMTKLLTDLCKATRVEDLKILRSIKGVGPKTGVPFLAEMGSVENFSSHKKLIAFAGMDPSVCQSGKYIGKSKLSKRGNRHLRRAIYLMTAAVVSQNAFFKAYFLRRKREGLVPQKALLATAHKLIRVIFAMLSHRTYFQAKMAI

SEQ ID NO: 214178 - protein, 354 aa, unidentified
MQQSTVIGVDLAKVSFQIHKATLAGKMLKSAKLSRQKFAEFLANEGKTTVFMEACGSANYWARKAKKYGHEVKLIAPQYVRPYRKRHKTDAADAAAIVEAGTREHMNFVPIKTVEQQDLQSIRRIRQLEVETRTALMNQIRGLLAEYGIVVNKGHSALREALIECCIEGKGEDVVHDLTPRIRKHFEGLKARLMGIDERVKEFDLELERVAKTDDRCKRIMKIPGVGPITATAIVSQVGDAREFKSARQLAAWMGLTPKQNSTGGKVTTLGISKAGNKDLRTLLIHGGRAVMMNPGKKKDKRSEWAVALKSRVGMNKAAVAMAHKNVRTIYALLRNGTEFKDNYKPRLPICKVA

SEQ ID NO: 214179 - protein, 424 aa, unidentified
MKVTFQTCCGVDVHKSFLVATIIKTSSSIEPSYQKRRFSTFNNSILEFKKWLLENECLYVCMESTGKYWIPVFNLLEDEINVTIANPKWVKAVKGNKDDTKDSKWIGDLFRLGLVRGSYIPCKKIRILREFTRYRYKLVSCRSSEKNRYQNALTVCNVALDSVVSDIFGKSSASIIDYLLEQSGTSIDHEVIASKLLKRLKAKEDAVIESIEGYQMTDSQKYRMHLVRAHMDYITAAINDVDSEIESLIASDPDYENAVELLCTIPGVKYDSAITIISEIGIDMSQFCSSKRLCCWAGLTPGSNESAGKKKSVRITRAGVYLKPALVQCAHAAVKSDKSPYYKKKYESLVKRRGKKRAIIAIARMILTAIFQMLTTGETWNPCDLYKIDMPEALLEKQKQKAIKQAQKLLIREGLLPPTEPIAS

SEQ ID NO: 214180 - protein, 331 aa, unidentified
MKKQALVGIDVSARSLDVALERGKTSRQDLVFENTAEGHRKLAKKLTRGGMRARVCLEATGVYHLDLSLALHATNGIEIMVVNPRAAKDFARAQLQRSKTDRVDARSLLEFNRRMEFVAWQPPSRMILDLRALSRRIQALLVNRAQEKNRLHADAVVADTTPAIQESIERHIQSINDEIAALTEAALDIVCADAELKPKFDHLVSVKGIADASAITILAELAVLPNDMTVRQWVAHAGIDPRCVESGTSVRGQVRISKVGNRHLRAALFLPAMVASQHEPQVKAFYQKLIANGKKPMQALVAVMRKLLHAIHGMFQHDENFIGEKFYAGNA

SEQ ID NO: 214181 - protein, 538 aa, unidentified
MRTLFEHCRMQIPPYRINYSPLRERRFGARLRLTAMQQNKSLCLSDFIRNPDSVIKDFNEIPDGDDVEYVKEYGIGIDCHSKFIEVCIRYRNGTVIQKSQSRFSTSWNDLVSGREWCLETLKTNADPVPDLSEPLHYLVESTANYHMPVCMAWGGNPTIINPTIAGATKRKTDVLDSRLLALHDQLNIWRECFIPSEEVKSLRVMISQRDRCIQDATVTGNRINSIITRFGFTIGRDGSVVKNPAVRAIVEDQISDHPSEIEGVCPIPIPMDVRIVLRAEYGKFDRLTAQAEEWKEKIIAKARSIEWETDTGTLPGPEMIRILSTAPQVGEMTAITWLARVVTPRRFRNAKALSAYCGLDPSLKISAGKVTSTTMRGGSKPLHKALNMSAHRLIHRHNEMFGIWGYNLQQQTGKKKKAANAVARKLSVAMYYMMKTGTEFSYEKYRSIRSIDVFDIPVEELVLINPDFKRYIRILKESNINTTVDLATAYVTCSLGSCRGLGKKFYGLLKDFLDHHVTYKQIYDELQEQLNRKEVEAE

SEQ ID NO: 214182 - protein, 311 aa, unidentified
MNSEAYVGVDVSKALLDVKVLPSNETQQFSNDDAGIKKLIKFLKKIDPALIVFESTGGLEMPAVSSLTENHLPVVIINPRQVRDFAKATGRLAKTDLIDADTIARFARDIRPEVRPLKDEYTQLLSALNTRRSQIVDMLVAEKNRLHTAPKSSIKSIQEHIQWLERSLKDINKDIDKTIKKSPMWRENDKILQSFSGVGPVVSASLLCDLPELGTLNRKKIATLVGVAPLNCDSGRFRGRRRIKGGRANVRRKLYMAAVASIRHNPMMKDFYDRLIDAGKPPKLVLTACMRKILTILNAMMKNRTYWIASH

SEQ ID NO: 214183 - protein, 370 aa, unidentified
MKKNSTVPKSPKRATARKGGPITIGMDLGDKTSRYWVLGENGEQLSEGSVATTKKAMTQKFAGMCRCRVAMEVGTHSPWLSRLLARLGFEVIVANARQVKLISASSRKNDRMDASLLARLARVDPQLLRPIRHRSESAQADLMMIRIRASLVEARTMLVNAARGFAKALGERLPACDTDSMGVERMESLPEGLRDRLRPLLVEVESLTEKIHELDVNLEQIARSQYPETELLRQVRGVGTLIALTFVLTIEDRERFQKSRDVGCYVGLRPKQSESGQSQPQLRISKEGDVYLRKLLVQGAHCIVSRRGPDTDLKRWGLKLATRGGKNAKKRAIVAVARKLAVLLHRLWVGGEVYEPLRNSQPALSSQRAA

SEQ ID NO: 214184 - protein, 329 aa, unidentified
MSKNSIVCAGIDTGKRKLDVAIKGVNGQRVELLIDNTADGHEVLSGWLRKHGVERVGIEASGGYEEAVVLHLRKEEFVVVVFQPIQVRAYATFHLRLAKNDKLDAALIADCTAATTRIHAPPDVRLVPFAHHMTLIDQIADDIARIKTRRESCRDQRIRQHWSAEIARLKRLRKAELKILVAAIREHDDLGKRLDLIESVDGVGLLTAVAILVRMPEIGRVTREQVAALAGVAPYDNESCDQVRERHIRGGRGRLRKNLFGAAWPASRFWNRQLVALYQRLIAAGKLHKVALIACARKLLIFVNTVVARGTPWNVQQPPRQAELGLQAA

SEQ ID NO: 214185 - protein, 380 aa, unidentified
MQPTHLFNVTSSLALSLELSSGSWKIAACDGCREKPALHGADAKAPWERLQQVLQCIEQLKAKWQLPADSEIYVVYEAGQDAFWIARALQAAGIKVFVVDPASIPVARHARRAKTDRLDALTLLECLFGWLRGERQRMHVVRIPSQQAEAQRQLIRDRGELQKEIGQHRDRTRKLLRTVGCWEEVQADLPARLDGGTLRCWDGQALPEPLRERLARECERLVLAQQQLAALEEQLRRQLPAPLQQRIEQLARLKGVGWIGAMRLVIELFWRQFQNRRQVGSCIGLVAQPYDSGASRVDQGISKQGNRKVRALLIEMAWMWLRYQSESAIARWFAMRTAGNAANKRGKRIAIVAVARRLAIALWRYIEQGVMPEGAKLKSA

SEQ ID NO: 214186 - protein, 338 aa, unidentified
MAIVFVGIDLAKNVFAVHGVDEHGKPALVRSSVPRARLHALIASLPACTIGMEACSGAHHWARLFIAAGHAVRLMAPKFVAPYRLSGKRGKTDAADAAAICEALQRPNMRFVPPKSLEQQALLTLHRVRQGFVEQRTALINRMRGLLSEFGIVMPLRASTVRLQAGAALEDLPGWANIAIGDCLSELHRLDERVAQYDRHLAAHARQDDRARQLMRLNGVGETTATALVGSVGSAHEFRSGRQFAAWLGLVPGQYSSGGKTRLGRITKAGDGYLRSLLVLGARAVLNAAKGRTDALSCWALALLERRGYWRTVVAIAAKNARMAWAMLRRGEAFVMPA

SEQ ID NO: 214187 - protein, 443 aa, unidentified
MSTLAAAPAEPVFAAFAAIDWVSKEHVVASVPAAGGRIEITKLKNTPEAVELWAASLRQRFPGAPTAVALEQKRGGVLYMLNKYDHLVLYPVPPTMSSSYRHAFFPSGAKDDNGDTLLLLDLLRHHRDRLPSLQQDTPDTRLLRFLTQDRRRLVEQKVSVLQQLTDCLAQYFPQVRPWFRSLDTPLTQALLERWPSLQQLQSSHPGTLKRFLAAHRSWDADRIAEQIRQIQAAVPATRDQGVLESCSRKTAACLAQLRVLRDQVAAYDKRIAAVTADHPDAPIFSSLPGAGAALTPRLIAAFGTDRKQWRDAADLQRFSGIAPVLVRSGNCSRVAMRRACPKFVRQTFHEFAAHSLPFCPWAKLLYEHHLQGDKKNHHRAVRAVAFQWIRIAYHCWVDREPYDERIFLAAQRRRNSPFAGKLAAEAGIEFQNHAGFHKLAAKA

SEQ ID NO: 214188 - protein, 348 aa, unidentified
MTRKFLKQVAGIDVAQNELVVSLGRMHEDITVEIYAHKTFPNTEKGFMTLVLWVKKLAWEAIPVHFVMEATGVYHEPLAYFLDDKGFLVSIVLPSKISNYFKTLDVKTITDKTASEAITRFGLERKLDTWKRPKAIFKKLRQLTRERDQVLEERTLSKNQLHAEQAEAEPNKSSVARIKKRIEFLNKQEKEIRDEMGQLIENDEDVKNIIIIICSLPGVGLLTAATVLAETNGFDLVRNKRQLTSYAGLDVKEKQSGTSVKGKPRISKKGNKHLRKAMHLPALSAIRHDELFKALFERLVAKNGIKMKGIVAVQRKLLEMIYTLYKNKQEYDRDYIAKKLENQNKKAA

SEQ ID NO: 214189 - protein, 343 aa, unidentified
MDYFAGLDVSVKDTSVCIVDGTGKNVREVKVASEPETLMAVLTNPAYHLKRIGLEAGPLSQWLFSALAEADLPVVCVETRHMRAVLKAQINKTDRNDARGIAQMMRVGLYRPVHVKTLRSQKLRMLLTHRKLLQSKAIAIENDLRGTLRNFGLKIGIVGRTKFEARIEELVEDVPDLAALVEPLLIVRRVLREQMAVLHRRLLAIVRDDEVCRRLMTVPGVGSVVALTYRATIDVPARFRRSKSVGAVFGLTCSKYQSGEIDRSGRISRRGDEMMRVMLYEAAQSMLRSKKWSWLKAWAMQVARRCGMKKAIVALARRLAVIMHRIWVDGTEFRWTREAALAA

SEQ ID NO: 214190 - protein, 345 aa, unidentified
MNTTHIAVDLAKSVFQVAVSHSPGRIAEEHRLPRPRFRSFFLHRPPSHVLMEACGSAHHWGREIQALGHQVSLLPASHVARYRLGNKTDRADTRAILEAARNEKITPVPVKSLDQQAITALHRLRSGYLASRTARINAVRGLLGEFGIPIPKGARSFLTNAHRALDHDLIPAYLREALFQALEEVRELETKADTLKDQLQRLGDNIPTVQYLLTVPGIGVLSATALFSTVGVIHRFRSGRSLANYLGLTPREFSSGFRRRMGRISKRGDAYTRMLLVHGARSALLAAHRVQEPDQLQAWAIRTAKARGHNTATVALANRIARIVWRVWRDQRPFQRYPLVQEVPA

SEQ ID NO: 214191 - protein, 330 aa, unidentified
MKKWNFILGVDVSKLTLDVHCAELNEHIKIANGKEGFKALKKWVKEYKIDLSKSIIVMEYTGGYEYKLLQFCESLSIQYTRLPGLAIKHSLGISRGKNDKVDAKRIATYADEKIKTISADKPLNMRILRLKELLSFRKRLVRMNAGLKASLQERISMYEVTEKDTIRKITEENIERNKADIEKLDLAMIELIEADAGMLSNYNIITSIKGIGPINALMTIAYTENFTSFSNPRTYAVYVGVIPFDHSSGTSLKGRKRVSHIANKELKQELNQAAKTAIIWDKELAAYAARKLQSKPYPLVLNNVKFKLILRMFSLVKRGEVFVENYKNVA

SEQ ID NO: 214192 - protein, 343 aa, unidentified
MNHFAGLDVSVKETSVCVVDDTGRIVREVKLASEPDALLRVLGNPAYRFKRIGLEAGPLSQWLFSALAEAGLPAICVETRHMRAVLKAQINKTDRNDARGIAQMMRVGLYRPVHVKTLRSQKLRMLLTHRKLLQSKAIAIDNDLRGTLRNFGLKVGMIGTVKFEARIRELVENLPDIAELVEPLLMVRRVLREQFGILHRRLLAIVRDDEVCRRLMTTPGVGPVVALTYRATIDVPERFRNSRAVGAVFGLTPSRYQSGEIDRTGAISRCGDEMMRVMLYEAAQIMLVRSTKWSWLKAWAMQIARRRGMKKAIVALARRLAVIMHRIWIDGTEFRWTREVTTA

SEQ ID NO: 214193 - protein, 314 aa, unidentified
MESTTPVKTTYAGLDVAKDRLDYALPDERAGYVSNNAEGHARLLRLLRSFAGVRVVCEASGGYERAAVAALLAGGLEVCVVQPGRVRAFALAEGLLAKTDPIDAALLRRFGEKMQPRLAVPTDPAAATLRELLEHRRGLSDQLVAVRNRLELAGPTLRPLLQRQEHFLQKELVAVEAMSAAHTAQDPFLREKAARLRQVQGVGPILAATLLGYVPELGRIESAQLCALIGVAPFARDSGHHSRPRHVRGGRAVVRQVLYMAAVAATRFNPILGAFYARLVAAGKPKLVCLVAVMRKMLGVLNRLLADPQFVLVR

SEQ ID NO: 214194 - protein, 417 aa, unidentified
MDPLLPVVLSCCCGIDVHKKSLTACLLTGGASGEVVQEVQTFTTVTAGLRALAAWLQQRGCRHVAGESTGVYWKPVFNVLQPAGLEVVLVNAQHVKNVPGRKTDVKDAEWLATLLRVGLLRGSFVPPPEQRDLRDLTRYRTQVIRQRAQECNRIQKLLEDANIKLASVASNILGASGRDMLRALSQGIDSPGTLADMARGRLRDKLPQLREALDGVLRPAQRWLLSEQLRKVTELDEAISRLDAQIMQLCLPFARALALLDQIPGINERLAQVIVAEIGLDMSRFPNPAQLAAWTGVCPGNHESAGKRQSGKARQGNRWLRAALVQAGWAAARAKGTSLQATFGRLKGRRGVKRACLAVAHRLLRIVHRVLRTGQPYQEEGPDYYRAPDRERLKEKLLARLRRLGYRVSVTVEEGAA

SEQ ID NO: 214195 - protein, 383 aa, unidentified
MQPNDTVNPTILLAIELSASTWLVAARVPGAEKPHLHRIDGGDTAALLALISSLRARVARRLDAPQIGVVCCFEAGRDGFWLHRLLTAHGVASHILEPTSILVNRRARRAKTDRLDAEGMLRVLAAYLRGDHQACSMVRVPTLDEEDAKRTHRERENLVHERLRIENRIEALLFTQGIRKRPSLRSWERDLDMLRTGDGREIPHHLRAELDRLRRRLVTTLELIREVEAERDQAAEAKPQDQACRKIAALCRIRGIGANFAAVLTREVFYRSFDNRRQIASYVGITPMPYQSGGMDRDRRISRAGNPRARTTMIQLAWLWLRYQPGSELAEWFRERVGTLAGRTRRIAIVAMARKLLIALWRYAETGVIPAGAEIRAETIVAA

SEQ ID NO: 214196 - protein, 359 aa, unidentified
MREQRNKISFRGQKIYVGIDVHLKSWSVTVLSETSVLKKFSQHPSPEALYGFLTRSYPGAEYHSVYEAGFCGFWIHERLTALGIDNIVVNPADVPTKSSEKLRKTDTVDSGKLARSLRANELKGIYTPDSVSLEMRSLIRLKNSITKDTTRQKNRLKSQLRYLGIEIPQEFLTPFSNWSKRFFAWLKEIETLTPSGRQALDIHIRHLEELRRQKLEMTRALRTLAKTDRFREPLRLIMSVPGFGQATGMAFLSEICDITRFRNAEQLAAYIGMIPMCHSSGEKDGTGDITVRKHGVMRCNLIEAAWVAIRQDPAMNLFYTEQCKRMPKSKAIVKVARKLVNRLFFVLKHQTEYVNSIVS

SEQ ID NO: 214197 - protein, 482 aa, unidentified
MKKKNIFQNRSQQLLRLFEKAGNRLKMMCVPIDYAKKDHIVMFCNGHGDILRKPFSVKNSLEGVKYLIDQVMRSCRQRHIKKEHVFFGGEDTNSYAENFANALRAKDWLVANVNAHDAKKQRDNLQASTDRIDLMGIATMLLNLRAKCSPAQEGIYRNLRTLVRHRKKLVVMKTEVKNRVHTLVDRLFPGFLNEKNTGINAFSKSSLFLMENRFSAQQIRRRQKPTLIKILKRCATPDAQSIAAKLHSYAAQVITTPDEYAATLQLSLEHHIKHYRCLQENIDQLLSEIGLLLAQTQGAFLTSIKGVGIVLAAGVSSEIGSPFEQKPLNNLTSYCGIIPRVNQSGGIEGHTHTGRVSKRSNHILKDYVVQSALQMGLRGPEPLLQDYKRREAAGQHAGFGIGRRFLRMAMCLMRSSQVYLPPTLRSPQTQMQERAGYYLTTWPLLRDKWKKAHAHQAAFAKDQPLGQWRQIVQELYDIKLKL

SEQ ID NO: 214198 - protein, 350 aa, unidentified
MMIIGCDLHTRYQQIAMVDTETGEMLECRLEHANGEARAFYAALQGPVRVGIEATGYTHWFEALLTELGHELWMGDAAKIRAAVVRKQKTDARDAAHLLDLLREGRFPKIWRPSPVERDLRQLVWHRQKLVWMRGAVKNQLHALAMGEGVCRKKQLFTAKGRKELEGLDLGPWSSYRRRELLRMYDEMAAATAKLDLEVERAAKSQPLAVRLMTHPGVGPVTSLAFVLLIGPVARFERSKQVVSYLGLNPQEHSSGGKQRMGSISKQGNPMMRSLLVEAGHTAARFDPELKRMYQRLKFRRGASVAKVAVARKLAVRMYWMLRSAANYAQLVRMQGSPWATLVENSPSLG

SEQ ID NO: 214199 - protein, 373 aa, unidentified
MNYTTTYVGLDVHKETIAVAIAEEGHSEPVSLGLIPNNHDSLLRLLKKLQKPGRQLRFCYESGPCGYEIYRFLTERGISCIVVATSLIPTKAGDKVKTDKRDAKKLARLFRSGELTAVWVPGEAQEALRDMVRSREDAVRDLQRKRHQLGKFLLRLGIHPPQGVRNWSAKHRQWLEALKMDLGAHQVVLSDYRNAMIQAEDRVKHLEREIALHVQGSVYEPVINALKALKGIELITAVALVAEIGEFGRFKGPDQLMAYAGLVPSEYSSGAKSRRGSITKTGNHHIRWMVVESAWHYRHTPKVGYQLKKRQQGQTDIIKQISWRAQNRLNLKYRKLVGKGKQKQVAIVAVARELLGFIWSVAVEAEKEMKKAA

SEQ ID NO: 214200 - protein, 384 aa, unidentified
MTATRKQHSSEPRPALYLALELSWSEWKLAFATAPADAPRLRSLRARNTDGIREEIAKAKKRFGLAEDAAVLCCYEAGRDGFWLHRWLTAQGFDNLVVDSASIETNRRQRRVKNDRLDAGKLVSMLQRYHGGEKKVWSVVQVPRQADEDRRQLHRDLIELKAERTQHVNRIKGLLAGCGLAVATIQADFPSDLAELRQWDETPVPAELHQRLLREFARHQFVQRQILDLENERARKIRSGKDRPTKKVQKLLNLRGIGVNSAWLFTHEFFAWRGIRNRKQLAALAGLTPTPYASGDSSREQGISKAGNRRIRTMAVEIAWCWLQYQPQSALSQWYERRWAKGNSRQRRIGIVALARKLLVALWRYLEVDVVPAGAATLDWREKT

SEQ ID NO: 214201 - protein, 366 aa, unidentified
MDKRTTVGIDLAKEIFAICVLDAQGAVLERKVLRRAAFERWAESLAAPCTVAMEACGSAHHWGRVFAARGHAVRLMAAEFVVPFRQGGKNDGNDALAIAIAARQPTMRFVPVKTVEQQAILAWHRMRQGWIEERTALLNRVRGLLAEFGLVPGRSPAVLIAAMARLVDEGTAPAPLRAIVQQAREQLHQLDARLGACDVQIQAHARQSPQAERLRALLGVGPITASAVVATVPDARLFRHGRLFGAWLGLTPSQHSTGGKTRLGASSKRGDAYLRGLLVNGARSALQAALRAAPDKATRLQQWMVGLAGRCGYQKALVAIANKHARMIWAMLARDEAYDPQAWQRHPRARTTAVTTMPSATALGNA

SEQ ID NO: 214202 - protein, 342 aa, unidentified
MDHYAGIDVSLECSSVCVVDASGKIVRETKVASEPEALIDWFRSLGFDLARIGLEAGPLSQWLYAAMKQAGLVVELLETRHVSDAFKAMPVKSDRSDARNIAQLMRLGWFRPVHCKSLSAQEIRAMLTARKLIQTKLLDVENSLRGILRGFGLKVGKTTRTSFASRIEELVEDHPNLQEIGKALLRARAVLLAEFNSFEKRVRAMSRLHERARLLMSTPAVGPIVSLTYASAIDDPSRFTSSKRAGPLFGLTPKKYQSGETDYSGRISKLGDASVREALYEAAHIMLTKPIKGCAQLKSWAMRIARRAGMSKAKVALARKLAVIMLRMLKDNVPFNPAAKAA

SEQ ID NO: 214203 - protein, 368 aa, unidentified
MLYLGIDQHARQITISLRDEHGDVVQARQVSTQPEKVHAFFQKLTRERLHGGESFVAVLEVCGFNDWLIRMLHEYRCHKVILIQPEERKLRKTDRRDAAALSELLWVNRDRLLQGKPVRGLRQVDIASNTDQESRRLTTLRKDAGQARTRLVNQIRHILRRHNLQWQMPTKRFPTKAAIAWLKQLALPEIDRLEMDHLLADLEQVQGRRQELEQVIARRCGVSAEAMLLASMPGVSYFTAVALACRVGRVERFPRAHSLANYWGLTPGCRNSGERNQRLGSITKAGSSMARWLLAEVTIKVLRRDARLREWFKRLKRRRGASIARVAVMRKLATVIWHMLSRRMTYAACRAAGEAGTKARQEQGCGRE

SEQ ID NO: 214204 - protein, 359 aa, unidentified
MQTKVNEKLFDGQSIYIGIDCHKKNWTVTILGEQYEHKTMSQNPDPDILASYLKRNFPGADYSAVYEAGFNGFYPCRKLRQLGIHCNVIHAADVPTRQKDKLQKMDPVDSRKLARSLRSREFEPIHIPDQSLESDRALVRQRFRVMRDVTRTKARIRSLLFQFSISVPDQFTLGQTRSWSKLYINWLKGLHTEHESLKQTLDNYIRIGELQRKELLDVNRQVRSLSQTDAYRGNYNLLISIPGIGFLTAMTFLVQIGDIRRFERLDDLCDYVGLVPMMHGSGERMYTGKLINRGRKELKTMIIEAAWESVRLDPALMSKFNELTLRMNKNKAIIRISRKLVSRMRYVLINQEPYRLGII

SEQ ID NO: 214205 - protein, 344 aa, unidentified
MVIIGIDAHKRSHTVVAVDEQGRQLAQRTTGTTSSDHFALLAWAASHATERLWAVEDCRHLSRRLERDLLAAGERIVRVPPKLMANARAAARSFGKSDPIDALAVARAALREPHLPAARLDGQDRELRLLIDHREDLVGERTRIISRLRWHLHELDPSLETAVRSLTHLRNLDTLAAKLTDATGTVARLARELTDRCRQLTVKINELEQELITLVSTLAPSLLAIHGCGPLTAAKILGETAGIDRFHSNHAYARHNGTAPLPVWSSNRQRHRLSRTGNRQLNTALHRIALTQARTHPAAKTMIARRRAQGDGGLEALRVLKRRLSDVVYRALLADLQTPHTNAT

SEQ ID NO: 214206 - protein, 413 aa, unidentified
MSYTIAAIDIHKKVLMVVVATVANEVTDATGEAIEFESRRFGTGSSERKHLVSWLQERGVTEVVMESTAQYWKPIWMDLEPHFLKLHLAQAHSNRAPRGRKNDFRDAKRLARRLLADELILSFVPEAEQRMWRTLTRTKHQLIRDRVRLQSQLEALLEEARIKLSSVISDLLGASGRRILAALAQGETDPVKLAELGDDRLKCSKRELTDALTGSPEPIHLEILKLDLERLQLLDYQILSMDVLVAKELHKHQEAVLRIAEMPGFGVDSAQQIIAEIGVDAAAFPTAAQFCSWAGTCPGRHESAEQNHSSRSPKGNRFVRRILTQAAQAAVKKKGSHFQSLFRRLLIKLGYRGAIWAIAHRLARLVWKILHDTVRYVEQGQETNPKAKKRRAQKLTLALRKLGYQVMLTPIQP

SEQ ID NO: 214207 - protein, 353 aa, unidentified
MLIIGCDYHPSMQQIAWVATETGECGERRLMHRAEAEQFYCELKGKQVRVGIEATGHSRWFERLMAELNFELWVGDPAQIRAKQVRKQKTDRRDAEHILKLMLEGNFPSIWVPTPENRDLRQLVLHRHRLVGMRTRVMNQLQAVAMNEGIRQKKRLWSEKGRQQLESLSLMPWTAQRRQELLQLLDQFDPSIDQLNQAIEQEAERIPEVKRLMTHPGVGPITALAFVLVIGTPERFGCGKQVASYLGLIPCEDSSADRWRLGHITKQGNALLRYLLGQAAQSVARCERPWQQQYAHLTMRRNKAIAKTAMARKLAVRLFWMWHKGWDYQQLSKVGSQGRKSFPHSVVTTDSTR

SEQ ID NO: 214208 - protein, 438 aa, unidentified
MSNKVIFNLDELFISVGIDVGADFSWMSIALPNQQFVGKPYKILHNSIDSLTTAVSKIKEAEELYSLESRIFLESTGIYHYPLFCYLRDKGFNCSVINPIITKNSTNINIRKVHNDRFDSKKAALVGLKPDLKVSLMPSDLALNCRNLCREYYDLMDNRSAYVNKLQGELRMAFPQYLGIFSKVTINTSLTLLETYTSPSAFLEADKQEIIDIIKSTARFGLTYAQNKYNAIIQAATDANQFGYIIESNIKRIRLYISFIRKYDEEINDILESLHKLVDSNEDTKFVKQVHLIETFKGAGFLSAVSIMGEIGDFSAFSKPKQLFAYFGLDPAVKQSGKFEGTKVQMSKRGSSIARRVIHTLSLQSISISRNGKAKNPVLREYYLQKCDSKPKLVAMGAVSHKVCNMIFAILRDNKPFKIIAPQEHIKQYNAAKCDIAA

SEQ ID NO: 214209 - protein, 358 aa, unidentified
MNSAKYIGMDVHMATISVAVRDAAGKLILESVLETKTSTILQFIHGLRGELHVTFEEGTWAAWLYDLLKPYVTNVVVCDARRNALLKEGSKSDRIDGRKLSELLRANLLRPVYHGEHGLRPLKELVRAYLTLRQDLTRVMNRVKALYRGWGIPCAGQSVYHPRHRDEWLRKITQPSVRRRAELCYLQLDMLVGLRQQARQELLVEAKKHPAWKLLRSLPALGPIRAAVLMAMVQTPQRFRTKRPLWRYGGFGVVTHSSADHRYVDGQLQPSKKPVSVRGLDFSHHHYLKDLFKSAAIQASTREGPFREFYEALVGKGMRPEMARLTLARKIVTIAFTVWKKGVAFDAKYLKPQTASCL

SEQ ID NO: 214210 - protein, 327 aa, unidentified
MTIVILGIDLGKNSCSVVGLDASGAVVLRRRMRRQTILGFAAKLPGCVIAMEACCGAHYLGRLLMVQGHTVRLMSPEYVRPYVKAQKNDDRDAEAIAEAASRPTMRFVELKSEEQLDIQTLHRVRSRLVAARKTLLNQLRALLLERGHIFPQGRRKLEQALDALIDDPAFAVSPRMRQLVIDMRAEWQELDRRIAALNAEFVELARCDVAARRLTTIPGVGVLNATALVAAVGDASAFRRGRDLGAWLGLVPKQHTTGASRSCWASASAATSICGCFSSMGPGQQCRRSPRGQARSGRGCAASWPGLIATSPSWHLPISWRGLPGRC

SEQ ID NO: 214211 - protein, 345 aa, unidentified
MPIVGGLDIHRRQITFDYLDIVTGEARRGQITPADREHLRAWLARFAGREEVAFAVEGCAGWRYVAEELAAAGVTAHLAEPADTAFARGRKRHAKTDKTDARHLRMLLAEGRIPECWIPPARILECRALLELYNDLRRERTAWAQRIHAVLFHQGAPALGEGALRTEQGVAGLRAAAAAQLSPAGQLQVATALEVIDALEARLHVVRHQLLDAARHLTGAKVLAARLYGVGPVTALAITCWLAGAGRFSSSRQAVRFAGLDITVSSSDRKGPPGKLSRQGPPVLRWAVYEAAKTHARTSAPDHRYYAAVKDRKNSKRACLSEARKILRQAHHILAELGDDALAAA

SEQ ID NO: 214212 - protein, 346 aa, unidentified
MEQQQFVGFDVSQAETSVCVVDGAGTIVWQGKCASTPEAMAALIQRRAVHVVRIAVETGPMSAWHCRSLAALGLPVVCIDARHAKAALAMQLNKTDANDAAGLAQIVRTGWYREVAVKSEHSHRTRGLLAARAKLVGMRKEVANQLRGLLKVFGHVIGAAGGEKFDARARELAAGDATLTITAEALLAARAALAAQVARLDKLLLTQARQDPACQRLMTVPGVGAITATAFIATIDDPARFKHSASVGAYLGLTPRRYQSGTMDVSGHISKAGDALLRCYLFEAATTLLSRVQKTSVLKEWGSRLAKRIGHKKARVAIARKLAVILHRMWADKAEFRATPSATASA

SEQ ID NO: 214213 - protein, 472 aa, unidentified
MMTEPQEIDDEEHEQIFQRVAAIDVAKASGHVCTRVPHETRPGKRRTRVWKVGATTKAILELADHLVCEGIEMVSVESTSDYWRPFYYLLQARGLSVQLVNARDVKNVPGRPKTDKLDSVWQAKLTERGMLRPSFVPPPEIRRLRDYTRLRTDLTGERGRHWQRLEKLLEDALIKVSSVASTMDTLSVRDMLEALIAGERNPRVLAGLARGRMRAKHAALVEALTGQFDDHHAELARLLLDQIDALAGQIDKLTGRIEELIAATPAAQPPTDPPHGDHTDSTDSADTAHAAHSAHADPELPEIPEIPGTALPAVDRLDEIPGIGRLTAQAMIAEVGLNMAQFPTAAHLVSWTKFCPQTFQSGPKTRSGKTGKGNPYLRAALGEAAAAAAKTDTFLGERYRRLVKRCGKRKALVAVGRSILVIVWHLLADPTARFHDLGPDFYDSRIDKNKKARNHIRQLQALGYRVTLEPAA

SEQ ID NO: 214214 - protein, 294 aa, unidentified
MATIDGVGIHKETRSFNTFTSCLTEMKEWLLANGITHVAMESTGVYWKPVMRVLEEDIPNVWIVNARHIKNVPGHKTDKMDSEWICKLLLAGLLKPSYIPPKEQRQLRDLTRYRNKLIQTIAAEKNRMMRVLEDCNIKLSSVVANTSGVTATALIDMLCEGRKLTMADIESVYHKKLSASPQELLEACTGFVEEHHVYMLQMIRKSIAQTQGLVDDLSKRIKEILIKYDNVLELLKEIPGFNTKVVEDLASEIGLDMSAFPSEKHLASWAGICPGNNESAGKKKAEESLTVTNK

SEQ ID NO: 214215 - protein, 355 aa, unidentified
MDSRKYIGMDVHQASISIAVRDAAGKLVIESLIETKAATILEFLQGLKGTLCVTFEEGTSAAWLYDLLKPHVANVVVCDPRKNALLKAGNKNDRVDARKLSDLLRAGLLTPVYHGESGVRTLRELARSYLTLTKDLTRVMNRLKALYRSWAIPCAGEKVYSPRHRSAWLEQLSEAGVRRRAEQLYQQLDILLQIRREARRELLRESRKHPAHELLRQIPRLGPIRVALLIALVQTPHRFRTKRQLWAYCGLALQTRSSGEYRFTAGQLQHSKKLPALRGLNINHNHDLKNLFKSAATHVSTSPDALGDFYRSLLAKGMKPAMARLTLARKMAAIVLTIWKKGARFDPGELKRQAA

SEQ ID NO: 214216 - protein, 412 aa, unidentified
MDVIVERPAALDVHKAQVTACVRLPGEAGERRSEVREFSTMVGGLLVLRDWLKAHGVTKVAMEATSVYWKPVWAVLEDDFELLLINARHVKNLPGRKTDVKDAEWLCQLLEAGLLRASFVPPKPIRALRQLTRYRKAQIKERQREANRLHKALEDTGIKLDCVATNILGKSGRDMLDALCQGTTDPEVLADLARGKLRKKIPALREALVGRFEPLHALLVSSILAHLDFLDEQIERLSDAIEEQLRPFGSAVEVLRSLGGIETRTAQNILAEIGVDMSVFPTAGHLTSWGGQCPGNDQSAGKRRSGRTRKGSKWLNDALNDAAMSAIRTNDSYLQAQYQRLRPRVGHGRALGAVKHSILCACWHMLKNGELYRDLGGDYFRKRDPERQTKRLVAQLERLGHKVTLEALPEAA

SEQ ID NO: 214217 - protein, 340 aa, unidentified
MGEVTTIGLDLAKHVFQVHGVDAEGATVLRKQLRRAQVLAFFSRLPPCLVGLEACATAHYWARELRALGHEVRLMPAQYVKAYVKRNKHDAADAEAICEAVVRPTMRFVPVKTADQQAAVLLHRGRERLVRQRTGLVNALRGHLAEFGVIAPQGLRNVGKLIAIVRDERDARLPDLARQVLQVLAAQIEQLEAAVAAIEKQLMAWHKSNPVSQRLASVPGIGPIIATAIAATVVEPSGFRSGREFAAWLGLVPRQNSTGGKHRLGGISKRGNQYLRRLLINGASANLLRSKATNADPWVIGLRRRRPPLVVAVALANKTARIAWAVMLREKEYQPRAVAA

SEQ ID NO: 214218 - protein, 381 aa, unidentified
MDLNRRSDPTPDGGEGMRIDIGVDLHKTQFTVYTQGGEKSGVNGQYPTNEEGYTAFLGKLGQRKRSGHDIRIGVESTGNTRYFKHRMEERGYPVVVINTMKFKVINESVKKTDKHDAATIAEFLSKDMLPESRLCSESSEQLRRLLKVRRTLVRTRVTVKNQIHGLLVSMGMEDTRASLQSKRGRQRILDTLAGAAKGLVVQPLFETIDRLTENVKAIESEIEKLVAGDKVVELLETIPGCGPVTACTIRAYTDDIGRFSNHKKYASYAGLAPWVQCSNEPAHYGRITKRGPEELRTAFVQLVVGIKRSRQSASWRLMERYEAMKTVKGPGKSIIATARKMSKIVWFMLTREEKFNVGFMTDSSLEKKIDSTRTALDEMSA

SEQ ID NO: 214219 - protein, 401 aa, unidentified
MNAVGIDVSKGKSTVAIMRPYGEIVASPFEINHTEDDFKKLVSQIQKLHGESRIIMEYTGRYYEPLANYLYNTGLHVSVVNAILIHDYSNSSIRRVKTDKKDSIKIANYGLDRWLDLPDYMPEDELRQALKVYNRQCSQYAKLKVVLVNNLIALSDQTFPGIDSLFGKTPRQDGHQKWIDFIKSYWHKDCIIKKSFKSFDNSYNLWCSKNGYHYQSNQTIDIYQLAYEAVASMPYNANTELIITETANELISLVDTLERLRIEMNRIASQLPEYPVVLSLHGVGTTLGPQLIAEIGDVRRFHNRKALIAYAGIDSSPYQSGTIDIKSRGISKRGSATLRKTLFTVMDCILRHKHTDEPVYQFLDKKRAEGKHYYVYMIAGCNKFLRIYYARVSEYLNSLEK

SEQ ID NO: 214220 - protein, 317 aa, unidentified
MTESVKVNVGIDVSKDFLDVHVGDVALRRVPNRSSGLSVLKRILSRYTVSLVLLESTGGYENLAVTYFQSLGYDVCVINPRQARDFARSMGRLAKTDKIDAQMLCRLADVIDASPERARFVKPLTDERRQRLVSMVRRRRQLCDLMIAERNRRSRTDDYGSESISTVLDFLTDEVARIDRDIAAHVGSCFSDISSLLQSFTGIGPVTASTLLGELPELGKLNRRQITALVGVAPFNRDSGYMRGRRRISGGRSGVRNVLFMAALSAVRFNPVLKAFFARLVAAGKPKKVALVACMRRMVCILNAMLRDGSRFKVAVG

SEQ ID NO: 214221 - protein, 348 aa, unidentified
MSQSNQYVGLDVALKETSICVIDDADKIVWRGRTDSTPEAIASAVKQHAPHAVRIGLESGQLSSWLFHELKEAGLPVICVDARHAKAALSLKVNKTDANDALGLAQIMRVGWYREVTVKGLDCQAVRALLVARAQIVSQITTLKNCVRGILKTFGRVLPKGLRSQFPARVRAAIDGHPVLGAIIEPTLQVLEATRAQLLVYDKAVIQRARSDDTARQLMSAPGVGTVVALAYMTGVEDPARFKRSSSVAAYFGMTPRRYQSGEVDHAGRISKCGDGMVRGLLFEAAKVLLSRSARPSALKTWGEALGKRIGAKKATMAVARKLAVILHRMWTTGTTFQWNIEAASPAA

SEQ ID NO: 214222 - protein, 462 aa, unidentified
MARRQAKPRDPAARQPAGSLPIVNPHAAAIDVHSDNHVVCVPADRATPHVRTFGANSCDLLQIAAWLKECGITTVAIESTGIYWIPLFELLEAQGFEVCLIEPGQASRCGARPKTDVLDAQWLQRLHSHGLLQGSFRPPDEVIALRAYLRQRQMLISYASTHIQHMQKALEQMNVKLTEVVSDINGVTGLRIITAILAGEHDPARLAALRDGRCKNDEATIARALEGTWREEHLFELSQAYELYRAYQMKVTECDRRIEQAVARLPNRSAGDGLQRKLRTRGRKPNDLRFDGANPVFRALGVDLTAIEGIDVSTALVILGEIGVDVSKFPTEKHFASWLGLCPNHQASNHKLKSRRVRKGKNRVAIALRMAARSLHRSHSALGAFFRRMHSRLGTKGAITATAHKLARYVYAMLKHGQAYVSQGLAEYEAAMHERMTRALRKKARALGYDLVASQQSSPAVP

SEQ ID NO: 214223 - protein, 415 aa, unidentified
MKNYCGVDWAEGHHDIAIVDSDGKLVTKKRIGDDPTGFAELTQLLAEAGDMAEDPIPVAIETPRGLMVAALRASDRPVFAINPMAVARYRERHSMARAKSDHADAMTLANILRVDAHMHRRLPADTEQARAIAVLARAQQDAVWRRTKAGNELRSLLREYYPAFLAVFAGKSATNLATPEARAVLAIAPTPAHIVKLTKTRIATALRRAGRQRGIDALAGELLEGLRQPHLRQPELVEKALGRQALALLAVLDTACTGADDLEQAAAEEFRKHPDYAIITSFPGLADLAGARVLAEIGDDRTKFATDRALKAYAGSAPVTRASGKTISITHRRVKNDRLAAAGWIWAFSAASRCGPAREHYQHRRAHGDRHAAALRHLFNKMLGQLHHCLQTREPFDPVKAFGHTVATPPRRAAA

SEQ ID NO: 214224 - protein, 416 aa, unidentified
MKLFVGLDISSEKIDVCFMTDDSNLSILNRLSVANDLNGASEIKALILKHHAEVSFEQIVIGMESTSLYSFHPAMFFQEDADLNALPTVVTVENPFKIKQYSRVFDEDKTDTNDAMRIADYLRIQRFTTSPIKEEKYMALQRLTRTRYQLVTELVTVKQHFLENLTYKCNTLSKELKSESTGIFSATIVHLMTENYSLDELANLPLEDFVQLIQNVGRSNFKNPEKLVKTIQRAIKNSYQLPRLMNESIDIILSTLVVQMRSLQQSIKQIDKGIEKLVEIIPEYQCLTSVPGIGKVYAAGILAEVGQIERFDDQAKVAKYAGLSWKVKQSGNYQSEVTPLTKQGNHYLRYYLVEAANSVKNHLPEYTAFYKKKYTETPINKHRRAIVLTARKFVRLVDALLRNHQLYTPPKSVLKE

SEQ ID NO: 214225 - protein, 522 aa, unidentified
MTSMARSCPRRSRKKFLVQKPQGQLTSRVQAVGPDHFAIVSVDCAKSRSKFMLADFYANVLVPPTVVAHTQGELRAAGERLRQALRQHDLRDLVVAIERTGEYHRPVQRAFREFGWEVRLVHSYASHQHRQPADPGNKTDDTDLAAIHRAAVNGFGLIEQPLPDEYQRWQLLVRHRRDLVWKMSKLCCQIREHLHAGMPGYADGFEHLWSSPLALAVARRTGSAQAVGQAALSGLQQIVDQANLRCRQSTLLRILAWADTAPPAHPHSAYLQQIITALDDDRLAKLQQIQALEGTLASFLARSPFVLLLIIPGINVVSAADLAAEMGPPPHYANANAITGRAGLVPTRYQSDRVDYPDGPLRRNANRRLRTALLQIADNLVTCNHHFRARATLWRQAGKDPRWIRVKVAKNISRIAFALIVGRQLFRHPCCQQRHYILDKLLAFHREHDTPMDQVLRDLQAATDQLPHSAYAAEAQPLAERLHHLQASRRGPQLLGNILPIVLARLGTQQVQSTMSEARAPS

SEQ ID NO: 214226 - protein, 408 aa, unidentified
MVVHAASVTSSTVVVAVDVGKTEFAFSVTDAARTSLLKPRTGCPMTGPSLRRVVAEIGRVLPADAAVKVGIEAAGHYHRPLLDAGWPVGWEVLELNPGHVTEQRRVLGKRTIKTDVVDLQAMTELLLAGRGQPVRDRSLVLGELTAWSAHRTGRVLLRTATKNQLLGHLDRSFPGLTLALPDVLGTKVGRLVAAEFADPARLAALGASRFIRFGATRGLQIRTPVAQRLVQAARDALPTADAVVARMVLAADLALLTDLDTQVEQATEQLARLVPSSPFAPLLTVPGWGAVRAGNYGGALGDPARFEHHRQVYRTAGLNPIQYESAGKRRDSVISREGSVELRRALIDLGLGLWLTDPAAKAYGSQLRARGKKGMVIGCAMAHRANRIAFALVRDQAGYDPSRWTQED

SEQ ID NO: 214227 - protein, 409 aa, unidentified
MQVLHPRCAALDLGKDVLVAGVRLQEESSVQRACRTYRTTRTQLLDLADWLTSLGITHVVMEATGSYWRSVWNLLEGRFELTLANPAQIKNLPGRKSDVNDATWMADLHAHGLIRGSFVPPAPIGALRELTRTRKQFVREISRHTLRIQKLLDVANLKITGPISEILGVSGRRIMKALIAGESNPERLAALADPHLKASRTELVEALQGELTAQQRRLLKMHLKLIENLETAVAQIDRDIAKAVSPFRELVDRLKGVPGLSDISAPALVAEIGVDMSRFPTARHLVAWARLCPRLDESAGKVHSRRILKSAAWVKTLLVQAAWCAMRTRNSYLRAQFLRLRARRGANKAIVAVAASILTAVYWMIRDGQPYRDLGFNYFQASDTDRFVRRSVARLQQLGYVVTLTRGAA

SEQ ID NO: 214228 - protein, 428 aa, unidentified
MEVTHPRCCGMDISKTDAKVCVRVQDEAATTSQVTTWRADSSHILELAGTLLRQGVTLVVMEATGDYWKPFYHLLGDSGLNVMLVNARQVRQIPGRKTDVNDATWLADLGAHGLVHGSFVPPLEVRELKDLVRTRTTLIRLRGQEAQRLEKLLESAAVKLSATITDIVGVTGRKMLEALIAGDAPTAIADLAGRRMKASHEQLAEALTGRFTDHHGFLARLHLDMIDDYSRRITQVDERIEAYFDGSQTGTERVTQHVRQDLAVKRDLLTTIPGIAKPTAERIIAEIGTDMAVFPTSARLTSWAGVAPGANESAGKSKSSRCRPGDTYLKGALGTAALVASRTKDTFLAARYKRIAARQGHMRAIVALQRTILVAIWNVMATGQPYIDLGGDYYIRRRPGPAITKAIRQLQTAGINITFTSPNTAVIT

SEQ ID NO: 214229 - protein, 472 aa, unidentified
MAAEMTEKDVLLAQDTGLESQCVEEDVLGQGSRLSAADRRRNARLEQLRERVPVGGLVLGIDLAADKQHAVLCDHDSRVLARWKVTAKAWQLGPLLDRAVAAAARHGFASVTVACEPTGHRWQVLEALAAERGLPLVCIQPLVMRRAREQEDYTTEKTDAKDSVLIARLAARLHCYLPERLTEDWGLLRAAGTRREQLVTAQTAARQQARDLLECGWPAVLAAAPKCGFDSATWLACLHVVLSSCDGRPERLRRWTAEQFTAAVRGALGRFGGKRLRHTTVAAVYAALSDPAGRHPRRAGALVRAGWAVEDLAAASRRLAEAEAALTGLLDQLGLTELACSIPGLSPVGAAAILAETGDLTRFSHARAVVKHAGLAPRARESGQYTGTARLSGRGRPRLRLAAWRAVFGALRHNQALQDRYRHLTERADNPLSDGQARAALAATLLRWLHAIITQQRPYQTITTTGDLHTAA

SEQ ID NO: 214230 - protein, 299 aa, unidentified
MVVIGADTHKGTHTLTAVDDGTGRVRGSREIKADDAAHLAAVRWARGLDQDRVWALEDCRHVSRRLEQTLLAAGERVVRVAPHRMGASRKAEREPGKSDEIDALAVARAVVKDGVEQSPVAYLDQQAMEIRLLLDHRDDLVAERTRTVNRLRWDLLELCAELERSLKRGALNGARGLDRVDRQLRKLAAGARVTVAREQISQLRSLNRQLCQFQAELAELVAAHRPKLLAEQGCGPVTAAILIGHTAGVRQYRKQSSFGLQTGTAPIPCSSGQRTKHRLNRGGDRQLNHAPHIIAVTRA

SEQ ID NO: 214231 - protein, 369 aa, unidentified
MSEVIREGAVRVGVDLAKRVIQVHAVDAGERVLTSRALARDKFLAWCARLPAGCIVAMEASSSAHHWARKLLALGLQPRILSAQLVSPYRQEGNTGKNDANDAAAICEVASRPRMRFIPVKSVEQQSMLCVHRLCEGLKEDRTACINRIRGLLLEFGLAFAVGVRALQAVLSEVLEDASNELGHLARLTLQRAQAQWHEIDAHLAWCDERIAEHRRMNQAVEQAATLIGVGPVSASAAVATVGDFKQFKSGAQFAAWLGLVPRQHSSGGKDRLGGITKRGDTYLRTLLIQGAKSAVMTAQGRSDRISKWVLALRERSGWQKAVVALANKNARILWAVMTRGAAFDADHLSTKPGAAPAAAAGTASTVLA

SEQ ID NO: 214232 - protein, 355 aa, unidentified
MSQEKYIGMDVHQATISVAVLDSRGKLIMESILETKAATILEFIGGLHGSLSVTFEEGTSAAWLHDLLKPHVSRLVVCDPRKNALLKDGSKSDRIDARKLAELLRGNQLTSVYHGEHGMRTIKELGRSYLTITKDLTRVMSRIKALYRSWAIPCSGTSVYAPRHRGEWLGKIPEPGVRLRAERFYQQLDLLQPVRQQARRDLLTESRKHQAVKLLRQIPSIGPIRAALLVAQLQTPHRFRTKRQLWAYSGFALETHDSGEYRYVRGKLQRNRERMTVRGLSNNHNPDVKNLFKGAAISASTHPGPLYDFYIALLAKGMRPTMARLTLARKIAQYHFTIWKKGVDFDATQLRGQEA

SEQ ID NO: 214233 - protein, 373 aa, unidentified
MPRYSTAFGMDVHLRSTTVCALDAETGEAVTRRFRGNPWGEVAEWMSGFPGPSLAAYESGYLGFAPQRELSGLGVDCVVAAVSRVPRSAADLSSKNDRNDAARMAKAILSHDVTPVWVPSPEIEGLRDLAAAHDAATARLAAAKQRLLAFLARRGYAYGGTTPAGNPRRYWTYGFLRWLDGIHPADDGGIRALAALRNEVEAADETREALLAEYRAAVAAGPLSAEVEALQSIKGCGFALAAAFASEVGDFSRFRSGRQVTSYFGLAPKQRSSADSVRLGGISGAGNALVRKLAVEGSWCYAQAGHQPKLMPKGSGVPLEIRMHGRKGSERLLRRRGEMLERGMPQAKANAATAAELVRWLWALGTMCREAGE

SEQ ID NO: 214234 - protein, 351 aa, unidentified
MQIVGALDVHRRQITFKTLEPASGECSRGRISPAAREPLRQWLERFEGFEGEFVLEGTTGWRFVVEEIERAGHVARLADPAETAARRGRKQRAKTDDADCDLQLRLLLAGELPEAWIPPVQILELRTRVRLRKTLIDQRTAWLQRLQAQLFHQGVPPGLKPRTASGRQELASVELSPAGREAVELYLRMLDQLDRELAPIDRALQTFARRQAGCRALIGQLYGVGAVTATAILAELGDARRFRSSDDAVRHCGLDVTVWQSDRKRAAGHLSHQGPSVLRWALFEAAQCAARHSSPDHAYYLEVAKRIDHNRACLSVARKLCRRAHHILRELGDDALAPPDPARATLVDAAA

SEQ ID NO: 214235 - protein, 396 aa, unidentified
MERISTLGIDLAKSSFVVCGLDKAGKQVLRRVFNRLKSAEFIATTDGCDVFMEACGSAHFWGRKLRGAGHSVNLIAAQKVVGFRKCNKNDRNDAHAIAIAGKCPGIEFVPVKSVEQQDVQSLVRIRARLIYRQTALVNEMRGLLAEYGMTICEGITPFRSKMSEMANGSISDFPGITPTIFQCVVSANEELLDITNRVEKHEALIHELTKKDDRCRRIQEIPGVGPLSAAAVIASVTNPGAYRNGRQFAASIGLTPKHVQTGGKDSKPVQLGISKHGDPVLRSMLVQGGMTVAKACKMRMDKAAKEESLEKSAENKTSLSSSLGQHPCRERAKKKAKKKIITPGREEWMRRMIVEKGMQKTAVAIANRNARTILSLLKSGDHYQPLGQQLPLEPVC

SEQ ID NO: 214236 - protein, 350 aa, unidentified
MIIIGCDYHPGFQQIAFVDTETGDCEEQRLEHCEGAQKFYRDLASQGKKVGVGMEASGHARWFERLLEELKIELWMGDAEVIRAKRGRKPKTDREDALHILKLLRTGDFPKIWVASWENRDLRQLLWHRHRMVQARTRAMNQLQAVALNEGLRCKKKLWREQGREQLESFGLAPWASRRREDLLQLLDRLSPTIAELTQAIEQEAEKCPQARRLMTHPGVGALTALAFVLIIGTTERFQCGKQVGSYLGLVPLEDSSGERRRLGHITKQGNSLLRFLLVEAAQVTSRTLPEWGSKYMHLTMRRGRKIAKVAMARKLAVRLFWMMRQGWDYQQVMKFGSHVEQPEPGDGVR

SEQ ID NO: 214237 - protein, 320 aa, unidentified
MIYIGIDISKDSFVAAYPTKSGYTTKTFNNDTKGVRQFIKSLPDESHCVMEATGNYSMLLLYLLQQAGILVSMENPQKIKHFSRAMMSVTKTDEIDAKLIAIYGEKMNPAPYKIPSESILLLKQKRTVLRQLKKHLAATINLQQSLAVLPKQDTTSKVAVEQTIKFLHKQISKMEEEITNLSNKEFKRQMDLLTSIKGIGNTLASALIVATGGFTYFTSAKQISRFLGICPTYQQSGTSVNIKGHINRNGDTHLRCQLYLAACSSLRCNTACKQAYDRLRANGKSGKSAIIAVANKLIRQAFAVVTSNRPYIDGYVSTFA

SEQ ID NO: 214238 - protein, 318 aa, unidentified
MNTNTLQNINVGVDTGKSQLDIYVRPLDIYFTVPNTDKGISDAIKIIKKHKPQRVVIEATGRLEMPFILACDKAKLPYVVANPLRIKRFAEAIGQRAKNDRLDAALIAHYAERVQPELTKLKSENIRLMSDLVTRRNQLLTMQTMERNRLQILPKNISSTITPILTALKNQLEKVEAKIEKLIESCPEYQAKNTILQSMPGVGKILAASLISNVPELGFITNKQASSLIGVAPITRESGRFKGKRMIKGGRPQVRTVMYMAMMSAIQCNPVFKATYERLLAAGKPKKVAIVACMRKMVVTLNSMLRDGAIWDKDSVKN

SEQ ID NO: 214239 - protein, 316 aa, unidentified
MKSPQNFVGIDVSAERLDVAVLPAGTHFTVAHTDEGIASLVLRLQELRPHSVVLEATGGYEISVAYAMSEASLPVVIMNPKVLRHFAKSTGKLAKTDKLDAQVLAHYAQAIQPPVRPLKDSEQMELATLMSRRRQLRDMIVMEGNRRRTSTPKVRGNIDQHLLYLRQLLEDLDREINDFIRRTPLWHEKSEILQSFNGVGPKVSASLIADLAELGTAPRTQISALAGLAPMNRDSGQWRGKRTIQGGRPAVRQALYMAALVASRRNPVIREFYQRLRQAGKPAKVALTACMRKILVILNAMLKNRTYWNPQLPLAA

SEQ ID NO: 214240 - protein, 362 aa, unidentified
MLYVGIDLHKRSLAVCVRNEQGDIVLRREVSTGWTEMDRFLAALQERARPEGGYLAVMEVCGFHGWLLKRLGKWGCSRAYVIKAPPQVRNKTDRRDAARLSDLLWINRDRIAGGTRLIEIHVVYQPTEQEEHARELTHLRMRLGRQRTRIKNQIHRIILRHNLAQECPTKGLFTLTALRWLEQVTLPELDRLDLDGLLEHYRVYSLQIQNVERLVHRAARQNAAIPLIRTLPKLGEYTALALWAHIGPVARFPSARSLAHYFGITPGCRNSGESDRPGGITKAGHPMVRFLLTQFVVHALRGDPGLRQWYCKIKRRRGGKIARVAVMRRLCEALWHMLSRQEPYRPVAAKVPDPGPTKRSVA

SEQ ID NO: 214241 - protein, 408 aa, unidentified
MRLYVGDDWAEDHHDVEVMNEAGKVLAKKRLPEGAAGMSQLHGLIGRHVPEDADDAEVVIGIETDRGPWVAALIAAGYTVYPANPLLASRYRERHAVSGAKSDGGDAHMLADMVRTDSHQLRPAAGDSPEAEGIKVVARTHKTMIWDRTRTVQRLRHQLREYFPAALEAFDDLDAPDALELLAKAPDPARAAKLTRAQVAAALKRARRHHVQDRTGAILAALRGEHLGQPAALTAAYAATVRSLVAVLVTLNEQVRLLEAQVKEHFGRHPDAEIYQSQPGMAAVLGARVLAEFGDDPYRYESARARKNYAGTSPITRASGKKKVVAARFVRNNRLIDALMAWAFTSMLASPGARAFYDEQRAKGFEHNDALRRLANRLVGILHGCLKTGTVYDEDAAWGHREELKPAA

SEQ ID NO: 214242 - protein, 370 aa, unidentified
MQDTIKYVGLDVSKENIAVAVAEEGREAPRYWGVIPHTPEAVKKLMKKLGSPKSLRVCYEAGPTGYPLYRLLLTLDIHCSVIAPTLIPKRPGDRIKTDRRDSVRLAQLYRAGELTSVYVPTPEDEALRDLVRCREDVKEDELRVKHRLSKFLLRNDIKPPAGVNKWTTKYFRWLDTLHFENSSLRVTFQEYYYQLKEIGQRLLRLEEEIRVHSNEGVHALKIQALQCLRGVALVTASSVVAEIGSFKRFPTPNHFMGYVGLIPSEYSSGESRRQGNITKTGNRHVRRLLVEAAWSYRYKPAVKGELARRQSGQSPTIQSISWKAQNRLHQKYYRLLSRGKESSKAITAVARELAGFIWAVMQEVEDVPES

SEQ ID NO: 214243 - protein, 340 aa, unidentified
MEAIAVIGIDLAKSVFQVHGVDAQGQVMVRKRLSRAKLLPFFAKLPRCLIGMETCASANYWARELMGLGHEVRLMPPQYVKPYVKRSKNDASDAEAICEAVTRPTMRFVGVKSPEQQSVLVLHRTRSILTRQRTQIGNAIRAHLAEFGVVAPVGRQGLERLIAVVSDEQDARLPNPARRCLAMLVEQHRLVLAHLLDADRAIRADSRAGEIGRRLQEIPGVGPLVASALVATVPDPHVFRTGRGLSAWLGLVPRQHSSGGKEWLGGITKAGDTYLRKMLFVGAMAVIRHAERYGTRRPWLTKLLSRRSPRVAAVALANRIGRTAWALMTSGERYREPVVA

SEQ ID NO: 214244 - protein, 375 aa, unidentified
MAKKSKRRCDTLPVLHPDAAGIDVGASGLYVAVSADRDPQPVRSFPTFTRDLHALADWLVQCGIRSVAMESTSVYWIPVYQILEARGLEVYLVSAQHVKNVPGRKADVSDCQWLQYLHSVGLLRASFRPPGFICAMRSLWRHRASLIQMAAEHVLHMQKALDQMNLQIHRVLNDITGVSGLSILDAILAGERDPLTLARLCHGGVKSSEDTLAKSLEGDYRPEHLFALRQSLAAFRYYQQLVLEADREIQQQLAELKTAATTQPTTPPPTKATAHYARHYEPRTFDLRGELYRVFGADLTNVPAISALTAQTILCEIGTDVSRLRNASAFASWLGLCPEKKISGGKVRFTKSRSVRSRVATPLRMGAQSLHHAKD

SEQ ID NO: 214245 - protein, 448 aa, unidentified
MKKTKSKLEIMNPNAAGIDVGSAIHYVCVPEGSDEQHIQKFSCFTEDLHNIAKWLKKCEVTTVAMESTGVYWIPLFQVLESYGLEVKLANARHVKNVPGRKSDVQDCQWLQQLHSYGLIEGSFRPDNQMCVLRSYVRQRKNLIENAATHINRMQKALVQMNIHLHKVISDITGVTGMQIIKAIVEGEKNPEKLAEFRSVNMKNDKATIAKALTGDYREEHLFVLKQEYTAYTFFQEQITECDKSIENYYKTFETKSDESRELGKEKNKSRRGRPNFTLREKLYRITGIDFTKIPGFDILTVQTIISEVGINHNKWQSEKHFTSWLVLSPANKITGEKVFGTKTRKVINRATNALRMAAYAVGNSTSALGAYCRRLKRRLGAIKAITATARKLACIFYQMLKYGQEYVEKGMSYYETRYKEKIVKNLIKKAQEFGYTLVQQEELINGVS

SEQ ID NO: 214246 - protein, 406 aa, unidentified
MVNYIYAFDVSKGKATQVLYKNNRCIEESLLKFTSMGFEKLLQDIRRIPGQVALAFETTGIYSKPLERFCHENHITYHSLNPLEVYNRSNGLTLRRNKTDQADAHKLAQVMSIFDFHPSVTKGPLYEEMKRMNAYYLELQEAIDRLYVKLLEAVYLCFPGIEQAFSKLKNVFALTIIENYPHPDYVLETSRTIIKNVLKKSTSKNISNQRAFQKADQIIECATSAYPSVHKDSFYCQVLSFYATHLKKLINQKEIIQDKMITLGSQFSEFTIYSSVPGIGELSACQLIAELGDLSRFKNHKQLNAYVGIDIRRYQSGKYTGQDHINKRGNRKARKILYVIITNMIRAQRHAPNHIVDYYYTKKQPPFNKCHKVAVIACMNKLLKCLYALFNHHTKYDYELNASHRN

SEQ ID NO: 214247 - protein, 423 aa, unidentified
MTGERELGENDLRGSRSICLKARGESRVTLNVREAPRLNCYKPKSARGADKSESLHGKDGRARRARSGSPGGQTKTTPIMKANILLVGIDVGRRELVVAIRSGEQIHVQRFANDPVGRRHFVAAMLRRAASGTIRVALEATGPYSFELALLLSKTARFEVSVINPKTIKHFLRAQGARGKTDQIDARGILQYLELMPFRPWRAPAPVLLALQAIARRLYQLNVERTREANRLEALEVLGAAGKTVAADLRQAIRQIDRRMEKLEAAAVELFRSDAVLHRKYELVTSITGIAQKSAIRLLGELLILDPTMKGTQWVAYAGLDPRPRQSGTSLDGHRYISKAGNRYIRAALYMPALVAIRHEQVITQHYQHLVDERGKPKMIAIVATMRKLLLCLHSMLKNNTPFDPTKLAPRTTLENPAFINTA

SEQ ID NO: 214248 - protein, 349 aa, unidentified
MEHYVGIDVSLELSSVCLVDAKGKIVKEAKVASDPDALVSFLRELGVSIERIGLEAGPLSQWLHAGLTKAGFETVLLETRHVKAALSAMTVKTDRKDARGIAQLIRMGWFRPVHCKSPGSQEIRALLVARKLLLGKLLDVEFSIRGILRGFGLKMGLVTRKGFEARVRELSAGHVMLEQVCAAMLAARAGLQTEYTKLHKALLTIVRNDHVCRRLMTAPGVGPVVAITFKTAVDDPTRIAKSKAVGALFGLTPKKYQSGETDVTGGITRVGDAMVRTALYEAANILLSRVTRFSALKRWGMDVLKRRGTKRAKVALARKIGVVLHRMWIDGTNFRWTKAERATEGAAAA

SEQ ID NO: 214249 - protein, 346 aa, unidentified
MLTLLGIDPHKVSHQAVAVDANGAPLGQLQVKARPAGHAELLGWARREFPGPRLWAVEDERNMAGQLLRDLLAAGERVVTVPAHIAADYRKQGRRRGKSDAIDATAVARAALREQLPDLVLDEASRDLKLLTDHRTSLVEERVRLQNRLRDLLHQLDPDLAAEIPSGGLTRYCWLDDIIAAYTGQPGVSAAIVVDLAQACRALTEKIKKLERQLKPLVAQAVPALLAMPGCGVLIAARIVGEVAGVHRFRNEAALATYAGIAPLDASSGQQQHHRLNRHGNRLLNAAIYQMAITQLRSHPPARAYLERRISAGNTWKVAMRALKRQLIRAVYNTLTRQTTPTPQAA

SEQ ID NO: 214250 - protein, 409 aa, unidentified
MELLIARCAGLDVHQATVVATVRMPDEQGGRRSVTETFGTMTADLLALREWLQAYGVTHVALESTGVYWKPVYYLLEDAFTLLLINMQELKRVPGRKTDVKDSEWLAQLLECGLLKSSFVPPPVIRELRDLTRYRVQQVRDRAQEVNRLCKVLEDAGLKLTSVVTDVMGASGRAMLRALVDGTTDPAVLADLARGVLRKKLPALRRALHGRFRPHHAFLIEQIFAKVDFLDETLDRLTAEIDRRVAPFEPMLTALDTIPGVDRIGAINMVAETGGDMSRFPSAGHLCSWGAMCPGQNESAGKRRSGKTRKGNRYLRRTLIQAGLSATRKNGSALQARYHRVKRHRGHKKAVVAVGHQILEIAYYIMRDGVSYDELGADYFNRRHAERAVRRHVRQLEALGFHVTIEKAA

SEQ ID NO: 214251 - protein, 391 aa, unidentified
MILAGIDVAKDKHDCFIMNSDGEILVKAFTFSNNLEGFNFLYEKIRSVTKPKHKIKVGLEATGHYSYNLLGFLLNKGLPTFVINPLHTNLFRKSLTLRKTKTDKVDSRTIAMMLMSDVALKPYTDTSYHNEELKSLSRYRFTKVQERSKLKTSVSRLVQILFPELEKIVCTIHMSSIYHLLEEYPGASYIASVHLTKLTNLLMEASHGRYNQNTAIKFREAARNSIGSILPAKSLELKHTIKLIRELTVEIDEIDAEIKKMMDSIASPITTIPGIGYSMGAMIISEIGDFSRFSSPDKILAYAGLSPSTYQSGQLNNCYSHMEKRGSRYLRYALFTVAQKVCIWDNTFAEYLSKKRAEGKHYYVAISHAVKKLVRVIFHLERTGQAYLKAA

SEQ ID NO: 214252 - protein, 322 aa, unidentified
MSEPVLGIDIAKQKIEVALLIDGKVKNKSFKNTTEGFEALALWLKKLEIPKVQACLEATGNYGEELAIYLHQAGHLVSIVNPARIKGFAQGELIRTKTDKMDAGIIARFCLAMKPEAWIPPSPEVRLLRALVRRADSLIEMLTQEKNRLGTTHESVIPLIKEHIGYLNKEIQKVRDQIADLIDQNPNLRRKKELLVSIPGIGEATIAVILSELDNLEKFKHVRELVAFIGLAPKETLSGSSIKGKPRLCKIGHVRLRKALYMPALVSIQCNPVMIAFYNRLKEKGKNGKVIVCAIMRKLVHVIFGVLKSGKKFDPNYKPNFA

SEQ ID NO: 214253 - protein, 325 aa, unidentified
MAIVVGVDIAKKAFDIAVLQSNGKYRTKGNLSNDQSGFSVFGQWLQKHAEPGAWVVMEATNIYHEALGDYLLAQGYRVCVMNPARIASYAQSQLQRVKTDKVDAKLIALYGTRHVEDLQLWQPDPVSVRQLRALVRRYEELKELFQMEINRLETAKSDVVKESILSVSAHLEQQIEQTLEAIRQHIDDDPDLRGKRDLLTSIEGISDKTAALLLAELGSISRFESARAVVAFAGLNPRLRESGQHKGQVRISKIGSRLLRAGLFMPAICAMSHNQAVRALRLRLEEKGKAGKQIICAAMRKLLQIAYGVLKSGQPYNVELALARG

SEQ ID NO: 214254 - protein, 367 aa, unidentified
MKIIHWIGIDDHADKWTIAHFKGNEEKPAREFELVPDAAGYRKLIKYLKELGGEVRVVYEAGPCGYELYRRLTKAGIKCDVAAPSLTPRKPGDRVKTNRRDANKLARYLRAGDMLTLIVVPDKERESLRDLVRARHAVQKDLLRNRHQISKLVLRYGHRYREGKTAWSKQFWTWLGKIKLDEQHSQLVLEELILSHRQRLEQRGRYDEAIEAAAKAPEYAPYVAALTVLRGIDRLSAMTILSELGDLRRFATAPQLMAAIGLVPSESSTGDNTNRFSITKTGNAHVRHIAVEAAWQYQKRIGNGPTIRKRRKDQPKALVDIAEKCELRLNRKFHRMTSRGKRSTIAAVAVARELMGFIWAIGQITHP

SEQ ID NO: 214255 - protein, 482 aa, unidentified
MKPKPKEKTQKATGDPTQPHWHEMNRKQRLETMRKIQSEDLSLEMVHPDSAGIDIGNESHYVAVPPTRDSQPVRRFGCTTAELKAMAEWLKQCRIRTIAMQSTGVYWIAVYDILEEAGLQVYLVNARETKNLPGRKSDVQESQWLMKLHTYGLLRNSFRPSQEIRRLRTYWRQRNDLVRSAGRHIQRMQKALTQMNIQLANVLSDVSGMTGQAIIQAILAGQRDPHKLAVFRDPRVKASEEQIARSLEGNWEEDLLFVLKQEQDGYEFCQKQMAECDRRLEQYLQQREDRSQGACLPEEKRKERLKKKKGNAPQFGLRADLFRMTGTDLTQIDGIDVMTATTILSEAGWDMSKWKTEDHFVSWLRLCPDNRISGNKIIGKGRLPTNNRISVALKMAASTLRLSSTYVGAQFRRLRTKLGAPVAIKAMAAKLARLVYRMLRYGMKYVDQGAEFYEAQHRKRQISHLKWKAAKLGFQIVEAAAA

SEQ ID NO: 214256 - protein, 285 aa, unidentified
MEQSILYVGLDVHKETIAVALAEAGLREDVREHGKIANTPAALKVLTGKLTGQRRELRFCYEAGPCGYGIQRQLSAMGYECAVVAPSLIPRKPGDRIKTDRRDALNLARLHRAGELTPVWVPDQAHEAIRDLVRARQAAVRTLRQARQQLSGFLLCHGQHYHRPAWMLLHRRWLASLKFDQAVHHIVLEDCIAAIEAATARRDRLEAHIEAALPEWSLAPVVEALQALRGVGLVAAVTLMAELGDITRFNNPRQLMAYLGLVPSEHSSGHTRRQGGLTKAGNGAC

SEQ ID NO: 214257 - protein, 330 aa, unidentified
MTVFFGIDVAKERLDCAAIIHDRQRPIGQKSFPNTPDGIERAAAWVTRTAKTELLGVHAVLEPTAAYHELAARLFAAKGMTVSLVNPAQIRSFAKGMAVLNKTDQIDAVLLARYGCLTQPKAWTPPAEPLVELQALLARLDDLEGDLRREQNRYEQACVRGCSGVIKRSFATSIKALKAQCKLLQEAIAEHLAAHEDLQADLKRLRTIPAVGPKTALRMLALLRSHRFDTARQAAAFLGLVPIERQSGRSVRGRPRLSKAGNSRLRAALYMAAVVATKLNPDIKAQQQRLLERGKAKMSTLGAAMRKLVHICFGVLRSGNVYQFPVAHRP

SEQ ID NO: 214258 - protein, 322 aa, unidentified
MNASIFVGIDIAKFSLQIACLELKFETQLPNSLVGWNRLVKLLTIHGPKVLVLCEATGGLERGLVDQLQKADLKVCVLNPRQARDFARAGNRLAKTDKIDAAMLAEFGRRMEPRPAAKVAPWVRTLAALVGRREELTAMRTAENNRLGQNFLSFVAKQLDASIKRFNKDIKALDVQIDRLIESTPELKTKHQLLCAVQGVGSITATTLLATMPELGSLESNQVANLLGVAPLNCDSGQWHGKRRIYGGRRFARRVMYMASLTATRHNEILKAFYDRLVQAGKPKKVALVAVMRKLIIYLNRVLKPKNIAETPCLLLTLNPEP

SEQ ID NO: 214259 - protein, 392 aa, unidentified
MYIVGIDIGKNHHEASIVSPEGKQIGHSLRFATTHKGADSLMSFIFNNIGNSSCIFGMEATGHYWYPIYSFLKARGYTIYVINPIQSDSLRKMYIRQTKNDSIDSFLIAEVIRFGQFTTTSMADENILAMRQLCRYRDSVISSRTEIKLRISTIMEQIFPEYEKQFSSLWVSTSMGILEKYLTPDNIENAPIDELFEIIKDKSHNRLTRAKAISIKEAAADTFGIKIAQDAFSFQLKQLIDRMNFLDKQIEALDCQILEYYEKFDCYLHTIPGIGMIAAATILAEIGDINRFKSSSALVAFAGIDPTVRQSGEFSSTHNHMSKRGSPYLRHAIFLAATTCSFHNSPLNAYYKKKRDQGKHHLTATGAVARKLTTIIYAVLRDSKPYEPKKFC

SEQ ID NO: 214260 - protein, 364 aa, unidentified
MNKKRKRMTTAQDPKPFAPDQVDPCGTEVSAEELIVALCRKGVQQPLKSFPNTPEGHREIGHYLARPGRRVRVCMESTGVYGLDLALALAAQAGIQVRVANPRAVRNFAKALMERNKNDRVDAGVLQEFAARMPFEPWQPPARPALHLCALARRLEAITDLCAAEENRLHASQATEALPAIIRRDLERSIRFHQRAAQRLTREALKIISEDSNLQQRYTLLVTVPGIAQTSALRILAELVMISAHLDARQWVAYAGLDPREYSSGTSVHKKVRISKAGNRHLRRGLYMPALVAVRHDPHLRGFYQHLLANGKLKMQALVAVERKLLHAIYGMFKHQQAYDGTKVYRLPDALAPASCAPVRTEAA

SEQ ID NO: 214261 - protein, 411 aa, unidentified
MAQERRLVIGGVDTHKDVHVGAVIDVRGKILDTAEFKTTAKGYRLLVEWMVGFGELQRVGVEGTGAYGAGLARYLADAGVAVVEVNRPNRQMRRRRGKCDTVDAEAAARAALNGEATVTPKAEDGIVESIRILRVAFTSARNSRTRVALQIRDLIITAPDQLREVLGSLTTAQRVARCARFRLGGDTAEPTAATKLALRTLARRYEALSAELAELNATLDELTARANPALRGSKGVGADVAAILLVAAGDNPDRLRGEASFAAMCGVNPIEASSGKTVRHRLNRSGNRQANHALWRIVMNRLTTDPTTKAYAARRTAEGKTKREIVRCLKRYVAREIYRLIVNPGVVPAGADLRVVRVGAGLRLHHAANALGTTVVSISRLELGHAHDTGLAQRYERWLGEITTSADFQAA

SEQ ID NO: 214262 - protein, 375 aa, unidentified
MASIIYVGMDVHTTNFTFCCYTADSDRGFAVAQTEPDYRQVIKYMERVQKQRGEECKFVCGYEAGCLGYSLYHQLTRCGVDCVILAPSTMHQEKGKRIKTDRRDAENIARCLAFSLYSPVYVPTTEDDAVKEYIRMRDDIKADLKRVKQQIIAFTTRHGFAFDGKSYWTQKHLKWLETLVFEHPLYKETLQEYLILYYMLDEKVAVYDTRIEEMSHLEHYEENVQKLCCFRGVAAHTALSLLVEVGDFQRFRSAKHFAAYLGLVPGEHSSSDKQIRTSITSITKAGNTHLRRLLVEAAQSYNRGAIGKKSAALKARQGGNPAEVIAYADKANERMQRKYYRIAFKSRHNIAKTAIARELACFVWGMMTGNISNAA

SEQ ID NO: 214263 - protein, 349 aa, unidentified
MRTKPVPETFAYGIDIGKKVFHVVAVNREGAVIQQARFARETLQAFFDVAPRVLIGMEACPGSQWLARRLRAIGHDARIIPARFVKPYVKSNKTDTVDAAAIAEAVTRPTMRFVDVRTPEQVDLQALHRIRDRLVGQRTALMNQARAFCIEYGLAMRVGAGGFHADIRRHLANIDNDLTATMRGLLNDILDDLAHVEGRVKALSSKIEAIARDDETISRLLTIPGIGPLGATALVAAAGDGRQFRKARDMAAWLGLVPAEYSTGGKQTLLGISKRGNRYVRRLIIHGARSCFLHLNRESHALGRWLSALEARTHRNKAVVALANKLTRIVWAVLTQPGAVYLRSKGAAA

SEQ ID NO: 214264 - protein, 414 aa, unidentified
MKSCLFVGIDTHKDSHTAAVLDGYFGVLATITFDNSSTGFTGFEGKLKKLSRGRGLVFGLEDSQGLGSFLANYLSGKGYTALEINPVTTDRGRKHTVSRDKSDERDAVVIAKTLIRERASLHPVRIDRNGVAIREMTGYRQMLVGESTRIKNRLHMVLFNQYKGVLSCFKDPFRKCALAFFLRYPAPSSLKEADPDSLSDFLKANSKGMFSREKARDILSSTDSSIADSLTDTRAHIITAHIERLLGVGKELKKIQDVLEGLVKASSYHCLTSIPGIDIVTAAKIISGVMDISRFSSASKLAKFCSIAPSERSTGKKRRYEKSKYGNKSLRSTIYFVALSHISRTRDGRDKNPISRTYYLKKVSEGKTKKEALTCLTRRLVDIIFAIMRDRSIYNFSKSRFTKQRDAELDSAAA

SEQ ID NO: 214265 - protein, 349 aa, unidentified
MIIGVDYHPSFQTIAFFVEETGECGEQELNHSDGQAERFYRDLKQRGICVRVGMEATGYSRWFERLLAELGFEVWMGDPAEIKAKRVKKQKFDREDARLLRRLMLENNFPQIWVPGPENRDLRQLLWHRHRLVQMRTRIMNQLQALAMNEGYRWKKKLFSEQGRAQLEKLTLAPWASRRRQELLELLDRMNPTIEELTAAVEREARKRPEALRLMTHPGVGPLTALAYVLIIGTPTRFQRGKQIGTYVGMIPCEASSARKQRLGHISKQGNSLLRFLLVEAAQAAARIQPDWRRRYLHLAMRRHKSIAKVAMGRKLGVRLYWMWRNGCEYSPSLEFGSYVGQLGTGHGV

SEQ ID NO: 214266 - protein, 413 aa, unidentified
MDLLHDRCAGLDVSKKDVKACVRSPGARANQRHSEVRTFATTTNALLELRDWLIEQRVTLVAMEATGDYWRPPFYLLEDDVNVILVNPAHAKGLPGRKTDVSDSMWLAQLAECGLLKASFVPPQPIRQLRDLTRYRTTLAREHTREASRLEKELEDAGIKLSSVATDILGVSGRAMLEALIAGERDPQILAQMAKGRMRTKVNALSQALVGRFGEHHAFLCRMHLDRLDALEQDIAKLSTRIEQALAPFRDTLARLDTIPGVGRGVAEVIIAETGGDMSRFPTPGHLASWAGVAPGLNQSGERRKPGRTRHGDHWLTGALGVAAMAANRTQDTTFLGARYRRLARRIGKLKALVAIQHSILTAVWHVLSENTDYHDLGGDYHAKRDPQRALRRITRDANRLGYTVRFDPIQAA

SEQ ID NO: 214267 - protein, 418 aa, unidentified
MKSMEITAVGIDVSKSKSTVAIRRPGGVIVARPFDISHSNHDLEKLVSILKTTGGDIRVVMEHTSNYWKPIALTLKEAGFYVSVVNAMLIHNFSDNSIRKLKTDRADSLKIANYALTFWNELPPFNDEDETRLVLREQSRMYERLASTATSLRNGLIALADQTFPSIDQAFGHAIKNADGHEKWVDFFSIYWHRDCVLRLSIEKFTESYRKWCLRRNYKFRTNTAHKLYALAQDAVPTLPKNNGTKALVLQACKSLNAVCEAKQSTQEEMNRLASLLPEYEVVMQMEGTGPITGPALMAEIGDVRRFKNKKALVAFAGIDAPPFQSGNFESKSRHVSKRGSPHLRRVVFLVANIILTLSHKNNSVFCFMDKKRAEGKHYYVYTIAGSAKFLRIYYARVTEYLRTQEIPVAASCLNGNS

SEQ ID NO: 214268 - protein, 413 aa, unidentified
MSKHTYRSKKVNEIDWDQLRGKWAGQSLVFAVDVAKETQYALLANQGQTESVLLRWNHLGESAALIGELSRFGTAVDVVMESSGTYGDSLRHLCRQAGFAVHLASAKRVHDAQEVFDGVPSLHDPKSAFLIAKLHLEGLTKPWPELDGRGREMNALRREYEMHQSQYERCQNRLEAALSRHWPEVLQLLALDCVALEQLLKVHGSPAQVAADGDGAAGEMRRTGGHFLEEGKIRAVIASAGATLGEPCTGAERRYLAALACELEHSRLHMRGARRALESMVAADGKLAEMARTVGCLTTAVLLSLHLDPRHFANPRAFQKALGLNLKEKSSGKHKGQLKLTKRGSSMARKYLYFAALRLIRRDPVVARWYEGKKDPKAKLKAETACVRKLALGRWHVARGDKFDASRLLSVGA

SEQ ID NO: 214269 - protein, 419 aa, unidentified
MKIFQNDKEERGKTLELIIALDISMGKSYKVLYDGQTCLSEGEILHNKFGFQALLEEIHSLPEEPKIVFESTGIYSKPVETFCQKNNLTYFLLNPLEAKKQLEQGTLRSWKTDKHDAHKLAQIHPFVDRSEKVQQPEIYTELRDLSRFYQEIEGQIKHTRMYLHHALQVSFPELERFFSSRVTPYALTLIELFPHPELVLQTSRTKIKNLLMKTTHKKISENRAMEKAKLIIEYAQESYPAVSPDSVPTQKVQYYARQLLHLLEEKKMVSEQLIVKARQLSEFQLLTSFPGIGEISAALLIGEIGDLSRFSNHKKVNAFIGIDIRRYQSGKYAGQDHINKRGNPKGRKVLYLIVKNMIRQQKAAPNHIVDYYYKLKKQPQAKKDRVATVACMNKLLKCIYSMVRNNTKYEYSYTVSKDQ

SEQ ID NO: 214270 - protein, 388 aa, unidentified
MPQSNDLSRSLAAFDQDRTLIAVIEMSQSNWLVAGLVPGLERRPLKKLSPDEDALLKLVQRWRNEAAQAGREITRIVVAYEAGRDGFWLARWLRRRGIEAYVIHPSSVAVSREHRRAKTDRLDTELLMRAVLGWLRGEKRHCSMAAIPTIEDEDAKRPSREHEKLVGDRTRLVNRMKAMLARFGIRTFKPTLRKAADRLDDLRTAEGTPLPENTRAELRRDMMRLRMVREQIKEIEQERLRKLTAAPAEKGPPTMVRFIARIIGIGIETADMLVSEILSRGLRDSKAVARYAGLTGAPDESGRRRREKGLAKAGNARVRRGMIQLAWRFLIFQKDSALAQWYRARTADAHGATRKRMIVALARKLLIALWRMATTGEIPEGISLRAAP

SEQ ID NO: 214271 - protein, 404 aa, unidentified
MTCTDFPHPAPTTARPDDSILFAALELSKTRRAASAKSWLVATSAPGEEKVSKRTVSAGDGRALLDLLAGLRDKAERRIGKPVKVVVIQEAGLDGFWRHRLLEANGIESHVVDPASIAVDRRKRRRKTDAIDADALLRTLMAWARGERRVCSMVRPPSPEDEDRRRLSREREALVKERIQHSNRIKGLLAAQGSADFEPLRPDHRARLARLTTGDGRALPPRLTAEIRRPLARLEAVIPDPKAVGAERDSLLAGDKPATPAAPAEAVGMAPPEAAVLLRLKGIGPEFASVLCLELLFRSFSNRREVAAYGGLTPSPFKSGGIDREQGISKSGNPRLRKMMIQLAWMWIRYQPGSAISRWFAEFGGTRRGRIRRIATVAVARKLLIARWRFATQGIVPEGAALKS

SEQ ID NO: 214272 - protein, 380 aa, unidentified
MNDHIEAFVAFDTSKLRNAVAIAEAGRSGEIRFLGEIDNTPKATAKLVKKLAGKYPRLAFCYEAGPTGYGLYRQITSLGHECVVVAPSLIPKKAGDRVKTNRRDALDLAAQLRADQLTAVWVPDPRHEAMRDLTRGRGAAVEDLRSKRQQVSAFLLRLGRPYEGKTNWTKTHMNWLASQKLEQAEQRIAFEEMLLAVRQAQERVVRLEQAIRGAVPDWSLAEVVEALMAMRGIDMVSATAFLAEIGDLSRFRTPRELMAYLGLVPSEHSTGDTVKRGPITKTGNRRARRILVECAWSYRHPPRVGKEKQDKVAAAPRAAREIAWKAQNRLYARYRALTRRGKLKTLVITAMARELSGFIWAIARELANTHAAARLQGIQG

SEQ ID NO: 214273 - protein, 368 aa, unidentified
MSDIIRIGVDTSKSVFQLHGVDAAEQPVLRKQLRRRDMLAFFARLPPTKVGMEACGGAHYWARELVALGHEVKLMPPQHVKPYVRRSKNDRNDADAICEAMSRPRMSFVAIKSADQQAAQMLMTTRERLVTYRTQLINTIRGHAAEFGLSAAKGPAHVEQLLSRVAEDATLPGLATALFAMLAQEFSRLNTQLREIEMKLKAWHRQDEISRRLAEVDAIGPIGGCLLSIKAPDPKAFHCGRDFAAWMGLTPKDHSTAGKKRLGAITRAGDEALRRTLVVGATSVIKQVSNGKGRPSPWLRDLVARKPPKLAAVALANKVARIAWRLMISGERYDAARAGIVSPAASLAPCSRRQGRSAPPAAVASGQP

SEQ ID NO: 214274 - protein, 457 aa, unidentified
MSRARKVPQTVKSVAEVDTLTMLNPNAAGIDIGLDEMWVSVRADRDAEPVRRFGMNTPDLIAVAEWLKACGVETVAMESTGVYWIPLYEVLEERGFQVYLVNARHAKNLPGRKKDETDAQWLRRLHTFGLLNNSFRPAGEMCAVRAYWRHRADLIEHRAAHIQHMQKALHQMNVRLSPTVKDITGVTGMAIIRAILAGERDPLTLARLRDPRCAQPEAEFVKALTGNYRDEHVFALKQAMALYDAYTQQILECDQELERKFSALKPVHDDDLPPLDTTDKRNTHSKNAPAYDGRALLYQLLGVDLVAVDGLNEVTAQIIISEIGTDMSRWQDEKHFCSWLGLAPHNDISGGKVLRSRTLKTHNRAGQAFRLAAQAVSKTNTAYGAFFRRMRAMHGPMKAIVATAHKIARAVYFMLKNRTPFHDINAEEYTQREREREIARLQKKATKLGFTLAPASV

SEQ ID NO: 214275 - protein, 402 aa, unidentified
MNSVGIDISKGRSTVAVMRPFGEVVTSPFEVRHTDSELSELARRLKSLTGETRVVMEATGNYHAPVAKLLHDAGLYVSVVNAKLVHGYGNNDLRRVKTDRKDAVKLANYGLDRWLTLPRYVPEENTRLLLKNCYRQYRQYSKVQTVLKNNLISLLDTVFPNANRLFSSPIRGDGSEKWVDFVAEFWHCRCVSEKSERTFTNKYQRWCKKHGYNFREAKAHTIYAEASGHIGVMPKSETTKLLVEQAVSQLRATSAALAALRQEMQTLASQLPEYPVVMDMFGIGPTLGPQLIAEIGDVRRFYSKKALVAYAGLDAPPNDSGDVTGRHKSMSKVGASSLRRTLFLVMSVYLQNAPLDEPVYQFMDKKRAEGKPYRVYMMASANKFLRIYYATVKAYLEALDQT

SEQ ID NO: 214276 - protein, 344 aa, unidentified
MEPMYYIGLDVHKRKISYCVKDNSGKVFAEGLLSATRLDLDLWMKTLPQPWSAAMEATMFTGWIYDHLKPHAAALKVAHPLMLRAIAAAKKKNDRIDARKICDCLRCDFLPECYMASTAIRERRRTLRYRNLLVRQMVQMKIKISALLMEAGVSYNKQRLHKAGYFRELLASNPDIDEGLRSLLRLCRETVVRLQKTESALVRSLESDALLMDRVERLMTIPAVGPITALTWALEVGEVQRFSSIKKAISYCGLCGAEKSSGSTVQRTPLSKQRNKHLQTTLIEAAKMAPRNSPALAMLYDKEKQKGNANRATLAVARKLVAYLMAVDRGQRTFQVVETSNIAA

SEQ ID NO: 214277 - protein, 342 aa, unidentified
MKKISTLGIDLAKNSFQVCAMDEKGKVLFNKKLKRDKFLSFTINLELSTNHIVAMEACSSSNYWGRKLQSHGFLVKLISPQFVKPYVKSNKNDAVDAEAIAEASRRPTMRFVGVKSVYQQDIKAVHNVRASLVKRKTALSNEIRAMLFEYGQIIPKGIAYTQKQVPRILEDADNELSTTLRDMVQELYSEFLEVIKKIEKYNSKIDQILQENERCQKILQVPGVGPITATAIFAAVGDVHVFKNGREFAAWLGLTPRQHSTGGKTTLLGISKRGDKYIRKNLVHGCRSVVAWADKKEDRKSKWIQKKVETRGTNKAVVALANKQARAIWAIMKTGEDYKVAA

SEQ ID NO: 214278 - protein, 394 aa, unidentified
MILVGIDIGKNQHTFSIIDKGTGEILSNPSVFNNNQEGFLSLIKKLSDYAKSELLIGMEDTGHYHFALLKYLLDSHYTVALINPATTDLTRKLQGGITKNDSLDSLTICDVISSNHRKKPYRITKVNRFDLYEQKQLTRHHHNLKEELNIYKNRLQKCIDIVFPEFNSLFRSKYGIVYMNVLKTFASAKKIADSDIQTIRECFEYNRRGKRISLSAEQLKAAAKTSVGIHSVAEEIQIRHLVRQIEMIEEQLSETDKKIEEFSLQNDSPILSIPGISHFSGTSILAELGDICNYTKASQIIKFAGVAPYHHESSQFTAQHTAITKKGSRYLRKTLYQIILTVINNNKVFTAYYNKKLAEGKGHRCAQGHCIRKLLRIIYHLLSTGQTFDPDLLR

SEQ ID NO: 214279 - protein, 495 aa, unidentified
MHNIGDVAVRKSCYDPVRKIARKRILRLWTCDSRFSRVEDSMSQRKKRSKGFKAIELPRQLQHVNLNAAGIDVGSDRHLLAVPEGRDVVSVREFGAFTTDLEALADWLTKCGVTTVAMESTGVYWIPLFELLERRGFEVKLVDARRVKNVPGRKSDVLDCQWLQQLHTYGLLAGAFRPSDEVCVLRGYMRQREMLVQTSSMHIQHMQKALKQMNLLLHNVVTDITGVTGMKILKAIIAGERNPKVLASHRDQRCQNSAATIAKSLVGNYREEHLFALKQAVELYETYQAKIVDCEAAIASYLGTQPKRTDDEPPANEKGTRAKDCVRGEVDMRAQLFQLTGVDLFSISGFGADTLLTLAGEVGFEMTAWKTEKHFSSWLSLSPGTNKSGGKVLNSKTKRSANRAAAAFRIAASSLARSKSALGAFYRRIKARAGAAKAVTATARKLAVIYYSMLKNGTTYVEVGQAAYEKKYRQRRLKGMQKQALAMGYQLVPIS

SEQ ID NO: 214280 - protein, 358 aa, unidentified
MSNRSDGDGMMTVGLDVGDKHVHACFLDHNGDIVEESRLATTAQALRRRFGSEERYRVILEAGLHSPWMSRLLIELGHNVYVANPRRLRAIYLNENKSDRVDAEYLARIGRLDPALLFPLKHRSAETQADLALLRARAMVVKARGMLIQYMRGVVKSAGGRIPHCDARGFAQKAANHLPPELEPVLSPIITSIIEMGETIRNYDKQIEEMVEERHPETQLLRQVAGVGPITAATFVLTVEDPARFARSRSIGSYLGLRPRQDESGSIKRQLRITKAGDEQLRSLLVSCSQYILGHFGPDSDLRRWGLHLAERGGKNGKKRAVVAVARKLSVLLLRLWATGEIYEPLRNARIRGEIAAT

SEQ ID NO: 214281 - protein, 460 aa, unidentified
MSRERSKQQKRAGQGGAVPSLNCIEPNAAGIDVGATEIFVAVPQDRDPSPVRSFETFTQDLHRLKEWLQQCRITTVAMESTGVYWIPLFQILEEVGLEVCLVNAQHVKHVPGRKSDVIDCQWLQYLHSVGLLRASFRPEDRVCVIRSLLRHRDSLVQMAAAHVQHMQKALTQMNVQIHHVLSDITGQSGLAILDAMVAGERNPVVLAQLRHSRVQASEEEVVKSLVGDYRREHLFTLRQSLEAYRYYQRLITGCDAEIEQQLQNFDGHLPPDAPALPPERYPHRQRKNEFRFDMRSELYRIFGVDLTAIPSINALTGYTLLAEVGTDWSKFRNIQAFASWACFCPQNKKSGGKVLSAKTRRSANRVNRALRLAAQTLERSTSYLGIFYRKMCARLGRPAGITATAHKLARIIFHMVTTGRAYDESIFATQEQRQRKHLESSLRRKAAKLGYQLIPLPQTA

SEQ ID NO: 214282 - protein, 358 aa, unidentified
MKNTSTVAAKQSKNFREQKLTIGLDLGDRSSWYCVLDEAGDVLLEQKLGTTPKAMKEVFGGMPRSRIALETGMHSPWVSRVLSELGHEVIVAHARNVRLIGESRRKDDRFDARTLARLARIDPQLLSPVQHRSAQAQAHLMVIRARAGLVRVRTSLINTARGLTKSYGERLRGCSPRNLNAETARQLSPELQAALGPLLGAIESLSQRIYEYNQQIAKIAKESYPQVARLEQVKGVGTLMALTYILTLEDAQRFRKSRDVGCYVGLQPGRRNSGQSEPQLHISKEGDPYLRTLLVQGAHHILGPFGADSDLRRWGLKLAERGGKNGKKRAVVATARKLAVLLHRLWVSGEAYEPLRNS

SEQ ID NO: 214283 - protein, 323 aa, unidentified
MSTKASKKRRSFIGIDVSKKLLEVGVHQSDYHFRCPNDPKNFPALITELISLRPARILLEATGGLERALLQALHGADLPVVVVNPRQVRDFAKALGWLAKTDRLDARVLAHFAAAIQPAIRPVKAQQETELDALMGRRTQLSDMLAQEKNRRGSAATKDTRDDIEAHIEWLEERIQELDERLKEQLKCSVVWQQKDKILQSVKGIGFVTSLSLLADCPELGQLNRHQIAKLVGVAPLNRDSGQQRGARHIWGGRAQVRGKLYMATLAATRFNPVLKSFYQRLLAKNKLKKVAIVACMRKLLTIINVMVRENKLWNVKAQPVSA

SEQ ID NO: 214284 - protein, 350 aa, unidentified
MEIFTGKPEGVMKLTPVGIDIAKNVFQVHHIDEETGEIVNKPIKRAKFLEYFVNRAPCLIGMEACGGAHHWARQLTRMGHQVKLMPGEYVKAFNIRNKKDPADARAIWLAVQQPSKPVAIKTEMQQAMLALHRTREQLVKFRTMQINALRGLLTEYGEVMAKGRAPLDRAMPDVLARVADRLPAALIDTLREQWNGLTGLDEQIATIERRMREWKKENKEVKAISEIPGVGLLTATAAVATIGDAKAFRSGREFAACIGLVPKQTGSGGKVKLHGISKRGDTYLRTLLIHGARSVITNAKQPDPWIEQMKKRRPPNVVVVALANKMARTIWAVLAHDRPYQRGYVSTKPA

SEQ ID NO: 214285 - protein, 444 aa, unidentified
MTRRCFGLDVHREFAQVAIWQDGLVRQAGQIAMTPEALRVFADSLAPSDEVALEATGNTHAIVRALQGRVARVVVANPQKTRAIAEAKVKTDKVDAEILAQLLAADYLPAVWVADEDTQARRRQVARRAHIVRQRTRLKNQVQSILHRNLIPRCPAADLFGIKGRRWLAEQELPADERQAVRALLRQLDFHGQELRLIDSELARVALRCADTKRLMTIPGVDVAVAMSITAAVGDFSRFSSPNKLVRYLGLNPRVKQSGDQPAAHGRIAKQGRAHARGMLVEAAWVAVKTPGPLRAFYERVRSRRGMQIAVVATARKLAVLCWHMITRGEDYAFARPSLTAKKLRALELKAGMPARRGQKGTASGYSLKDVRTREKALAEQAERAYTQMVADWQAKAPANRNVGVAAANGARLSRPSDGATAARQDTAPDPALRSGVDHTHSAA

SEQ ID NO: 214286 - protein, 426 aa, unidentified
MKVDLFIGIDWGSKTHAVCIVDAEGKKVWQGEVAHRGDDVLAFVERLTKLTAGDFSRAVAGMESPHGVMVEVLLERGLKTYSINPKQLDRFRDRHSVAGAKDDDLDAFVLATSLRTDLKLYREIVLPSEQLMQLGALCRSYESLTDQVIALGSQVREQLMRYYPQMLALGEWHKESFLWELFEAAPTPAQTAAPTRKQPKGLSAQKVAAILKRHGIRRHEPSAVLASLRSTPLPVAVGVAEACATRIRALLPVLRAAHEQRSDCTKRMKTLLSSFQKENDSPEESHHDAALLLSLPGIGVHNGAVMLTEAYSALQARDYQALRRRAGAAPVSKRTGGKSKKPQIEQRQACSGPLREATYHWGRIAVQREPRAKQHYADLRARGHSHGRAIRGVVDRLLKVLMAVLESGRPYDPERRGTQKNLPAAA

SEQ ID NO: 214287 - protein, 410 aa, unidentified
MSKSRRSTNSSVAGTSNPEQLQLLAEWLIAQQVEEVVMESTAQYWKPVWSALECYWKPVCQKREDGGPKSGTLHLAQALSNRGRRGRKRDFPDAERLVKRLVSQELILSFVPDAEQRLWRTLTRTRYQRTRDKVRLQNQLEALLEEAHIKLSSFVSKLLGASARRMLTALADGETDPAILAALADRRLRATPAQLRDALGACNGIHSVYRRLLKMALADLQFIEEQISQLDQEIATLLREHQDAVQRLAEVPGLGVDSAQQILAEVGAKAATFAAAKNLVSWVGACPGDEESSGVNRSKRSPKGNRQMRRTLNQCANAAVKHKGSIFEIVYRRLVPRLGHKKTIGAIVHRLCQLIWLILHKGIRYEERGPAVCEKSKRLRTQRMICTLRKLGCRTLWSPRMNEAIFDPVP

SEQ ID NO: 214288 - protein, 332 aa, unidentified
MMAHNGLVVAGIDVAKDKVDVCIRLLSSRQTFPSTPEGRRALIRWLRKYKVGKAAMEASGGYEREWAKALREVGIEALIVDPKRVRNFAKSAGQLAKNDPIDAEMIAWFAETFIEAKGQAYDAAREKLAQIVNARQALIDVRTSLQNRREHSTPDVVQKMQGRLLKQIAVEIAKLEAAIAALIKATPRFAELAEIIESVPGLAEGTSAGLIGAMPELGQIGNKVAAALLGAAPYDDDSGKRRGDRHIQGGRRKVRNLFYMACMGAATRHNPVLKAFYDRLIAKGKEPKVALTACMRKLIVILNVMIARGEKGDASRYEVSDPARLPPSACAA

SEQ ID NO: 214289 - protein, 347 aa, unidentified
MHRYIGIDAHTESCTLAVMGPSGKRLREARLETNGKVLTDFVRSVAGQKHICLEEGTQAEWLYELLEPLADEVVVQLPERSNGVKNDSVDAWQRADELRRGDIKRPVYKAPGKFTALRAAARAYEVTQRDMVRGKVRLNALYRSRGVQDLGSEIYDPDLRARRIAQLPLQQGRVAQLLSGQLDGLVQAQQVAEQWLLEEGKKAPIVRLLETTPGIGKVRAAQLVAVVVSPHRFRTRRQFWSYCGLGVTTRSSSDWMKDRDGQWVRRQTAQTRGLNRNRNPVLKRVFTGAAESVIRRGLRQPLRAAYQRQLEAGTKPNLARLTLARRIAGAVLAMWKNQEEYDPTKQQ

SEQ ID NO: 214290 - protein, 390 aa, unidentified
MQTEAAHAKPSTAIQTDLAAIFISLELSRSIWLITSLSPGSGEKMSKHSVRAGDVAGLLARFSESKQKAFARKRGKSFPIVVIQEAGLDGFWLHRALEREGIESHVVDPASIATSRRRRRAKTDRIDGEALLRALLAYKRGEPRVCTMVRAPTPEEEDRRRLCRERKVLIAERVEHVNRIKGLLFSQGISSYEPLRRDRRQRLEDLTTGDGRTLPTHLKIQISRELDRLELLLDQIKLAEAERDGLLAEGQAAAPELPARMLLEFKGIGAECAATLWLEALFRHFDNRRQLASYAGLAPTPWQSGSVDREQGVSKAGNPRLRAILIELAWLWLRHQPQSALALWFKERVKRNGGRMKKTTIVALARKLLVALWKYVTTGVVIEGAVMKPA

SEQ ID NO: 214291 - protein, 349 aa, unidentified
MSQFSGSSQAAVDYDSTIIGALELSEKKWVLAVQLPGVSRHSRHALDACGDGLVSFVERLKAKCAAAGRKIARVILTHEAGRDGFWLARFLARRGIEVHVIQPSSLPVDRRARRAKTDMIDVEMLLRTLMAWLRDEPRVCSMVPIPSEADEEARRANREREDLTRERRSIVNKIDGILATLGIKGYKALRRDRREQLNCARQPGGDPIPQKAKARIERLLDRLDLVLKLIDQVESTRDAVLKKDAPADEAERMIRSLTALRSIGPDIATLLVREAFVRQFRNRRALGGYVGLGGTPFSSGGAEREQGIGKDGNRRVRAAMVELAWMRLRWQPDSALSVWFRARVGAMGG

SEQ ID NO: 214292 - protein, 342 aa, unidentified
MQETSNVKTFVGIDAHSRQCSIKAIGEQGESLLVKEVPTRESSLRRVFKGLPPPVWVMVESSSMAPFVKDCIDGSVDRVIVCETRENRWIARSEDKSDQADADRLARLLRMGEFKDVHVPKGLRRDRREVLRLYQKAQGDASRTKNRIKSKYREHGVSAEGKGVYTKNGRDKYLEKISRPNVRFLFEVLYTKLDSEDAACGALLRRLISIMKGTREHSLLKGIPGVGNINSAIMVCIIDDPYRFEGKRKLWSYSGLGLRSRWSGDPERARVKGTSGGNRLMKYAALTSATAALRGDNRFSRHYEKMLIDGVDPAMAKRTVARQILATALSMFKSGQVYRESS

SEQ ID NO: 214293 - protein, 375 aa, unidentified
MGERNTTDVGLDTSKNSIQVAMLLPGGDKAVEWEIANEPRAVRRMAKRLKREAVGELRVGYEAGPCGYVLQRQLRELDVNCVVVAPSLIPVKPGDRVKTNRRDAKKLAVMLRAGALTEVHPPTPEEESVRDLCRCRDDIREDLIRARHRLGKMLLRRGWTYPGKAWNDPHRRWLRNLALEHDADRAVFDDYLRAIEHLEERLCAIEITIEATSHREPYREPVAWLRCFRGIDMVTAMSLVAELHDFGRFQSARELMSYLGLVPSENSTGDRQRRGAITKTGNKQARRLLIEASWHYRHKPAVGHKLRKRREGQPGWVIALADRAQARLHRRYWRLLTHGKAHNKAVTAVARELSGFLWATLREHGAAKRSGASVG

SEQ ID NO: 214294 - protein, 410 aa, unidentified
MIKENFIYVGIDLHKETHTAVMIDCYNQKLGEITFPNRPAAFPKLVTKVKKCNTDGKEVVYGLENAYGYGRALAVWLIDKGYLVKDVNTAISHRQAKHRGAMYRKSDSDDAEAIALATLNMLDKLPDAYPNDAYWSLGQLVHRRDNIMKQRTRLVNQLHEQLCIAYPSYKQFFNNISRPTALYFWEHYPSRKYLKGKSVEDLRAELVPVSHNKCSTRTCEKILDAIAGDKVKNNAYQDARDMVTLSIVSDLQHYDKQLAEVDKMLEQMYKMLGCTLTTIPGVNVITAVKILAEIGDIKRFSNANKLAQFAGIAPLHLSSSGKGKDVATKQGNRRLQATIYFLAIQMVQVSSKGTPRNSVVRAYYEKRKAEGKTSQQALICISRRLISIIYGMLKHGTEYRMPVVESAGEK

SEQ ID NO: 214295 - protein, 427 aa, unidentified
MKNSTARKLEQIPTDYLIVGIDAHKKKHAAAIKAPNAFTRAKFKVDNSRAGFEELLERVRSQVTNTGCKGAFFAIEAGGRYWRTLAYFLEERELPFRLISPFTLKRRREGEDIDRRKNDYRDADMAAELLRTGKFTETRLLQGNYADLRATYHTYYSLGRERSRATNLLGALLDGLFPEFHTVFKNISTKTALAVLATYPSPHVIAGMAMEKFMDTMLAKYKGQHIRRKKLSEVYQAAQRSVGIHAGAGVISFELSLLVERIRLLTEHRQKVEDLIVALVEWIPESKYLLSVPGIGHLTVAGILGELGPLTHYRNAKQLIKMAGINPTQSESADKKGSRTPMSKKGRPLLRYCLWEAALNLLHYNEEFKAWAKRLQERPLHQNPLKKREARGAVCRRLLWLVFALFNKRSFYQKNYRTETEVELVTA

SEQ ID NO: 214296 - protein, 348 aa, unidentified
MAILKQVAGIDVAQKELVVSLGRMNHELSLEIFDYKVFANNQKGFKELTIWAQKQVKNDVRIRYVMEATGVYHESLAYYLTEKGWEVSIVLPNKISNFFRTLDVNTITDKTASEAITRFGLERKLEVWQMPKKIFRELKQLTRERDQLIADRTVLKNQLHAENAEAFPNQRSISRVNKRIKLIDKQDLEIKAEIATIVKKDQELVNKINTITTIPGVGKLTAVIVLAETNGFELIKSKKQLVSYSGLDVKLKDSGTSVKGRPRISKKGNRHLRKAMYMPALSAMRYNQQHKMLFVRLVSKHGVKMKAAVAVQRKILELIYSIFKSDIPFDENYMQPNIQKNAEEVENV

SEQ ID NO: 214297 - protein, 336 aa, unidentified
MKKNSTVAVGRKQILKQAKLTIGLDLGDRTSYYCILDEAGNVIWERNMPTTSNGIRQAFGRIPRCRIALETGTHSPWVSRQLAQLGHEVIVAHARNVRLIGESSRKDDQLDAQTLARLARIDPGLLGPVRHRSAQAQIHLTVIRARAALVSTRTALVNAARGLTKSYGERLKKCGTEQMNRDSSEGLSQELRDALDPLLREIESLNERIAEYDRRVEQIAKEVHPEVARLKQVKGVGTLIALTYVLTLDDPHRFRRSRDAGCFLGLRPGRRNSGKSEPQLHISKEGDRYLRTLMVQGAHYILGPFGQDSDLRRWGLEAVRARRKECQEASGRCRGT

SEQ ID NO: 214298 - protein, 385 aa, unidentified
MKEQNFVPYEFDIFGGLDVDKKSIAVTFMSHQGVLQSFSVPYRAEHLLNYVSKHFAGKKVAFAYEAGPTGWGLYDRLTAEGHPCVVAAPSMIPKVPGQRVKTNRLDSQRLSEHLRGGQLKSVHVPTEPYRQLRHLTQLRDTFVKDVVAMKLRIKGLLLFEGLEFPPAPAGSQWSYLVRGKLKQLPCSGSVRFKLDRLMESLESSEKQALETIREIRRFCQQDAELSQAIKHLKSIPGIGEIVASHLLARTGDPDQITNVRQLGGFIGLAPREHSTGDRIARGGIMRTGDGRLRSKLIQAAWSAIRHDPELREFYRSVSQRHPRDRAARKAIVAVARKLTTRIYAVLKQKRPYVVREKVNSAPLTQEETSPQGTTRRLKEPGEIIS

SEQ ID NO: 214299 - protein, 323 aa, unidentified
MMSTQYNYAGIDIAKRNFVIAVSSLSKTKTETNNPKGIAHTIEYLKKHNVALVVMESTGGLEIPAAKAIHRAGIAVIIATPRQTHQFAQSQSLTKTDAKDAQMLAFFAQMTAQKEGWQTMLYQPPTEAEEVLEALVNRRNQLVDMRTAEKNRLHQVHETQVESVKQLIAHFDRLIDELDKQIDDHTHTHFDGKAKVAEQIKGIGSITTATLMAMLPELGRLSHKRLASLVGIAPHPRESGETKFKSRCFGGRSAVRKALYMATVVATRFEPLIRDFYQRLLSKGKPYKVAVTACMRKLLTVLNARMRDYFAENGTTENGIQTA

SEQ ID NO: 214300 - protein, 329 aa, unidentified
MQSLVIIGTDVSKLTLDHGLHSAMAHLKTSNDFKGFKTWLKWALTFGSKETLWVIMEHTGYYSYQFELFLHRNHIRYTKVAALEIKRSVGLVRGKSDKVDALLISRYGWMRRDHLQPQQISTAVITELKELISLRDKLVKDRSGYKSRMKEQNATRHHSKCHIQNKVQARMIKQLTSEIKEVEEAIKGLVKENGELENNYNLLVSIKGVGFVTAAYMLAYTENFQKFSNSRKFSCYAGLAPFEHSSGSSIRTKNRVSHYANKKAKQLLNLAASVAIQHNKEMKAYYQRRVSEGKSKMGTLNIIRNKLVDRMFAVVKRQAAYQENLNIAA

SEQ ID NO: 214301 - protein, 382 aa, unidentified
MRDFAREVDPLEPERHRCARVEVSSNHSRDRGSTMNITTYGLDLAKRIFQVHWVEAETGEVKRKVLPRGDVGAFFARRASGVVAMEACASAHHWGRVLTGLGHQVKLVAPQFVRPYVKTNKTDAADAQAIWEAAQRPEMRFVALKSEEQQAVLSLHRMRAHFVKIRTMQANQVRGLLYEFGLVVPKGWRALLAQAAPLLADHTRCVVPELVRSELSMQLEGLGTLTSRIRQLERRIESWQQRESECQRIAAIPGVGKLTATAVVATIADACCFRSGREFAAFLGLVPRQSGSGGRVKLLGISKRGDPYLRTLLIHGARTVLFQQSRIGRTPDPWLKGLLSRRPKNVAIVALANKMARTIWALMAYSRVFDRGWRRIPAMAPS

SEQ ID NO: 214302 - protein, 428 aa, unidentified
MASSTDVTPVKTWVAIDVAKFTNVALMEFPDGKRKQFRFRHCAEDYDQLVSSLRSGSAPTRIAFEPTGDYHRSLGYRLVSEGFDVVLVSSVAGARMREAIFNSWDKNDPKDAQVILQLMKQGMTLRYCDPLILKTHDLQELSKTYHSIAIARKRLQHVLLTHYLPLYFPEMETFWTSTRNEWFIQFLIEFPTPASITSMTFAEFREAVWVSMGRRVHKEDKIAEIYRLATHSIGLPVALNSPAIETYRLQLSRYLELCQHRRALESKADELLSRGVDYQHLRSVPGVGPIVALVILAEAGDLRRFTHHRQFLKYCGLDLAKNQSGVSRSREQLSKRGNARLRGALWQAALSAVRMRENAFRDKFQRYTATAPLDPDLRRKARVAVTAKMARIIYALIKQGQPYRHYLDAFTPSGSIPNKRAVEAFRTS

SEQ ID NO: 214303 - protein, 343 aa, unidentified
MQTMTTIGLDIAKSVFQVHGVDAGGEVIVRRQLKRRYVLTFFQKLSPCLVGIEACGSAHHWSRELQALGHTVRLMPPAYVKPYVKRQKNDATDAEAICEAVTRANMRFVPTKTAEQQSGLVLHRARHLFVRQQTSVINAIRAHLAEFGIVAPVGRHGVEELLNVVTDPNDKRVPDIARACLSALGDQLQSIKQQILEFDRLIRAWHRSNEMSMRLEAAPGVGPVLATALVAAVADPKSFRSGRNFSAWIGMVPKQHSSGGKNRLGNISKQGDRYLRGLFVAGALSVIRYAKVHGTKHRPWLTALLARRPTKVAAIALANKIARMVWAMMATGERYKEPVALAR

SEQ ID NO: 214304 - protein, 344 aa, unidentified
MITIGIDPHKTSITAAALDPASELLGQQRLPCAADTAQQLVVWAERWPDRTWAVEGAAGLGHGVAQQLLAAGERVLDVPAKLAARARLLNSGSTRKTDLVDALAVAAVALHNGKLRHVEPEDETVVLRLLSDRRDDLVAERTRTLNRLHVLLRDLAPGGARCNLTTLEASRFLSAIRPLTLADSERKRIARALLDDLRRADRQVKAISKTIEAAVAASNTTLTEVFGIGAVLAAKIAGHAGDISRFPSKAHFASYSGTAPIEASSGDLRRHRLNRGGNRQLNTALHTAAICQIRSAGRGQDHYRRKLAELKSTKEAQRSLKRQLSNVVYRHLLADHHRRRPIRD

SEQ ID NO: 214305 - protein, 391 aa, unidentified
MRKPKTKAVNDFSRCLDPLDMDATLIAVIEMSQSSWLVAGIVPGVEREPLKKLAIDEHALLNLLNRWRAEAEKQGHRITRIAVAFEAGHDGFWLARWLAAQGVEAHVIHASSVAVTREHRRAKTDRLDTELLKRAFLGWLRGERGHCKMVAVPTLAQEDAKRPSRERETLVGEASRIITRVKAAFVRLGIRGFNPKLKAAATRLEMLRTPEDEPIPPNTLAALKRDLERHQIVKKQIREIEQTRLDVLKQAPEKGPHAMVLLLARVIGVGVETADMLVQEVLSRTMRDRRAVGRYAGLTGSPDGSGAKRRDKGLARSGNARVRHGMIQLAWRFLLFQKDSALAQWYRKRTADAPSTRKTLIVALARKLLIALWRLARDGVVPEGVRMRPAA

SEQ ID NO: 214306 - protein, 433 aa, unidentified
MEEADDEPLFRERAAGIDIGKQTVMVTVRVPSETRPGGRAQETREFGTTRRQLLELADWLRCHGVERAGMESTSDYWKPVFFLLEQQGFDCVLYKAAQVKALPGRPKTDKLDSVWLAKVTERGSLAGSFVPPEDIRRLRACTRYRRRLTQARTAEKQRAEKLLEDAHLKLSSVISDIHGVSGRDMLRAIIAGERSPRVLAELARGVMRRKLAALREALDCSFFTEEHAFVLSMMLENIDHYSAQIAVLDQKIALLCEPYQRQVAQLDGIPGFGVTNAQDLIGEIGVDMTVFPTAGHLCSWARVAPRVKESGGRRKGGSATGKGNPYIGATLGEAAVTVGRTQTFLGAKLRRLVRHMPKKKAQGAVMRTQLVIAHALLSDPEAAYRELGPGYYDERAGTQHQARGHIRSLERLGYKVTLEPVDPETGELTVKAS

SEQ ID NO: 214307 - protein, 308 aa, unidentified
MPVFVGIDVAKASLAVALYPGEQQLEVGNDAAGHKALCRWLAAQQVERVLVEATGGYEQALVQHLAEHWPVVRIPPHRARAFAVAIGKVAKTDPIDAAVLARLAAVVDGPEVTPLRAVDARLQALVRRREQLVAQRDDERRRQQQATDRCVRSSLLRHIRQLAREVARLDRDIAACVPQCDSDRAHRLRSVPGLGPVTVATLMAFLPELGQLGNRQISALVGLAPYNCDSGNRQGLRRIRGGRANVRRILYMASWSVVRHQPAFKARYAALRARGKCAKVALVACMRVLLIRLNAMIRDASEWRMAAG

SEQ ID NO: 214308 - protein, 322 aa, unidentified
MQGKITSVRADEAVYVGIDVCKGWLDVYLHPTGQSFRVPNSKEGIRRLCKELAGFKVALAVMEATGKLHRLAHRMLSQAGYAVATVNPQRPREFAKSIGQLAKTDGIDARILALYGAATGPRTTPVPAKTAAELQELVLARQAVKADETALKNRYGTAESAVLKRVLKRQLVACERAAAGLDAAIAALIEGDSTLKKRYEILLSIKGIGPAVAATLVACLPELGLISAAKATVLVGVAPLNDDSADRQGLRRIQGGRAHVRTALYMAAVSAARCNPDLKAFYAGLRARGKQAKLALTAVMRKLVILASALIRENRTWTEKHA

SEQ ID NO: 214309 - protein, 395 aa, unidentified
MSAEGEAIRSNDYRKDTTVKAPSTRPAAVLGLDVGKSSHWACLIDRDGEVLASAPVRNREAELDALFASAPAGTLVVVDQFRNIGSLAVRRARAAGLGVAYLPGLAASRAAGLFAGEAKTDERDAAVIARTALGVPDSLSGVPGRGEALEAARALSSQRDHVVACATRDKNRLRAVLLESCPALEAAVDLSDRRWLELLAGFGGAWGIARSGAEGPRAEVAGEAAAASTAPPPALVEAENRQVRFLAARISEALDEAGALEAETAALLEGDETYACLLTVPGIGPRTAAQLAVSVDIGRFPDHDHLASYCGIAPRVRSSGTSVRSVRASRRGDARLKSLLIFSCNSLVRSSGRYGEYYRACRARGMGHGRALKAVARKRLRAIYAVMRDRVPYRE

SEQ ID NO: 214310 - protein, 345 aa, unidentified
MLADELDFVIGVDTHRDSHSLALVQAATGGLILQTELATNAAGYEQALALAEQEAPGRRAFAIEGAGSYGAGLARFLAAHGERVLEVGRPARPNRRGQGKSDALDALHAARSVLGRARPAEPRQSGSREGLRALVITREGAVVARRAGLNQLRSLIVTCPEASRAELRDLSEAKLLDRCLSLDSRATELRGTLVALAALARRVRVVSAEARELKREIEALVRGIAPALLAEPGVGPISAAQLLISWSHRGRIHSEAAFARIAAAAPIPASSGQLVRHRLDRGGDRKLNRALQTIILARRRSHAPTIAYIERRVSEGKTTREAVRCLKRFLARHLFRILEGLPLPA

SEQ ID NO: 214311 - protein, 427 aa, unidentified
MSVTQNEKIRQVTDTTMVIGVDIASELHWARAFDWRGLELGKAVKFENSAEGFNFFLRWVSELTVEQKKDSVMVGLEPTGHYWFTLAAHLQGGDFKLVLVNPYHVKRSKELDDGHPSKSDKKDPKTIAKLVLEGRYVYPYIPQGLYAELRVAMNCRWRIRKELASLQNQIQRWLKIYFPEHSKVFGRFTGAGSMALLHSAPFPSDLISLGVEGISGIWKQMKLRGIGRKRAQRIYEAAQTSVGCTTGMEAARMELQILLEDYDAKLQQYERVMQVVENLCSQIPAVAELLKIQGLGLVTVAGLFAEIGDIRRFESPRQIQKLAGLAITENSSGKHKGPTEISRRGRSRLRAILFRAAIPLLAKNREFQLLHRYYTTRQNNPLQKIQSVIAICCKLLRVFYALATKDCAYSPEKVLADIQRNQPLKAA

SEQ ID NO: 214312 - protein, 338 aa, unidentified
MSIVMGLDQHRAQITADWLDTETGEVKRARIAPADRAGVRAFLERFGGLELEVALEATTGWRLVVEELRRIDAGVHLAEPAETAGLRGPKKRAKGDRADARHLRELLMVKRVPESWIAPDHLLDLRARVRLRHTLSEQRSEWQQRIQAVLYHHGCPPRRSLMVGDGRAWLAAQPLSESAREQVTIALAMIDALELQIAPLDRELRAYARRQAGGKALMSHYGIGALTAVTILAELGDCRRFSSSRHAVRYAGMDITVHQSDQRRSPGHLSRQGPPALRWALFEAAQVARRPSSPDRDYYEQAAERLGGNRACLAVARKLLRRSYHTLRELGEEALQPA

SEQ ID NO: 214313 - protein, 426 aa, unidentified
MRSVALDVHLDFCEVALVEDGELRSAGRIATTPEQIELFAGSLGPDDRVALEVTGNAWEIARIIEPHVAQVLVVSPSDTGIRQARAKTDRLDARTLARLLAAGSLDAVWMPDRATWVMRRRLSRRGQLVSARSRAKNEIHAVLMRQLVGRPPVSDLFGVKGRRWLAGLALALEERETVDAAMRQIEFLDAEIAAVERLIAQVALCSPEIRRLMSVPGVNVIVAASFLAAIGDIDRFQSPRKLAGYLGLDPRVRQSGSGPATHGHISKQGSVRARHALVEACWTAVRQPGPLHAFYQRVRARRGHSVAIVAAARKLACLFWCLLTRETDYAYAQPSLTKKKLRRLEITAGHPRYAPEATGIWHANDAVREAERELARQAETAYQRTVRDYHAAQASKAGASATPGRASSGRQSGKQRGKASVPDPAL

SEQ ID NO: 214314 - protein, 323 aa, unidentified
MRSVPVFVGVDVSKARLDVAVSGSDEAWHVTNSSGGITKLVDRLREIGPALVVMEATGGFEVPSAAALAAAEIPIVIANPRQVRDFAKSTGQLAKTDAIDAKIIALFAERVRPQVRALPDEDARALDAIVGRRRQVIDMITAEKNRLGLALPAVRKNIEEHIRWLERQLERVDSDLDQRIRKSPVWMAKHNLLRDVPGVGPNLARTLIAELPELGRLSHKQIAALVGVAPLNRDSGLFRGKRMIWGGRASVRCALYMSILSATKWNPVIRVFYLRLLAQGKPPKVAMVACMRKLLTILNAMVRDGQEWDPSIPLDQLRFQHSC

SEQ ID NO: 214315 - protein, 408 aa, unidentified
MKDSGKRYIGLDVHKHYLIAVGVDEELNVVLPVRRVEFSYLEAWMKKTLTKRDEIALEMTTNTWQLYDELCAYAGSVLVVHPPHVALITRSLVMNDKIAASILARLLAKGLLVGVWVPPQDIRELRGSVAQRKKMTGLATQAKNRLHAVLQRHHWLPPEGNPFHASQKKWWLTLPMGPLEKVNVQSDLDTLQFAEKQLMQLTSMMAEIANQNEEVTRLLQLPGFGVVTAVTVWAAIGDIHRFEDVQHLVGYAGLGTKVHDSGMSTRTGRITKAGRRDLRVVLIEAAQVAANSHPHWKAELARLQPHLGRNKAIVAIARKLLVAVWYILAQHKTDRFAQPEAIAQKLLKFAYQLGKETRPKGQSAAQFVRQCLDALQLGQELTTIAWGSKKPIPLPPSTNKVSDVPNTK

SEQ ID NO: 214316 - protein, 346 aa, unidentified
MKILALDLGKYKTVGCAYESETGAHQFQRTFTAPADLQRLVQEIKPDRVVIEVCSIAGWVCDLMGQLGVTVQVANTSDDAWRWRKVKQKDDRRDALKAARLSAVNQLREVYIPQIEVRQWRALITYRQHLVGRRTKIKNHIRDLLVREGQLLARGSKCWNQLGQELLSKMARPLAEVGPAELWRGELWEELQQLQMIQAHIASVEEKLNAIGAADKRVQLLRTIPGVGPRLSEAIVALLDQPQRFRKASQISGYIGMVPKAFDSGESERRGRITRQGNRLVRSLLIEVAWVGLRHNGWLRQTYQRLCAGKKARKKIAIVAVGRKLLVRCWAMLRDNRAWSWQPQIT

SEQ ID NO: 214317 - protein, 384 aa, unidentified
MLKPNDLNQSRIVLKQDSTLIAVIEMSLSSWLVAGIVPGVERQPLKKLAVDESALLKRLNRWREEAEKAGRRIERIAVAFEAGRDGFWLARWLRARGIEAHVIHASSVAVSREHRRAKTDRLDTELLKRAFLGWLRGERDHCKMVAIPTTKDEDAKRPNRERQSLVGEQTRIVNRMKAALIRLGIRGFNPKLKKAAGRLEDLRTPEGEPIPPNTLAELHRDLERRRLVSNQIRKIEQARLERMEQAPSDGPHAMVRLIARVIGVGIETADMLVHEVLSRKLRDRRAIARYAGLTGAPDESGSKRREKGLAKAGNTRVRVGMIQLAWRFLLFQKDSALAQWYQSRTEGGRNRKTIIVALARKLLIALWRLVTTGEVPAGVVLRAA

SEQ ID NO: 214318 - protein, 427 aa, unidentified
MNQNNQNQSFAAFIGLDKSDKKINVSLQRCGTAKIERSIIKGGAEALHAWVATLCTRFAHRQVAICLEQPAAGLIHGLMGYDFIVLFPINPMTLARYREAFTPSRAKDDPTDADFLCELVALHREQLKAWQPDDVCTRKLRHLTQARRRSVNMRTRLSNQLKALLKGYFPQALELCGDELTTPMACALLQKWSSLQQLKRARAETIRRFYYAQNARRGDVIEKRLALIAQAVPLTNDPALIESSIITVQALALGLRAVHTAISRYDREIARTFAQHPDASLFAALPGSGTAYSARLLAAFGSRRELFESAEAMLNFSGVAPVLKRSGQATLIHRRYARPLFVHQSFIEYANESIRHSLWARAFYQMHKAAQKSHWVIIRALAYKWIRILFRCWQERTPYDEIRYLRSLQKSRSPLLQYLAQPAIQTA

SEQ ID NO: 214319 - protein, 423 aa, unidentified
MKPSIEPSFTALVGIDWSDRKHDFCLQAAGSPQREFGVLVHSPEAITLWAKALYRRFGGPIAVCLEIAKGPLVHALQRHEFIVLFPVNPATLAKYREAFVPSRAKDDPTDAEIALELLLRHRDKLQTLQPQSADMRTLATLVEQRRLLVGDKTRITNRLSSTLKEYFPQALDWFDDRDTVLFCDFLQRWPSLKHVKRARQATLQSFFSAHNLRRARLIDERIHSIRSASALTNDPAVIGPHQLLVQALVAQLRVTLQAIDDFDAAITELAERLPDYQLFAALPGAGSILAPRLLVAFGEQRERYRSAAELQNYAGVAPVLERSGNKCWVHWRLACPTFLRQTFVEWAGSTIPRSFWAGAYYQRQRAKGCSHQVALRALAYKWIRIVYRCWQTRTPYDESVYLNALKRRGSPLIAHLATTTQVT

SEQ ID NO: 214320 - protein, 346 aa, unidentified
MEHYAGIDVSLELSSVCVVDAQGKIVREAKVASEPEALLAFFASLGFEVKRIGLEAGPLSQWLHAGLKRTGFDTVLLETRHVKAALSAMMVKTDRKDARGLAQLIRMGWFRPVHAKSMGSQEVRALLVARKQLLGRLIDVELSIRGILRGFGLKVGVVTRKGFEGRIRELVTGHITLERIAGAMLSARATLKVEYEKLHKIVLTIVREDAVCRRLMTVPSVGPLVAITYKSAMDDPNRIAKSKAAGALFGLTPKKYQSGEKDVSGGITRAGDEMVRTALYEAANVLLARITRFSKLKRWGMDVAKRRGSKRAKVALARKIAVILHRMWVDGTTYRWTDAQPIAVQV

SEQ ID NO: 214321 - protein, 388 aa, unidentified
MIYVGIDIAKLNHFAAAVSSDGEILIEPFKFTNDYDGFYLLLSKLAPLDQNSIIIGLESTAHYGDNLVRFLISKDFKVCVLNPIQTSFMRKNNVRKTKTDKVDTFVIAKTLMMQDSLRFLTLEDLDYLELKELGRFRQNLVKQRTRLKIQLTSYVDQVFPELQYFFKSGLHQHSVYALLKEAPTPNAIASMHMTHLAHILEVASHGHFGKDKARDLRVLAQKSVGVNDSSLSIQITHTIEQIELLDSQLFHTELEMANLVTCLHSVIMTIPGIGFVNGGLILGEIGDIHRFSEPKKLLAFAGLDPSVHQSGNFQAKKTRMSKRGSRVLRYALMNAAHNVVKNNSTFKDYYDSKKAEGRSHYNALGHCAGKLVRVIWKMLTDNVEFNLE

SEQ ID NO: 214322 - protein, 462 aa, unidentified
MARRKRKNTSSSDALPPQLTTVNLHAAGIDVGAEEHWAAVPPCDDPQPVRRFGANTADLEALADWLWGCDVTTVALESTGVYWIPLFELLETRGFQVLLVDPSKLPRSGRPKTDVHDCQWLQRLHTYGLLSACFRPEEQVVVLRSYLRQRATLLADAARDIQHMQKALTQMNIKLQHVVSDITGVTGLAIIRAILAGERDPLQLARWRDPRCKQDEAAIAAALHGTWRVEHLFVLQQALERYEFQHRQLAACDARIAAHVETFADQSHGAPLPPKRGQRRRHRNRPAFDPREPLYRMTGVDLTRIEGIDETTALIVITEIGLDMSKWPSEKHFTSWLGVSPQRRISGGKVLSSRTRPTTNRAAAALRLAAASLHHSQSALGAYFRRMKSRLGTSKAITATAHKLARLLYSMLKHGTAYVAQGLEAYEQQYRERVVKNLSRKARKLGYALVKPGEATVETSLA

SEQ ID NO: 214323 - protein, 395 aa, unidentified
MSAEGEAIRSNDYRKDTTVKAPSTRPAAVLGLDVGKSSHWACLIDRGGEVLASAPVRNREAELDALFASAPAGTLVVVDQFRNIGSLAVRRARAAGLGVAHLPGLAASRAAGLFAGEAKTDERDAAVIARTALGVPDSLSGVPGRGEALEAARALSSQRDHVVACATRDKNRLRAVLLESCPALEAAVDLSDRRWLELLAGFGGAWGIARSGAGGPRAEAAGEAAAASTAPPPALVEAENRQVRFLAARISEALDEAGALEAETAALLEGDETYACLLTVPGIGPRTAAQLAVSVDIGRFPDHDHLASYCGIAPRVRSSGTSVRSVRASRRGDARLKSLLIFSCNSLVRSSGRYGEYYRACRARGMGHGRALKAVARKRLRAIYAVMRDRVPYRE

SEQ ID NO: 214324 - protein, 358 aa, unidentified
MGEITRVGVDLAKRVIQVHAVDATGRVIVAKQLQRDGFTAWCAQLPPGCLVAMEACSGSHHWGRRLRAMGMEVKLLAPHFVSPYRLSGKTGKNDAADAAAICEAASRPTMRFVPVKSVEQQSMMALHRWREGYKEERTACINRIRGLLAEFGLVFAQRPEVLRAALAEVIEDASNELGAVARMALQRAHLHWIELECHIAWCDERIARHVRSDEQAKAAAKLCGIGPVTASALVATVDDFKQFKNGRQFSAWMGLVPRQSSSGGKAVLGEITKRGDEYLRTLLIQGAKSAVFTAHRRNDRLSRWIVQLRDRVGWQKAAVALANKHARILWSILVGGQSFDPEHVPTKHRRPSLAAVAA

SEQ ID NO: 214325 - protein, 297 aa, unidentified
MKKVSTVTAKASKKISQQKLTIGLDLGDRNSWYCVLNEAGQIQMEQRVRTTAKAWQEVFSAMPRSRIALEIGTHAPWISRLLSELGHEVIVANARKVRLIGESRQQDDRLDAQTLARLARIDPELLYPVKQRSASAPADLMVIRARAGLVRARAGLVNTARGLAKSYGERLRGCNVRNMNPEKAEALSPELQGALGPLLSAIEETRERIREYNDRIEALAQSSYPQAELLKQIQGVGTLIALTFLLTLEDPHRFGKSRDVGGYLGLQPGRRKSGKSEPQMHISRVENPAPRPHAGLS

SEQ ID NO: 214326 - protein, 388 aa, unidentified
MQIITDRPQAPTAIRTDLGAIFVSLELSRSTWLITSLSPGGGEKMSKHTVRSGDVAGLWARFSQLKDKVHVRTGQVVPIIVIQEAGLDGFWVHRLLQDERVESHVVDPASIATSRRRRRAKTDKIDGEALVRALLAYKRGEPRVCAMVRAPTPQEEDRRRICRERKTLTAERVEHVNRIKGLLFAQGISDYEPLLRKRRERLEELRTGDGRPLPEHLKAQIGRELDRLELTLQQIKSVETERDAMLSPSSGNTPAPVAMLKSLKGIGPEFAGVLWSEGLFRSFSNRRQVASYAGLAPTPWQSGSVAHEQGVSKAGNPRLRTTMIQLAWLWVRHQPRSILTLWFHQRVQLNGGRVRKVLIVALARKLLIAFWKYVTAGVVLEGAETTAA

SEQ ID NO: 214327 - protein, 407 aa, unidentified
MQVYIGIDWSETKHDAAFLNAAGACLAHLTFKHSPQGYAELETVRQSFGVAPQACLVGLETAHHLLIDYLWARQYSQVYVVPPSVVRSRRKRYRQSGARTDESDAWLLADLLRTDRRRLQPWHPDSLLTRQLRAQVSLYFHLSRSCVRLSNRLRAVLLRYYPAALEVFYHLDAQITLAFIQAYPTPQAAAALSYADFQSFARQHRYPRPQQLPARFAQLQAPQPAAAPETVAVYRPEAVLLASLLLGTVQAKNAAQSALRAGFTQHPAHPIFASLPGVGDILAPGLLMKFGDDRRRFPTPGSVQALAGTCPVTDQSGKRKTIRFRRACDRQFRHIAQQWALNSLRTSVWANAYFLQVRPRCASENHAYRCLANRWLAIAWKLWQTRQPYDEAYHLQQRAARSRPVSV

SEQ ID NO: 214328 - protein, 355 aa, unidentified
MNDSKYIGLDVHQATISATVLDAEGKLVMEAILETKAETVLQFIHGLRGSLHVTFEEGSSAAWLYTLIKPHVTRVLVCDPRKNALLKVGNKSDRIDAHKLAELLRSNLLRPVFHDDTGLRTLREMARSYLTITKDVTRVMRRLKAIYRSWAIPCGGQEVYSPRHRAEWLGKISEASVRRRAELYYQQLDALVYLHRQAKKELLAEGRKHQATKLLRQIPSIGPIRSVLLVALLQTPHRFRTKRQLWSYSGLALETRNSGEYRFQDGQLKRSKKVFAIRGLNKNHNHDLKNVFKGAAIRAAAIEGPFQKFYEALVAKGMKPAMARLTLARKIAAITLIVWKKGARFDAEHLKQQAA

SEQ ID NO: 214329 - protein, 411 aa, unidentified
MQIVHERCCGLDIHKKTVVACVLITQADGTLQREIRTYATMTADLLMLRDWLESLDVRHVAMESTGVFWHPIYNILEDEDRTILLVNAQHMKAVPGRKTDVKDSEWLADLLRHGLLKASFIPPAPIRELRELTRYRKTLVQERASEINRLQKVLESANLKLAAVATDILGKSGRDMLDALVDGQEDPEVLAALARGRLRPKIPELQRALEGRVKAHHRFLIEQILSHIDFLDQAIARVYQEVERCLTPFSEAVTLLQTIPCINAVAAAIIVAEVGTDMTRFPSAKHLASWAGVCPGNRQSGGKRLSGTATKGDVWLRAVLGEIAVSIARSRGTYLHAQYHRIARRRGKPKAVWAVAHSIMIIVYHILRTKQPYQDLGERYFEQLEAPRLERHHVRKLEQLGYTVTLTPQVA

SEQ ID NO: 214330 - protein, 318 aa, unidentified
MDTLKNTTNKIGVDVSKKKLDIAFDEHTVITIENKESAFFDLLKRLPYALKDVHFIMEATGGYEKKLARFLLAQSIEVSVVNAKRVRDYAKAMGRLAKNDTIDAVVIRAFANAIDLVRLEEKSDDNYELESLVKRQQQLTKLQSVEKQHLETASGKTVVHSINTVIKLLEKQIISIEKMIVALLENTDSYHKRRKLILGVEGIGERTASTLLIQLPELGKLNNKQISALLGVAPFCNDSGPRKGKKQIWGGRKVVRSSLYMPMLSAIQYNPVIKAFYNRLVARGKIRKVAVIACMRKLLTILNSMLRNNTEWNPKYGI

SEQ ID NO: 214331 - protein, 353 aa, unidentified
MSQQLSTTIAVIGVDIGKNSFHIVGLDQRDAIVLRQKWSRSQVESRFANMPPCLIGMEACVGAHHLSRQLKGLGHDARLMPAKYVRPYSKGQKNDFRDAEAIAEAVQRPTMKFVTTKTADQLDLQALHRVRERLVSQRTGIINQIRAFLLERGIAVRQGQRFLRAELPRILAAPPDVLSPRMVHVIEDLAGDWRRLDERIEGLSGEIEAIARRDAGCERLMSVPGIGPIISSAMVAAIGNGDAFAKGRDFAVWLGLVPKQISTGDRTILGKISKRGNRYLRVLFVQAAWVVLIKPKSWERHGLKPWLEAAKKRLHHNVLIALANKLARIAWSVLARGRSFEARMTNEANAQPV

SEQ ID NO: 214332 - protein, 413 aa, unidentified
MDVVHPRCAGIDISKRDAKVCVRIQGHDNRRTTSTVTTWGAMTNQILALREHLVEQKVTCVVMEATGAYWKPFFYLLEDAVPVMLVNARDARNMPGRKTDVSDSAWLADLGAHGLLRGSLVPPEPIRQLRDLTRARTAITRDRARQVQRIEKILEDAGIKLSSVATDIMGVSGRAMLQALIDGRDDPAVMADLAKRRMRSKIPALTEALTGRFTPHHGFLIGMHLNLIDEYANSLAELDARIEETMKPFRAARELLVSIPGISTTVAEVFIAETGADMSVFPTAGHLASWAGTAPGSNESAGRVKSTKTRPGNRYLKNALGIAALAASRSENTYFSAKYKRIATRRGPMKALVAVEHAMLVAAWNMLTNGDFYRDPGADYFTRRIPAKTKARAIGQLESLGYRVTLEPLADTA

SEQ ID NO: 214333 - protein, 341 aa, unidentified
MKKLFIGIDFSKEKVDVAIIFAENLSKTASRVFNEFKTTVSGYKQLVKWVEQNSYGIDSSLWLFCGENTGDYSKGLCNFLYGKGYDMWLENAKSIKDASGLRRLKSDRADASMIAEYAMRNYDKAIIYEPLSESLAQLRELFLYRQIVVRHRCSFQVRRGEKRLTMEKSSVKTMISQSGRHIVSELNKEIEKIDKRIAELIKSDEELTEVYTIVTSVPGIGTQNAVCLMIYTDNFRRFNYNSRKIACYYGIAPFGKDSGTSVHSDPRVHYMANHQIKAMLTQAALAAVNFNSIMARYYMRLVEGGKKKQVALNNVKNKLIHLVTAMVRNRQFFSPEYKISA

SEQ ID NO: 214334 - protein, 411 aa, unidentified
MKRVIGMDIHRTFAEVVFWEDGRLRQHGRVDMTRSGLEGFGRGLTKEDEVVVEATGNAMAVVRVLSPYVARVIVANPLQVKAIAHARIKTDKIDAGVLASLRAADFLPEVWVPDAETERRRRMVARRNQVVRHRTRVKNEIHAILAAHLVPPCPHAELFNGPGRAWLAKQALPDDERAAIERHLRELDRLGEDLAVLDHEIGAAVVDDPAVRRLLTIAGMNVTVAAGLVAAIGEIGRFSSPQKLVSYFGLNPRVRQSGLGLAQHGRISKIGRAHARALLVEAAWAAAKAPGPLHAFFVRIRGRRGHQVAAVATARKMAVLVWHLLTKETDYLWPRPALVAHKVRALELQAGRPMRKGNQRGPAYPYNVKALRAQEMAIAEQAERAYEQFVKQWREQPARRRTGAAPAAGSS

SEQ ID NO: 214335 - protein, 444 aa, unidentified
MVCSGMILIREVADAPVIMGISKPAGLKSPCGEVKIVNPLFVGIDVSSRSNVAYLMKPDGSKHSSFSVQNNLGGAKMLSERIVSALSSMRLSDVVIGLEATSIYGNNLVYALREDGSLSRFQRKIHVLNPKQVKKFKEAYPDLPKNDFVDAFVIADHLRFGRIAKEVYMDDYRYQALRTLTRARFDVIQNLTREKQRFANYLFLKCSGIAQEKDIQNTSATTIALMEHFETVDDLANTDLDELTDFIAQAGRGRFVDPDATARAVRAAAKGSYRLPKTVNDTVNQAMSVSIASMRALKEQVKVLDKAIEQQFEIIPNTLTSIPGIGKVYSAGIIAEIGDIHRFDSQASVAKFAGLVWTQHQSGEFEAEHSRMIKSGNRYLRYYLLEATNSVRRCDSEFRRYYDLKFKEVNKYQHKRALALTARKLVRLVFRLLKDNRLYIPSEG

SEQ ID NO: 214336 - protein, 333 aa, unidentified
MKSGTVHIGVDVSKEKLDIYVPAKKEGSRPLTKEVDNNINGFRELRDLARKAKATVCVEPTGGYELELIAFMHKFDVPIAYTDALRVRQFARAEGSLSKNDTIDAALISRFADKIGVRVLEQQEVEAVELKRKAKFRQTMVDSRTAMINRLETEIDPEMKALLKEQIKCMDKVIDKAEKLCLDTVKKNERMDSLKERFTTIGGVGDLTAISILSSLPEIGTLSDGKLNRLVGIAPEEKQSGTKEWQRRIWGGRKDVRNALYMAAVASIKWNAILGGYYHKKRAEGHPHKWAIVPTMRKLLSLLNRIARDPGFTPTPEPKSTKQNANVGRKKAA

SEQ ID NO: 214337 - protein, 416 aa, unidentified
MKYAQILVLAETPPGGLTAGIDWGSADHAVCVVDTAGQVRARFTVAHDRAGIGKLIAGLRAAGVSEAAIERSDGVLVEALLEAGLTVVVVTSRQMKNLRSRYGSAGAKDDRFDAFVLADVLRTDRARLRPLAVDTPATTALRAAVRARRDLVAHRIAACNQLRAHLAVAFPGAVGLFASLDSPISLAFLARFGSHDAAGQLTEDDLAAWLHTVPHRGKAARPGQLRARLQAAPRGATGPDGAALVPVTGALVATLATVSAQVQALEAEIAVQLAAHPDAHIFTCLPRAGTVRAARLLAEIGDCRARFPDPESLAGLAGVAPVTRRSGKHISIGFRWAVNRQLRDAVCDFAGDSRHASPWAAALYDAARARGKDHPHAVRILARAWTYVIWRCWQSGSAYDPAKHAALQRVLEQRKS

SEQ ID NO: 214338 - protein, 408 aa, unidentified
MNQLFVGIDVGSRDNAVHIMLPDGEKYSSFSVRNNLDGSQTISKNVVSAMTAKGLKNLEIGIEATGVYGDGLMCFLNENDALAQFEKRLYILNPKQVEKFKQAYSDLPKNDPVDAFVIADSLRFGRIKTNPYQDDYRYKSLQTLTRARFFAVQNLTREKQRFMNYLFMKCSGLAQEKVFSDTYGAAALAVFEEFDTPDDIAEMDIEQLASFIAEKGKNRSPRPDEIAKAVQAAAKGSFRLPKTVNNSVNQVLSVSISSMRAMQSQIKALEKEIERQFQNIPNTLTSVPGIGPVFSAGIIAEVGDINRFTKGQSGLAKYAGLVWKENKSGMFEGQNTRMIKSGNRFLKYYLCEAAISLVRCDTEFRRYYDLKFKEVNKYQHKRALALTARKLVRLVFRLLKDNRLYRPA

SEQ ID NO: 214339 - protein, 433 aa, unidentified
MKVLYERVAGIDVHKDMVKVAIRSPGEKPWTRKTEILEFRTFYGVLQEMARELRRRGVTHVVMEASGVYTEPVYYALCEQDFEQVAVINPAHAKALKGHKTDARDCARVAELFECGLLRGSYIPAPELKEVRDLTRYRMKTVQARTSEIQRLGKALESAGIKLGSVASSITGTASTAMIEALIDGERRGGVLADLAIGRMRAAGKLADLSMALAGRFTGHHALLCRLHLDRIAVFDDGVDGLDERIAGKAARWQREAGLLTSVPGFGDVVAQAWLGEIGPAPHLHFATHEKLASWVTLCPGNNISARKRKHGRTGDAGTYIKPMLVQAAWAAIRVRGRLQARYNRLVRRFGGEKNPGAKKKAITAIAHTLLKIAYQVLKSGTPYQEPGADFYTRRESPGQKQAWLERQMQKLHPGCAITITISPPEAALPPGG

SEQ ID NO: 214340 - protein, 428 aa, unidentified
MDYTQNAKIAQVTEKSLIIGVDIGSESHYARAFNWRGQEYGKKVFHFNDDVEGYKAFKGWVEAHKARTGAETVIVGFEPTGHYWFSFGRYVKQMGMMLVLVNPYHVKQIKELDDNSPKKTDFKDPKTIAKLVVDGRYSIPYIPEGVYAELRQAVSSRDRIIKEQNALTNRIKRWLKIYFPEYLKVYTKFSAESGLLLLEKAPLPAEIVELGVDGVTQIWREQKLRAVGKKRAETLVEAAKNSVGIEGGACAKLELQLLLSDFRTKQAQLEQVEAVIEAEVLKVPHVEKLLAIKGIGLITVAGFLSEVGEIGRFDSPKQIQKLAGLELKENSSGKHKGQTSISKRGRKKLRKILFQSVLPLIRSNAEFSDVYRYYTTRQKNPLKGKQAVIAVGCKLIRIFYTLLTKGVDYDASRMRLDIIRPADGEQVA

SEQ ID NO: 214341 - protein, 350 aa, unidentified
MAMTIVEPVSARAVTGGVDTHLDVHVAAALDDIGGLLGVESFEASPAGNDKLLAWLRTFGDVAQVGVEGTGSYGASLARSLRAARVTVVEVDRPNRQARRRTGKSDPADAVEAARAALSGRAQGAGKTRDGNVEAIRALVVAKRSARSTRIKSLNQIRHLGFTAPDELRDRMRGASRDHLAGVAAGLRSRAGGDPVITATKTAMRILGRRVLALDEELATIDALLAPLVAATAPSLLEVHGVGVDTAATLLVAAGDNPGRLRSEAAWAHLCGVAPIQASSGKVTRWRLNRGGDRQANGALWVVVITRMGSDPRTRAYVERRLKEGRSKTEIIRILKRYVAREVFHHLPRA

SEQ ID NO: 214342 - protein, 455 aa, unidentified
MPRTTTGDRPELKPVNVEAAAIDIGSKMHMAAVDPACTDTPVRAFGTFTQDLHDLADWFKACGVTSVAMESTGVYWIPAYEILEQRGFEVILVNARYAKNVPGRKTDVSDAAWLRQLHSYGLLRGSFRPDAEIATLRAYLRQRERLVEYAAAHIQHMQKALMEMNLQLHHVVSDITGATGMRIIRAIVAGERNPDVLATYRDVRCHSSIETIRAALVGNNRDEHVFALTQSLELYDTYQAKMLDCDRKLESLIAALTDKGAKPVGKLSRPRVKTKQVNTPSFDVRAALYGVLGVDLTEIHGLGPSLALKLIGECGTDLKAWPTAKHFTSWLCLAPGNKISGGKVLSSRTRRSSSRAAALLRLAATTIGRSDTALGAFYRRLSSRAGKAKAVTATARKIAVLFYNTLRHGMTYRDPGADHYEEQYRSRVLANLKRRAKSLGFVLQAVPCDAELAVS

SEQ ID NO: 214343 - protein, 311 aa, unidentified
MATSSETYIGIDVSKDRLDVAVLGEERGWQVDNTPNGIAKLVQQMENLQPELIVVEATGGCQRAVVDALFHARLCVAVVNPARVRQFARACGLLAKTDKLDARVLAVFGQRVQPKRYEGKSDAEKELSALLVRRKQVEEMLKAEQNRLRTTSPSLKSSVEQVIFCLKEQKKILDEQIQNFLTEQEAWQEQTEILSSAPGVGPVTTATLLADLPELGKMDRKKIAALVGVAPMNHDSGKKRGYRKTKGGRSDVRSVLYMSTLVATRYNPLIRAHYQHLLKRGKEKKVALIACMRKFLTILNAMLRDQQPFRM

SEQ ID NO: 214344 - protein, 391 aa, unidentified
MIYVGIDVAKDKHDCFITNSDGEVLFKAFTITNNLDGFNELHQKIASVMDDVTKVKVGLEATGHYSYNLLGYLIDKGLPTYVINPLHTNLYRKSLSLRQTKTDKVDARTIASMLMSDVNLKSYSDISYHNEALKSLTRYRFDKVKERAKLKTSVSRLVCILFPELEKLVPTLHITSVYALLSEFPGAKHIATAHLTRLTNLLSEASKGRYGKDTAITFRDAARASIGSNMPAKSLELKHTIKLIQELDSEIDEIEKEIKIIMDEINSPILSIPGINYRMGAMIIAEIGDFNRFDSPDKILAYAGFSPSTYQSGQLDGAYAHMEKRGSRYLRYALYNATKYVCHWDPTFAAYLAKKRAEGKHYNVAISHAVKKLVRVIYHLEKTKQQYIKAA

SEQ ID NO: 214345 - protein, 330 aa, unidentified
MKKYEIIVGIDVSKKKLDVTIVNVSAPKEYDYFMVENTTKGFKELLKKLTLETLFCFEYTGNYGAPLCLFLQENTQDYWQCNPLVIKRSKGIARGKSDKADSKDIAFFALSNLHKVELSKLPEVDIQTIKNLLTERDKLNKAIMIFSSTKEYTDLLQKNTVKEVVKNNNKTVNFLKKQIKEIEKSIKEVVKLNEVISEKMDLAMSVPGVGEQTALQLIVRTRCFTAFKDSRKLACYMGIAPFPYSSGSSIKGKTKVSHYANKKLKSILSMAALSAKKWDYELASYYTNKTEEGKAHSLIMNNIKNKIIARVYAVVQRGTPFVNTRKFSVN

SEQ ID NO: 214346 - protein, 410 aa, unidentified
MSVLEVALDRSTVIVAVDPGKAFNRVWISNGSGMLADPMSLSVSREGIAQLELALNKHGPDAPVIAIEATGSLHRPWVTELERRHPGSVRLFAPSETKSARTQLGSGRFKTDDRDCAALTYMARQGGGRHYGQQSSVEALRAAVRHRRGLVADRKVAQQRLHDQLNALCPGLSAPAGHGRSLALETPTGLAVLACAAAFSGRPPQLRSLMCRAPGRLTATTAEYWVQRWRSCLPPPVDADQRARRLMRDLDRYRRLRDDIEAIDLEVMALLADTEGQILTTLPGVATIRAAAFAAHSLPIERFPDAEHLYSATGLAPALYQSATLNRRGHISRQGLAEHRDALMGIAWGLSQCSPSFVQRDAELRARGMAPIQARVALARHACRLAYRLLRTQQPFDEQRYRRGRLGRER

SEQ ID NO: 214347 - protein, 467 aa, unidentified
MTPRAGKRFRTSPPSDDLTVKHPHAAGIDVHAAVHFVAVPAEDVPAGFVNPEPKLPAGVRKFGTNTGDLEALADWLTACRVTTVAMESTGVFWIPLFDLLASRGFQVILVDPRQTAHAPGRPKSDVLDCQWIRRLHSYGLLTGAFRPDDEIVRWRGFQRQREMLIRYAAQHIQHMQKVLEEMNVKLTEVVSDIVGQTGMKILRDIVRGVRDPVKLAQHRHELCKATEEQIAAALEGNWRPELLFALKQALALYDFYQKQLRECEGRIEECLRAMEDKSKGAPLPPPPRKRKPEKNEVRFGARVLLFKMAGVDLTQIEGISETTALVILSEVGVDLSAFAHEKNFVSWLGLCPQHRGSGGKIFKRRTRRGANRVARALRMAAQGCHHAKNALGAFYRRIQARCGGAKAVVATARKLAERVYRMLRYGQEYVRQSQEAYEEAYQLRQVKSLAKKAASLGYKLVPETMTP

SEQ ID NO: 214348 - protein, 325 aa, unidentified
MNQKNNKAMNHIEYNQIIAVDVAKNELVTYDGNRLGKIANKPGSFEKLLADVNADTSELLVVCEATGSYERPLVNWLQQRDIAVHIANPARVRAFAKGKGIQLKNDPVDAKVLMLYAIENKVVASRVPTDTERQITALLDRRSHLSRELTREKNRLEKEPDYTSEFIVKSIEFIKEQISQIDEQIKQLSEQDKQLKENCDLFSSIKGVGHLTAITVLTYMPEIATVSRNQAVALAGLAPYDRDTGTVKGRRFIQGGRAKIRRCLYMAAVSAARFNPVIRDYVARLIARGKPFKCAIVAAMRKLIIHMHSQLKLKLNQIEKNAICA

SEQ ID NO: 214349 - protein, 462 aa, unidentified
MKRKSQERSTKHERRAQRLLDKIHLSAAGIDVGSGSHWVAVPEDRDDQPVREFKSFTHELIALADWLETCAIDTVAMESTGVYWIPLYEILEERGIEVLLVNARHVKGVPGRKTNILDCQWIQQLHTFGLLRGNFRPDAPIAALRSLIRHRDQLVEVAASYVQRMQKSMVLMNLQLHNVISDVTGVTGIAILRDIVSGQTDPALLARHRHARCKASEQEIAASLTGHYRDEHLFVLRQALELYDLYQDKIQRCDEQIEARIHGLEADCESPERLLPKPRRARSRSANEPHFEIRSPLFTLCGGVDLTELPGIGPYGALKLLSEIGLDMSRWASEKHFVAWLTRAPRNKISGGKLLSSRTQPSANRAAKILRMAAMSLGRSDHALAAFDRRIGARVGKAKAITATARKLAILVYRMLRHHITYRELSAADYDQLQRSRILRGRRRRAASLGIELVDTNTGLVM

SEQ ID NO: 214350 - protein, 424 aa, unidentified
MNLTQNDRLKQVTSDTLIVGVDVGSQTHFCRAFDWRGFELSRRVFKFSNTGKGFLTFLRWTEELLNKTDMKKVIVGCEPTGCYWLTFQKFLQDHEIQLVTVNPFTVNRSKELDDNSPEKSDLKDPKTIALLVKDGRFSTSYLPGGVYAEIREASVCREQIMKQHVRLSNQIQGWLQKFFPEYFECYADWDSTSGLMLLKEASLPQDILKTGAGGINQIWRDAKVRAAGIKRAQTLVEAAQNSVGLEAGEAARLEIWILVNDYISKEEQLRRLDEYLEEKVKEVPNVEKLLAIKGVGLSTVIGFVAEVGDIGRFTDPKQIQKLAGLEIVKKSSGKKKGQPRISKRGRRKLRRTMYESARSLINWNPAFQDVFLYYRNRERNPLGGMQAKIAVACKAIRVFYVVLQTGCEFDEERFRKDIIRPEAA

SEQ ID NO: 214351 - protein, 321 aa, unidentified
MTKGIEIYGIDISKKVFDIYNSNKGHLQFNNDEKGFTVFLKTLSKHSLVVMEATGYYHYRLAQYLDKNGVLVSVVNPLSVKRFIQMRLSKIKTDKSDAKAICEYAQMNQVPLYNALTNVQAECFQLFALLEVYLKQRTATKNKLKGEESLGKPSKVVYQSLRRNLKHLDKEIDTIELRLLELVKQEQQDQLTLLKSIPGMGVKTALFLIVLTDGFNKFDNAKQLCSYVGITPTIRQSGSSIRGKSRISKMGNRKLRSLLFLCSFSACKHNKACRELYQRIIAKGKSKKLALIAVANKLLKQAFAIAKSGRPYDENFVSKLT

SEQ ID NO: 214352 - protein, 485 aa, unidentified
MAKRKQSNFERINLERMNRKQRRELGQRLEKSDPGLEIVHPHAAGIDVGNESHFVAVPGNRDPQPVREFGCWTGDLVKMAAWLKGCGIETVLVQATGVYWIALKDIVEQQGIEVVVANAQHTKNLPGRKSDVQECQWLMKLHTYGLVRGSFQLAEDMQGVRAVWRLRGRHVEEAARSVQHMQKALTQMNVQLANVLSDISGKSGQAIIGAILEGERDPGKLAELCDRRVQASTEEVAESLRGNWRDEMLFELSQARESYRFAQQQIQSCDRKLESYLKVLPTRQVEIMLPAPPVPSPATPVRARQAPRKQGNTPEIPGMRDELVRICGVDLTTIDGISIVTAQTILAEIGTDTSRFRTEQAFVSWLGLAPNRDISGGKVIRVVRRKVPSRASTALRLAATSLKSSDSYLGARYRHLQRQLPSKASAVKAMARYLGVLVYRLMTKGQAWVDQGAARFEQKRKALNLATLQARALASGYRLVPVTGS

SEQ ID NO: 214353 - protein, 356 aa, unidentified
MEQVNKLDFSGQSIYVGLDVHKKSWSVSIFSEQCEHKKFTQPPEADKLAQYLKRNFPGAAYQAVYEAGFCGFWAHDRLQERGVNCIVVHPADVPTTNKERTSKRDRIDCRKLARHLRSGELKGIYVPTRLQLEDRSLVRSRQTLVRKQTRCKNQIKSFLLFYGLELPEEMVQSRWSKKFLHQLAEIRMERDSGHLALQSYLEELQQLRKLIAAVNRGIILLSREAAYREMVQRLKTIPGVSTLTAMILLTELGDLTRFKNLDHLASYVGLIPDTKASGETEHIGGLTFRRNAQLRAVLIEAAWTASRLDPVLLLAFNQYCRRMKKTKAIVKIARKLLNRIRYVLKNQRDYVPGVIQ

SEQ ID NO: 214354 - protein, 350 aa, unidentified
MQIVGCDFHPQWQQVSFLDQETGEYREAKLVNGDGEAERFYRSLSPGALVGIESCGNAQWFIDLLSSLGHTVWVGDAAKIRASYVRKQKTDRRDADHILKLLVEDRFPRLWTPSAKQRDLRQLLIHRHKLVEIRTRVKNGLQHLAMNRGVQKQSRLWSVRGRAELEKLPLEGWSARRREDLLELMKGLDRQVKELDEAVVQAAREDAKAELLMSQPGVGPITAMAFVLTIGDVSRFEYSGKVASYLGLIPSEYTSGGKRKLGAISKQGNRFMRQLLVEAAQTACRLDEGFRKQYQARCHHKPKAVAKVAAARRLAVRLYWMLRLNKRYPEIAHIESSSGVPLAIHGRDVE

SEQ ID NO: 214355 - protein, 352 aa, unidentified
MSQKSNCAIAVIGIDIGKNSFHVVGHDRRGAIVLRQKWSRGQVEARLANLPACLIGMEACVGAHHLSRKLRMLGHEARLMPAKYVRPYSKGQKNDFRDAEAIAEAVQRPTMKFVATKTVDQLDLQALHRVRERLVSQRTGVINQIRAFLLERGVAVRQGLRFLRVELPGILATRTDVLSPRMLRILEDLAGDWRRLDERVEGLSNEIEAIAQQDAGCERLMSVPGIGPIISSAMVAAIGAGDVFSKGRDFAAWLGLVPRQISTGDRTILGKISKRGNRYLRVLFVQAAWVVLIKPKSWERHGLKSWIEAAKKRLHRNVLAIALANKLARIAWSVLAHGRHFEATKVGGAIAQ

SEQ ID NO: 214356 - protein, 340 aa, unidentified
MGQASTIGLDIAKRVFQAHGADATGRVVFRKRLVRAKVLEFFAGQPPCLVALEACGGAHYWARELGKLGHTVRLIPPAYVKPFVKRQKNDVADAEAICEAAQRPGMRFVPVKEEAQQANTVVFRARDLLVRQRTQCINALRGHLAEYGHVVPQGPAHVNRLVALVEDPKSAVPESARGILQVLIRTLNALEEQLKELDGEIARRAKADPVARRLMTIPGIGRIAATAITALVPAPEGFRAGRDFAAWLGLTPLQRSTGGKHKLGAISKMGERTIRRLLILGASAVVRWASRRGAAAGSWLARMLARKPRMLVTTALANKMARIVWAMMVSGETYRRPAQA

SEQ ID NO: 214357 - protein, 331 aa, unidentified
MQAGEGIIGIDISKDSFDMVLRSTRGEQHRVFSNDQKGYMALVAWAEKQPERVVHICMEATGSYWEGLAEHLYQGEYTVSVVNPYQIKRYADHLLNRNKTDKADASLIAEFCEKDQERLRAWKPYSPEIKALRSMGRRLDELQDMKQQEQNRLKSGVTDLVVIESLQKNIKQLKDQIKALWKKIQEHVKQHPDLREQQRLLTSIPGIGKLTAIKLIAEIGDIRDFSSASQLAAYAGLAPKQFRSGSSVHKQTRISKQGRTELRRCLYMPAVVASEHNPIVKDLKRRMLASGHVMMEVIVAAMKKLLHLVYGVLKSGKPFDPDYGKQFCFNS

SEQ ID NO: 214358 - protein, 373 aa, unidentified
MNYTTVYVGMDVHKESFSLCCYTNEKEQAEYCQKVKAHYSKVLNYLDAMRFHYGNDAVFICGYEAGCLGFTLYHQLTQHHVKCVILAPTSMAKPTGKKKVKTDKLDAALIARCLAHHDYSPVHIPTDKDEQVKEYIRMRSDHKAALKKIKQQISAFCLRHNYRYEATKSHWTQAHLNWLRALKPEGLYEEILSEYLSTYDQLTDKLERIDKRIEELASDPDYQEKVSKLTCFLGIKTHTALTTMVEVGDFNRFPSAQKFAGYLGLVPGEDSSGDSRNGLSITKAGDSHVRMLLTEAAQSYTRGRSGCKSQALKARQYGNTAQVITYADKANERLRRKYYRMVLTQNKKPNVAKTAIARELSCFIWGMMTENMQ

SEQ ID NO: 214359 - protein, 370 aa, unidentified
MTQCTKTQFVGLDVHKDSIVIAVAQLGREPARVIGTVPHEWNALRKVLDKLGPRCEVACCYEAGPTGYGLARALIAAGWACDVIAPSLIPKKRGERIKTDRRDAVKLAQNHRSGELVAVFIPDEKGEAIRDLERAREDAKKAERVVRHQLSKFLLRNNRRYPGRTTWNAAHQGWIAKLAFAEPAQQYVLSDGLAAVETATLRVSQLTARLRELTVGWSQEPLVKALQTMRGVEFVTAVTLVAEVGDFRRFATAQDFMGYVGLIPSEQTSGPHRRQGPITKTGNAHVRHVLVESAWHYRRQPRMSKALRERSVGVAPQVCAIAWKAQKRLHGRLNRLIGRGKNKGEAVTAVARELAGFVWAISREEKLIVS

SEQ ID NO: 214360 - protein, 394 aa, unidentified
MKLVGIDIGKNKHFFCIMDKVTGEIIVSPTSFLNNKDGFDFFIQKLKPYSKDSLLIGMEDTGHYHFSLLKYLLDNHFTVALINPKTTDFTRKLQGGIIKNDELDTFTICDVLDNHERKKLYRITKVNRFDLYEQKQLTRHHHNLKEELNVYTNRLQKSIDIVFPEFNSLFKSKYGTIYMNILKTFGSADNIANTDIRILRKCFDIKGRGNRISLTPEKLKECAKASIGIPSSSEEIKIKHLIDQIELINEQISEVDKKIEEFSVQNNSPILSIPGISHFSGTSILAELGDISNYSKPSQIIKFAGVAPYHYESSQYNAKHTTITKKGSKYLRKTLYQIILPVIRYNPVFQQYYQLKLSQGKGHRCAQGHCVRKLLRIIYHLLTTNQQFDPKLLR

SEQ ID NO: 214361 - protein, 436 aa, unidentified
MNYKQNEKINQVKESTLVVGIDIGSTTQYARAFDWRGIELGKVFPFSNSREGFESFKAWMQHLQDKYKKLDAIVGIEPTGHYWFDLGAYLEDEGILLVMVNPYAVKQTKELDDNSQSKNDRKDPKVIAKLVTEGRYSAPYTPDGVYADLRIMVANRKRLIREMTQIKNRFARWFAIYFPEYTDVFGDYEAQSSMLLLKKVCTPEAIVELGAEKINQIWRDAKLRAVGMKRATTLCETAKRSIGLKKGSSAARYEMKLLLEDYEYKKAQLDAVMEEIEKLCRKIPESEQMLAIKGIGVITVAGFLAEVGDVRRFESPRQIQKLAGLSLRENSSGKHKGQTTISKRGRSKLRAVLFNAAIPLIAKNPEFKSLHEYYTTRANNPLKKKQSVIAISCKLIRVFYAILAKGVTYDAQKLISDIHRHKKNDCEIQETSAARC

SEQ ID NO: 214362 - protein, 397 aa, unidentified
MEIQDETGRKLAVRRLPEGAAGIAQLHELIAAHLNADGDPGQVVVAIETDRGLWVQALAAAGYQVYGLNPRQVARFKERYNLSGAKSDPADAHALAGMVRAERHQLRAVAADSAGGQAVKVAARAHQTLIWERTRHTLRLRSALREFFPAALLAYADLGLTGADTLELLARAPAPAVAAKLTAAQISAALKRARRRDVPTRTQAVNDALRGPQLAQPAAVTAAYAAAVQAAAAVLTTLNEQIRQLEARVEAHFLQHPDAEIYLSQPGIGTVNGARVLAEFGDAPGRYASARARKNYAGSSPITRASGRSKIVLSRFIRNDRLADALQSQALSALTASPGARAYYDKQRARGLGRNPALRQLSNRLAGILHGCLKTTTCYDEAIAWPGAVVHPEPLAA

SEQ ID NO: 214363 - protein, 361 aa, unidentified
MEIRTIGIDLGKTVFHLVGVNARGEVVVRKKCSRTQVLRFTSNLRECLIGMEACGGSHFLGRALREQGHDVRLMPAQYVKPYVKTNKNDYIDAEAIAEAVTRPTMRFVPIKTDDQLDLQSLHRVRERWVVRRTAVINQIRGLLLERGITMRKGRKHLETSLPHILEDAENKLSGALRALLTQLQIEMQYLHRQIGESDKLIARIAGDLEPCRRLVAIPGIGPVIATATIAAIGNGAAFKKGRGFAAWLGVVPGEHSTGGRQQLTGTSRRGNKYLRRLFVLGAHTVLLQRTKQSSGLSTWLASLSARKRKQVATVALANKMARMVWAVLYKGEAYRPPLLHNPSRPDGLHMTPGTSARLGNR

SEQ ID NO: 214364 - protein, 403 aa, unidentified
MPTASEIRVSIDVGCHRHSVAIGLPTGEVLEEFDLLHRPEGFDLLFAHVERYQRRYGGEVAVAMEGYNGWARPLDTLVRSHGYRLFNINNLKLARFKEIFPAAAKNDRIDARKGLELFQLCDHLPVARGVLQEVAATPLENDQLKRLTRRRRALVEERSRLLCRMQADLQAACPGLLAITQNADNVWFLNLLTHSDDLGKLARLRETTLLGIKGIGRTYAARITAWQKSVHFSHDVAWVGPMIIEDARRILELRASIKALEARCAELVAQSEIAQCIDSIPGFGLVCAAEIAGELGTVARFTNEGSLAVYMGMATLDNSSGKHRGSKNPKHVNTRAKAAMMVGIDRHRKQVLESQRYYEKKRAQGKTHNQAIRALGRHLCRVIFSMLKQGRCYELREAKIAAE

SEQ ID NO: 214365 - protein, 480 aa, unidentified
MNVKTRRTKKQVNVENQEIKLLAKEELGRKIEVIKKELRSYTWRDLETNGKFAKNDKLSFITDDMLIAGCDIGSETHYIRAIDVRGRELSSGAFEFSNTSEGFANAKAWVLALAAKNDKKQIVLGLEPTGHYWFALAAWMISNGISVVQVNPYAVKQSKEIEDNSQLKDDRKDPKLIANLVKDGNYGMPYLPEKVYADMRRLSMFRDQLTEDRIRNINRLHRELKIYFPEYMDAFGKIDGAFTLEVLKVSAIPSDITALGAEGIKNIWHNVKLRGRGYSRANEIVSYAEKSVGLTDGTDAGREAVKWYAEQILKLDEQLAVVESTLHEKCREIPCAENILEIKGVGENILAGILAEMGDISRFDDVKEIQKLSGMGLVACSSGKHKGQTKISHRGRKRLRYWLFQAAKSAVSHADEFKQLHEYYTTRTNNPLKKMQSLVVIACKILRVIYTILKTGTTYDPQKLLKDIKRPTASQAPMAA

SEQ ID NO: 214366 - protein, 365 aa, unidentified
MNAIHYIGFDVHKKTISFCVKTAAGLIVEEGTLEAERTVLRHWAAARKRAWRGAMEATLFSAWIYDTLKPYAQQLSMGHPAKMKAITAGKNKSDRIDARMIADLLRCNLLPACYVLPPRLRDLRRLLRYRNLVVQQSVRMQNKVAGLLMESGTAFDKQRLHQKKYFADLMKSLQEVPESVKDLLRMSRGSMEMFQSTQKQLLERLLSEPVLEQRVERLMSIRAVGPITALTWALEIADPHRFASIADAVSYCGLSAAFRSSAGKQQRGPISKQRNAWLQTVLIEAAKLAPRWNPQLAALHAHELERGHRNRATLQVARKLVAYLLAVDKSGQPFQVHTPTPPASTKTKKKTTRKDKKAVTLTPAA

SEQ ID NO: 214367 - protein, 430 aa, unidentified
MKSNTQNAKIEAITEKTLVLGIDVGSETHYARAFDYRGVEYSKKPFKFSNTEVGFVTFKAWVLDIKEKHGKDKVIPGMEPTGHYWFNLGKFLQDNEMKPVLVNPHHVKKSKELDDNHPTKNDRKDPKVIAGLVREGRYMIPYLPDGVYADLRTASNIRFQLQAELTRIQNRINRWFNIYFPEYKTVYGKPDAKSGILILKEAPLPEDILTLGIDGVNQIWRDAKLRAVGKTRAKTLIEAAEHSVGSKEGVVSARMEIRMLLEDYESRSIRLQEVMALIEELVNQIPMAEKLLEIKGVGIKTVSGFLAEVGDIRRFNNPKELQKLAGLALVENSSGKHKGKTTISRRGRKRLRYLLFEVAMSLVAKNPEFRELHNYYTTRRLNPLKKMQSLMAIAAKLLRVFYAILTKNVGYDPKKMVNDIRRPATYAQAA

SEQ ID NO: 214368 - protein, 428 aa, unidentified
MLKINPLSTLYVGIDVSSKSNYVCALDFYKNKYINSSFANNQPGAEELALKILECLKEHPDINTVVAALESTSVYSIHIANYLSSCEELMHFKPYVFVLNPKCTANYKKSYIGLGKSDPIDAFVIADYARAGNIESEPWRGSQFLALKRLTRHRLHLVECMTREKTYLVSNLYLKFSELQMLEGDEQPFCDIYGATSSSVLMEYLSPEEIIDSSEEDLIAFLAEKSRNRIKDISKTADLLKKAARDSYRLDKALYEPLNVSIASSFNCIETFKKEIKVIDNAIEKEIKGLNPNAFIILQSIDGIGPVFAGGIIAEIGDISAFHSSDALAKYAGLMWKSNQSGDFDGEDTPMSKAGNRYLRYYLGEAANSMRKHNVEYGAYYRKKYNEVPKHQHKRALALTSRKFVRLVYGLLARNQLYSGVSLDTSNK

SEQ ID NO: 214369 - protein, 368 aa, unidentified
MKDVTTHVGIDAHKKDLFIAMLVGTAAAPVTWTVPNEPNAIRRLVRRLEREATGRVRVCYEAGPCGYALQRQLTTTRVACQVIAPGLIPRKPGDRVKTDRRDARKLAELFRAGLLTEVHPPTPDQEAVRDLCRARDDVREDLQRARHRMGKLLLRRGLHYSGRNWTRAHRAWVDGLAWTHAAERVVVDDYLLAIDHLEARLGELDARLAELAATDPYREPVGYLRCFRGVDTLTAMLVLAELHDGRRFPSPRALMAYLGLVPGEDSSGEKHRRGRITRTGNTLVRRLLVEAAWHYQHRASIGVGLAHRRKGQPGRVIAIADKAQQRLCRRFRRLADQHKPAPKVVVAIARELSGFLWAALQPVTTAAD

SEQ ID NO: 214370 - protein, 483 aa, unidentified
MAKRKMSTFERLNSGEMNRRQRRELARKVAADDPELLIVNPNAAGIDVGNESHFVSVAPDRDPNPVREFGCWTAALRQMAEWLKSCGIDTVSMQATGVYWIALYDILEQYGIRVVVSNAQHTKNVPGRKSDVQECQWLRKLHTYGLVRDSFRLAEQMQSVRTIWRVRDRLVKDAGRAIQHMQKALTKMNIQLANVLSDINGVTGQAIIGAILKGERDPYKLADLKNYRAKASREEVARSLEGNWREDVLFELQQAVDSYHFLHQQMQECDRKLEGYMASLPTRTLNAPAQPESAPAGTPPKKKKAKKPRGNEPAWDLSAELARIYGVDLTTIDGINVMTAQTVLSEIGTDMSRFENEHHFASWLGLTPSKDKSGKTVRKGKKKVKNRVAEALRMAATTLLKSDSYLGARYRHLRRQLPTAAAAVKAMAHYLALLVYRMLTRGEAWVDRGRQHFERKRNQRELASLKSKARVHGFQLIPISQAS

SEQ ID NO: 214371 - protein, 398 aa, unidentified
MSECYVGIDVSKDASTAHGIDRGGKKLFYVEFTMDTEGFSKLLSAIRAHCIDFSMASAAMESTGCYHSNLLCYLVTEGIQCFVINPLLIANFAKLSLRKTKTDKKDSMVIAQFLLLHKDTLVKAAPSESLQDLKDLARERESLTVLMSGLKNDIKRMLQITFPELESLCNVFSESMRDIIKQYPSARLIRAANARAIKKALMPSDARRTPPFYPEDFIAAAQKSVATDSIAKELILPEKYATLEHLMKQRERITEALVEACQAMMIQDIEIITSIGGISDTTASAFLAEVGDFKVFPSYKHLIAFAGLDPSIHQSGNFEGRGKISKRGNRHLRHLSYLMTTCVVRLDNIFREYYLRRRAEGLPYKKAIIATTHKLLRVIFTMLINRTTFQVKEVIHNS

SEQ ID NO: 214372 - protein, 410 aa, unidentified
MIKENYMYVGIDLHKETHTAVIIDCYNQKLGEITFPNRPADFPKLVTKVKKCNTDGKEVVYGLENAYGYGRALAVWLIDKGYFVKDVNTAISHRQAKHRGAMYRKSDSDDAKAIALATLNMLDKLQDACPNDAYWSLGQLVHRRDNIMKQRTRLVNQLHEQLCIVYPSYKQFFNDISRPTALYFWEHYPSRKYLKGKSVEDLRAELVPVSHNKCATKTCEKILDAVASDKVKNNNFQDARDMVTLSIVSDIQHYDKQLVEVDKMLEQMYKMLGCTLTTIPGVNVITAVKILAEIGDIKRFSNANKLAQFAGIAPLHLSSSGKGKDVATKQGNRRLQATIYFLAIQMVQVSSKGTPRNSVVRAYYEKRKAEGKTSQQALICISRRLISIIYGMLKSGTEYRMPVVENAGEK

SEQ ID NO: 214373 - protein, 391 aa, unidentified
MVCVGIDVAKDKHDCVIINSEGEILADVFTISNNMAGFKQLHQAIQRCTCKTDKIKVGLEATGHYSYNILGFLLDNGLATYVLNPLHTNLYRKSLSLRKTKTDRVDARTIAAMLLSDVSLKPYTDTAYHNEDLKSLTRYRFDKVQERAKLKQSVSRLVCILFPELEKLVPTLHMASVYALLDEFPGAKQVADANLTHLKSVLYDASRGRFGRDKAIEIREAARSSIGSVMPAKSLELRHTIRLIRELDAEITEIESEIDKIMEELHSPITTIPGIGARMGAMILAEIGDFSRFDSADKILAYAGLSPSTYQSGKLTNCYSHMEKRGSRYLRFAIFNATKYVCLWDSSFSIYLAKKRAEGKHYNVAISHAAKKLVRLIYALEKSGRPYKAVA

SEQ ID NO: 214374 - protein, 310 aa, unidentified
MDIIAIGIDVSKDRLDVAVHPGDEAFVVERNGAGLERLVERLIQLSPSIVALEATGGFETVAAAAVGGAGLPVVVVNPAQVRAFAKALGQRAKTDPIDAAVIAHFAAATRPEPRPLPDEATRLLSDLVTRRRQIVEMIGAERQREKRAVSRQLKKSIARLVKALEKELVSVDTDINDNVRGCPAWRATEDLLVSVPGVGPVIARTLMAELPELGHLNRKQIAALAGLAPYTRQSGQWRGRSFIGGGRKIVRTVVFLGAMTARRHNPILKAFFERLVAAGKPKMAALIAVARKLLTILNAMLRDKTSWQNA

SEQ ID NO: 214375 - protein, 356 aa, unidentified
MNTRKVQDFVVKGKEVFVGLEDSKKTWKIAVRCDKMLIHRVSMPAKHQIVVQYLRNKFPECTIHLIYEAGFRGFNLFDRLTEEGIDCMVIPPHLVTEPKVSRVKTDKRDANRLAMIRENHDFKEPCCVPDKERREDRQISRTLWGMQKDIVRTRNRIRKFLDFNGIEVSFPERWGEEEFRALKELPLGDSLKKSLTALITLLEQLWAHKEALHAALRTLCSKERYKKAFGIAMSLPGIGWFTAIRLILELGEDLSRFTSGKKIASFVGLTCSEYSTGETERKGRITGMGSGLIRAALIENSWMAIRKDSVLLAKFTRIWKGKGSKKKAIVAVARMLIVRLRACVISGTPYAIGTVK

SEQ ID NO: 214376 - protein, 412 aa, unidentified
MNIVYERCVGIDVHKRNVVVCAITPDAQGQRQKEQRTFSTMMPDLLRMRQWFQSLNVTHVAMESTGSFWKPIFNVLEGHMEVLVVNAQHLKAVPGRKTDLKDAEWIADLLQHGLLRPSFVPPAFQRELRELTRYRTSVIEERSRTINRLQKILEDTNIKLSAVASDLMGQSAREMLAALVAGEADPTVLAQLARGKMRAKHDLLVQALQGQFKPHHRVLISEQLAHIDTLDEEIERLSAEIAQRLRPYEAQLKRLETIPGIKRRLAEVILAEIGPDMQRFPSARHLASWAAMCPGNRESAGKRLSGKTRKGSPWLRTALVEAAHAATHCKESYLSAQYHRLVLRRGGKKATIAVGHTLLVIVYHVLADEKDYQELGGNFFDEHDRQAVQKRLVHRLEKLGYEVTLVPTSPAA

SEQ ID NO: 214377 - protein, 447 aa, unidentified
MEANGKQFHVDSMDEEIVARVAAIDVAKDSGMVCTRVPHPSQPGRRTTTVWSVSARTNSIIAVADRLAEEHVERVVLEATSDYWRPFYYLLEARGLVVWVVNARDVKNVPGRPKTDKLDAIWLAKLNERGMLRASFIPPVEIRQLRDYTRLRVDLTAERSRHIQRLEKLLEDALIKLSSVATNMMGVSGRTMIEALIAGERDPRVLAELAKGRLRIKRIALIEALTGRFDEHHGELATVLLSQIDGLSAQIEHLEARIEELIADMPTAQAPPAAPDPDDAGEPAYLAAVDRLDEITGVGRHAAQVIIAEVGLNMAIFPTAAHLVSWAKISPRANQSGAKTRSGKTGKGNPYLKSVLGEAAASAGRTNTFLGARYRRLARRIGKLKALVAVARSILVIVWHLLTDPTSRYRDLGPQFFDNRIRPERRKINHIRQLEALGYTVTLTPAA

SEQ ID NO: 214378 - protein, 310 aa, unidentified
MTGGEADFVGIDVSKAHLDVACDGKRTIARHINDAQGCAALAHELRDAGLVVVEATGGYELEIVLAMQSAGVPVAVVNPRRVRDFARASGRLAKTDRIDAVVIAQFGRAMRPAQTPHIEAGLMALGDLVTRRRQVIEMVVAEENRLEHASPAIAALIKEHVAQLKDQLANIDTAIALAVRADDALSRRKAILESVPGVGEITAAVLIAELPELGAIDDKKIAALVGVAPVAHDSGTLRGQRHIAGGRGSVRCALYMATLSAVRSNPSIKTFHRRLRDNGKRPKVALVAAMRKLVILLNTLVRRDQLWKTI

SEQ ID NO: 214379 - protein, 389 aa, unidentified
MLYVGIDAASEKHDVTIINSNGDILTPNFTIENSRVGFKKLHTEIKFHTESLQVCIGMEETGIYNNNIADYFFNLGYMVFCTNAILVKNFIKSKTVRLTKTDSLDSYYISLFNLINYDSLIPYTPKVYITNELKSLSRLRFDKTNQLSKYKSEFKRLLMISFPEFVKRFDPLSKWVFTLLTKYTSKEAISRAHVNSLAKVIRSHGNRLETAASLKLLAKVSIGNSNSVNSLMLENVMSDIIHFKAQIKVIDESITEHLQDYKHILSVPGIGPVTGSLIIGEIGDVTRFKNKFSLLAFAGCDPTIYESGKFKSKRSKISKRGSKYLRSALYTSTRVACVGKNKSNKFRTKYDKKMKQGKHHNSAIFNVAKNMLFTIYSMLKTGEYYNDSE

SEQ ID NO: 214380 - protein, 349 aa, unidentified
MSQIIRIGMDTSKYIFQLHGVDASEQVVLRKRLSRKAMLEFLAKLPPTVVVIEACGAAHYLARELGKLGHTVKLIAPQLVKPYVPRNKNDGRDAEGLCEAASRPRMRYVPVKTAEQQAALMLLGIREQLVVRRTQLSNTIRGHAAEFGLIEAKGLDKLATFLAAIERNERVPALARELFAMLARQYDQVQAELKAIEAKLLVWHRADAVSRRLAQIPGVGPVTAAALVMKAPDPHAFRTGRLFAAWLGLTPKDHSTAGKTRLGKITRAGDETLRQLLVVGATSVVKQATTRGRGPSWLIELLKRKTPKLAAVALANKMARIAWKLMTTGEDYDGARLDAQSDAEVAAAA

SEQ ID NO: 214381 - protein, 354 aa, unidentified
MNYLGVDYHKSYSFATMITEEGEVRNKEKLLNRREAFREYLRGYSDVVAVVEASWAWPVAVELLEGLVRKVILAHPYKVRVIAESRIKTDSIDSEALAYLLRADLIPQAYKRNKEELKRQKVLRSRSFLVKMRTQVKNRIHALMGTQSEEVREAAGGYSDLFGKGGMEWLKGLRLEEPDGTILGELIEVYENLCVEIAKQDRVVKKMVAEDPDCRLLKSIPGIGDFFAALIKSEIGDIGRFPSASKLCSYAGLVPSTHASGGKVWHGRLTKQGSRWLRWAAVEAVKPSICSHGEMRSYYERIRYRKGPKAAKVATARRLLSIVYRVLRDKDTFKLHKMDIGKKAGSPSHVTSAA

SEQ ID NO: 214382 - protein, 411 aa, unidentified
MDCVIERAGGLDVHKKTVTACVRGPGLKGSRDQHVRTFGTTAAELLALRDWLSAHGVTHVAMESTGVYWKPIFYVLEEALICVLANAAQIAQVPGRNTGVNDCAWIAQLLEHGLIRGSFVPPAPIRELRVDLTRYRKALIQERTRGANRLHNVLEDSGIKLASVASDVLGVSGRAMLEALVAGTTDPDTLAELARGTLRKKLPALRQALVGRFRAHHASLVSQLLAHLDYLEEAIAGLSAQIDVVIAPFAEEVARLDTIHGVNQRTAEVIIAEIGADMAVFPSAGHLASWAGLCPGNNESAGKHRSGKTRKGNRWLRAALTEAALAAGTRSANGAFAARYRRVMPHRGHKKAVIAVAHAILVTAYHLLAHKTTYREPGADYYERRHADRVRHRAIQALERQGYRVTIEPAA

SEQ ID NO: 214383 - protein, 313 aa, unidentified
MAEKVFVGIDIAKETLDIHVLPSNEKWQCNNNPKDIGRLVKRLRPKAPEAIILEATGGYEAMVAALLIEAELPVSIVNPRQVRDFAKAMGQLAKTDCIDALVLARYGEAIKPRLTPLPTKEERLIKEFVSRRRQLVDLRSGEKNRLHQARTDRIRQSICAVIDALDREIQQIDDDLDSTIKQSPLWQEDVKLLKTIKGIGPVTARTLLAHLPELGKVSRQEIASLVGVAPLNRDSGKKRGKRSCIGGRKAIRSVLYMAAKTAARHNKTIKPFYQRLEKEGKLYKVAIVACMRKLLVIANAVLRDRQPYREVLA

SEQ ID NO: 214384 - protein, 257 aa, unidentified
MKEPERFVGIDISKEELVVAVRPTAELQSFPNTEEGLAALVGFLQPLQAHSIVLEATGGFARAAVNAMALTALPVVVVNPRQIQDFARSVGLLAKTDAIDARIIARFAEAVRPERRPLKDLETQKLEDLNNRRRQIVEMITAEKNRLGMAPTWSQRDIRSHIAWLEKRLKRINDNIDDLIKQSPIWRQKEKILTNVLGVGSVVTTTLLCGLPELGTLSARKLSALVGVAPFNRDSGKSRGRRSCWGGRAHVLSTSMQ

SEQ ID NO: 214385 - protein, 430 aa, unidentified
MGLIVPTTIHPEREDQPLPYEWFVGIDWGSQQHQVYVLDRDRRRVGERVVDHDGASLARLADWLWTLSAGQPQRVAVAIEVPRGAIVDGLLERGFHLFALHPKQLDRFRDRHSVAGAKDDRRDAFVLADSVRTDQPSFRRLQLDAPQLLLLRELSRAEETLLEEFRRSANRLRDQLHRLYPQMLQLCSAADAPWLWDLLDLAPTPAHAALLSAEQVQRVLKAHRLRRITAPEVLACLQAPALPVAPGAAEAAQAHCGFLLPCLRVLAEQLRACGQQVDAMLRPMADEPGAGERPSDVAIVLSLPGVGRKMTAWLFAEAAQPLAERDYQVLRTHSGIAPVTKQSGKRRLVVMRRGCNPRLRHALYHMARVAMQRDAHFSSVYTALRAKGQRHGQALRTISDRLLRILVAMLRNGTCYDASRIRRESVVQMG

SEQ ID NO: 214386 - protein, 415 aa, unidentified
MTDLLTKKEHKVERFIGLDVHKYYLIALGVDEQLQVILPAQRVELSRLDTWIQKTLTPQDAVALEMTTNTWQLYDELSEYAGSVTVVHPPHVALITRSQVMNDKIAASILARLLAKGLLVGIWVPPQEVRELRGLVSQRSKMTRLSTQAKNRLHATLQRHHLAPPEGNPFRPDQGTWWQALPLGKLEKVNLQSDLDTVCFAEAQLARLTSLMNEVAAKDERMTRLIHLPGFGVVTAVTVWAAIGDSHRFADPQHLVGYAGLGARVHDSGLTTRTGRITKAGRRDLRLALVEAAQVAANTHPHWKAELARLEPRLGRNKAIVAIARKLLVTVWYVLAKNATDRFADPGIVARKFMEFAYLIRKHNRPAGQTAAQYVRQQLDTLQLGADLSAIPRGSKKKPIRLPLSNQVSDVPNTK

SEQ ID NO: 214387 - protein, 338 aa, unidentified
MKTFVGVDYHKAYSFGTIMNQSGQILKQGRFGNHPEAVARFLGEYAGPDCAAVLEATRNWCVMHDWLEELTGQVALAHPLKVKAIAEAKIKTDKIDATTLAHLLRCDLIPAAYVCSPAARVLKNLLRHRMFLVRLQTMAKNRIHVLLDRHPAVRAQRRAEELFTQVGIAWLKQVELPTYDRHILDSEVALLEHLRVQIKQADAWLRQVGRKDPRVKLLESIPGIGRAFALLIVSEIDDIRRFASPKKLHAYAGLVPSTHASGGYTFHGRITKGGNKYLRWAAVEAVWPAIQKDVGLRDFYENLRRRKGANPAKVATARRLLTIVYRVLTEKREYRHVA

SEQ ID NO: 214388 - protein, 352 aa, unidentified
MARTTKFHSVTTTIGIDMGKNTLHMVGLDANGAIVLREKVSRGRIGSRLTNLPPCLIGIEAGMATHYVARELAALGHNVKQVPPAYARPFRQGHKNDFRDAHAVAEAVQRPTTRFVPAKTNEQLELQALHRVRSRLVSERTAVINQIRGFLLEHGIIVRQGQRFLRHLLPDILAKRTDVLSPRMVRIISDLVGDWRQLDERIETMTDEIETLAKSDDSCRRVMTVPGIGPLISSAMVAAIGNGTAFAKGRDYSAWLGLVPRQMSTGDRTILGRITKHGNGYLRMLFMQAARVILLRPTNWSKHGFGAWLVRAAQRLHPNVLAAALANKLARIAWTVLAQERSYEARVTKAAA

SEQ ID NO: 214389 - protein, 310 aa, unidentified
MEACFVGIDVAKDRLDVHVRPTEEAFAVARDGEGLAALVERLAGLQPSLVVLEATGGFETTVAAAIAAAGLPLAVVNPRQIRDFARALGHLAKTDALDAQVIARFGELVRPQARPVASAEAQALGELVARRRQLIEMIGAETNRRRQLTQPRLIRGLDRHLRTLQKALSELEQDIDDQIRGSPVWREKEELLTSSPGIGSTTARTLIAELPELGSLTRRKIAALVGVAPINRDSGTMRGKRRIAGGRSAVRSALYMAALSAVRCHPPIKALYRRLRAAGKPAKLALVAAAHKLLIILNAMIRDGTPWRHA

SEQ ID NO: 214390 - protein, 333 aa, unidentified
MAKRVFQLHGATMTGHVTFRKKLTREQFRRFMAEHPSCMVVFEACGSASYWAREMAKLGHDARLIAPQYVKPFVKRQKNDAADAEAIVIAARQPEMRFVSPKTEDQQARAMLFRGRERLVHQRTELVNALRAVLYEYGHVFPAGIGHLKRIEALVEDPACDLPVLVVAECRDLLAQIAEKTDRIDAKRKALKELAAGTDTARRLQTMPGVGPLTALAVEAFAPDMAQFRCGRDFAAWLGLVPRQHSSGGKERLGRISKAGQTDIRRLLIIGAMTRIMGRARHKIPPDSWLGRMLARKPKMLVAIALANKMARQIWAILTKNEDYRDPVLATAA

SEQ ID NO: 214391 - protein, 303 aa, unidentified
MQQSSTLYVGLDVHKESIAVAYVAQEYGAEVVSLGTIGTRQCDIDKLIRQLQSKSKQLVFVYEAGPCGYWLYRYLTKKGYTCWVVAPSLIPKKTGDRVKTDRRDAMQLARLMRSGDLTPVYVPAVDDEAIRDLSRAREDTLRDLKAAKLRLKAFLLRHDIRYTGRANWSPAHLRWLSEVVCPTPAQQIVFQEYVQTVTEQTERRGRLELELHEQVKTWRLAPVVEALQALRGVQFTVAVTTVAELGDLTRFDTPRELMKFLGLIPSEYSSGERRRQGAITKAGNSHARRALLKVPGRIGTQRK

SEQ ID NO: 214392 - protein, 343 aa, unidentified
MDHFAGLDVSVKETSVCIVDGTGKIVREVRVASEPNALLAVLKNPAYHFKRIGLEAGPLSQWLCSALAEAELPVVCVETRHMQAVLKAQINKTDRNDARGIAQMMRVGLYRPVHVKTLRSQKLRMLLTHRKLLQSKAIAIENDLRGTLRNFGLKVGMVGTVKFEGRIKELVENLPDLAILVEPLLIVRRALREQLVILHRRLLAIVRDDAVCRRLMTTPGVGPVVALTYRATVDVPARFRKSKSVGAVFGLTCAKYQSGQIDRSGRISRCGDEMMRVMLYEAAQSMLRSKKWSWLKAWAMQIARRRGVKKAIVALARRLAVIMHRIWVDGTEFRWTREAVTAA

SEQ ID NO: 214393 - protein, 353 aa, unidentified
MSHSSEVTVLFPSMTIGLDLGDRQSSVCVVDAAGVVIEERSVATTPEGLQRLFGTRATARIVLEVGTHSPWVSRQLTAYGHDVYVANPSAMYGARRRTKRNDRMDAAYLARLGRVDVQLLHAIRHRGEQTQAHLAQLRARDQLVKTRTQLINHVRGSVKSVGLRLPTTSAEAFAKRAAAHLPLALADALTPLLTMITTLTAQIRAFDTQLEQLALAEYPETQRLRQIAGVGALTALAYVLLVEDPTRFATSRQAAAYFGLVPKLDESSQSTPQLRITKRGDPLGRRYLVNAAQYILGPFGPPCDLRRFGEALMVRGGPNAKKRAVIAVARKLAVLLHALWRTGTDYHPERRAA

SEQ ID NO: 214394 - protein, 357 aa, unidentified
MVQVKKLDFSGTTIFCGIDVHKKSWRVNIQDGEFELEDFTQNADAVLLHKHLNRKYPGARFKVCYEAGFCGFSAQRYLSNNGIECWVINAADVATTDKEKRQKNDKIDARKLCEHLQTKKAKSVYIPQTSWEHDRSLVRARSRIVGNQTRSKNRIWQLLHFSGLTLPKNYEAGQYWSKNFIKALQALDCGSDALKTTLELYIKDYQQTRNLLLDATRAIRKLCAESPYKKLILLLTSIPSIGEINAAIMLFELQDVKRFKHLDHLCSYAGLIPDTSDSGDTKVTKGITSRTNHFLRAALIESSWAAIRKDPALLMKYKAYCKKMDKNKAVIRIAKHLLARINYVLKNEKEYVTGVVA

SEQ ID NO: 214395 - protein, 352 aa, unidentified
MAYNQSDYDIFIGIDVDRKSFAFTVKDQNQMNRSHKIPAQAENLYQHIRNTYNNKRVICAYEVGGTGYHLRDYLTTRDIPCLMVSPPSMPKASADRVKNNRLDSEKLAQHLKSGVLPSIRVPEETYRELRHLTHTREDYVTQGRIAKQRIKALLLFTNLYQTIRDPLQNWSSRYIKELAQLECSTATRQRLDLLLEDLIYARKQNLRNLKNLRTYCQNQPAIKSNLGYLQSIPGIGFITAVTLLANIGDPGNLNNARELGGFIGLVPREHSTGERVTKGSITHLGNRTLRSLLVEAAWVAIRRDTLLNQFYQRVRAKHHPSFGARKAIVAVARKLTMIVYSVLKEQRDYIPR

SEQ ID NO: 214396 - protein, 420 aa, unidentified
MRAVALDVHRDFCEVAIVAEGRLRSAGRIATRPDALELFAQSLDSRDLVALEVTGNAWAIARILEPHVARVIVVSPSDTGIRQARAKTDRLDARALARLLWAGQLDGVWSPDERIRAMRRRLARRSQLVRARSRAKNEIHAVLMRCLKDRPPASDLFGVKGRAWLAEQQLALTERETVDSAVRQVEFLDSEIAQVEQLIAVEALSWPEVKRLMTVPGVNVIVAATFMAAVGDIRRFGDRRKLTGYLGLDPRVRQSGAGPANHGHISKQGSSSARHALVEACWSTVRQPGPIAGFYQRIRARRGHSIAIVASARKLACLFWCLLTRGEDYAFAQPSLTTKKMRRLELQAGAPRRQGGQGVWATNDAMRHAERELALQAQRAYERTVKDWQQAGASATPGRASSGSSKEQVARQTPRPKSAL

SEQ ID NO: 214397 - protein, 384 aa, unidentified
MKNDSILFIGMDTHKEFTEVAYSRDGRNNDVIHLGRIPSTKQGLLKLARQFQSKYPHATLHFLYEAGPCGYWMYRLLSQQGHCCYLVAPSLIPKKPGKRVKTDKRDAMDLCRLLKNGDISPIYVPEPEDEAIRDLSRARETAMRDLNDARYQLKALLLRNNIRYDGKANWSLKHLRWLTEMILPHRCQQIVLQEMIQTITERSSRLERLDNELTHQIKLWRYYPVVKAIQALRGVRLLVATGVIAELGDLSRFDTPRKLMSYVGLTPTEHSSGDKRRLGSITKCGNGRARRLLIEGAHSYRYAANVSTSLQVRQEGLPKEIVDTAWKAQLRLCTRYQRLMKRGKHRNVVATAIAREMIAYIWAISREVVLPKVDLKLSKVRIPA

SEQ ID NO: 214398 - protein, 354 aa, unidentified
MIIIGCDFHTRTQVIAMLDTETGVVVEKRLEHAGGEAKAFYEGLKEPALVGIETTGYTRWFAEMLQELGHELVVGDAAKIRAKETRKQKHDRRDAEHILNLLVRGDFPKIWLPPAQERDVRVLIEHRHQLVELRTRARNGLQAIALSSGLRRRGRLWSQAGQGELQKLPLREGMGRRREDLLRLVRQLSTWIEELDQRIDEEVTRREDAQRLMTHPGVGPQTALATVLVLGPPERFPDRQHVTSYLGLIPQEESSGRRQRFGHLTKQGNRLMRFLLVEAAQTASRYDPRLHRVYRRLVFRKGAPIAKVAVARKLAIRLYIMLRDGIDYEEFCRRGPDRSGPGSHAGMLGDVALV

SEQ ID NO: 214399 - protein, 338 aa, unidentified
MAAYAGIDLHSNNIFLGVIDQDLTRLFNKRLPNKLDIIEKALRPYKKALAGVAVESTFNWYWLVDGLQDAGYKMHLANPAAIKQYEGIKHRDDQSDALWLAQMLRLGILPEGYIYPKDQRPTRDLLRRRLLYVQQRTAHILSLKSMVTRNNADTISTRAIKKLKPEEAHTLFDQEHLCLACSHAIATIQFLSAQIKSIEKEVMKHVKLKPEFTSLLTMPGIGNILGLTIMLEVGDIHRFPRAGNYASYCRCVKSERLSNEKKKGSGNRKNGNKYLAWAYVEAAHFAIRFHPKARRFYDRKASRTNTTVARKALANKMARASYYIMRDQEAYDESKMFP

SEQ ID NO: 214400 - protein, 362 aa, unidentified
MKQSTTLIAFDQHAATTVAAVLLPGQRTPALHSLTSDSAAIVRFVERLRRGHVVQCCYEAGPCGFELHRALTARDIPCDVIAPALIPRRAGDRIKTDRRDAGQLAVLYRAGALTAIHIPTEQEEAARDLLRCREDIRADLLRARHRLAKFLLRHGRRFTDTKKAWSKRHDAWLRTQRWPLSALDQTHTAYLRTVDEAVARLRTVDEDLRGLLMLEPLRPRVERLRCFRGIDDLTALTIAAELGDPRRFAAARRAMAFVGLVPSEHSSGTKRARGAITKTGNAHLRRVLVEAAWHYRHRPFVGAALRRRQRGAPPAIVAQAWTAQQRLHRRYHRLAGRGKVKQQVNTAIARELTGFVWAALIQ

SEQ ID NO: 214401 - protein, 348 aa, unidentified
MAHFVGLDVSVKETSVCIVDDAGKVILEQKVLTEPDTIIALLTSLGATYGRIGIEAGPLSQWLVNALTAAELPVICVETRHMKALLTAQQINKTDRNDARGIAQMMRVGLFKPVHVKTLIAQEQRMLLTSRKLLQRKLLDIESDLRGTLRNFGLKVGVVGSSRYEARVRELVAGFPRLTAIAEPLLSVRRVMRQQLAVLHKMLLDTVRDDPVCRRLMTAPGVGAVVALTYRATVDQPQRFVHSRAVGAHVGLTPKRYQSGEIDYDGGVSKCGDALLRTMLYEAAHSLLIQSRKWSWLRAWGIRVAQRRGVRRAIVAVARRLAVVLHRMWVDGSEFRWSKDSAAVPAVA

SEQ ID NO: 214402 - protein, 346 aa, unidentified
MMIIGCDFHPSWQQVSWVDSETGDCGERKLVHVTGDAQQFYQQLVAPVLIGMEATGNSQWFIELVEDLGHAIWIGDAAQIRASYVRKQKTDKRDAAHILKLMMENRFPRLWTPDREQRDLRQLVLHRHKLVILRARVKNELQHLSLNKGVQRKHRLWSQAGQKMLRELPLKPWAACRREDLLGLLSMLNQQIGKLDDAVQTAAEENPQAKLLMTQPGVGPNTALAYVLTIGEVSRFQRGKQVASYLGLIPREESSGGRQKLGSITKQGNRMLRSLLVEAAQVAVQHDPGLRQQYLHRCHQKPKGVAKVATARKLAVRLYWMLRTNVAYPEIVRIESSSGLPLVGAS

SEQ ID NO: 214403 - protein, 523 aa, unidentified
MPVTRSRKRSSSRRPEVLQKPRGVIHPRVQKVGPEHFGIVSVDCAKARSKWMLCDFYGNVLVPPTVVEHNRPALTAATTQLRQAMAEHDLRDVIVAIERTGRYHHATQRAFAAAGFEVRIVHPFATKQFRQASDPGTKTDDTDLVAIQRAASSGFALIELPRDDHWKELLLLIRYRRDLVFKSSALCAQIREHLEAALPGYATCFYNLWIRACAFPLVRAFGSAEALLQAGLRGLSEVLRQQHVRFQERTLQRVLAWAEQAAPSDQAAALHLRVALRLEDDRQQKSLEILGLERDIASRLVRTPYVLLLSFPGINVVSAADFAGEMGPIGNYANSRCITGRAGLRPARYQSDQVDRPNGPLVRCANRKLRAAILGIADNLVCCNRHFNVLALRWRAQGKDPRHTRVKIALRFCRIAYQMVAGGQVFRHPCLQHRSYILDKLNAFHREHDTAMPQALTDLQTAIEQLPRSAYAEEARPLAQELQRIEQGRRRGPQLLGDILPIVLARLGVGALQSRESGEHDLT

SEQ ID NO: 214404 - protein, 361 aa, unidentified
MENEPEGLTRAVIGGVDTHKDAHVAAVIDGVGRLLGTHTFPTTAAGYRALLRWMCTLGTPVRIGVEGTSSYGAGLTRALRTAGMAVVEVNRPNRQLRRQRGKSDAVDAEAAARAALAQHAPRIPKAQDGTVEILRLLRLQRRSALHARTQAGNQLHAVVASAPESIRFHFRAQSLVRLVATLHRQRPRKSDPPLEAMTRAVLHGLARRWHQLDEEIKTLTMQLAPLVRECAPALLGRPGVGPEVAAALLVAAGDNPERLRNERSFAALCGVSPVDASSGRQRRHRLNRGGNRDANRALWVIAFVRWRMDPATQAYAARRMAEGRTKLEVLRCLKRYIAREIFALLQPMRHAWAEERLDHAA

SEQ ID NO: 214405 - protein, 432 aa, unidentified
MERIRENAAGIDIGARKVFVSVEGKEVKCFFTFTEDFEKLRDYLLETAIETVAMEATGVYWNILYEILEEAGLDVWLVDGGQTKQVPGRKTDVKDCQWIQQLHSYGLLNRCFVADSDIKELRIYQRLREDHIRSASMHINHMQKALTEMNIRLTEVLNQIHGASGLAIIEAILKGERDKEKLLKLCHIKIIKNKKDEVLKSLNGRYTKSGLFALKQAFDSYYFYQNQIKQCDAMLEEVLKRISKGKPNQTISARRKPIRHNKPDIDNLGTVMLKIFDGKDATALSGITDYTWMQLLSETGTDLSRWESEKHYTSWLGLAPGQHTSGKMKKNKRKLGRPKAGQIFRQIAQSLLTSKRIALGAFGRRLSSRKGSPVAIKAVARKLAALYWRIMVKGMDFVEKGIQKYEDQLMVQKQRSIIRLAKELNMQITYNV

SEQ ID NO: 214406 - protein, 392 aa, unidentified
MNESTQLKDCVAWVGIDWADQKHDVALQVAGTQVVERSTLEHTPEAIAAWVASLRQRFGSGGIAICLEQARGALVYALRMHENLLLYPLNPQSLAKFRKALYPSGAKDDPMDADLLLKLLRHFGEQLRPWRPDDVATRKLGLLVEARRSFVDRRTSMINELTATLKSYLPQAFVWAGEDLTGPMATDFLTKWNRLDVIQKLEPAQLRAFYYGHNSRSEELMKQRLALIKTAVPLTQDEAIVGALSLQVQQLALGLATLRQIITRYDDEIAQVFEAHPDAFIFRSVDGAGAVLAPRLLVSFGSDRERFADAEALPRYSGTAPVTERSGKQKWVHRRWARPKFVHQSWVEFADQSRRFSGWAACCYEHLKHKGMGHWAAIRVLAIKWQRILWRC

SEQ ID NO: 214407 - protein, 423 aa, unidentified
MDVLYERVAGLDVHKDTVVACVRIMVDGKTARECRTFATTTEQLVALRAWLEECRCTHVAMEATGVYWMPVFRLLDADKFALIVANAAHIKNVPGRKTDMNDAMWIADLLACGLIQASFVPNEEVQELRALTRTRKQLVREQTRHVQRIEKTLAEANIKLSSVISDIMGASGRRMIQAMIDGVRQPNKLAELAGKQIKASPKELYDALHGRLTDHHRFLLALHLKQWDSIDETIRKLDGELDQRIGRMATAAEDRKIPFRALIELLTTVPGVSAVAAPAILSEIGPDMSRFPTAGHLVAWAGLCPGHNESAGKRKSSRLRKGAPWLKTMLVQCAWAAKRTKDSYYRAQFFRLQAKRGPQKAICAVAASILTAIYHILKHGTEHHDLGSAHFDRRPVEVKASRLVAHLKKLGFNVQLQPIAEAA

SEQ ID NO: 214408 - protein, 323 aa, unidentified
MSQPNLQCMGIDVAKLSLDIATTDTIEPFTVGNDEDGFAVITDKLKHTKINLILMEATGGLEAAIACKLQSEGYDVVVINPRQARDFARSMGYLAKTDKLDAAMLAQLALVIDRHPDRSRYIRHLPDEARAVLAAMVVRRRQLNHMLVAERNRLYPSHPQSRKSIDNIIDALQNELDRINEQMKQHMTAFIQEQARLIGSVKGVGDITVASLIAELPEQGKLNRREISALTGVAPLNRDSGKMRGKRTTFGGRAGVRATLNMAALVATQFNPAIKLFYQRLLAAGKPKKLALVACMRKLITILNTMLRKGEEWNASFQSQVIS

SEQ ID NO: 214409 - protein, 429 aa, unidentified
MMAVMIGVDPHKASHTAVAINATEEPLAELRVRASESQAERLLAWAQAWPERTWAVEGAGGVGHLLAQQLLAAGERVLDVPPKLAARVRLLQAGDTNKNDPNDAFSVAVAALRSPGVREASRDDHATVLKIWSKRYKDLGRTRTQVACRLHQVLCELIPGGVARQITAGQAAHILESITPADAVEAARCELAAEFTQDLRGIDAAIRDTRKKLITAVRAAGTSLTGLFGVGPVIAAAVIGDGRAVSRFPGRDHFAAYNGTAPIEVSSGGRKTCRLSRRGNRRLNHAIHMAAVTQIRYRHSPGRAYYDKKLAEGKTPKEALRALKRQISDAIFACLQADARRAAAKSPGGQRGNGSASSAAGSHPQHRLFGKATPGPATHPTTPAGAGTPAPFPAQLPSRASGRPGPGPGAARPRSGARRASSTRPPASR

SEQ ID NO: 214410 - protein, 405 aa, unidentified
MGCVRLMVRRTPTRECRTFATTTEGLLALLAWLTASRCTQVAMEATGVYWTPVWKILSAGDFTLIVANAAHIKQVPGRKTDINDAMWIADLLACGLIKASFVPEEDIQELRALMRTRKQLVREQTRHVQRLQKTLEEANINPGLNPGDIMGVSGRRMIEAMIAGERDPHRLAALAARGIKASPKALYDALYGRLREHHRFLLKLHLQQWDALDAAIRQIDRQVAGQIARMDEEAADETSPFRELILRLSAIPGVSRLSATAILAEIGRDMSRFPTAGHLVAWAGLCPGQNESAGKRKSARLRKGAPWLKTMLVQCAWAAKRAKDSYYMAQFHRLRSRRGPQKAICAVAASILTAIYHMLKSGTPHRDLGADYFDRRSPEAKAKRLVTQLTKLGFDVKLQPLAVAA

SEQ ID NO: 214411 - protein, 346 aa, unidentified
MSKDLYIGVDVSKSWLDLAYYDGVAVDWKYGHIRVDNKESGYNQISKWLRKLGVNRERVLFCMEHTGLYCQNFRLWLERKGYVYGMVQPRKMHRFEPDLGENERALDRIKTDEMDSFRIAIYCEEHCRKIKASPSKLPGEAYFKLKRLMAERKQYTRQTVIYKQHLHDISVYDTEGSRERKKVGLNLLTEQIRQTDREIQRIIESDSVLKRNYELLCSIKGVGLVVAVETIILTENFTSITNPRKYACYIGIAPAKKESGVSVRGGEHISRKGFTQAKADLSQICLVAIRYDPGIRTYWERKKAEGKHSGVVLNAVKFKLILRMFAVIKRQKPYIEMQAYTNKRRT

SEQ ID NO: 214412 - protein, 378 aa, unidentified
MSQSTTTAASVYAGLDVHKDSIDIALAEAGRDGEVRHLGAVAGGVNAVSKALRRLVSQGHCVHVVYEAGPCGFVLQRHLATLGYHCEVVAPSSIPKRSGDRVKTDRRDALMLARLARAGELSAVRVPDAVDEALRDLVRAREDAVREQRNARHRLKALLLRSGVVYAGKSAWTAAHLRWLASLALPHAAQQIAFQEYLHAVSESGARIARLEQSLRDALAGWSLAPVVAALQALRGVQLIAAVTLVAEIQDFHRFDNPRRLMAYLGLVPSEDSSGQRRHQGSITKAGNSAARRMLVEVAHQYRYPARVSAGIAKRQSDLPKAVTDIAWTAQLRLCARFKRLGARHVPHNKIVVAIARELSGFVWAIACEVTPPPAAST

SEQ ID NO: 214413 - protein, 311 aa, unidentified
MNQEKYIGMDVHQATISVAVMDSSGKLIMECILETKAATILEFIAGLRGTLSVTFEEGTSAACLHDLLKPHVSHLVVCDPRRNALLKDGSKSDRIDARKLAELLHANKLHAVYHGEHGVRTLKELGRSYLTITKDLTRVMSRIKALYRSWAIPCSGATVYAPRHRAEWLAKIPHPGVRLRAERLYQQLDVLQPVRQEARRELLVESQKHDAVKLLRQIPSIGPIRSALLVALLQTPHRFRTKRQLWAYSGFAVEIHDSGEYRFVRGKLQRNRERITVRGLNHNHNHDLKNLFKGAAQSASSVAPKKVLPEP

SEQ ID NO: 214414 - protein, 392 aa, unidentified
MAVSGLPFILDRGCGLDVHKDTLVATIKGSDFDTETKTFLTFTDDLYNLVEWLQAHSITQVAMESTGVYWRPVYAVLEDYFHILLVNARHIKNVPGQKTDKKDSEWITKLLLSGLLKGSFIPPQHIRELRELFRHRRKLIAMRTAEKNRLQNILESANIKLRSVVSDVFGVSAMEMVRAMANGQVDPLLLASMAKGSLVKKHAELLKALTGKITDHHRFMLNLILQSIDHINLQIAQSEAQMEQYARIMHQELKLLESIPGVSSRVALGIVSEIGTDMDQFATHQNLSSWAGVCPGNNESAGKKYSSKIIRGNKYLKTTLVEAAWVAARSKVNPLLAVKHHQIAARRGQKKATIAIAHKILIAAYHVLRDNEPYQLHPQDKKILENRRLKKN

SEQ ID NO: 214415 - protein, 347 aa, unidentified
MRFYTRQHKHYCGIDLHARMMYLCVMDAAGAVLLSRNIESSPTTFLAAVGRFRDDLVVAVECMFTWYWLADLCEREGIAFVLGHALYMRAIHGGKAKNDRIDAHKIAALLRGGMIPQAYVYPPQMRATRDLLRRRNHLTRKRSELIAHIQNTLSQYNLPPLDHRIDKRCDRVGLLSHFPDPQVQNSIALDVALIDQYDELLPKLERHIRACAKQHDRKSFVLLRSIHGADLILPLVLLYEIQDIERFPRVQEFLSYCRLVKPARESAGKLQGHAGGKIGNAHLKWAFGELATTFLRANPPAQRLHERLKARHGKGKALSVLAAKLARAVYFMLKRAQVFDDTKFYQD

SEQ ID NO: 214416 - protein, 370 aa, unidentified
MRVSVGVDLHKSQFTVYYRYEGTDEGIIKKYSTQRYGYKEFLGTLRGYKGKGVKVKVAVESTGNARYFKNAVEREGIKVTVINTLKFKVVNESVKKTDKRDAKTIAEFLEKDMLPESKLCSEKSEAVRRVLKSRKSLVRTIVSIKNQVHGLLLGYGIESRKEDLQSVKKRRQILTVLAEHGYADATVKPLLEIIDRLSEEVKKLEEVLIELVKGDRAVEVVMSIPGAGIITASTVSAYVDDINRFRSYKEFSSYAGLAPWVQTSNTTEHYGKITKRGPEPLRTALVQIVLGMVRSRRTNEYRLMKRYKNMKSHKGSGKTIVATARKLSKIIWYMLKNDTLFDPFKMTDPKIQRIIDEMRKETMELENIPA

SEQ ID NO: 214417 - protein, 408 aa, unidentified
MANEAIKVIAGIDTHADTHHVAVINEHGKPLVDREFLAVGSGYRKIMDFIISYCTVTAVGVEGTGSYGAELARTHRAAGLPVLEVNRPNRAARRLKGKSDPLDAYEAAKSVLDGRTTSVPKAKDGPVECLRILRTGRASALKARTAAINQIKGLLVSAPDKLRAKYRAMTTSALIPALQRTRPSGHTADQEYVTLLTLKALATRCQSLAAEIAAADAALQEILDAYAPLLCDLPGVGTDVASQLLVTVGDNPDRLGNEAQFASLVGVAPVPASSGKTTRHRLSRGGDRNANHALYQVVLVRMASCQRTKNYMAKRTAEGKSKREIMRCLKRYAAREIYRQITNPQPAPDNSDLRRVRTTLGCTITTAARELGQWPSRISLLERGLLRNDILATSYRQWLTEQASAIPI

SEQ ID NO: 214418 - protein, 259 aa, unidentified
MMIIGCDFHPSFQQIAYVDQETGEYGERRLNHREEAVGFYRSLAGRKVVVGLEATGNDRWFRKLVVESGHELLVGDASAIHAAAPREQRTDKRDARHILRLLVENRFPAVWQASVANEEQRQLLMHRCRLVRMRTRIKNQLDSIAKSEGLTGSRSWSGQRRGQIEALPLAGWYSQRRADLLQLLDGLELRIKPLDRAVEVAASQDAEARLLMTHPGVGPVVSLAYVLVVGDWRRFPRGKQVGSYLGLIPSEASSGKRQQ

SEQ ID NO: 214419 - protein, 322 aa, unidentified
MSVSVLGIDIAKQKFDAALLIDGKTKHKSCKNSAEGFETLMLWLEKQGIKKVHACLEATGNYGEDLAIYLHEAGHIVSIVNPARIKGFAQSELIRTKTDKIDAALIARFCLVMKPDPWIPPSPEIRFLRALVRRVDSLIDMRSQEKNRLSTAHESVISLIKEHIAYLDQEIEKIRRQIADLIGQNPHLKRRKELLDSIPGIGKATIPHILAELDDLEKFSHVRQMVAFIGLAPKETLSGSSIKGKPRLCKIGHARLRKALYMPALVSIQCNPVMIAFYNRLKEKGKNGKVIVCAIMRKLVHVIFGVLKSGKKYDPNYKPASA

SEQ ID NO: 214420 - protein, 310 aa, unidentified
MERVFVGIDVAKEQLDVHVRPSGEIFTVANTDAGIRELVARFKSVPEALIVMEATGGYEMPTVGTLASAGYAVVAVNPRQIRDFARAAGRLAKTDAIDAAVIARFAEVMQPPVRPLDDEHTQALSELVARRRQLLDMLAAERNRQSQARGRRGQRDLAAHVRWLSRALAEVDRDLNTTIRSSPVWRERENLLTSVPGVGDVTAHTLIADVPELGLLTRRQIAALIGLAPINHDSGTLRGRRMIGGGRANVRHVMFMAALVASRYNPVIAAFYGRLVAAGRPKKVALIAAARKLLTILNAMLRDGRAWQPA

SEQ ID NO: 214421 - protein, 360 aa, unidentified
MQQHSTTHSVQITGQQTGVTIGVDLSDRYSSFCILDADGTVAEEGRVRTTTPALQRRFGTLAPCRVVLEVGTHSPWMSRLLAGLGHEVVIANPRAVRLIAESDRKRDRTDAERLARLGRADPSLLAPIRHRGQQAQEDLALVRSRQSLVRARTALINHVRGAVKAHGERLPACSAPAFHRKGAAQLPAGLRPALLPQLELIAQLSSQIAAFDRQVEALSAERYPETALLRQVAGVGPLTALTFVLTLEDPARFRRSREVGPYLGLTPRQRQSGARSPQLPISKAGDRYLRQLLVGCAHYILGPFGPDCDLRRWGLRYAPPGARNAKHRAVVAVARKLAVLLHHLWVTGEAYQPVRQAQAA

SEQ ID NO: 214422 - protein, 368 aa, unidentified
MTSIHDPEAIHLGLDVHKDTISVGVLEPGCQIPVVDKIFHDEASVRRLIDRLGDRSRLRVCYEAGPTGYELARLLASMGVSCEVIAPSLIPTAPGDRVKTDKRDCRRLARLHRAGELVAIRIPTVAEEAVRDLCRARADLVDDRDRARKRLLALLLRHARVYRGGSYWTHKHDQWLAAQRFDEPALDATFGHYRAVLAARDAAVAAAEADLKVWFDRDPFVDCVARLGAYRGIAHLGALTLVAEVCDWRRFPRATTFMGFTGLVPSEYSSGGSTRRGHLTKTGNAHVRTQLVESAWAYQHRPAVGAALRRRQDGVSPETVARAWKAQTRLCGRFRRMAAVKDTKSVVAAAIARELAGFVWAEMTSDVN

SEQ ID NO: 214423 - protein, 391 aa, unidentified
MIYVGIDAAKDKHDCCILGGNGQTVQEAFTFRNNHEGFEQLRTAIQRRSEAEGSGQIKAGLESTGHYSGNLEAFLRDSGVELVVFNPLQVNLYRKSQTLRKTKTDKVDAKCIAQLLITAESNPVSVSYQILELKALTRHRSRLVSQRTKLKISISRLVVILFPELPTVCHSVTQAAMKALLLELPGARQIAACRIDRLTNLLRAASKGRYGRAKAEEIKSLAQQSIGANSPAAALELQLTLQHLDFLQKQINKLDKAIRAAVVQTQSPILTIPGIGPTLAGIILAEIGDIHRFSSPDKLQAFAGLDPSTYQSGKFKADRTPMVKHGSTYLRWALMQAARLAAVHCETFGRYLATKQAQGKHYFVALGHTAKKLIRVIFHILNTNEVFVPQT

SEQ ID NO: 214424 - protein, 412 aa, unidentified
MEVVEDRCAFLDVHRDTVMACARTPDPAGGRREEVAQFGTTVSQLVKLTDWLVERDVGLVGMEATGIYWKPVHWVLEDEIDRVWVINARHMRNVPGRKTDVNDAIWGASLLEHGLVRPSFIPERPVREMRDLTRYRKSVIEERGREAQRLHKVLEDAGIKLASFTSKVLTKSGREMIEALIAGQRDPEILAEMAKGRMRAKIPELQDALAGRFNEHHARLCRTMLDRIDHADEIIDGLTEQIEHLLDPHEAAVHLLCGITGVSTRTAQVMLAEIGTDMSRFPTAGHLASWAGMCPGNNESAGKHRTGRTRHGSKWLRIALVEAGQAAGRSKNTYLSAQYHRIRGRRGPRKAAVAVGHSILVIAWHLLSTGETYTDLGGDYFDRRRNDASRQRRLVAQLEAMGLDVTITPVAA

SEQ ID NO: 214425 - protein, 386 aa, unidentified
MTQAPGARPTPAVHERTLILAIELSNTSWVLAAEIPGLPGVKAKRSIEPTPEALMAAIASYRARAETAGRNVDRVVTVYEAGWSGFWLVRWLAKYGIETHVIQPSSVPVDRRARRAKSDGIDAELLLRTLLAWLRGEPRVCSMVPMPTEADEDARRRVRERAELVTERFGLVNRISAILATLGAGEYNPLRRNRRQRLDELRTALGDSLPTHAHAKIARMLDRLELLLIQITELEQSRDAVLEDKTPDRAASMIQQLAKLRGVGVQTATVLVREGFVREFANGKALGSYAGLTATPYSSGGIEREQGIGKAGNARLRTVMVELAWLWQRYQPDSAQVSWFRERISGTGRRMRKVMVVALARKLLIALWRFATQGVVPEGAVMKPAS

SEQ ID NO: 214426 - protein, 349 aa, unidentified
MEHVGMDLGKKESQIAVITEAGELVEKRKRTERERLTQYFKDRPMAKILIEASTISEWVARLLEGLGHEVVVADPNYAPMYAQRSRRVKTDRRDALALAEACKLGAYRRAHRTSDEQRHVRALLTVRDSLVRARARLVTLAQAIVSREGLRVPTGSSGCFSERVERLGLPAQLAAEIAPLLAMLVPLNEQIGLLDEKLDELGRKDERVKRLMTMPEIGPVTAVSFVATLDEAQRFRGAHQVEAYLGLVPREWSSSEVQRRGHITKAGNSRMRWLLVEAAWRVATHRKRPETKGLREWTERIARRRGQRVPVVALARKLSGILYAMWRDNSAYDPTMLKGVVRTKSEQVA

SEQ ID NO: 214427 - protein, 342 aa, unidentified
MSRYIGVDLHRNRFTACVRSERGRQYVSTWKLEGLSKFVSRLRATDEVAVEVTGNTRLFYDAVEPRVKRLVVVDPRQFEVIRKSVKKTDAHDARALALFLSKDMLPEVRMKDPAHAEMASLVQTRDTLVKARTALKNKVNNLLSARGINLSRESLASDKGLREVLGMRFGTTVDVELEVLVGQIRSLNQSIARLEKAIADQGPKLPGHGNLKSIKGIGDVGAGVLLSVIGDVHDFKDEGKLAAYFGIVPRIANSNETEHSGRITKRGSKLGRTVLIQCALIAKRYSVYLQRYYERIQARRGTGKAIVALARKFLGIIYLTLKQNLVWEDFANGVIRDAEVSP

SEQ ID NO: 214428 - protein, 393 aa, unidentified
MGKRAKVTQIGLDVHRKFSIAAARDASHKIVWRERLEHVDRNELRKRLSRWPAGTPVVLEGTFGWGWMSDEVKDAGLDPHLSSSRKVAAWREARGLAKSNKIDADLLSELWDQKPEMRGGELKRWWEVWLAPQEVRDQRELLRHRMSLVKVQTETKNRIHALLHRHGILSEFSDLFGVAGRRFLSLLMNDQQKLRETGRQTLKDQLILLDGLRRLIARATRQFKGQLKRSKPGQRLMTLPGISTVLAYTIIAEIGRVERFRKARSLARYSLLTPQADDSGEAREGKPIGRKIGHAGRHTLQWAWIEAARGAVRKDAYLRGIFNRRTDNGKKDRNRGYITVANVMCKIGHAMLSKQTDYQEVPPPRPGSKQANQKDYSRPGTGQPSPCLAACET

SEQ ID NO: 214429 - protein, 368 aa, unidentified
MREWDLHPTNMRKHTNTESASLEATRGHFNGRSGAIKLGIDVHQAFYMVVEQVDGSNPKPPQRMSKEGFLGWAAKLRRQQPEAAIHAVYEACGFGFGLQRQLSVLGIACHVVCPQKLDERNQRVKTDGRDAKALCLKLDRFVEGNRDALATVRVPSEEEEQLRALHRQREQLVRTRKQLEAHGRRLMVNHGIEPVQKWWKVRAFAKLEVPAWLTTLFTHTQRRLLGREAKIRQHTRQFEKNVYTAQPRSCGAVTSVVIDREVGDWHRFKNRRQTGSYTGLCPGEYSSGQTRAQGCVTKYGNPRLRPPPLHGALPLHLTHFHAHRPNRAFGPRAPETSPILLAAAPASPGDILLRDRLGGLIHEYDLAA

SEQ ID NO: 214430 - protein, 367 aa, unidentified
MKQQTSATTETLDKGRSLIDFSGKIIYVGIDVHQKDYQVAKLLNGICLGNHRMGSNSEDLIKHLNSHYPGATFKCVYESSAWGFTLQRSLQSAGMECIVVHAADVSTSDKEKKRKTDKVDALKLARNHAAGELKAIHVPGEDIQKDRNLIRFRKKLVGDLNRSRNRLKSILKYQGIQLPAKYEKTNWSHNFLEWVEQEAQKDERLKSTLVLMLEQIRLLRQLLLKTEGKLRELKKSRYQQNTSLLLSVPGVGPTTALWFLLEVGDINRFKGFDALNDLIGFCPDTDSSGDKEKDTGITTRRHKQLRSLLIEAAWQAIRIDPALMDCYQALTKRMKGNQAIIRIARKLLRRIRAVLISGVPYQKGVVK

SEQ ID NO: 214431 - protein, 386 aa, unidentified
MGNCAGIDWASEKHDLLIEEPAGEQLLAATFAHDEDGVSALCAALECFEVEVVAIERPDGVLVERLLESGVRVLALHPNQVKAARDRFRASGGKSDQFDRFVLCELARTDRHRFRVLEPDSDETKAIRALTRAREDLVGARVALANQLRAELERCWPGPIRLFSAIDSPISLAFLARYPSPHDARGLGEKRLAAFLKAHHYTNRKTAAQLLERLRSAASGRAGEIETRRRRSIVLHLTRTLAVMVEQIGELESEIADALRAHPDGEIFSSFFRSPDSVICAATLLAEIGDCRGRYPHRDAIAAQAGHAPVAVESGKRKTAKFRWACNKRLRNALATLAHATRQWHPWAADRYAAARARGHNHRRALRTLGRAWSRILWRCWQTHPL

SEQ ID NO: 214432 - protein, 339 aa, unidentified
MQLYAGLDLHSRNTFIGIMDKEFKRVFAKRVSNNLPLIIKTLEPFQDQLTGIVVESTFNWYWLIDGLMDAGYDCLHLANPSAMKQYEGIKHTDDQHDSFFLAQMLILGILPQGYIYPKEDRPVRDLARKRLFLVRHKTSHILSLQSLIARCCGQRVSANEIRKFTVEDLQRLLEQEYLVLSAQANLDTIVFLKQQIQQLEKAIKNKVKLSKSFQQLMTVPGIGLILAMTIMLEVGDIGRFPQVGNFASYSRCVSSQRLSDGKSKGHGNRKNGNRYLSWAFTEAAHLSRRYNEHFRSYYNRKVAQANTSLATKALSNKLARICYYIMRDQVPFRQELLSQ

SEQ ID NO: 214433 - protein, 338 aa, unidentified
MNHYAGIDVSLEASSVCVIDGSGKIVREAKVASEPEALIAWFGSLGLSLTRIGLEAGPLSQWLYAALRDAGLAVELLETRHVRNAFKIMPVKTDRKDAHGIAELMRLGWFRPVHCKSMEAQETRAILTSRKLVQKMLHETEMSLRGVLRNFGLKVGKVAAGQFEFRIRELVEGHPTLAAIAAALLATRATLRREFNALEKRLRAIARTDTRARLLMTTPGVGMIVALTYACAIDDPSRFKSSKTVGAHFGMTPTRYQSGETDYTGRISKIGDSSVRAVLYEAAHVILTKPVKGCTALKSWAMRIAKRAGMNKAKVALARKLAVIMHRMLADGTTFQPA

SEQ ID NO: 214434 - protein, 310 aa, unidentified
MIIHPGYVGIDISKTHLDIFDASRGRQQRCANAAKDIASLIRSWKRQPPFILFEATGHYDALLRRRLAKAQIPFARVNPARARDFARAAGYLAKTDSIDAKMLAAMAQCLHPEPAQPVDIDRERLARLHKRRDQLVAMRQQERTRASECACPHTNTDISRHLTWLDREIDTIEARIETLIAASTNLAAAADLMRSVPGVGPVTAAALLALLPELGACSPKTIAALAGLAPFNVDSGQCRGLRRISGGRKRVRDALYMAAVAASRSKSRFATFYKTLRNAGKPPKLAFIALARKILTTLNAILRDQIAFQP

SEQ ID NO: 214435 - protein, 431 aa, unidentified
MKPIVKQNTEPDPAEDFVAFLALDWADEKHAFRLQVVGQSKIETGTLEQKPEVLGPWLAQLRERFGGRPIAVGLEQSRGALIHALMAYDFLVLYPIHPTTVAKYREAFKSSGAKNDPLDAGQILEILTKHQDRLHRLNPDTVETRLLGRLVEDRRKAVDLRTTHIQALGANLKEYYPQALELTNDNLKSRLACDLLIKWPTFEDFQQAKPSTLKRFYYGHNVRRPEVLERVLTLAQKSQALTTDPALVESGRRLTQRYARLIQALNPAIEDYEQRIQRVFDAHPEVKLFSDLPGAGAARAPRLLAFFGTDRSRYAAALNVQSFTGIAPVTKSSGKSKVVYARAACPKFDRQTFHEFARLSVSQSQWACNYVQYYTDKGKKYHTIIRALAYKWIRILFKCWQERTPYNEDKYMATLKIRGSIFATWHLQKQS

SEQ ID NO: 214436 - protein, 365 aa, unidentified
MVNHIFVGIDLGDKNSVARIAVNQGKTERWGFVNDRRGRQRLLDEVRRRSEKVENGQVVMAYEASSCGFILYDEAEARGIRCEVLAPTKMEKSVEQRQHKNDDRDAEDVVEKLRGHVLAGNRLPTVWVPDRQMRDDREVVRTRVELVEKQTRVKTQIQMLVKRHGLEKPTGIGGPWTVRHRQWLEALTESDAWGYGARTALMSLLRHLSFLEAEIERIEKPIHELAEQPRHKPILDELTREHGVGLMTAMVYRTEIGYAGRFRRGRHVGKFVGLTPTSHESGQQQDRKGHISRQGPPRLRRMLCQASWVHVGHDPQAKRFYQQLVARNPKKKKIAIVAVMRRLAVRLWHRMRQAEIRMTDLVPVN

SEQ ID NO: 214437 - protein, 317 aa, unidentified
MEETPAADRFVGIDVSKSWVDVHVRPGGTAFRCNTDGEGLAELVRRVHPLMPRLIVMEASGGYESLVAVGLAAAGLPVAIVNPRQVRKFAEALGQLAKTDAIDARVIAHFAEAVRPPPRPLPDQTLTQLQELLARRRQLVIMINAEKQRFAKAESKITQRSCKAMLKSLEAERARIDRAIDKLVQASPLWCGKLDLLTSVPGVGDIVARTLIAELPELGAIGRHQIAALAGLAPFSRDSGKRKGRRFVRAGRVQVRAPLYMACLVAIRHNPPLKTFYRRLREAGKPTRLALVAVMRKLLTMLNAMLRDNKPWTCAQS

SEQ ID NO: 214438 - protein, 389 aa, unidentified
MNEGSPGAQIRCSWSLEVPAQQIADTGEPIMLYLGIDQHRKQLTTRTLDEAGELVLARQVSTQWEKARAFFEWIRERSRCEGGFVVILEVCGFNDWLLLMLREYGCEQIVLIQPDRRSKHKTDRRDAKTLAELLWLNRVRLLNGQRVHTIRRIRPASPSDAFARQITALRCRLTRQRTKTINRVQHILLKHNLQQACPTKGIQTKRAAQWLQTLSLPDVDRFELDGLLPQWKLIEEQLTAVNQKIKECCHQYPIATLLLTIPGMASYSALAIASRMGNIEDFPRPDSLANFWGLTPGCNNSGDNSQRLGSITKQGSSLVRFLLGQLVLHVLRRDPRLRIWYRRIKQRRGSKVARVAVMRRLAMIIWHMVKHNEYYNYGGVRRPMRNDAA

SEQ ID NO: 214439 - protein, 444 aa, unidentified
MGNLVKIYENAAGIDIGSEKIFVATDNHSVRSYRTFTSTLQACVKDLLSQKIKTVAMEATGVYWITIYDMLEKAGMDVWLVNPADSKNLPGRKTDVQDCQWIQQLHSYGLLRRSFIPTDFFRQLRTYNRLREDHIQMAATHVQHMQKALILMNIRLPEVLNQIHGKSGMLMIESILDGQTDPKYLLSLCDVRLRKNKREEILQALNGFYSEEHLFELKQAYNAYHFYQTQIEDCDKKMELLLEKMSSETVIQNEDTLQKATRATKRVRHHAPQIENLHYKLLNITDGRDAATLPGFTDYNYLRVLSEIGNDISRWPTAKHFTSWLGLAPGQNRSGKINKRSKKRSSTKAGQVFKQAAQTLLLSKHIALGAFAKRLKSKKGPAIAIKATARKLAVMYYNLMKHGADYVEQGTKKYEEKYRNQLIKFMQKKASELNLQLIELQTKE

SEQ ID NO: 214440 - protein, 317 aa, unidentified
MALQLIFVGIDVSKEWLDLWLAPLKRFERVRNDPAGWAAAIDLVKSLGLEAGTVVAFEATGGYEHGLRQAVLEAGLDARRLNPLRVRLYAKSLGRNAKNDRIDARIIARYAEAADTTPDILDPAREQLAELVSHRRRLVDERVAVANQTGTLRTGLLQDQNRKRLALIERQIDETDTLILEAIGHVPSFVAKIALIKTLKGVKDITATALVALLPELGRLTRRAIAALVGIAPFDHDSGKFKGTRSIAGGRAPVRTALYMAARAAARSKSPLGEFYKRLIAAGKPPKVATVALMRKMLVTLNAMIRDNQIWKHAKPC

SEQ ID NO: 214441 - protein, 343 aa, unidentified
MQAITTIGLDIAKSVFQVHGVDAEGNVVLRRQLKRRYVLAFFQKLSSCLVGIEACASSHHWSRELQALGHTVRLMPPAYVKPYVKRHKNDATDAEAICEAVTRANMRFVATKTPEQQSCLTLHRTRHLFIRQQTSVINAIRAHLAEFGIVAPVGRHGVDQLLGVAADSNDKRLPEVARVCVAALGAQLRMLKAQILEFDRMIRAWHRSSETSRRLDDIPGVGPVLATALVASVADPMAFRSGRDFSAWIGLVPKQNSSGGKDRLGNISKRGDRYLRSLFTTGALAVIRYAKIHGTKHRPWLTALLTRRPTKVAAIALANKIARMAWAMMAKGERYKEPAALAA

SEQ ID NO: 214442 - protein, 366 aa, unidentified
MSFAHADGTEVRPKRRCAFMKVLIGVDPHKTSLAVAAVDEATGELLERASVPQDHAGLRSLERWAKRFPERSWAMENAGGLGRHLAGRLVAAGESVVDVPPKLSARVRELSRGNARKNDGLDALATALAASRNGRLAAVDPEAASEVLSLLSERREDLVAERTRALNRLHGLLRVLVPGGVAGKLSARRAARILRGIRPRGGASDRLRRRLASEVLRDVRTLDRKIADLDGRIEAEVEASGTTLTQIFGVGAILAARIIGTVGNVARFPTKAHFASYAGTAPVEASSGEVVRHRLSLAGNRKLNYALHMVATSQARSDARGGEYYRKKVAEGKSRKEALRCLKRRVSDAVFKSLVADSQAPSRSAA

SEQ ID NO: 214443 - protein, 407 aa, unidentified
MTAVMIGVDPHKGSHTAVVIGPAEEPLGELRVRASAGQVEKLVAWAADWPERTWAVEGAAGLGRLLAQQLVAAGERVLDVQPKLACRVRLLQAGDTNKNDPNDALSVAVAARRSKTARPVMAEDYPAVLKVWSKRHRDLARLRNQVACRLHAVLCDLVPGGHPKEISAAQAARILEQSSPSGAVDRARAELAAQFPGDMRRLDAQLRGTRKKLAAAVRASGTTLTEVFGVGPVIAGTITGDIADVSRFPGRDHFAAYNGTAPVEVSSGNRKIHRLSLRGNRRINHAIHMAAITQIRHRHSDGRAYYDKKVTEGKTHKEALRSLKRRISDAIFACLLADARRAGQRPARTAREGNQGTTLTPARPAHTPNAGSSDKPLPDLGTTTRPGTRAATPSPSKPASKKTRPAT

SEQ ID NO: 214444 - protein, 431 aa, unidentified
MNRSVGFLSVGIDVGADFSLMAFALPSQELLGKPYKIIHSSQHSLNGAVEKIKTLSQKYQLPARVFMESTGIYHYPLYHKMKDAGFDVFVLNPLVTHAGRDLNVRNIHNDKYDSQKIALLGLRPGLKTSLIPSDQVISMKVILREYYAVKKEISMYICRLKNQLRQAFPQFLPLFSKVNGVTAMAILCEYPNPESLLNAGEHAVADFMKSVSHNGPLKVQKKAAALIQAAQDARSFGHWNHGISILIRHYIEMIRLLDVRAKTLLAQAKALLAEQDSKTLAHQTELLQTIPGIGFLSALTLICEFGDFSAFKRPKQLFSYFGLDPIVRQSGNYNGTNLKLSKRGSPFARRCIFVIALQSISLNIHKEPKNPVLRTFYEEKCMCKAKMTAIGAVMHKICNLIFAVLRNDAPFVLQTPEQHNAAYLSKTHSVA

SEQ ID NO: 214445 - protein, 367 aa, unidentified
MKKVSTAVAKQSRNISRQRLTIGLDLGDRNSWYCVVDEAGRIQREQRVRTTAKALQEAFGAMPRSRIALEIGTHSPWVSRLLSELGHEVIVANARKVRLIGESRKKDDRLDAQTLARLARIDPELLYPVKHRSAQAHADLMMIRARASLVRTRTGLVNAARGLAKSYGERLRGCNVRNMDAEKAEGLSPELQRALEPLLAAIAEVSERIVEYNDRIEALAQTSYPQVELLKQIKGVGTLIALTFLLTLEDPHRFPKSRDVGGYLGLQPGRRNSGASEPQLHISKEGDPYLRTLLVQGAQHILGPFGIDCDLRRWGLKLAERGGRNGKKRAIVATARKLAVLLHHLWVSGEVYEPLHNSNRMALAAAA

SEQ ID NO: 214446 - protein, 424 aa, unidentified
MNNTQNRKIAQVTDKTLIVGVDIGGEKHFARAIVARGFEVSKKPFPFMNTEDGFDSFVSWAYNLADSHKLTKIMVAMEPTGHYWFTFVAFLKKYDVQVVLVAPQHVKHSKEMDDNTQEKDDRKDPIVIARLVPEGRYLIPYIPEDVYAELRAAFNRRCELVEEQVQIVNRMTRWFDIYFPEYRKVYGRIDAKTGIIILKKAPLPADILCIGVDGIRQIWKDAKIRGYGPKKAKQLFAAAEHSVGMEGCTSVRWNLWQLLEEYELVEKQLNDILQLIEGCLYQIPGADKLLKVPGAGLVTVAGFLSEVGDIKRFSDPKQIQKLAGLAVVENSSGKRKGLPGISKRGRSRLRWVLFQLARSMVMFNPEMKAYHQYYTTRKDNPLKKLQSLIAIAARIARIFYGMLKNGTEYDPTMVMKDFNKAVTA

SEQ ID NO: 214447 - protein, 397 aa, unidentified
MRPIIGVGIDCSKKQHKVCISDNFGKKYGKIFTIGNTVDDIEYLVDKIIEVEKNIGEADVVINMESTGIYHLPLYSALSKIFNTNIYQPKQVKEQSKKNIRKSKTDKRDARTLSRIHLEIEPPETDYSDKEMYDIREIIRQRFKYKDIRTNLKKKFRRNLCIVFPNFDSLYKDPYAAVPWNMLKNYPTPEDVIRAGTDEISRIMEDASNGQKLKVSPDDLIELAETTIQCDISNQGALFGLKMLMEDIEHFDRRIEQMDKEIRIYWDKIKNNLYFPTFPGIDMVKSVALYTEFGGLNRFSHPDKAVAFSGLENFVYISGESKNFSGRMTKAGSPIIRRVCWEILSPPKKYIPRLTEHMNKLKNKGKHHSSCIHSASKKLIRILWGLEHHKQEYRNPV

SEQ ID NO: 214448 - protein, 416 aa, unidentified
MNAAGIDVSSSKSTVAVLRPFGEVIKLPFDVPHSAEELASLAEQLKSIEGETRVVMEHTGRYYESIAKVLHEAGLYVSAVNPLLIKEYGNNSLRKVKTDKADAMKIAKYALDNWSELRDYTPMDTIRYDLKTMNRQFQLAIKQKTATANNLIALQEQSFPGIRKLFDSPVRSDGTQKWVDFTHDFWHTDCVRSGSLNAFTERYRKWCKRNRYQFSTEKAAEVYALAKSAVVLVQKTSVTKTLVQEAANQLTAISRSAETYRSEMNKLVSQLPEYSVVMEMYGVGESLGPQLMAEIGDVRRFERKQSLVAFAGIDPAPSESGDYCSCSNRTTKHGSSYLRRTLFNIMKVHLQRAPADEPVFQFMDKKRAEGKPYYVYMIAAGNKFLRRYYGKVMAYFSSLEDLPPVDMDSTGLHHTK

SEQ ID NO: 214449 - protein, 357 aa, unidentified
MEYCGIDAHSKSSTVCVIDSKGKKIMMQKTESTYEGLARIIGLFDVNMPIVVEACSASRPVIAILRDIGFENVIVVNPVATNQMRARGKKTDYVDAQGLAELARLGLTEVWRVHIPGDWAQNMRDLLYAREFAIKQRVMTVNRVKAIFRREGKTAPSLKGLSGWEGIEESLPKYSEEFAFCRQLRDICVSRELDLTRKIKEELAKHSQHKLVLSVPNMGPLTAAVLLACIEDISRFKSSRTLCAYFGIVPGIFQSGATERMGPITKRGNSLARKFLAQAAHHSRYVSSPFNPVYRDILKNKNTSIAVMTVARKIVTCVYAVMRHNEPFDPVKMGLVKIDKEVKFVRAYERARNLQAV

SEQ ID NO: 214450 - protein, 338 aa, unidentified
MKLYGGMDLHSTNVVTQLINEEDNVVYRKKQSCELEQILKGLEPFQDSIEGLAVESTYNWYWLVDGLMEAGYRVHLVNTAAVKQYEGLKYTDDDSDAFWLAHLLRLGILPTGHIYPKQSRAVRDLLRKRGQLVRQRTAHILSIENLYSRNTGSRLSCNAIKGLTQDQIEQQFDDPNVALAIDSNRVIMNALDQQIKVLEQSILKQAKLEPRYRHLLSVSGIGEILALTIMLETGDIGRFEQVGNFTSYCRCVGSERLSNGKKKGHGNTKNGNKYLACAFVEAANFAIRFNEQAKRFYQRKAAKGNRIIAIKAVAHKLARASFYVMRDQVPFDSAKLFV

SEQ ID NO: 214451 - protein, 374 aa, unidentified
MGDYSEAFVGFDTSKLRNAVAIADAGRGGEVRFFGEIENTPAATAKLVRKLSAKYKRLTFCYEAGPTGYGLQRQIKELGFACVVVAPSLIPKRPGDRVKTNRRDALSLAKLLRADELTAVWVPDGAHEAMRDLTRARETAMLDLRTKRQHISAFLLRLGKPYPEKKTWTKVHVSWIASQKLEHPQQRLVLEEMMLAMRQAQERQQRLEQAIAAAVGEWSLAEVVTALMAMRGIDLISAATLLAEIGDLSRFQTPTELMAYLGLVPSEESTGDVIRRGPITKAGNRRARRMLVECSWSYQHPPRVGSAKQPKVDAAPPAVREIAWKAQCRLYRRYRALIGKNKLKTVAIVAIARELAGFIWAVARATTTARAAVA

SEQ ID NO: 214452 - protein, 310 aa, unidentified
MDAIVVGIDVSKNRLDVAVRPTGEVFAVVRDAEGLDALVARLKPLAPVAVAGEATGGYETVVAASLAAADLPVVVVNPAQVRSFAQALGKRAKSDPIDALVIAHFVEATRPEIRPLPDAETRLLGDLVSRRRQIVGMITAERQRQKILTGKRLQRSIARLLAALQKELSSLETDIDQAVRGSPAWREKEDLLASVPGIGKIIARTVMAELPEIGTLDRRQIAALVGLAPWTRQSGTWKGKSFIGGGRAAVRAALFLGAMVAARHNPELKLFRDRLVQAGKPKLVALVATARKLLTILNAVIRDRKPWQPA

SEQ ID NO: 214453 - protein, 368 aa, unidentified
MGTVFIGLDVHKMSISVTTAEDGREGAVRFCGEVANTPEQVRKLAERLSRSGDRLEFCYEASGCGYGIYRQLTEAGHGCLVAAPTLIARKPGDRIKTDRRDSQMLALQHRAGGLTAVWVPDEVHEAMRDLVRARGDAVMALMRARQQLLAFLLRHGRTYPVGKPWTLRHRRWLAGQAFDQDAHRVVFHDYVEAVWASQDRRDQLETRISALLRGWSLAPLVEALRALRGLDTISSVSFVAAVGDLSRFENPRRLMAYLGLVPSEHSSGDRIRRGGITKTGNREARRMLVEAAWSYRYPPRVSTGKTDVVSRQPKAVRDVAWKAQVRLCDRYRRLSAGGKRPTVVIAAIARELSGFIWAIGQEVRPAAP

SEQ ID NO: 214454 - protein, 402 aa, unidentified
MTRSVFVGLDWAYRSHAVCVIDAQGSVLKHLTISHDAQGLGELRHALAAFGKALPIAIERPSGLIVDALVEAGHQVFAIHPNPVKASRPRYRSTNAKSDAGDAFMLADLLRTDGHRWHALQPQSAAIRGLRALVRTRDDLVTTRVRLANQLTALLDAYWPGAACIFAAVDSPIALAFIEQWPTARKLTARQIAAFCKRHGYSGRRSAGVLLERLQAAAPSLCEPTLAQAHATAALALVAVLKPLSVQIKALDAHIAQAMTALPQAISVMSLPRAGCICAAQILAELGDVPERFASAQQLCSEAGVVPVTYESGKSRAVTFRWACNHRLRRAITCLADNSRHASPWAASVYNAARKRGCDHPHAVRILARAWTRVLWRIWTNGTLYDPAIHSSACRIEISQEG

SEQ ID NO: 214455 - protein, 376 aa, unidentified
MLSVSASIIYLGLNVHKESVTIAVLPGDAVAPTRVERLPNDLAKLRRFCERLTTGGGGIRACYEASGAGYVLHRALVSWGHHCDVIAPSLIPTKPGVQRKHDKYDAAQLARLYRAGELTAIRIPSEAEEWVRDVVRCRETFQREVLKSRHYILKFLARRGFVNREGTAWRQAHYEWLRRLARADSPLAPEDRQVFGEYLGLLEYKLSRRDELDRQIAALALTPALADAVQRLQCFRGLQVHGAMVLATELVDWRRFESPRQLMAYLGLVPREHSSGHREWRGSLTKAGNTHCRHVLVQAGWAYRFQPKIGVALKARQRGQSPTVIAHAWKAQHRLHTLYKRLAFRTKPQIAVVAAERELVGFLGAVIQDAPAPTAA

SEQ ID NO: 214456 - protein, 371 aa, unidentified
MKHNSIFIGMDVHKNSIDIAIAESGRTGQVRHYGKINGTLAALNKAVGKLVGKGDRPHFVYEAGPCGYQIYRHLTARGFDCAVVAPSMIPKQSGNRIKNDRRDSLMLARLHRAGELTAVYVPLAEDEAIRDLSRAREDAKSDEKRSKQRLLAFLLRSGHRYSGRSPWSQAHMRWLADIKMAHPSQQIVLQEYIDTINQCTLRLQRLTEQIRQLLPQWRLFPVVQALQSLRGVSLIVAVTTVAEIGDFKRFQNPEELMGFLGLVPSDKSSGEKIKHGSITKAGNSHVRRMLVEAAWAYRFRARVSRALLKRQEDLPQPICDIAWKAQLRLCARYRHFWAKGKVKPVIVTAIARELCGFIWAIAIKTDIPVAV

SEQ ID NO: 214457 - protein, 404 aa, unidentified
MDIVNDRCAGLDVHKKTVVACVITPQTKKTCTFGTMTDDLLEMCDWLTDQKVTHVAMESTGVYWKPVYNLLEVLNIKILLVNAQHVKAVPGRKTDVKDAEWLADLLRYGLLRASYVPDRNQRELRELVRYRRSLTQEKSRVMNRIQKVLEGANIKLSSVATNVVGVTGRAMLKAISEGADDTEELMHLIKGRLNSKKTALREAMKGLIGPHQRMMLRSQLRHLGFLEQEIEEINAEIATRMASIEDVIVQFDAIPGVGRRIAEDVLAEMGSDMSRFPTSGHLASWAKVCPGNNESAGKRINGKTAKGNPWLRSALVEAAWTASRSKNTYLSAQFKRISVRRGAKRAASAVAHTILVTMYQMLARGTTYNDLGGTFFDQRNVKRVVHRSVTRLENLGFKVSLVPA

SEQ ID NO: 214458 - protein, 411 aa, unidentified
MRLFAGDDWAEDHHDIEVMDAAGKVLAKRRLPEGAAGMSQLHELIGRFLPEDADEVEVVIGIETDRGPWVAALVAAGYTVFPVNPLQASRYRERHGVSGAKSDQGDSHMLADMVRTDSHQLRPAAGDSPEAAGVKVVARTHKTLIWDRTRQVQRLRHQLREYFPAAIEAFEDLDAPDVLELLGKAPDPARAARLTRAQISAALKRARRRNIADKTDAILAALRGEHLTQPAALTVAYAATVRSLVAVITTLNEQAKLLEEQVKEHFGRHPDAEIYQSQPGIGAILGARVLGEFGDDPRRYVSAKSRKNHGGTSPITRASGKKKVVAARFIRNDRLIDALMSWAFASLNASPGARAFYDQQRAKGLEHNDALRRLANRLVGILHGCLKTRTLYDEATAWGHRENLPQSSVAA

SEQ ID NO: 214459 - protein, 326 aa, unidentified
MTLSHSTDNTFVGIDVGGAGLDVAWHRGDSAHYANRPDAIATLVERLRTGPEVTRIVLEPTGGYEKALVKALRQARLPIEIIHTTRFTAYRALVGVKAKSDTSDAKLLASYAAAPDEVRGRKAGHVELPEDAVREELSELASRRDQLKHMIHAETCRLGTVRKDELRQMINTHLETLRAEDKQVHRMMLELVRQRDDLRRDQRLLKTIKGIGVKSALVLLASVPELGRIDNKAAAALIGVAPFVRRSGTMNAPARIHGGRAPVRSILYMAAVTASKHNPLLSPFYDRLIAKGKPPKVALIAVLRRLVVFANAVLRSGQPWKGATAT

SEQ ID NO: 214460 - protein, 402 aa, unidentified
MIFVGIDWADKEHEISVVDQSGTELTRFRVPHNHQGLQTLKNRLLRHANAPEEALCFLETNQGLLVQFLLEAGFPVYPLNPKVVDYRRKPSGAKSDAIDARLLADIGRSDFKRLKRLNPDSEHIQEIKMLCRDQDTLIEDATRLTNRLTACLKEYYPVALELFSKITLPVALDFLKSYPTLESARSASVPELAAFLKAHRHPQPNLTARRIYEKLHAPQLEASRATTRAKSRFLLVIIAQLEPILKEIHAYDEEITRLFKSHPDSFIFTSLPGVGPRLAPRLLAGWGEDRSRYENAAVMQALAGTSPVLYQSGKYRFARQRRACLKSLRRALQLFAFQSIRLVPWASEYYQRKRAAGKTHHEALRALANIWVRIIFAMWLSHQHYDEAVFLAAKAKHAPLVA

SEQ ID NO: 214461 - protein, 340 aa, unidentified
MKLYGAIDLHSTNNVTVVIDEQDRVVYQKRLPNDLALILKELSVYQSELQGIVVESTYNWYWLVDGLMAEGYKMHLANTAAIQQYEGLKYTDDHSDARWLAHLLRLEVLPEGHIYPRAERPVRDLLRKRSQMVRQRTTNLLSIQNLLTRNTGSSLSANRVKGLDVQQVDDLLPNGDLALAVKANLSVMSSADEQVELLEQTVTQRVKLRPQFSFLKSVPGIGEILALTIMLETGDIRRFLNVGNFASYCRCVGSQKLSNGKKKGQGNTKNGNKYLSWAFVEAAHFAIRFNSKIKSFYQRKKAKTKVVVAIKAVAHKLCRACYYIMRDRVAFDVTKAFGHQ

SEQ ID NO: 214462 - protein, 392 aa, unidentified
MSQHFRFDASRSLTALEQDSTIVAVIEMSQTKWLVAALVPGVERQPLKKFDAQEEMLLKLLHGWRREASNAGRNIKRIVVAFEAGRDGFWLARWLRARDVEAYVIHPTSIAVSREHRRAKTDRLDTELLMRVFLGWLRGEKRHCSMVAIPTIEEEDARRPNRERQNLVIEQTRIINQIKAIFTRFGLRTLRPTMRKLAEGLEDLRTAEGTPLPQNTLAELRRHLARLRFVRDQIGAVEQERLRKLAVAPAAEKKSPDAMVHLIARVLGVGIETADMLVNEIFSRQWRDRKAVARYAGLTGSPDESGSRRRERGLARAGNVRVRCGMIQLAWRFVRFQKNSALAQWFAARTADGRASTRKTMIVALARKLLIALWRLVTRGEVPQGVVLRPAS

SEQ ID NO: 214463 - protein, 413 aa, unidentified
MVSAFRFFVGVDWGTVNHRVCVLDGEGNKIAEREVSHCGSALQELLVWLRRQTGASPEQVAVAIEMPAGAVVEMLVERQYPAFAINPKQLDRFRDRYSVAGAKDDSRDAFVLADSLRTDRHCFHPVQLKDPQIIRLRTLSRLHHDLQQDWSRLSNQLREQLHRYFPQMLQLSAAADDSWMWDLLALVPRPVLLRRARLHTISKILLRHRIRRFTAEQVLQLLQTEPLPTAPGTAEAASEASLLLIARLRMLQQQIREVDRRIADILLELQTQEQTSQHRDVQLLCSVAGVGQVVAATMLAEALQPLRDRDYHALRSYAGAAPVTRQSGKKKQVLMRYGCNQLLRNALYHWARVSLQKDPRSRAHYHRLRQKGHSHGRALRGVVDRLLAMLISILRHQMPYDPKRRSPLLQPAT

SEQ ID NO: 214464 - protein, 370 aa, unidentified
MKNAITYVGLDAHKKDIYVAMLVDHERAPVTWQLANEPNALRRLVRKLEREAPGPVRCCYEAGPCGYALQRQLTSARLSCQVVAPALIPRKPGDHIKTNRRDARKLAELLRAGLLTEVAPPTPADEAVRDLARARDDAREDLLRARHRLSKLLLRRGVHFAGPSRAWSHPHRRWLRSLAWDHAADRRVADDYLLAIEQLEARLAELDAALTEVAQTEPYREPVAWLRCFRGIDTLTAIIIVAELHDFRRFHSARALMAYLGLVPSEHSSGEHARRGRITKAGNAFVRRVLIEAAWHYQHRPGVGGALRGRQTGQPAHVIAIADRAQQRLCRRFRRLVAEHKPTPKVAVAIARELAGFIWAALQESRPQAA

SEQ ID NO: 214465 - protein, 383 aa, unidentified
MLPAQDKDFTRNAVVLAVSLELSKGSWKLGLLDGTREKPAINTVSDDVPQKRLNEAVAVIEATKLKWHLLNDVRVVIVLEAGQDGFWIARELEKRGYEALVIDPASIPVERQARRAKTDRLDAIKLVMCLRAWLYGERNRMHVIRMPSKEAEAQRHLVRDRGEMQKECGQHRDRIRKLLRTVGCWDNVDGDFAERLAQGKVLCHDGTALAPELHARLTRECERLALAERQLRELEKVLVKQLPEPVQERITGLKQLKAIGDVGAMRLVLELFWRKFDNRRQLGSCVGLVPQPYDSGESRVDQGISKQGNRRVRALLIEMAWMWLRYQPKSAIAKWFEQRCGGSGPNKRNRRIAIVAVARRLAIALWRYLEHGEIPEGAEMKPA

SEQ ID NO: 214466 - protein, 417 aa, unidentified
MFSTTDLLVGVDIHRRTNVVQVMAGHGQVLTSKMRVPNNRPGTETLTAHLAQMADKGGFDHIHIAAEATGNYWLPFFCALEQSPDLVDCSVSLYPFNPKVIHNFRKSLGDWNKTDELDTTVISERLRFGRELPYPFHMEDRYLPLRTLTRYRYHLIGELVRVKAHALSLVYLQASEYTAHPAFSNIFGRTSQAVLKEFPSLETVAAMPFDELVEWLDVKGKRRFAHPEDNAQRLQQIANDSYRLPDEWLESVNTSLTLSLRHITVLQQLLTRIDTAIADQMENYPNSLTTIPGIGPVFAAGILAEIGDIARFDYRHAKVASYAGLKWSKHQSADFIAEETRLKRTGSRFLRYYLCEAAQLVRMNDAEYAAFYQKKYDEVRHHRHKRAIVLTARKLVRLVVRLLTTNEPFRARQVSSG

SEQ ID NO: 214467 - protein, 356 aa, unidentified
MVIVAIESHQGALHMQISTIGLDIAKNVFQVHGIDAAEKVVVRKRLRRRQVLEFFKALPPCLIGMEACATAHYWARELTKLGHEVRLMPAKDVKAYVKRNKNDAADAEAICEAVRRPTMRFVRIKSAEQQGQLMQHRTRDVLIRQRTQIINALRAHLAELGLVAAQGNAGVNELRAIVTDEQDTRLPIDARASVIVLAAQLEALESVIGAIEKRIKMQHRSSEASQRVEAIPGIGVIGATAIVATVADPTIFRSGRDFAAWIGLVPRQDSTGGKQKLGPISKQGDRYLRRILVVGAIAVLRRAQANPGKYPWLTQLLARRPFKVVAVALANKMARMAWALLAHGGTYRAPELAETA

SEQ ID NO: 214468 - protein, 337 aa, unidentified
MHYIGLDVHSKNFTVAVMDRNGQVLLEGHKPTSEHNLRDVVAGVSGAKVVALEETTVAAWVYRVLKPHAHRVIVCDPRHNELIAKSGHMTDAQAARQLADLARGKFVKAVYHPADEGRQAFRELVQSYHQLQRELVRVKNQLKAKLRQQGIPCAGSDVYQPHQRGFWLAQIKHDDVRFQVEMMMETVEHLMEQKVAYLQRLKQRAKAFPEIAAFQALAGIGLVHGATFYALVDEPQRFANKKRLWSYCGLGIAQRSSDGMSSPPHLNRNGNRLLKCVAKSAAQMAVRHGDNAFARQYQRLIASGVKSTNAQLTVARAIIATMFAMWRKGETYIPREV

SEQ ID NO: 214469 - protein, 377 aa, unidentified
MQSIIYVGMDVHTENFTFASYEFGKGDVFAVDQVIGATWKDAIKYMKTLQKQRPEEDIHFVCGYEAGCFGYSLYNELMAAATDEKNLSLQCVIMAPSTMAIQGNRKKTDRRDARMIATNLAHGTYSSVYVVSKEDNGVRDYIRMRDDTKKKIRSTKQQINALCLRHGKNYTANKWTVKHYDWLHKVVLEDMYSNITLREYLHQLSQLEENLVRYDKEIEEIATRDRYAKAVEKLCCLKGINTITALSLVTEIGDFNRFSSADKFAAFLGLVPGEYSSGGSINRTGITKHGNTYLRRLITESAQGYSKGTPYTKSWRLKARQSGQEKEIVDYCDRARIYLGKKYFRLKQNGKNGNVCKTAVARGLACFVWGLMTDNIS

SEQ ID NO: 214470 - protein, 467 aa, unidentified
MFAPGRRPGRPAKTRPPFVVLDPHAAGIDVGATVHWVAVPPGTDAEPVRSFGTCTADLEELADWLQACGVTSVALESTGIYWIPLFEMLESRGLVVRLVDARQTRGLPGRPKDDVRDCQWIQRLHSCGLLRGAFRPDDQVVVLRSYLRQRQMLITCASDHIRHLQKALEQLNVKLPEVVADITGVTGMSIIKAILAGERDPARLAKLRDQRCKQDEQAIARALYGNWRAEHLFCLRQALELYEFYQQQLAACDRQIDAQLQTFADQSAGAPMPPRPAGKRKMRRRYKGNVPGFDARARLYRMSGVDLTQIEGVEEGTALVLLCEIGLDMNRWPTEKHFCSWLGLCPQHKISGGRVLSRKVRPGVNRAAQALRLAARSLEHSLSALGAYFRRLKARLGAPKAITAAAHKLARLVYSLLKHGQAYLAKSLEEYEREHHERQLRNLRRKAHELGYKLVQPGQVATAPMPA

SEQ ID NO: 214471 - protein, 320 aa, unidentified
MTILDSQVVVGVDVAKDEIVVYRSDLQKPLKVANKRTSLKQWLKTLPMNSAIALEATNIYHLDTTEMAHEMGHDVYVIDGSRLNKYRDGIGMRAKTDALDAELLARYLSRESDRLRIWNPPPKAYTQLKSLLRRRAQLVRGCVALKQSWKNEPLLKEQFNQLLVAIAQFEKTIQKTLKEIAEDAGMQDQVKRCQAVEGVGLLTATAAATAFLRGEFANSDEYVAFLGMDPRVRQSGQKDQRRRLSKRGDSEFRRLFHNSAMAASRSPVWKPYYQSYLARGLKGTQALVILARKLARVMFALMKNQSEYTPNSMLGGFPQT

SEQ ID NO: 214472 - protein, 377 aa, unidentified
MEGAPMLDTTTFVGLDVHARSIKAVSLDVMTGEARCATFGYDAGAVAGWVRSVDPRARCVYESGVTGFDLQKRLSGLGVDCVVGAVSKMIKPSADRRRKNDRNDAEFLARMLSVGNVVEVWVPDDECEAARDLTRALEDARDDLSRSKQRLSKFLLRHGLAFDERTPTGRRKGNWTRAHWSWIESIRFAEGADNDVLAYYVDAVRRAAEEKARLEGLVEAEARKPRWRKGVDSLRCLKGVDTATAADLVFEAGEFSRFGNARSFAAWVGLTPSEHSSGESDRRGAITKAGNKHLRKALVEAAWHYLTCSGRPKGLAKGQAPDPGARRHAAKGVRRLVERREALLARGVHGNKANVATARELACWVWEIGRRAEGTLG

SEQ ID NO: 214473 - protein, 445 aa, unidentified
MADRVRPQTLEVAHPNAAGIDIGAGSHFVAVRPDADETPVREFLSFTEDLEALARWLTQCGVDVVAMESTGVYWIPLYELLESRGFTVYLVNSRHVKNVSGRKSDVLDCQWLQQLMSYGLLSGAFRPQEEICVLRAVARQREMLVQYQAKHIQHMHKALTQMNVQLDHVISDLVGATGQKIVRAIVAGERDALKLAQLRDVRIRASEADIVKSLQGNWRAEHLFALKQAVSLYDSYQTSIAECDAQLAEVLGRLAVHDDAPEPPKSGRGRPVKAEKFDLRKALYRACGVDLTRIEGIDVGTALTMIAEVGPDLSRFKTVKHFASWLGLCPGTKISGGKVLSGASKRIANRLAQALRLAAVAAGRSHSALGAYYRRLSARLGKAKAVRATAHKLARLIYTLMTKGEAYVDQGQDYYEQQHQQRVVKNLKKRALAMGFSLTPVAVAA

SEQ ID NO: 214474 - protein, 416 aa, unidentified
MSGKREIACGVDVHNKFIVATILSSDGLKLQDRFETNLEELLKFKDWLKENGCHKVALESTGNYWLPIYHVLEGSVNFILANAYQIKHIPGRKTDTLDSEWIAEICLKNLISPSRIFSRDRRELRSLTRTRESLIKVRTKIKNRVTHELEAACIKLSSVISDIFGKSGRHIIDGLLKGMDLEKILESIPSKRVRVNKEEIRGIIQANLSHSQIFLLRSHLNMIDSITKQIVEIDAMISDQISSRNEDLRIALSMPGMGFISASTILAEIGDFRDFSSQNKLAAYCGLVPSVYQSAGKLINGHITKHGSPHIRGMIIEVAHAIIQTKRNSKLKKFFLRIKAKRGAKIGIVALARKVLCILYHLLINQETYQDELLGKPRCIKHSSVHSTALMSLDEMIRTIIKAGYEVRKNECLESG

SEQ ID NO: 214475 - protein, 415 aa, unidentified
MCKVIMVGCDLHDATTVLKVADGPDATVRKGFATSNRLAMIEWIKDFASQRGASRIVFAYEASGQGFGLYDDLTDAGIECHVLAPTHLPHTTHSRKNKTDDKDALMILDEVRAHVLAGRTLPDVWVPNHQTRDDREIVRLRLEVATQRTRLKNQIRNLAKRSRLAFPDDFTSSGDWSKRSVAWLREVAAGTTGALREGVRTALASLMELYQAMSAQIQALDQAIKRLSRTERYARSSRKLKLLSGVGTLTAMVFLTELGDLARFANRRQLAAYLGLAPSAFESGERDDRKGHITKQGPPRVRHVLCQAAWAALRVSPEWKSKYDRIRRGSKSRSRIAIVAIMRQLGVEMWQTARSPELDAMLDERDALASQKTKKTTSARAPQKGAAPSTPPSPRPRRGEAEATATRKGLVRHPE

SEQ ID NO: 214476 - protein, 432 aa, unidentified
MKFNQSNKQNQRISRISETTLVIGTDIAKHNHVARAFNYRGIELGKRCLFQNDDNGLLNLLAWAESIKQEHGLTDVLLGVEPTGHYWFPLFHFLRQRSIEVVLVNPHHVKKSKELDDNSPTKNDIKDAKVVAKLVIDGRYTQPQLPEGVYADLRVLMNQRDRLCGDLNRVKGRIHNWLDRFFPEYRQVFKNWEGKASLITLTNFPLPQDVVAAGETTVVAIWKKNDVKRAVGPKRAELLYRKARKSIGLTEGATAAKHELAMYLEQYAMLCRQIEQLMELVAGLVEQIPGATHMMSIPCIGLITVAGFLAEVGDLSGYDHSQQIVRHAGLSLRENSSGLHKGKTTISKRGRCRLRALLFRAALTMVAKNPEFRALHLYFTTRRDNPLKKKQSMIAICNKLIRVLFELGRKQKEYDANKVLGPHREAQLQAAA

SEQ ID NO: 214477 - protein, 345 aa, unidentified
MKIVGCDLHTRYQQVAMLDAETGELVERRLEHESGEARAFYASLEGAVRVGIEATGHTRWFERMLAELGHELWIGDAAQIRASMVRKQKTDARDAAHLLDLLLSDRFPRIWRPTLEERDLRQLVWHRQKLVWMRNAVGNQLHALAMGEGVCRKKKLFTKKGRQELESLVLGRWASHRRQELLEMLDRLDESLHELDQAVEQQAEQNADAVRLMTHPGVGPVTSLAFVLTIGPVGRFERSKQVVSYLGLNPREHSSGGRQRLGAISKQGNPMMRSLLVEAGHTAARLDAELRQDYQRLKLRRGSGVAKVAMARKLAVRMYWMLRSQAGYAQLVRMQGSPWATLVKE

SEQ ID NO: 214478 - protein, 392 aa, unidentified
MLYLGIDIGKNNHVATLIDSQGKTLFKGFSFANTTDGGESLIAKLSHHIKSCSEAAVGMEATGHYWLALYSFLVGRGYAVHVINPILTDGWRKGVEIRKRKTDIIDSFLIADLLRYGNFVETSLADENILSLRNLSRFRCYLVGSIGDLKRKAICILDQTFPEYQTVFSDVFGKTSSELLLHFQTADDFVSITAAKLETALARVTMKSFAKNKLTQISELAAKSFGLKFCKDSFSLQLKLLIEQIRFIEAQVSDVEAEIGVLLTKLNSPITTVPGIGPVTGAAILSEIGDISRFSTPSKLVAFAGIDATVIQSGESSGTYKMSKRGSAYLRKALFQAALVASNNDPVFMAYYQRKRAEGKHHLTAVGAVARKLCYTIHAILKNNTPYIVQNL

SEQ ID NO: 214479 - protein, 417 aa, unidentified
MKKHNNSAMKSEPISKRAKSRGPVQRDTKEVLAELVETLRKKLDPKVEAGSTGEEDRRGKFRPNLDRLTVGVDLGDQWSHYCILGLEGETLAEGQLRTTQQHIAEFFQALNAARVVFEVGTHSPWVQEVICGCGHEVLVANPRLMEGSKRRKRKNDRIDANKLARLGRVDPQSLHPMRHRSKEVRQDLVVLRARDALVAARTELINATRGLVKSMGARLPKCSSPSFAQKVEEAVPVEIREALLPLVRMAAALSDCIQGYDQKIEKLGREKYGHTALLRQVKGVGPITALAYVLTLENPGRFAKSRDVGPYLGLVPKQEDSGESQPQLGISKTGDTMVRKLLVGSAQYILGPFGPDTDLRRYGLRLCERGGKNAKKRAAVAVARKLAVLLHCLWVSGEVYEPLRQGMSPTIASAVAA

SEQ ID NO: 214480 - protein, 315 aa, unidentified
MTKHLPPVNVGVDVGKNQLDLYLLERDRALTVPNEEQAILVLVRSLSRYRVERIVVEATGRLEQPFVRAALAAGLPVIVVSPLKIRRFADVIGQLAKTDQIDARLIAQFAATVKPLPRPASDANAQAIKDLVVRRRQLTSLRTMEKNRREVMPNDLKPSFDRILKALDRELKSLEQLINHAIDQHASSRHKRELLTSMPGIGNCVAATLIGDLPELGSLDRRQIASLTGVAPFNRDSGTLRGKRRIRGGRAHSRTALFLSAMVATRFNPDIKRFYQRLLTAGKHKKVALTACIRKIVTALNAMLRDNLPWRSAIA

SEQ ID NO: 214481 - protein, 423 aa, unidentified
MSPKKENNSTESVVHPICCGLDVHKNTVAACLLRSGENGREYPEQKEFGTFTDDLIMLREWLLAHDCPVVAIESTGVYWQAVHNVLEGYHKVVLVNPKHIKNVPGRKTDMSDSKWLAALLRHGLVKGSFIPAKQQRQWRDLTRLRKSYLQAVGDFKRTVHALFHSANIKIDSVASQLFGATGRNLMRLLCTSKSNLSLAEVESCLCGSLVEKAQELYRSVHGFFREHHRGQLIILLQTIDGLEKQIAKLDRKIREAMRDHQELLKRMKEVPGISDIAAPAILSETGETLADFSTAAAFASWCGLCPGNNESAGKRRSGRIRVTRNHLKTLMVEVAWAAVKKRGSYYKDKFYRLKGRLGPKKAIVAIAHRILKAIYHIIKDGVPFKDLGENFIIEQNRDAKLKYLKKQAKLLGHELIPIPKQLS

SEQ ID NO: 214482 - protein, 382 aa, unidentified
MDDAGTVLWSRRVPNDQAAIEAIVDQACRVESVVWAIDMTAPESALLRGVLSRRGQHIRYVPGRVVHSMTGAFAGEGKTDARDAVVIAQTARLRGDLATVAVPDDVAIELDLLTGHRRDLVTERTRGINRLRGLLTRIFPGLERCFDYSTLTGLAFVTRFTTPSAIDGVSDEEIYDHLRGQGVRRPTIPKMISKARAAAAAQTVALPGEATTALLVQQAATSLMALTRQITYLDKQIAEVFRRDRHARILESVPGIGTRSGAELIAFTGGDLTSFGSAAKLAAYAGLAPVPHDSGNRRGTLRRPQRYHRGLRKVFYMAALNSSQRDGPSREFYQRKRRENRSHVHALISLARRLIDVVWALIRDGREWTPRGAGPPIAEAAA

SEQ ID NO: 214483 - protein, 418 aa, unidentified
MEPNRYRHYIGIDWATEAHRICLLDHHGQLCAKVSIPHSGAGLDQLLEWLASYGVEPAFAAVAIETPRGALVETLVERHYAVFAINPKQLAHFRDRYTSAGAKDDDRDAWVAASALRTDEAAFQRVTIDAPELIQLRELYRIADELREEVQRLTSRLREQLIRYYPQMLVLYSAPDQPVLWDLLELAPLPVTANQLTVPQVEAVLRKRRIRRFTSGQVLEQLRATPLTLANGAAAASSEHALVLVTQLRVVYELRQQTLKRLASIVKKLCQATTESGAPSDAAIIASLPGAGVLTTAALLSESSRSVAERDAPALRAYAGVAPVTQQSGKTLKVSMRYACNNRLRNAVYHFAMGSLRDPVARRHYDRLRDDGHSHPRALRGVADRWVTVLMAMLRSGTRYDATRRKAWIAADAVGATA

SEQ ID NO: 214484 - protein, 440 aa, unidentified
MRTDVAGMDIGSERHWVCARTEEGGGREVCDFGATTPELVRMAEWLKARRVQSVAMESTGVYWIAPHEVLEGHGLEVLLVNTRQLAQVPGRDQKTDPTDCEWIQRLHSCGLLRGSLRPAEEICMLRTLVRDKATLVAESGDWVRRMQKSLDQMNVRVHRAVSEISGTTGMAIIRAIAGGERDAGKLAQLRDPHCHKNEKEIAEQLTGHWREDHLFSLSQALKMHDAIEERISAYEKEILRKLAEMEREGQRGKNSPPLKNTNKARMIKKRGQEPKRQALYRMSGVDATQIDAIGVETVEVIISEYGPDLSRFPSEEQFVSHATLAPRIPRSGGKPLKKKKRNSASTRVATALRMAAQSLRHSDTALGAYYRSTARRKGPGIATFAAARKIATLIYRLLRWGQPYIDEGAEAYEKRYQLQRFRGLESRARQPGYRLTPLTA

SEQ ID NO: 214485 - protein, 326 aa, unidentified
MKKISFVGIDVSKDTLDVCVKVAGVKTDSKIQNETAAIRKLLKPFIGKEVIVAMENTGRYNWPLYDVLAQMPFRVYVISPLHLNKSLGLARGKNDRVDASRIVDFIEKNHTELRVWERPSDTIVKLKILLTERALRVKIKRQLLCAKKDYARMKGFGLDKQLNKLNIEEVERLEKQIRIIEQSIVSLLKSDNALCKQVKLIQSIPGIGKILCWAIIAKTQGFTIIDSPRKFACYCGVVPFEHQSGTSVFRRPKVSLYADKAMKSLLHMGAMTAIRCRSDMQDYYNRRVCQGHNKMSVLNAVRNKLIHRVYAVIKNQKPYEYNLVVS

SEQ ID NO: 214486 - protein, 336 aa, unidentified
MKKYIGLDAHSSTCNFCVMDGTGKVLDAVKITTNGRLLREYVKGISGEKKLTFEECELSSWLYEMFKNEDCELLVCNPVENRNYKKAKTDRIDARNLADLLRGNFLKPVYHDGSTREKFRDLMSGYQQLVDDAVKVKNRYKSLFRKGGKRHVGIRLYNDENLLEEFDRKDLKFVGVQTYELLREMEKRRKEYIIEIKKHSKKFKEIKVLKTLTGIGDIQAAKIVAQVVNPERFKNKYKYYSYCGLVRHRQISGDKAYGDKKIWGNRTLKCAYKMAAHSALKGNNVFRKYYDNLRSTGTNHKCASNAVSRKIAAISLVLWKNNVRFDPKMVTNSIIE

SEQ ID NO: 214487 - protein, 385 aa, unidentified
MRNNAFVPSDYDVFGGLDVDKRSISVTFTNQQGHIRSLRMPYSVEHLVNHVRKHFPDQKVVFAYEAGPTGYGLYDGLVAQDYPCLIASPSMIPKAPGQRVKTNRLDSVGLAENLRGGQLKSIHVPSPVYRELRHLTQLRDTFVSAMVGMKLRIKSLLLLEGIEFPPAPAGSQWSFMVKAKLRKLPCSGTVRFKLDELLDSLEFNEKRVVKTTQQIRRFCQNDPELSRCMEYVMSVSGIGRIVASQLLARIGDWRELKNIRQLGGFLGLVPTEHSTGDRTDRGSITQTGDGRLRSKLIQASWSAIRQDSELREFFASVCKTHARHLASRVAIVAVARKLSVRISVVLMKQRPYVVREKVHSAPVTQEETSPQGTTRREPEPGETNS

SEQ ID NO: 214488 - protein, 350 aa, unidentified
MMIIGCDFHPRFQQIAFVDRETGEYGERRLNHPEEAEQFYRSLFGRPVRIGVEATGNFRWFRHLMEELGHEFLLGDATAIRAACPRRQKTDKRDARHILNLLVEDRFPVIWQPSAENDEMRQLLLHRCRLVRMRTRVQNQLDSVAKNEGLLSSRVWSAKRRSQIEALPLPGWYGHRRADLLGLLEELNKRIKPLDEAVCKAAEGNPEACLLMTHPGVGPIVSLAYVLTIGDWKRFPRGKQVGSYLGLIPTEESSGNMRRLGQVSKQGSVLVRWLLVEAAVHAQRHDPSWHRQYVRLSMNKHHGVAKVAIAHKLAVRLYWMLRSGDDYSKVMERSSHAGSPCSAVASGPRG

SEQ ID NO: 214489 - protein, 346 aa, unidentified
MSYRIAGIDVHKKMLAVVIADVEGNGEYQFERRKFLTTTEALRELAEWLNQQTVEEVVMESTAQYWRPVWGMLEQCWQPVREQRPGSVRRLHLAQAKSNAGRRGRKNDFPDAERLVKRLVARELILSFVPCPAQRLWRTVARRRNQLMEQKVQLQNQLESLLQEAHVKLSSVVSDLFGVSSRRMLTALSKGERDLNALTGMADASLRATPAQLRDALSACRDWDSTYPELLRMVLEELKLLEKQMGELEKHAARLMAPHEESIQRLVEVPGLRSISALQIVAEVGPGAETFPTADRLSSWVGVIPGEQVSAGENASTQSPKGNCNMGAFWTRRRTRRSRREEASSR

SEQ ID NO: 214490 - protein, 343 aa, unidentified
MQTITTIGLDIAKSVFQVHGVDAAGQVVIRRQLKRRYVLAFFQKLPPCLIGIEACASSHYWSRELQALGHTVRLMPPAYVKPYVKRQKNDATDAEAICEAVARANMRFVPTKTPEQQSCLMLHRTRHLFIRQQTAVINSIRAHLAEFGIVAPVGRKGVTELLHIVADPSDKRVPEVARACLVALGNQLLSLKEQIVEFDRMIMVWHRSNETSKRLHYIPGVGPLLATALVASVADPRTFRSGRNFSAWIGLVPTQHSSGGKDRLGSISKQGDRYLRSLFVAGALAVIRYAKIHGTKHRPWLTALLARRPTKVAAIALANKLARMAWAMMARGERYRQPVALAA

SEQ ID NO: 214491 - protein, 316 aa, unidentified
MNSVILGVDISKRTFDVALLINSKVKTKKFDNNSKGFSSLKEWLKGKEALTAHVCMEATGCYGTKLAQYLYDNNFKVSVVNPARIKGFSMSQLSRVKTDKADCQLIAQFCQAMQPDLWQQKPIHIQKLQQWVNRLDTLITNKLQESNRLGDIDPEIAADIQFHIDFINERIKEVEKLIADHITQHEDLNDKRQLLASIPGIGEKTIAVVLAFLSVENFDSAKQVAAFVGLNPKPKQSGSSVRGVGRISKTGDADLRKAFYMPAVVSIRFNPIIKDFSQRLADTGKPKMVIVIAVMRKLLHIIYGVLKTKTLFNANI

SEQ ID NO: 214492 - protein, 378 aa, unidentified
MTAILQENDTAIDGTLYMAMELSNKKWKLGFSDGDRCRIKSIDAGNWTGLLDEINQAREKYKLSFGCRIASCYEAGRDGFWIDRALKEAGIENQVIDSSSIEVSRRSKRVKTDRVDVKALLRLLMRYDHGEKAALRSIRVPEISAEDQRRINRERERLIKERGAHSARIKSLFKLHGINLERMSEFPALIQTAKGAVTGYDLPVDLKIELQREYQRYQLVDQQIKAIEKEQIERVAEDDELALQKINQLRRLKGVGWQSSWILIMEFFNWRDFKNAKQLGSCAGLTPTPYDSGDSTREQGISKAGNKRVRKLMIELSWLWLRYQPDSALSRWFETRFGKGGKRMRRIGIVALARKLLIALWRYLEHGALPEGAILKAI

SEQ ID NO: 214493 - protein, 344 aa, unidentified
MITIGIDPHKDTHTAAAVDDATGQLLDELTVPGTEAGHQRLISWVQQMSDGQDRRFALEDCRHVNGRLERFLVGAGEVVLRVGTRMTAQARQSARTYGKSDSIDALAVARAALREPCLPQASHDPKLRELKLLVDHREDLVGERTAIVSRLRWHLHDLDSGLEPFARTLNRDATRRGLSQRLGRYGSGVQVRICRELLVRIGELTRHEAALRTEIAERVRPLAPGLVAISGVGDLIAARLLVETGGPGHFASDAALARHAGCAPIEVSSGRTRRHRLSRLGNRKLNAALHQVVLTQVRVHPPARAYLAKKRAEGKSTKEAFRCLKRHLVRVVFRALQEAVPGPA

SEQ ID NO: 214494 - protein, 351 aa, unidentified
MEYVGIDWASRRAAWCALDSAGELLGEGVIAADLDGLTGLVARRGLEVSAAVEMMSGAVWVADTLRAAGWRVQVADARKAKALAPLAAKTDRIDARVLAELCRRALVPELWVASLDDRALRERLLRRMHLVRLRTSAKNRIFGLLSQWGLRVSVKRLRQADGLLLLERLALPEVWRASIGEALAVVELLDERIGPIEAELAPLAKADGRVQLLRTIPGIGSLLALTFAAEIGEIARFPSPAKLVGYSGLVPRVHQSGESSRTGRLSKAGSPLLRWAAVEAAQQAWRPHNPWHRLYVDVRRRQGNGNAAKAAVARKVLIACWHVLARNEPFKPAARSAAPIVPASSSSSLAA

SEQ ID NO: 214495 - protein, 391 aa, unidentified
MSTYFVGIDISKYKHDCCIINAADQIIVAKFTIKNDKDGFNELLTSLQSLSTPEDIRIGFESTAHYALNLELFLEKAHHSFMEVNLVLISEYKKSTSLRRTKTDSVDCESIARWLMTVEYKPHSKGFYHAYSLKSLTRLRDRLIRQRSFYLVKITNVLDHTFPEFKPFFQERFSKTALYLLENYGSAEKMARMNSTSYDNLRRISRGKFTPQKFLQLKALASNTVGVNNSIFDTELTCLLTLYKEVAKQISVLEEQITGLIVDVHPHYMSIPGIGPISAAVIYAEYGDLSNFSSPAQMLAFAGLEPGISESGTESHKGRMVKRGSSQLRYTLMNYALPLIRFDVTFATYYAKKRSEGKPHRVAISHVTKKLVRVIFALERQNTDFVATALR

SEQ ID NO: 214496 - protein, 412 aa, unidentified
MTQLQSEYLYRVGIDWASQHHQVCIVDREGHRTEDIVPHTSAGLAALAEKLAALSPGAPERVAVAIEVPRGPVVETLLERGVHVFALNPKQLDRFRDRHSVAGAKDDRRDAWVLADSLRTDQPSFRRVHVDDPLIIELRELSRLDDDLREELSRLSNRLREQLQRVGPDLLALCPAADEPWFWALLDLTLARRPKPVAIKAVSAVLKTHRIRRLTAETVHAALQVPPLRVAPGTLEAAGAHIAVLLPRLRLVHDQRHRTVGTRIDRVLAELANEDVPGEHRDVTILRSLPGVGRLVAATVLAEAARPLAERDYQTLRTQAGAAPITRQSGKKAAVMMRWACNGRLRNAIYHWARVSVQVDARCRAHYDRLRQRGHEHARALRGVVDRSLAVLMAMLTSRTLYDPERRCAKPA

SEQ ID NO: 214497 - protein, 346 aa, unidentified
MNNLNVIGVDLAKNIIQVSVVTPAGKELQNKALTRNKFSAFLARQKPSLVAFEACATAHYWSRIAHLHGHTAKIIPAKAVSPFRQGHKTDSNDALAVAEAARRPNIKEAPMKTVEQQGIQAIQRSRELLVHDRTALSNHIRGLLLEFGIVIPQGFAALHRRIPEVLEDAENELPDLYRPTLNLLYGRLITIKDDIDVLNVQITALVKQNVACDRLTKLEGVGPISSVLLYATLGTGEAFANGRQFSAYLGLTPKQYSSGGKTVLIGISRYVANKRLRSVLIQGARAYIHRLKDPKTPKERWLWALIERAGYGRAAVALANKNARTAWALLTQGEEYKREYEAPLAA

SEQ ID NO: 214498 - protein, 450 aa, unidentified
MYARGHAIQHKRDERRRGRKYHFGVHRQMGILKIGKMREGRLLRQNVGIDVSKSSFEACYTTIDMEGVVRHKASRKFKNTKVGFEEFLRWSERVSDPNLELHFTMEATGIYHEGLAYFLKERGKRVSVLLPNMVKKYAGSLNQRSKTDKIDAKVLGRMGVERLLPEWKLSSPIFRKLRKLTRERVRLLDVRVRLSNFLESEEHSGEPHRPTIDRLEEHVKYVNKQIKRVEREIKDLILQDDVVSRRMKYVLSIPGVGLLTFAAIISETQGFDNFRNLKQLYSYAGYDVQQRESGKYKGRSRISKKGNRYIRRALYMPAMAVIRHSETFRRFYERIKERSSSRMVSLTAVQRKLLGLIYTLYKKEVQFIDNYDLQKEPNQTNEPSQNNTQPEIQPQNTPSSEHIENKKSGEGNQSPTTQDRQDDALPSFSNAKLQNRHKNEDEKINTYLGT

SEQ ID NO: 214499 - protein, 421 aa, unidentified
MIQVSHEAFAAFVGIDWADAKHDGCRQVAGSAKRDYCQLEHTPEAIDAWGTTLRMRCHGQPVALCLALNKGPLGSALRTYDFLVLCPIHPLTLARYREAFTPSRAKDDPTDAALQLALLLPQRDKLQPLNPQSPTMRALAQLIAPRRRVVGDTVRITNRLPSPLKNYCPHVLHGLQEKDTAIFCDFLSRWPTLKAVPLARRATLATFFRAHHVRYAEVIAQRLQAIKAAPPLPTDAGVMAPHALLVQALVAQLRGTLQALADCDTAIAQRAQSHPDFPLFQALPGAGPVFAPRLLVACGEQRERYACAADLQKYAGSAPVTERSGTKSWVHGRLQCPKFLRHTFVEWAAESLRPSFWAQVSYQQPRDKGKAHQAAVRARAFQWIRILSRCWQERTPYDAAIYLQALHRRGASLSQTLAKAS

SEQ ID NO: 214500 - protein, 430 aa, unidentified
MRLTARPGRKGDRVAETFEWFLGIDWGSEAHELCLLDAHGRVCGTRTVAHTALAVHDAVQWVREQTGTAPAAIAVGLEMPRGVLVDTVIEVGFSVFAVNPKQLDRFRDRFTAAGAKDDQRDARVLADALRTDRRAFRRVRPDDPLIIQLREVTRLREDLQEDEGRLANRLRDQLYRVDAAWLAFSAAADEPWLWAILAGAPDPATWVQLPRRRVAAALRAHRIRRLSADAVLEQLRQPRLTVAAGVTDAVATRIAALVPQLQVIYEQRLIAERRIDRLLERLATVAVDAEPREHRDVEILQSLPGVGRIVTATMLTEATGPLTERDYPTLRAHAGAAPITKRSGKRAFFVHMRYACKRRLRQALYHWARTSIQRDAAARAYYDRLRLRGHSHARTLRSVADRWLRILIAMLKTGTLYDSSRFVSAVEIPA

SEQ ID NO: 214501 - protein, 401 aa, unidentified
MEGPIVSIDVSNGNSHYMCFIKNNKRFGKVKKIDHDIEGFKRLLEDIQKLEAETNEKVCAVFEATGVYTKPLERFLSKNSIKTYMINPLESARKRKEEIHNKKTDKLDPISISKVYYDKEEMMELKKKDETYNWLRKKNRLYEDQLNHLRKYKVTFQNQLSICFPGYLDLFKDGYSDIPMTILKKYPHPDLLKNKKAETVARYLEKNTCHNHKVSLEYALKIIEFAKKTYPGCEKDDVEVEIFKILLDKVIETQRECEKTLNEMITVASTLEEYRYILSIDGIGTNLAARIIAEIGDIEEFKSREALVAYAGLDPHIYQSGDQDGKHLKISKKGNKYLRCLLFLAVGCSIRGAKDNPVNQFYQKKKQQSNPLNSKAAKTACTAKLLKIIYGICKNKTTYER

SEQ ID NO: 214502 - protein, 408 aa, unidentified
MNHTLCVGIDVAKLSNHVYALNFNRDKLLSVNIPNTQDGANLIETHILKLLDKHHLSKVIVILESTGVYSGHLATYLSASKFLSVFDIKVYLINPKISKNYRKSFADMDKTDPKDAYILADIARVGRTDELTPFKGGQRLALERLTRHRLHIAEKLSNEKVYALNNVFIKFSNFETIFSNNFGSTAVDLLLDYKTIDDIIDSSLEDLSDFVAKSSKNRFDNSLDIAAKIQKAARDSYRLDKVSYDPINTALASSINVIKCYEHEMKDIDKAILRQVAGFNHDHYQILTSIPGIGKVYAAGILAEIVDISQFESNDALAKYAGITWRKNQSGKFTADETYMTKTGNKYLRYFLIQAANMARIHIPEYRDFYHKKYDEVTTHQHKRALALTARRVIRLIYGLLSTNRLYK

SEQ ID NO: 214503 - protein, 458 aa, unidentified
MYRELQPFREALSHELKASLFPAAAGIDPNKLLETYLDRLTMFTGVDVADQTFTSLALDAGREILGSLEECPNEPAGFEHFMAWARDLRDQHGLRIIAIAGETTGIYYWALWDFLREQPDVARVLYNPRTTEHMGEVLSKKVRNELVDALLLAEQLRLGSTPEVLLQDDADLLTARYYSRAARDLAQQINRKKNQLRALLRAYSGPVCQVFPREKLHHPAVYALLQEHVFPADFLHAGAETLTTILTTYCRDIFGPADAEQLLTASRQAITRPIGQEAIRRLVHAHIQDITTFQERKALYLKAGYALIKDRTETELLRTVKGAGVSNTLALVSEVGDAARFASGEHMASFLGLTTSKHISGATLFQSKHITKQGSPNGRYAAVNVAQHLTRWVPRYQKMYQNIKARKPPRKGHFIAMVAVARDFVSNVLYDMWRNQRPFFVEVSDYRSYRQKRSRSSD

SEQ ID NO: 214504 - protein, 377 aa, unidentified
MREKLRFLGMDVHAETIAVAVAEPDGEVRSLGTIANREDSIRKFIRKLGSPEQLRACYEAGPTGFVLYWQLTQLGVKCDVVAPSLVPKKPGDKVKTDRRDALKLARSHRSDDLTAVWIPDEASEALRDLVRAREAAKRDQLRAQHRLTKFLLRTGRRPPLGVKVWTERHAEWLQQVCYAHPAQEATLLDCLHEVQHMAERVKRLENSIVEVIQLAPASMQEVIRGLQALRGIAHISAVTIAVELGNITSRFEHARDLMEYSGAFPDENSSGKRIRRGGITKSGNAHLRRIVVESAWSYRHRPAIGARLRRRQEGLPAEITAIAWKAQNRLHKRYMTLMARGKEQRKTMTAIARELLGFIWAIGIQAEASVCKQQMAA

SEQ ID NO: 214505 - protein, 423 aa, unidentified
MEVIHERVAGLDVHKDSVVACVRIMSGGKAKRECRTFGTTTAELEALRDWITSWECTLVAMEATGVYWLPIWKILLGGAFEMNIANARHIKAVPGRKTDMNDAMWIADLAAYGLIRASFVPDEEFHELRTLTRTRKQLVRDQTSHVQRIQKTLTEANIRLDSVISDIMGVNGRRMIEAIIEGVRDPVKLAALGDRRLKATRKELHDALHGRLTDHHRFLLKLHLDQHDALEKTIRVIDAEVERRIARLDKQAKPAETPLSRLIELLVSIPGVSYLSAITIISEIGSNMSRFPTAGHLIAWAGLCPGQNESAGKRKRSRLRKGAPWLKTMLVQCAWAAKRQKNSYYRAQFYRLQARRGPQKAICAVAASILTAIYHILKDGVPHQDLGIDYFDKRKPEAKVKRLVAQIAKLGFEATLQPIAKAA

SEQ ID NO: 214506 - protein, 408 aa, unidentified
MKRYYMGVDWGDRLHQVYVGDEEGKKVREIKVQESPEGLAEIGRWLDERRAEGIELWAAIEKPAGRIVDFLLDHGVEVYPVNPKSLDRVRDRYRMSDSKSDGFDAYVLAEFVRTDQAHLRALRPNSEKAQELKMLSRDQRRVVRHKTRLLHQLTTTLKEYYPRPLEVFEDLETEIALDFLKQYPTPAYLNALKRKEFNRFATKQHHLSKQRCEQLWEKLQKPQLAVPDHVVRAKAQWVEVLIEQLRASIKAMKIYNHKVESFFASSPAAQVAKTLPGAKSGTLVAAIWAELGDAQGRWQSSRHLQAEAGAVPVTQASGKSRVVHFRFACNKHLRHTMYWFSFVSLNHSQWAKLYYRGQRDKGHSHHQALRALGAKWLKIIFVMWRDHKPYDENFHLANIALQKMRQAA

SEQ ID NO: 214507 - protein, 363 aa, unidentified
MAMKAMTLVGLDVHARQTHAAVLDPTSGEIAVSRLRMAPLEVASFLEDLAPAVRAVYEAGPTGFGLARAAREHGIDVRVAAPGSIPRGPGDRVKTDRRDAIRLVRLLAAGELSFAFVPSVADEQFRDLVRAIEDVRGDLMRARHRLGKFLLRHGERYPGAGHAWTGAHMKWLRALSLPDPCSRATFADYLASVELLIGRRASLLAALEQQIPECSHAPVIARLRCFRGIDTLSAAGLCAELGHFARFPRPDQLAGFLGIVPSERTSDTKRRQGAITKAGPPHARRLLVEAAQHYRHRPAIGQKLARRQAGQDPRIIEIAWRAQRRLHARWQHLHQHRRKPAGVVAIACARELSAFLWEAATLD

SEQ ID NO: 214508 - protein, 394 aa, unidentified
MKLIGIDIGKNKHFFCIMDQQTGEIISQPISFSNDKEGFDFLVQKIKSYPKDSILIGMEDTGHYHFALLKYLLDLQYTVALINPKTTDFNRKMQGGITKNDKLDTINICDVLDTPERKKQYRITKVNSFDLYEQKQLTRHHHNLKEEENVYKNRLQKCIDIVFPEFNKLFNSKYGIVYMNILKMFGSAENIANTDIRTIRKCFEIEGRGNRISLTPERLKECARSSIGISSSAEVIQIKHLTAQIELIEEQLTEIDKKIEEFSIQNNSPILSIPGISHFSGTSILAELGDISNYSKPSQIIKFAGVAPLHYESSQFNAQHTAITKKGSKYLRKTLYQIILPVIRHNPVFTKYYQLKISQGKGHRCAQGHCVRKLIRIIYHLLKTNQQFDPQLLR

SEQ ID NO: 214509 - protein, 365 aa, unidentified
MAIVGGFDIHRRQVTFDYLDTITGQVRRGRITPACRETLRHWLERFAGCEDVTFAVEGCTGWRFVVEELQRAGITALLAEPAETAERRGPKRRAKTDKADARHLRTLVAEGRVPCSWIPPEHVSELRALLQLYADLRQEHVAWAQRIHATLFHLGVPSLAGQLSDPEIRARLAGAGTETGLSPAGAQAVQVALKMMDHLETELAPVHAQIRAFARRQPGCKALARELYGVGPLVAAIIWAFLGDARRFSSSAQAVRHAGLDVTVWSSDGKGPPGHLSHQGPPILRFSSAVAVSGCIGVAFHRRSRRADGAVVVPPLCLLSDARAGGGYGARHMDGLGSRCLAGERRRGGSPSAARTGMPARAAGG

SEQ ID NO: 214510 - protein, 362 aa, unidentified
MSRSSWLVAGIVPGVERQPLKKLEPDEAALLRLLERWCGEAAKAGRTISRVAVAYEAGRDGFWLARWLRARGIEAHAIHPSSIAVSREHRRAKTDRLDTELLKRAFLGWLRGERGHCSMAAVPSLEEEDAKRPSREHESLVAERTRIVNRIKANLARLGIRGFKPLLRSAAERLETLCTPEDVGLPPNTLAELRRDMALLHFVREQIQQLEDARTERLEKAPGGGGNVMVRLLAQVVGVGLETADMLVHEALSRDLRDRRAVARYAGLTGSPDESGASRREQGLAKAGNARVRRGMIQLAWRFLLHQKGSALAQWYRARTADARPGTRKTLIVALARKLLIGLWRLVTTGEVPEGIVLRPAI

SEQ ID NO: 214511 - protein, 391 aa, unidentified
MSLYFVGIDISKYKHDCCIISATDQKVISKFSIKNDKVGFEELITTFNSLSSPEDIRIGFESTAHYALNLELFLENAHHSFMEVNPVLIKEYKKSTTLRRTKTDSVDCESIARWLMTVEYKPHSKGFYHAYSLKSLTRLRDRLIRQRSFYLVKITNVLDHTFPEFKPFFNERLSKTAIYLLENYGSAEKMANMNSVSYDKLRCISRGKFSIQQFLRLKELAANTVGVNNSIFDIELNSLLTLYNSLCKEIKTLEAEITRLIEEVHPHYMSIPGIGPISAAVIYAEYGDISNFSNPSQMLAFAGIEPGINDSGTESHGGRMVKHGSSQLRYVLLNACLPLIRFDLTFATYYAKKRAEGKKHRVAITHVAKKLIRVIYALERQDVDFNAQKLR

SEQ ID NO: 214512 - protein, 400 aa, unidentified
MLSIGIDVSKGKSTVCGMKPRGEIVYTPFEVQHTREGMSELLSLLRGSGEEVRVVLESTGSYHCPVVAALLENGIFVSVVNSLRMKRFCSQSIRRVKTDQIDAMQIALYGLAYWQELQPTRLPENTYRELQLLARQYYQMTSLLIKAKVDFNALCDQVLPGMQELMNDHAGRHKLSDFVLRYRHTTHILEMGETRFRKDYCKWAEKKGYRNHERMAALIFATAQNGIPVLPNAPSTQIVITEAIRVLHTVEASRDAILTQMQALAKTLPEYSLVREMPCIGDTLAPRLIAEIGDVRRFHSKRALIAYAGIDAPPYQSGKFCANNRHISKRGNRYLRKTGYEVMQSYVMHKPANDPIFTFIEKKRSEGKSGKLAMVAGLNKFLRVYYGKVTELYRSLPAIE

SEQ ID NO: 214513 - protein, 480 aa, unidentified
MNVQVNGTGQVPVRRLAGIDLGIASEHTVRVLDGAGNKVCAARCVPARESLLAMEARALAGTPPGTRLEVILEPTGAAWFPVARFLSARGHTVYRVSSAKAADLRKFYRRHAKSNGIDADTLARVPLADPDGLIKLDLATGDEAVLDRRVRACDRLTQQAARHKTRIKDLVRQLMPMTPLTGDLGKADLAVLDRYADPRALLAAGPAPLTTLISAASRGHQGQARAAQWAAAAQAAIELYGPDDPAVPFADLAAEVATEIRLLQAIEAELTAHAAAREAAYRTVDPAQIARTLPGLAEVGGPAMTAIMGKPGRFPGGHHFKSFLGLAPRASETGQTDRKGEPMTKAGPSLGRATMIRAADTARKLDPQLARIYYTQMTERGASHLKACCVVAGHLALRLHTAMLRGAPYQLRDTDGTPITPGQARQIIAANWTVPDDIRKRRRSRKNKGRTPQQASKPVQRGGPPRPGSPPGHPPVKPAP

SEQ ID NO: 214514 - protein, 427 aa, unidentified
MARQRKGETHMTNTNRRWFVGVDWASSKHDVTLTDDGGKIIGRRIFAHSGDGLRQMADWLVCESGALAGDIHVAIETPHGAVVEVLLERGFNVYSINPKQLDRFRDRFTVAGAKDDRRDADVLASSLRTDAQAFRALMPADPAIVELREWSRMAEAHGQDLRRYMNRLRDQLQRYFPAFLALGGEDDAAWKLALLELAPAPAMAHSLPRAKVARLIEAHHVRCHDADAVLAILRAPAPTVSQATIAAASAHVRTLLKSIRLAVEQSKEANAMLDRLTKALAEPEESAPGQTVQRDAAILRSSPGIGRIILATLLAEAPQAVRERDYHALRCNGGIAPVTRQSGKRRYVVRRLACNRRLRNALYHWARNAIQKDARIRARYEALRARGQSWARTLRAIADHLLYIACAMLRSGTLYDKNHGSEAIKSA

SEQ ID NO: 214515 - protein, 339 aa, unidentified
MELYAGLDLHSRNTYIGIMDNAFNRVFKKRVPNHLELILQTLDPFRDQIKGFVVESTYNWYWLVDGLMDAGYSSAHLANPSAIKQYEGLKHSDDQHDAFFLAQLLILGILPQGYIYPKKGRPVRDLARKRMFLVQHKTAHILSLQSLIARCCAMKVRANDMRHLTVKELEEWLKEEYLVLSAQANLDSINFLKQKVKQLEKAIIQKVKLNKEFKYLLTVPGIGNILAMTIMLEVGDIKRFPKVGNFTSYCRCVPSRRLSDGKSKGHGNRKNGNRYLSWAFTEAVHLGRRYNERFRRYYNRKVAQANTSLATKALGNKLARICYYIMRDQVPFREELFCH

SEQ ID NO: 214516 - protein, 341 aa, unidentified
MTQQVMAGIDLHSNNAMIGLVDQDGRRLGHKKVDCNLQQVVDFLSPWKDQLKSIAVESTFNWYWLVDGLRDLSYPVVLANPAKIEQYSGIKHADDKNDAYFLAELQRLGILPTGYIYNPQLRPVRDLLRRRMLLVQQRTALMLSFKSLYSRTTGAEMTSKRLKELEVSQTRDLYSHPANQLIATIQKQQMDSLSGSIAKIEKAVLKSARELPYYPKLQTVPGIGPILGMTITMEVGEISRFPSPGDFASYCRAVDSRRTSNDKSKGDNNGKCGNKYLAWAFVEAANFARRFDEQCRKWFDRKAARTSNVIATKALACKLSKASWHVMAENVDYDSKRVFGA

SEQ ID NO: 214517 - protein, 370 aa, unidentified
MLNVTTFVGLDVHARSIKAVALDAMTGEVRCAAFGYDAAAVADWVKAIDPKAKCVYESGVTGFDLQKRLAALGVDCVVGAVSKMIKPAADRKRKNDRNDAEFLARLLFVGNVTEVWVPDDECEAARDLTRALEDAREEVARSKQMLSKFLLRHGLVFDETNPSGARKKNWTAAHWAWIKSVSFAERADNEALAYYIDRVNQATEDKARLERLVAAEASKPRWKRRVDSVRCLKGIDVTTAADLVFEAGEFSRFKSARSFAAWIDLTPSEHSSGEGVHRGGITKAGNRHLRKDLVESAWHYLSCSPHSKDLARGQVPDPRARSHATKGVRRLVARREDMLARGLNKNKANVATARELACWVWAVGRMAESA

SEQ ID NO: 214518 - protein, 351 aa, unidentified
MNSITIGMDIGDKKHVVCVLDKTGHVIDNCTIDNDKKSLRTFFSKYKGATVAIEASAHSPWISRQLASMGCKVLVGNPRKLRVIWDSNNKTDVRDAEMLARIARFDPGLLYPITHRGKQAQVDLELLQARDILVKNRANLINHVRGSVKSLGSRLSSCSTESFHCQVSDHLPEELHDTLKPVLDIIEEVTTQIKAFDKEIEQISKERYPETELLRAIKGVGSLTALAFILILEDPEKFDKSRQVGSFVGLIPRRDQSGEIDKQLRITKAGNPYLRRLLVSAAQYILGPFGEDCNLKRFGLRLAARGGKNAKRRAVVAVARKLAVLLHRLWRHGEIYNPLYKTQPQLLAKAA

SEQ ID NO: 214519 - protein, 360 aa, unidentified
MTGTMTWAAMDVHARSTYAASLDVVTGELSRQRFDTGAVEPVVGWLAGLPGPVRCCYEAGPTGFGLYRAAVAAGIDCQVIAPSKTPRPSGDRNKSDRRDTDLLLRQLMAGGLTAVVVPSATCEAARDLARAREQVRVDLMRCRHRLSKLLLRHGRVWDRSAWTKVHREWLSAQTFEQVNTELAFIDNLAACDGLTARKDALDERLSWVVSDPEFWPLVRRFRAFRGIDTLSALIVTLEVCDFARFSRAVQLGSWLGLVPSREQSGESDHHGSITKTGSKYARRILVEAAWHYARPPRIGRTLYERQEGLPDHVLQIARRAQSRLYRIHRRMRERKKPGNVITVACARELACFLWVAATAL

SEQ ID NO: 214520 - protein, 381 aa, unidentified
MTTTATHNSHDTTTERVLFVAFELSEKTWKLGFTVGHGQKPRERTVAARHQARLLQEVAQAKKRFGLPETAPVVSCYEAGREGFWLHRFLQAQGITNSVVDSSSIEVNRRKRRAKSDGLDVRKLLSMLIRYEYGEREVWRVVHVPSVEAEDQRHLHRDLETLKQERASTTTRIKGLLSSQGIRLTSLRQFPEQLDALRLWDGSPIPSGLRRRLLRVYAHHEFLSQQITELEAERRALLESSQDASIEKVRQLMHLKGIGINGSWLLIMEFFGWRDFTNRREVGGLAGFTPTPYQSGESAREQGITKSGNRHVRWMTTELAWSWLRYQPESALSCWFRERFGGGGKRLRRIGIVAVARKLLIALWRFLKTGVLPEGAVLKEA

SEQ ID NO: 214521 - protein, 342 aa, unidentified
MRFYCGIDLHARDCFLCVIDDQDKIHLKSKVSNHLPSILDRLEAFSSRPSVVVESTLNWYWLVDGLQEAGFEVKLAHTLGLYMITGAKVKTDRRDAFTLARLLRLGAIPEAYIYPKDKRPIRDLLRRRKRLVFLRAAVYGDLRRTLLQHGLFAYSRGEIKGLSEAQIVHDFDHPVVRSSGQLQLERISLYSRQIKDLEDIILATVADEPLFDLLQTIPGVGKILALTIYYEVGDIGRFEGPKQFCSYARVVPGIAQSGHTIRRGRGSKQGNRYLKWAFSQASGLAVRFDPRVRKFRQKHLARRRSKARKLISLSIVAHKLATAAYYVLKDQVPFDKGLIFNP

SEQ ID NO: 214522 - protein, 353 aa, unidentified
MTYTGIDYHKRYSVACTLDEKGRRLLERRIEHNAPEAFAAYFAELGAPSEVVIEACWNWGTLYDLLEQVPGVTRVVLSHPAKNRIIADAQIKNDRVDAHALATLLRGDFVARVHVPNREVRQRRNTVRQRLWAAKVRTMVRNRIHTVLDRHPGIDRPVYKDVFCQRGVSWMRAAELPAPDRELLTEDLELHTLLERQMAGLERRIEADSATSDDARRLRTLPGVGKVLGPVIALEIDGIRRFRTSDRLCAYAGLVPTTRSSGGKTSHGRMLPFCNHWLKWAFIEAAWVAVGCSDYFGGFYRQHRARGKCANEAITITARRLAKIAWQMLTAQRDYRRVPTKPDPLSPAALATD

SEQ ID NO: 214523 - protein, 357 aa, unidentified
MKIIGVDLHTRQQTIAMLDDETGELVEKVLNHSGEEVREFYSALPRPALVGFEATGSMHWFLRLMKEFEIDCRVGHPAKDRAAEPRKQKNDRRDARLILTLLAEQRFPAIWMPSCKQRDLQVLLRHRHQLVRIRTRVQLGLQALALSHGLRRGSSLWTPGGQHTLRALPLAPYAAAQRDSLLALYPQLQHSIDRLNHQVEQQAQQRPHACRLMTHPGVGPVTALATEVFLGDPTRFADGKAVASYVGMIPSERSSGRHQRFGKLSKQGNSLLRFLWGEATLHAARRDPELQRFYRRKLVQKGMGKARMAAARKLGIRLWIMLRDQIDYTEFCRRGHLRRQCSGAVCAAMPKGDSGPN

SEQ ID NO: 214524 - protein, 420 aa, unidentified
MSFKIIKNNCCGLDVHKTWIFACIGITDSNNRTEYKQARFSSFTKGLNELCDWLAKYNCKDVCMESTGKYWIPVFNILEQRSLWVTLSHPKYTKPMKGNKTDRKDAKWICDLYMCGMVKPSFIPPADIRELRDLVRYRFKLTCMITGEKNRAQNCLTVSNLKLDDVFSDVFGKSSRSITEQILQHPGETFDVAPFVNSRCKTPIVEIQAAIDGAISKEQAVKLRQCLDHIDELNKHISEVEQEILRLSDKYEAALNLIRTVPGFDKNPLTAIQVLSEIGGDMSVFPTAKHLVSWAGCCPRNDQSNQKIKSTRISRAGSYFKPVLVQVANALIKSKKHSEFTNRYKRIKARRGHKKAIIAICRMILTAIWHILSDLKPYTAEGFRESRPVNESKVLTTSQALNLLKQRGYIIKDELAPAMN

SEQ ID NO: 214525 - protein, 326 aa, unidentified
MRQPVSHTPKIKTQVALDVSSKVLDVYFKTDGKAFSVPNSEEGLSRILKSFKDYDVSLVLMESTGGYEDLAASFFQSNGFDVAVVNARHARNFARAMGKLAKTDRIDAAILADMAFMIDASNDRDRYIKPLTDEQRKRLSVMTVRRRQVVGLISTEKQRLTRADDWTRASIKKTIKALTTELRHIEHQISDHVKKNFVDLSKMLLSIPGIGEQAMAILIGEVPELGKADRRTISALIGVAPFNHDSGNFRGRRRIWGGRQSVRNVLYMGIISATRFNPVIRSFYNRLVSAGKPKKVALIACMRKLLTIINAMMRTGQPFDVALHGV

SEQ ID NO: 214526 - protein, 349 aa, unidentified
MTEQRRSYAGECVYVGVDVHKETYTVTCVCHKQIVKPATVQAEPGGLAVSLPRGFPGATLYSVYEAGFSAFVLHRVLTKAGITNMIVNPASIAVAANDKVKTDRRDSKKLAIDLADGRLRGIYVPTEAAELARLLPRTRAQIVEHRATIARQINAKLHQFGLIAPSSRRMISNRYLREMATWTLPPELSVSLTLLAEQWRFATRQLIEMRRLLRDQAKAQEEIEKVYRSVPGIGEVVARTFATELGDMTRFANERALFSYTGLTPSEHSSGTAVRRGSISRQGSSRVRHLLVETAWRAIPRDKALKEIFDRIAATRGKKRAIVAIARRLTGRIRACFRQGTTYAIGTYA

SEQ ID NO: 214527 - protein, 375 aa, unidentified
MKEKLRFLGMDVHAETIAVAIAEPDCEVRSLGTISNRMESLRKLIKKLGPVEKLRVCYEAGPTGYVLYWQLAELGVQCEVIAPSLVPVKAGDRVKTDRRDAEKLARSYRSGDLTAVWVPDEGSEALRDLVRAREAAKQDELRARHRLGKFLLRSGHRPPSGVRAWTHLHLIWVSQIRFKQVAQESTRLDYLHEVEHMRERVLRLEQAIVEAVKLASPALQEVIQDLQALRGIAHISAVTIAAELGQISRFEGARQLMGYCGVVPSEDSSGKRTRRGSITKTGNAHLRRIVVEAAWSYHRPPAIWAGLRKRQQSVSEEAKEIAWKAQHRLHKRYARPAAQGKDKRKIVTAVGRELLGFIWAIGTRAEAAARQRIAA

SEQ ID NO: 214528 - protein, 363 aa, unidentified
MARTRIAQDDQLRVTVGVDTHKDTHVARAKDQLGRRLGEVKIISTTPAGYRDLLGWAKSLGEIDTFGLEGTGSYGAGLARCLRSEGAVVVEVIRPGRQTRWRNGKSDPADADAAATTVLSGDAAGSPKSGDAAVEMIRVLRVARSTAMRARTQAANAMKALVVTAPGDLREQLRGLSTVKLVRVCVRSRPGELTNPTAATKAALRSLAGRYESVEAEIKTLSAQLDLLINEIAPQLVAIFGMGPDSAGALLVAAGDNPDRLKSEAAFSMLCGSSPIEASSGQVIRHRLNRGGDRQANAALYRIVMVRLRWDSTTREYMARRTREGKSKREIVRCLKRYVAREVYTVLGATSALGSMGPVDAVA

SEQ ID NO: 214529 - protein, 340 aa, unidentified
MHAPLLSYQLISYRSMCCEHEYLNEIIELGSNMIAIGIDVSKLKLDIFHAGKSEEILNTEKCIKKFGKSLKDKDCRIVLESTGKYHRLTHKILVEMGFTVMVINPFQSRHFAKSMNVICKTDRVDAKILAKYAEVMEYNPTMVATEQETQMQGLSRHLEDLKQTKLELTGRLDGAECHFIVKSLKRTIKTIEKEIADAEAELDKAVGNDKELTTKCELLESIPGIGHKTAVFLVCNLRELGNINKNKIAALSGLAPRNNDSGSFSGKRYVRGGRRDVRAWLYMPILGAATQHNKRLKSFYERLVIAGKNKKAALVACMRKLIVWANSVLATGKKWEECHA

SEQ ID NO: 214530 - protein, 421 aa, unidentified
MKKNISKTTKTQKQGNAKRKQLREAKRNVAGLETAKKRKAKRSEVEREVKDEASEPAGQAVVVAEFKAGEGEGYTIGIDIGDKRSRYCILDKEGKILRESSVATLPAALKTVFSKLAGCRMAMEVGTHSPWVSRLLTALGHEVIVANAREVPLIYKSRRKNDKLDAEKLARLARLDPKLLKGIRHRGAEGQGDLLLIRARAQVVETRTGLMNMVRGLVKSRGERLPGCTSEGFVVELLEGVDEAAVRALKPVMVLIEQMTATIKGYDKQVEEMGKKHAEIARLAQVKGVGPLIAATYVLTIEDPERFGRSRDVGGYLGLVPGQSDSGESQPQKRITKAGDGYLRYLLVQGAHYILGPNGPDTDLRRWGQKLGSSGGDRGKKRAVVAVARKLAILLLVLWKTGAKYEPLRNSDKQEKQKVAA

SEQ ID NO: 214531 - protein, 316 aa, unidentified
MSELVYVGIDVAKDSFEVAVTGESQTLKLDNDEAGHAELSQLLMPLAPRLVLLEATGGYEQDLALALAAAGLRVSVVNPRQARDFARCTGKLAKTDRIDAQALRGFALMLDAQGHEPRALADDQRRELTALVVRRRQLVAMLVAERQRLGVAHQKAKPSILAIMDAIAAQLKDVDGGLKAHIQAHHADLAKLLTSVKGVGPTTASTLLAQLPELGHLNRKQITALVGLAPMNRDSGTLRGQRHIFGGRADVRRVLYVAALVGTRFNPVLKAFYAKLLAAGKPKKVALVACMHKLLVILNAIARTRSPWRNDFAEAL

SEQ ID NO: 214532 - protein, 426 aa, unidentified
MDKAPRRCIGLDVHRDFAQVAIWQGGQVRQAGTFATTPEGVREFAAGLGPADEVALEATGNTWAIATLLASHAGRVVVSNPAKTRAIAEARVKTDKVDAEILAQLLAADYLPSVWMPDAETSALRRQVLRRAHIVRQRTRLKNQVHAILARNLVPRCPAADLFGIKGRAWLAAQELPPDEQAAAAALLRQLDFHAEELALIDADLGQAALGRPEVLRLMTIPGVDATVALSIVAAVGDFTRFRTPERLVSYLGLNPRVRQSGGQPASHGRITKAGPAHARGMLVEAAWSASKAPGPLRAFYQRVRARRGMHIAVVATARKLAVLCWHLIIKGEDYAFALPSLIAHKQRKLELRAGAPSARGRKGPAAHYSLAAVRAAERDLAAQGEVAYRTMVAAWQPARPPANPARKKVAGAAASKGTRLIKPAG

SEQ ID NO: 214533 - protein, 400 aa, unidentified
MIDTSDIDVYLGLDVGKGEHHATALTPAGKKTFDKRLPNSEPKLREVFARLQAKHGTVLVIVDQMASIGALPLAVARDLGCHVAYLPGLTMRRIADLYPGEAKTDAKDAFIIADAARAMPHTLRSVDLDDETIAELQMIVGFDDDLTAEANRLSNRLRGLFTQIHPHLERVIGPRMQHPAVLRMLDQFGSPAQIRKAGRRRLIALIRPQAPRMAGRLINDVFTALDEQTVVVPGTDAAALIVPSLANSLQAVLDQRKLLAHRIEELLEAHPLSKVLMSMPGIGIRTGARILIDVGDGTSFPSAAHLAAYAGLAPATRSSGSSIRGEQPSRRGNKQLKRAFFLSAFAALADPASRTYYDKKIAQGKHHTQAILCLARRRADVLFAMLRDGTFYQPPTPNTP

SEQ ID NO: 214534 - protein, 339 aa, unidentified
MRLYVGVDLHANNNFVAMVDKKGKRVDQKKLPNDLSVILEFFKPIQKEMVGLVVESTYNWYWLVDGLMEAGYKVHLANPSAIQQYSGLKHADDKHDAFWLGEMLRLGILPEGYIYPKEERPIRDLLRKRRHLVKLRTSLIISLQNIISRNCGVEFRVNEVKRLKEDRVSPLLEGNEDLALAGKASKEIIDQLTRQIRKIETWILQRIELKECYPFLLTLPGVGKILALTIMLETGPISRFAQVGDYVSYCRKVPSRWTTNEKSKGKGNQRNGNKYLAWAFSEAAEFARRHDAQARAYYNRKMRKTNFMVAHSALAHKLARAAYYLMRDQVPFMPEKLFC

SEQ ID NO: 214535 - protein, 334 aa, unidentified
MTTSVDTAWLALDIGAKSHAWASDIAGRRESGTVENTSSALLTFLRGRLRPGVTWRVLVEATGVYYLDAALLAHELGAAVMVINPRAAHHFAQALSQRNKTDKLDAAMLLECLQRMPFRAWQPPSKVHLQLRSYGRFLVQLVESNTVNRNRLHALTSVKDSPRPLCSELKRMIASTDRRIARLRAQAIALIREDPALAVRFEALCSFKGIADVSAVALLSELITLPTTLSSRACVSHAGLDPRVFESGTSVHKPPRISRHGNKYLRRALFHPAMTAARHDPRAKAFKERLVARGKKPMQATTAIMRKMLTAAWAVMKNPTPYDSARLYADLEKA

SEQ ID NO: 214536 - protein, 418 aa, unidentified
MNEDESARDVRRYIALDIHKHYCVIAAVDREGRVVLYPVRVEHTDLEGWLKKKLQPSDHVVFESTTNAWHVYDLLEPSVERVVVANPIKVKQIASARVKTDVRDTLILARLLAANLVPDVWVPPAHVREMRQLLSQRRQLVETHTQIVNRMHSVAHRHHLKHERGKRFNEKNTHWQRDKRLSKTEQFQLELEMENRAYTERQIGRISKEVAKVSHQKPWAESMTYVMQLPGFGVITAMTVLAAIGEIERFGSAKHLASYSGLTGGVDQSGTHLVQKGITKEGRQELRWAMVEVAQRAVKSDPRWTRKFQELHKRMHRNQAIVAVARQMLELVWHVLTRHQPYRHFSQERIAYKYLTWAWQMDEAARDGLTRQQFARYYMMRLGIGHDLTRIALNPKYPRKLASEAELLALRPELNHIE

SEQ ID NO: 214537 - protein, 362 aa, unidentified
MPMLAELVDAVVGVDTHRDTHEVEIALPTGTAIGTRKISNDNSGFAELLAWIVDHAPGPRVVVSIEGTRSFGVGLARAVAAAGLTVIECEQPNHKARRGKGKSDPIDAHLAVLAALRLAADRLPVPRADGDREALRILLGARHELTVVTTAQTNRLRALLLGGGDTERNLARATLTDPVLLALVRRREQPHASREQAVRHGEIRRLAHAVRAGRHTLAANRAQVQAIVDQIAPGLTERRGIGAVTAAQAIVSFSHPGRCRSDAAFAALSGTSPLQASSGKTVRHRLNRGGDRALNCAIHTIAVTRMRCCPTTKNYVARRTAEGKSSREIRRCLKRYIARELYRALNASATLTAQTPAAPAAA

SEQ ID NO: 214538 - protein, 315 aa, unidentified
MSDVPCFGGIDVATAQWDIALRPSGERWAVPNDASGVMTLVDRVQALHPTLMVLEATGGLERAVTSALATAGLPVVVVNPRQVRDCARATGPLATTEALDARALAHCADVIRPTPRPLPDAQTQELRALLGRRQPLIVMRTAAQNRLAGTSTRLTKDIEAHMTWLNAGIATLDDDLAALLRASPLWRDNDDLLQRAPGIGPVCARTFLLALPALGPRTRQQIAAVVGVAPLNGDSGTLRGRRTMWGGRAHVRTVLSMGTLVATRHNPRIKVFDERLLAAGKGKKVALTACMHKFLTILNAMLKQRTLWQAQEVQS

SEQ ID NO: 214539 - protein, 358 aa, unidentified
MAQASIAQSGPRGVVVGVDTHRDVHVAVAKDELGRTIGQTTTPATAEGYRSLLSWARGLGEPLAFGVEGTGCYGAGLARYLGRQGQLVFEVIRPSRQARRRRGKSDPADAEAAAGAVLSGEASGVPKSGDGAVEMIRVLRVARTTANRARTQAINALRSLVVTAPEELRERLHDLPGPRLVRTCAAFRPGAPAGPGEATRMALRSIARRCRALEEEIRVLDGELERLAEAACPALLEVYGAGADTAGALLLAAGDNPQRLRSEAAFAKLCGASPVEASSGKVTRHRLNRGGDRHANAALHRIVMVRLRWRHQPTIDYVARRTAEGKSKREIVRCLKRYVAREVYRVLADAGPPTLARS

SEQ ID NO: 214540 - protein, 470 aa, unidentified
MKERNAIGIDPDSQGFVCAYVKRSDTKVDTRGYMATDSDLKSFLKWVKGEKDVVVAIEGSNGLSKPLEKALREAEIVFYSFKPTDTDKFRKAVLGQNKNNKKDAESVARYAMALEAQGKLEKYRRVWFADMELQLLTRRHESLNQQLTAEVNRMWKLLRYASADLYLALGGKNPEVECGEKVVKSEGILNLLISTPDVGKWKSLSEKQMLEAMGGGNYKGRRALIQELRKVISSFQSVSKAMALLLSTSAHQIQRLKEEQLDIVRMLEELTAENTAVQELRQMKGIATKTAAKMIAEIIDIRRFAREDSLACYTGLGMREHSTGQTTNMVPTQLFNHRLKDAFMTAARNVVFYDPDSHIAGYYRNLVKAGMSPLAATRRVARAMVRVIYRKLSALTAGTTDVPTGDKQEEGESDMASGSTRSGQSHTSDISLSSPRNHRARSVRKVKREVTLTGRTRELGRRKIISKKIT

SEQ ID NO: 214541 - protein, 469 aa, unidentified
MKRKSRRAKCQKVSPFSGDLQLIEPDAAAVDVGSRSHWVAVNPQRDSNPVREFGTFTADLMSLADWFAQCEVKSVVMEATGVYWVSLYDLLEERGFKVYVVDAHTVRHLPGRSKSDVKDCQWLRRLHSYGLLRGCFRPPAQIRQLRNYQRSRSNIVDAAAQQQLRMQKALTLMNVHLHHVISDISGLTGLAIVRAIVGGERDPKQLARLRDPRIVASKETIQKSLEGNWQEELLFDLKIALESYDHFQGQINAYDEQIRRELKEVPSKVDLLQQALPAGRLRVCRKRPGMSQQDQLELRAELYRISGVDLTRIDGISLQTAQKVFFEIGTNVSAWDDEKKFSSWLGLSPNHRISGGKVLKRSSRKVVNPLSTALRLAARTLRNSHSALGANFRRLIAKIGMPKAITAMARKLAVLIYRMLKYGTQYVDKGMQHYEAKYQATKIKYLRAQAATLGMILLPKHSAGAGATT

SEQ ID NO: 214542 - protein, 385 aa, unidentified
MSELNDLSRSLTSLEQDKTIIAVIEMSQSSWFVAGIIPGIERHPLKKLEPSEEELVRLLMRWRTEATKNGHTITRIAVTFEAGRDGFWLARWLRARDIETYVIHPTSVAVSREHRRAKTDRLDTGLLKRVFIGWLRGEPDHCHMAAIPTLAEEDAKRPNREREGLVRERTRIVNRMKSCLARFGIRNFKPTLRKAPERLATLATPEGVPLPPNTLLELRRDMARLRFVMDQIKEVEEARAQRLEQAPQEKTHAMVRLIARVIGVGIETADMLVHEILSRQLRDRRAVARYAGLTGAPDESGNKRREKGLAKAGNARVRRGMIQLAWRFLVFQKDSALARWYRTRTESAGKKRKTMIVALARKLLIALWRLVTIGEVPAGVVLRAA

SEQ ID NO: 214543 - protein, 401 aa, unidentified
MDVVGIDVSMGKSEVVIYQNNTLLKAFNMIHSKIGFDHLLVELKKLTNPHVYFEATGVYSRPFVSFCEINSITYTMLNPLELHYRTSTIRRLKNDRTDANRIAQFGVDFPQSETKSFPDPYCNIRELSRFINQIGSDIKLKRMKLHVAVQQSFSELEKLFANSVSKLALNIIQLFPHPELVSKYDKSDLIQLLMSQTDKCISRKKSEKYARQLMTYAAQSYPSVSCNSIQTEEVRYYAEELKKLIIKKEQLVKQIIQLSEGLPEFHILTSMPGIGPQSAAEIIGELGDIRRFSNSKKLNAYVGIDLNQYQSGTYTAPDHINKRGNSHARAILYFTVRNMIRQQASAPNHIVDYYYRLKKGPHPKRDKVATVACMNKLLKCLIAMVKANQEYAYAYHGLEAQ

SEQ ID NO: 214544 - protein, 411 aa, unidentified
MGQVVIGMDPHKSSATIEIINDREKILDTGRYSTDTAGYRAMLAAGRKHRDRVWAVEGCNGIGRHLAQRLVADGEPVVDVPAKLSARARVFSTGQGRKTDPVDAHSVALVGLRSQGLRTISADDATVALRLLIDRRDQLGVTRVQVINRIHRLLLELLPGGGKKHLSAAQAKALLTKVRPRDIAGKTRRRLAAELIVDLTSLDAKINAADKELHQLINTTGSTLRDLHGIGPANAARLLGDVGDITRFADKARFASWNGTAPLDASSGDQHRHRLSRAGNRRINRVLHIMAVVQLRTDTKGRRYYDRKVAAGKTSMEAMRCLKRRLSDIVYKQMRDDAQPVATGPGGHVGAATGSSAVNSNPDVDASEKSCPGPVTTNATRAESSRPDRSPARSRHPKTAPARSRRQAHSA

SEQ ID NO: 214545 - protein, 307 aa, unidentified
MFVGIDVAKDRLDVHIRPSGEAFTVARDGEGIDELAERLRAAAPSLIVLEATGGFEAVVVAGLAAAGLPIVVVNPRQIRDFARATARLAKTDALDAAVIAHFAEAVKPPIRPLADPQARLLGELMARRRQLIEMITAEKNRRRLLTARRTLKSVDRVLATLQAQLEQSDGDIDTAVRGTPAWREAENLMVSVPGIGPKIARTLIAEIPELGQLDRREIAALTGVAPFNRDSGTMRGRRTISGGRPVVRNALFMSVLVSIRFKLPLAHTYHRLRAAGKPAKVAITACMRKLVTILNAILRDKKPWQNA

SEQ ID NO: 214546 - protein, 347 aa, unidentified
MNYIGVDCHISSLDFAVVNERGATTQKAKVNTSVKEFIYFVKSVPKPRKIFIEEGELAGWLLETSLKFGERLIITDPKINKWIGKAGQKDDTIDAEKLAQLARGKYIKPIYHPVDRRRRFKELVFAYHDTVKSQARIKNKIKASFRKNGIQCRGVTVYSDKHRAKWREKLSENKISCLIVEELWVQLDQLRASKERLKKNIRIQSKQYPEIKQFMQIPGIGLIHAASISAIIETPHRFGNKKKLWMYAGVGLRQRSSGGKVYSRKLTREYNRPLKNAIRQAVEASIHAHDNQFRRQYLRLTLKKGVVSHKAKLTVARSMLATLYGMWKKGEAYDPEIDAKRNSEDKK

SEQ ID NO: 214547 - protein, 347 aa, unidentified
MNFYTQQHKHYCGIDLHARAMYVCILDEQGTKLVHKNLPTTPEAFLRLIAPYREDLVVGVECMFTWYWLADLCSQEGIAFVLGHALYMKAIHGGKAKNDKIDAHKIAVLLRGGMFPQAYVYPSEMRATRDLLRRRCHLARKRAELLAHIHNTNSQYNLPEIGKRLANKSNREDVADHFPDPSVRKAIEVDVALIDQYDQLLGEVELYLTRSAKAHDVQPFARLQSVPGIGQILALVILSEIQDIARFPRVQDFVSYCRLVKCAKESNGKRFGTSGKKIGNVHLRWAFAEAAVLFIRQSQPGKEYFAKLEHKHGKAKALTVLAHKLGRAVYYMLSREQAFDLKRFVTA

SEQ ID NO: 214548 - protein, 336 aa, unidentified
MNRYIGIDIHRNRCHATVQDEDGMTVKQGYFQNSPSGFEDFFDGTGEAKVAIEASDAWQPVYDWLVERGFDVKLAHPHKTRIIAEVKIKTDCRDSEALADLVRADLIAEVYVPCDEMRELRGIVKQRGKLVQERSKFKNRIKDQLRKRGIEYKGKNLWSNSGKQWLRDLDVDAVDDFLEVLKTLNDRISKLEGEIEEIAGNMEEARLLRTIPGVSYYTALTIIAEIATVERFPSSAHLCSYAGLTPSVKQSGSKEVHGSIQGGRPLLRWILYQAAHNHIQNAPNSHVTKFYKRLERRKPEKLAKTAAARKLTTVIYWMLKLKEEFHPEGYDPRTSC

SEQ ID NO: 214549 - protein, 467 aa, unidentified
MSTTNKCIYVGIDCSKGYADLFSLQSNKDIAEPPFRLYDTAEGHQRFQVLIIGWLHQGFVHIYCGVESTGGYENNWVNALHQMGKSQAVYIARLNPKGVKSLGEARLTRTITDSVSAENIALYLMDHPDKVHYLNPSQTSKAYSDGRKHNSFIRMLKKQRNQLGNQLEKLVYEQLSPLLCYCRHGQPTWLLLMLEKYATAASIKKAGISKLSKIKGISAEKAKSVVAKLAELNDQSSDHLGSVIKSTVVHILHLEQSIKKEKSNLFSRFKQTEEAVLLSSITGIGEQSAVEIIVEIEDINRFEAAKKLDAYFGTHPMWKQSGDGTWGNHMSKKGRSEIRGVLYMCGMSAVRHDEMFKAIYARARAKGKNHFSAMGVVMNKMLRIIYGVLKNKTKYNRETDLKNQQNAQSKQRAKEEKQLEINEEKQTKLERYNSGEVKEMPVSKRYAKKKRQSPKLQLEECTGSSAS

SEQ ID NO: 214550 - protein, 334 aa, unidentified
MLYAAIDIHKLAFQAAVLDPESGQLVEERFAADRESLARWAEQWRGQLVAVAIEATTGWRWVWRELVERGLEVRLAEPLQARALLGRRRSAKTDRLDARWLARLLAKEMLPQSWIPPEQIQQLRDRTRLRKALAEDRRRWGQRLHAYLLHEGWPCSRSNLLRPPGLRWAAALRLSADARLQVDSLLAVIAALEAQLDTLDAELRRFARADERGQALQSIYGIGPILACHLLAEIGEARRFRRAEQITRLAGLDPVVDESGESRRRGHLAKAGSPHLRWALVEAAVHAHRAGAPDLGLYRATRARRDTSVARLTVARKIGKRAYHILRELELASA

SEQ ID NO: 214551 - protein, 320 aa, unidentified
MLSFGGIDVSKDRLDVMVLPEEQCSSVPNDAAGWAKLVEQLRGFSISAVGIEASGGYERGAVRALLAAGMSVRQVNPFKLRQFARASGVLAKNDPLDARMIASFIAIMPTRPAQPHAPAVERLAEILTVRRQLSDAKVAAENASRLLEDAMLQRLSRRRIARLAADIDLLDGRLVEIVMADAALVHRYQLLTSMPGVGPVLACTLIALLPELGRMNRKQVAALVGLAPYAFDSGKLKGARCIWGGRASIRRVLYMAALIAMRCNPALKAFHNRLAATGKKPKVVIVAVMRKMIITLNAMLRNETPWVDRSSGRHSVLTAR

SEQ ID NO: 214552 - protein, 344 aa, unidentified
MFYCGLDVSLRETAICIVDADGKIVKELKVSSDPDAIANAIRDSGFVCEKVGLESGSTAAWLQAGLVTLEFPAICIDARHAAAMLQAGLRNKSDRNDARGIAQLMRVNAYRPVWVKSERSQRLGALFTARNTLQDQLVRIENVVRGLLRCDGIRLPLGRRHFEAEVRTRVGDHAEIMSTIEPLLVARAELIRQRTVFDRRIITLARRDEVCKLLMTMPGVGAHVALSFKAGIDDPDRFRRSRNVGAHFGLTPRRYSSGEVDLSGHISKMGDRHVRHMLYVAAQVTLRRNQGLWSSMKAWAMNVAKKRGLAKARIALARRIAVTLHKMWLTGEPFHWQKPGAAMA

SEQ ID NO: 214553 - protein, 375 aa, unidentified
MITRRILVSLNSAIEWLADETPYASLGLQPVSQLGARLPSVANLNSCLGRPHERLIPQNKDRIMTLPQNIIGVDVAKNWIDVFYLATAKAERIAMTKQALAQFAKGAKGCLVVLEASGGYERPLTEALTRFKADFSRVNPRHAREYARATGKLAKTDRVDAEMLARMGRALELHPTPPTPPEQVELAELVARRDDLVAMIGAERNRLGQSHNAWVRTQITSHINGMVRHRKAVEAEIAKLTTADETLAADSLRLQSMPGIGPTIAAVIQARLPELCRLDRRKLANLAGLAPHATESGQHRGKRRIWGGRADLTRAFYIAGFVASRCDPTLRAYREKLQAAGKPTKVAIIACARKLLTILAAMMRDQTDYGDKKPA

SEQ ID NO: 214554 - protein, 315 aa, unidentified
MNTHIAPPADVVHIGVDVCAQWLDIHGLPSTKIKRLANTAAGHAKLIAALPPGAHVIMEATGGYEHALWLALLRTGKTASRVNPGRVRHFAKATMKLAKTDAIDAAVLSSFGQTLKPKADTLPADWELELADLVSRREQLVSVRAQQKTQLHQLSHETLITQARALIQTLNGQIQQLNELIKGVMEHEAARAKAARLQQMDGIAQVAAATLMAELPELGSLSDAAISSLAGLAPHPFDSGPMRGQRHICGGRKKVRRVLYMAALRCVRFNAILKTFYQRMLSRGKPFKVAITAVMRKLLCVLNLLISDPNFKLAH

SEQ ID NO: 214555 - protein, 408 aa, unidentified
MSIVFGIDVSSRDSSVCVLQSGATREYKITNDTIGFKTLLIDLKEYAEHPQIILEATGVYSRRITRFLDEYDYDYVLLNPLKAKKEINQGLRRNKTDRNDAYHLALAQDQNQHQPNQKEPDVYHQLQSLSRAYEELTHDIISSKNRLHKYLQLTFPELETIFNNSRGVNYWYLVELFPHCQDVRNLEVSTIAKQIKDFKGYGINRAQKLAIKLKHLADLAYPAVDQDDPERDEVVYYANRLLRLTADRERRSEEMIKLAKTLPNRDLEILMSIPGIAEITAVRILAELGDIRRFSNPNKINAFVGIDPGRYQSGEKDSSLRISKHGNAVARKILYRAIGQIDLAAKTSPCHIADYYERKKQFSQTKGFKKIAIASIHKLLRTIYILIITDQMYDYNVANNNQKDFCRN

SEQ ID NO: 214556 - protein, 338 aa, unidentified
MVLIGIDPHKASHTAVVVDDDERELARIKVRSDRSQVAVLLEFAEAYRPRRWAIESAGGLGFLLAQQLVRAGEDVVDVPATLAARVRLLGSGRGSKNDPNDALSTAIAALRDPHLRTVVVEDHAMVLRLLADRHQDLTSLRTQAVCRLHALIAALVPGGVGRRISADGALSQLQAVRPSTVVETARRDLALDLVADIRRLDAGIAAVKASTAVAVAASATTVTDVFGVGPVVAALLIGHTGDITRFPTPGHYASYNGTAPIEASSGKVVRHRLNQRGNRQLNHALHMAAVTQIRFDTPGRAYYLRKIEEGKSAKEARRALKRRISDAVYRQLRADALG

SEQ ID NO: 214557 - protein, 343 aa, unidentified
MQSISTIGLDIAKSVFQVHGVDAAGQAVLRRQLRRRHVLAFFQKLSPCLVGIEACASSHHWSRELQALGHTVRLMPPAYVKPYVKRQKNDTTDAEAICEAVTRPNMRFVPTKTVEQQSCLMLHRARHLFIRQQTAVINSIRAHLAELGIVAPVGRRGVEQLLEVVADTADRRLPEVARACLAALGSQLRALKAQILEFDRRIMVWHRSNATSKRLDAIPGVGPALATALVASIAEPGAFRSGRDFSAWVGLVPKQNSSGGKDKLGSISKQGDRYLRSLFTAGALAVIRYAKIHGTGHRPWLTGLLARRPTKVVAIALANKLARMAWAMMARNERYKEPAALAA

SEQ ID NO: 214558 - protein, 367 aa, unidentified
MSKAENSRLCVGVDLHKTQFTVCALNEDGEYLLEKQYPTKEEGYQEFSCEMHDLEEQGYSIELAVETTGNARHFKNRMESECFAVKVVNTNRFKVITMSTRKTDTNDAATLAFYLMKEMLPEAHICSQTSEEIRRMLKTRSILVQSMVKIKNQIHGMMLGYGIETKAAQLQSKKKRQELMNDLEDHDYSAYTASSLKVMLKILDDLSSEIKEVEKHLKEMVADNEDVELLMTVPGIGINTATTIAAYTEELNRFDGNYKKFAAYVGIVPSVRNSNESKHYGWITKHGPQELRTAFVQAAPGMIRLTKVTSDWRIIKDYQRRKGDKGSGRAIIALARKITRIVFVMLSKRESFNPELMRCEVIIQQTA

SEQ ID NO: 214559 - protein, 369 aa, unidentified
MQHELRTVAIDLAKKVFHLVGTDTTGKILWRKRLTRHAFMPFIAQLPPVLIGIEACGGAHYWARRFREHGHEVKLMAPQFVKPFVKSNKNDMRDTEALAEAVTRPTMHFVPPKEVDQQDMQCLHRVRERLIGARTALINEVHGLMHEYGIVLPKGVAKFRQAVVDKLESEKEKLTALSQEMFGKLVEEFGALEKQLAYYQEKLEALATTHPECQRLMTIPGIGPITATALVAAVGDVGVFKNGRQFAAWLGLVPKQHSTGGQTRLLGISKRGDSYVRKLLIHGARATLRWVKRKTDGRSQWIQGLLERRGWNRTAVAVANKNARIVWALLSRGGVYDTNASSSGGQAPWRHREWCDEGQARVRGKDCNR

SEQ ID NO: 214560 - protein, 348 aa, unidentified
MEFYAGLDVSLEATSVCVVNGEGKVVREGKLPSDPDAIELFLAEWGVHLKRVGLEAFSFSAWLYAALDDKGLPIVCIETRHTKAALNAMLNKTDRNDARGIAQLMRTGWFRPVHVKSRAAQALRMLLAGRKALLGKVLDMENMIRGLIRPFGLKVGQISVGKFDARVRELVAGFAELEQIVEPLLAARAAMRLQFARMHRLALAAAREDKAVRRMMTVPGVGAIVALTFRATVDDPGRFKKSVTVGAHFGLTPRRYQSGETDWSGRISKCGDEMTRAMLYEAAIAILTRIPKNFKLRLWGLKLLKKKGLKKAATAVARALAVLLHKIWVDGSTFRYGVGLKGGRIARA

SEQ ID NO: 214561 - protein, 345 aa, unidentified
MHYVGMDCHITTLDFAVVDDAGRLVKSCKVDTSAKNFMEFVKSVAAPRIVYTEESALAAWALETCIRFGEKLVITDPKQNHWIGSSTQKDDPLDAFKLAQLGRGGFIKEIRHPVGDRRRFRELMDCYHDTVKSTTRIKNKIKSKFRQNGIHCTGMTVYSETYREEWRQKLPQDQTLLLIVEGLWNHLKESEQTEKNLLKAARNFAKHYPEIKLFEDIPGIGFISAATISAILETPHRFANKRKVWMYAGLGITIRSSGGKTYSEKLSKDYNRLLKYTLKQVAETAVQAKDNPFCQKYLAMTILRGIAPHRAKLTISRDLLATMWAMWKNGEKYNPEIRRSLVLNK

SEQ ID NO: 214562 - protein, 309 aa, unidentified
MDTIVVGIDVSKDRLDVHVHPDGTALSFSRDASGIEALIGKLAGLALQLVAVEATGGFETVVVASLAAASLPVVVVNPARVRAFATALGKRAKTDPIDAQVIALFAAGTKPQVRPLPDAATQALADLVARRRQIIQMIVAEGQREKRASPRARKSIARMLKTLRAELSVINTEIDESVRGSPVWCAKEDLLDSVPGVSSVTARSLLADLPELGSLDRHQIAALAGLAPFTRQSGKWRGKSFIGGGRASVRAVLFMAAMTAMRWNPTLRAFHQRLRAAGKPKMVALIAVARKLLTILNAILRDNKPWQIA

SEQ ID NO: 214563 - protein, 452 aa, unidentified
MSRKTCTHLRGKRGQAFADQIRGIPSEQILCVSLDISKYFHVVMIHNALGDIVTPIFEIDILETGFDRLCQAIDEAVLRAGAQLVLLGMEPTSHYFENLARHLLQRPQPVKLINSYAVSKNRDQHMMHREKSDEIDAAAIGDLLRRGEGTPYRPPTGVYLQLQHLDRVRLSKVKIQTMLKNQILGHLDRISPGLVITDDSAKERYTPLFTTYFWSCQTLQHLIRVCPDPHQLAAMSIQDLIHAFHAQGYPLGPARSGKIIAHAKKALLPDPELVAIRSELLQHDLALLDAVEHHIGSLAAREIALLDQTPYPIWTKLKGLSPIQVASLAAAMGDPARYAYAGQVFRRSGLVSGRSDSGTRQRKGKGKRVVKTGDVYLRRALMNAVSTLLMHQPILGRYTCTARKCMCYHQLKQTKPAGVARVATARRAMGILWATLRDQRPATLILKRGVTM

SEQ ID NO: 214564 - protein, 367 aa, unidentified
MSHPITHSSGVLMSLVATPTPDPSGALLVELPRVTLGLDLGDRRTDICRIDLAGNVQERFKVSTERDALEQLFQLEEPSRVVIEVGTHSPWISRLAQANGHEVIIANPRKVKLITQGSRKNDRKDAELLARLGRLDPDLLSPIRHRGRDTQVRLLSIRQRGHLVGLRTSSINHVRGLVKSHGQRVRPCSSPAFAKRAMEDLTPELFTSLKPSLTAISGFTKLIRDLDRQIATPPDDLRDVVERMRQITGVGPLLALTFVLTIEDPHRFEKKSDIGAYLGLVPRQSQSGNTDKQLGITKTGDGYLRALLVNAAHYILSRGPDTRLRRFGEHLEQRAGHAARKRAAVAVARKLAIVLHRLWVTGDDYKP

SEQ ID NO: 214565 - protein, 407 aa, unidentified
MRYYIGVDWADETDAVWVVDEAGDTVLQRTIAHTVTARSEWARWLRERQAEGSELWAAIERPHGRIVDFLLDHGVVVYAINPKSLDRARDRFRVGASKSDPFDARVLALFLRSDHASLRPVRPSSEAAQELKGLTRDYRRQVHLQTRLLNQLTATLKEYYPRALELCEDLTAPWAQAFLARYPTPPAAAGVREAEWRTFARTHRLGPDRTAALWQLLHQPQLPLPAHVVRTKARLLQALLRELAPTLATVAEYRQAINDFFATLPTAEIARSLPVGKSGTTVPTIWAELGDHGDRWDSFRSLQSYAGSVPETERSGHALLIKFRFACNPVLRDALHQFAFLSLSHSLWARSYYDHYRARNHTHHEALRALGAKWLKIIFVLWKRQVPYSETHHLATMARQHLQQSAA

SEQ ID NO: 214566 - protein, 344 aa, unidentified
MPHVVGVDLAKDVIQVCVVKHKKVLSNKEMTPNDFTIWLATHHTSTVVFEACATSNYWKQKALECGHDAKLISAKLVANIRQNQKTDKNDALAIVQASQLIDIRFIRGKTFSQQELQSINKMRELAVRQKVALNNQIKALLLEFNIRISPRNGGMSGVVQKVLEDADNGFSAVFREALDSTWQALLDIIKRISGYEDNLRKTINDNPDCKKLLALEGVSTINAVHLYTALACNDENQFQTGRDASACIGLTPIQYSSGGKIKLGSIGKYVKNTLVRSNLISGAMSMIQQVTRRNPRTTKEKWLKELIERRGKRCAAVALANKTVRTAFAMLRDGTEYQAQILKN

SEQ ID NO: 214567 - protein, 345 aa, unidentified
MTQYKRVGVDTSKAVFTLHGIDQQDRPVLRINLRRAQMIAFFRKLPPTVIALEACGSSHYWAHELTTLGHTVRLIPPQYVKPYVKRGKNDRNDAEAICEAAGRPGMHFVSVKSVTQQAQGMVLKVRETLIGQRTALINTVRGHAAEFGVIAGKGAGKIGPLLSAIEQEVAIPAEAKEMFALLGQQIDEIDTRIKDVDAKLNAAHKASEVSQRLATIPGVGLITALTLAVEIDPSMFESGRHLAAWAGLTPKERSTGGKQRMGGISRAGNERLRVLLVSGATAVINAAMRPGSQQMTEWLRALLFRKPRKLVAVALANKMARTAWAMMKRGETYRRPFVAAGAVAA

SEQ ID NO: 214568 - protein, 345 aa, unidentified
MESMYYIGLDVHKKTISYCVKDASGQVLQEGKIGATRGELDSWMKTLPQPWSVAMEATIFTGWIYDHLLPHAAQVKVAHPLMLRAIAAAKKKNDRIDAGKIADGLRCDFLPECHMAPTEIRDRRRTLRFRHLLVRQMVQMKNRVSGLLMETGVSYNKQKLHKVGYFLELLSSNEEIHSNIRPLLKLSRDAIVRLQKTEYALVSSLQRDPLLADRIKRLRTVPGVGPITALTWALEMGEVSRFPSIKQAISYCGLCGDEKSSADKVIRTPLSKQRNKHIQRVLVEAAKLAPRENHELALVYETEKQKGNANRATLAVARKMVAYLLAVDRGKRDFVPAEDHRGVAA

SEQ ID NO: 214569 - protein, 411 aa, unidentified
MVKENFIYVGIDLHKETHTAVMIDCYNQKLGEITFPNRPADFPKLVTKVKKCNTDGKEVVYGLENAYGYGRALAVWLIDKGYLVKDVNTAISHRQAKHRGAMYRKSDSDDAEAIALATLNMLDKLPDACPNDAYWSLGQLVHRRDNIMKQRTRLVNQLHEQLCIAYPSYKQFFNDISRPTALYFWEHYPSRKYLKGKSVEDLRAELVPVSHNKCSTKTREKILDAVASDKVKNIDYQDARDMVTLSIVSDLQHYDSQLAEVDKMLEQMYKMLGCTLTTIPGVNVITAVKILAEIGDIKRFSNANKLAQFAGIAPLHLSSSGKGKDVATKQGNRRLQATIYFLAIQMVQVSSKGTPRNSVVRAYYEKRKAEGKTSQQALICISRRLISIIYEMLKNGTEYRMPVVENAGEKL

SEQ ID NO: 214570 - protein, 339 aa, unidentified
MQLYAGLDLHSRNTYIGIMDKEFKRLFGKRVLNKLPVILDTLAPFRDQLKGIVVESTFNWYWLIDGLMDAGYQCVHLANPSAMKQYEGIKHTDDQHDAFFLAQMLILGILPQGYIYPKEERPVRDLARKRLFLVRHKTAHILSLQSLIARCCAQRVSASEIRKFTVEDLQQLLKQEHIVLSAQANLDTIMFLKQQIKLLEKAIQKKVKLNKAFQQLMTVPGIGLILAMTIMLEVGDIGRFAQVGNFASYCRCVSSQRLSDGKSKGHGNRKNGNRYLSWAFTEAAHLSRRYNEHFRSYYNRKLAQANTSLATKALSNKLARICYYIMRDQVPFRQELLSQ

SEQ ID NO: 214571 - protein, 428 aa, unidentified
MMTHQDRLQAFHELRRTVRSSDSMLVVGVDVAKNKHHAFFGTPTGKTLWKKLLFDNSIHGFRSLQTMSANLMIQHGLQNCVYGVEPTASYHKPLAEYLIRQGQQVVYVSNVAVKNNRKTLDGRWDKNDTKDAANVADLVSRGRCQFYDLADGDILELRSLIAYRTKLKKLEHALRMRLRNNLVAQYFPELDKLIPQGGQDALVLDIIAQSLAPAQIAAMSFEEFRAKHQVQQRHIAQERRLRVIWELSQESVGCALPEAAAWEGQMLVEQLEHTRKIKKELESRLKTTGQRFPAYSRLLTLPGFGPIVTTMVLAAIGDAQRFTNRKQVLRLAGLDLSASRSGTKSDSAIPVISKQGKAGLRYALFQAATIASYKDETIRNHFTRLLKGREQERGIKMKMRTKLAAKLLVVAWTLMKRNEDYDPDHFKP

SEQ ID NO: 214572 - protein, 360 aa, unidentified
MKILGVDLHAKQQSIAMLDTETGELTEKIIRHEGNAVREFYGTLEGPVMVGIEATGSMQWFLELLEELGMQYRVGHPAKIRAAEPRKQKHDRRDARLILELLTANRFPDIWMPSSEQRDLRILLRDRHQWVKMRARLQHTLQSIALNHALRKGSSLWTAAGLETLLRLPLPPYTRQRRNQLLQLYAQLQKRIQELDRQVEEQAQQRPQARRLLTHPGVGPLTALATEVFLGNPNRFISAKQVASYIGMIPREYSSGQRQRLGNLTKQGNSLLRYLWTEAALHAVRKDPELKRFYRRKLIPKGMGKARIAAARKLGIRLWIMLRDQIEYEEFCRRGKLRQNGEAQAGMPDFNSGAATAVTG

SEQ ID NO: 214573 - protein, 379 aa, unidentified
MDHAITGTLAKTVLHGALELSKNGWLLALQFSDRAQPSLYPIRGGDTEGLMTKLMAARDRWAKVSGKAPSIVLCYEAGYDAFWLARFLKARGIECLVVDAASVQVNRRARRAKTDRLDVRMLLRALIAWDHGERHVWSVVRVPSVDEEDLRRSHRERDRLVRERTAHINRIKGLLFGQGIRGINVKSKYKTLQIDKLVTGEGRSLPPRLASEITREIARLALIQEQIVALERERDQAPTPCKVTEKKRVQLMCLTGIGPAIAAVMTREVYYRQFDNRRQVAGFLGLATSPHDSGDVERSQGISRAGRGQVRGAIIQAAWLWLKHQPKSAITRWFVQRTAGHSGRIRRIMIVAVARKLAIALWRFLEQGLVPQGAMLANR

SEQ ID NO: 214574 - protein, 310 aa, unidentified
MSRDPKYIGMDVHKEAIVIAVLNDRGKLVMESIVETQASSILQFIHGLRGELHVTWEEGTWAAWLYDLLKPHVHEVLVCNPRRNALLKEGSKSDKVDARKLADLLRTGMLRPVYHGENGLRTLRELGRSYQTISKDLNRVMNRLKALYRGWGIACSGTQVYAARYREEWLHKIPHAGVHRRAELLYQQLDGLQALRRTLRPELLAESRKHKAAKLLRQIPCIGPIRAARLLALMQTPHRFRGKRQLWTYSGLGIETHDSAQYRYVRGQLQRSKKPQQIRGLNQNHNHEMKEIFKGAATRASCGVGPLRDF

SEQ ID NO: 214575 - protein, 360 aa, unidentified
MFCERTSVGLDVHARSVVAAAIDGRSGEVFRARLTPSHAEVIEWVGKLPGPCAVVYEAGPTGFGLARALSAAGLRCEVAASSKLLRPAGDRVKTDARDALNLARLLRLDEVVPVRIPSAAEEAARDLVRTREAARADLMRARHRLSKLLLRHGIVYYDGKAWTERHDRWLHHQRFDAAPTQSAFEDSYEAVVLATARRTRLDEKITALAADSEFSPLTRRLACLRGISTLTGFALAVEIGDWDRFTGASIGAYLGLVPSEYSSGTSRAQGAITKTGNTHVRRLLVEAAWHHRSTYRPGAVLRHRWDQAPAAARARAHAGNQRLHARWVGLNLRRKRAVIANVAVARELAGWCWSLAVLPD

SEQ ID NO: 214576 - protein, 430 aa, unidentified
MKSNTQNAKIEAITEKTLVLGIDVGSETHYARAFDYRGIEYSKKPFKFSNTEAGFVTFKEWILDLKERHEKDKVVPGMEPTGHYWFNLGKFLQDNEMKPVLVNPHHVKKTKELDDNNPTKNDRKDPKVIAGLVREGRYMIPYLPDGVYADLRTASNIRFQLQAELTRIQNRISRWFNIYFPEYKTVYGKPDAKSGMLILKAAPLPEDILTLGIDGVNQIWRDAKLRAVGKARAKTLIEAAEHSVGSKEGAVSARMEIRMLLEDYESRNTRLQEVMVLIEELVKQIPMAEKLLEIKGVGIRTVSGFLAEVGDISRFNNPKELQKLAGLALVENSSGKHKGKTTISRRGRKRLRYLLFEVAMSLVAKNPEFRELHNYYTARRLNPLKKMQSLMAIAAKLIRVFYAMLTKGVDYDPKKMVSDIKRPAVYLQAA

SEQ ID NO: 214577 - protein, 342 aa, unidentified
MKFYCGIDLSARDCHVCVIDEQLKIVVQQKLRNDLPKIVQLLEPYKANLKIVVESTFNWYWLIDGLQAEGFDVVLAHTLGLYLITGAKVKTDRRDAYSLAKLLLVGAVPAAYIYPVETRPVRDLLRRRARLVQVRAGEYGSLRRLLLRQGMLSSKQQEIKTATEAELEQWFAHPLVRLHASQELQRIELYSQQIAELEKTILGLAQTNQSYQLLLKLPGVGQTIALTILYEVGELRRFANVKVFSSYCRVVPGIAQSGSVTGRGRASKQGNHYLKAAFSQAAVHAVRCYPKVRRYYERQLKRHQGRGRQMICYNIIAHKLAQAAFHVLKEQTEYREELLFGR

SEQ ID NO: 214578 - protein, 357 aa, unidentified
MNTTQKISFANAHFFIGVDMHQKNWKVTIRTDGIELKTFSMNPSPLELIAYLHNHYPDGIYHIVYEAGFCGFWALRVFQQHKVDCIIANPADVPTTNKEKTNKSDPIDSRKLSRELENKSLHGIYIPSPEQEELRMLMRLRFRIVQSQTRVKNRIKGLLYSQGIDIPLRFSGNARWSRAFIRWLESLPMNTSAGHFTLQNLILQLTQLRQHNTIVLRQLRTEAKDQHIAPVVNVLLSVSGVAFITAMTLYTEIIDMKRFPDENHLAAFFGLVPSLQSSDETIYANNLTHRQNSFLRAMIIESAWTAVRDDPAMTLKFKELSKRMNGQEAIIRIARKLVRRIRHVWLTQENYVYALVA

SEQ ID NO: 214579 - protein, 446 aa, unidentified
MNDGSGLSRGDRNRNARLARLRELVPLSNAIVGIDLADAKQAAVVTDHDSRVIARRRVSARAWELGELLDWAVARASAAGFSSVTVACEPTGHRWRVLDQLAAGRRLALVCVQPLLVYRAREGEDLTRDKSDPKDAVLIARLASELRCYEPEHAGAVWARLRHLGARRNQLTTGATAAVNQIRDLLECAWPAALAASPSPFRSVTWRAALAVVLDRCAGDPARVRRGGLGRFTAAVRRELPRWGGTRPCLRIIRAMFAALADPAGVTAHRPGALERAHLALGDWRDTRARLADTETRMCAVLDDLGLTDLVTTIAGLTVTGAAAILAETGDPARFATPRALVKHAGLCPRENASGAAQGKTHISGRGRPGLRLAAWRAVWAAMPNNPVMAARFAYLTTRQDNRLARQQARTACAAALLRWIHVVITRRVAWDPAIAAGSTPAQQAA

SEQ ID NO: 214580 - protein, 408 aa, unidentified
MKLFVGIDVSSLRLDVCFVNSEDQVLHEAPLPNDITGAAEIKEIILELAKSVHYDVIKVGMESTSVYSFHPATFLAEDADLKELGIEVIVQNPKAIARFKGLFEEDKTDIIDARRIADFLRLGLHGTTVIKEEKYVALQRLTRSRYQLVEQTTECKQHFLENLYYKCNTLTRDAETSIFGATMMDLLTESLSFGEIAEMEIEDLAAMLQQKGRGRFSDPEKLAKSINKAIRDSYRLGKVLEGSVDVVLATYAMMIKTLKQQVKELDKAIEKLLEVIPESQCLLSIPGIGTVYTAGILAEIGQIERFDDQAKLAKYAGLYWKRKQSGNRESERTSLTRTGNHYLRYYLVEAANSVKNREPVYNEYYYKKYDEVPKHKHKRALVLTARKLVRLVDVLLRNHQLYTPERSV

SEQ ID NO: 214581 - protein, 400 aa, unidentified
MLSIGIDVSKGKSTVCGMKPGGEIVYTPFEIQHTREGMSDLVSLLRSSGEEVRAVLESTGSYHCPVVTALLENGIFVSVVNSLRMKRFCSQSIRKVKTDRIDAMQIALYGLAYWQELQPAKLPEDTYRELQLLARQYYQMTSMLIKAKVDFNAICDQVLPGMQELMSDHAGRHKLSDFVLRYRHTTHILEMGETRFRKDYCKWAEKKGYRNCERMAALIFATAQNGIPVLPNAPSTQIVITEAIRVLHTVEASRDAILTQMQALAKTLPEYSLVREMPCIGDTLAPRLIAEIGDVRRFHSKRALIAYAGIDAPPYQSGKFCANNRHISKRGNRYLRKTGYEVMQSYVMHKPANDPIFTFIEKKRSEGKCGKLAMVAGLNKFLRVYYGKVTELYRSLPAIE

SEQ ID NO: 214582 - protein, 366 aa, unidentified
MKKNSTVAVGRKQIFKQAKLTIGLDLGDRSSHYCMLDEAGNVILERSLPTTANGIRQAFSRIPRCRMALETGTHSPWVSRQLSELGHEVIVAHARNVRLIGESSRKDDRIDARTLARLARIDPGLLGPVRHRSAQAQIHLTVIRARAALVSTRTALVNAARGLTKSYGQRLNKCGTEQMTRDRAKGLSPELREALDPLLREIESLNERIAEYNRRIEQIAKEVHPEVARLKQVKGVGTLIALTYVLTLDDPQRFRRSRDAGCFLGLRPGRRNSGQSEPQLHISKEGDRYLRTLMVQGAHYILGPFGQDSDLRRWGLKLAERGGKNAKKRAVVAVARKLAVLLHKLWVSGEVYEPLRNSHKVVRAVA

SEQ ID NO: 214583 - protein, 317 aa, unidentified
MKEFRLFVGIDVSKDRLDVAVRPTGETWQVPYDAEGISSLAENLRELAPQLVVLEATGGMELAVAGELALAEVPIAVVNPRHVRDFARAAGKLAKTDALDARVLAHFAEAMQPEPRPLPDATTQELKALVARRRQLVEMITAEKNRMRTATRSIRPKVQEHVRWLEEDLQNLDQDLGDFMRSSPMWKDKDELLRSTPGVGPVLSMTLLSGLPELGTLNRGEIAALVGVAPFNRDSGTLRGKRKVWGGRGQVRAALYMAALVATRYNPVLRVFYQRLCAAGKPKKVALTACMRKLLTILNAMVKHHHPWNPQLVLENS

SEQ ID NO: 214584 - protein, 324 aa, unidentified
MQHYAGIDVSLELSSVCVVDATGRIVREGRVASEPEALIAWFRGLGVELTRVGLEAGPLSQWLYAAMRGAGLAVELLETRHVRDAFKAMPVKTDRKDARGIAQLMRLGWFRPVHCKSLPAQETRALLTARQLLQAKRLDVEMSLRGVLRGFGLKVGPTTTRTFPVRIRELVAGHPTLTAVAEALLAARETLGERLRGLEKRLRDQAREDERARLLMTTPGVGVIVALTFVAAVDDPGRFRSSKAAGAHFGLTPRRYQSGETDVTGRISKIGDAGVRGMLYEAANVILTKPVKGSALKSWAARIANRAGMRKEKVALARKLAVTC

SEQ ID NO: 214585 - protein, 342 aa, unidentified
MNTVTIIGIDLAKRVFHAHGAHADGSVAFRKRIARSQVVPFLARQPTCVVAMEACASAHEWGRAIQQLGHEVRLIPPNYVKPYVKRQKNDTADAEAIAEAGSRPTMRFVAVKTEEQQARSMVFRTRDLLVRQRTQLINALRGHLAEHGVIAPQGPAHLKTLAAVMGAAEPTMPQLVLDVGRVYLEQVDRLSCEIAELEKILRREAQCGEDTRRLQTMPGIGPITAMAVEAFAPPMATFKRGRDFAAWLGLVPVQHSTGGKQRLGRTSKMGQRDIRRLLIIGAMAVIQWASRRGARPGSWLARMLDRKPLMLVAMALANKMARSVWAMLTKKEDYRDLGSAVA

SEQ ID NO: 214586 - protein, 351 aa, unidentified
MANGITMPPTIGIDLGDERSEVCVLGGDGEVQKRFSVATTRAGFEKKLGEIPATRVVVDVGTHSPWVSRWLAAQGHEVIVANARAVRSIAESDRKTDRNDAEQLARLGRADPKLLHPIRHRGEAAQRDRMLLAVRDHLVRTRVSYVLQARGLAKGLGERLPRCKSDAFAQRMRREGTDVFPAMDVLVASVEQLDAHIAELDEKLEALARSTYPETLLLRQVCGVGLLTALAFVLTLEDPLRFARSRTVGSFVGLTVRKRQSGTRDPALRITKAGDQYLRRLLLQCAHYVLTHGPDCDLRRFGEKLIARHGRKKAAVAVARKLAVLLHRLWITGEAYEPLYQAERNALRTAA

SEQ ID NO: 214587 - protein, 418 aa, unidentified
MAKFNGNYSVYVGIDWANDKHDLCIQQANSDIRKFKVIKHSANAINDWIISLHKQYKGKIAVAVELSKGPIVYALQKYKFVTIHPVNPSMLAQYRKAFSPSGAKDDPTDAELALDLMLNYPKKIKALKMESEPVRKLTYLVEQRRRLVEDRRRFSNRLINTLKQYYPHLLDWFSHRGSGMFCDFITRWPNLQKLKRARADTLRKFFHAYPGRTASCTEQRLMLINQAEPLTLDNAVIESHQLLAVALASQMLVVVEAIKIFDKEISALFETLPDAELYKSLPGTGPCLAPRLLVAMGENRSRFTSASEIQMYAGIAPVTERSGQKCWVHWRYQCSKFNRQSFIEWAAKSVYQSYWAGLYYQQQRSKGNTHQSSVRSLAFKWIRVLYRCWKTKEPYNESKYLKALRDRNSPLLFKEKAC

SEQ ID NO: 214588 - protein, 322 aa, unidentified
MSSPSSANVGIDVSKETLDIAVHETETHWTSQHEFSEFPQLLRSLQALNPTRIITEASGGVENLLVSYLAAAGLPVIVVNPRQVRDFARATGQLAKTDRIDAFVLARFGATIEPNVRQLKSAETQELGALVARRAQLVSMLTAERVRLQQAQQQRRQAIVADLKAHISWLEKRLGKCEGDLSQLLRSSSIWRAREERLRSVPGVGPVTTLVLIADLPELGQVPDKQIVALCGLAPHARDSGKWHGKRMTRGGRARVRTALYMAALVATRHNLVIKTFYRRLLRAGKDKKVALTACMRKLLVILNAMFRNQTSWQPPRLQDLI

SEQ ID NO: 214589 - protein, 346 aa, unidentified
MLHVGLDLSRKRVEFGALAEDGRPLEVGSAPADADGLRWLCRRLAGYGEPVRAVIEAMNGARFVHDGLEQLGWEVEIADAVRAKGLAPLACKTDRIDAFVLAELSRRDLVPAIWLPSAEVRRERERARWRLQLVRQRTRLKNRVHSILIAWGKPCPAADLFGPRGRELLARLEVPEPWRSHLEAAVRLIDELDLEIAAIERELRRAGKEHPCVSLLTSVPGISWVLGYTIAAEIGDISRFPEPAKLAGYSGLCPRVYQSGESDRRGPLSKRGPRYLRWALVEAAVTAARHPLYRQRYERTKRRLGKQRGPKVAQVELARRLSHAIWHMLTRGESFAPKGASTSLAA

SEQ ID NO: 214590 - protein, 370 aa, unidentified
MKKKILYIGLDVHKNTIDVAIATGRSNGKVRSYGKINSTIDALNKLIEKLYGNNPELRFVYEAGPCGYQIYRHLRSKNIECAVIAPSMIPKRSGDRIKTDRRDAINLVRLFRAGELTSIYVPTVEDEAIRDLVRCRDDMRRFEHKARQRLLAFLLRHGHHYAGKRHWTKIYYNWLATVRFSHSADQIAFQEYVDMVNECGQRLKRITEQIQVHVEQWDRSPLVKAYQALRGVSFVVAVTVVAEIGDMNRFQNPKQLMAYLGLIPSEHSSGKTIRRGSITKTGNGHVRRVLVQAAWTYRMPARVSTVLLKRQQGLPKSICEISWKAQTRLCARYRRLIARGKSRQTVVIAIARELGAFIWAIDRQLHGAVA

SEQ ID NO: 214591 - protein, 314 aa, unidentified
MAMHATRPVIGIDTAKEELVIQHDDEKRHLAVDNTPAAIRQWLAGLPKGCDIAIEATSTYHMEITERAHAKGHHVYVVDGYRLKNYREGVGGRAKTDLTDAQLLARYLRKEKDELRRWMPPPKAYRTLQSLLRRRAALVKARTALRQSLSAEPLLKTALATLLKQIDRIDHLIQKRLREAVHAAGLRDQVQRCQAIDGIGELTATALVMAFLRGDFQNSDAFVAFLGLDVRVRDSGKLKGKRRLTKQGDTEVRRLLHCSAMSGARHPTWKAFYQRYRDRGLKTTQALVILARKLARVAFALMKYQENYCAPRLS

SEQ ID NO: 214592 - protein, 355 aa, unidentified
MNKIKTNFEGQAIYIGMDVHKDSWNLGIHLNDIFLKNVHQKPNPQIMVDYLHKNFPGAIYKAAYEAGKFGFWIQRQLTSLGVECLVVNPADIPKSQKDSLQKTDPRDARNIALRLQSGFLRGIHIPDEQQEADRIFFRHRKKIWKDLTRCKNRIKGLLAFTGIDIPEPYDNASWSHNFINWLKALDCKQSPRRLALDFQIRQMEFMRKELLSISNGIRKMMREQRYKTNYYLLRTIPGIGPLTAASILVEIGDIKRFDTFCHLNSFIGLLPMEHSSGQSENKMSLTVRKHRQLRSDLVESAWTAKRTDPAMALYFDQQIKRKDSKVVIIKIARKLLNRVRYVLLNQQPYEYGIVK

SEQ ID NO: 214593 - protein, 400 aa, unidentified
MSASEGKADIAIPHARSEFMMGWTPRRRHRCAKVEVLSTTLREASVSEVSIIGLDIAKHVFHAHGADERGRVIFSKRIGRGKLLDFFAAQPSCTVALEACGGAHHWARQLTQLGHDVRLIPPAYVKAFVKRQKNDAIDAEAICEAAQRPSMRFVAVKSEEQQAAGLVFRTRDLLVRQRTQLINAIRGHLTEYGWIAPKGPSHVAMLADLIEEDEMANALPEAAHAMFRLMLDLLAGLNGKIADLDKEIARRAREDEVSRRLMTVPGIGPISATAIAALAPPVETFAKGRDFAAWLGLTPLQRSTGGKQKLGATSKMGERTLRRLLIIGSSAVVQQASKRGAPKGSWLEQMLARKPRMLVTVALANKMARIVWALLVKQENYRAPVAAKDVILADLRSSEV

SEQ ID NO: 214594 - protein, 343 aa, unidentified
MQTITTIGLDIAKSVFQVHGVDAAGQVVIRRQLKRRYVLAFFQKLPPCLIGIEACASSHYWSRELQALGHTVRLMPPAYVKPYVKRQKNDATDAEAICEAVARANMRFVPTKTPEQQSCLMLHRTRHLFIRQQTAVINSIRAHLAEFGIVAPVGRKGVTELLHIVADPSDKRVPEVARACLAALGNQLLSLKEQIVEFDRMIMVWHRSNETSKRLHYIPGVGPMLATALVASVADPRTFRSGRNFSAWIGLVPKQHSSGGKDRLGSISKQGDRYLRSLFVAGALAVIRYAKIHGTKHRPWLTALLTRRPTKVAAIALANKLARMAWAMMARGERYRQPVALAA

SEQ ID NO: 214595 - protein, 410 aa, unidentified
MELLHPHCAGLDIHKETVVACVRHLRSGKVTTGIKTFKTTTEELIALSDWLATEGCTHIVMEATGVYWKPVWHILSDGEFELVLANAGHVKNVPGRKTDVNDAVWLAELMAHGLVKASFVPDQPTQQMRDLLRTRKQFGRERSSHIQRIQKTLEDANIKLDLVVTDVLGLSGRRILQALIAGQTAPQALAALADRRIHATTAQLEAALRGRVTDHHRFMLKLHLDQIDAQDAAIARIDKEVDGNVEPFRVALEMLNGIPGVSSLSAEVIIAEIGLDMSRFETAGHLISWAGLCPRNDESAGKRRSNRMKKGAPWLKTTLVQCAWAAARTKDSYFHAQYLRLRSRRGPKKAIGAVASSLLTTAYHMLKSGTFYQDLGANHFNHRAKDKQALHLIHRLKNLGFNVQITPSPA

SEQ ID NO: 214596 - protein, 438 aa, unidentified
MSALPVINPKAAAIDIGSEQMHVSLAGGEPKIFGSTTAQLHALRDYLLSQGASSVAMEATGVYWLCPYEVLEKAGLQVVMVNGKYVKNLPGRKTDMKDCQWQATLHAHGLLKGGFVPQEHIRRLQDYQRLRADHIAEAASCEQHMQKALERMNIKLHDVISDLTGVSGLKVIRAILQGEHNPVALLALCDCQIQKKKAERVCESLVGTWKKEHLFALRQALAAWEFYRGQIAECDEALEQVLKEVTDDKPGPPDKLPSWGRRSGANSPQIPQMREMLWKLCGGKDPTAIPGISDYTLLQLVAETGTDLGSHWKSDKQFSAWAGLAPGARQSGKRRGSQKRSRNRAGRIFCVIARAVGRASDKALGGFYRRLRARRGGLVANLALARKLAQMFWWTMVHGLAYVEHGLKKYQDRVQQTEQAWLRKLARKHGMVLQPAPA

SEQ ID NO: 214597 - protein, 364 aa, unidentified
MQKISTMQASGKNIFEGQLTIGLDLGDRSSAYCVLNEAGEIVLEHKLATTPEAMKQVFGSMPRCRIAMETGTHSPWVSRLLNALGHEVIVGHAQKVRLITKSRRKDDRLDARTLARLARIDPELLSPVQHRSAQAQLHLAEIRARAGLVSARTALVNAARGLVKSYGERVHKCDTRQFSREASGLSTGLREALEPLLCQIESLNESIQEYDRRIEKMAKETYPETALLKQVKGVGDLIATTYVLTLEDAHRFRKSRDAGCFVGLQPGRRNSGESEPQMRISKEGDEYLRTLLVQGAHYILGPFGEDSDLRRWGQKLSARGGKNAKKRAVVAVARKLAVLLHRLWVSGEVYEPLRNSQKAMSTAA

SEQ ID NO: 214598 - protein, 351 aa, unidentified
MQITTVGIDLAKNVFQVHGVNEHGKTALKKQSRRDQMATFFANLPPCLIGMEACGGAHYWARKLQAVGHTVKLMAPQFVKPYVKTNKNDAADAEAICEAVARPNMRFVPHKNIEQQATLALHRVRQGFVSARTAQANQIRGLLAEFGLVMPQGLSHVKGRVRDLIEDASNELPGSFRQLIERLLDHLMVLDRQVNELQAQIKDSHRKSEASRRLEKIPGIGPITASALVATIGDAKSFENGRQLAAWMGLVPTQSSSGGKTNLLGISKRGDTYLRTLLIHGARSAVRAVQGKPDQSGSPWLQKLLERRNYNIAAVALANKNARIVWALLARDREYKSGFSYAKATSPRSGD

SEQ ID NO: 214599 - protein, 389 aa, unidentified
MNTITKTASTNASILAIDLGKYKSVACVHDPDTGEFRFTTFETTRDELQRLIRRDQPGVVIIEACLLAGWVHDLCVELGVRCLVANTACEAWKFKHLKRKTDKDDALRLAQLYLLDQLPTVTLPATEVRQWRSLIACRQTWVGRRIAVQNRIRALFVAQGLPAPRGAKAWTATGLAGITTQAKALTECGPDELWRGLLELALTEYRQVCELVSQAEARLDALGKQSAEVILLETVPGVGPRTAETVAAYLNDAARFKTAKQVSAYSGMVPRQHQSGEMDRRGRITKRGPALLRKMLVECAWCMLRYNAWARGIYQRLTGGGQRRKKQAIVALARKILVRCWAMLRDKKPWRDPQTGAKPKLPPSKQRRQEETQRRRQAKQSAVLEGTNA

SEQ ID NO: 214600 - protein, 408 aa, unidentified
MNAVGIDVSKGKSMVAALRPMGEVALLPREFLHTEVGLEQMAYAITTLGEDTRVIIEATGRYHEPVAAALHKYGIYVCVLNPLYIKQSGGGSIRKVKTDKADAMKIAKYGLDNWVDLREYTPMDTVRQQLKLCSRQYNLYMKTVVSLQNNLISLTDKTFPGVNELFSSPERADGHQKWVDFVMTFWHCDCICRVSEKVFTERYQKWCKRKGYHFSTEKALDLYAGSCGHFTTLPKNDNTKLLITTAAQQLLAGKMTLAALRAEMTRLAMQLPEYNTVRAMYGVGETTAAQLMAEIGDVRRFPRRSSIVGFAGVDPGVDDSGKHSAKSVPTTKRGSPHLRKTLYQIVCTYLRKAPANELVYQFLEKKRAEGKPYFVYMTAAQNKFLRIYYARVKECLAAFDAQQDTTQS

SEQ ID NO: 214601 - protein, 419 aa, unidentified
MNEQSHQPGLYIGIDWADRKHDCYVIDRNGKAFHREISHSPEEIDAWVTEMLALADGGPIAIMLEQSRGPLVHALMFRENVLLFPINPKQLARYRESYPGGGKDDPTDAKYLARMLRERITTLTPWQPDDENTRLLANLCEQRRKMVDGQTKLRLQLIAQLKSYFPVVLELFGTVRQQPLLLSVLSRWPDPRQLRRADRRLIRRVLSEHSVRNEERQNKIIDRLRSAKSLTSDNALITPAAMAVKLLASQLQQSHKTIMTFDAAIAEAMQRHPDAHLFTSLRGAGPALAPRLLCAFGSQKDRWKDADSLAAFSGIAPVTRKSGKQRQVRRRYACPKFLRQTFHEFADSARLYCPWTKARYRMLRDRGMKHHAALRKLARSWIRILFCVWQTRTPFDCDRYLAQLKQRCPEIIPYLADGN

SEQ ID NO: 214602 - protein, 438 aa, unidentified
MSNKVIFNLDELFISVGIDVGADFSWMSIALPNQQFVGKPYKILHNSIDSLTTAVSKIKEAEELYSLESRIFLESTGIYHYPLFCYLRDKGFNCSVINPIITKNSTNINIRKVHNDRFDSKKAALVGLKPDLKVSLMPSDLALNCRNLCREYYDLIDNRSAYVNKLQGELRMAFPQYLGIFSKVTINTSLTLLETYTSPSAFLKVDKQEIIDIIKSTARFGLTYAQNKYNAIIQAATDANQFGYIIDSNIKRIRLYIRFIRKYDEEINSILESLHELVDANEDSDFVKQIHLIETFKGAGFLSAVSIMGEIGDFSAFSKPKQLFAYFGLDPSVKQSGKFEGTKVQMSKRGSAIARRVIHTLTLQSISISRNREAKNPVLREYYLKKCDSKPKLVAMGAVSHKVCNMIFAILRDNKPFKIIAPQEHIKQYNSAKCDIAA

SEQ ID NO: 214603 - protein, 368 aa, unidentified
MATNVRYIGLDIHKDSIVIAVAENGVEPAKVLASIPYDVSQLLKRLRKLGSAASVRCCYEAGPSGYESYRALKQTGIFCIVVAPSLIPIKSGNRVKTDRRDARTLAHFLRSGGLTAVWVPDEATEAMRDLERARGAAKKTERVARHQLDKFLLRHARRYEGGKRWTQKHLEWIARQQFAHHAQQRVLIDALHTVQQATARIERLTNDIAQLVEQWTSRPLVKALMAFRGIELVTAVTIAAEIGDLKRFDTAGRFMAFVGVIPSEHSSGTSCRRGSITKTGNGHVRRVLVEAAWSYRYQPRLSPRIRKRNEGISPTVQAIAWKAQVRLHNRYQRMMHRGMVAQKVITAIARELAGFVWAVGQEKQLLCE

SEQ ID NO: 214604 - protein, 320 aa, unidentified
MSEQAVVVGIDVAKLHVDVAVLGASAAAGRYDNDDRGHRTLIEALLPLAPALVVMEATGGYEAPLACALQAAGLAVAVVNPRQARDFARSFGQLAKTDRIDAAGLAEFAVALLGRPDLDRYLRPLPTAAQQDLVALVNRRRQLLTMLGMEEQRLAMARPAVRRSIQALIKAIRKQLDDVDGAMAEHVTRHFAELAGLLCSTRGIGPVASATLIADLPELGHLTRRQVSALVGVAPFACDSGSMRGRRRIRGGRFELRRTLYMATLAAITYNPVIRAYYRRLVDAGKLKKVALVACMRKLLTILNAMARTHTPFQENYRNT

SEQ ID NO: 214605 - protein, 346 aa, unidentified
MPNVGGLDIHRKQITFDYLDTVTGQVRRGQVSPADREHLRAWLARFHGREDVAFAVEGCTGWRYVAEELAAAGIAAHLAEPADTAFARGRKRHAKTDKTDCRHLRMLLAEGRLPECWIPPGHILECRALLETYHDLRAEHTAWVQRIHAVLFHQGAPALGEGTLRTEQGVAALRAVTAEWLSPAGQLQVAAALEILEALETRLHMLRRQLTDAARHLTGAKVLAARLYGVGPVTALAMTCWLAGKDRFSSSRKAVRFAGLDVTVSSSDRKGPPGRLSRQGPPVLRWAVYEAGKTHARSSAPDYRYYAQVKDRCNGKRAALSEARKILRQACHILAELGDDALAPAA

SEQ ID NO: 214606 - protein, 436 aa, unidentified
MAGTDLGGERYWVCAPIVDGSGREIASYGATTPELIRLAEWLKQRRVESVAMESTGVYWIAPHEVLEGQGLQVLLVDTRQLARVPGRDKKTDPRDCEWIQRLHSCGLLRGSFRPEEAVCMLRTLVRDKANLVAESGDWLRRMQKSLDQMNVRVHRAVSDIDGVTGMAILRAIAAGERDAQKLAQLRDRRCSKTQQEIAEQLTGHWREDHLFSLQQALKMYDAVQERIAAYEQEILRQLGEMEEPGQQGQTAPPLHNANKTKAIKKRGQESKRQALYRMSGVDITQIDALGVETVEVVLSEYGPDLGRFPTEKEFVAHVTLAPRVPSSGGKPLKKKKRNSASTRVAAALRMAALSLRHSQTALGAYYRKLAQRLGGDVAVFATARKLATLNYQLLRWGQPYVDEGAAAYENRYLQQRIKSLTAKAKQLGYELTAVNA

SEQ ID NO: 214607 - protein, 352 aa, unidentified
MGQVTMADQQSHVTVGVDSHKDVHVAAVIDQVGQILATTSMATTDRGSGQLVRWAQRHGQVDRFGVEGTGSFAAGLTRYLRARGYQVLEVNRPNRQTRRRRGKSDTVDAESAARAALAGQASTPKAADGTVEMIRALRVARRSAIKARTQAANQLDSLVITAPEELRVQLRGLATARRVEVAAAFRPGSLTTPVAATKLALRELARRHLALTAELERLDTELAKLVRKAAPKLVARRGVGTEVAGMLLVAAGDNPDRLRSEAAFAHLCGAAPIEASSGKTVRHRLNRGGDRQANNGLWVTAMCRMHSDQRTKDYVARRTKEGKSKKEIIRCLKRYIARELYRDLVTAVLDKP

SEQ ID NO: 214608 - protein, 380 aa, unidentified
MIALDEGWVRPAMSGYRWVPTLNRPGDAPMGYDYHIGVDYHKSYSHIVVQDAGGKMLRSGRVKNDGQSLASFLGPYRENAHAVMEATRNWTVMYDWLDEICDEVVLAHPLKVKAIAEAKIKTDKIDATILSHLLRADLVPKAHAPSHRARDLRSALRERMFFVRLRTMVKNRITTAFDRYPEETAQLRQVTDLFGVTGRKQLAALAVSDLDRIQIDRGLAFVDNINQQIKDCERTIKLLSKGNANVRLLKTLPGVGEFFARLIDAEIDDIHRFASAEKLAAYAGIVPSTYSSGGKTFNGRIIKQGNKWLRWAFVEAVVPAITHDLEFRAYYERLKAAKGANRAKVATARRLLTIAFRMLRDGRCYEQRGPNKEVTPSRLS

SEQ ID NO: 214609 - protein, 415 aa, unidentified
MEPVLESCAGMDVHEKKVDVCIAHGSLDKSPKFEIRTFSTMTSDLEELSSWLKKYKVTTIGMESTGVYWKPIFNVMEGEFKIVLANAQHLKSIPRKKTDIMDCKRIAKLLRYGLLPNSFIPPREIRELRDLNRTRRKLVGIMTSEKNRLTKVLESANIKLSSVVSKICGVSSLAMIQSLLEKDKLSKEEISKLAKGSLKKKVGLLEKALNGKVTDHHRFLLKMHLENIDHLARQIKKIDEQIERKMILFQKERNLIQTIPGISEISGSAILAEIGTDMSQFPDAAHLSSWAGVCPGNNESAGKKKSGKTQKGNSFLKGTLTEAAWAASKIKGSSYSAFYQNIVRRRGKKRALVALAHRMLNDIYYVLKTEVPYQDTGSEATNERATKRREQSMIRSLEKAGYSVVKTPAAEMAVA

SEQ ID NO: 214610 - protein, 371 aa, unidentified
MEVLHAHCAGLDVHKDTVVACVRPMVEGKIATHVKTFKTTTAELMLLSDWLSAEGVTHIVMEATGVYWKPVWHILSDGEFELVLANAAHVKNVPGRKTDVNDAMWLADLIAHGLIRASFVPDEPTQQMRDLLRTRKQMVRERSSHVQRIQKTLEDANIKLDSVVTDILGLSGRRIIEALIAGQTMPQALASLAHRRIHASTDELEASLRGRVTKHHRFLLKLHLDQIDAFDAAIASIDEEVDTNVEPFRAAIELLSTIPGISALSAQVLVSEIGIDMSRFPTAGHLISWAGLCPKNDESAGKRRSNRMKKGAPWLKTTLIQCAWAASRKKNSYLQTQYLRIRSKRGAKKAIGAVAASMLTAAYHMLKDGTF

SEQ ID NO: 214611 - protein, 344 aa, unidentified
MHIASIGIDLGKTTFHLVALGERNKILLRRKFSRSQLLAYTANLPSSLIGLEAGSGSHFLGTVLREQGHQVRLIPAQYVKPYRKTNKNDFIDAEAIAEAVTKQNMRFVQIKSQEQLDIQAMHRVRDRLVQRRTALINEIRGFLLDRGLTFAARPIHLRKNLPSVIEDAEQKLSPRLHWLLDRMWQEWNQMEVDIKAITEAIERIGNENALCRRLRQIPGFGPLVSTATVAAIGNGAAFRRGRDFAAWLGVVPRQYSTGGKQKLFGMSKRGNTYLRRMLIHGARAVLLRVKYNTGGFGQWVHRLAQRAPHNKVVVAIANKLARIAWAVLSSGHDYQHQRLQPVAA

SEQ ID NO: 214612 - protein, 347 aa, unidentified
MSTSMIAIDTAKSTFHLHGVDAEGKVQLKRKLRRDELVAFFGRQPRCTVVMEACGAAHHWARMLGGLGHEVRLIASEAVRPFVKRGKKNDPADAAVICAAASRPEARFVAVKSLEQQGVLALHSVRTLPVKQGTMLANAMRGLATEFGLVVPRGMDRLEELVALVEEDEGIPEQARKAFVELREHRRATAERIGDLERRIVAHARHDDTARRLATIPGIGPITASLTAATVGDGIGDFRSARHFAAWLGLVPRQHSSGGKTRLGRITKAGNREIRTLLVLGATSMVYRAGQWNSAAGAWVRGLLERRPVRHVTVALANKMARIAWAVMARHEVYRARGGVAPAAATA

SEQ ID NO: 214613 - protein, 425 aa, unidentified
MRVTKVVDVIKMEQVMDVSVDVHKDELYALARTPGKEYAEQFANKTPRIRKIIKDYQEIASEHGFKQIRVVCEPTGVYDRKLLRAARQLGALTSYVNAEAVAKFRVVQNNDNNKTDTSDPGVILTMAEHGHTIKHRILPDGYLGLRKLGSLLDDEEVMIVRIRGHINHVREELFCDWKFDKDFMYGNTGKSLVAKYGANPYKIVKSGFTRFSSVMKRAVPRIRKTSIERLWAQAESSVLNEQPEGYIAILEQRLCDLYEDFWRHKNRKTSIEKEMVAILQQLREDDPSIPPPTPGIISEKNFARLLGETGPLNDFQSEEKIMRYAGLNLCMRKSGQYQGKYKISKKGRPLLRKIISQIVLQLVRKGGLYGDYYHEKKERQSLPGAKMMTIVMRQYLRKFYGWYRSEQEFDKTRFFTCEHKYKMAA

SEQ ID NO: 214614 - protein, 345 aa, unidentified
MGQVCQIGLDIAKEYFQVHGVDKNGKDVFNKKLKRKNVLSFFANLPPCLVGLEACGGAHYWARKIAKLDAGHTVKLISPRHVKPFVLNNKTDAVDARAICEVAGRPSTRFVAAKTVEQQDLAAWHRIRERKIKERTALANQAKALLLEQGIVVAKGITRIRKFLPIAVENLENRLSMTARDYLSELYAELVTCDELVEKYESRIISFAKNDEACKRLQKIPGVGPITATAIVVHAADATEYKNGRGFAVSLGLTPKEHSSEGKQKLPGISKRGSNTIRKLLIQGARIITRYALAGEDKGYPVQKWIQGVATRRGRQIAAVALANKTARIIWNLLAKREEYRPVMA

SEQ ID NO: 214615 - protein, 383 aa, unidentified
MHGQIHSTTCQQILGLDLGKFNSVLCIYDPATHEHHFGSVQTTPQTIHDLLVTHQTEDASATLLVIETCDVAGWVYDIAVALGMQVWVANPAHEAWRWTRVKRKTDKDDALKLAKLAVLGQLPTAHMPSPQQRQRRRLVHYRRVLVDRRTQIKNQIRSIHSQQGLSLPKRGKAWTQAGIRQISQDARPLSECSLIDDLWRGRLHVELQLLESLNKQIEQVDQKLDGLGASDDRVRLLQTVPGVGPRLAETVVAHLDDPQRFKSAGQVASYAGLVPKQFESGTIKRSCRITRRGPGLLRSMLVEVAWMVYLRNDWAKAFVTRVSRGAASRKNIAIVALARKLLVTLWAMLRDNTRWREHKAPCFSPPEDTVQEIPLSSVAVAMR

SEQ ID NO: 214616 - protein, 398 aa, unidentified
MAVVMIGVDPHKASHTAVAINAAEEPLGQLRVRASAVQAERLLGWAQAWPERAWAVEGAGGLGHLLAQQLLSAGERVLDVPPQLAARVRLLATGNVNKNDPNDARSVAVAALRSAQVREARRDDHGTVLKVWSKRYKDLGRTRTQVACRLHQVLCELVPGGVSGEITAGQAGQVLASITPAGAVQAARCELAAELTEDLRGVDIRIRETRKKLAEAVRAAGTCLTRLFGVGPVIAAAVIGDVRAVSRFASRDNFASYNGTAPIEVSSAGRKVYRLSRRGNRRLNHAIHMAAVTQIRYRHTQGRAYYDKKLAEGKTGKEALRSLKRQVSNAIFACLQADARRAAAHAKGPGGQPGNGSDSSAAGSHPGHRLFGQATPGPNPQRYDHPHRAARARPKPAS

SEQ ID NO: 214617 - protein, 459 aa, unidentified
MKHNSKRQRAKEISLFERIQPDAAGIDCGQRSHFVAVAPERDPQPVREFSTFTTDLVRLAKWLKQCQVTTVAMESTGVYWIPLYEILEQHGFEVVLVNARAVHNVRGRKSDVSDSEWLQQLHSVGLLRPSFRPSNAMVPLRSLLRQRATLVEELSTRVLRMQKALTEMNLMLHTVVSDITGVTGSKIIEAILEGARDPERLALHRDGRVRASHQQLVAALTGNYRAEHLFALKQNFEAHQFHLRQIAECDQEIERVLMQLAEQQPPPSTALPAARRTQVSKKHAPGFEMRSPLHRLTGGADLSQIDSIGPLAALQIVAEIGTDMSRWKTEHHFAAWTTLAPNNRISGGRLLSSRTPPSANRVATILRRCAMTVGKTQTALGAFYRRLAARIGKAKAITATARKLALLVYRVLAGTLVYQDTGAEAYHQLNRARELKHLRKRAHILGFQLLDPASGELLA

SEQ ID NO: 214618 - protein, 399 aa, unidentified
MTAVMIGVDPHKASHTAVAVSAAEEQLGELRVRAGGAQAERLLAWAEAWPQRTWAVEGAGGLGHLLARQLLSAGERVLDVQPKLGARVRLLAAGNANKNDPNDARSVAVAALRSPGVREARPDDHAAVLKLWSKRHHDLGSARTQVACRLHAVLCDLVPGGVPKRIIAAQAARLLDSVTPPDAVAAARCELAAAYIEDLRRIDAQMREARKKTAAAVRASGTSLTSLFGVGPVIAAVIIGDVRDTSRFRTRDHFASYNGTAPIEVSSGRRKVHRLSRRGNRRVNNAIHMAAVTQVSHRHSKGRAYYEKKLAEGKTPKEALRALKRQVSDAVFTCLQADARRAAGRAGGSPGGQQGNDSGSSAAGSHPAGRLFGQATPGPHHQPTIPTSQVAGKKPKPAT

SEQ ID NO: 214619 - protein, 343 aa, unidentified
MEYGAIDLHTKDSQIRIIDGAGVVVLERRIPTTRARLTDVFGRRPPLRILLESGTGSEWVAQHLECLGHEVVVADPNYAPMYGQRTRRIKTDRRDVAALVEANRVGVYRRAHRVSVLQRDVRRRLRVRDQLVHVRRQAINLLRAQLRSEGVRVPTGAAETFVARFSASEVSAAVRSAMAPLLELLAAVAPLLAQSEQRTRQAANADTVARRLMTAPGVGPVVALAYQATVDDVRRFATPGAVTSYLGLVPREDSSGERQRKGAITKAGPSRMRVLLIQSAWHLWRSPTGSATLHAWARRLGERRGRRIAVVALARRLARILWAMWRDGRDFDPARVGRLVVAA

SEQ ID NO: 214620 - protein, 290 aa, unidentified
MTVYVAVDFHAREQTVSYCNLADGEIHRRKLRHQHDDVRAFYQQFTGAVIVAFEASGYSAWFEQMLAELGHTVWLGNPAEIRRKAPRRQKNDRRDADLMLDLLLKGDFPRVHGFSEESRTVLRQLRYRHKLVKVRTIAKNSLQAIGINAGLPLQRRLLTAPGIAQLQALSLSPVLTQQRDEWLQLIGSMNERIATVEAQLQQRAKDDAAIALLRTHPGIGLLTSLALRYTLLPTSRFSTTRQVTAYVGLDCMEDQSAERRGWAVLVKPDRNCCVFCLMKRGTRPRGTIRN

SEQ ID NO: 214621 - protein, 324 aa, unidentified
MALKIVYKICCGIDVHKNFVVACIAKTDKQGITTYESHHFSTYTKGLKELLKWLLDRNCKDVCMESTGKYWIPVYNVLEKDCSIVLAHPKYVKAIRGKKTDKKDAKWIADLFKHDLVAGSFMPPADIRQLRDLMRYRFKLTCFKSSEKNRYQNCLTVSNIQLASVVSDTFGKSSQKILDKILENPDDASFDIESLIHGSMKDKLPKLELAIDGYITPEQAAKLKIIKEHFDNLESRKAELEELILALASPYQQEIAIILTAPGFKNTFSAISVISEIGTNMEAFPSAKHLCSWAGLTPTNNESAGKKKSVRVSKAGCYIKPLLV

SEQ ID NO: 214622 - protein, 281 aa, unidentified
MKNYEDVVGIDVSKKTIDAYCHQAEVHKEFVNDVVGYKSLLKWVFKVTKGIKVFYCFENTGYYSLKLALYLHSQAIVYVEESPLKIKRCSGIVKEKTDRIDSSLIARYAWLYREELHPSTVKSSSHLELGRLLALRDQIVRNNAGLKGTLKEIKVLLSSPTTDSGCILLKRSIDYLEKQVKSIEDRIKAILCEDVLMRKNYELLTSLKGVGLVVACQLIYHTGNFTRFASWRAFSSYCRTAPFEYQSGTSIHRRKQCHYLGDRKMKSLLSMASVSAIQHDS

SEQ ID NO: 214623 - protein, 350 aa, unidentified
MDKELYIGVDVSKQTLDLAYYDGESIDWKKAHIKVSNNNAGFKKIGSWVAKVSKGFDIVLFCMEYTGLYTQDFRLWLEEKHYIYRMVEPRKMHRFEPDLDDGLRSLDRIKTDELDSFRIAIYCEQNHRKILRNPSKLPPPVYFKLKRLLAERKQTVKQSVLYKQQLHDICAYDTDLSVERKNGQLKTLNDALKGIDNEIDMYIKEDADISKNFSLLTSIPGIGRIVALETIVLTENFMAIDNPRKYACYIGVAPFKKESGTSVRKGSSVSKKGFKQAKADLSIACLVCMQHIPNIRDYWERKRKEKCSGIVFNAIKFKMILRMFAVIKRGTPYVETDNYRNGKNKQPGVN

SEQ ID NO: 214624 - protein, 394 aa, unidentified
MKLVGIDVGKNSHHFCVMDKETGEFNVAPSSFSNNKEGFDFLINSLKPYSKKSILIGMEDTGHYHVALLKFLLSNGYTVALINPKTTDLTRKMEGGITKNDKLDTITICDVLDTPERKKQYRITKVDRFDLYEQRQLTRHHHNLKEELNVYCNRLQKSIDLVFPEFNTLFSSKYSIVYMNLLKTFGSAEAIASTDIRTIRKFFEIKGKGNRISLTPEKLKECAKNSIGISSEVETIQIKHLVSQITLIKEQIAEIDKKIEEFSITNNSPILSIPGISHFSGTSILAELGDIGNYSKPSQIIKFAGVAPYHYESSQYNAQHTGITKKGSKYLRKTLYQIILTVINNNPVFKKYYLLKISQGKGHRCAQGHCIRKLLRIIYHLLETGQSFDPALLR

SEQ ID NO: 214625 - protein, 393 aa, unidentified
MNKIVHHIGLDVHKETIAVSIAPANTTEVRRYGIIGGTLEALDKLIKKLSAQDVELRLVYEAGPCGYVIYRHLKSKGISCAVVSPSLIPKKASDRVKTDRRDADQLARLFRAGELTPIHVPDQEDEAIRDLVRARTAALRDQRQARNRLKGFLLRQGFRYTGRTSWNDAHKRYLAGLLMPQPAQQIVFQEYIHAIDDASQRLARLDNAMVGALPGWKWEPVVAALMSLRGVQVLTAMTLVAEAGDMTRFKNPRQLMNYFGLTSSEHSSGGNRVQGGITKCGNSHCRRVLTEAAWHYRVRPLVSEAMQKRQEGQSKEVRLIAWKAQQRLHKRFKQLAARKKSVVAATAIARELTGFVWAIACAVKPAAQEAKPEILRTCKGRVYQLNNPKKDQK

SEQ ID NO: 214626 - protein, 312 aa, unidentified
MYHMKEELVYLGVDIAKAYLDTAIGNEKSRFSNDALGHRQLINWIKQMPANVQVICEPSGGYERALVRALVGAQLKISLVPANRVRQFARAAGILAKTDRIDAKLLCAFGEALQPGTISASQLEQQHLRELESQRRHLTHLLVMERNRAARMNDLCVCKMNRRLITQIKKQIEQLDLLIQGQIKASPELSTKAEKLTAISGVGARTAALLLAQLPELGELNRREVAALVGVAPFNRDSGRMRGKRAIYGGRKPVRHGLYMAALVAAHHNPILRNFYLRLRAAGKPAKLALTATMRKLLIVLNSALKPDLIYA

SEQ ID NO: 214627 - protein, 342 aa, unidentified
MTFVGCDLHTRMQQVAVLDTQTGEVSERQLPHDGMAVERFYAALPRPVTVGIESTGYAVWFHTLMQRLGHTLLVGDAAKMRAMVVRKTKTDRRDALHSLDLLRHDRFPAIWVPDPATRDLRALLTHRMRLVRIRTMVKNGLHAIALNSRLACGSKLLRQAGLAQLQALALPPHTAQRRDQSLELLASLTTQIRVLDDAITTAALAHPDAPRLITHPGVGALTALTTIVVLGPVSRFHDSKHVVSYVGLAPALHASADKYHLGHITKQGSPLLRFVLGQAAAHAARMDPDLKRTYGALVHRRGRPKAKVAVARKLLVRLFIMLRDQIDYDEFRRRGRTAPASA

SEQ ID NO: 214628 - protein, 398 aa, unidentified
MDLPVYYELETNNGNRDYRIQIGGHYMNYNTVYVGMDVHKESFTLCSCKYEDEKASHYQRTPASYKNVLRYLAFLRTIYGEDTRFVCGYEAGCLGYSLYHQLENFNVECVILAPTTMLEQRSKRRIKTDKRDAEIIARSLAQHNYSPVHIPTETDNQTKEFIRMRDDHKAELKKIKQQILSFCLRQGYQYDGSGNWTAKHVKWLRSLKTEGLYKEILDEYLLTYTILTDKLNRLDQRIEELASKEEYKESVSKLTCFLGIKTHTALSVIVEVGDFQRFVSARKFAGYLGLVPGQHSSGDDRNGLGITKAGNTHVRRLLVESAQSYTRGKIGYKSRVLRSRQAGNSPQVINYADRANERLRRRYYKMVLKDGKKYNIAKTAIARELACFIWGMMTDNIY

SEQ ID NO: 214629 - protein, 340 aa, unidentified
MIATTKFFIGIDVSKPYFDVALMAVVNHVKQEIETSRFDNTAPGMKLFEKWLKSYKTAFNTDSLVVMENTGIYHRLLWSFCSNRGLPIHIGNAARIKWSFGIVRGKNDKIDSIRLCSYAFKEADDLKATAALDPELMLLKDLISARTKLLKQRSGISVSVKELGNVNGKEHQKLIEKALKNAIDGIASSIRNVEDQIKKIITGNQDFKRNYKLLLGIPGIGHVTAVYLIGCTGNFAGQPSGKELACYAGVAPFEHSSGISIKGKTRVHRMANKELKKLLHMCALSLIQHNQEFKTYYNRKKDEGKHSMSIINAVRNKIALRVAAVIKNQASYKNNYNIAA

SEQ ID NO: 214630 - protein, 392 aa, unidentified
MTEPYLIKWLSKYPKDGGWMYAACKANLKKEMKNMNHLGIDVGKRKCSRAALKDDKGMMLDEFFFGNDMSGIHNMLSRIQSHGKGATIRAVLETTGNMWIRIHDSLEENSIDTKHANPYKTRIIAEAKIKSDKLDARILSDLLRTDLIYESYVPNSEDRDKRSLVRHRITLSRTKTKLANKVHSILDKYDYQTDLTDIFSKSGIEWLKSLSSIVTPVDRIILNTSIESIEAINQQVDTVSKEISKYARDNKDVKILLSITGIDIFSAMLISAEIVDVRRFSTPWKLVSYAGLAPSIRESSRKIKTGKITKQGSSPCLRWIFVQCALTAIRFDAHLRIFYDRIRNKRGHATAIVATTAKELLVIIWYMLTRNELYRYMNKQRYEQKLHKLEHR

SEQ ID NO: 214631 - protein, 377 aa, unidentified
MKTELYVGLDVHKDSISTAVAEAGRQGEVRDTGAISNDLHTLEKFFARLRKAHGPDVIIHVCYEAGPCGFGIARRLKQLGLECSVVAPSMTPTRAGDRVKTDKRDARKLARLLRSGELTAVYIPEPTDEAMRDLCRARTDAVADRRRARHRLKAFLLRHGYRYHGKTAWSAAHQRYLRELVLPHPAMKVILEEYLMAIDGAEERIGRCEQAMRDLLAGWRLEPAVKALMAMKGFQIVAAMILVSELGEIHRFAHPRQVMAYLGLVPTENTSSDKRRQGGITKCGNAHARWLLIESAQHYITPPKVSKELSKRQEGQPREVRAISWRAQNRLHGRFTRLAARRLQRNKALVAIARELCGFVWELLRRQPCYQLEAVCF

SEQ ID NO: 214632 - protein, 345 aa, unidentified
METMYYIGLDVHKRTISYCVKDVSGRVYAEGSVPATRFDLDRWMKTLPQPWTAAMEATMFSGWIYDHLKPHAAALKVAHPLMLRAIAAAKKKNDRIDANKICDCLRCDFLPECYMAPTAIRERRRTLRYRNLLVRQMVQMKTKISMLLMEAGVSYNKQRLHKAGYFRELLATNPDIDEGLCSLLRLCRETVVRLQKTESALVRSLERDSLLMDRVERLMTIPAVGPITALTWALEVGDVQRFSSIKKAISYCGLCGAEKSSGNTVQRTPLSKQRNKHLQTTLIEAAKMAPRNSPELAMLYDKEKQKGNANRATLAVARKLVAYLVAVDRRQKEFLTVERENRTAA

SEQ ID NO: 214633 - protein, 423 aa, unidentified
MDILYEQVAGLDVHKDTVVACVRIVAEGKTKRECRTFSTTTDQLVELRAWLEECRCTQVAMEATGVYWMPVFRILGEGLFELIVANAAHIKNVPGRKTDVNDATWIADLLACGLIKASFVPNEEIQELRSLTRTRKQLVREQTRHVQRIEKTLAEANIKLDSVISDIMGASGRRMIEAMIKGVRQPRQLAELAGKQIKATPKELYDALHGRLTDHHRFLLDLHLKQWDGLDKTIREIDREIDQRIGRLRTKGESGEVPFRTLIELLSTVPGISTVSASAIVSEIGCDMSRFPTAGHLVSWSGLCPGKNESAGKRKPSRLRKGAPWLKTMLVQCAWAAKRKKDSYYRAQFFRLQSKRGPQKAICAVAASILTAVYHILKNGIEHHDLGGTYFDRRPVELKAGRLVARLKKLGFNVQLQPIAEAA

SEQ ID NO: 214634 - protein, 408 aa, unidentified
MELMHKRCAGLDVHQRTVVACVRVTENGKLTEEVRTFETTTTGLLSLAAWLEVEGCTHVAMEATGVYWKPVWHILEGKFELLLANAAHIKNVPGRKTDVKDAVWIADLLAHGLIRASFVPPTPIQDLRALMRTRKQLVREITRNTQRIQKTLEDANIKLTGVVSDILGKSGRAVLDALVAGETDPEKLVERTGGRLKAPRDSLVEALRGSVREHHRFLIKLHLGQVDALNNAVRELEARVGEHLDPFRKNVEILTTMPGISDTAASVIVSEIGYDMARFPTAGHLVSWAGLCPRSDESAGKRRSSRTRKGAPWLKTTLVQCAWAAIRTKDSYLRARYHRLKSRAGPMKAIVAIAASMLTAVFHMLTTGAAYKELTAAYFDRRDHAKLAKRLVRRLEDLGLQVTVQPAA

SEQ ID NO: 214635 - protein, 411 aa, unidentified
MRQEGPVAVYIGIDWSEKKHDVVCMNEKGAVITQFQIAHSADGFVQLDNKLRKLGMTLENILIGLETAHNLLIDFLWDKGYSQVYVIPPNMTRSCQGRYRQSGARNDASDARLIADLLRTDRHRLYPWHPDSCLTLELRAKVHWFMSLSRSKRRLASQLRAILLRYYPAALQVFGELDSQITLEFIQTYPTPQAAAQLTLDEFKSFVRQHRFPIRKIPGCFERLQAKQPEAARHTVLAYQQEAVQLATLLLQTVRTLAAVQRELTCLFEQHPDRSIFASLPGAGDLLAPGLLVKFGDDRRRFPQANALQALAGTCPVTDQSGQRRRIYFRQACDHEFRHMTQQWAKSSIAQSDWASTYVSQALQRGFSTNHAYRCLANRWLAIAWKLWQEGKPYDETYHLHQRAARCRPLH

SEQ ID NO: 214636 - protein, 430 aa, unidentified
MKSNTQNAKIEAITEKTLVLGIDVGSETHYARAFDYRGIEYSKKPFKFSNTEAGFATFKEWILELKERHEKDKVVPGMEPTGHYWFNLGKFLQDNEMKPVLVNPHHVKKTKELDDNNPTKNDRKDPKVIAGLVREGRYMIPYLPDGVYADLRTASNIRFQLQAELTRIQNRISRWFNIYFPEYKTVYGKTDAKSGMLILKAAPLPEDILTLGIDGVNQIWRDAKLRAVGKARAKTLIEAAEHSVGSKEGAVSARMEIRMLLEDYESRNTRLQEVMVLIEELVRKIPMAEKLLEIKGVGIRTVSGFLAEVGDISRFNNPKELQKLAGLALVENSSGKHKGETTISRRGRKRLRYLLFEVAMSLVSKNQEFRELHNYYTTRRLNPLKKMQSLMAIAAKLIRVFYAMLTKGVDYDPKKMVSDIKRPAVYLQAA

SEQ ID NO: 214637 - protein, 442 aa, unidentified
MRTIGLDLSIKQPSEAIVAGHDGSFVGSSFKVDETAAGLKALMERARKGVADDGSLRVIMEPTANAWLPIAIYLSHREVTCHLVQSEKAADLRAFYRKHAKSDRIDTRVLAKIPFVDEEGLNSLYLPTAEEQALRRLSRQREKLVSGASAIKNRLHDLDRLAGWDKVLRSAFGSPFSEAARSFRRDLYDPWKVRELGIRCLEKYLVKLMGKKDCRSTAEKLYRASLDIIELYSPPGKDVSAHLDFEMLCFEAQIKQERLLKLEELEERVNHQIQRISRGSRSVELARSLTGIGEKGGPVLASYVGNPHRFNQNTFRGWHGMIPGSKQSSSKDQKGVSMTKAGPNLVKKFAYLCADIARQWDPQIARIYWDQMTNKGKHHTQAVCACATHLLDRLLAVLKEDRPYELRDCAGNPITNTEGKRIIQEKYQVPKEVRQSRRARNP

SEQ ID NO: 214638 - protein, 360 aa, unidentified
MHATTVAVDLAKSVFQLAVADAQWRVVETQRLTRTHFERWFLNREVNLVIMEACGSAHHWGRWLNSLGIEVRLLPAQYVRAYVKRNKTDAADAAALLEAARASDMRPVRVKSVEQQALQGMHRIRSLWMGTRTSRINALRGFCREFGIAIPVGARTGIEAISRVLADPNTAVPELIRGTARLLVEEIRLLEARVAQLERELACLAKLSPACTTLLSIPGIGLLTATALVAATSGDVSHFKDARHFSSWFGLTPKEYSSGNSRYLGHISKRGDRYLRMLLTHGARSVLRAAKVAECAGKEVGGVRRWALDVQARGNHNKAACALANKLARICYATLRDKVPFGESSRLGKKVNRESFVMPA

SEQ ID NO: 214639 - protein, 355 aa, unidentified
MTSMTETPPDVSLTIHAGVDTHKHTHHAAIVDHLGRPLADREFPATDAGYHQLLSWLAGTGIIASVGVEGTGSYGAGLTHVLHDAGLTVVEVDRPDRRSRRRHGKSDPLDAYAAATAALTGRATTVPKTHGGDVEAIRFLHNARRSVIKSRAEAITTLKAMIVNAPEPLRAALRGLSDPALFAACAALRPGPIVPGDLTAAVKTALRSLARRIRALTAEGRALRTNIAALVAHTAPRLLERCGVGVETAAQLLITAGDNPGRITSEGAFANLCGVAPIPASSGKTTRYRLNRGGDRQANRALHVIVLSRLKYDDRTRAYRDKRLAQSKSKRDIIRCLKRAVAREIFALLNPANPG

SEQ ID NO: 214640 - protein, 322 aa, unidentified
MNLFFFLGIDVSKLKLDCALRLPDGKYKNKVVTNHPDGFKTLAEWLNKHGATQLHVCMEATGTYWEAVAEFLASLGFPVSVVNPAQIKAFGTSRMVRSKTDKNDARLIADFCHERRPAPWQAPSPGEQALRAMVLRLEALQNMRTQENNRLEVAREAVKPGIAEHIDWFDKQIEALSKAIRQHINDDLDLKDKRDLLDSIPGVGERTIATLLAFYADLDRFDNARKAAAFAGLEPRLHESGTSVKMKPRLSKIGHAFLRKALYMPAMVALYKTAWGTRFRERLAAAGKPPKLIIGAMMRKIVHVAFGVLKSGKSFDPTMHGC

SEQ ID NO: 214641 - protein, 307 aa, unidentified
MASVAHLAPIHLGLDVHRDTISVGILGPGEAVPAVDKIAHDEPSVRRLVGRLGDPRRLRACYEAGPTGFELARLLHSMGISCQVIAPSLIPKAPGDRVKTDKRDCRRLARLYRAGELVAIRIPTSTEEAVRDLCRTRGDMVEDRMRARHRLSKFLLRHGQVWRAGKAWTLAHERWLLTQRFTEPALQTTYDHYRAVLQARDVQLEAIEADLAVWQDRAPFAEAVARLGAYRGVTRLGALHLAAEVGDWRRFARASAFMGFCGLVPSEYSSGQVTHRGHITKAGNVHLRTQLIGPPPGRWTPGLCGHG

SEQ ID NO: 214642 - protein, 355 aa, unidentified
MTTEQRQRTMFVGVDVHKDTHTAVGLSPFGEKLFEITVGNYKKDFENLTKKVEEMSGTLSPYFGLEDCHGYGERLAEHLVDSYPVIHVPSILVDRQRQNATHPEKSDSLDALGVAKVMMQSIDTLPIYTISEEAKRAKQLKEISMDREYLVEERTRLKNHLHTILHRIWNTEYREKFKDPFSLKALAYWRKAKPHCDEFLLRTMRRKTKRLIDLFHEINELEAEMKVLLEDYTIQTASGCGPVIAATIIGEIGDINRFHSPAALAKYAGCSPRECSSGKTHRHRKTRSGNRRLNCAFHRMALSQISRMGNEKAKIYFKRKVSEGKSKSQALVCLRRQMVNIVWMMLKHKTVYRND

SEQ ID NO: 214643 - protein, 370 aa, unidentified
MLNTTTFVGLDVHARSIKAVALDAMTGEVRSATFGYDAAEVAGWVSSVDPSAKCVYESGVTGFDLQKRLASMGIDCVVGAVSKMIKPPADRKRKNDRNDAEFLARMLSVGNVVEVWVPDDGCEAARDLVRALDDAREDLKRCKQRLSKFLMRHGYVFSETTPTGRRKGSWTAAHWAWIKSISFPEKADNDVLAYYVDAARQAMEDKARLERLVEAEASKPRWKRRVDSVRCLKGIDVTSAADLVFEAGEFSRFKSARSFAAWLGLTPSEHSSGESVRQGGITKAGNKHLRRVLVESAWHYLGCSPHSKDLAKGQVPDPAARRHAAKGVRRLVERRRAMLERGVHKNKANVATARELACWCWAVGRMIENG

SEQ ID NO: 214644 - protein, 338 aa, unidentified
MDIIKQVIGIDVSKDTLVVCYGTVDANQNQQISKSVTFDNNLKGFRELMAFVRKNRGQLQAPLHFVMEATGVYYENLAYFLNEKQQKVIVVLPNKTKNFSKTLDIKSKTDKLDAQMITQFGLERQMQLWSVPSPLIKAIKALTREYHSKKDMAAQVKNQLHAKEYSHIPLKESLKRSQSILSVFEKQLREIEKEIKELVKQDDDLNDRINKIDKIEGVGFMTIVSIIAETNGFALIENAKQLSSYAGLDVVYNESGLKKHKTTISKKGNKHLRKAVYMPALSAVKYNPQLKQFYIRLVIKKGIKKVALIAVARKLLILIYTIFKKNEDYVPNYNLAKG

SEQ ID NO: 214645 - protein, 393 aa, unidentified
MFYIGIDIAKHNHEASIIDSDGSLLCESISFSNSQKGCEKLIALLERFSVDPDNCIVGMEATGHYWLSIYSYLFELGFDLKVINPIQSDAFRKIYIRQTKNDSKDSFVIAQIMRFGQFSSSSLSDENIMALRQLSRYRFCLVDDCSDLKRKVICLLDQVFPEYSSLFSDIFGVTSKELLLKYPTPEDMLSVSATKLSNFISKCSRGRYGRSKAEEIQSAAKSSFGIKFASNAFSFQIKQMIEQIKFIENHLKELEKEITELLIQTNQVITTIPGIGNVLGGVIIGEIGDISRFESAPKLVAYAGLDVRVSQSGQFTGTQMKISKRGSSYLRRAIWMAATVAAFSDPVLSEYYQSLRARGKHHLTAIGAVSRKLCNIIFAVLRDDKPYEPMPKR

SEQ ID NO: 214646 - protein, 315 aa, unidentified
MSDMPCFIGIDVAKAQLDIAVRPSGERWAVANDASGVATLVERVQPLHPTLIVLEATGGLERAVTSALAAAGLPVVVVHPRQARDFARATGQLAKPDAVDARALAHFADVIRPTPRPLPDAQTQELRALLGRRQPLVAMRTAEQHRLTGTSGRLQTDIEAHITWLNERVGRLDNALETVLRGSPLWRENDDLLQRAKGIGPVCARTLLLALPELGTLTRQHIAALVGVAPLNCDSGTLRGRRTIWGGRAHVRTVLYMGTLVATRYNPQIKAFYERLLAAGKVKKVALTACMHKFLTILNAMVKHRTPWQPQEVQS

SEQ ID NO: 214647 - protein, 396 aa, unidentified
MYYVGIDVSRHHHDATAIDATGQTVIAPFRFLNTRQGVNTLLARLQTLDGRVNIAMEATGHYWLPLYEALVAKGYSVSVFNPFQIKAYRQIGLRKTKTDAVDSLWIADFLRIGRARPMVVPSPAIRQMRELARFRFSLLQRQANIRRRALTILDRVFPEYRTLFPRPFSPSSRALLRRAVAAETFAAWPPEDLAQTLRQASRGHFGPEQARQLLHLAQNSLGIRSLGAVANQEMQFLLDQLALLDDQINTLDEELDRLLQQTGTYLTTIPGLSTTLAATILGEIGDVHRFTTLKQLVAYAGLDPTVHQSGQFQATHSRLSKRGSVYLRRALWMAASVARQYDPDLKAFYQRKRLQRKHHSVVIGAVCHRLLARIYVVLKEQRPYEIRTPDTNHSTT

SEQ ID NO: 214648 - protein, 389 aa, unidentified
MSQPQPNDLSRSLTALDQDGTLIAVIEMSQSSWLVAGTVPGIERQPLKKLAPDEAALFRLLQRWQDEAARSGRTMARVTVAFEAGRDGFWLARWLRSRGIEAHVIHSTSVAISREHRRAKTDRLDTAMLMRVFLGWLRGERGHCRMVAVPTIEEEDARRPNREHESLVGERTRIINRMKSTLARLGIRGFKPELRKAPQHVEGLRTPEDTPIPPNTLDEFRRDLARLAMVREQIGAVEQARLGRLQEAPATDPHAMMRLLASIIGIGIETADMLVQEILCRNLRDRRAVARYAGLTGSPDESGSRRREKGLAKAGNARVRRGLIQLAWRFLMFQKDSALARWFRARTAGPEGARKTTMIVALARKLLIALWRMVMTGEIPEGVVLRQAA

SEQ ID NO: 214649 - protein, 362 aa, unidentified
MSEASWLVAGLVPGVDRQPLKKLEPDPDALLRLLERWRAEAVKTGQTIGRVTLAYEAGRDGFWLARWLQARGIEVYVIHSTSVAVSREHRRAKTGRLDTAMLMRVVLGWLRGQRGHCGMVAIPTLQEEDAKRPSRERENLVSEQTRISNRMKSALARLGIRGFKPKLRKAPQRLAALRTPEDLPIPPNTLDELGRDMARLAVVRDQIEEIEQARLERLEQAPDEGPNAMVRLLARIVGVGVETADMLVREVLSRNLRDRRAVARYAGLTGSPDESGSKRREKGLAKSGNARVRRGLIQLAWRFLMFQKERALAQWYRARAEGAKGARKTTMIVALARKLLIELWRMVTTGAVPEGVVLRPAA

SEQ ID NO: 214650 - protein, 418 aa, unidentified
MRRVIGMDIHRTFAEVVFWEDGRLRWHGRVDMTRSGLEGFGRSLVKDDEVVLEATGNAMAVVRVLSPYVARVIMANPLQVKAIAHAHVKTDKIDAGVLASLHAAGFLPEVWLPDAETERRRRLVARRNQIVRHRTRVKNEIHAILAAHLVPPCPHAELFNRPGRAWLDHQALPDDERAAITRHLRELDRLGEDLAVLDREIAEATIDDPAVRRLLTIAGVNLTVAAGLVAAIGDIRRFPSPQQLVSYFGLNPRVRQSGLGLAQHGRISKIGRSHARALLVEAAWAAAKAPGPLHAFFLRIRARRGHQIAAVATARKIAVLVWHLLAKETDYLWARPALVAHKLRALELQAGRPMKKGNRRGPAYAYNVKALRNQEMAIAAQAERAYQHFVAQWQPNPTAKRRATNMVASSRGASRQPG

SEQ ID NO: 214651 - protein, 526 aa, unidentified
MASFNNGTMRGFTNNGKYTTDELKNVKLDDGTRVVTSPVTDIKRPVCAGIDVHKSVLMAAVCVTDPKTLKAVFYVRQFTSSNSDIRCMAEWFSSYSVLDVCMESTGKYWIPVYDILEQNGLKPVLTHPKYVKQAKGKKTDFRDAIHIANLFRMDLVVASFIPPADIRDLRELCRYRLKLTYIRTSEKNRFQNSMTVSKIRLDSVFTDPFGKSASDIMSYLISTDPDDVSDDKILSFVRQGVKASSEEILDSIHGYEFIGVQRDKLQVIKTHMDDLNKCISMIDTKLEHYLQKYSRVIHHLVSMVGVSEEAALYILGEIGTNMSVWRDSDSLASWAGLSPANNESARKKKSTRIGHGGHYLKPLLVQCALAAIKSTKKQPYFYCKYVTLKKRRGHKKAIIAIARKMLVSIYHMIKEDEDFQPVDYEQIVTRKHNTRELNLKNIIEFLGEHGVDAETIHMVESQCTGDTEGRKDAEPGEKAKAQKKKQPKPDAEPTTPKQETVKRRGRPPKSRQTKDRPLNQPAVATA

SEQ ID NO: 214652 - protein, 415 aa, unidentified
MQSFIFVGVDTHKNSHTAAVFSNYFNLLATITFANSFLGFSDFLTKLEKLSDGKAMIFGLEDSQGLGNFLAEFLIKKGFYVVDIDPVTTDRGRRRTAHKDKSDDRDACLITKTLIREKDNLHKVIINKTSLALRELVKSRELLIGESTRIKNRLHVLIFNQYMEVSTIFPDLFSKCALAFFARYPDPSKLEGESLPTLTAFLKSNSRGRHGNNKAVDILSFASTDIKPDILIDARSSIIKKHIKRLTSIREELKEISDMLSRLVLKSPYSTLNSVPGIDIVTAAKIISQVIDIGRFSSSSKLAKFIGVAPVEKSSGRKRRYQKSKHGKRYLYSAIFFIALNHISRTRDGRDNNPISRAYYLKKVSEGKTKKEAITCLARRLCDVIYAIMRDGSIYSLSKVKSSSDIKVLETVASL

SEQ ID NO: 214653 - protein, 414 aa, unidentified
MFAVGVDVSHGRSTVAVLGAKRKVVMKPFEVPHTVDGFASLAEKLNGLDGEVRIVMEHTGRYYESFAMSMYRAGFFVSAVNPLAIRDYQEGISVRKVKTDTADALKIAQFAIDKWEILPQYTPMDTIRYNLKTLHRQFQLSSKTRTALNNNLIALLEQNYPGANRYFDSPVRPDGTQKWVDFVDTFWHVDCVAGVSQNAFVERYRKWCKRHGYHFSEQKAIEIHTDARRKFPLAPKTDTCKLLVKEAVAQLNAISRTVETYRTEMNRLAAQLPEYDTVMAMTGVGKSMGPQLMAEIGDLRCFAHSKSLVGFAGTDPIKDDSGDKISGSNRSSKRGSPYLRKTLFVIMTILLQLQPQDDPVYQFLDKKRSEGKKYYVYMTAGMTKFLRIYYGRVRDCLREKGLWDNPASQEVNPG

SEQ ID NO: 214654 - protein, 391 aa, unidentified
MVCVGIDVAKDKHDCCILDSEGTTLVDCFTIPNNMDGFKSLLQTIQDCSQKSDKIKVGLEATGHYSYNILGFLLDNDLPVYVMNPLHTNLYRKSLSLRKTKTDRVDAKTIATMLLSDVDLKSYTDTAYHNEELKSLTRYRFDKVQERAKLKQSVSRLVTILFPELEQLVSSIHGTSIYALLSEYPGAKQISEAHLTRLANILVKTSRGHYRKDKATHIRDAARTSIGSVMPAKSLELKHTIKLIQELTSEINEIEDAIRKIMDELKPPILSIPGMGFYSAAMILAEVGDFSNFNSPDKVLAYAGCSPSTYQSGKLTNCYAHMEKRGSRYLRYALYTATKYVCYWNPVFTEYLTKKQAEGKHYNVALSHATKKLVRLIYALQKSGKAYLAIT

SEQ ID NO: 214655 - protein, 350 aa, unidentified
MMIIGCDFHPRYQQIAMMDTETGELTERRLEHENGEAQAFYASLAKPARVGMEATGYGQWFERMLADQGHELWIGHASEIRAGVVRKQKTDARDAAHLLRLLVEKRFPRIWIPSPAERDARQLLRHRHKLVCFRVSVKNQLHGLAMSQGICRKKKLFTAKGREELEKLSLGPWASRRRQELFGMLDRFNPVIDELDRAVQQQAENHADAARLMTQPGVGPVTALAFVLTLGPVARFPRGKHVVSYLGLNPKERSSGDKQHTYSISKQGNTMMRWLLVEAAQTAVRYDPELLRLYQRLKFRRGASVAKVAVARKLAVKLYWMLRATASVAQRAPMQGSSGGTLIPHVGSKF

SEQ ID NO: 214656 - protein, 316 aa, unidentified
MTAPTIGIDVSKDRLDVGVWPSRETWQAPNTPPGITELTTRLTALAPTCIVLEASGRYEHAAAAQLATAQLPVAVVNPRQVRDFARATGQLAKTGRLDALLLARFAEAMQPPIRPLPDATTDALRDLLTRRTQVVEMLTAEKNRLPTAGAAVRPHIKAHIAWLEAQRDDLNGELQAALHASPVWQAQDLLLRSVPGIGPVASLTLLAALPELGTCSPKQIAALVGLAPLARDSGTMRGKRTVWGGRAVVRQPLYMAAVTAVRWNPAIAAFYTRLCAAGKPPKVALTACMHKLLTICNALLRTNTAWDPERYKPLAA

SEQ ID NO: 214657 - protein, 357 aa, unidentified
MKRNSRSNASIEWKEKPAITVGLDLGDRFSHYCMLNQDGEVVEEGRIQTTEAGFRDHFEDVSRMRIAMECGTHSPWISRLVDKLGHQTIVANARKLRAITENESKNDRHDAEMLAHLAYSNPRLLSPIRHRSVERQRDLNLIHSRDALVRARTMLINAVRGLVKSSGTRLPHCAAKCFETRVGPAMPAELSTAMEPLLEQITALTVRIRAIDKQVEQLAVRYPEIRLLRTAPGVGPIVAAAYVLTLDRFDAITTSRGAGAFLGLRPRQSQSGSRDPERSITKMGNMYLRRLLVQSAHHILSRFGRDSTLRRWGLKLAASGGKRAKSRAIVAVARKLAVILHTMWRTGDCFKPFPAEA

SEQ ID NO: 214658 - protein, 325 aa, unidentified
MRHDSTSKADAAAPVAGIDVGKHRLHLAFANGGGVEEHANDAAGHRTLIEALRRRGALRVGMESTASYSATVAEALREAGFIVNVFQPRQVKAFAQFKLKRAKSDKIDAPIIAQCTALSEPQATPDPRLAGLCEHLTVVEQIADDVRREKTRLEHANNPAIRAVHREEIKRLTLRRREALRALVAMVRQHADLAEKMALIRSIDGIGELGALTLVLRMPELGSLSREEAAALLGVAPFTRESGQFKGERHIAGGRARARRTLFAAAQAACGRWNKALVELYQRLIAKGLHHRAAVIACTRKLVIYANAVLKRGKPWTKNPEPTPA

SEQ ID NO: 214659 - protein, 355 aa, unidentified
MSQEKYIGMDVHQATISVAVMDAGGKLIMECLLETKAATIVEFIQGLHGTLSLTFEEGTSAAWLHDLLNAHVSRLVVCDPRKAALLKDGNKSDRIDARKLAEMLRTNQLKPVYHGEHGLRTLKELGRSYLTITQDVTRVMNRIKALYRSWGIPCSGRTVYAPRHRAEWLAKIEQPGVRNRAERLYQQLDSLQPLRLQARHELLRESHQHAVVRLLRQIPSIGPIRSALLVALLQTPHRFRTKRQLWAYSGFAVETHDSGEYRSVRGKLQRNRERITVRGLNDNHNKDLKNLFKSAAISASTRPGPLQDFYLALVGKGIRPTMARLTLARKIAAITLTMWKKGVSFDPKQLHRQAA

SEQ ID NO: 214660 - protein, 350 aa, unidentified
MIIIGCDYHPSFQQIAFVDTDTGEFQERKLQHREEAEKFYRDLAAQGMKVRVGMKSSGQARWFERLFSELQFELWIGDAAEISAKRVRKQKTDRQDAQLILRLLLKDDFPRIWVPSWENRDLRQLLWHRHRMVQARTRMMNQLQAVALNEGVRAKKRLWREAGREQLEAFKLAPWASQRRQDLLELLDRMNPTIAKLTKAIEGEVEKCPAARRLETHPGVGPLTALAFVLIIGKADRFQCGKQIAAYLGLVPLEKSSGNQRRLGHITKQGNSLLRFLLVEAAQVTVRSLPEWRSKYVHLTMRRGRKIAKVAMARKLAVHLYWMLRKEWDYEQLRKLGSHAGKPGYRDGVK

SEQ ID NO: 214661 - protein, 426 aa, unidentified
MDLIYRSCAGLDVHKKTVQACVRQVSAGGQVHTETRLFGTMTRDILALGDWLAQWQVTHVAMESTGVFWKPIWNLLEGRFELVLCNAREVKQVPGRKTDVKDCQWLAQLMQYGLLKASFVPSRPLRELRDLTRQRVQLVNEHTATANRLQKVLEDANVKLSSVATDVLGVSGRDMIRALIAGEEDPARIADLARRRLRNKLPELTAALEGTVDDHHRWLLQMYYEHLTHLEEMIARFEARIDEMLQEPALNAACSGGDVLPFPDAVRLLTTIPGVDECLAEAILAETGTDMSRFPGPDNLCSWTGICPGNNESAGKRHSGRTTKGNRWLRRALTQAAWAASHTKDTYLSALFRRLAARRGKKRAVVAVAHSILVAVYYMLTRGETYQELGSDYLDRLHPERLARSLTKRLETLGFAVTLEPLQLAA

SEQ ID NO: 214662 - protein, 441 aa, unidentified
MLHEARGNAAGIDVGAYEVFVAVPEDRDEENIRSFSTFTEDLQEMARWLKQCRIDTVAMESTGVYWIPVFQILEAYEIEVYLVNARHVKNAPGRKTDVLDCQWLQYLHSVGLLSASFRPSANVVAIRTLLRHRENLIKSAASHIQHIQKSLTQMNLYLHNVISHITGTTGMAIIDAILSGEHDPKVLAKLRDYRIKADEETIAKSLVGDYKEEHLFTLKHSVDLYRYYGALIQECDREIESRLVTFETKREDEPKLNPVKKKTAGTNELTFDVQSHLYKIYGVDLTQIPGISGLGAHTIFTEIGLDIHKFKTVHHFTSWLGLSPNNKVSGGKVLSSKTSFSSNRVAKALRLAANALYNSKSYLGNYFRKMRSRLGAPKAITATAHKLARIVYSMLTNQTPYDESVFAVEELKSQEKLMKKLKNQASALGFTLVEAKTPESA

SEQ ID NO: 214663 - protein, 403 aa, unidentified
MIFVGNDWADDHHDVCVMDSDGVVLAERRFPEGVAGMSQLQELIAAHADDPSQVMVGSETDQGMWIEYLIAAGFVVYAVNPKSVARYRERTRPGGGKSDRSDARLLADMVRTDRHLHRQAGGNTEQASAVRVLARAHQSLIWERTRHGNRLRACLKGFYPAAIATFSSLTGRDALAVLAIAPTPTQGRHLTVGQIRTALEKAGRKRNLEARAVEYQQSLKASRLSTGRIVEDAHGVIVGAEVGILTELNRQIDQLETQVSDHFEQHPDADIYLSMPGAGNTLSARMLGEFGDDPDRYADVKSRRNAAATSPLTIQSGKMRIVTHRWIKNDRLHGATIDWAFHARRQSPGAAAYYQQKRDAGQPHHKALRALANRLVGILHGCLEHGVLYDEHTAWGHRQTEAA

SEQ ID NO: 214664 - protein, 428 aa, unidentified
MKFPELSRQKQFCQFKRQINGSDQYLVVGIDVAKDKHHAFMGTARGSSLLRKLIFANDLKGFHELRMQAEAIKSQNTLSKIVFGLEPTGNYHKPLGAYLIGYGCQVVLVTGKAVKNNRELLDGRWDKNDTKDAANVADLISRGKCLFYDLPSGNLNQLRQLLSLRRRLKKEEHSLRMRIRNHLLAQYFPELDRYYAACENESLAIVRYCLDPRIIAGMDFNSFFTMVTTHRRGIAQKLRLHKIHQLAMDSIGCETGECAKFEAQLLVDKLSQVRLQLKQVAQLIEDIASQFDEYSRLLAIPGFGPYVAAKVLATIGNPWRFERRGQVIRLAGYDLNAERSGKGGDKAVPVISKKGNSELRYALYQAALVASTRNKDFKKYFTRLLQGRERERGIKTKMRVKLAAKMLVIAWTLMKKQEPFDPEHLMVE

SEQ ID NO: 214665 - protein, 410 aa, unidentified
MEGRSIGLDVHRDFCEVAICDGGKVRRAPRIAARPEALRQFAQQLGPQDRVALEATGNALAIARIIRPHVNDVVTVNTRRLKAISEAKQKTDRHDARMLAQLLAAGLLDGSWQPDEQTRALRRRVARRARLVTHRSRCKNEILAVLHRNLKARPPMTDPFGVTGRQWLAEQLLPADERDTIDAALRQIDFLTEEIATIERDLATFVLTSAHAMRLMTVPGVGMVTAAVFLAHAGDITRFPTSGRLVGYLGLDPKVRQSGNAAARTGRISKEGASLVRHVLVEAAHTAVRSPGPLRAFYERIRARRGHQIAIVATARKMAVLFWHLLTSQRDYAYSLPTATAKKLRMIELKTGAGARKTTAQRQSLNREQRRKHEHAAAEHAQAAYERTVADWHRQQRQRAARSQQVASRT

SEQ ID NO: 214666 - protein, 298 aa, unidentified
MDNFYFIGVDVSKKKLDFCVLFEGKVLREEQVSNHQQAVARLIGELKNDLEMDNEQFLICAEHTGQYTFPLVCACKSVECKLWLENPSQIKYSSGMQRGKNDKVDAKRIAIYASRFGDKVKYYDRPSEEIERLKQLERERALYVTDLAKYKGQMYDQKDFMPAALYRKKTKRMKGLIQELQAAIDAITAEMEKIIGSTEVLARQMELLMSIDGVGKVVALNVIIETEAFSRFDNPRKFCCHAGVAPFSYTSGSSQHSKNKVSHRANKNIKKLLHMAGGSGNHRKEGGITKQRPTICGK

SEQ ID NO: 214667 - protein, 457 aa, unidentified
MSAPKKVKKKSISKANTQLPILHPHAAGIDIGATEIQVAVPCDADPNPVRTFTTFTDDLLALCQWLRQCGVQTVAMESTSVYWIPVFQILEAAGLEVCLVNARHCKNLPGRKTDISDCQWIQYLHSVGLLRASFRPPEQICAARTLLRHRASLARYAGSHVQHLQKALTQMNLQIHNVITDLTGVTGLAILEAILAGERDPQKLAALKDCRIKASHDTLARSLQGDWRPEHLFVLQQALETWRHYQKLIGQCDEQIQQLLARFDSKLDVRQHPLAPGKRGNKKPQRYEPQFDARTELYRLCGVDLTQVPGIQVSTALVLFTELGPDFVTRFPTAKCFASWLGLCPDNRITGGRIISVKTRDVKSRAALALRLAAQSLWHSQDYLGDCFRRWKARLGTPKAITAMAHKLARIIWHLIKYAIPYDPSVWVQAQERLKQKKIKYLQQSAAALGYKLLDVA

SEQ ID NO: 214668 - protein, 367 aa, unidentified
MKKNSTTTQRGKRAPTGTEVTVIGMDLGDKTSRYCGLDRDGEVREEGSVATTKQALTQRFAGKKRCRIALEVGTHSPWVSRLLKSLGHEVIVANARQVRLIAHSSRKNDRLDARTLARLARADPRLLSPIQHRGEQAQQHLAMIRVRAALVEARTKLVNAARGFSKAQGERLPACDAAAIGVKEMAELPAGLKAVLRPLLEQVESLTGQIKKADVELEQIARTQYPETALLRQVKGVGVLIALTLVLTLDDPERFQKSRDAGCYVGLRPRQRESGASQPQLRITKEGDRYLRTLLVQGAHHILGWRGPDTDLRRWGLKLASRGGKNGKKRAIVAVARKLAVLLHHLWVTGEVYEPLRNSGAATTQAA

SEQ ID NO: 214669 - protein, 426 aa, unidentified
MALKIVYKICCGIDVHKKFLVATIIKSEGIMPHYQKKRFSTFNNQILELKQWLLENGCKDVCMESTGKYWVPVFNLLEDSINVTVANPKWVRAVKGNKDDVKDSKWIGDLFRLGLVPGSFIPDKPIRILREFTRYRFKLVSCKSSEKNRYQNVFTVCNVSLDAVATDMFGKSASSITDYLISSDAFDPEHCVSLLKGKLKKKALDVVASVDGYQMSPEQKLRARMVRDHYDYLVDAIRKLGEVLDTLAAPYESAISLLCTIPGIDRLSAITIISEIGTDMSQFSSSKRLCCWAGLTPGNNESAGKKKSVRITRAGVYLKPALVEVAHAAVKDKEHPYYGIKYNRIAKRRGKKRAIIALARMILAAIYHMLSTGEVWNPCDLQQVDIPPELQAKQLQQSLKRAAKLLVANGVISPDALAALAAQSSA

SEQ ID NO: 214670 - protein, 343 aa, unidentified
MSNARTIGLDLAKHVLQAHGADEAGRVVLRKRLRRDKVLEFFASQPRCLVAMEACGGAHYWAREISRLGHEVRLIPASYVKPFVKRQKNDMADAEAICEAAQRPTMRFVAVKSEEQQASAVVFRARDLLVRQRTQLINALRGHLAEHGMVVAQGPSHVAKLIPHVEDPTSGLPDAARSTLGILIEVLKSLDDRIRRLDAEVARRAKEDEVARRLATNPGVGPVTATALAALAPAAETFRKGRDFAAWMGLTPLQRSTGGKQKLGRTSKMGERTLRRLLIIGASSVVQQATRCGAPGGSWLARMLSRKPRMLVVVALANKMARTVWALLAKGETYRSPAVAASG

SEQ ID NO: 214671 - protein, 349 aa, unidentified
MEQNEVILGVDTHLDTHVGAVINDIGRLLGTRSVSTDTAGYLDLLTWANSFGHVCRAGVEGTGTYGAGLARMLHDHEIEVLEVNRPDRAMRRSKGKSDPTDAENAARAVLSGRATAIPKEQSGAAEAMRAVSVARRSAVKAKTQAINQLRALLVSAPQEIRDRLLKVKTAECIKGCIRLRSLGKTPMLQTLTTTLRLLAKRWLTLAEELKSLDTMLDDLTSQHAKRLRERFGVGPQTAAVLVAVAGDNPERLKSEAALAALCGTSPLQASSGKTVRHRLNRGGDRSANNALWTIAMVRMRSDPRTRAYVDRRTKEGMSNKEIHRCLKRYIVRELYPLILADLADSTRVV

SEQ ID NO: 214672 - protein, 422 aa, unidentified
MKESGVRIVGFDCAEEDHSAVLLDEGGEFESRMKVVNRRDKVEAALAKLILEIPSDTDLVVVVESKRSHGRLVTDVARFLGVTVWQVNTVALNHFRDVEGQPRKDDEWDAYLAARMVFLRLKGSRVITEKTDEEMALSRLTRSFARLTDDKSRQVLRVRAVLLELAPEMLHRSWSGPKVGSKAMQYLLERWPGFEGLAKAQLRSIEKILHRCRYGSKASEIAILLRDMARRISIEGEERSAITLELSFLVQQIQVCDVALKKLSTEISNRVENNPIGVKLMEMPGIGPFIAGVLLSELLPVSRTTTEPKSATYSGVTPLSRKTGKTPDSPHLARGVNKRILDALYQSSVAVIRYSAVDNAYYQKKLRDYSGHPKPHVAAFIALSRQRHKVIFKLMTTDARYDKETLIARHLERLEEARKAAA

SEQ ID NO: 214673 - protein, 297 aa, unidentified
MEQTIRHSVGLDVDKRSFKSCLKTKELNHRSKVKATKTFNNNPEGFKEFHLWIKKNVKSPSQVSIVMEATGVYHEHLAWHLHKLGYLIHIVLPFRAHRYMQSLGIKSKNDKIDAHGLADMGMQQELEPWKPCSEDLLLLRSLTRQYEMFQKTKTVVTNQLEAAMHLAICDKMITKNLKSLIEKISKDIEKLKVRIEELILKDPVLHQKFTLVEPIKGLGIVSFAILVAETGGFELFENQKQLVSYAGYDVVENQSGLRIGKTKISKRGNGHLRRILFMPAFNIVRYKVAPFHQAYER

SEQ ID NO: 214674 - protein, 413 aa, unidentified
MERLLERCAALDVHQASVSACVRVPGEGDQRREFNERFGATTPDLLALCDWLRGHGVTHVAMEGTGVYWKPVYYALEDEFELLLVNAAHVKQVPGRKTDTKDAAWLCQLLECGLLRASFVPPKPIRELRDLTRYRKTLIADRASEANRLHKVLEDAGVKLSSVASNVLGVSGRLMLEALCQGANDPVALAELARGRLRSKLPALRRALESRFRDHHAFLVAQILAHLDYLDEAIAACSARIDEQIAPFASALTLLESIPGVGRRNAEVIVAEIAADMSVFPSSRRLASWAKLSPGNNESAGKRKSGSTGKGSPWLRSALVESALAATRTRGYLRAKYWRIRQRRGHQRAVIAVAHAILEISYHMFQSGELYRDLGDDFFDRRDNERATQRHLRALERLGYRVTVESAPDREAA

SEQ ID NO: 214675 - protein, 339 aa, unidentified
MRLYAGFDLHSSNTYLGIIDEDGKRVFKKKLSNDPEVILSTLLPYKDNMAGIVVESTYNWYWLVDILMEEGYKVHLANTTKIQKYSGLKYADDQHDAFWLAEMLRLGILPEGYIYPKEDRPIRDLLRKRSHLVRLRTSLILSLQNILSRNNGIKLKANAVKALTIDHVTPYLAGNEDLVLAGKVSKASIDFLTMQIKSIESVIGERISIQEPYSKLLTEPGIGKILGLTIMLEAGPINRFADVGNFVSYCRKVSTTWISNEKQKGKGNRKCGNKYLAWAFSEAAELARRFDKDARAYYNRKAHKTNRMVAHNALAHKLARAAYYIMRDGVSFVPEKCFR

SEQ ID NO: 214676 - protein, 468 aa, unidentified
MALTLGIDVAVRAEHQATLARDGATVWRGRKFWTRPADLERLWADLDLPDPAELTVVVEPTRNAWIVLAEWFRRHGARVVMVPTTQSADLRKYYSKHTKNDRIDSELLARLPLLHPEGLREYSGQGPADSLRRLVKQRSTMVKRRVAVYARLDALVELLGPGWYAVLGSNYGIAALEFLARYADPHAVIRLGQARLTRFLIARSRGAWRDDHAAGLITAARETLALWGTSDGSDGMDFAELAEDIAHEAEQALFLPRQIKQIDERVANLYADADPAGIVASAPGVGAVISAVIAGRIGDPHRFTSLAAIRAYTGLVPKVSQSGVSKVESSITKAGDPLLREMLCTAADQARRVDPQFAAKYQRLMVGDRHHESAICHLATHLVTRIAACMRTGQPYALRDIDGTPITEAEGRAIVKARYKIDPRRRENVRYQRMRERRKHAAGQESQESRCAPTAQPATTKPTSRQVA

SEQ ID NO: 214677 - protein, 357 aa, unidentified
MAALSIADVPAKVTVGVDTHKHSHIARAKDGLGRHLGQLEIETDPRGYASLLAWAQGFGPVVTFGIEGTSSYGAGLTRFLRAQGQAVIEVLRPVRRDRRFGGKSDPIDADAAAGAVLAGRATAVPKAGDAGVEMIRALKIAKQSAIKARTQAVNAVKGLVVMAPDPIREQLRNLKTPALVRTCSAYRVDRASDPTSAIKLSLRSLCRRYVALDQEVRSLEKELDALTIRLVPQLRQLFGVGQDVAATLVLAAGNSGDRLRSEASFSMLCGASPIPASSGMVQRHRLNRGGDRQANAALHHVIIVRLRHDKATRAYFAKRKADGKSKKEIFRCLKRYVAREVYRTLVDPREEASRSAA

SEQ ID NO: 214678 - protein, 331 aa, unidentified
MDNQIDLKYYIWRYSHALCGIDVAKNKHDVTALNVSGKTVLKPLTFSNNKAGFELLDLSLRQLNQDYLIALEDTGHYAFNLLNFLHEQGYKVYTYNPLLIKKFAKSLLLRKTKTDKKDAHGIALKLLSDPNREQFQHDNRQVELKILARHIHRLKKKQSDWKVQYTRCLDIIFPELDKIVGKHSEYTYQLLTCYPNPQKRLEAGFDKLIEIKRLTASKIQDILSVAPRSIGTTSPAREFEIIENIKHYKRLIDKAEKCVNDLMAELNSVITTVTGIENRLGAVILAEIRNIHAFDNPAQLQAFAGLDSSIYQSGQIDLAGRMVKRGSPHLR

SEQ ID NO: 214679 - protein, 402 aa, unidentified
MYYVGIDWGTEEHQVSVMSQAGQSISELVIQHTWAGFEQLSHTLKELGPVEINLERPNGLLVEWLVSQGWPVYFTPPHIVGKRRRRASKDDRRDSRQLAQLMRDHDPDCQRVCFSSEAAEGLRQLVQAYDQLAQEQRRLSNQLRAVLTNYYPSALGLFNRLHQPLTLAFLQVFPTPQQAQAASREDLVAFFRSQAYRYMQRVEHHYQCLQQPMPTARVQQGWVPHMLALVALLHTLHDQLQHLQRLIRQAFTAHPEAAWWRALPAGKGDLTLPRLMAYFGDQRDRFSSFQMLQAIAGTAPITQQSGKRRLVSFRLACSRPFRRAISDFARLSLHHSGWAKAYYLNQLALGHSKARALRALANSWLRILWTIWQRHELYSESKHLSHQLRQGILSPASLSLAA

SEQ ID NO: 214680 - protein, 406 aa, unidentified
MQLVHERCAGLDVHKSSVVACALLPEGKQLRTFGTLTWQLEQLAEWLRGLSVGVVAMESSGIYWKPVFNILEVAGFELLVVNARHIKAVPGRKTDVKDAEWIADLLRHGLLRPSFIPNRAERELRELTRYRRTLIEERAHEVQRLQKVLEGANIKLEDVISNVVGLNGRRFLGALIAGDYDPETVAATANYGLQRKRELLAQALHGTLGAHQRFLLDQLLSHIGFLEQRIAALDTEVKQRSRPFEAAIARLDQIPGVGIRAAEEILAEIGTDMSRFPSARHLASWAKVCPGNNESAGKRRSGYAGKGNRWLRSILVECAWCATRKKDSYFKVQYHRLAARRGRKRALLAVGHSLLTVIYHLLNYGVVYQDLGPNYFDQRDRSHITRQAVRRLERLGYRVSLTEGAA

SEQ ID NO: 214681 - protein, 481 aa, unidentified
MVQSVGIDFHEGQHQVRCLDERAQLCDGFSFRTTPQGLAALEERICRDGSSPIVVFEPMGLAWLIVAAYLRARHPGCRLVKAKGQKVAALRRYLRGSAKSDRIDALTLAKMPFIDPEQLGEVYLPPAEVHALQRLTRQRQRLEREVVARKNRIGRIVDGYLPGVREAFSSPWSLQARAFLRSQLDPFAVVHAGEEALHTFLTRARSRSKGDTAETHPVYLACQNIAALYELSRPSGGVDEGFFADLQEEIARELRLMEAEEAESEAISLRVEELYQKLHTSDNLRTIPGVGEHTAPVFLAVVGDPTRFRCQAAFANWTGVVPGASQSSDVEAKGLRMTKAGPPIIRWALYQAGQIGRRYDPQLAWVYYREMVHHGKNHKQAMGAVMSHLAARVLTVLREGRPYELRDAEGKPISREEARGLLSKYRVPEEIRREKRRRNPAKGSAHRKRAEGMASHRTSEAARAPQPVVTTAIPQGSVYPG

SEQ ID NO: 214682 - protein, 370 aa, unidentified
MKKNSKNSKSPTRSTKTKLRKTDQVTIGMDLGDKTSRYCVLNAAGEVLLEGSCATTKAGMAQVFGAMPYCRIAIEVGAHSPWVSRTLKRLGHEVIVANARQVKLISQSSRKNDKLDAQMLARLARVDPALLRPIRHRSEEAQKDLMTIRIRAALVESRTGLVNAARGLAKSTGERLAACDADQMEVEKLEQLPADLRETLKLLVEEVESLTEKIKECDRKIEQIARDRYPETKLLRQVSGVGPLIALTYILTIEDKQRFPKSRDVGCYVGLRPKQNESGERQPELRITKEGDVYLRKLLVQGAHCIMAKRAPDTDLKRWGTKLAGRGGKNARKRAIVAVARKLAILLHRLWATGEVYEPLRNSQAMAKAA

SEQ ID NO: 214683 - protein, 420 aa, unidentified
MSFKIIRKNCCGLDVHKTWIYACIGITDSFKRTEYKQARFSSFTKGLQELCLWLAKYNCIDVCMESTGKYWIPVFNILEKHNLWVTLSHPKYTKPQTGNKTDRKDAKWICDLYMCGMVKPSFIPPADIRQLRDLVRYRFKLTCMITGEKNRAHNCLTVSNLKLDDVFSDIFGKSSRSITEQILQHPGEFFDVTPFVDDRCKTPIEEIQAAVDGAISPEQAVKLRQCLEHIDELEKHKSEIEREIFRLSDKYEVALNLIRTVPGFDKNPLTAIQVLSEIGSDMSVFPTAKNLVSWAGCCPRNDKSDRKIKSTRISRAGTYFKPVLVQIANALIKSKKHPEFTTRYRRIKARRGHKKAIIAICRMILTAIWHILTDLKPYTPEGFLESRPVNEAKVLTASQALNLMRQRGYIIKDDMSPVMN

SEQ ID NO: 214684 - protein, 345 aa, unidentified
MKITTVGIDLAKNLFQVHGIDDRGKAVLRKQLRRTQMAVFFGNLPPCVIGMEACASGHHWARTLQRFGHTVRLMAPQFVKPYVKTNKNDVADAEAICEAVGRPNMRFVAIKSIEQQAILSVHRVRQGFVKARTAQANQIRGLLGEFGVVIPKGLINVAKRVPEILEDAGNELPMPFRHLIDRLTEHLKELDRQVKEFEREIIAWHRSSELSRKLEKIPGIGPLAASALVASIADAHSFDNGRQVSAWLGLVPRQSSSGGKATLLGMSKRGDAYLRTLLIHGARSAILAAKNKVDNTNGWLTDLLKRRHPNIAAVALANKNVRTVWAMLAHGREFKADYVPTRMAA

SEQ ID NO: 214685 - protein, 344 aa, unidentified
MGEEHAAYQLFVGVDVAAETFVAAWLAPGGKPGTPVTGEQTPAGFAALQRRLRATGSPPTATLIVMEATGNYWVAPAVALHEAGYRVAVVNPRQAHHFAKAQLRRAKTDALDAADLAQLAAALRPAPWTPPPAVDHEVRQRLVARDGLLAMRTQARNQRHALLQWPVVVAGVRQHLDELIADLDRRVAALEAEIAAVLRDSMWAESLVCLTSAPGIGLVTAAWLLVSTLNFALCTGPEALTAYVGLAPVPRESGRTIRGRRAIGHDGNGRLRTALYMATLSAARYNPAITAFYQRLRAAGKPPKVARCAAARKLLHQAWALGSKLQRFDPDHHQQQEALSQLAA

SEQ ID NO: 214686 - protein, 325 aa, unidentified
MIDGILGIDVSKNTLDASMSSCNNRVRARSFANSSDGWRHLQDWLTTQKIRRVHACMESTGRYSLGIACALYEVGHIVSIVNPAQIRDFARTKLGRNKTDGVDAAHIREYCELFKPKPWAPPSEAHRRLGELQTIRSGIVAGLTEWKNRKSSGMVDAVAQALADVTISHFTSQLEAVDEAIAQTIDNDSGLLRKRDLLLSISGVGETLAGVMMAELPGPDVLRSSAEVVAYAGLNPRQHQSGTSIDRVTRISKIGNAVLRAALYLPAMSAMRYNPAIVALVARLKSRGRLKPKQIVVAAMRKLLVLCFGVLKTGKPFDPAIAMGC

SEQ ID NO: 214687 - protein, 408 aa, unidentified
MSNNKTLYVGVDVHSEHNTCCFMDQDGNTVRKTFAVPNSLPGAERVVSEIIDSVQTNGFSQVKIASEATSFYDYVFLDHLSSSEKLSLFNSSIYRFNPKTTKSFKKTYPDKDKTDSDDAFGIADRLRFGRLPEPYPAQQPYIPIQRLTRFRKHIVDSIAKEKTYFTTHLFLKFSSYSSVKPFSNTLGASSEALITEFSLDELSAIDIKDLVDFLADKGKNRFPDPEAVAQKIKKITRESYRIRPALASSIDLILATTIRNIRALNKSLKEVNNAIAQEVKAFPNSLISVKGLGPVYSAGIIAEVGDIKRFSSQAQLAKFAGLTWRKTSSGNFSANITRMTKTGNKHLRYYLWEAANSLRVHNEEYRHYYRKKYREVNDHRHKRAVALCARKLVRLVFALLTKKQIYQA

SEQ ID NO: 214688 - protein, 373 aa, unidentified
MPSNLRYLGLDVHAETIAVAVAEPDGEVRFLGMIPNRPEAVAKLIRKLGSRDHLRACYEAGPCGYVLYWQLTRLGVPCDVVAPTLVPIKPGDRIKTDRRDAVKLARCYRSGDLTTVWVPDAAHEALRDLVRAREAAKQDQLRARHRLGKFLLRHGLRPPAGVKPWMQRHRRWLDSVGFELGAQRATIADYLHEVDHAVARLERLERALDEAVAAAPAAQRAVIAALQCLRGIRQVTAATIVSELGPLSRFPHPRQLMGYSGTVPSEHSSGDRMHRGAITKTGNAHLRRVLIEAAWAYRFTPKCAKGLRQRQRGQPEAITDIAWKAQQRLCTRYRRLLARGKPTPHVITAVARELVGFIWAIGVAVERGQAMAA

SEQ ID NO: 214689 - protein, 331 aa, unidentified
MRFYKQPHRFYAGVDLHARTLYVCVLDQAGTTVFHQNLTADPATFLHAIAPFREGLVVTCECMFAWYWLADLCVAEGIPFVLGHALYMKAIHGGKAKNDKLDAFKIATLLRGGMLPQAYVYPKGMRETRDLLRRRMFLVHKRAEAITHVQNTNSQYNLPAFGKKLAYAGNRAELAVAERFTDPSVRKSVEIDLDLIDHLDQSIADVELYLTRTAKVDDIHTYERLKTVPGVGPILALVLLYEIHDIRRFDTVGQFLSYARLVRPDHESAGKKHGFGNKKIGNAHLRWAFAEAVCLFLRGNDQAKRWQARKEKKHGKGKALAILAAKLGRAV

SEQ ID NO: 214690 - protein, 347 aa, unidentified
MSEVTTVGLDVAKRVFQVHGVDSSGKAVIRRQLKRGQVLAFFKKLPPCVVGMEACATSHYWAREIAKLGHEVRMMPARYVKPYVKRNKNDAADAEAICEAVTRPTMRFVPVKTPEPQAVLMLHRTRQLFVRQRTQLINALRAHLAEFGIVAGVGRKGVETLLQGIDDDPDERVPASARDCLVALRAQLALVNQQILGADRRILSWHRSSEVSRRLGEIPGVGPLIATALVASIPDPHAFRSGRDLAAWIGLVPKQNSTGGKERLGHISKAGNRYLRTLLVVGALSVIRRAKQTGSTRRGWLVALMARRTTKVAAIALANKNARTAWAMMAHGTCYQEPQQDPAPRAA

SEQ ID NO: 214691 - protein, 406 aa, unidentified
MTQVDDLSRSLIAFEQNSTMVVVLEMSQSSWLAAGVVPGIERRPLKKLDPDPTALLRLVEGWRDHAMKAGRMITRIVLAFEAGRDGFWLARWVRARSIEPFVIHSTSVAVSREHRRAKTDRLDTEMLIRVFLGWLRGEPRHCKMVAIPTLEEEDARRPNRERESLIGERTRIINRMKAALIRLGIRGFKPELLKAPQRLEAQYTAEGVPIPPNMLDELRRDMARLAWVREQINAIEQARLERLAQAPSTGPHAMVRMLASIIGVGVETADMLVQEILSRNLRDRRAVARYAGLTGSPDESGVKRREKGLAKAGNARVRRGLIQLAWRFLRFQKESALGQWYRARTEGAAGKRKTTMIVALARKLLIALWRMVTTGEIPAGVALRLKHLIEEQQIQFQRPLRLGDSR

SEQ ID NO: 214692 - protein, 398 aa, unidentified
MISVGIDVSKEKSTVCILKPYGEIVRSPYEITHTESQIAELVSTIKCLDDEVRVVMEATGNYHLPVLSFLKEHGIFVAVINPLIMKKYASIILRKGKTDKLDSIKIANYGLDNWFHLIKHESSEEIYVQLRLLGRQYGHYIKLRIESKLSLTTMLDYTMPGIKTMLKSRSDKPEKDKLNDFIEEYWHYDNITKKSENQFISNYKNWAKKKGYQQSEAKAIKIYDLAQQGIPTLSSNAPSTKMLVLEAVRVLREIDKTLALILSQMQELAKSLKEYTVVREMAGVGDIIAPRLMAEIGDIRRFHSGKALIAYAGIDAPPYQSGQFTGTRRRISKRGSATLRKTGFEIMKCLKSNKPESDTVYLFVLKKEAEGKASKVAKIAGLNKFLRIYYARVKEVYK

SEQ ID NO: 214693 - protein, 407 aa, unidentified
MDLLKTVFGIDVSSRKSNVCIMVNGQKVNDYAISNDMVGFNWLLGDLKQVTKPQIIFEATGVYSRRLQAFLDMHELRYVMMNPLEAKRKTKDDLHQNKTDKLDALYLAKLQSEHPQRLAYVQNKEYQELMANNRIYEQASHDPITNKNRLHKAVQLTFPEIEHLLANPRGKNYWSIALRFPHPDIVLETKKANIIDFLKGLSGIGKKRANDITQSLIRLAKVACPAVKKNSAHIRGLKMAINNILSAEEECQTALQEMAKLAPKRDLEILTSIPGIGKNTALRIISELGDIRRFNNPSQLNAFVGVDPQVYESGNLTAHLSISKRGTAIGRKVLYLAINQIQSAKKAGKPCHIADYYEKRKRSSETASHKKAAIASIHKLLRTIFALIKNDQLYSYDVAKHNQRLLS

SEQ ID NO: 214694 - protein, 320 aa, unidentified
MRNGAQDTQLTNQENMIYMGIDVHKRHINVAVMSEHVVLGQNHVEIRDVDAYMVRLKKKYPDRRLRAAYEAGFSGFALYHQLESLGIETIVVNAADVPTTDKERTTKSDRADSLKICHALKCGQLRKIWVPPDELSGDRDLVRYRLVLRQHLAKTKTRIKMFLYKQGVQIPPELESSHWTKAFQAWLKEQTMTTASSQTTLMLMLEELQHADQVYKKHLRRINELALTQRYSHNVDLLYTIPGIGRLTAITILTELGPIARFAKADQLASYVGLIPMQHQSGSSDRNMPIQRRAHQELRTLLVQCSWMAIKRKQPLQYGL

SEQ ID NO: 214695 - protein, 338 aa, unidentified
MKLYGAIDLHSNNNVTVLIDEQDQVVYQKRLPNELAVITEQLSGYRDRLQGIVVESTYNWYWLVDGLMEHGHRVHLANTAAIQQYEGLKYTDDTSDARWLAHILRLGVLPQGYIYPKEERAVRDLLRKRSQMVRQRTTNLLSIQNLITRNTGSSLNGNRIKILNAQEVDELFANADLALAVKANLALMNCADEQIHLLERTVSERIKLRAEFCFLKTVPGIGQTLALTIMLETGEIKRFSTVGDFASYCRCVGSQKLSNGKKKGQGNTKNGNKYLAWAFVEAANFAIRYCSRIKSFYQRKKAKSHGVLALKAVAHKLCRACYYIMKDQVPFDVAKAFA

SEQ ID NO: 214696 - protein, 436 aa, unidentified
MDRVIIGVDPHKLSVTIEARDTREILRATGQFGSDTRSYHQLLGVARQWPQRIWAVEGANGIGRPLAQRLLASGERVLDVPAKLAARARVFDTGQGRKTDAADAHAIVMVALRDKGLRELRIDPELTVLRMLCDRRDELSRARAQALNRLHRLFLGLLAGGAPVKKSASQYRALLATVRPRDLAGKTCRRMAAEELEDLERLDIKLKAMKAELKAAVQATGSHLMDIHGIGPAGAARILADVGDVTRFPDRGHFASWNGTAPIDASSGQHTRHRLSRAGNRRINHVLYIAGIVQLRNDTEGRAYYRRKLQQSKTSMEAMRALRRRLSDAVYRQLVADAAARQAALQQTGPGGHSGAALSSSAAGLPPGTGTSDQPLPGPAPSTLPPPQAALKTPAAPIAATSRRRARGVNVERPTGRTTLTPTSAGAHSTAPGPRT

SEQ ID NO: 214697 - protein, 410 aa, unidentified
MPKIVYPICCGIDVHKSFVVACIASTDEYGVTSYSKAKRFSTFTGDLRRLSEWLAANNCRDVCMESTGKYWIPVWNILEPTCKLVLAHPKYVKAIKGKKTDKRDAKWIADLFKHDLLNGSFIPPADIRQLRDLVRYNTKLTSYVTGEKNRAQNCLTVSNIKLDDVFSDVFGKAATAIVTRLLESNEPFDVTPYLTKNIKASPAEVQAAVDGVMCAEQAEKLRIIRSHMDSLDLCKANLESAILTIAESFLPQINLVVSVPGIRVFSAIAIIGEIGVDMSVFETSRHLCSWAGLAPQNDNSAGKKKTTRISRAGLYIKPLLVQCANAAIKANTNPEIKNRYNSIKKRRGHRKAIIAIARMLLTAIFNILKKNEPYNPDFYDNSLSPVVRDVSLDQAILILHRQGYRVSASL

SEQ ID NO: 214698 - protein, 353 aa, unidentified
MKRDKYMGMDVHQATTVVAVIDAEGKSVLETIVPTAAGAIRRLIESISGPLHVTLEETTQAEWLHDLLQGFVLEVVVCDPRRNKLLVEGSKGDKADARKLAELLRTGMLRSVWHGRQTTRGLKEMVRAYETFAVDTRRTMMRIKALYRSRGIATKGTAVYQKKERDRWLNQLTEVGMQQRAAWLYEQLDHIRELRKRAKAAVLTEGARHRAVELLRTIPQVGPIRAAQIVATAGTPHRFRTKRQFWSYSGLAVVTHTSSEYEMREGRVVRRNKPVATRGLNINCNRRLKSVFISAATAGGVAHPWQAYLDNLKEKGMKADMARLTLARKIASLTLAIWKKGESFDPKKLNWTN

SEQ ID NO: 214699 - protein, 313 aa, unidentified
MAKMVVIAGIDVSKQWLDVALGPKKAELRVPRDEAGYDELAGWLRRHGVSRVGLEASGGYEIAVMDGLEDRGFEVVRLNAQRVRSFAKAKGQLAKNDLVDARVIAEATAVVVNQKPERRRRDLDPLAQHLASRNQIKGWITDCTNQLEHLTEKALRRGFMAHKAALNRKLIAIDKAIAGLIAEREDWRVLAARLRQVPGVGPVLASTLIALLPELGRLPRRSIAALVGIAPYDDQSGRRSGKRYIQGGRAAIRQVLFMAATTAMTHNPVVSAFAARLAGKPRKVIVVACMRKLLVILNAMVRDAADWQKPATA

SEQ ID NO: 214700 - protein, 363 aa, unidentified
MRILALDLGKSKSVAYTVDTATGECGFKTVRTEPAVLGRLFAEGRPDRLVFEIGPLAGWVHDAAREAGVRQIEVANVAHEAWRWRHTRRKSDRVDAVRLADLSAAGQLPTVHVPQATTRQWRGLIAYRARLVARRTAVKNRIRAILASVGETMPRGAGGWTQEGLALLAALARPLADVGPEDLWRGELALELEALAHLEAQVATVEAKLDTLAEADERVARLRTIPGVGPRLAELLVALFDDPHRFRSGRQVGSYLGLVPRQFQSGAMDRHGRITRHGNPLARALLVEVAWLGLRWNGRLRAIYERVHRGSRARRKVAIVAVARRLAVFAWAMLRDGTAWRPEQPAETAAQSRRAGTEAGVLA

SEQ ID NO: 214701 - protein, 354 aa, unidentified
MKRSTKYVALDVHQATTVASVRDESGRVIARSVLETHEPSIFEFLRGMRGAIHVAFEVGTQSQWLYELVAPLADRVVVCDPRQVARQGNKSDQVDADRLSELLRLGGLRLVYHGSAHRVDLKEFTRTYQALVEDGTRVMLRIKALFRARGIPTPGTAVYHATGRARWLAQLPDRGARFRAEALYAELDVLRALRPKAKAAMIGEAKRDPAWPVLRTIPFLGPVRVALLLATMGTPWRFRTKRNLWAYAGLAVVTRSSADYTVVAGQPVRRRRAPLTRGLNRNHNRVLKDVFKGAATAAASRPGPLQDFYEGMVARGMRKELARVTLARKLAAITLRLWKTGECYDPTQLTRQSS

SEQ ID NO: 214702 - protein, 368 aa, unidentified
MGKSITYVGLDVHKKTIAVAFADEGDSEVRPYGVIDSELSSLDKIVRKLVSRGGEPRFVYEAGPCGYGIYRHLKQQNIKCMVAAPSLIPKKSGDRIKNDRRDAKKLARLYRSGELTGVHVPKSEDEAMRDLTRAREDSKTAERKARQQLNAFLLRHGLIYSGKSNWSLAHWRWISDIKMEHEAQQFTLQEYVDTARSCSERVERIIEKIRLLAGQWRFSPVVEAIQALRGVSLVVAATVIAEIGDLRRFDNPRKLMAYLGLIPSEHSTGEHTKRGGITKTGNGHARRMLTEAAWSYRMPARVSRRLRDRQQNLPEKVWKIAWKAQVRLCNRYQRLIARGKLSKVAITAIARELAAFMRAIFRTVEVGA

SEQ ID NO: 214703 - protein, 346 aa, unidentified
MKKIFIGIDFSKEKFDATLIKAEGLKECTPSVHEVFDNKTSGFRRLVKWAKAQSESVSVDSWLFCGENTGGYSIGLSNHLYASGYDMWLECAYKIKHSVGIQRVKNDKADSRAIAEYAMRNYDKMILYKPQSASLTCLREVFLYRHSLVRQKVALAVRRDEKRLTQEKSDVRAFMSFTSKHLVTEVNKAIAKCDQKIKDIIAADDELREIFDIITSMPGIGVQNATCLMVYTDNFQKFDLNARKIGCYYGIAPFGRQSGTSVNSRPQVSPFANRMIKSLLSQAALAAIKFDMNVHNYYQRLIGRGKHPLLVHNNIKNKMLHILVAMVRDRIKYNPDYVYQTNKSAA

SEQ ID NO: 214704 - protein, 346 aa, unidentified
MEKISIIGLDLAKQVFQVHAADAKGRCVLRKQLKRCEVLAFFAKLTPCVVAMEACGTAHHWARELAKLGHEARLIPPAYVKAYVKRGKNDAIDAEAICEAASRPSMRFVPVKSIEGQALAMLHRSRDLSIKNRTMLVNALRGHLAEFGFVAAKGIGKLPDLIKIVSEAPKEALPDMVRATLSGFLDAIAGLNVHLAAIEKRLRAWHKSDAKSQRLASVPGIGLIGATALCALVPDPSLFKNGRHLAAWLGLTPRLDGTGGKTRLKRISKAGDGYLRRLLVLGATSLLRSVANKTTPLALWTQGLLARRPPRLVTVALANKLARIAWALMTKAEAYKPLAAAHMANP

SEQ ID NO: 214705 - protein, 421 aa, unidentified
MKKIKPKTTKAVNQKVLIATIDGGKDKHYGYYRCPDGTECKSFDFWNNGRGFQEFWERISSAARTHGLEEIIVGFESTGPYMEPLVQFLRNKTGVRLVQVNPMHTKQLKELTGNSPLKTDRKDPKIIADIIELGHALTVVIPEGSAADLRRLTQGRERTIASRTRLFNQLQCLLVISFPEFLQVMKDVKTASAQHLLRHYPTAEEIVALGEASLAALLRKVSRGKLKKDRASALFEAASESVGIRDGRNSMLLEIQLMLETIASYDRFIDKLDAEMVRHLEQIPYSRVILSLKGIGSVTAAGLIGEVGDFTKFGTISEVMKLAGLDLYEVSSGKHRGKLRISKRGRPLMRKLLYLAALSTVRKGGVMHEWYQRALSRGMKKTMALVAVSRKLLGVIFALVRDHSVYVENYTKQKSILQEAA

SEQ ID NO: 214706 - protein, 439 aa, unidentified
MQQNPTPPTPTPTPTPEANAFERLSHYGGFDWAKHQHQLAVVDHAGAVRLELRFDNTAEGWALLREKLAPFPALGVAIETSCGPDVERLLDMGLAVFPLNPKAAERYRDRKRPAGAKDDPLDAWCFADALRTDGHAWRPLRPLDPATMELRLLCRDEIALIQQRTALANQVQAALHEYYPVALQSFDDWTSPLAWRFVLAFPTPADLAHAGKRKWEKFLHANRAWRPGTAERRLALFAKAAAFANPNAAVTAAKSMLASALAEQLLTLQRQIDRYRQRIEKLFAEHPDRDTFGSLPGAGDKIAPRLLAELGPDRQTFDSPEALQCYAGTAPVTRRSGKRHDVVIRRSCNMTLRATVHLWADLSRSTCVWAQAYYARKREQGMGHAAALRCLGQRWLKILWRMWRDRAAYDEARHTRDQVKHGSWVVKLLPDATPAASTH

SEQ ID NO: 214707 - protein, 387 aa, unidentified
MKKTQRTLQGENTTKKEVLHLAFELSQNKWKLGFSDGKKVRFKTIVARDLDRLQEEIEKAKGRFLLEGDVRIVSCYEAGRDGFWLHRYLLSCGIENVVVDSSSIEVDRRKRRAKTDRIDAGKLLNMVMRYHGGERLSWRVVRVPSVEEEDGRHLHRELEVLKKERTMHRNRIKGLLIQHGMAVKNPSGIRFLEGLESLKIWDGNPLPLDFKARIVREYDRLKMLEGQIYALRKERQSRLENAEDPSMRKVVQLMSLHGVGVQSSWKFVQEFFGWRQFKNRREVGSLAGLTPTPYDSGGIQREQGISKAGNKRIRTLAVEMSWVWLRFQPQSKLSQWYMERFAEGGKRMRRIGIVAMARKLLIDLWRYLEHGVIPEGVILRTYIPSFY

SEQ ID NO: 214708 - protein, 401 aa, unidentified
MPFHGGLDWGGASHAVCVVDGTGQVIVRLEARHDAAGLADMLARLKRIAPPAELPIAIERPSGLIVDALMAAGHPVIPIHSNVVKACRPRYRAAGGKSDPGDAYMLADILRTDGHRFRPLMPASDEIKALRALVRGRDDLVAQRVALANQLRSLLDSFWPGAAAIFAAVDSPIALAFVGRYPTPDSASRLGEKRLASFMAQHAYCGRRSPAELLTRLRVAPAGLASDAEADAKGEIARALTAILERLVAEIAKLSSRIEHAVADLPDGRIIMSFPRAGRICAAQILAELGDVRERFPTEDQLAAEAGVCPVTHASGKSRGVVFRWACNKNLRAAITCFADNSRHASAWAAHTYARARQRGCKHPHAVRILARAWIRVLWRAWQNGTAYDLQQHTAVAKIAA

SEQ ID NO: 214709 - protein, 498 aa, unidentified
MIRSVGIDFGEGGPHKVRCLDEQAQLCDGFTFYTTPEGLVTLGERIFRDGANPVIVFEPTGLAWLVVATYLRARRPDCHLVRAKTQKVAALRKYLRGRSKSDRIDALTLAKMPFIDPEQLYEVYLPPMEFHALQRLTRQREQLEKGIAARKARIGTIIDGYLPGLRQAFEDRWSPCARAFYQSRLNPFAVVRTGEKALHTFLTKATPRGKVSSAEAHQVYVACVNINTIYVQSTAAGVISEDFFADLQDEVARELRLMEAEEAEAKALARRIEELYQKLHPEDNLRTIPGVGEHTAPVFLAAIGDPERFRSQSAFANWNGVVPGARQSSQAESKGLKMTKAGPSMMRRALYQAGEVGRQWDPQLAYVYYGQIVYHGKTHQQAMGAVMSHLGARVLAVLREGRPYELRDIDGKPISGQEARRLILSRYKVPDEIRRERRRRNPKKSNASRLPKGKRGMTQNHRICEAASAPQPDIAPVIPQRSVYPVGSARSSPALDCT

SEQ ID NO: 214710 - protein, 406 aa, unidentified
MELVPIFKRVIGLDVHQGQVTACAIIEEADGQVRIEQRQFGAFKKDRRALAQWCARLQPDEVVMESTGIYWKSPYTALEAAGIRAKVVNARHVKQVPGRKTDIGDAQWLAMLARAGLLRASFIPPAKLRELRLIARQRQKLVGQLASEKNRLHKVLTDGGIRLGVVVSDVHGQSARAMVKALIQGAAPHEVLPLASRRLKASREELFDALQGDLTDSHRFVLDELMRHIEAIEARIARFDARLLEGLKEERNSLLLLQTLPGVDLIGAAMLLVEIGADMSVFGHADRLASWVGICPGNDESAGKRKSGRTRKGNPYVRRLLCEFAHAASRTRCALQSKFQALVVRRGRKRAIIGLAHKMLRTIFFMLSRGQPYRDSAINYEALSVKRNAPRWIKALTRYGFLPALA

SEQ ID NO: 214711 - protein, 385 aa, unidentified
MAPPARPEIVIGLDVGKSSHWACVVTREGELLASKPVLNRENAIDGLYAQYPGALVVVDQVRNIGSLALSRAKLAGMPRAYLPGLAAHGASRLFAGDAKTDERDAMVIAKTALGIPDALLAVADRPPEIEAARSLAAQRDFLTCENTRSKNRLRSILFESCPEFEAQADLSDPATLKLMAAVGGPWSISEASPQAVGALTRGCGRAKVAALVESVESSSRPHPAAVACEDRAVRLLARRISENAAEIESLTSEISALLAADETYRCLLTVPGIGPRTASELVISIDIADFAGHDRLASYCGLAPRNRQSGTSISSVSASRQGNKRLKNLLIFSCNCLARSRNRWGEYYARCRDRGMPHGKALKAVARKRLKVIYAIMRDKVPYAA

SEQ ID NO: 214712 - protein, 383 aa, unidentified
MKAVCGLDVHKDSIFLCILHSDGELFEQVFGVLTFQLEEMRKLLQKHHVFEVCMESTSIYWIPIWRVLSPHFTLRLVNPYFIKQLPGHKSDVKDAQWIAECTMKELVRGSFVPPEIIQQLRQYDRRIFDLNAEIVRKVSKVDGVLQRCNIRLSNYVSNIECKSYRDVVRRLSEGVTNPNELMKLVHGRIVNRHGAETILASLTGVVSQAEIDVLRQLHEEIDIAESHRNECQQRMLEICEKHFPEELERLQKIPGIKERAATSLIAEIGTDMSKFETANHLASWSGLRPRNDESNKKIKSRKITHGNVYLRNTIIQCAWAASRQKDSFFSRFSYHQTIVRRKNKMKVIVAVARKLLITVWHVLHDKTDYVDFKPDREESANNG

SEQ ID NO: 214713 - protein, 337 aa, unidentified
MKVTLIGIDLAKSIFQVCGVNQAGKHIFNRQVRRARLMELLMQHPDASIAMEACSGSNYWGRELQQRGFKVMLIPPQHVKPFVKGNKNDRNDAFAITEAARRPDLKCVEPRTLAQTDLIQVHRVLDRMMRQRTALINQIRGFLNEYGIVVAQGKEKLLAAMPDLLEDAENGLTLSSRALYQELYEQWRQANEAIDRIEQGLKNQANTNEATQRLMKMTGVAVKISTATIAHAGNGHGYKSGRHFAANLGLVPKEHSSGGQQKLGGITKRGNQYLRRLLIQGAWSVLRNADKNDDRMSRWARQLVERRGKHKAVVAVANKMARIMWSMLYHQTEFRAN

SEQ ID NO: 214714 - protein, 414 aa, unidentified
MEKVLERCAALDVHKRQVTACAHVPDRLGERAELRAEFQTMTPDLLALRDWLKGLGVTHVAMEATGVYWKPVYYLLEDDFELLLVNASHVKNVPGRKTDVADAQWLCQLLEHGLLRASFVPPKPIRELRDLTRYRKSLVWERQREANRLQKLLEDANIKLASVATRVLGASGRAMLAELCEGRNDPEALAELARGKLRRKLPELRRALTGRFSAHHALLVSQLLSHIDYLDEAIDALSNEIEQRLRPFEHKLELLTTIPGVAQRTAEVILAELGPDMQRFPDHRHAASWAALCPGNEESAGKRKTGKTRKGDSWLRTALIEAANSAAGRTRDTYLNAQYVRIKRRRGHSKAIVAVAHSILIAAYYILQQEKPYQELGGDYFMQRENTDRLTRRLVQQLERLGQHVTLEPALEPR

SEQ ID NO: 214715 - protein, 457 aa, unidentified
MYRELFPLRQALSAELKANLSPAVPGIDAEHLLQSYLDRLTMYVGCDVADHILTLFAVDTAGDELGHLSTANDPPGFEQAWDWLEDLRSQHGLRIILLAMETTGVYYWACWDFLAQRPNLARVLYNPRTTAHMTEVLSKKVRNELVDAYALAEQVRLGSTPEVVLSEDTDLLTARFCSRAARDLAGQINRKKNQLRALMRAYNPAISHVFPGSQFHHQAVYALLQQYVFPDECLDAGVEAISAILEAHCRTAFGRQHAERLVARCRDTLSRPIGRDEIRQRVHHLIDDITTCQKRKAYFNKAGYRLIENRPETSLLRDATGAGISNTLALVSEVGDVQRFKSGAHLASFLGLTTSKHISGTTIFVSKHITKQGSPNGRYAAVNVAQHMSQRVPKYQHMYKRIKNRKPPRKGHFVALVAIARDFVTNVLYDMWRFQRPFFLEVEDYRAYRRKNPRLDQ

SEQ ID NO: 214716 - protein, 350 aa, unidentified
MPKRNAPLPAAVYGVDIGKNIFHVVALGNDGTVVQRVRFRRDTLLQFFQRAAPALVGMESCAGSQWIARKIQALGHKVRLIPAQFVKPYVKSNKSDTIDAEAIAEAATRPTMRFAALKTEEQADLQALHRVRDQMIGTRTRLINQMRAFCLEYGVALRQGAGLFKLDLPEALRDPANDLSPAMRKLLGELFADLRQLEKRIADVTREIEAIADREDSARRLMTIPGIGALGATALLAAVGNGGQFQKARDLAAWLGLVPREYSTGGKQKLLGISKRGNRYVRKLLVHGARSCFRHLDRTKDRLGSWLDGLQARMHPNKAVVALAAKMARIAWVVLTKPGAFYERRDPAFA

SEQ ID NO: 214717 - protein, 369 aa, unidentified
MNSYTTVVGLDVHKETIVAAVLLQGRNDVTERVSLENHPKAIEKFVNRVTRQGPAEFVYEAGPCGYEVQRQIGKPGYRCAVIAPGLTPVRPGDRVKTDKRDAANLARFYRSGDLTEIRVPTCEEEAARDLPRAREDVLQERLRARHRLSKFLLRQGRVYRETRAWGVNHRAWMKTQKFDFVPLQQTFEANMRAHEETEARLVMLEQQIHDLAQQPMYRTAVSYLRALKGIDTLSALTLMVETQDFRRFSKASEFMSFTGLASSECSSGEKVRRGSITKAGNAHIRRVLVEAAWPHRVPSVWSKKIAEHREDCPKEVVQIARKAQARLHRKFTRMISRNKMHQVAVVAVARELAGFVRSIGQHIPSATAV

SEQ ID NO: 214718 - protein, 387 aa, unidentified
MARPSDSMRVAAPGAAVRTSPGATGWSDGRSAQTGPQREAATMLHCGADVHSKSTHLVILDSRGKELLSAKVATDKKSLQDAVKPYVKRKLKVVQETGALQAFIRAVFEEVGAEVVTVHAAAMKVITSSKKKTDKRDAFHLAWQSSKDNLPEPVYVPSGYELGLRALVGAQQRARKGRTQAINGVRGQLKSLGITLPPGCLARESGWVSLAGMELPETLRLIVDLGYKIWLAHTEVLDRIERELEDRTREDPLVALMQTVPYVGPACAVAVRAYLGKLDRFHGRKAVASYAGFCPSPRESGERRGLGRLTKAGPPRLRTVFVQAAHLLIASGFKRYPQWRAWFGRFIYRKMHPHKAVVALAKRLYLLAYQVGRTGMPWRSQCAGNQA

SEQ ID NO: 214719 - protein, 343 aa, unidentified
MVIGLDLGDRWSRFCLLDNAGTVLEEDRVRSTDQALEARFSSLPPMRFVIETGTHSPWVSRLLEGMGHSVVVANARKLRMIYESNRKNDRLDARMLARLGRADVELLAPVRHRSAKAQADLAVVRGRDASVATRTQLINACRGMVKTMGGRLPKCTTAAFVGKVRSSIPPELQAALRPLLASIRAISEQIENCDRRIRSLAANEYPQTKLLQQVKGVGPLVALTYVLTLEDPHRFANSRAVGSYLGLCPRQAESGNSAPQLGITKAGSGHLRWLLVQSAHYTLSSLASDSRLRRWGLELASRGGKNAKRRAVIAVARKLAVLLHKLWVTGQVYEPLHGISQAA

SEQ ID NO: 214720 - protein, 352 aa, unidentified
MSEYIAFDSHKRYSLVEREDVASGKIVQQVRLTHGPGAVRRYLARCTPGTAVALEATGNWYWIVEEIEQAGLQPRLVHPRKAKLMMGLINKTDKVDVHGLNRLQRNGTLPTVWIPPRPLRDLRELTRTRLVLVEQRTRLKNRLTATLAKYGVPPSEYSDAYGKSARAELEARIEPLPEQTRWVCKQLLAQIDFLVRQIRQLEQRLEDLVEVTPEMERLMTLPGIAEILAATIALEIGDIGRFPDAPHLASYAGTTPRVHASGGRVRYGRLRADVNRYLKWAFVEAANSVAVNHRRCPERHVSQLYDRLRQRKGHHKAIGAVARHLAEAAFHVLRRQEAYRDPVLERGCTGEV

SEQ ID NO: 214721 - protein, 326 aa, unidentified
MTDAPELIFVGIDVSKDTLEVALDDSAKTRTLGNDEAALKKLIAMLDAVRERVAVVLLEATGGLEQPAAAALCAQGFAVMVVNPRQAHDFARAMGHLSKTDSIDARVLSQFARTLHASDKRERLLYKLPTVQQQALLAMVTRRNQLMGMRVAEANRLAGAHASQHKSIRTVLKTLDGLIGRIDDDAARMLKEHFKDKLDLLKGLKGVGPGTQAMLMAALAELGQLTQREISKLVGVAPLNCDSGKFKGKRTTWGGRANVRCTLYMATLSATRYDPVIKAFYQRLTHAGKLKKVALVACMHKLLTIINAVIKSGVPWRAGYPQEGHA

SEQ ID NO: 214722 - protein, 340 aa, unidentified
MVIVHEERNFMKLNHVGIDVSAKTFTTIIDHEGERTEAFDLPNDPKGFKKLIRMITKKGFSAQVVLEATGNYSLDLALALHRAKRIEVMVANPRAISQFAGAYLRRSKTDALDANVIVEFSMRMPFEAWKPPEAHCFNLRAISRRIEALTKTATQEKNRLHAATTFDEMSDVVRNDIEVNIRHLERRIERLREQAREHIAEHPELERSFLHITSVKGIAQAAGIQILAELSTLPGDMDVRQWVAHAGIDPMQFQSGTSVDKPSRISRRGNAHLRRALFLPALVAVQHEPHVTAFYEKLLERGKTKMQANVAVMRKLLHAIYGMLKHDRDFDGEKFYVLGA

SEQ ID NO: 214723 - protein, 313 aa, unidentified
MKHIPSNVFIGVDVSKDRLDVAVAPSGESMRFANSEDGIALLADFLKPRNPELVLFEATGGWEMNAVNHLVAQRLPLVVLNPRQVRDFAKATGQLAKTDAIDARILARFGQAVRPEVRSLKPLELRKLDALNTRRRQIVEMLTAEQNRLVSAPEWIRPDIEDLIAILKKRLAAINRDLNKLIRKSPLWREKDKILQSFPGVGPITASTIIAALPELGTLTRRQIAALVGVAPLNCDSGTHKGKRKIWGGRADIRSVLYMCAMTAARCNPVIRPFYQKLLRAGKPNKVARTACMRRVLVILNAMMRSNTCWQPA

SEQ ID NO: 214724 - protein, 354 aa, unidentified
MKNVKYIGLDVHLSTISAAVLDEQGKLVMESVLPTHSAAILDFIHGLRGILQVTFEEGTQSAWLYDLLVRQVQQVVVCNPRKNALLKAGNKSDAVDARKLAELLRAGLLSPVYHGETSTVTVKHLGRSYESLTQDSTRVMSRLKALYRGQAVPSSGKKPYGERREEWLGKLGGAGLQSRARRLYQQLDVLHALRREARQELIGECRKYAAVRLLRSIPFLGPIRAGLLIGRVQTPHRFRTKRQFWAYCGLALETRSSADYRFVNGQLERTRKPVWIRGLNLNHNHDLKNLFKSAATTASARPGPFGEFYQHLLAKGMLPAMARLTLARKMAAITLSVWKKGERFDAQKLKSPQA

SEQ ID NO: 214725 - protein, 387 aa, unidentified
MAQVNDLSRSLTAFDLNSTLVVVVEMSKASWLVSSVVPGVERQPLKKLEPDATALLRLIERWRNEAVRVGRPISRIALAYEAGRDGFWLARWLIARGIEAHVIHSASVAVSRERKRAKTDRLDAAMLMRVFLGWLRGERGHCGMVAIPTMEEEDARRPNRERESLVNERSRIINRMKSALARLGIRGFKPHLRKAPERLAGLRTAEGTGLPANIIEEFRRDMARLALVREQISSIEKTRAERLERAPDTGPHAMVRLLARVIGIGIETADMLVREILSRKLRDRRALARYAGLTGSPDESGLKSREKGLAKAGNARVRRGLIQLAWRFLMFQKDSALARWYRTRTEGPSGARKTTMIVALARKLLIALWRLVTTGEVPDGVELRTAA

SEQ ID NO: 214726 - protein, 320 aa, unidentified
MASRESLWSGIDVSKQTLDVAFGADPHAPRETIPYTDEGVQLLVTRLQRLQPTLIVLEATGGLERMVFAQLLQAGVPTARVQPRRVRALAHAEGRQAKTDRLDARLLARCAERVRPPHHQATDEQRASLRDLLVRREQVIQMRTAEINRLTAAAPNLRPGIQKHIDWLDQEIRALEQELDNEAERTDELRRKRELRDSVPGIGAITALNLLLRLPELGTINRKEAAAFVGVAPYANQSGAQHKPRHISGGRRDVRSVLYMATLAATRCNPTIRAFDQRLCQAGKPRKVAIVAAMRKLLTILGAILRQQKPWDPAVHTSAP

SEQ ID NO: 214727 - protein, 278 aa, unidentified
MVGLDIAKNVFQVHGVDRRGETVLRKRLRRSQVGDFFRQQIPCLIGIEATQGAHYWARVLRTFGHEVRLVAPQFVKPYLKSQKNDANDAEAICEAVSRPSMRFVPSKSIEQQDLQALHRIRSRMIGSRTQLGNQIRGLLAEYGIVLPLHLSQVRRSLPRLIEEDNPLLSGFGRQLLAPLYEELCTLEQRIAKVEEQVQQIHRGNALCQKIAAVEGVGPVTATAVVAAIADGRTFHNGRQFAAWVGLVPRQHSSEDGVASRAEPASAALIAVANSFGVR

SEQ ID NO: 214728 - protein, 401 aa, unidentified
MDRNRTVAGLDVHKDSVYLCIMGQDEGIIFEKTYGVLTPELRQMCHDMVDHGVTEAAMESTAVYWVPVWNELCNSMELKLVNPYFIKQLPGRKSDVKDAQWIAECLLKNLIRGSFVPEPIVQDMRKLNRRIMDLNEDMTYNCNKLDAALQRCGFRLSNYVSTIKSRSYQSVLQAIINGMTNPKELAKMVHGRTVNKHGRDKITSAVTASYSKTDITILRQTKEVIDTIERQIEECQKELTALCQEHFPEQYRRIQTIPGVKERAATAIIAETGVDMKMFATAACLVGWCGLKPRNDVSNGRYKSRKVTHGNRYLRQILIEIAWGASRTRNCFFSNFSYIQTTVKKKGRMKILVAIARKVLVALWHMLSKEEDFVDIYLKRLEEQKKLEKQIKRLEATVVKR

SEQ ID NO: 214729 - protein, 327 aa, unidentified
MTASVSSHNHIFIGIDVGSASFEAAWHRGGCTQYQNRPDAIAALVARLSAEKQIIRIAVEPTGGYEKALVKALRGAGLPVEMVHTSRFAAYRKLVGAKAKSDTSDARLLAAYAAAPEEVRGRKAGHVVLPQDDVREQLAELAARRDQLKHMIHAETCRLSTVRSRSIRDDITAHLQALRQADCKTYDAMMQLVRQRDELRNAKRLLQTIKGIGDKTALTSIAAVPELGLISNKAAAALVGVAPFVRQSGTMRAPAHIRGGRAAVRNAFYMAAVTASRHNPVLAPFYARLIAAGKPVKVALVAVMRRLVVFANAVLRSGQPWKGAQII

SEQ ID NO: 214730 - protein, 315 aa, unidentified
MADSIAQSVGVDISKDTLDVHLHPAGRARRFANTEKGCRALIGWLGGVVVVRVAFEPTGAYHHRFERLLAQAGFALCKVNPRQARRFAEAIGRQAKTDAVDAAMLARLAALLEPPARPVISARLDEMKELHIARSALVKDRTAALNREHTRRSALLRRQAAQRLAQIERQIAAIDAALRHLLMADAELKARFEILIGIPGVGETTALTLLIEMPELGALEHKCAASLAGLAPIARDSGQHRGKRSIRGGRASLRRAIYMPALVAVRFNPDLRAKYNALRAAGKPPKLALIAVMRKLMILANALLRDQRNWTPKLA

SEQ ID NO: 214731 - protein, 399 aa, unidentified
MIKECLNILSPWSNVIHYSSKNKKMISLNERSVVVGVDVHKYSHTAVAMDSWGKEKDRLEFSNDNLPIYTTWLNSFGPKEDLFVGLEDVNCYGTHLVEELRREGFHIRYVPAILTERERKSSTKRQKSDYVDAKRVGKVILTKFEETLPAKESIADEAELKTAQALDLLLMERRDLVKEKTALKNQLHALLHQYYGDHYADDFKKPFNQDAIDFYLENLENPKEKHILATSIVRRLKRLVLLEEHIGSISEELAVIGKKSDEVMALTNTIHGCGMVTACSIMAELTTIKRFAGKDNLASYAGVAPTEHSSGRKNKLHTNPFGNRRLNRALHTIALSQIACKGDPRGKEYYQKKLKEGKTKLWALRCLKHQIAKRVFRVLREVLKNPVRSKENEAQNCSR

SEQ ID NO: 214732 - protein, 355 aa, unidentified
MASITLLGIDLAKDVFQLHGLDELGRPQLKRTLRRRALVQFVAKLPASTIAMEACSSSHHFSRKFQQFGHEVKIISPQFVKPFVQGNKNDAADAEAICEAASRRNMRFVATKSVVQQDIQCLHRVRKRLVHNRTALTNEIRSIVGEFGIVFAKKRSALVEGIKGLLNGSCPREELSSEGLTLLQDLYSELLELDQRIENCELKLKKISSQPQCQRLFKVGGLGLLSVTALAVALADPGQFKNGRNFAAWLGLAPRHQGTGGKNRILGISKRGDMDLRTLLIHGARAKLRGINAKSRAKRKLDPLEDWAYRLCQRQGYNKATVALANKNARIAWSISAHKTEFESHQAVASLKKGA

SEQ ID NO: 214733 - protein, 331 aa, unidentified
MTNNVYVGVDVSKNILDTLFRFPAGQTAEQRSFSNAKTGRKKLISRLSQMPGVHVVMEATASYHLGLMYDLNEADIPFMVVNPFCAKAYGRSKNLRSKSDTIDANTLAEFGSERPFIPTQMPSDNQLKIRQLASVIRLLTKHRTATKNSLRMIEQMPVISSDATKELKKIIALIDKAIARATEVMKQLVLACHKETLALINSVKGVGLKTTLILISYLGDLDSFQSAKQVAHFMGLGNVDNQSGQRTRPRRISKRGHPELRSLMFLCALSAARHNTSCRDLYQRLMAKGKPKKVALIAVANKLVRQIFAVVKNKTPFENNYLEKASISLAS

SEQ ID NO: 214734 - protein, 408 aa, unidentified
MEVIHERCAGLDVHKETVVGCLRVRERGQVRREVRRWATTTAELLELGDWLRQAGCTHVAMEATGVYWKPVWHVLEGEFELILANPAHIRNVPGRKSDVNDATWIADLLAHGLIRASLVPPGPIQELRDLTRTRKQLMREIVQHKQRIQKVLEDANVKLASVVSDVFGESGRRMLKAISAGQTDARQLAALGDGRLSASRETLAAALQGKVTTHHRFLLSQHLRMIEHLEQTVTAFEGQIEAAVQPFRAAREHLVTIPGVSATAAHVIIAEIGVDMSRFATVGHLRSWAGLCPELHESAGKVMSRRLRHGAPWLKTVLVQCAWAATRNKNNYLRAQFVRLRARRGSKKAIIAVAASILTTAYFLLRNQVPYRDPGALYFARVDQERTAQRLARRIKELGYEVQIRKAA

SEQ ID NO: 214735 - protein, 326 aa, unidentified
MAVLGIDIGKTSFDVHLLADDHAASVHLPNAAAGFADLRDWLVRQRQTKPAALHACMEATGNYGLDLAAFLVAEGIKVSIVNPKQIRAFGIAELRRNKTDKLDAALIARFCRAQNPAPWTPPLPDMLALREAVRRCAALKEMRTAELNRQKAGFSSEAVRASIQRNLDHLNTEIEAIAGEIRTLIAHNAELHRKAHLLRSIPGIGEITATVLLAELPNIADFEPKGLAAFAGLSPAEHSSGTQTKHSGISRIGNGTVRSACYLAALSASRHNPRLTDFAQRLKAAGKPKKLVLIAVARKLLVLAHAVIRTDRPFDANHIDANPANA

SEQ ID NO: 214736 - protein, 422 aa, unidentified
MLGVGIDWAEAFHLVALGRPAEGVIELRRVEHTPAAVDQLIAQIATLEPDPAEVRVVIETRHGLLVERLVDAGYTVLPVNPDLVARRRGPARKKDDAEDARIACLLALDRHTSLRPLIPHGEQAAELRAIARDDERAARDQRRLLNRLRQDLISTFPTALAIAGDDLGAPTVLRLLERWPTRDQLASASHQELVAFARAGRHGWPERFADRIAQALAADHFTPRDYLVRAKADTIRLAATQLLAIGSQRRVWEQRMAELLVGAPRHGRTRQPREDNPGQALPGGKVYLSFPGLGDRLAARVAGEIGDHIDQYQSPNALACYAGKAPVTRRSGKSELVVATRLACNRYLAAAVQQWAFCSLRCSGWAREFYDAQRARGKTHHAALRALGNRWLEILWHCLIRSQLYDEATHLANRNRALGKAA

SEQ ID NO: 214737 - protein, 340 aa, unidentified
MNATTYGLDIAKRVFQMYWVDAQTGEIANRRFGRDDLITFLAQRPAGRVALEACGSAHWWARKIRALGHEVVLLHAQFIRPFVQTNKTDAADAKAIWTAVQQPGMRTVAAKTEDQQAMLSLHRMRSQLVKFRTMQVNQLRGFLYEFGVTFRAGRLAGLAEVRERMAELEDVLPGSIILNLQDQLRRIDAFEQDIEQLEKRIGAWQKQEAACRAISQVPGIGRLTATALVATMGDAKTFKSGREFAAFLGLVPRQSGTGGKIRLGSISKRGDPYLRTLLIHGARSVLCHAKVPTAWQKGMQERRPGNVVAVALANKMARTAWAILAHESTYEMSHVSIRPS

SEQ ID NO: 214738 - protein, 368 aa, unidentified
MKKLTQYVGLDVHKDSISIAVAVEGRDPAQQLSRIPNDPTRLLKQLDRLGPRGQLQVCYEAGPTGYGLSRELKKAGISCVVVAPSLIPRKPGDRVKTDKRDAAKLAHFLRSGDLTNVRIPDESTEALRDLVRARDDAKLVERAARHRLSKFLLRQDRKYPGRTAWTGMHLTWIRSQSFEHEAQKRVLREYLHSVEDATSQVARLTKDIEELVHEEDLGPLVTCLQALKGFQLVTSAGVAVEIGDLHRFANPRQLMAYLGLVPSEHSTGDGKRRGGITKTGNKHVRRLLVEAAWSYRHPPKKSYAITKRWEGVAPEVTSIAWKAQNRLHRRYRRLLGRGKSKQVVITALARELAGFVWAIGKQINKTAA

SEQ ID NO: 214739 - protein, 345 aa, unidentified
MTVYIGVDFHARQQTVSYLTTEDGEIKRRQLDHGQPDEVRNFYQQFAGQQVIVGFESSGHAAWFEELLEELGCEIWIGHATAIRLFARRRQKNDRRDADLILDLLLRGDFPRIHRYSPQSREVLQQLRYRQRLVKLRTMVVNSLVFMASSRGVSLRTRLKSRRGVERLRQIALPQPLIEQRDEMCQLLQELKTKIDRVEGWLEAKAEADPGVQRLRTHYGIGPLTGLCLVHTLECVERFANARKVTAYVGFDPVEDSSGERRRIGSISKQGSRLLRFFLVEAGQIAIRKDQDLARVYHRVLVRRGHAKAKVAVGRRLLVRAFIMLRDEIDYAEFQRRGVAARSSR

SEQ ID NO: 214740 - protein, 404 aa, unidentified
MNDSMIGYAGVDWAMDGHAVCVVNGHGTAVIEFDVEHSAEGLSEMCRRIAGTGARRVAIERPDGPVVDALLGAGLEVVVVSSRSVKALRERYGTSGNKSDRSDAFVLADCLRTDGHRWRSLEPDSPATVTLRGHVRARKDLVETRVAVANQLRAHLRIVFPGAVGLFSAIDRPIALRFLERFPSATSAGWLSEKRLATWLRANSYSGSKDPAELYTRLSAAPAGVIGVDGDARGAITLAYVNVLKTLRTQIDELNTRLDELLDAHPDAPIFRSLPRCATVRAATLLAEIGDCRARFPDPESLCCLAGVAPSTRASGRHRVVTFRFSSDTKLRAAICDFAGDSWRGNAWAAHRYHELRASGKTHPHAERILARSWTHIIWRCWQDNTTYDPTRHGAHQRLTTQTA

SEQ ID NO: 214741 - protein, 388 aa, unidentified
MNVGADKSEPLTAIRTDLGAIFVSLELSRSSWLITSLSPGGGEKMSKHSVRGGDFAGLMERFAQLQEKARRRTGQSFRIIVVQEAGLDGFWIHRALQNEGIESHVVDAASIATSRRRRRAKTDKIDGETLVRVLLAYKRGEPRVCAMVKVPTPGEEDRRHLCRERNALTAERVRHVNRIKGLLFSQGVSGYQPLRRDRRQRLEELQTGDGRAFPQHLKALVNRELDRLELLLEQIKTVEAARDALLAAEQTAKPAPAAMLLDIRGIGPEFAAILWSEGLFRHFENRRQIAAYAGLAPTPWQSGAVDREQGVSKAGNPRLRTTLIQLAWLWLRNQPRSALSVWFHERVSRNGGRLRKTTIVALARKLLVALWKYVTAGVVIEGVTMKVA

SEQ ID NO: 214742 - protein, 424 aa, unidentified
MNLTQNDRLKQVTSDILIVGVDVGSQTHFCRAFDWRGFELSRRVFKFSNTGMGFLTFLRWTEEIMNKTEMKKVIVGCEPTGCYWLTFQKFLQDHDVQLVTVNPFTVNRSMELDDNSPEKSDLKDPKTIALLVKDGRFSTSYLPSGVYAEIREASVCRDQIMKQHVRLSNQIQGWIQKFFPEYLECYADWDSTSGLMLLREAPLPQDILKIGAGGINQIWRNAKVRAAGIKRAQTLVEAAQNSVGLEAGEAARLEIWVLVNDYILKAEQLKRLDEYLEEKVKEVPNVEKLLAIKGVGMSTVIGFIAEVGDIGRFTDPKQIQKLAGLEIVKKSSGKKKGQPRISKRGRRKLRRTMYESARALMIWNPVFQDVFLYYRNRTKNPLGGMQAKIAVACKAIRIFYVVLQTGCDFDEEKIRKDIIRPEAA

SEQ ID NO: 214743 - protein, 345 aa, unidentified
MIVLGADMHKGSHSLAAVAAGSGELLGDKVVKVGQPGFAAALAWARELEAERVWALEDCRHVSGSFERFLLVNGERVVRVATRLMAGERRSSRERGKSDLIDAIAVARAALREGVERLPVAQLAGVELDIRLLVDHRERLVRMRTALNNDLLWHLHDLWPEQTLPGGALLSQKWTARLGRRLARAEQTARIRIARDELRQLRELSRSIDALEREISGLVAEVAPQLLTEPGFGPLTAAKLIGEIAGAQRFATDAKLARAGGVAPIPVSSGKTNRHRLDRGGNRQINTAIHRIAVTRARCHPETRDYIERKRSEGKTNREAIRCLKRHLTRRIWHLLQPPHPAPIS

SEQ ID NO: 214744 - protein, 342 aa, unidentified
MVHVGLDLSRTRLDVHVMDESGTPLAVTTALPEAGGLAALVSRINAEFGGPVYAAIESMNGARFVHDQLELAGWQVEIADAQKVKGLAPLACKTDKIDSWVLAELSRRDLVPAIWLPTPAVRAERERARWRLHLVRHRTALKNRIHATLLAFGHPCPVSDLFGTGGRELLARLALPEPWAGDTAAALHLIDQLDHEVAECERVLRQVGADHRYVPLLMTAPGIGWVLGYTIAAEIGDIARFASPAKLAGYTGLCPRVYQSGGKDHRGPLAKNGPKYLRWALIEAAVHAARHPIYADRYRRTKTRLGRQRGPKVAQVDLARRLAEAIWHMLTTNKPFAPAGAA

SEQ ID NO: 214745 - protein, 353 aa, unidentified
MDKIARVGVDLAKNIMQIHAVDSVEHVVVRKAITRERFVNWFANLEPCLNAMEACSGAHYWARKLSALGHDVRLIPPQFVAPYRKGGVHVKNDALDAEAICEAASRPHMRFVPVKSPAQQSVLVLHRMRTSFVEERTALINRMRGLLAEFGVFLPQGTDSLRKQFVERVEDGSNELAGPARQALMHGWTQWQALDEQIAWLERQIAEHAAHDPQAQRCMGVCGVGRLTASAAVATVVDARQFKNGRQMAAWLGIVPKQNSSGGKSRLGRITKQGDAYLRTLLFQGARSAVLTAHRRNDRLSRWIVQLRARVGFYKTLIAVANKHARILWAVLAKGEQFDPSYAPVRTRMATDS

SEQ ID NO: 214746 - protein, 429 aa, unidentified
MPYRIAGIDVHKKMLAVVVSDVEIDSEYQFERKRFSSSPEQLRSLAAWLLEQAAEEVVMESTAQYWKPVWEALERYWKPTCEKREGARRKSGALHLAQALSNRGRRGRKRDFPDAERLVKRLVAQELTLSFVPDAEQRLWRTVTRKKYQLRCDRIRLQNQLESLLEEAHIKLSSFVSDLLGLSAQRMLKAISEGETDPAVLAALADKHLRATPEQLCDALGACTQLNPVYRRLLKLGLEELRLIDDQIGRLDREMASLLGEHQDAVQRLAEVPGLGVDSAQQIIAEVGPTAATFPSAKCLSSWVGACPGDDETAGVNYSHRSPKGNRQMRRILNQSANAAARTKGSIFEIVYRRSVPRLGHNQAIGAIAHRHCRLIWLILHRGVRYEERGPAVTRRSKQLRTWRMIRQLRSLGYHIAPPNPQPSQEQAR

SEQ ID NO: 214747 - protein, 385 aa, unidentified
MNQTSSCAISTNTLHCALELSKNSWLLAIQFPDREQPSLYPIEGGNTEKLMAKLAAARDCWAKVSGSPPAITVCYEVGYDAFWLARFLMGRSIECLVIDPGSLQVNRRGRRVKTDRVDVKMLLRTLITWCRGERHVWSLVRIPSIDEEDLRRSHRERGRLVRERTAHINRIKGLLFGQGIRGINVKSQYKTLAVDNLVTGDGHRLPPRLACEIAREIQRLAMVQEQIAKIERERDTAPTRCEATERKRHLLLQLKSIGPAISALLSREVYYRQFTNRRQVGSFLGLAPSPYNSGAEERCQGISRAGSGHVRAIMIETAWLWIRHQPKSALTRWFVERTAGQSTRVRKILIVAVARKLAIALWRYVEHGMVPQGAILNPPTTGNAR

SEQ ID NO: 214748 - protein, 343 aa, unidentified
MQVTTIGLDLAKSIFQVHGIDAGGRPVVRKALRRAQVLPFFESLAPCLIGMEACSSAHHWARELSACGHTVKLMPPSYVKPYGKRGKNDAADAEAICEAVTRPTMRFVPVKAPEQQAAVMLHRTRALLMRQRIMVVNALRGHLAEFGLIAPQGAKGLADLLERTFRPDGTGPIPSLARAALAPLVSQVRQLQGAIKTIDAELLAWHRQNAASRRLETIPGIGFITATAIAATVTDPSHFRSGRQFAAWLGLVPRQSSSGGKERLGSISKMGDRYLRTLLVVGATSVIRYARGKNAAGAAWINGLLARRPARLVSVALANKTARIAWAVLTEERDYRKPALMAA

SEQ ID NO: 214749 - protein, 413 aa, unidentified
MNKLYAGIDVHSTINYVYLMKSDGDKHSSFSVKNTPDGSKKIVANIVSALTSLGISDVTIGIEATGVYGDNLMIYLNEEECLAQFNCDFHVLNPKQVKNFKKSYSDLPKNDPVDAFIVADNLRFGRITKPLYIDDGYKYKALQTLTRARFFAVQNLSREKQRFANYLFMKCSGLAQEKVFSNQTGATAMALIDEFETVDELVYMNIDELAAFITEKGHGNFTNPNAVAKAVRSAAVGSYRLPETLNDSVNQALSVSIFSIRAMKEPIKTFDRAIQKQLELIPNTLISIKGIGTVYSAGIISEIGDINRFDSHAALAKYAGIAWYENKSGNFNGEITNLVKSGNRYLRYYLVEAADSLRKCDSEFRRYYDLKFKEVNRFQHKRALALTARKFVRLVFRLLKDKRLYIPPEQFKG

SEQ ID NO: 214750 - protein, 445 aa, unidentified
MMRKAKKQRLKIVHPRCAGIDIGSREHWVAVDPERCDDSVRCFTTFTDDLHRLADWLKSQEVEVVAMEATGVYWIPLYEVLDARGFDVQLVNSRATRQVSGRKSDVLDCQWIWQLMSHGLLKGAFRPGDAVCALRSFVRQRAGKAQEQSRCIAHMQKALTQMNLQLDNVVSDLMGKTGTAILRAIVVGERDPQKLAQLRDRRLRADEATVARSLHGNWRDEHLFALTQALAHYDFLNEQIGACDQQISQALATLPRLSEAEAPKPVKPLRSRHRTATQQKELHQALHAVMGVDLCAIPTLGVDTVLVLAGEIGADLSRFPSEGHFCSWLAVAPPTNISGGKTLPGQKPKVFNRTGQALRQAAVNARRSESYIGACHRARLARMDSAKAIKATAHQLARLIYAMLTKGQAYVEKGIEAYEALSKDRQLRALQRKASKFGLILSEAA

SEQ ID NO: 214751 - protein, 315 aa, unidentified
MEESPLFVGIDVSKERLDVAVRPTGETWQVSYDSDGINSLAGYLRELAPHLVVVEATGGMELVLAGELAAAQLSVAVVNPRHVRDFARAAGKLAKTDALDAQVLAHFAEAMNPEPRPLPDASTQELGALVARRRQLVGMITAEKNRVRTANQRIRPKVQEHIRWLEENLEDLDRELGDFMRSSPMWKDKDELLRSTPGVGPVLSMTLLSGLPELGALNRGEIAALVGVAPFNRDSGTLRGKRKVWGGRGQVRAALYMAALVATRYNSVIRDFYQRLCAAGKPKKVALTACMRKLLTILNVMVKHRRHWNPIVQNS

SEQ ID NO: 214752 - protein, 369 aa, unidentified
MPHVTSIGLDVHARSVAAAAFNPFTGEVVHRDFGTDAAEIAEWALGFEEPRACYESGPTGFHMARELRALGLDCAVAAVSKMQRPAADARRKNDRRDAEFIARMLATHNIVEVPLPDAAVEAARDLDRALDDATAEYRRARQRLNMFLIRLGHVWDERNADGTRKGSWTRAHWRWISGIRLEGPQRDVLEYYVTAARCAESDRRQLEKEVLALARTDRWRPAVEALSCIKGIDTLTAFRLAAEAGSFTRFRTAPAFASWCGLIPSERSSGETERRGGITKTGNRLARTALVESAWHYLTCTPRPKAPTPGADVPAAIRARADDCTARLCRRREALAAAGKSPCKANAAVARELACWVWEIGCRAEGTLG

SEQ ID NO: 214753 - protein, 400 aa, unidentified
MLSIGIDVSKGKSTVCGMKPGGEIVYTPFEVQHTREGMSELVSLLRGSGEEVRAVLESTGSYHCPVVAALLENGIFVSVINSLRMKRFCSQSIRKVKTDRIDAMQIALYGLAYWQELQPTRLPENTYRELQLLARQYYQMTSLLIKAKVDFNALCDQVLPGMQELMNDHAGRHKLSDFVLRYRHTTHILEMGETRFRKDYCKWAEKKGYRNRERMAALIFATAQNGIPVLPNAPSTQIVITEAIRVLHTVEASRDAILTQMQALAKTLPEYSLVREMPCIGDTLAPRLIAEIGDVRRFHSKRALIAYAGIDAPPYQSGKFCANNRHISKRGNRYLRKTGYEVIQSYVMHKPANDPIFTFIEKKRGEGKSGKLAMVAGLNKFLRVYYGKVTELYRSLPAIE

SEQ ID NO: 214754 - protein, 432 aa, unidentified
MKKIRENAAGIDIGAKKVFVSIEDQEVKNFFTFTEDLEQLRDYLLKHKIKTVAMEATGVYWNILYEILEEAGIDVWLVDGRQTKQVPGRKTDVKDCQWIQQLHSYGLLNRCFVVESDIKELRSYQRLREDHIRSAAMHVNHMQKALTEMNIRLKEVLSQIHGTSGLAIIEAILKGERNKETLLKMCHSSIIKNKKEEILKSLNGKYTQAGLFALRQALESYNFYQRQIQQCDKMLDKVIKRMGDGGTDQKQQSLRKPIRHNKPDINNLGISLIKIFGGKDATVLSGITDYTWMQLLSETGTELTRWPSEKHFTSWLGLSPGQHTSGKTKKNKRKAGRPKAGQIFRQIAQSLLTSKHIALGAFGRKLRARKGPSIAIKSMARKLAVLYWRIMVKGLEYVEKGIHKYEEQLLAQRHRTLMRLATELNAQVSYNL

SEQ ID NO: 214755 - protein, 352 aa, unidentified
MAKNDFDELMSVGVDIGKDVFHLVGFDKEGRLVLRKKIKRMALVATFEELPHCIVGMEACLSAHFVSRTLRKMGFEPRIIPAIYVKPFNKGQKNDYNDAEAIAEAALRPNLKTVSEKTQEQLDLQALHRVRSRLVSRRTAAMNQIRAFLIEQGITVRRSVAALRASLEAILSNRGDEMSLRMRRLILGLQQDWIWLDKRIDMTTSEIKEVSETEESCQRLMTIPGIGPIISTAVVAAVGTGEAYDRGRDFAAWLGLVPRQHSTGGRTILGRITKRGSRYLRMLFVQAAQVIMMRPKNWHKFSFGAWLEAAATRMQHNKLGVALANKLARIAWSVLNSGKDFDWMEKELATAI

SEQ ID NO: 214756 - protein, 414 aa, unidentified
MPRVKCGIDWAEDHHDVALVDSEGQQLAKRRIGDDVAGFAELMTLLAEHGDSPEEPIPVAVETSRGLLVACLRATGRPVFAINPLAVARYRDRHSAARKKSDAGDALTLAHILRTDTAEHRPLPADSELAQAIAVLARAQQDAVWDRVHAQNRLRSLLREYYPAMLEAFRDVRGGLSTPAARAVLAAAPTPAAAAMLTTGQLRALLEHAGRRRGLDAEASRLQSVLQAEYLHQPPLVEDAFGRQALALLRQLDAACRNAEELATAAIENFEKHPDAEIITSFPGLGSLTGARVLAEIGDDRSRFKDARALKSYAGSAPVTRASGKHLAVHTRRVKNQRLAAVGYVWAFSALNASDGARAHYDRRKQAGDRHIAAQRNLFNRMIGMLHHCLQTRQNYDETRAFCSAELNIHSAAA

SEQ ID NO: 214757 - protein, 384 aa, unidentified
MSMNPFYTSHRIGQLILKRSALGFRRLIRWSPPPCERYADRVFFFLKGIIMQNVTLIGIDLGKHSFHVHAQDKNGNALLRKKFSRNQLTAFLSTCAASTVVMESCAGAHFMARHISQFGHQVKLISPQFVRPFVKSNKNDFIDAEAICEAASRPSMRFVTPRTEDQQAMSALHRVRDAIVRDRVKTTNQMHAFLLEFGISMPRGIAVIRRLAAVLEEHELPPYLARLLMRLHQHYAYLTEQIEELEQELKTHMADDDTAQRLLTIPGVGLITASLLATKLGDGKSYASSRDFAASTGLVPRQYSTGGKSTLMGISKRGDKNLRRLLVQCARAFMQRLEHNQGRLADWVKAQLSRHHSNVVACGLANKLARIAWSVTTHRTAFIQ

SEQ ID NO: 214758 - protein, 346 aa, unidentified
MEISTYVGFDVSKSSIAATAVDPLGHRLRQEKLGTSDEEIQRFLTNLPRPTRVVLEACNVWEHVYDAAAATGAEVLLANPFQTKLVSKTTLKTDRVDSEKLAKLARLDAIPEAYVPSPEQRALRKLVRERVYYTQSWTGVANHVYAVLLQKGIPFSPGLLQRRTLRSRVIDPRFPEIERGLQELASIEETTHALDRAIREAFEASEEAQLLATFPGVGRFTSVALVAFLCPIERFESLDAVVKYCGLCPSVHQSGTTSYNGRLVWDANHLLKWVLVEAQWNVRRHEAKGDVYRVGHRVARRKGAGNGAVAAARKLVRITASILRRHTPYQPDAPESSSRQRPIAAS

SEQ ID NO: 214759 - protein, 339 aa, unidentified
MDLYGGMDLHGDNVYCTVMDEEYRPVFERRLPNELAVVLAALEPYRERLKGVAVESTYNWYWLVDGLQAHQYPARLANPARMQENLGLKSANDKTDARFLAKQMVMGVLPEGYIYPKEERAVRDLLRRRMRLVHMRTGEWLSLEGLVARHSGQNLGIQALNGIEGGALSRLLGNDPLVLAAAQISYRHIAFLDREIRQIEKAVEPRVKLTGGYERLLGVAGIGRILTMTIMLETGPIARFPGPGNYASYCRAVKTEHVSNERKKGEGNGKSGNRYLAWAYVEAANFAVRYSPELRAWYQRKAARTKRVVALKALANKLAKACYFILRDGVDFDVKKLVG

SEQ ID NO: 214760 - protein, 390 aa, unidentified
MTYYVGIDIAKYKHDCFIADDSGCVIKDSFSFSNDKDGFNVLLSILKELKSKGQIKIGFESTGHYHFNLKLCLKANGYDYVEFNPLLVHKFSSTQTLRRTKTDKKDAHLIAKYLMTVDYKPYVNSFYHINNLKSLTRLRETLITDKTRFLNQITAYLDQIFPEFKPLFENGLNESAFYLLTHYMTPAKMSKLDSNKYSKMKSELRHPISYQKICQIKDAAINSIGHTSKALEYALEASLTLYLTLDNQIDELESKIIEIYDSLNCHIHTIRGISKLTSAGILSEIGNFNKFLTPAQFQAYAGLEPSKNDSGTHDGLGVMVKHGSSYLRKYLMNSAETFYVYNPSISDFYWKKRNEGKHHRVALSHVARRLINTIFYLEKHNQDFNPNLIK

SEQ ID NO: 214761 - protein, 374 aa, unidentified
MNFIGIDLHTNRFTCCYRDEQSPADKPAQGRVIKTFELDMEGLAAFYRTLTCDTYVLVEATITTFSFVRLFKEKVKEVIIANTHELKQVSLARCNTDKIDADKLCRILKAQVLSGESLVSPVTAPPEQIQVLRGLFTTYRLFQKQNVQLKNRIHSLLKEQLYGFTQEEIFDRRNRKKIRAIAPDTALQFQVNLLLDRLERDEADVETLKNRILLEAAPFMAQIEILTSMKGISVFIAVAIIADIIDVGRFKNSKAFTSYLRSAPRVSNSNTSVNIGRTNKKGRKLSATLLTQSLNHVLDSSVKLRLWYERLCEYKKPGLVRTGLRRRVLAEIFQMLKKGEYHYGRDEKKHEAKMAQYKRFLEKQKNNEISKKIA

SEQ ID NO: 214762 - protein, 317 aa, unidentified
MTELKSPLFIGADVAQDAVVVAAHGQSTSRSIGNTPAALKAWLKALPPGAQIGLESTGSYHERLALLAHRAGFTVYVLNPKDVRHYAHAVGKRAKTDHVDALLLARFIAHEHADLHPWQPPTREQRHLDNLLKRRATLVKAQGMLRQTLAHLSPLKTESKAMLASLAKLIATIDRTLEQAVAANPGLQAKADCVQSVPGIGLLTGTALVNLFSRLPSARADALVAFTGLDPRPCDSGKKRGTRRLSKRGPGELRRLLFNAAMSAAKTRVWKPFYERERAKGLPTTAALVCLARRLVRVAFALYRNNAHFNPEAIHCA

SEQ ID NO: 214763 - protein, 412 aa, unidentified
MDVIVQRPAALDVHKEQVTACVRFPAPDGARAQDVREFKTTVGGLLVLHDWLKAHGVTQVAMEATGVYWKPVWAVLEDSFDCLLVNARHVKQVPGRKTDVKDAEWLCQLLEAGLLRASFVPPKPIRQLRNFTRYRKAQIKERQREANRLHKALEDTGIKLDCVATDILGVSGRAMLDALCAGTTDPEVLAELAKGRLRAKLPALREALEGRFDAQHALLIGAILSHLDFLDEQVERLSEAIEEQLRPFQPAVDLLRTLGGIETRTAQNILAEIGTDMSVFPSAGHCASWAGQCSGNDQSAGKRRSGRSRKGSKWLNDALKDAAMGAIRTNDSYLQAQYRRLKPRIGHGRALGAVKHSIICAIWHMLSTGELYRDLGGDYFRKRDPERQTKRLIAQLERLGHTVTLEALPDAA

SEQ ID NO: 214764 - protein, 319 aa, unidentified
MEVIVERCAFLDVHRDTVVACARTPDPGGGRREEVAEFGTTTSQLLELADWLTERKVTLVAMEATGIYWKPVHWVLEGSVPEVWVINARHMRNVPGRKTDVADAIWGASLIEHGLVRPSFIPPEPFRALRDLTRYRKALAEERSREVQRLHKVLEDAGVKLSSVASHVLTKSGRAMIDALIAGERDTTVLAEMAKGRLRSKIPALQDALAGRFNEHHALIASSMLARIDQIDVTIATLGERLDELLGPCEAAVTLLVTIPGVSRRTAQVILAEIGADMSRFPTAGDLASWAGMCPGNNESAGKRKSGRTCGARKPARGR

SEQ ID NO: 214765 - protein, 360 aa, unidentified
MTESTPIVAFDQHAASVMAAVLMPGDRTPALHPLPPDLPSIRRFLERLAVPAVRCCYEAGPCGFDLQRSLHAQGIACDVIAPALIPRRVGNRVKTDRRDAAQLAVLYRAGALTAISIPTEQEEAVRDLLRCREDICTDLLRAKHRLSKFLLRHGRRCPDGRAWSKRYFAWLRGQQWALAALEQTFTSYRRAIDDTVARLRSVDGDLQTALTFAPIAPRVARLRCFRGIDDLTALTIAVELGDATRFPAARQVMGFTGLVPSEYSSGATQKRGGITKTGNAHLRRVLVEAAWHYRHRPAVSHRLRTRQQAAPPAAIRVAWSAQHRLHARYRRLLARGKSPQLAVAAVARELSAFVWVALTQ

SEQ ID NO: 214766 - protein, 344 aa, unidentified
MSEVSIIGLDIAKHVFHAHGADERGRAILSKRISRGKLLDFFAAQPRCMVALEACGGAHHWARQLTQLGHKVRLIPPAYVKPFVKRQKNDAIDAEAICEAAQRPSMRFVAVKSEQQQAAGLVFRTRDLLVRQRTQLINAIRGHLTEYGWVAPKGPSHVAMLADLIEEEEMVNSLPEAARAMFRVMLDLLAGLNSKIADLDKEIARRAREDEVSRRLMTVPGIGPISATAIAALAPPAETFAKGRDFAAWLGLTPLQRSTGGKQKLGATSKMGERTLRRLLIIGSSAVVKQASKRGAPRGSWLEQMLARKPRMLVTVALANKMARIVWALLVKQETYRAPVAARA

SEQ ID NO: 214767 - protein, 348 aa, unidentified
MRFYTKTHKHYCGIDLHAKKMYVCIIDGEGKILVHCNINCNPADFLRAIAPYREGLVVGVECMFAWYWLSNLCRVEKIEFILGHALYMRAIHGGKAKSDKIDSKKIAAMIRGGMFPIAYEYPPEMRATRDLLRRRNLFVRKRGELMAHIHNTVTQYNLPALGFDLGCESNRHQVTELFSDPEVRKIIEMDVAMIDSYDDALKILEKDIEKTARQHDRHALLLLCSILGIGPILSMVMLYEIHDINRFETVQQFASYCRQVKCSHESANKKKGTGGAKIGNAHLKWAFSEAAIMFMRYNPQAKKLVEKLTIIHGKGKALSILSHKLARAIYHMLKNNMPFDREKFFATA

SEQ ID NO: 214768 - protein, 336 aa, unidentified
MNTTRDVLGIDVSKKKLDLTLLVNGKAKTKVFDNTSAGHRALVAWLGASKASLPTLHICMEATGVYYEAVATTLHAEGFKVSVVNPACIKGFGLGENIRNKNDEIDAGLIARYCLALNPEPWTPPPLEQRQLRAWTLRVQSLKDIRQQEENRIEAHMVADLRDIAANVAEHIKWLDAEIEKLQREIDDHIDRHPGLKNDAALIASIPGLGATTVARILGHLGDIRRFKSAKAFAAFLGVTPKHRTSGTSLKGRTMVSKTGNASLRAALFMPSMVARRHNPILRQFAERLLANGMAKRAVISAVTHKLTHLIYGVIRTGKPFDAGYLQKNLAIQDGI

SEQ ID NO: 214769 - protein, 403 aa, unidentified
MTVRPQVWVGIDVGKASHHACAVDETGKVVWTQKLANQQRAVEQLIDRAHQTADQVRWAIDLTSPMALMLITVLLAAEQSVVYVPGKVVNTMTGTFRGEGKTDAKDARVIAETARLRSDLSEVTMPDELVVELTQLTGYRTDLMADWVRGINRLRALLGSIFPGLEAAFDYSNRTPLILVSALCTPAEIRAAGIEGVTAHLVDSHAWPTAITKTTATAVALASEQELALPGEAGTAALVKRLARKLLDLDREIKDIDKTITERFRDHRYARIIESLPGFGPGLGAEFLVITGGDLASFTTAGRLASYAGLVPVPRDSGRITGNLRRPKRYNRRLRRVFYLAALSSIRTNGPSRRFYDRKRGERLIHTQALLALARRLVDVLWALLRDGREFSPDGPTAASAVA

SEQ ID NO: 214770 - protein, 353 aa, unidentified
MRGIFEGGCDYHPGFQQIAFVSTDTGEVGERRLEHTEEAEQFYREVGKHGEVVRVGMEASGHARWFERLLHNLQFELWIGDAAEIRTKRVRKQKTDRQDAQLILQLMLENRFPRIWVPDAENRDLRQLLWHRHRLVQMRTRVMNQLHVVALNEGLRRKKALWRPEGRAELQGLSLAPWAGRRRQDLLDLLDRLTPKIHELNGKLEQIVEQRPVTRQLSTHPGVGPLTALAFELVIGTPERFACAKQIASYVGLVPSEESSGDRRRLGHISKQGNVLLRFLLVEAAQVTVRSDAQWRSQFFHLAMRRGRKIAKVAMARKLAVELYWMWRRGWDYRQMQQLGSHAGEPGHPHGVQ

SEQ ID NO: 214771 - protein, 413 aa, unidentified
MSLKIVYPICCGIDVHKTFVVACVASTNSSNITSYSSHRFSTYTNGLRELALWLEAHNCRDVCMESTGKYWIPIFNILESSFNLVLAHPKYVKAIRGKKTDKKDAKWIADLFKHDLVAPSFMPPSDIRQLRDLMRYRFKLTCFSASEKNRFQNCLTVSNIQLGNIVSDTFGKSSQRIISQILEQPGEPLNLPSLIHGSMMPKLPELTLAVDGVFSPEQADKLKIIRQHYDDLKIRKTELEQLILALAMPYQQEINLILTVPSFKNIFSAITVLSEIGTNMEAFPSAKHLCSWAGLTPTNNESAGKKKSVRISKAGCYIKPLLVQCANAVVKSEKHPEIRNRYLRLKKRRGHKKAIIAIARMLLTAIYHILKNKVSYNAELYRKADIIPVNREITIEQAVLLAQSQGYRIKIAS

SEQ ID NO: 214772 - protein, 321 aa, unidentified
MLKYSLGLDISCEKIDACISAIDTNQNVVVKSTTHISNSLSGFKHLDDWIHKHHKDKSIPIVICMEATGIYYENCALYLFDKGYAVSVILPNKAKKYIQALGLKSKNDKIDAKGLSRMGAEQCLSVWQPLGKYFYELRLLTRQHQNLNEQMTITRNRLHAIEHAMYRNKIVEKQLRKEIDFLEKQVKETTKIIEKHIHGNTEIKQKVENICTIKGVAILTVAILLAETNGFALFENARQLVSYAGLDVVENQSGFHKGKTRISKKGNSRIRRALYMPAFVVITCKQIHFLNHYERTLDKHNVKMKSYVAVQKKLLTTIYAL

SEQ ID NO: 214773 - protein, 363 aa, unidentified
MSSMPQLVSGDQDDSAADEVIVGVDTHSDVHVAAVITALGALLDTAHFPATAAGYRALVGWVGSFGVLRRAGVEGTGSYGAALARHLRAAGVEVIEVNAPDKATRRRRGKTDTLDAEAAARAVLSGRASGSAKAGDGPVEMLRMLKLAKDSAVKARSQTINQLKAVLVAADPALREALSGLSNTMLIRRCAQLEATAPADVTSAAVYTLRLLARRILELTKEIHDLVHHISDTITRHCPRLLTRRGVGPDNAAALLIAAGDNPDRLHSEASFAALCGVNPLEASSGKTSRRRLNRGGDRQANCALYRIAICRLRCDARTRDYLARRITEGKTRREAIRCLKRYLAREIYQIITSPPEVEPSAT

SEQ ID NO: 214774 - protein, 338 aa, unidentified
MKITTIGLDIAKSVFHFVGVNKAGKLVKKKMIKRKDLIHFFAQVEPSLVVMEACGGANYWAREFQKVGHEVKLIAPQYVIPYRPGNKNDYNDALTTAEAAQRPNMRFVQPKPVEQQDVQMLHRMRERLNKQSTALVNQVRGMLAEYGIVIAKSTAAFRTAFPDILSDENNELTVKGRYIFNQLHEEFTDIEKRLKSCDTQIVEERNTNPVCLRIETSPGIGPVTSTAFYAAVGEGKDFSNGRHFSAWCGLVPRQHSSGGKDNLLGISKRGNAYLRTLFIHGARAVLQHCGGKQDRLSRWAYALAERKGFNKACVAVANKLARITWAIAAREDEYRTFA

SEQ ID NO: 214775 - protein, 339 aa, unidentified
MSSLHILGIDLGKHCFHIVGHNSAGREVLRKKLNRSQLILFISKLCPTTIAFEACGGAHWLARKCLELNHQVKLIPPQYVKPYVKGNKNDFIDASAIAEAACRPSMRFVAVKSEEAQIIAAIHRVRDGFIKERTACMSRISAILLEFGLSLPTGHAKMKSLFQWLADQKQPLPPFFTRELQALHEHYSYLNEQIKRQDKKLSQYVETNELAQLLKSVPGIGDLTASLCLADISSPTNFTNGRNMAAWLGLVPRQYSTGGKPKLLGVSKRGNKQLRTLFIHGARAVLARPDKTGKAFGQWLIDLRASKPFNVVVVALANKLARIAWAVMYNRQAFRMTTI

SEQ ID NO: 214776 - protein, 340 aa, unidentified
MNVTTYGLDVAKRVFQLYWVDAQSGEIVNRRFGREELIGFLAKRPAGRVALEACGSAHWWARKIAALGHEVVLLHAKFIRPFVQNNKTDAADARAIWTAAQQPGMRTVAAKSEEQQAMLGVHRMRALLVKFRTMQINQLRGLLYEFGVTFRSGRRAGLAEIRARMTQLEDALPGMLLSSVQGQLKRLDALQSDIETLEERIGAWNKQEAACRAIAQVPGIGRLTATALVATMGQARAFRSGREFAAFVGLVPRQSGTGGKVRLGSISKRGDAYLRTLLIHGAHSVMMHAKAPTVWQQEIRTRRPANVAAVALANKMARTAWAILAYGRAYQKDYVSVRPA

SEQ ID NO: 214777 - protein, 375 aa, unidentified
MCERAVLTNRPSLDLSPFVLKGPESLSGSEGQIRCLPQPEQLHGLRARTEQGREWMMAQNEVVVVGIDVAKDKVDACIRSLSQRQTFPSTAEGQRALIRWLRKHKVGKAVMEASGGYEREWAKALRNAKIEVRIVDPKRVRSFAQSAGRLAKNDAIDAEMIAWFAETFDEARGQAYDAAREELVQIVNARQALLEQQTQMQNRCEHTVPIPVRKMHERLLKAIALEVTKLEAVIAALTKASPHFAETAEIIESVPGLGKITSAGLIAAMPELGQVSNEAISALLGVAPYDDDSGKRQGERQIKGGRRKVRNLFYMACMGAATQHNPVLKTFYRRLIAKGKKPKVALVACMRKLIVILNIMIARREKWDASRYAVG

SEQ ID NO: 214778 - protein, 391 aa, unidentified
MTILVGIDVAKDKHDCFFMNSEGEVLAKPFTIFNNKEGFDFLYEKIQSVSSSDNIKVGLEATGHYSYNIIGFLLNKGLATFILNPLHTNLYRKSLSLRKTKTDKIDSKTIAMMLLSDVSLKSYSDISYHNEDLKSLTRYRFSKVEERAKLKTSLSRLAQILFPELEKLVPTLHMTSIYQLLEEFPSASAIASVHLTRLTNLLSKASKGHYDRETAIKIRDAAKNSIGSNMPAKSLELKHTIKLIRALTIDIGEIEAEISKMMDKIASPITTIPGIGRNMGAMIISEIGDFSRFSSPDKILAYAGFSPSIYQSGKLDNCYAHMEKRGSRYLRYALFHAAKLVCHWDKTFADYLAKKRAEGKHYYVAISHAVKKLVRVIFHIEKTKQAFLKAS

SEQ ID NO: 214779 - protein, 343 aa, unidentified
MQVVRIGLDLAKYVFAVHGVDARGKVVLRKTLRRDSVSCFFANLPPCLVGMEASNGAHYWARVLTDLGHQVRLISPQFVTPYVKSNKNDRNDAEAICEAVGRPSMRFVPPKSAEQLAVQAIHRIRRRLVSDRVKLVNQVRGLLAEHGIVIPRDITQFRRGLAQIIASCAGGLSELVRSLMRELQEELVELDRRIASYDRRIREIFRNSEPCQRLGKIEGIGPITATALIAAVGDRTCFKNGRQFAAWLGLVPKQRSSGGRARLFGISKRGDRYIRTLMIHGARAVLGRARRKQDPRSLWLGKLRQRRHPNVAAVALANKNARIVWAMLSGDTAYEPALSVKAA

SEQ ID NO: 214780 - protein, 337 aa, unidentified
MSYLGVDLHTNSFTVCYRSCQGKQRIGTFDIRRIDRFRKTLRKADKVAVEATGNTAWFVDRICDRVSKVVVVDPHQFEVIRRSVKKTDKHDARTLAYFLSKDMLPEARMKSKENAQLHSLAGTRDKLVKQRTALVNKIYNVLNRHGLSWKKETLTTEKGLKSIMAFDWEPIVRMELEVLAEQIRSLTRSVKKLDDRISQEGKKLDGHKNLTSIKGIGERSATVLLSVIGDVNDFADENKLAAYFGIVPRVSDSNEKIYHGRITKNGSKIGRTTLVQCTLVAKRYSPYLREYYDRIKRHRGSGKAIIATARKFLGIIYQTLKNDWIFEDFPNFVIANT

SEQ ID NO: 214781 - protein, 379 aa, unidentified
MYRILKIGMDVHTTNFTLCALESKFGEEDQIIANITVGPDHKNVLDFIKRIKEKMDPKGQDEIDVECGYEAGCLGYSLYHTLTACKLKCRILAPTTMLSEQGPRIKTDRRDAKLIAQCLSNGGYHAVHIPTAEDNAVKEYVRMRDDHKLALKKVKQQTNALCLRFGFFYDGTNWTGMHLKWLRALELPELIRETLNEYLATYDELTAKIDRYDKRIQEIAAQSEYQEKVKKLECFLGIKTHTALSLIVETGDFIRFRKGNIYAAYLGLAPGEHSSAESGGRLGITKAGNSHLRRLLIEAAGGICKGQIGKKSKDLIARQKGNPADVIAYADKANVRLRSKYYRLTRHGKKRNVAVAAVARELACFVWGMMTDNIHGNAA

SEQ ID NO: 214782 - protein, 450 aa, unidentified
MSPTVTPPKETELLMVNPDAAGLDIGRDEIWACVPADRATPAVRVFGTYTPDLNALADWLVACGIKTVALESTGVYWIPIYEILEARGLKVYVVNARHLKHVPGRKSDLQDCQWLQRLHTYGLLTASFRPAADICAIRSYVRQRAMLIEYRAAHIQHMQKALQQMNLQLTQVLSDITGKTGLAILRAILAGEQDPQRLATLRDERCAKSAEEIVKALTGNYRAEHLFALKQAVALYDMYTTQVQDCDTELERLWQTQRPAREQDLPPLDTTDKRNTHSKNAPGYDARTLLYEVVGVDLVAISGLNASTVQTILSDTGLDLSAFPSEKHFGSWLGLAPRNDISGGKVLRSRTLKSGNRAGQAFRLAAQAVSRNQDEFGAYYRRQRARLGPEQAIVATAHKIARAFYHVLKHRTPFRSLSADDYNQQVRDREVAHLKKKATQLGFTLAPAPA

SEQ ID NO: 214783 - protein, 351 aa, unidentified
MPATASTTIAVIGIDIGKNSFHIVGLDDRGAIVLRQKWSRSQVEARLANMPPCLVGMEACVGAHHLSRKLKALGHDARLMPARYVRPYSKGQKNDFRDAEAIAEAVQRPTMKFVATKTADQLDLQALHRVRERLVSQRTGIINQIRAFLLERGIAVRQGQRFLRTELPRILAAPPDVLSPRMVHVIEGLASDWRRLDERIEGLSGEIEELAKRDAGCERLMSVPGIGPIISSAMVAAIGTGDGFAKGRDFAAWLGLVPRQISTGDRTILGKISKRGNRYLRVLFVQAAWVVLVKVKPNRWEGHGLKPWIEAAKKRLHHNVLAIALANKLARIAWSVLARGRAFEASKLQAA

SEQ ID NO: 214784 - protein, 347 aa, unidentified
MSFVGVDLHTNSFTACRREADGSERFESFTLSPADLARFCLRLDADDAVAFEATGNSAWFRDQILPCVGRVVVVNPSQFKVIRQSVKKTDRNDARALALFLAKDMLPETRAKTQAESELGSLTQTRDLLVKQRTRLLNKIHALHNRHGIKLKRESLASKKRLLAITADPFTPLEWVELEIVRDQALSLTEAIGKIDARIEGAASTLDGDASLTSIKGIGPRAAAVFLATIGNIRDFASADKLAAYFGIVPRGSQSNETDSRGRITKRGSRLARTALVQCTLIATRYSPYLKAYYDRIRLRRGSGKAIIATARKLLAIIYDTLKSGRVFTDFAAFQFQLGHIPAGQSS

SEQ ID NO: 214785 - protein, 429 aa, unidentified
MNKSFGNDNKNPAGTLYVGIDIAKEEHCVRTIDGKTGDKSKPLFFINRRSGFERFLSKLEQWVCMYKSERVVIGMEPTAAYWKPLYRHLVDFGYEVNLVSSLHVKRSKEIQDNSPLKSDPKDALIIADLLHCRKHLDTHPVSEDIEEVKVLVAHYDDLDRDKGRWRNRLEQYRAEYFPELDDFFNDVGCRAVRALLRAYPFPGDIESAGSDRIAELLWKESRGQVSHEKSLRLVEAASRTIGRKTGSASMRMIVMHILDTLDWYDTQKKEVEKRLKEAVQRVSIYPILVSIEGVGLMTAAAIIGVLGDLREYKNYRQVLKKAGLNVYSKSSGKHEGKIHITHFGKGILRKMVFMGSLGHASRSCAYFYEKYWKMVERGVPKMKALVAIMRKILKMAFALVRDNRMFDKKWRNCLVAEREVSVIRRAKAA

SEQ ID NO: 214786 - protein, 370 aa, unidentified
MGQSTPLYVGLDVHKDSIAVAHAQGHSADPPVFVGAIGPRQADLDKLIRRLEAKTPELVFAYEAGPCGYGLYRDLIRRGFACQVVAPSLIPKKPGDKVKTDRRDAVELARLLRSGDLTGVYVPTIDDEAIRDLVRARDAARLTLKNAKLRLKGFLLRLGLHYVGRADWNPAHKRYLAKVVCPTASQQIVFQESVRAVDEQVDRLARLEAELLERAPAWRLYPVVQALQALRGVQWLVAITVVAELGDLTRFDSPRQLSAFVGLIPSEYSSGSARRQGGITKAGNGRARRALIEGAWAYRHPAKVSQHIQTRIDGLPKPIQDLGWKAQVRLCKRFRRLTARGKHPNVAVTAIARELIAFMWAIAKEVPVTC

SEQ ID NO: 214787 - protein, 330 aa, unidentified
MEQEYIGIDLHKQFFQVCAMTATGELRWEGRWPRTDAGVALLRARCSATTAIAVEATGPTWAFVDGLMSTGARICVVDPRKTKLKAGYAAKTDRLDARRLADALRRESVVSIYLPPPAVREVRELCRARHQVVRLRTRVSQMIRALLLRSGVADVPVRRVFSARGLKWLGEVTLPAEADAALQRLRRVLAGIQAEALEAEQRVAAAATADPIARALDTLVGIGPVLALTIRAEVGDITRFRRGAELASYAGLVPRVDASADRYRTGRITKEGSPWLRWALVEAAMHARRRPDRVGRWARQLAVRKGGFKARVALARRLCDDIVAQWPHGA

SEQ ID NO: 214788 - protein, 361 aa, unidentified
MRIIGCDLHARQQVLAMLDTTTGEIVAMTLKHEGNNVREFYSKLPRPVLVGIEATGSMQWFVNLMEELGIECQVGHPANIRAAEPRKQKHDRRDADLILKLLVETRYPKIWLPSKEQQDLRALLRHRHQWVRIRTRIQNALQAIALANGLRRGPALWSQDGQRTIASLPLAPHAAYRRSELQAMYAKFAKEIEKLNQRVEEQACERPGARLLMTHPGVGPITALATEVFLGDAARFADSKALASYVGMIPSEYSSGERQRFGGLSKQGNPLLRFLWGEAAMHAVRRDPELQRFYRRKLVQKGLGKSRVAVARKLGIRLWIMLRDEIDYNEFCRRGQKQQKSSEACAGMPDTGHGAKQSPAD

SEQ ID NO: 214789 - protein, 392 aa, unidentified
MKTTAKGVLQTGGEQVAVGVDPSRNALQLAILAPHGTTTKRFPLVPASLASIDAVLGQGQGVRIGIEGAATCGAMVLLHWLRQGYDIREVNPQISKRLRECLTESHTDISDAQGLVWSVRFHPHLPKVRLTVTTAAWKRLSRLRARLVKARTGLYNRLYSLLAESYGAVYKRLFPNLKSKRALEFFQAFPTLDDALDDLPQVRSLLGEERARLLEEAGRWGEGLYLETLRLEICLTIQLIFAHRTAIEGVEAKMAELSQADPQVGRLRAVPGMGTTLALTILGHSGDFSRFESHDAYAAYCGLAPAVWQSGQSRVYAKRRRRYSRPLKQAFLQLALTQLRLNPESRAYYERKRREGKPHWVALIALARQLCKKVYKLMAEKAPPNPPLDIDG

SEQ ID NO: 214790 - protein, 345 aa, unidentified
MNKQICIPQATVFCGIDVSARSLAVALINGDGSLAQREFPNSAGGHRALLAWLAKCGGRVRVSLEATGVYSLDLALALDAAETVGLAVLNPKLVNRFAQTLRRSKTDAADAVVLAEYSQRMPFSRWQRPEASHLRLRTIGRYVESLVVEQAGLKNRLRTAEQTSTTPRVVLGDLRQALAAVERRVAKMRREALKLVRAEAALRERFQLLVSVPGIAEISAIRILSELVLLAPTMGVRQWVASSGLDPAHQQSGTSLHKPSRISRAGNRHLRAALYMPALSAVRNDPHLRAFYRALRSRHKTGLQALMAVARKLLHAIYGIFKTGRPYEGKLLFPNIQTEVESIAG

SEQ ID NO: 214791 - protein, 360 aa, unidentified
MSNVPVFVGLDYHQDSVQVCVLDQQGTVLLNRAAANDCQALGRLVGPLGVVQRVGIEACCGAADLGQQLVEQLGWNVSLGHPAYIAHLKGSPDKSDYSDGRLIADLARVGYLPRVWLAPAYVRELRQLVNHRQRLVDRARALKLQVGAVLREQRVKIDRDRGSRWSKAWVASVRDNQRLSEHARWIVNDLLDDLAYTAGKVAGADGRLREATSADGVVERLMTQPGIGEVTAWVLRAYVGDFGRFRTARQLARYCGMSPCNASSGTKRADAGLIDGCNRLLRLTVVQAAHRLIRTVRRWGELADSMRARGKPACVIVGAVGNRWLRTLHHAMKGAAAGTAPQPQPQPQRAGAGAGVTIAN

SEQ ID NO: 214792 - protein, 346 aa, unidentified
MNDIAIAVDVAKSVFQLGVSDRPGRICETHRVPRAHFLRFFATRPSATVVMEACGSSHFWARQIQQLGHRVVLLPPHHVRPYVHRNKTDRTDVKGILEAFRNEDIKPVPIKTPAHQAIVALHRLRSGWVVERTARLNALRGLLRELGIFIPVGSRKVIPAVWAHLGDADSNIPDVVRPALAEACAEVRDIEHRIDLSERQLKLLAKELSVAQRLLTIPGIGLMTATALVAFIVDIHRFPSGRHFASYLGLTPRECSSGNRRRLGAISKRGDVYLRVLLVHGARSVLSRAKQLSESPRRDHLREWALKLEKTRGHNKATVALANKLARLAWAIWRNESTFQPGPIAA

SEQ ID NO: 214793 - protein, 346 aa, unidentified
MVYVGMDVHRKRTQVAVLGEDGTQLMNRNVPNDPAELAAILGPLGPGTPAVFEAAYGWGWLAELCEDLGMETHLAHPFRCKAIASARLKNDKVDARTLAHLLRTDLLPEACIAPPEVRDLRALLRHRARLVRLSTSLKTRVHAVLADRGVRVEESLWTKAGRARLATLDLPPTQRAIVEDCLAQIDAIELPLRRLRSEIRRLAKPDPRVEALQRLPGIGPITAMTLVAEIGDIARFPSARKLCAWAGLTPTVRNSDLKVRHGHISKQGSSWVRWTLVEAAQVARARPPFTRTYAQIARRRGKHIATVAIARKLLARCFYVLKEMNDQPRSPGELDEGTLPETRPLQ

SEQ ID NO: 214794 - protein, 343 aa, unidentified
MQTVTTIGLDIAKSVFQVHGIDAAGNVIIRRRLKRRHVLAFFQRLPPCVVGIEACATSHHWSRELKALGHAVRLMPPAYVKPYVKRQKNDAADAEAICEAVTRANMRFVETKTPEQQSCLMLHRTRHLFIRQQTAVINSIRAHLAEFGIVAPRGRHGVEDLLDIVADPTDRRVPEVARACLAALGAQLRMLKAQILEFDRRIMAWHRSNETSKRLDEIPGVGPALATALVASVADPKAFRSARHFSAWVGLVPRQHSSGGKDKLGSISKQGDRYLRSLFTAGALAVIRYAKIHGTRHRPWLTALLARRPTKVAAVALANKIARMAWAMMAKDERYKEPAALAA

SEQ ID NO: 214795 - protein, 341 aa, unidentified
MKLTTIGIDSAKNVFQIHGADERGTAVLKKQLKRDQVVPFFANLLPCKIGMEACGSAHDWARKLQALGHSVQLIAPQYVKPFVKRNKNDAADAEAICEAVTRPNMPAVPIKNASQQAILSVHRARQGFVKARTAQANQIRGLLAEFGIIIPQGISHIAKRVPEIIEDGENELPGSFRLLIQRLVDHLKVLDQQVGELEREIQAWHRENEASKKLAKIPGIGPMTASALVASVGNARSFRNGRQLAAWLGIVPKQHSTGGKATLLGISKRGDTYLRTLLIHGARAVIRVAERKPQPDAWLGKLLTRRNKNVAAVALANKNARTIWALLAHDRAYESDYRMAA

SEQ ID NO: 214796 - protein, 343 aa, unidentified
MWLYLCQKSIRYLCPQTQYKDCIMQKIALGLDISKQTIDAYFNGQEDFIRVMNNQAGIEKLIERIKNYQQQSKEIHACCEYTGVYYLPLASALHDSGIKISVINPLSIKLYAEYRLRRTKTDKQDAKLIADYCDKENPPLWIPLSEKRNTLKVLNRRIEQLNVLLNIESNRQDVSDSVIKSGINRIIYAIKTEIESCKTAIQNLIDSDKELSHNQKLLQTISGVGKSTAAWLLSVLVDIDKFENSKKLISYLGLSPVIKDSGTSVRQAKISKMGDKKVRKALYYPARAACLRSKLWRPWFEQKIKQGKHPKQIYVLMMCKIVKYAYAVIKTGQPFDENRHKPA

SEQ ID NO: 214797 - protein, 407 aa, unidentified
MEVVYRCCCGIDVHKKVIVACLVNGGEQELREFGTTTSEIKTLANWLTESGCEMIAMESTGVFWKPLYNLFELMDLDAMIVNAAHMKALPGRKTDVKDAEWIADLLRHGLLKASYIPNREQRELREITRYRKSLTEERCREVNRLQKILEGANIKLDSVVKDITGKSARKLLQRIIDDDIPDSDEVSKLVHGRMRPKLEQIVASIEGITTLLQRKLLAQIIDHIDDLNRRIGELDKLVQEYMAEYEAAIKAIDEIPGIARRSAEVILAEIGLDMGRFPSAAHLCSWAGVCPGNYQSAGRRKHGKTTKGNKALKTILTQCAKSAKTVKSSYFFAQYQRISARRGKNRATLAVAHSMLIAIYHILKNKTAFHDLGSDYYDSFNRDRKINSYLKRLKALGWEPDAIPSSA

SEQ ID NO: 214798 - protein, 351 aa, unidentified
MKILAMDLGKNKTVVCIYDQKSGKHRYQKVMTGPQQMHDLIVEHKPDRVVFEICSAAGWVFDIARCVGIEVQVANTNGQAWRWKNIRRKNDREDALKLAQLSAMNQLRTVHIPNRQVRQKRALIQYRQSLVARCVQIKNSIHSILDKEGLSMPSGKSGWTKESTEELKAMALPMEKCDGDNLWRGSMWVELEMLAKVTELIKEVESKLDEMAQDDRRVRILRTIPGVGPRLAEAVVAYVDEPGRFRSCKQVGCYAGLTPRQYQSGNSNRVGRISGQGNKVLRALLVEVSWLGLRHNEWMRQTYQRILRGSASRKKIAITAVARKLLIRCWAMLRDGTAWRKEKAKVSNVAA

SEQ ID NO: 214799 - protein, 391 aa, unidentified
MSMYFIGIDISKYKHDCCIISAADQKVVSKVTIKNNKAGFDELLTIINSLSNPEDIRIGFESTAHYALNLELFLESSLLTFMEVNPVLISVYKKSKTLRRTKTDSVDCESIARWLMTVEYKPHSKGFYHAYSLKSLTRLRDKLIRQRSFYLVKITNVLDHTFPEFKPFFNERFSKTALYLLENYGSAEKMARMNSASYEKLRSLSRGKFSPQQFLKLKALAANTVGVNNSIFDVELNSLLSLYKSLTKEIDTIEKEINKLIEEVHPHYMSIPGIGSLSAAVIYSEYGDISNFSNPGQMLAFAGIEPGVNDSGTESHGGRMVKRGSSQLRYTLINCCLPLIRFDMTFATYYSKKRGEGKPHRVAITHVAKKLIRVIYALERLDIDFNTQKLH

SEQ ID NO: 214800 - protein, 428 aa, unidentified
MNYNTQNKKIASITEKTLIVGIDVGSQTHYARAFDWRNYEYSKKPFAFINNEEGFVAFKNWMDEIAEKHHKDKVIPGMEPTGHYWFSLGAFLRNSGMRVVHVNPHHVKKSKELDDNNPNKNDRKDPKTIAALVNEGRFSYPYIPTGIYAEIRNLSNLRFQTQEEITRIKNRIARWFSIYFPEYKDVYGKLDAISGLMILREAPLPEDIVKLGAEGNNKIWRDAKLRAVGMKRAKSLVNKAEHSVGSQEAPEAARMELRILLSDYEMYSQRMEELIQTIEEKLKEIPYIDKLMEIKGIGMITICGFIAEAGDIRRFDNPKQLQKLAGYAIVSNDSGKHNGESHISYRGRKRLRYVLYEAAISLIGKNPEFKEIHNYYLTRKENPLKKMQSVIAVACKVIRVFYMMLTKGVAYDGVKMLQDIRRTELVMN

SEQ ID NO: 214801 - protein, 344 aa, unidentified
MDHFAGLDVSVKETSVCIVDDAGKIVREVKVASEPEALLAVLKNPAYHFKRIGLEAGPLSQWLFSALAEAELPVVCVETRHMQAVLKAQINKTDRNDARGIAQMMRVGLYRPVHVKTLRSQKLRMLLTHRKLLQSKAIAIENDLRGTLRNFGLKVGMVGTVKFEARIKELVENLPDLAVLVEPLLVVRRVLREQFVILHRRLLAIVRDDEVCRRLITTPGVGPVVALTYRATVDVPARFRKSKAVGAVFGLTCSKYQSGEIDRSGRISRCGDEMMRVMLYEAAQSMLYSKKWSWLKAWAMQIARRRGMKKAIVALARRLAVIMHRIWVDGTEFRWTREQAAAAA

SEQ ID NO: 214802 - protein, 435 aa, unidentified
MSYFAPLVDLSEDEERLLREVGTGMQVVHERCCGLDVHKKTVVACILITLANGEVQRHIRTFSTMTAGLLALSDWLESLTVTVIAMESTGIYWRPVFNLLEDGRTVILVNAQHMKAIPGRKTDIKDSEWLADLLRHGLLKASFIPPAPIRELRDLTRYRKSLVQERAREVNRVQKVLETANIKLSSVATDVLGKSGRDMLSALIEGTTDVEILAELARGKLRKQLPQLQQALDGRVQAHHRLLLKHILAHIIFLEETLEQLQQEIEQHLCPFEETMTLLMSIPGIAALAAAAILAEIGDDMTRFPSAKHLASWAGVCPGNKQSGGKRLSGKTTQGNATLRAMLAEVVWVLSHMKDNYLSAQYHRLARRLGKKKAVMAVSHSLLVIIYHVLSTKQPYSDLGADYFEQRDSARLTQRSVRQLEALGYAVTLVPKEVA

SEQ ID NO: 214803 - protein, 387 aa, unidentified
MTPHSTFVRSLLLLGWKVTATLKGAWDVTMIGTERPETKVEVILGVDTHLDFHVAVAMDHMGRRLGESSVSTTVKGYEGLLCWAEGFGPLRCAGVEGTSSYGAGLARHLKSQGIEVLEVERPKRRRGGSRRNVEKSDPSDAERAARAVLAGETSGVPKSGDGRVEMIRTRRAARRSAMKARTQAANQLQGLRVTAPEELLNRLRGLSRKELVSVAARFRIGDDLRDVPSATKFALRSVARRYEALSEEIAELEAHLDRLVAQVAPELVSLAGIGTDHAATLLMVAGDNPQRLRSEASFASLCGVSPIEASSGKVVRHRLNRGGNREANRALYMICLARMRRDRRTKEYVARRTQEGKSKREIIRCLKRYVAREVYRVLISCVSHSRR

SEQ ID NO: 214804 - protein, 355 aa, unidentified
MDLRQKEPSVNKIIRIGMDTSKHIFQLHGVDAEERPILRRKLRRREMIVFFEKLEPTVVGIEACGAAHHWARELEKLGHTVKLLPPQFVKPYVKRGKNDAADAEALCEAMSRPTMRFVPVKTAEQQAGLMLVGMRDRLIRTRTQLSNAIRGYAAEFGLIAAKGLAKIEPLLARIAADETLPPLARELFAAHAKDYAHVQAQLKEIEAKLMAWHRQNECSRRLAEIPGVGPIGAVMLAMKAPDPAAFPSGRQFAAWIGLTPKDHSTAGKVRLGVITRAGDEALRSVLVVGASAVIQQVRRGRGRPSPWLLCLLRRKAPKLAAVALANKMARIAWKLMVTGETYDNRRAMQLEAQAA

SEQ ID NO: 214805 - protein, 432 aa, unidentified
MSQFQDDFVVGIDVSSQFSVVAMLEPSGKMIRKPFRVEHSPAGFNKFLEILKKEEERLQRKPIYFVESTGIFHLPLFFFLRSNDLKGFVLNPLSVHSIKNFDLRKVKNDNKDAEAIAKLAKYQDVKFSLVPEPKILALRMMAREYFALADTLTEIKNRLCTDLYLIFPGFLSIFSNPFGKTALAVLREYPSPKAVQQADRKHLTALIAKNARKGLAWASKKVDALMEISNLTNAMPAELSVLDSKITIHLETILQLQNSQSEIEKKLHEMVDAKDFPADARRYIELLDDMPGVGFITAATLVAEIGDFSLFNSPKALVAFFGIDPSVNQSGKFTGDKNKISKRGTRFGRRVLFTVAMASIRTNRNGQPINAVLREYYQKKCVNKKKKVALVAVMHKLLHYMFAVLRDGKPYQVRKPEEHQTWRQNHMKLIAA

SEQ ID NO: 214806 - protein, 430 aa, unidentified
MKSNTQNAKIEAITEKTLVLGIDVGSEMHYARAFDYRGIEYSKKPFKFSNTEAGFVTFKEWILDLKERHEKDKVIPGMEPTGHYWFNLGKFLQDNEMKPVLVNPHHVKKSKELDDNNPTKNDRKDPKVIAGLVREGRYMIPYLPDGVYADLRTASNIRFQLQAELTRIQNRISRWFNIYFPEYKTVYGKPDAKSGMLILKAAPLPEDILTLGIDGVNQIWRDAKLRAVGKARAKTLIEAAEHSVGSKEGAVSARMEIRMLLEDYESRNTRLQEVMVLIEELVRKIPMAEKLLEIKGVGIRTVSGFLAEVGDISRFNNPKELQKLAGLALVENSLGKHKGETTISRRGRKRLIYLLFEVAMSLVSKNQKFRELHNYYTTRRLNPLKKMQSLMAIAAKLIRVFYAILTKGVDYDPKKMVSDIKRPAVYLQAA

SEQ ID NO: 214807 - protein, 394 aa, unidentified
MVACVRHMVDGAVKREVRTFKTTTKDLMALSEWLSAEGCTDVAMEATGIYWKPVWHILADGDFKLMLANAAHVKNVPGRKTDVNDATWLADLMAHGLIRGSFVPDQPTQEMRNFLRTRKQFVRERSSHVQRIQKTLEDANIKLDSVITDIMGLSGRRMIEALIAGETDPFALAALAHRRIKASQAELEAALRGRVSDHHRFMLRLLLQHIDAIDAAIGQIDQEVDAHVEPFRTAIQILSSIPGISDLSAEVIVSEIGIDMNRFPTEGHLISWAGLCPRNDESAGKRRSTRMRKGAPWLKTTLIQCAWAAARTKGSYLQAQFQRVRSRGAKKAIGAVAASVLTAAYHMLKNGTLYEDLGSDHFDRRAKGKQILRLVSRIQNLGFAVQITPIGAAT

SEQ ID NO: 214808 - protein, 313 aa, unidentified
MSPEWFVGVDVCKAALDVAVRPGGVVWQVDNDKAGISELVRRLGQLKPASIVLEATGGYERAAAKALFRAGLPVAVVNPRQPRAYARATGQLAKTDRIDAQVLSRFGEVIRPRLVTSDDTARDELSGLQARRQQLMEMVTAEENRLQTAQPKVAREIREHLGWLKKKAKQLDKEIEERVQSRPEWSMTEEILRSVPGVGPVLSAAIIAGLPELGRTDRRQIAALVGVAPLNRDSGTLRGRRCVWGGRAPLRSVLYMATLAATRHNPVIGAFYRRLCAAGKPRKVALVACMRKLLTILNTMLRNQTPWLTRPAS

SEQ ID NO: 214809 - protein, 346 aa, unidentified
MTIVDSTRPITGGVDTHLDNHVAAALDAHGGVLGVESFPTTPVGFVALHDWLCGFGPIGRVGVEGTGAYGAGLSRYLQSRGLVVIEVDRTNRQVRRMHGKSDPVDAIEAARAALSGRASGIAKTADGNVEAIRALLIAQRSGRQARARCLNQIRHLGFTSPDALREQFRDVPKAHLAQRAAALRPRADGDRVLHATKLAMRTLGRRALAISDDMHALDVVLGELVTDTAPALLACHGVGVDTAAILLVAAGDNPERIRNEAAWAHLCGVAPLDASSGKQRRHRLSRAGNRQANHALWRIVFTRMGSDARTRVYVERRTADGLTKPEIIRVLKRYVARETYQLLPRG

SEQ ID NO: 214810 - protein, 335 aa, unidentified
MWHVGIDLHREFVVMAAVNDTGEAMAPVRIRCEDTGTIVGTLEVLKPFRAVIEASGTYRWLYDLLRPYGTVLLAHPLRLRAMIQRRTKTDKLDAQLLANLLRIDQIPLAYIPPEPYQQLRDLTRGRARLVRDQAEVKIKLRALLARQNRQAPYRVPFGVRGMAWFSKQDFGPIENLVRDELLERLKHYQRQLAILEEHVSRMQKAFPQVEVLLEIHGIGPYSALLIVAELGEVERFRTAKQVGAYAGLTSRVHQSGGHCHRGSITRQGSPWLRWILVEAAMKVVREDAGLKNFYTRVRKRSSAKIARVATARKLAEICWKRLRRWQQGQRQPTAA

SEQ ID NO: 214811 - protein, 346 aa, unidentified
MENDTLAAVDIAKEIFEVGVSDRPGRVALRKRLPRDRFLEFFAQLPPATVVMEACGSAHYWARRIEELGHVVVLLPPQYVRPYVMRNKTDRTDVDGLLEAFRNEQIRPVPIKSVTQQVIATLHRLRSGWLADRVRSINALRGLLRELGFFIPEGRRHVLPEAWEIIQDDRRGLPDALKPSLAALCEEIASLSTRIEDVEARLEALARQIPLIARLRAVPGIGLLSATALYAFIGDPSRFPSGRHMASFVGLTPREHSSGLRRFLGRISKRGDAYLRMLLIHGARSVLWHAKRLKNPDRLRSWALRLERKVGHNKAAAALANKLARISWAVWKNDRDFEVVPEPQAA

SEQ ID NO: 214812 - protein, 343 aa, unidentified
MKLTRIGVDVAKQVFQVHGVDRHNTAVWRRRLPRERWLQAVGEIAEPGCEIGIEACGGAHHWARQLQWRGYRVKLIAPQFVKPYVKSNKNDANDAEAICEAMSRPSMRFVAVKTVQQQDIQAMHRIRSGLIEQRTAKGNQIRGLVAEYGLVAPKELSSLRRAIPCWMEDADNGLSACFRQLLDGLWRDLRAVDDRISELDRTIADLAQADPDARRLQQLRGVGPIVATALIAAIGDARQFANGRQMAASLGLTPRQHSSGGKDRLLGISKRGDAYVRGLLVHGARSALRTAPAKDDRLSQWATRLAQRAHPNVACVALANKTARLAWALLRHGTHYQPALAAA

SEQ ID NO: 214813 - protein, 392 aa, unidentified
MLFIGIDAASNNHEAAITTLHGEVLTEPFTIPNNISGFKKLRSEIYSHTEHHNNVRIGIEETGIYHKNITEFLALCGFTVHTINAVLTSHSRKSQSVRLTKTDKIDALSICRYLEFNFKRLNSYTPSLYINEELKSLSRARFDVQNKLSKAKTEYTRLIDLSFPEFKQHFNQHSKWSYKLLSQYPSADKISRAHLKTLIKIIAIKGDRTAAANQLKSIAKNSIGSQSVTNELLLTNVLEDIKHFTSQAKRFEKSISKIVEEHYENILSIPGIGNITAGLIIGEIGDISRFKSSSALLAYAGLDPIVHQSGKFKATKVNISKRGSSYLRTAILTSTRVACVSPNIPDNKFRTKYYKKLNQGKHDHSAICHACKNMVNVIFALLKSGDFYKFDY

SEQ ID NO: 214814 - protein, 363 aa, unidentified
MKDAIVGKTYVGIDYHKRYSVASAINEWGERLLEARIESNTPEGFARFFHSLRGEKHVAMEACWNWGRLYDLLEETPGVARVMLADPYKTRIIAEAQVKTDKIDARKLAELLRGGFIAGAHISSKASRRRKEVMRQRLFWVRQRTQLRNRVHALIDRQPANPLPQATDIFGKRCLQALRQWKLPEPYGLLMAQDLETLELLDRHIRQIEKGVAAERKSDRATELLYSLPGFGVTISEIVAAEIDGVQRFPSSDRLCSYAGLVPTTHSSGGKTWNGRMLTRCNKWLKWAFIEAAWVAVGCDGYFGALYRHHRQRGKKATRAITIVARRLCKIAWQLLAENRPYQQRHFSPFPGPLCIASGGPPR

SEQ ID NO: 214815 - protein, 409 aa, unidentified
MDVLYPRCAGLDVHKDSVVACVRRHDEGGAATHVVQTFGTTTTALLALGDWLGSHGCTHVAMEATGVYWKPVWHLLEDAFVLVLANAMHIKNVPGRKTDVNDATWIADLLAHGLIRASFVPPTAIQDLRTLMRTRKQLVREKVQHVQRIQKTLEDGNLKIASVISDVVGVSGRALLEALIAGETRPEVLLAVTRGRLQAPRERLLEALRGRLRPPHRFLLRLHLDQIGALEQAIETVDAEVGATLAPFRERAARLTTMPGISDVLAQVIVSEIGVDMSRFPTAAHLVSWAGLCPRHDESAGKRRSTRVRQGAPWLKTAMVQAAWAAARAKTGYLRAQFLRLRSRRGPRKAVVAVAASMLTAAYYMLRDDVDYRDLGADHFDRTDRSRAARRLVRRLGDLGFHVELTDAA

SEQ ID NO: 214816 - protein, 386 aa, unidentified
MVFVGLDTHHETSTCCVLDDRGQRLEGRTIKGSWTETSRYLQALQQRDGRPMAVCYEASCGYGALHDHLRTFCQQVVVAHPGRLRLISRSKRKNDRVDAQKLAKLLYLDEVPQVHVPSAEVRSWRELIELRRRQVQTRTRVQSRIRALLRTYNVCIPKRGKKIAAEANAPVSEVKPAVVASEACEPFKILWTNRGHRWLKLLQWPTAAVALRCELLVDELEQTERAIKRVTVELDKLAAGNAGVQLLCTIPGVGCRTAEAVVAYLDDPDRFARSNRVGSYAGLVPCQDSSGGTDRLGHITKEGPATMRWLLVQSAWQVVRREPFMRAYFNRVAGGQKENHKKALIATAHKLLRCMHSMLRTGEVWNPPKDIAPVEAKSAATEEKSG

SEQ ID NO: 214817 - protein, 407 aa, unidentified
MEVLIERACGLDVHKKTITACIVTPEGKEIKTFRTHTVFLIELIDWIKEHRCTHVAMESTGVFWKPIVNLLEAEDIEFLVVNAQHMKAVPGRKTDVKDAEWICNLLRHGLLKASFIPGRTQRELRELVRYRRSLVQERSREHNRVQKVLEGANIKLASVVSDIMGLSSRDMLAAMIEGENDPEKLAGFARRSLKRKKEELELALQGNMSAHQRLMLKTMLTHIDFINEQIVELDTEVAKRLDPFQEHLDRLDTIPGIARRTAEQILSEIGTDVGSRFPSAAHLCSWIGLVPGHNESAGKRKPSKTRKGNKYLRSALTEAAHSIRGSDNYLGAQYRRIAARKGKHRAAIAVAHSMMTIAYYLLTRGEDYRDLGAHYFETRQQEMIVKQSVRRLENLGFTVTISSTTAS

SEQ ID NO: 214818 - protein, 427 aa, unidentified
MNNAILENQTHEFAAFIAIDWADEKHAFCLQATGQKKKESGILEQKPEVIGPWLAKLRERFGGHPIAVGLEQSRGALIHALLGYDFVVLFPIHPNTVANFRQAFKFSGAKSDPLDTDQILEILTKHLDLLKRLTPDTEQTRLLGRLVEDRRKTVDLRTSHVQALQASLKEYFPQALDILSGNVASRLAGDSLKKWPNFPAFQQARPSTIKRFFYGHNVRSPQVIESVLKIAEQSQALTTDAAIVESGTRLSQMHSEVIQTLNPIIEDYDRRIEKVFHDHDDAKLFTGLPGAGPALAPRLLAAFGTDRSRYESATNVQQLAGVAPVTKSSGKMRVVYCRVACPKFLRQSFHEFARLSVERCQWARNYVDYYTLKGKKYHTIIRALAFKWIRILFRCWKTRTPYDEAKHMESLRKRGSVFATLHLEKKS

SEQ ID NO: 214819 - protein, 412 aa, unidentified
MTISHARVIGLDAHPDSFTSAIISGVTPAAAVVEKVYNKVPIRQLASWAEKHTFKEDTIVLEASGNSFHIVRALEKVGRNAKVLESCQVGKLKDAHANNDKISAVRIGKAYLAGTAKIVWLPDPITQERRDIFHAYSKTVKRSTQLINRIKSYLSDNGVRLNSKTSLIKQQKTILQKHSWSLTQKMILEGLFADLIHAQNQKTHWNRLMAQQVLTDPVLLSLTRLTGIRDIVAYSVGAIIGDITRFANPKKLVSYVGLHPAFDDSGEEKWSGGIKGHGRRDIRSLLIEAAQSIYNSKHSLAAWGKKLLARKGSKTLAIAAIARKLTVAIYYILKGSWSPVEEVDSLMSAKIGKMITKLGSEGLAALETTRKDFRAQIFELLKVGRTYRLDPDKKYTKSPEPPAISSPLPVNA

SEQ ID NO: 214820 - protein, 405 aa, unidentified
MSTDVFAGLDWAVHTHAVCVIDGAGTVLDRFEIAHDREGLAELMRRLARFGARVRIAIERPSGLIVDALVEAGHHVFPIHPNAVKASRPRYRSHGAKSDASDAYLLADLLRTDGHRWRELSPQSDSIRALRALVRSRDDLVATRVALGNQLRSTLETFWPGAACIFADITSPIGLAFLKRYPSPTSAAKLSEATLGRFCRSQHYSGRRSPAELLARLHSAATGLAGPLTNEAAAQLVRSMVAVLLPLVTQIAELTRRIERFVESLPDGQIIMSFPRAGHVCAAQILAELGDVRERFPSLDQLAAEAGVVPVTYQSGKTRSVAFRWACNHRLRQAITCLADNSRHANAWARGIYTAARARGCDHPHAIRILARAWLRVIWRAWTDRKPYDPALHVSAQSLASGGGG

SEQ ID NO: 214821 - protein, 313 aa, unidentified
MADIIEAFVAFDTSKLRNAVAIAEAGRTGEVRFLGEIENTGAAVAKLVRKLAGKYGRLTFCYEAGPTGYGLYRQIKSLGHECIVVAPSLILKKPGERVKTNRRDAVSLVKQLRGGDLTAVWVPDPRHEAMRDLTRAREVAVEDLRCKRQQVSAFLLRQGLHYPGERTWTKAHRNWLMSQKLEYAEHRIAFEEMLLAMRQAQERIERLEQAIRVAVPDWSLAEVVTALMAMRGIDFISATAFLAEIGDLSRFPTPRELMGYLGLVPSEASTGDTIKRGPITKAGNRRARRILVECSWSYQHPPRVGKEKQESCS

SEQ ID NO: 214822 - protein, 344 aa, unidentified
MTQPAVYQLFVGVDIAARSFTAAWGLADQAPVRPVRYEQTPAGFTAFQQALAATEVPAAQTRVVMEATSTYWMQLASALHSVGYAVSVVNPKQAHDFAKAVLQHAKTDPLDAKMLVQLGRKLQPARWTPPPAIYQQLQQRLAWRDSLIHLRTQVQNQHHALLHEAVVVDAVVARQTALIADLTAQIAAVENELTALLASADEWARSIVRLQSIPGVGLITAAWLVVATANFTACPSVEAATAYLGLAPHPWQSGSSVRGKPHIGHSGNARVRQALYMAAVSAVRCNPILRTFYARLKAAGKPAKVALCAVARKLLHLAWALVTKQQTFDPEYGHAPAQVETVAA

SEQ ID NO: 214823 - protein, 378 aa, unidentified
MKAARFTADEIERVAYLTSKGYLPVAVDVASRVFQVCYYDLGAKHIRNYQLSRVKFFEFIDDTQTPRKLIGIEACGSCNYLCRYIEEHNHKCHILLAQKVKAFLHLDKTDRIDALGILKALITPSMQHIPARTQENQYLLNLITVREQLNKQFVQTVNAAHAFLYESGVVAGTVSVKSANKVTEALKALGNTETEKDHSEDDCSYSHLNCISESLLSNIESLQTKIKEINTHLLSYASNNEICSNLQTVPGIGKLSAVALYAAMGEPERFSSSRAFAAFIGVAPVTTGTGGKTTVLGIRKSGIQSIKKMLYMCAMVYLSQAMKNGTESSWLKLKLNQNRSKKIIICAIMNRLARIAYAIAKSGQPFDENKCNMIKKLR

SEQ ID NO: 214824 - protein, 352 aa, unidentified
MIVLGADTHKRSHTIAAVSAATGELMGEQTVQVGAKGFAALVVWARELGSERVWALEDCRHVSGSFERFLIARGERVLRVTTKLMADSRRRARGRGKSDSIDAIAVARAALREGLHALPAAQLEGPELDLRLLVDHRERLVRQRVALNNTLQWHLHDIWPELRLPGSSLFYGNWGPRVARRLARTEQTMRVRIARDELHRIRELSQTIKALEAEIASLVAQVAPGLLSEPGFGPLTAAKLVGEIAGVARFASDAKLARAAGVAPIPVSSGKTNRHRLDRGGNRQINATIHRIAVTRLRCHAETQDYIARKRAEGKTTKEAIRCLKRHLTRRLWHLLRTSSPAPGHTITPSIS

SEQ ID NO: 214825 - protein, 352 aa, unidentified
MTLVGCDLHSRKQQVAVLDTDTGEVLEQELLHEGDAVERFYRGLPRPVTVGIEATGYTLWFHALMQKLEYTLLVGEAAKIRAMVVRKIKTDRRDAQHLLDLLKHDRFPTVWMPDPATRDLRALIAHRVRFVRMRTMVKNGLHAIALNHRVALGPALWTKRGLAQLQALALPPHTAQRCGENLELLTWLTTRIAQLDAQIAAAAAADARAQLLLTHPGVGPLTALITVLVLGPANRFPTSKHVVSYVGLAPAINASADTYHLGKITKQGNALLRWILGQAAPLAARADGELKRSYFTVLHRRGRSKAKVALARKLLVRLSIMLRDQIDYDEFRRRGGARRSQPAWHPVAAPTM

SEQ ID NO: 214826 - protein, 420 aa, unidentified
MKAYNVDNFAVLIGMDWADKKHDICEHPTGTNKYHYTVIKHTPEALHEWAMGIKQRYPEQKIAIVCELKKGPLIYALAKYDHLTLFTVNPCAVAKYRQAFTPSGAKDDPSDAFVQVEILTLHMDKLSVIELESAAMRTLSQLVEYRRSLVQDSVDLSNKITATLKNYYPQALEWFKEKDTYIFCDFIQKWPSLTAVKKARKQTLLDFFESHNSHYSTVNNARLDSIKNSMPLTLDEGVIVPNQMLVEVLITQFKVLLKGIEKLDKAIKSAYKAQQDKKIFDSLPGAGPQLAPRLLVAFGSNRARYNDAAELQKYAGIAPVIERSGQKMWTHWRYSCPTFLRQTFVEWAGFSIRYSFWAKAYYEQQKAKGKPHNSIIRSLAFKWIRIVFRCWKTNTPYDESTYLAALKRRGSPLLKFAVNS

SEQ ID NO: 214827 - protein, 359 aa, unidentified
MHEDKEIILVADYHAENIEFRWFNQATGEERTGKFPTSQAGILHLIDQATQELEPGGQVVWIMESTTGWARVKDLIGPRAKFLLANVLQMPLPPKARRRKTDKIDTGRIMREYLHGSLPLSFQPEVWWRRVRRVVDLRQDLVERQTAIKNWIGSLLHHETWQNRKNLWSDCGLRRLWAMRLPAEDRMLVDLKLAQLEQLEQELVQVEAQMRQIYDAWPEAQWVDEVRGIGMVTSVSLLAHIGPIGRFPTAEDLISYAGLAPGMWQSDGTCHHGRIGGGGTDSHLRYLLIEATMWLRQIPRYRPTYERVVKKRGKKIARIVVARLLLRSLHKMLTERVRFNPMRRPTATAKETATAGCSK

SEQ ID NO: 214828 - protein, 353 aa, unidentified
MKMYYVGMDVHQASIVIVVLNGAGKVVEESSLQTGVAAVRSYLQRLKGKVLVTFEEGTQAQWLYEVVQPLVTAVIVCDPRQNRLLAAGNKSDRIDARKLAELLRHGSLKAVDHRDHGVRVLKELVRNYECLVQDTTRVMSRLKAIYRGRAIACQGHELYRQDRKQQWLRKLSEPGAKARAGFLYEQLAAVRPLRQKAKLAMLREARRQAAYPWLLSVPRLGAVSVAQVLAIVGSPHRFRSKRQFWTYVGLAVVTRTSADQEVINGVLRRSRRPVATRGLNRNHNHLLKRVFKTAATSACHRGPFSAAYEARVKRGMDPALARLTIARQIAAITLSLWKRGELFQVERMKMLMA

SEQ ID NO: 214829 - protein, 348 aa, unidentified
MKERTVVSKKSSTKIVNKYSGYDHYIAIDWSQKTMALGRISKKRPENVKVKEYPSNYKELQRMLSTIQGRTIVVLEESSPAHWLYLQLYDYAEKIVICDPYRNRLLSDGPKTDPIDAGKLCLLLYSGMIKEVYHSHEKVFELRKYVSSYIDLVKMGVRLKNQRSGFLSQEGKSKTMSDKVELDSTSFVIDLQQEQINLYEVQKDKHEELFKKLCKENKILKRLFSIPGIGEISAVKILSMIVDVRRFPNVSKYLTYCGLVSHIMESGGKVYGRRRPRYSRVLKDVYKTAAVTVINGKSPLRKTYDHYIEKGMSEHNARHALARYIARISYGIVKTETVFRAYKGKKIK

SEQ ID NO: 214830 - protein, 351 aa, unidentified
MKQRTKSGEVTIGLDLGDRRHRFCVVDDVGGMVEEGSVGNDRVSLGGLSGRYPGALMVLEAGCHSPWVSRYLEEQGCRVLVANPRKLRAIYQNERKSDRRDAQMLARIGRLDPALLYPVRHGTEEAQADLLRIKLRDSLVRARVALINSVRFTLKSLGYTVRNPSSERFHKVIEEGLPETLRQMIAPSVQALAELTTRIKVLEREINTLAQAKYPMTVHLRQIPGVGPITALYFVLKIEDPSRFDKVRDVGAYVGLCPRRDQSGESDPQLRISKCGDAYLRRLLVSAAQYILGPFGPESALRQYGLTLAAEGTARAKKRATVAVARKLAVLLLSLWKSQRPYQPFPLAPAA

SEQ ID NO: 214831 - protein, 340 aa, unidentified
MSLVLQSLLPFPDSCQGMSPHQQGRGTKMTEHCYGGIDVSKDRLDVMVLPDRRSFSVDNNAAGYSELVKRLRGLSIAAIGIEPSGGYERAVIRALLAADLSVRRINPNKLRQFGRARGVLAKNDRLDARLIAEYVAIMPTRVVQRDPAAEQLAEVVTMRRQLCDEHVAVENQTAHLEDAMLRRLNKRRLARLAADILLLDRRMAQIVASNANLTRRYELLTSMQGVGPTLAFTLVALLPELGQMSRKQIAALVGLAPYDFDSGRLKGHRCIYGGRLPVRNVLYMAALSACRYNPALKVFHHRLAATNKKPKVIIVAVMRKMITTLNAMLRDNVAWQPKSA

SEQ ID NO: 214832 - protein, 593 aa, unidentified
MSPPVAPALQCIGVGIDTARYWHHATFFLEDLQPARAAFEFPENRAGYDQLRQAYAGLAQRHAGVHFCIRLDAAGQYAVNLEAFLRSLPWPMTLSVGEPKRNQRYREAISPKRKADPVDSACAARFALRERPAATATLPAAMHQLREVASRLAAQIRHSTRLVNQLHNLLARVFPELDMIVAHLPVQWVLELLNRYPTPARLARARLATLQAIPYADPDKVRQLHQAARTSIGTFDGDTAALLVRNLVQQLRAAQAATAELEKRLSADYQALPQPNHLHTIKGFGQATAAVLTAKIASIDRFATPGQLVGYFGVFPEEHASGADKHGQPHPRRQRMSRQGNDLVRKYLWMAAQTALLHNPPVRALYRRLRARGTRGDVALGHCMRKLLHLAFAVWKSGQPFDPNHYPWEPTKPAADTPTNSMPIAADQLPESAANKTAAGHNQGTGPEKQVVTAATSTVNLPAPSVKHSITLAPSSATPRQGLVDFAALRQKVRLAQALEHLGLLRDLKGSGPQRRGRCPVHQGPGTTGRSFSVQLDKNVFHCFHPPCGIKGNVLDLWAAVHRLPLVDAARHLAHTFRLDLDATTLRTEKRNP

SEQ ID NO: 214833 - protein, 345 aa, unidentified
MKITTVGIDLAKNVFQVHGVDERGKAVLRKQLKRKDVLSFFANLEPCLIGMEACGSAHYWARKLSELGHTVRLMAPQFVKPYVKTNKSDRNDAEAICEAVARPNMRFVAVKTAEMQAVLALHRARQGFVKARTAQGNQIRGLLAEFGIVIAKGIGHIAKRLPEILEDGENGLPGMMRELLQRLGANLQDMDRQVGELERQIMRWHRENEASRKLEAIAGIGPITASALVATVGDAKSFKNARQVPAWLGMVPRHEGTGGDVKLGAISKRGDVYLRTLLIHGARAVIAHIERKPDHADEWLKKLIARRNKNIAAVALAAKNARIAWALLAHERSYQHDYVATRKVA

SEQ ID NO: 214834 - protein, 324 aa, unidentified
MNTIGIDVSKEKLDCAWLREQDKLKTKVVANKLTGWQDLLDWTLKNTGLAIVELHFVMEATGIYHEQLATFLYEAGAKVSVVNPAQVKFYAQGLGVRSKNDKKDSVVLARYGLKENPSLWQPEAPEIRTLKALLARFDGIEKDLQREKNRQEKAKISLAPAEVIHSLNLMIEQLKSEQQRLDDLIEDHINKHTKLRENKALLESIPAVGNVIATRMLMVIGSRQFDDAYQCAAYLGLVPVQHESGSSVKGRAHLSKAGNPVIRAKLYMAAVVAIRYNPDIKAQYERLTSKGKSKMSALGAAMRKLVHICFGVLKHQQPYQPQAT

SEQ ID NO: 214835 - protein, 402 aa, unidentified
MNCVGIDVSKGKSTIAVMRPFGEVVVSPFEVCHTVNELSELARQLKSLDGETRVVMESTGNYHAPVAWLLHDAGFYVSVVNAMLVHDYGNNSLRRAKTDKKDAVKLANYGLDHWLTLPRYVPEEDTRLMLKTCYRQYQQYSKVQTMLKNNLISLLDTAFPNANRLFTSPPRADGSEKWVDFVATFWHCECVCGLSEKAFTAKYQKWCKKHGYNFSEDKALDIYASAFAHFGVMPKTDTAKLLVEQAISQLRATSAALAALKQKMQSLAASLPEYPVVMEMFGVGPTLGPQLMAEIGDVRRFHSKKALVAFAGIDAPPYQSGQIDVRSRSISKRGSASLRRTLFLVMGVLLQCAPMDEPVYQFMDKKRSEGKPYRVYMMASANKFLRIYYASVKAYLDSLEHD

SEQ ID NO: 214836 - protein, 347 aa, unidentified
METAQDTVGYRLFVGVDSAAATAMAAWQAAGGKVSRPVQIAQSPEGHAELHEKLRASGVPAGETLVVMEATGSYWITLATTLAQWGYMVSVINPSQAHDFAKALLKRAKTDAIDAQTLAQLAALLQPERWTPPPAIYTELQQRLAQRDSLLDLRQQVRNQLHALEQGPVVIAVVRQRMETLIATLTAQIKEVEKEITPVLAQDAAWAKAAALLQTIIGVGLVTAAWLVTSTLNFSVCPSPDAAAAYAGLVPYVRESGTSVRGKQAISRSGNKRLRRTLYLATLAATRWNPQIKAFYTRLRAAGKPAKVARCAAARKLLHLAWAVVTKDCAYDPAYQQRSTAQPASAA

SEQ ID NO: 214837 - protein, 406 aa, unidentified
MNESSAVSVNAAVAAAGQAGADRRPGHTDELYPAYIGLDVHKDTIAVAVAECGRGEPEYYGVIANMPTKVARLIDRISARYGGERLLWVYEAGPCGYGLYRQIVASGHHGEVVAPSLIPQKAGERRKTDRRDALGLARLSRAGELTAVWVPDQEQEAIRDLTRAREDMKKLELKARQTLGAFLLRHGRVYSQGKSRWTQAHFRWLETLRFDSPVQQLVLQEYIEAVKATQRQVAGLEAQMREALPGWSLAPVAEGLMALRGISLISAMTVLAELGDITRFDSPRQLMAYLGLVPSEHSSGGSRRQGPITKAGNGHVRRVLTEAGWNYRFNARKTRDIEKRAERCSPAVQAIAWEAQKRLCARYRHLIQAGKVKQQVTTAIARELAGFIWAIACEVMGKPHGGRAVA

SEQ ID NO: 214838 - protein, 376 aa, unidentified
MSEITRLMLLVVRVGVDLAKNLIQVHAVDATGKRLVSRALKREQFIAWCEQLLQGCLVAMEACSGAHHWARKLRAMGLDARLIAAHFVTPYRMEGRSGKNDATDAAAICEAASRPSMRFVPVKTVEQQGVMSLHRMREGYKEERTACINRIRGVLTEFGLVFAKSPKVLRARLAEVLEDADNELSGTARLVLQEAFEQWRQLDAHLLWCDRQIGQHVRSTPQARRAARITGIGELGASGLVASVGDFGQFKNAAQFGAWLGIVPSQNSSGGKTNLGRITKRGDDYLRTLLIQGAKSAVMSAHKRDDPISKWLQQLKERVGWQKACVAMANKNARILWAVMTREQPFDARHVSVKPQGKLPLAERAGVAPMLVACPA

SEQ ID NO: 214839 - protein, 353 aa, unidentified
MKRDKYMGLDVHQAMTVVAVMNADGKIVLETMVPTAAGAIREMIESLSGPLHVTLEETTQAEWLYEVIRDLVSEVVVCDPRRNKLLTEGSKGDKPDARRLAELLRVGMVRSVWHGHEKTRTLKEMVRAYETFTRDTNRTMLRIKAIYRSRGIATEGSGVYQATQREQWLGKIGEVGMRQRAAWLYEQLDQVRKLRKQAKAGMLAESRTHRAIALLRSIPQLGPIRSAQIVATADTPYRFRTKRQFWSYSGLAVVTHSSAEYEFKGGRVQRRSKPVATRGLNPNCNRRLKFVFVSAATAGGRSDPWRKYLENLREKGMRPEMARLTLARKIAAVALTIWKKGETFDPKKLNATT

SEQ ID NO: 214840 - protein, 399 aa, unidentified
MTVSTDAIAVFCGLDVGKDEHHATALSPAGKRLHDKALPNTEPGLRELFTALAQHGPVLVVVDQPASIGALPVAVARTMGCQIGYLPGLTMRRLADLHPGESKTDARDAFVIADAARTLPHTLRSIDTGDETVAELTMLTGFDEDLAAESTRLRNRIRGLLTQIHPSLERVLGRRLDHPGVLALLESFPTPSLMAAAGRDALLEVVRPHAPRLAERLVGDVFTALEEQTVVVAGTSAAATILPHLTSSLRSILHQRDTVAAQVEHLLEDHPLSPVLTSMPGIAVRTAARILVEIGDAGGFRNAAHLAAYAGLAPATRRSGSSIRGENPSRRGNKQLKRALYLSAFAALRDPQSQAYYQRKRTEGKHHVAALTCLARRRVDVLFAMLRDRTLYQPTPITA

SEQ ID NO: 214841 - protein, 240 aa, unidentified
MGTYIGIDVSKDRLDVHVLPQDEAFSVERNGKGLGELVERLKSFAPNLVAVEATGGFETTTAAAVAGAGLPLAVINPAQIRHYAQALGKRAKTDAIDAKVIARFAADVKPDIRPLADETARFLADLVTRRRQIVEMLQAERQREKRVTVRRLRKSIERLIKALEKELAELDGDIDDTLHASPVWREKEDLLASVPGVGPQTARTLIADMPELGTLDRKKIASLAGLAPYTRQSGRWKAKA

SEQ ID NO: 214842 - protein, 371 aa, unidentified
MNNTTYYVGMDVHKESFTLCTFKIGDEKASHTARVAADKLSVLKYCEFLRSRYGRDIDIVCGYEAGCLGYSLYHQLTDLGVTCVILAPTTMMSQKGKRIKTDKRDAEVIAQCLAYHMYNPVYIPTEEDDKIKEYIRMRDDHKIALQRIKHEITSFCLRHGKIYSAGKHWTHAHLRWLRELEIDDIYHDILAEYLATYEQLDDKIRRFDTKIAEYASGYRYAENVQKLSCYIGIKTVTALSTIVEIGDFNRFESAQKFASYIGLVPGEHSSGPDQNRLCITKAGNSHVRRLLIEAAQSIGRGRVGYKSAATRKLQEGLSPEVIAYTDRANERLRRRYYKMVLSDGKRTNVAKTAIARELACFIWGLMTGNIA

SEQ ID NO: 214843 - protein, 312 aa, unidentified
MAEYTIGVDVSKAFLDVHRLPDGKSTRFSNDKKGHKALARWLKGPAVVRVVYEPTGAYHRGFERRLAALGLPLVKVNPLQARRFAQAKGQRAKTDPVDARMLAEMGLCFGLQADAVTPEIIRRIKELQIARMALIKGRTRTKNRAYQLTLPLLKAQNAARLKQIKSQLTALETEIQRLIASDPELLRKSLILCSIKGISQVTAAALIAEMPELGTLAPKQAASLAGLAPVARDSGQWRGKRFIQGGRKFLREALYMPALVAIRFNPDMKMKYQALKAAGKPSKVALTAIMRKLIILANTLIQKNRIWVENLS

SEQ ID NO: 214844 - protein, 408 aa, unidentified
MLKAVHVGVDISGERNVAQFLDQDGNLLRKPFSFSNDSPGLSSFVEVLRDVADSHKPEVMNIGMEATGFYWWHLEERLSEDGFLDVETRVFVINPSLIKAFKKAYTSLPKTDAVDAWVIADKLRFGRLTPVSEKALIYAPLARLTRLRYHLKRAITGEKNRALSLMFLRFSGYKKAAGRRAFNKAPLDLLNELTIDEVADEPIEELLEYVLSHGNSRISNPEEFVGELKAAARRSFRLNPKMEDAVGVALSLTTENIRFLEGQCRKLDSVIARELRAIPQTLDTVPGIGPVTAAGIISEIGDVSRFQSQAALAKFAGLTWHRYQSGRFDAEETSLTKAGNAYLRYYLVEAANSLRLHNEEYSAYYRKKYSEVPKHQHKRALVLTARKFVRLVFALLSKGQIYRTGVVK

SEQ ID NO: 214845 - protein, 336 aa, unidentified
MNFGGIDLHKKTITVCVANQERTIVQRKTWACSDTEAIRCFFAGLRPFRAVVEATASYEWLWQLLEPLAERLVLAHPNKLRLIAESARKSDKLDAQVLAEFLALDLIPQAYRPTPRQRQHRALVRQRYFLGRHITAVKNKIRHVLAAYNADRRDLFSDRGQEYLAGVAVSDADRFVVEQLLASWQHLEKQRGALDRQLRAFAKKAPAAEQEARAVLGSIPEVGPVTVDIVLSELGDVQRFRSAKKVAAYAGLAPGQRESAGRCKELGISKEGSALLRWALVEAAWRVVRKTGRWRTTLETLARRRGRKKAIVAVARRLLGVMVALLRTGQRYRLAA

SEQ ID NO: 214846 - protein, 391 aa, unidentified
MVCVGIDVAKDKHDCCILDSDGTIRADCITIPNNMDGFKQLLQTIRDCTKKSDKIKVGLEATGHYSYNILGFLLDNDLAVYVMNPLHTNLYRKSLSLRKTKTDRVDARTIATMLLSDVDLKSYTDTAYHNEELKSLTRYRFDKVRERAKLKQSVSRLVTILFPELEKLVPSLHIASVYSLLSEYPGAKQISEIHLTKLTNLLATASKGRYGKDKAIQIRDAARTSIGSVMPAKFLELKHTIKLIRELTSEIDEIEVSIQKIMDELNPPILSIPGVGIQSAAMILAEIGDFSNFESPDKILAYAGCSPSTYQSGKLTNCYAHMEKRGSRYLRYALYNATKYVCYWNPVFAEYLAKKRAEGKHYNVALSHATKKLVRLIYALQKSGKAYLTAA

SEQ ID NO: 214847 - protein, 348 aa, unidentified
MSQLLSTVTVIGIDIGKNSFHVVGLDGHGAPVLRQKWSRGQVEARLANMPPCLIGMEACVGAHHLSRKLKTLGHDARLMPAKYVRPYSKGQKNDFRDAEAIAEAVQRPTMKFVATKTSEQLDLQALHRVRERLVSQRTGVINQIRAFLLERGVAVRQGFRFLRAELPRILTAPPEVLSPRMVRLIGGLAEDWRRLDERIDCLSGEITALARQDAGCERLVSVPGIGPIISSAMVAAIGTGEAFSKGRDFAAWLGMVPKQFSTGDRTILGKISKRGNRYLRVLFVQAAWVVLIKPQSWERHGLKRWIEAAKKRLHRNVLAIALANKLARIAWSVLARSRIFEASKLQVV

SEQ ID NO: 214848 - protein, 342 aa, unidentified
MSTFAALDVSQETTAVCVVDDAGRIIGEKKIPTCPQAIASFLTRYALDRVGIETGPMAVWLWNELHDRGLPIICIDARHANAALKVRSNKTDRNDAAGLAQIIRTGWFKQVRIKSRISYELRSLLAAREVLVRSRVKLENEIRGLLRTFGILFGKVVGGFASRTDRIIAGELDASPMMRTVISSLAKARAAILERIQELDRQVLAAARADATVRLFMSVPGVGPITALSVASAFDQASRFKRSSSAGAYLGLTPKRYESGEMSRNGRISKHGNKMTRKHLYEAATTMLTRTTRFCALKAWGLRLAKKVGFKKARVAVARKLAVVLHAMWKTNTPFRWSSVAA

SEQ ID NO: 214849 - protein, 351 aa, unidentified
MPRPSTVQTVTTIGIDMGKNTLHMIGLDSRGAIVLREKVSRGRIILRLANLPPCLIGIEAGMATHYVARELAALGHDVKQVPPAVCEAVSAGHKNDFRDAHAVAEAVQRPTTRFVPAKTDEQLDLQALHRVRSRLVSERTAVINQIRGFLLERGIIVRQGLRFLRQALPDILAKRTDVLSPRMVRIVADLASDWRQLDERIEPVTDEIETLAKSDGSCRRVMTVPGIGPIISSAMVAAIGSGAAFARGRDFSAWIGLVPKQMSTGDRTILGRITKRGNGYLRTLFVQAARVILLRPASWPKHGFGVWLARAAQRLHRNVLAAALANKLARIAWTVLAQERNYEARIMKAAA

SEQ ID NO: 214850 - protein, 367 aa, unidentified
MQSTTKYIGLDVSKEKISVAIADAGREQPRYYGTIAHSAAALRKLIKELGPASSLSFCYEAGPTGYETFRWIESMGATCIVIAPSLMPKRSGDHIKTDRRDAEQLARLFRAGELTPIYVPEREDEALRELVRAREAAKEDAHRARQRVLKFLLRHQIHPPNTVKRRWTKKYRTWLEQLTFEHMAMQMAFTEMLHALEEVEQRIGRLEKALVEQAASSAKAPLIRALQSLRGVGFLSAVTFVAEIGSFARFRSPAQLMAYLGLVPREHSSGARTKRGSLTKAGNGRLRRVLVESAWSYRHRPAIKGDLARRLDGMPADVQLISWKAQERLHKKYRRLVFGLNKHKNVAVGAVARELSGFIWAVARTLE

SEQ ID NO: 214851 - protein, 339 aa, unidentified
MNVIYLGIDLAKNVFQLCGLNQAGKPVYKKRTDRKTLLQTVANIPACLIGVEASTGAFYWQREFEKLGHKVKVISPQYVKPFVRGQKNDGNDAQAIAIALMQPTMQFVPPKSPEQQDIQALHRARQRIVNHRTATVCQIRGLLLDRGITIGAAVSRVRHAVPLILEDAENGLSARMRRTIAELYDLFNDLGRRINFFDKEIDTVFRQSEACQRIAKVKGIGPKTATAVVAAIGKGTEFKNGRHFAAWLGLVPRQHSSGDRQVLMNMTKKGDKHLRTLFIHGARAVVRVAANNNEGHLNQWVNQLKERRGFNKTTVAVANKNARIIWSILHNETEYRPAV

SEQ ID NO: 214852 - protein, 355 aa, unidentified
MSQEKYIGMDVHQATISVAVMDARGKLIMECVLETKAATILEFIQGLRGTLAVTFEEGTSAAWLHDLLNPHVNRLVVCDPRKNALLKDGNKNDRVDAQKLAELLRTNQVKPVYHGKHGTRALKELGRSYLTITKDGTRVMNRIKSVYRSWAIPCAGTSVYTRRHRAEWLAKLVEPGVRIRAEHLYQQLDSLQPLRLEVRRQLLLESHKHAAVKLLRQIPAIGPIRAALLVALLQTPHRFRTKRQLWAYSGFAVEVHDSGEYRWVRGKLQRNRERITVRGLNDNHNKEVKSLFKAAATSASIRPGPLHDFYVARVESGMRPTMARLTLARKIAAITLTMWKKGVSFDPKQLHRQAA

SEQ ID NO: 214853 - protein, 318 aa, unidentified
MSDSVFIGIDVSSQTLEIAISDQAKTWQVANDTSGIEQLVRQASSLAPGLVVLEATGGYEFEAACALQAAGLAVAVVNPRTARDFARAMGALAKTDALDARMLAAFARVLHQHPERERFVKPLADAELQQLQALVLRRRLLVQMLTSERQRLRLAHAAARPSIERVIEFLKRELGDNESEVAAHVQRHHAQLAQALASVPGIRAASVAVPLAELPELGMLDRRRIAALVGVAPLNRDSGQMRGQRSIWGGRADVRRTLYMATLTAVRHNPALRACYERLLAAGKRKKVALVACMRKLLTMLNAIAIHGSAWDSTMHNA

SEQ ID NO: 214854 - protein, 432 aa, unidentified
MRELAERNVGHSQRHNEGKTRKCCGDEIYCRELRLVAPKSVARSRPRLPPLMGWSGRAPALPAKMLARGTEDKEHVMSQKLNSEIATLGIDIGKNSFHIVGQDQRGALVLRQKWSRGQVEARLANLPPCLIGMEACVGAHHLSRKLQALGHDARLMPAKYVRPYSKGEKNDYRDAEAIAEAVQRPTMKFVATKTAVQLDLQALHRVRERLVSQRTGIINQIRAFLLERGIAVRQGLHFLRAELPGILAKRTDVLSPRMLRVIEDLCGDWRRLDERIEGLSDEIAALARQDKGCERLMTVPGIGPIISSAIVAAIGSGDAFSKGRDFGAWLGLVPKQMSTGDRTILGSISRRGNRYLRTLFVQAAWVVLVKITPEGWERYGLKSWIEAAKHRLHRNVLAIALANKLARIAWAVLHKGRAFECVKTNATSARAA

SEQ ID NO: 214855 - protein, 335 aa, unidentified
MKKIYVGIDISKEKCNLCFRSGLEIVREEECSNDVKALKKAFKAVLKALGASLEEVLVCAEYTGRYIYPLTVACQELDIFLWMDDPTRIKNSMGLTRGKNDAIDAARIAEYAFRYSDKAVRYSIPDAALASMKNLLADREFLLIDRKRYQSQLTDQKKYMAPGDFKHKNSRWKKVIKSIDEQIAAIDAEIDALISADPVLVRQKELLVSIDGIGPRIAINMIAITGGFTRFQNARQFCSFAGLTPYKYDSGTSVRSKAKISKRANQTMKALLHMSAVNVATRMKSGEYKDYYERKLKEGKHVMCILNVLRAKLVHRMFSVIRRDTEYSKKYKTVC

SEQ ID NO: 214856 - protein, 397 aa, unidentified
MIAVGIDISKAKSTVAVIDSDGTVLASPFTMAHTQPEMEAFVTYLKGLGEPTTILMEYTGHYHYPVLKKLQDEGFPVCIVNPYQMKKYGDVEIHKAKTDKKDALRIATYALEKSYKLVPYSSMEQKYEDLKFLSRQYNQRISYVAKLKVQLIALLDQTMPGITRILPLNSRNPEKCALLLFIKRFKSFDEIQRIGKARFLASYDVLAKKASERNASSKGLSIYELAVDSITTRGEDPYIWLSQNQCVDLLSATQNAADEIISQMRNIAETIPEYKVLRAMHGVGDRLGPIILAEIGDVHRFHSGKALNSYAGNDAPPYQSGQFESRNRHISKRGSSALRKACYEVMQALKLTKPQDDPVYLFMLKKEQEGKPFNVAKMAGVNKFLRIYYARAMELYK

SEQ ID NO: 214857 - protein, 339 aa, unidentified
MEHVAIDLGGRESQVCVRSDDGTILEERRCATRALGKYLEKRPMSRVIVETCAESFSVADAALGMGHEVRVVAATLVRALGVGARRTKTDQRDARLLSEASCRMDLPSVHVPSHESRQRKAFCGMREVLVTARTKLINNVRGWLRTQACRVRGGASHCFADKVREALGSSLPTYVERQLRVIDQLSVQIEEADQELAVAAKQDSTCRRLMTVPGVGPVTALRFVAALDCIERFDGAHKVEAYLGLTPGESSSSDRQQRLSITKAGPSAIRWALVQAAWAARRAKGSHPMVAWSFEVEKRRGKRIAIVALARKIAGILYAIWRDGTFYDRHHRAAVAPAA

SEQ ID NO: 214858 - protein, 412 aa, unidentified
MPNPLFVGIDVSSKDNVVCCLTNDDEKRPLYRFTVLNNRPGILELKERISWLVKKHNFNEIRFGLEHTGCYSTHAAIYLQRHLDFGCPDVNVYMFNPSLIKEFKKAHFLDAPKNDRVDAWYIAAKLKSGHLPYPFTWSEPMMALQRLTRARYHLMQALIRESNFLMTNLYLKWSDYTLVFENKLSATSLAVMEEFESTEALAGISMDKLVEFLVQHGKNRFDDPQAVAKELQKAARSSYRLPKAVNDSVNLAMASSIRVIRTVQEQLKSLKKAIEDHLKTVPQTLDSVPGIGPVFASGILAEIGDIKQFESHKQLAKFAGLAWSEHQSGKFTASQTRLIHSGNRFLRYYLMEAANSVRVYDPVFAEYYAKKKAEPKQFAHKRALALTARKLVRLVFFLLKTNQLYQPKGGNR

SEQ ID NO: 214859 - protein, 312 aa, unidentified
MKNDTIGVDVSKDHLDAHRLADGASRRFVNDTSGRKAFLKWLAEKPVERVVFEPTGPYHRAFESALGAAGVPFAKVNPRQARRFAEATGKLAKTDRLDAAMLARMGALLELEARPARSNALLELKELHSAREALVKDRTAAKNRAKTLTLSLLRKHNAQRLDQIERQIQAIETAILAAIEADADLASRFAILTSIPGVSAVTAFALLIAMPELGALDAGQAASLAGLAPIARQSGRWTGRSFIRGGRADVRQALYMPALVAARFNPDMKAKYAHLIETGKPAKVALTAIMRKLLVLANALLKANRPWTQRTA

SEQ ID NO: 214860 - protein, 428 aa, unidentified
MLKHHTEPDPAEEFAAFLALDWADQQHAFRLQVVGQSKIETGTLEQKPEVLGPWVAQLRERFGGRPVAVGLEQSRGALIHALMAYDFLVLYPIHPTTVAKYREAFKSSGAKSDPLDAGQILEILTKHQDRLHRLNPDTVETRLLGRLVQDRRKAVDLRTTHVQALGANLKEYYPQALELTNGNLSSRLAGDLLLKWPTFEDFQQAKPSTLKRFYYGHNIRSPEVIERVLALAEKSQPLTTDPAIVESGSRLSQMYARLIQALNPAIEAYDQRIQQVFDAHPEAKIFTGLPGAGPVMAPRLLAFFGTDRSRYAAALNVQSFTGIAPVTKSSGKSKVVYARAACPKFDRQTFHEFSRLSVTKCQWARNYVQYYTDKGKKYHTIIRALAYKWIRILFKCWQERTAYNEDKYMKTLIKRGSIFATLHLQKTS

SEQ ID NO: 214861 - protein, 338 aa, unidentified
MKLYCGIDLHSNNSVIVILDEADKVVYQKKMANDLELILQQLQVYINDIVAIAIESTFNWYWLVDGLKEAGHEVKLVNTAAIQTYNGLKHTDDKDDARWLAHLLRLGILPTGYIYPKEERAVRDLLRKRSQLVRQSTTNILSAQNILARNTAHSINANRLKTIKDEEADKLLEDSNITLAFKSNITIIKSLQATITTIEQAVVKQVKLRPEYQQLLSVSGIGQVLGLTIMLETGEISRFEKVGNYSSYCRCVKSERLSNGKKKGENNRKNGNKYLAWAFIEAANFAIRYNDKVKSFYQKKKAKTNGIIATKAVAHKLARACYHIMKDQVPFDVNKAFM

SEQ ID NO: 214862 - protein, 340 aa, unidentified
MRLVGCDLHASQQSIAMLDRDTGEIVEKTLTHEGGAVRAFYAAIPPPVIVGIEATGSMGWFLRLMEELAIECRVGHPTAIRKAETRRQKHDRRDAALLLQLLAEDRFPAIWMPSTEYRDLRSLLLHRHQWVRMRTRVQNALHAIAMAHGVRRGHALWSRDGQALLASLLLPPHTADRRSELQALYQHLEEHIDRLDEQVKHVAGERPRATLLMTHPGVGPVTALATEVFVGDPTRFLDGKVLASYVGMIPREYSSGKRQRLGALSKQGNPFLRFLWCEAAAHAVRRDPDLQRFYRRKVVQKGFAKARVAAARKLGIRLWIMLRDQIDYTEFCRRGLARQS

SEQ ID NO: 214863 - protein, 347 aa, unidentified
MDRYIGIDAHTTSCTIAVVGPSGRKLGSHVVETNGQALVEQIRAIARPRHVCLEEGTQSAWLHEVLSPHVDELVVAGIGSSRGPKSDQRDALSLAQALRTGAIETSIFKAPTRFALLRALARSHTTLTRDVVRTQCRLKSLFRSRGIPTSGRSIYNPDDRDTWLARLPASSRPSALLLGHQLDELRALKQDAEQQLIAESHRHPISRVLESCPGMGPLRVAMTIPVVVTPERFRTSRQFWSYSGLGIVMRSSSDYVQADGGWKWAPVLKTRGLSRRFNHTLKYVFKGAATTVITKPAGCPLRDDYHRLLEAGTKPNLAKLTLARKLAATLLAMWKHEEVYDPARHRK

SEQ ID NO: 214864 - protein, 423 aa, unidentified
MERRETPAGIEPEQGGFEMAGTLYVGMDLGKGFHQVAVVDEHKEPVGTAFRVNRGSRGIEMFFRQLKLYGVGPEDVVVTIEATANFWNELVWALTMRGCRVYLAQPKKAHDLRKFYADHTKTDITDAEALARMPLVDEKLRPVWVPSPNEQMLLRLCRLRWKYRCRIADLKKRISTLSEMVVPGIDRVMPVRYSKSARLFLRRYLAPRKARRLGKRRLVEILSKAAWGKFSEKKSEQLWECIENAPDLGWQADDLLLEVSVQLDELEMLESQVERLDQRIAELYSDVDPEQRLMQIPGLGEFLAAALTAHIGDIGRFPTTKSLVGYSGLAPRVKSSAGRTKPGQVITKKGSPFLRAWAYLGASCARQYDPELKAYYHRMRDRGKHYNVALCATAARLLEKAYEALSQGGVNEMESPDQKICSG

SEQ ID NO: 214865 - protein, 408 aa, unidentified
MTVVGIDVSKGKSMVAAMKPGGELVAAPYEVRHSDIELSHLALDVLCMEPDTRVVMEATGRYHEPVAAQLHSAGIFVSILNPLLIKQSGAGSLRKVKSDPKDALKIAKYGLDNWSTLREYTPMEAIRQQLKLCARQCDLYNKNIVMLTNNLISLSDKTFPGVNELFSSPEKADGHLKWVDFYRRFWHCDCINRMSPDTFGERYQKWCKRKGYHFSADAADALYAASCGLYTTLPRDNNARLLVTVAADQLIALRENQSKLEAEMLNLCKQLPEYETVMAMYGVGKSTGPHLMAELGDVRRFLHRSSIVAFAGVDPGVVGSGKMQLSSVTTSKRGSPQLRKALFQVVSTYVKCKPENEAVYQFYTKKRDEGKPFFVCTTAAANKFLRIYYARVKECLNAAESATQVEEG

SEQ ID NO: 214866 - protein, 301 aa, unidentified
MNATPVGIDIAKNVFQVHYVDAQVHYVDAQTGEIMNRPIKRAQFLEHFANCAPCLIGMEACGSAHHWARQLTKMGHEVRLMPAQFVKAFNIRNKSDAADAKAIWLAVQQPCKAVAVKTEMQQAVLMMHRQREQLVKFRTMQINGLRGMLAEFGEAMGKGRSALGKAIPDALMRVEECLPKVLIDTLREQWTRIEKLDEEIATIERRLREWKKEDKAVKAIIEIPGVGLLTATAAVAMIGDPKAFRSGREFAAWVGIVPKQTGSGGKVNLHGISKRGDTYLRTLLIHGARAVLTREGPWSVG

SEQ ID NO: 214867 - protein, 345 aa, unidentified
MGNYCGIDLGNKRTTVCVMDKQRKVLRLVEVRTTTEGLKEALSGYRKLTCIVEAAPLAEWTAGAVEALGHTITVVCPRKAKVALESQGARKKTDRRDARALAELCRSGWYEAVHRKSEEARNVRSYMTARKQLVKASNAIASSVRGILRAHGVKLPECEDGESFEDQVREAMKPLAKSVQVAIQELLQAWELLHGQQRRMYRQLQDQLKSDPVAERLMTIPSVGPATAAAFIATIDDPNRFSDGAKVASYLGLVPSVYQSGETEFRGRITKSGDKLLRWLLVEAANNMLTRSKTESYLRTWGLELEQKKGRGKARVAVARRLCMLMWTLWKEGGVFHVEPMKEAA

SEQ ID NO: 214868 - protein, 484 aa, unidentified
MSKRKLSTFERLSQGKMNRKQRKELARRLYSDDPGLEVVHRNVAGIDVGNESHFVAVAPGCDSPAVREFGSWAADLMRMAEWLKSCGVKMVVMQSTGVYWIAVYEVLEKAGFQVWLTNARDTKNLPGRKSDVQESQWLLKLQTYGLLRNSFRPPEEIRRLRTVWRLRNRHVQEAGRAIQHMQKALTTMNVQLANTLSDVSGVTGQAIIRTILKGERDPYQLARLRDYRVQASEEEIARSLEGNWQEDVLFELQQAVDGYDFCQQQIRACDLRLQKYLSAVRSHPRSQPAADQTVTSGQSQPVEKKKKGGKQPRKNQPQFDLDAELQRLCGVDLRTIDGVDVLTILTFVSELGTDMTPWPSEDHLVSWLKLSPRRQVSGGKLIKHEHTKVKNRAAEALRMAASTLAHSHSYLGARFRSLRGRMGPGKAIKAMAAYLARLIYRMLTHGQAWVDRGVQQYEVKRQARETQSLQRRAAALGFRLVPAA

SEQ ID NO: 214869 - protein, 344 aa, unidentified
MDHFAGLDVSVKETSVCIVDDTGKIVREVKVASEPEALLAVLKNPAYHFKRIGLEAGPLSQWLYSALAEAGLPVICVETRHMRAVLKAQINKTDRNDARGMAQMMRVGLYRPVHVKTLRSQKLRMLLTHRKLLQSKAIAIENDLRGTLRNFGLKVGMVGTVKFEARIKELVETLPDLAVLVEPILVVRRALREQFVILHRRLLAIVRDDEVCRRLITTPGVGPVVALTYRATVDVPARFRKSKSVGAVFGLTCAKYQSGEVDWDGRISRCGDEMMRTMLYEAAQAMMRSKKWSWLKAWAMQIARRRGMKKAIVALARRLAVIMHRIWVDGTEFRWTREQAAAAA

SEQ ID NO: 214870 - protein, 337 aa, unidentified
MNHCGIDLHSNNCVVVVSDENDRILHQKRLPNDLAQIQAVLGPYREELSGVVVESTYNWYWLVDGLTDAGYHVHLAHPAAIRKYDGLKHSGDFADAAYLAQLLRLGLLPEGYVCPREERGARDLARKRMQLVRYRTAQILSIEGIMVRQTGSRMKGEAVKQLTAEQVNALAFVPDVALAMEANRVVSETLGQQIEVLEKRLHKRVSLRPEYHLLKTVPGIGETLATTIMLETGSISRFAQVGNFSSYCRCVDSRRESNGKKKGEGNTRNGNKYLAWAFVEAANFAIRYSPQARSFYDRKKSKTNRALATKALAHKLARACYYMLRDQKPFDAKLCFG

SEQ ID NO: 214871 - protein, 408 aa, unidentified
MEILYPRCAGLDVHKDSVVARIRCVSEPVHDEVKTFATTTSALLELNEFLSAQGVTHVAMEATGVYWKPVWHLLEGDFELILANAQHIRNVPGRKTDVSDAGWIADLLAHGLIRSSFVPPAPIQELRDLTRTRKQLVREVSQHSSRIQKVLEDANLKLGSVLSDVLGKSGRAILQALIAGQSDPEKLADLAQGTARKKRAELVEALHGRIRPHHRGLLKVHLTLVATLEQAIADIDTTVGKALASVHESARLLSTMPGISDVTAHVIVAEIGVDMTRFASDAHLRSWAGFCPRSDESAGKRRSTRVRKGAPWLKTTLVSAAWAAVRVKDSYLQAQFHRLRGRRGAKKAILAVASSMLTAAYHMLKNGVEYQDLGASHFTRRDREKIILRLVRRINDLGCQVQLVPQAA

SEQ ID NO: 214872 - protein, 425 aa, unidentified
MNYKQNEKINQVKESTLVAGIDIGSTIQYAGAFDWRGIELGKVFPFSNSREGFESFKAWMQHLQDKYKKLDAIVGIEPTGHYWFDLGAYLEDEGILLVMVNPYAVKQTKELDDNSQSKNDRKDPKVIAKLVTEGRYSAPYTPDGVYADLRIMVTNRKRLIREMTQIKNRFARWFAIYFPEYTDVFGDYEAQSSMLLLKKVCTPEAIVELGAEKINQIWRDAKLRAVGMKRATTLCETAKRSIGLKKGSSAAQYEMKLLLEDYEYKKAQLDAVMEEIEKLCRKIPESEQMLAIKGIGVITVAGFLAEVGDVRRFESPRQIQKLAGLSLRENSSGKHKGQTTISKRGRSKLRAVLFNAAIPLIAKNPEFKSLHEYYTTRANNPLKKKQSMIAISCKLIRVFYAILANGVTYDSQKLLSDIHRQPQAA

SEQ ID NO: 214873 - protein, 453 aa, unidentified
MQNYSVFVGIDASQNKHDFSVMNSSLSILNNKKKVTFDNTLQGYQKFIDTVTTIEPDLSKVLFGLEVTGVYGDGLFDRLKLNGLNVIMIRPESVKKYRDYIGLPKTDKLDAKCITEILARGEAKAVSEKKKEYDELKTLTHRRSSLSKTLTQEKNRLNAKVVKFFPELLHVFKSGHNTLRAIFSSYSTPYSIINADKDELLLLIQSASKKHYGLDKMNALISASKNSIVTHTILSEEDTFTIQSLLESVIYLEGKLRELDKRIESKLESFPLYKIILSFTGCGKLSAATIIAELGDITRFNKASQIVKFAGIFGDNSESGTSVNRRGRMAKKGSRDLRHALYMIAEFARRNNPILKDVFNRKKNGDRKRHILAVNALTNKICAILFSIMRNESVFVIQHRDLMRIPEVTRAEFFQNIETEFSSSTRKKIYKFEDEFGEIHDFVYRSARVAETV

SEQ ID NO: 214874 - protein, 417 aa, unidentified
MQVVRPICCGADIHKDIIVATIATSNQNGIAEYIQRKFCTQNYDLINLKSWLKEHNCFEFAMESTGKYWIPIFNVLEDEIKVYVVHPKYTKSIKGKKTDKKDSKWIAELFRHGILTFSFIPPREIRELREISRYRIKLVAMRTSERNRYQNAMTVSNIGLASILSDPFGKSSKAIMEEVLKSSSLSEGKLRSLLNKSAKKKAKEVFASLEGSRIEPDQRLKMTVSSEHMNQIDSHIDTLELDLVQRCLPYANLINLLIDIPGISYISAIAVIAEIGVDMSVFKSSKQLTCWAGLAPANNESANKKKSVRISRAGTYLKPLLIQCALSAIKSTSNPYYRIKYNTIKKRRGHKKAIVAIARMILVNIYAILSTGEVYNPCDFKEVTSPKPAKKEMTIENALFFLQAQGIDTSALVLNVS

SEQ ID NO: 214875 - protein, 409 aa, unidentified
MRRLIERCCGLDVHKKTIVGCVRVPDARGEVAELIRTFGTTTPDLLELSDWLTGLGVTHVAMEATGVYWKAPYYILEGDFEVMVVNPAHIKHVPGRKTDAIDAAWIAELLSYGLLRPSFVPPKPIRQLRDLTRYRMQVIREHTRTVNRIHKVLEDAGIKLASVATNVMGVSGRDMMRSLISGTADPEALAELARGRLRTKLPELRKALTGRFEDHHAFLLERMLAPVDDLEADIEALSGRIEDHLAPFAEAVELLDSIPGVGQRAAEAIVGEIGTDMSRFPSAGHLASWAGLCPGQRESAGKRKSARTRRGSELLRTVLIECAHAAAHTKDTYLAEFFRQVTRRHGKKQAAVAVAHEILVACWHILSTGQPYLERGPAALRQLTEDQIRRRAVRQLEKLGLTVTLEPAA

SEQ ID NO: 214876 - protein, 351 aa, unidentified
MAAKKRQVTGGVDTHGKTHHAAAIDGAGRVLGDQEFPASASGYRQLLAWLRRFGQVIKVGVEGTGTYGAGLARHLTAQSVTVVEVDRPDRRARRAKGKSDPLDALAAARAALSGQASGTPKTRTGPVEAIRALRVARRGAMKARTAALNQLHGLLASAPESLRHDLSHPQAPLVDRCAALLVDETRLTDPVEATKAALAAIAARIQALTAEITHADRRLRPAVARTAPHLNAVYGVGTDVAGQLLTTAGDNPDRLRSEAALAHLCGAAPIPASSGRTDRHRLNRGGDRAANSALHTIALVRMRHDPRTRAYVDKRTKQGLNKKEIMRCLKRYIVREIHTALLADFTTLNTA

SEQ ID NO: 214877 - protein, 352 aa, unidentified
MLPGIERQPRKKLEPSPERLLAVLHRWRDEAVKAGRTITRIAVAFEAGRDGFWLARWLEARGVEAHVIHPSSVAVSREHRRAKTDRLDTELLKRGFLGWLRGERGHCNMARVPTIAEEDAKRPNRERDCLVGERTRIVNRIKSTLARLGIRNFKPTLRKAADRLATVHTPEGMPLPPNTFAELQREIARLGFVVSQIREIEEARQRRLGQQHETGPHAMVRLLARIVGVGVETADMLVHEVLSRPMRDRRAVARYAGLTGSPDESGAQRREQGLARAGNARVRRGMIQLAWRFLMFQKDSALALWYRARTADSRIGTRKTMIVALARKLIIALWRLVTTGEALEGVVLRPAS

SEQ ID NO: 214878 - protein, 310 aa, unidentified
MNDTIGVDISKASLDVWRLSDRKHMRFSNDVSGLKALCKWLGTVPIRIVYEATGRFHRDLEAVLSKAGHGTVKVNPARARRFAQATGKIAKTDRVDAQMLAHMGSTLALDPTPVRSKDMHEISELHVARVALIKDRTACRNRLDTARNRMVITQLKARERQIDKHIAQIDAELIRLIKADPELARRYEILMSIRGIGPVAATAMIVDMPELGTMTPKEAGSLAGLAPVTRQSGNWKGKARIFGGRSGLRTMLFMPAVIATRYNAPLRKTYLALYGGGKPWKVAITAVMRKLIVLANALIRDDRKWTEINP

SEQ ID NO: 214879 - protein, 348 aa, unidentified
MRSQNAVATVYGIDLGKTYFHVVGTDSTGKPVRRAKLTRNNIFEFFANVPMAIIGMEACPGSQWLARKLLALGHVVKIIPAQFVKPYVKSNKNDTIDAAAIAEAVTRPTMRFVPIKHTEQVDLQALHRSRDLSVSSRTRLISQMRAFCLEYGLPIRISPAAFKSAIPGIISDDTNDLTPAMRRLLESLWQDFRILDDRVAAVTAEIAAIANQSDLARRLETVPGIGPLTATAIVSAVGGGKQFRTARDLAAWLGLTPAQYSTGGKTTLLGISKRGNSYVRRLLIHGARSCVMHLDRTRDRLGAWLVGLESRMHANKVVVALANKLARIAWVILNKPGALYERRDPRFA

SEQ ID NO: 214880 - protein, 316 aa, unidentified
MQSALFIGVDVAKDNVVVACSQETFASRTLLNKTSALKAFLVSLPPQSSIAMEATGSYHQNLADLAHRLGLRVYVLNPRDLYHYAKAMGLRAKTDRVDAALIARFLASEGARLRPYHPPTAAQRQVDHLLRRRAKIVSLKTALQLTCAEAPSIRAETASVLKSFAALLKKIDRQLDELQQAMPGRTQQLERLQTIPGVGALTACWLTNLLDRIRFRNSDALVAFAGMDPRPCDSGQKRGRRRLSKRGPAEGRRLLFNAAMAASRCTAWKEVYTRCRQQGWASTEAFMILARKILRIALAMYKTQTNFDPAFIGKRA

SEQ ID NO: 214881 - protein, 410 aa, unidentified
MKEQNGADVNIIPQLDKACGLDMHKDKIIGFISCKDGSGQELKEFGTFTCELKEIKAWLQGHHVEHCLMESTGIYWMSLYAILTEAGISVTVANPTHIKQVPKRKTDRKDAKWLCTLLLNGLVRPSFMPTAEQRILRDHCRSRLFYMRQQNKTQNRLLKILESNNIKLRSVISSIKTKSAMSMIRLLATGVTDKQQLIACALGRVKLKKEGLSKALDGTLAPHHLVQLQMLLQDLDHVAKQLETLETMIVEMTQAHYSVAYECLDSITGIAGKSAQIILSEAGSDMSRFNTADHLTAWCGLAPGNHESAGKRRETSVKKGNPYLKTAIITAAWAAVRVKDSYWRALFERLRKRMRVQKAIVAIARRMLKVVYKTLDTLTHYQEKGIAHFMDLQAKAAMYHRMKQQWPSTE

SEQ ID NO: 214882 - protein, 470 aa, unidentified
MARAVAFEAMNSPSCGLDVHKDMIEACVIDGSGGKHRKTFGTMRQSLYALRDWILSLSCFHVLMESTGVYWIPVYEILEEAKGMDVGVGNAGKMKQVPGRPKTDKADADWIARLCMVGFILKSFVAGREYRELREYTRYHKKLVQERARQASRIEKLLQMNGFKLSSVLSDITGASGMKLLRVLCDKGSVTLAEVQGALHWRVKKSAQEIESAINGQIKQTSRLLLGKMLSRLERCEAEAAEIYKMMVGMSQSSRAQIEQLKGVPGIGELSAIYIIAEISADMSSFRTSRHIAAWAGLAPKDSESAGRLKSSRTKKANAYVKSILTECAWAATRARGTRLSNWYWRNAKRLGDKKAITAVARKLLVYIYAMLKSGEPYDDSLDAADTEKREAWKLDSARKIVEHRSNGAAAQKHPGNMQQGAAGPVSPLLRPETGAQPAAGAPAPPGPPKKRGRPRKEAGAAKGTASQLA

SEQ ID NO: 214883 - protein, 386 aa, unidentified
MRFYKNQHQFYIGIDLHARTMYICVINNIGETVFHKNMECSRDNLELVTNTFGKDIVIGVECIFTWYWVADFCAERGIDFALGHAYYMKSIHGGKTKSDKIDSEKIANMLRGGMFPIAYAYPKEKRAVRDLLRRRLFFVRQRAELSVHLQNTNHQYNINEPLTSSRMRSEVYRNTIPQKFSDPATLKMVNADLAMFQAYHDIITKLEFQIEDSMEVQDPVSYSIINSVPGLGFILSLTILYEIDDIHRFSDVGKFISYCRLVKCSHESAGKKEKGGHNKIGNVHLKWAFSEGAVLFLRNNERGQRWHDKLVQRYGKAKAMSIIAQKLGRTVYYMLKRREAFNPDKFYGDKKIENKDSGGEHLAYVASRRLHERKLFKSPLTRLAHN

SEQ ID NO: 214884 - protein, 375 aa, unidentified
MSQYNTVFVGLDQHKESIAVAYAPEEREAEVTFLGPVGTRQCDIDKLLRTLQSKASNLLFAYEAGPCGYWLYRYLKRKGLRCLVIAPSLIPRKSGDRVKTDRKDAVQIARLLRSGDLSGVYVPEIEDEAIRDLCRARQGAMHDMKASRLRLKSFLLRQDIRYTGRATWNPAHLRWLSEVVCPTPAQQIVYQEYLRAITQHYERLGRVEAELHQQVKGWRLSPLVEAYQAMRGVQFHVAVTTAAELGDIRRFDKPRQLMAFVGLHPSEDSSGPRHRKGGIAKTGNLYARTALIEGAWSYRYPAKVSRQIQERQEALSPAIRDISWKAQVRLCKRFRKLIAQGKHPNVAVTAVARELVAFLWAIAQQVQLPAAPSLN

SEQ ID NO: 214885 - protein, 324 aa, unidentified
MTDAVLGIDVSKNTFDASLGAGTKARSKSFANSPDGWHQLIAWLGEHKIGQVHACLEATGRHGLGISLALHEAGHVVSIVNPAQIRNFARTKLGRNKTDQVDAVHIREYAELFKPRPWTPPSPAMRRLCELQTIRAGTVAGLTEWKNRRGSGIMDDLALSLAETTIQHFTSQLELVDQAIAETIDNDVELSAKRDLLVSINGVGEALAGIVLAELPGPDILGSSAAVAAYAGLNPQQRQSGISVNRPVRISKIGNAVLRAALYMPALSAMRYNPAVVALVDRLKAQGRLKGKQIVIAAMRKLLVLCFGVLKTGKEFDPAMVMGK

SEQ ID NO: 214886 - protein, 343 aa, unidentified
MEAYAGLQFVGIDLHRRRTVIVRTTEAGEVLEAVRIVNDVQRLASVMARAGDCPEVVLEATYGWYWAVDALQAGGASVHLAHPLGVKAFEYRRVKNDFRDAQDLADLLRMGRLPEAWIAPPPTRELRELVRHRAKLVGLRSRCKAEVHAVLAKCGVQVVMSDLFGVWGTELLDGLELPAPYAARIASLRRLMDDLDFEINVFAGIIRGRMAHEPGYTAVQKIPGIGPTLGAVLVAEIGDITRFASASKLTCWAGLTPKHHESDTHVRRGRITKQGSRLVRWAAIESVKTVSKASEVGVLRERVADRRGRNIGSVAAARRQLELVFYALRDGRVRALEHLPRVA

SEQ ID NO: 214887 - protein, 340 aa, unidentified
MSKRSNPEQTSVFCGIDVSAATLAVAVQQQDQPAEQREFANSTSGHKALIAWLGKRKAKVRVSLEATGIYSLDLALALDVAQNIEVAVLNPKLVNRFAQTLQRSKTDRADAHMLAEYSRRMPFTAWRAPAREGLGVRTLVRHIDSLTVQHTREKNRLHAAQGSGATSRCVVEDLKRSLAALQRRIARLRREAKALVQANETMRQNFALLISMPGIAEISALQLMGELTLLSPEMSVRQWVAHSGLDPAHKVSGSSIHLPSRISRAGNRHLRRALYMPALVAVRRDPHLKAFYETLLARHKAKLQALIAVARKLLHAIYGIFRSRTPYDGRKLFPHLLLTE

SEQ ID NO: 214888 - protein, 376 aa, unidentified
MKNLIFVGLDVHAETIAVAVAEADGSVRSLGVIPNRAESVGRMIRKVGKPEQLRVCYEAGPTGYVLYWQLSELGVKCEVLAPTLIPVKAGDRIKTDRRDAEKLARCYRAGDLTAVWVPDAAHEALRDLVRARLAAKRDQLRARHRLGKFLLRHGRRTPEAMGAWTDKHLAWIKTVHFEHSAQETTLLDYLHEVEHVAERLVRLERSIDTTIETLPVKLRAVIEALQSLRGIAQISAVTIMAEVGELSRFEHPRQLMGYSGALSREHSSGPRVCRGAISKAGNAHLRRIVIEAAWAYRHRPAVGTTLAARQRRSDPALIATAWKAQHRLHQRYLRLIGRGKSKQQTVTAVGRELLGFIWDIGVQVERQTQLPLKQVV

SEQ ID NO: 214889 - protein, 350 aa, unidentified
MLIIGCDYHPGFQQIAFVDTTTGECGERRLEHMEGAEQFYRDLRARCVEARIGLEASGYSRWFERLMEELGFELWIGDAAAISTKRVRKHKTDKQDAELLLRLLMENRFPRIWVPTREDRDLRQLLWHRHRLVQMQTRLRNQLHAVALNEGVRLKKRMWRPKGRAQLESLPLAPWASRRRQDLLRMLDQVDATITELTAAIEQEAVKRPEVVRLMTHPGVGALTALAFVLIIGTPERFARSKQLSSYLGLVPTEESSGERRHLGHISKQGNTLLRFLLVAAAQITVRSDPDWRRRYVHLAMRRERAIAKIAMARRLAVRLYWMWRNGCDYTHLPKLGSHAGQPGNRLGPQ

SEQ ID NO: 214890 - protein, 343 aa, unidentified
MTKDTMIGVDLAKAVFQVHGAAITGQPKFRKKLSRQGFSKFMAEQPPAVVVMEACGSAHYWAREMIRLGHEVKLIAPQYVKPFVKRQKNDAADAEAIVIAAQRPEMRFVEPKCAEQQSRAILFRARERLVHQRTELVNALRACLYEYGHVVPQGIHQIKRIEEILDAPNSDLPDLMREECRDFLEQITEKTVRINARTGKIKALAAEADTARRLQTIPGVGPLTALAVEACAPPMENFRCGRDFAAWLGLVPRQFSSGGKERLGRISKAGQADIRRLLIIGAMSRLNWLGRKSIPEGSWLARMAARKPRMLVAIALANKMARTIWAVLTKHEDYRDPAQVAAA

SEQ ID NO: 214891 - protein, 412 aa, unidentified
MDVLHPCCAGLDVHKDSVYACVRRIGPGGGVRETVQVFGTMTPDLLQLADWLAAEGATHVAMESTGVYWKPVYYVLDEQFELVLANAQQLKRVPGRKTDAQDCAWIATLMQHGLIAASFVPPEPQRDLRELCRQRVQLTRQKAAVSNRIQKVLEDANLKLGSVASDVLGKSGRAMLRAIIAGETDPVTLAGLALGRLRKQLPRLRPALTGRVTEHHRFVLKLFLDEVEVVEEWVRRLEERIEAVLSPFAEAVRRWTTIPGVDRRTAQAVAAEIGTDMSRFPTEGHLSAWAGMCPGNDESAGRRRSGKTPKGSSWLKRALVQAAWAASHTKGTYLSAFYRRLAARRGRKRALVGLGHAMLGIMYHMQRTGTDYTDLGGDYFERRDADRLTRRLVRRLESLGLKATLEPSPQAA

SEQ ID NO: 214892 - protein, 403 aa, unidentified
MNNVAGIDVSKGKSMVSVLRPFGEVVAKPFSVGHTGSELKELAGYLKSLDGETRVVMEHTGRYYEPVARFLHEEGVFVSAVNPKLIKDYGNNTLRKVKTDKADSRKIARYGLDNWAELRQHTPMDTIRMQLKTLNRQQGLYTKTKTMMKNNLIALLDQTYPGANALFDSPVREDGTQKWVDFAASFWHVDCVRGMSQSAFTERYRKWCKRHGYNFSSDKADEIYTEARDLIAMLPKDAMTKLLVQQAIEALNAVSTAQARLKAEMLKLASQLPEFPVVMAMRGVGESLGPQLMAEIGDVTRFPHRGSITAFAGVDPGANQSGSHESQSVNTSKSGPPELRKALFLVMDCLLKTMPQDDPVYRFMDKKRSEGKPYLVYMTAGANKFLRVYYGKVKEYLSQLENL

SEQ ID NO: 214893 - protein, 320 aa, unidentified
MRNTVGLDISKLTFDATAIVGNAEYSAKFDNDSKGLDQFSDRLKSLGCQNLHICMEATGNYYEEVADYFAQYYSVYVVNPLKISKYAESRFKRTKTGKQDAKLIAQYCRSAKESELVKRQKPTDEQYRLSRMTAAYAQIKSECAAMKNRHHAAKDEEAAKAYAQIIKAMNEQLEVLKEKIKEQTEKPNCKEGVKRLETIPAIGRMTAAVLFHHLTSSKFETSNKFAAFAGLSPQQKESGTSVRGKGKLTKFGNRKLRAVLFMPAMVAYRIRAFPGFIKRLEEKKKPKKVIIAALMRKLTVIAYHVHKKGGDYDPSRYKSA

SEQ ID NO: 214894 - protein, 324 aa, unidentified
MTDAVLGIDVSKNTFDINLGAGTKARSKSFANSAAGWHQLIAWLGKHKIGQVHACLEATGRHGLGIALALHEAGHVVSIVNPAQIRDFARTKLGRNKTDQVDAVHIREYAELFKPRPWTPPSPAMRRLCELQTIRAGTVAGLTEWKNRRGSGMADDMALSLAETTIQHFTSQLEAVDEAIAETIDNDPDLCAKRDLLVSINGVGEALAGIVLAELPGPDVLGSSAAAAAYAGLNPQQHQSGISVNRPVRISKIGNAVLRTALYMPALSAMRYNPAVAALVDRLKAQGRLKGKQIVIAAMRKLLVLCFGVLKTGKEFDPAMAMGK

SEQ ID NO: 214895 - protein, 352 aa, unidentified
MTIQVPGAKFVPREYDVFAGLDVDKKSMAVVFTDHAGAMRSLRMAHSSGPLLNYVRKHFAEQRVAFAYEAGPTGFGLHDELVTQTYTCVVAAPSKVPRAPGERVKTNRLDGRKLSESLRGGQLHSIHVPTRPYRDLRHLVQLRDTHVRQLTASKLRIKSLLLYEGIAFPDPQEKWTAQAMRELQTLPCSETVRFKLDDLLDTLHFHFQAAASAIKQIRRYCLNDPELQQSINVLQSLPGIGWIVASHLVARLSDPRQITNGRQIAGFLGIVSSEHSTGEKENRGPITRSGDSRLRNKLIQSAWTAIKKDPELRAFYRRIYQRHPQKVAARKAIVAVARRFWRQRSQGRRFCP

SEQ ID NO: 214896 - protein, 332 aa, unidentified
MSKVRFIGLDVHADTIAVAVAEPNGEVRSLGVIPNRPESIRKLVKKLGPAEHLRACYEAGPTEYVVYWQLTALGVRCEVIAPTLVPVKAGDRVKTDRRDALKLARGYRAGDLTPVWVPDAAHEALRDVVRAREAAKKDQLRARHRLSKFLLRHGRRPPVGTKAWTRTYLAWVKQVVHFEQPAQEAMRLDYVHEVDHAADRVARLDLAITKAVTHAPAAMRAVIDALQALWGIALTSAVTIAAEVGTLSRFTRPRQLMGYGGLGPSEESSGGRTRHGGITKTGNAHLRRIVVEAGWAYRHRPAISGALRKRQAAASEPVKAICATSTIVAGQI

SEQ ID NO: 214897 - protein, 312 aa, unidentified
METTQVQFEQVVSRGCGIDVHKKMLVATIDGEGLQRETREFATFTSSLTELKEWLLEREVTHVAMESTGVYWKPVYHILEPSGIKVWVVNARHIKYVPGHKTDKKDSKWICKLLLAGLLKPSYIPPKEQRELRDLTRYRKKMIQQVASEKNRIVRILEDSNVKLSSVLSDTNGVVATKLINMLCEGKNVTMQDIDRVYHKKLQCTKEELYEACNGFMTQHNITMLQMIQKNIANTQASIETINQLIKQALSKYENVLEVLKEVPGLNTKTVEDLIAEIGLDMSVFPSEKHLASWAGMAPGNNESAGKKKVDA

SEQ ID NO: 214898 - protein, 427 aa, unidentified
MKKIKIDYLSTLFVGIDIGSRTNVISALNFDQDFLIKMVPVANAQGGAEQMEEMVAEVLSQHHEFKTVFIGLESTGFYGVHIANYLSTSEKLAPFSTKVYCLNPNEVKQYKKSFNSLDKNDGIDSFVIADFARVGRIHTEPWRGAQYLALQRLTRHRLHITECIAREKTYMLNNIFLKFSEFAMLNKDEHPFSDKYGATAEAVLTDYLSTEDIVDASVDDLVAFISSKSRGRISDPEQTTYLLQKAAQDSYRLDKCLYEPLTISIASSFNCISSFEKELKAIDKAILQTVQGLNPEEYTVLNSIPGIGKVYSAGILAELGSIKAFQNANALAKYCGIVWNDNDSGDFEAEDKRMSKAGNRYLRYYIIEAAGSVINHCPEYKAFYDKKYAETRTHQHKRALALTSRKFIRLLFGLLDKGQLYSPEKSR

SEQ ID NO: 214899 - protein, 442 aa, unidentified
METRIIGIDLAVKAAHRAVVLDQASASLVGGLFTFRSYPADLDRVLAKARAGTSADVQIKAVLEATGMAWYPVSTYLERNGVSVYRVNGQQTADLRRVYSRYTKNDRLDANVLARLPLVAPESLHRVWIPTGDQQALQRACREVEQLSQLVSASKNRVRAIDQWAWLGWPMKDIYGPTARWLRRHWYNPWRVCSAGAEAIAHAWREAHPNCQGEPEWLYPLLRRAERVRELYGSRQQIDYERLQAYVTRQQARWQHLEAEKQRLRLQTVRPVYRRLHPSRHLETPQGVGQDSAAIYIAFIGDVQRFPTLRQFRGWTGMVPHSRQTGQTQAQGLRLTQAGPDLIKATAYRNAEVARLWDPQIAAVYFRQMMDYGKHHLQAVCACATDLLNRIYAILRDQRPYELRDVDGTPVSKKEARRICLTEYRVPDEVRKRRNHRDRDRR

SEQ ID NO: 214900 - protein, 350 aa, unidentified
MEFFVGLDVSLDETHICVVDEGGRIIKETCAASEPDAIAKAIRHKGRRIKHVGLEAGNLSQWLYEGLVKEGFSVSVMEARHVRAAFAAMRVKTDRHDAHGIAQLVRLGWFERVNVKSLDAQETRALLTARGFLVEKVTATENSLRAALRNFGLKMGSVTRRTREARAWELADGNSVLEGLVEAMLRVRTLLLNELASIDGQLTAFAKSDPITRLLMTTPGVGVIVALTFRSAVDNPDRFPRSRDVGAWAGLTPRRWQSGKTDIAGRITKAGDLRVRVMLFEAAASILGRARFMSPLKAWGLRIAKRTSMKKAIVAVSRKLATILLAMWKSGTAYWAAGRPPASAQDFATA

SEQ ID NO: 214901 - protein, 240 aa, unidentified
MNSTPPIVGIDVAKDHLDIAVSSDSSPSRLANDPAGFDLLIQRLRDLHPSLIVLEASGGWEMPVAVALSTAGFPLAVVNPRRVRDFARASGILAKTDPIDARVIVRFALAVHLEPRPLKDLHTQELSALVTRRRQLLDMITAERTRFHSASPPVRADLSAHIAWLEKRLASLDALLARSIKNSPLWHENDSILQSAKGVGPVLSSTLLAKLPELGSLSARQIAALVGIAPFNRDSGLFKG

SEQ ID NO: 214902 - protein, 408 aa, unidentified
MVVEAARVTSSTVVVAVDVGKTEFAFSVSDGARVSLLKPRTGCPMTGPSLAQVVADIARVLPGGAGVKVGIEAAGHYHRPLLRAPWPVDWEVLELNPGHVTEQRRVLGKRTIKTDVIDLQAMTELMLAGRGQPVRDRSLVLGGLAAWSAHRTGRVSLRTATKNQLLGQLDRTFPGLTLALPDVLATKVGRLVAAEFADPAGLAALGSSRFIRFGATRGLQIRRPVADRLVQAARDALPTADAAVARAVLAADLALLSDLDAQVDQATDQLARLLPSSPFAPLLTVPGWGQVRAGTYGGALGDPARFDNHRQIYRTAGLNPIQYESAGKRRDSVISREGSVELRRSLIDLGVGLWHCDPAAKVYGTQLRARGKKGLVIACAMANRANRIAFAMVRDQCPYDPTRWLQGA

SEQ ID NO: 214903 - protein, 507 aa, unidentified
MAKAVQFKSVSTGQIKPAKQMPTVHPHAAGIDLGNAAHFVCVPADSVPAGQSPVRQFGVFNPQLDEMVEWLKQCQVQTVAMESTGVMWIPVFQKLETAGLEVLLVNTKRLKHVPGRKSDVLDCQWIQQLHSYGMLNGSFRPADIICRLRTLMRQRENVIASAGSETQHMQKAMQEMGVHLHVAVSDVTGETGLRIIDAILAGERDPKELVKLRDWRVRKSTVAEMEAALQGDWRDELLFVLGQSRKAYAFFQEQLAALDQKIIALLGEIPPAPQPPTDGSQPVNAPAPEGPTQPKAQSDSGPAAASEASAAHKASKTRKAQATKKAKRKPSKGGNPLPKDIRPQLTKIFGVDLTLVPGLNLVGVLVILSEIGTDLKRWRDGDAFAAWLGLCPGSNISGGRILSSRTPHVVNRVAVLLRLAALAIGRTDTCLGVFYRRMKAKHGAAKAMTATARKLAVLIYHLLTTREQYQEPDLKAYDERVRKAKIIRLSRQAKELGFDLVPLEQAA

SEQ ID NO: 214904 - protein, 343 aa, unidentified
MQITTIGLDLAKHWFQVHGVDANGQVVVRRRLWRSGVIAYFRSLEPCLVGIEACATAHHWRRELIALGHTVKLMPPAYVKAYVKRNKNDAADAEAICEAVTRPSMRFVPIKDAEQQSVLMLHRARSLLVRQRTMLVNALRAHMAEFGIVAPQGLRHVEMLTKTITHQQERLPELARSILQTIADQLNGTMARIQEIEGRLVRWHRQSRVSRLVATVPGVGIMGASAIAATVPNPSLFRSGREFAAWLGMTPRQNSSGGKERLGRTSKRGNKYIRSLLTAGAVAVLRHARNRPTRDGAWVRALLARKPTKVAAVALANKTARIVWAVMVREAGYQPHEGFRQPA

SEQ ID NO: 214905 - protein, 423 aa, unidentified
MMKLKYSICCGLDVHKNVIVATIVTTNKDGISEYLQKSFSTINSDIQRFHNWLIENNCYHVCMESTGKYWIPIFNYLENDIDVCLTHPKYVKAIKGKKTDKKDSKWIADLYKFDLVRCSFIPPKDFRQLRELSRYRFKLVCMKSSEKNRIQNCMTISNVGIASVLSDPFGKTATEIMSYLLEHTADSIDEKAVRKLIKKGAKAKSDEIIEAIKGYTIETDQAKKLELARGHLEYLDDMITQTEVELYVRIKPYYEFVEFVSTMPGMTELSSTIVLAETGVDMDIFDDAKHLCSWCGLSPANNESAGKKKSVRIAKAGDYLKPMMVQCALAAIKSKKQPYFAIKYGRIKKRRGHKKAIIAIARMMMVCIYHMVSEKKPFTPTDYEELMNPQNHVERVVLNENNVFAYLESLGYDSSKLVKRNDN

SEQ ID NO: 214906 - protein, 359 aa, unidentified
MQRNKISFKGQKIFIGIDVHKTTWEVAVLTESGFLKRHSQEASAKVLFDFLRKHYPDGEYHAVYESGFSGFATYYALKEHGIDCVIMHAADVPTTQYEQVMKTDRVDAEKLVRTLRNGDIKRPVYIREKDNLDERAVIRTRRIIQKQLAGYKSRVKHMLHCNGVEIPKRFSRPGTHWSRAFIAWLKEDVRLLSSTRVSLDLLIRQVEVMRGTLLEATRELRRLSQTERYAHRHKLLMSIPGIGPIVAMCILTEVWDESRFQNERQFAHYLGLVPTCHDTGEHKSRGVNTFRGNRHLASMIVEAAWVAVNKDIGLGAYYSHHKKDVPPQKAIVRVARKMSNIILSVLKNDKEYEPYKWDK

SEQ ID NO: 214907 - protein, 441 aa, unidentified
MEQRQLFKEEGAMEQTRQAEQKAEPEFAAFVAIDWADKKHYWSLRAAGSKQIERGEVENTPEAMEVWAAQWSARFASRPIALALEQRRGALVAMLSKYKQLHLYPVHPLTLAKYREAFFSSRSKSDVQDADLLLELLCQHRDRLRRLEPDTVEMRTLQFQVENRRKLVDERTAVSNRLTGSLKMYFPQILVWFEDVTAALVGDLLLEWPTLTELQKARPRTLRTFFQQHNCRDVEKTEQRIQQIRTAIPSTHDEAVIVSARSVVWVSVRQIEVLRQAIVDLDRQIKEIAHKQEDWKIFDSLPGAGEALAPRLMSSLGSNRERFESASQAQCFVGIAPVKEASGNTQFVHMRWACPKFQRQTFHEWAACSIPHCGWAKAYYDVMRERGKKHHTAVRALAFKWMRILYRCWKDRQPYKEEVYLASLAKRCVPMQRLVKSVQMP

SEQ ID NO: 214908 - protein, 342 aa, unidentified
MDISTLGIDLSKTTFHVIGFNARGEIVLRRKFSRKQLLQFTSNRQRLLIGMEACGGAHFLGRALQTQGHDARLMPAQFVKAFRKSNKNDYLDADAIAEAVQRPTMRFVPIKTDDQLDLQALHRVRDRWVARRTAVMNQIRGFLMERGIAIRKGSSHLTTQLQGVLEDANSLLSGRLRLSILELKHEWDELDKRIENSNVELQRIAKQDDACHRLMEIPGFGPLVSTALVAAIGNGIIFRKGRDLSAWLGLVPRQHSTGGKARLLGIGKRGNEYLRRMFLHGARSVVAQIGRNPSALGLWLADLSARSHRDVTVVALANKMARTAWAILSRGTHYCAASPAAA

SEQ ID NO: 214909 - protein, 344 aa, unidentified
MEITTIGLDLAKSVFQVHAVDAMGQPVVRKALRRAQVLPFFAKLPPCLIGIEACGTSHHWARELIRLGHDVRLMPPAYVKPYVKRGKNDAADAEAICEAVTRPTMRFVPVKSPEQQAALSMHRTRDLLVKQRTQLVNMIRGLLGVGGGDIPQGLERALTMARQIVDGELPDVPAEAAKIVGTLSQQALDIHMRLREIDRDLLAWQRASDVARRLMTIPGIGPVGATALAASVTDPHQFRSGRQFAAWLGLTPLQNSSGGKERLGRISKMGDKYLRKLLIVGMTSLVRRARHKPETVDPRLADLLARKPVRVATVAMANKAARVIWALMVRGETYRSGHAPMLAA

SEQ ID NO: 214910 - protein, 343 aa, unidentified
MEYYAGIDVSLESSSLCVVDATGRIVRESKVASEPEALIAWLQSLGFDLARIGLEAGPLSQWLYAGLKQAGLAAELLETRHVRNAFKIMPVKTDRKDARGIAQLMRMGWFRSVHCKSLPAQETRSLLGARKLLQGKLHDIELSLRGTLRGFGLKVGKTTPKTFEARIRTLVADHPTLTLIAEALLRARAVLLDEFIKLDKKVHALARQDPRARLLTTAPGVGSMVALTYAAAIDDPARFKSSKTVGALFGLTPKKYQSGETDITGRISKTGDAAVRTALYEAANIILERPVKGGWLKAWALGVAKRAGMRKAKVALARKLAVVMHRMLVDGTPFDLNRVTATA

SEQ ID NO: 214911 - protein, 338 aa, unidentified
MLHVGLDLHKKYSTVVVMDDNGNVQLAETLYHDDRARLIAFFSELAGKAIVTVEATRDWYWLYELLEELGVTVKLANARKVRLIAESWLKTDKVDPKSLAQLERTGFLPEAYIPPREIRDNREYLRYRLTLVRLRTGLKNKVHALLDKLGIKHPFADLFCPAGRRFLSQLTLRPAYREELSNYLALIEDIERRIVTATKEITRQLKPDPRAKLLMTIPGIGYLTSYLLLNEIGDIKRFPSPGKLCAYGGIVPIVRQSADHRWQGHITKEGNRYIRWALTESACKAPSKDYALGSFYRRVAYRRGPLKARVAVARKLLVAVWYVLTYGEPYKGTAFPTV

SEQ ID NO: 214912 - protein, 377 aa, unidentified
MTKIRFVGLDVHAETIAVAVAESGGEVRSLGIIPNKLESVRKLVGKLGSVQQLKCCYEAGPTGYVLYWQLTQLGVACEVIAPTLVPTKAGDRVKTDRRDAEKLARCYRAGELTAVWVPDAEHEALRDLVRAREAAKKDQLRARHRLGKFLLRHGKRPTDAGKAWTKKYLEWIKTHVRFAPAALEATLAHYLEEVDHAAAQIVKLEQAIDQAVSEASPEIRAVIEALQALRGVAQMTSATIVCELGSLSRFESPRQLMGYSGLVSREHSSGSKIRRGAITKTGNAHLRRVLVEAAWAYQHRPNVTGYLLRRQKSLALADETKHTAWKAQHRLHKRYKALAARGKNKNQIVTALGRELLGFVWAIAVHTEAQNKLAKVT

SEQ ID NO: 214913 - protein, 397 aa, unidentified
MIAVGIDISKAKSTVAVIDSDGTVLASPFTMAHTQPEMETFVTYLKGLGEPTTILMEYTGHYHYPVLKKLQDEGFPVCIVNPYQMKKYGDVEIHKAKTDKKDALRIAAYALEKSYKLVPYSSMEQKYEDLKFLSRQYSQRITYVAKLKVQLIALLDQTMPGITRILPLNSRNPEKCALLLFIKRFKSFDEIQRIGKARFLASYDVLAKKASERSASSKGLSIYELAVDSITTRGEDPYIWLSQNQCVDLLSATQNAADEIISQMRNIAETIPEYKVLRAMHGVGDRLGPIILAEIGDVHRFHSGKALNSYAGNDAPPYQSGQFESRNRHISKRGSSTLRKACYEVMQALKLTKPQDDPVYLFMLKKEQEGKPFNVAKMAGVNKFLRIYYARAMELYK

SEQ ID NO: 214914 - protein, 313 aa, unidentified
MAKSERFIGIDVSKDTLDVHVLPEGKAFVFSNDIDGIAALCRKFGKLRPQLIVLEATGGLQIPVASALSVKKHPVAVINPRQARDFARATGRLAKTDKIDAQVLAFFGQQVRPEARPLKDEQTQELSALLSRRKHLIGMLVMEKNRLALSFGSVRNDIEQHIEWLEERLSEIDSRLGKAVRSSPIWREQDNLLRSVPGVGAVLSTSLLANLPELGKLDRRSIAALVGVAPMNCDSGKYRGKRRTWGGRSDVRAVLYMAIMTAVRFNPVISKFYKRLIDAGKPHKVAATASMRKLLTILNSMVRTGQPWAYSPS

SEQ ID NO: 214915 - protein, 401 aa, unidentified
MQDTQQHGAVDVFVGVDVGKGQHHAVALDRNGKRLYNKALPNDEVKLRALIAELKTHGRLLFVVDQPSTIGALPVAVARAEGVLVAYLPGLAMRRIADLHAGEAKTDARDAAIIAEAARSMPHTLRSLRLADEQLAELTMLCGFDDDLADQVTQTSNRIRGLLTQIHPALERVLGPRLDHPAVLNLLERYPSPAALAATSEKTLANRLTKLAPRMGKGLATEIVQALSEQAVTVPGTQAATIVMPRLAQQLAALRKQRDEVAAEVERLVLAHPLWPVLTSMPGVGVRTAARLLAEVAHKAFASAAHLAAYAGLAPVTRRSGSSIRGEHPSRRGNKVLKRALFLSAFAALRDPVSRAYYARKIQQGKRHNQALIALARRRCDVLFAMLRDGTIYQPKSAPNA

SEQ ID NO: 214916 - protein, 600 aa, unidentified
MTQVTAPSPTTVIGVGIDTARYGHRVTFLRDDKQPAAPSLDVLESRDGYQQLQEALERLRARHPDARFHVRMDCAGQYAVNLERFLRDLPLALEVSVGEPARNAAYRKAHFPKRKCDAGDSFATARYAVVERPPPSADLPAEYVALREVAGRLESQVVQTTRFLCQLHNLLARVFPELATLVAELRTSWILSLLSQYPTPARIARAKAESLEGIRYAKPAKIAAIQAAAKTSVGMLHGEIAESLVVQLVRDIEASKQAEKRLKHLLKQAFDTLPAGPHQLLTTIPGIGPATAAALVAKVVSIDRFATPAQLVSYFGIFPEEHTSGYDRSGAPVPPGSVSMSRQGNDLVRRYLWMAAQTAAMHNPAVLALYARQRSRGKRGDVAMGHCMRKLLHLVFAIWKSGRPFDPKHYPWEKSAPAEAQDSSPLAKLETAAGHKEGQASEGKVVTAAASNVKADSYQVKSPGPRRRIDFENLRKQVTMEQALGQLGWLVGLKGKPPQLRGPCPIHGQQQDRRRCFSVHLAKQVFRCFHQDCAAQGNVLDLWAVARHLPLYEAALDLASTFHLDPYADREEEPVPPYPSMSQPPPLTPVPKGVITPDAC

SEQ ID NO: 214917 - protein, 341 aa, unidentified
MKDTMIGVDLAKRVFQLHGARMTGEVTFRKKLSREQFLAFMAVQPACLVVFEACPSASYWAREMTAFGHEVRLIAPQYVRPFVKRQKNDAAYAEAIMIAARQPEMRFVAPKTAEQQARAVLFRSRERLVCQRTELANALRAVLDECGHVFPVGLGHLKRIAALLDDPACDLPALIIAECRDLLAQIAEKTERIDAKTRNLKALAAETDTARRLQTMPGGGPLTALAVEAFAPDMAQFRSGRDFAAWLGFVPRQHSTGGKARLGRISKAGQADIRRLLIIGAMTRIMGRARHKVPAESWIGRKLARKPKMLVGIALANRMARQIWAMLTRNEDYRDPALEAA

SEQ ID NO: 214918 - protein, 413 aa, unidentified
MEVIHPRCAGIDCSKKDAKVCIRIQGQGPRVKTSTVSTWGATTGQILTLREYLVAANVTCVVIESTSDYWKPFYYLLDDDLDVILVNAASVRNLPGRKTDVSDAAWLADLGAHGLVKASFVPPAPVRALRDLTRTRTVITRERTREVQRLEKLLEDAGIKLSAVATDITGVSGRAMLEALISGQRDPAVLAEPAQRRLRSKIPALTEALRGRFNDHHAFMTRLFLDRIDAHTADIGRLDERIEEAMQPFRPTRDLLMSIPGFSRIVAEVFIAETGGDMSVFPTAGHLASWAGVSPGSNESAGRVKSTKTRPGNRYLKGVLGIAALSAARSKSTYFAAKYKRIATRRGPMRAIVAIEHAMIIAAHNMLTNGDFYRDPGANYYTAHQPARTKSRAINQLESLGYRVTLEPLTESA

SEQ ID NO: 214919 - protein, 376 aa, unidentified
MKNKATPTLHDNDQPNAALAGDNSGARQIFKLGLDVDLNNAVTAIQCGTGEIKRGQSFSRARLLGWVRTQVNAGHTVHTVYEACGFGYTLHHELVSAGAHSLVTTPMRHTAQRRRKNDRMDARELCVRLARWLDGHRDELKPIRIPSSEEQQRRELGRQREFFKRELRRLENHGRALRIEFEHETLPSGWAGPRKWKRLSLQCSSFVREQLEPIVTQIRACRAQLVKLSAALEARVAEQMIPTGLGSLTLALLDGEVCNWHRFKHRKAIGSYTGCCPSEYSTGGVQRFGPIDRQGNKHVRVLLVEAVWRLLKWQPGWHARQKYLARLKHGASLKKKIAVALARQLAIDLWRWRTGRATAAELGWTLKNAIEETTPL

SEQ ID NO: 214920 - protein, 358 aa, unidentified
MRMIGVDLHTRQQTIAMLDPETGELVEKTLKHEGETVREFYAALPHPVLVGIEATGSMYWFLELLEELGIERQVGHPTEIRAAEPRKQKHDRRDAALLLKLQVENRFPSIWMPSAELRDLRALLRHRHQWVRMRTRVQNTLQAIALSHGLRRGQSLWSQAGQQAIASLPLAPHAAQRRTELQALYGRLGKQIDELGEQVMDQALLRPGAKLLMTHPGVGPVTALATDVFLGDPARFDDGKAVVSYVGMIPSEYSSGGRQRLGGLSKQGNPLLRFLWCEAGIHAVRRDPELKRFYRRKLPQKGLGKTRVAVARRLGIRLWIMLRDQIDYQEFCRRGQMRQKSGGARAGMPEGVHSPARS

SEQ ID NO: 214921 - protein, 422 aa, unidentified
MLAESHDDEQIIARVAALDIAKAELVCCVRVPASAGGKRRLQEVTTHSTMTQALTELANRLVEMGVQRVVMEATSSYWKPVFYLLEAHGLDPWLVNARDVKHLPGRPKTDVLDAVWLCKVAERQMLRPSFVPPWPIRRLRDLTRYRTDLVSARTSEKNRVEKLLEDACIKLSVVASDIFGVSGRAMLAALVAGERDPKVLAQLARARMRGKIDRLEQAFDGHFADHHRFLLSRMLARIEGLDADIAAVDAQIDVQLAPFAEAAARLDEIPGIGPVAAAAIIAEIGVDMSRFPTAGHLCSWAKFAPGINSSAGKPQGSASSGHGDPYLARVLGEAAVGTTKTDTFLAARYRRIARRRGQPRAVVAVGRSILVIIWHLLQDPDARYHDLGADHYNRHVDPTAKKRSHIRQLEALGYTVTLTPAA

SEQ ID NO: 214922 - protein, 440 aa, unidentified
MDAYQKGFIKMSNDFYLSVGIDVGADFSFMSIALPNQTFVGKPFRITHANPASLEKAVLTIKEAEESNSLKAHIFLESTGIYHYPLFCYLRDKGFPVSIVNPIITKSSTNINIRKVHNDKFDSKKLALIALKPDLKVSVIPSDLVLDLRNLTREYYNLMDCRSAYVNKLQGELRVAFPQYLGIFSKLTVETSLALLEKYAIPTAFLTAKKSAVIKVISSTARFGTAYAERQYQAILAAAEAAANFGHALPSNGKLIKLYVSFIKKYGEEIDGILAAMHELVDAHPDEPFVNQIHLLETFKGAGFLSAATVMCEIGDFSVFKSPKQLFAYFGLDPAVKQSGKFNGTDVKMSKRGSPLARRVIHTMALISIGRTRKGVANNSVLRDYYLSKCQSKPKMVALGAVMHKVCNIVFAILRDEKPFTVISPSQHKLNYLQSHRLAA

SEQ ID NO: 214923 - protein, 387 aa, unidentified
MPQADDSSRSLDPFQQDATLVAVVELSQSSWLVAATVPGLDRQPYKKIMPDETMLLRLLHRWRDEAARSGRAIARITVAYEAGRDGFWLARWLIGHGIEAHVIHSTSVAVSREHKRAKTDRLDTAMLMRVFIGWLRGERGHCGMVAVPTIEEEDAKRPSRERENLVGERTRIVNRMKAALARLGIRGFKPELRRAAQSLETLRTPEDLLIPPNMLDEMRRDLARLIVIRDQIAALERARLERIKQTPDHRPHAMVQLLAKVVGVGIETADMLVQEVLSRNLRDRRAVARYAGLTGSPDESGSKRREKGLTKSGNARVRRGLIQLAWRFLLFQKESALTQWFRSRTEGPKGARKTKMIVALARKLLIAFWRMVTFGEIPQGVVLRQVA

SEQ ID NO: 214924 - protein, 373 aa, unidentified
MKKTTRWVGLDVHAETIAIAVAEKDGMVGFVSTIPNRPDAIRRALKKLEKGGKLHACYEAGPCGYGLYWQLAEMGIECDVVAPTLIPVKAGDKVKTDRRDAEKLARLLRSGDLTAVWVPDAEQQALRDLVRARHAAKRDQLRHRHRLGKFLLQLDARRPEKILAWGIKHMTWLEGLTLPHASHQEVLVDYLNEVKRAKERIERLEQAIDAGIARAPKHLQELIAALQTLRGVAKIGAATLVTEVGRFSRFESARQLMAYVGVVPREHSSGGSTHRGSISKTGNARMRHVVGEAAWSYRHRPANGPGLKKRQEGQNEDVKAIAWKAQHRLHKRFQKLSAQGKHHGRVVTAISRELLGFVWAIGCKVEAEIDAAA

SEQ ID NO: 214925 - protein, 411 aa, unidentified
MRLFVGDDWAEDHHDVEVMSEAGKVLAKRRLPEGVAGMAGLHEMIGRHLGEDADGAEVAVGIETDRGPWVAALVAAGYTVFGVNPLQASRYRERHGVSGAKSDSGDAHMLADMVRTDSHQLRAVAGDSAEAEGIKVLARTHKTLIWERTRQVQRLRHQLLAYFPAALEAYDDLDAPDALELLGKAPEPARAAKLTRAQVSAALKRAGRRNITERATAILAALRGEQLGQPAAVTAAYAVTVRSLIAVIAALNEQVKILQGQVEADFGRHPDAEIYRSQPGIGAVLGARVLGEFGDDPHRYADGKARRNYAGTSPLTRASGKKKVVAARFIHNDRLVDALNAQAFTALRASPGARALYDEHRARGIEHNDALRRLANRLVGILHGCLKTRTLYDEATAWGHRQNLPQPSVAA

SEQ ID NO: 214926 - protein, 345 aa, unidentified
MDHFAGLDVSVKETSVCIVDETGKIVREVKLASEPDALVAVLTSPSHHFKRIGLEAGPLSQWLYNALAEAGLPVICVETRHMRAVLKAQINKTDRNDARGMAQMMRVGLYRPVHVKTLRSQKLRMLLTHRKLLQSKAIAIDNDLRGTLRNFGLKVGMVGTAKFEARIKELVENLPDLAMLVEPLLVVRRVLREQIGVLHRRLLTIVRDDDVCRRLMTVPGVGPVVALTYRATVDVPARFKNSKAVGAVFGLTPSRHQSGESDRPGSVSRCGDEMMRMMLYEAAQTMLVVSTKWSWLKAWAMKIARRRGMKKAIVALARRLAVIMHRIWVDGTEFRWTREQAPIAT

SEQ ID NO: 214927 - protein, 355 aa, unidentified
MERYIGLDPHGTSCTFGVIGPSGRKLRTDVVETNGKALVSYLRGIPGRKYLCLEEGTQSAWLYEILSPHVEEIVVAGIVESRGQKSDVLDAFRRAEELRAGTIKKPVSKAPRLYSRLRELGRVHSMLVRDVVRVQARLKAMYRARGVGTPGKSVYGPKQRERWLRQLPVSSRWATEQLHQQYDLLLELKQEAEQELVAESRKHRIAKVLATAPGLGPIRVARLLPIVVTPHRFRTRSQFWAYCGLGIVTRSSSDWIQSPNGGWLRAQVQQTRGLNRQHNSSLKNIFKGAATTVVMRLLNDPLYEHYIRLTSAGTKPNLAQLTIARRIAAIVLRMWKDEQEYDPGRLTRKIAPAAH

SEQ ID NO: 214928 - protein, 426 aa, unidentified
MDEVTDEPLYRDRVCGIDIGKAGLVATIRVPAETRSFGTTRREVLTLADWLRCWQVPAVVMEATGDYWKGPFYRLEAEGLECVLADAKQVKNLPGRPKRDPADSRWLAACFERGAITPCFVATPEFRIIRLHTRYRRDLTEERTREKQRAEKLLESAAIKISSVVTDLHGVTGRDIMDRLIAGERNPKILAQLARRRARRKISQLEEALDGAEFFTTAHAVLLAKVLERIDRLAADIDQLTVVIERLLAPYEEQLQQAESMPGWGRRAAQDTLAETGPDMGRFATGAHLASWAGRAPLDHQSGARAGRAKAKKGNRYLGAVTGETAVAAGRTQTREGVRHRRLARRRGAAKACVATGNTQLKVYHKLLSNPGMRYVDLGPDYYERQRGIRRQVAHHIGKLGALGFEVTLCRIPEPEGPMGSQSSMI

SEQ ID NO: 214929 - protein, 332 aa, unidentified
MTSTWVGIDMGKRSFTAWVAGSRRPLATFSNTQEGWERLATSLDPAQAEAAVRLVVEPTGGYEAALVRFALERGFGVSLVNPARVREWARSEGRRAKTDRQDARMLADYGQDKEPPAWRAQAEEMSELDSLLRRRVDLEGMLRQEKNRKEALEHRPGVARGVPKSVDRLIETLEGELGQIEGAIKELQAKHTLLESQAELLDSVPGVGQKTVLPLLVLLDRWQVLTQGHGDAKGLVAYVGLDPKPFESGSSVHKPAAISRMGDRVLRRQLVMAALGGTRGDNPLRAFYQGLVARGKPKMLALVAAARKMLVWAWAVYRHQSAFRTDLHPHKA

SEQ ID NO: 214930 - protein, 322 aa, unidentified
MSQPNPLCVGIDVSKATLDIAASSDVAQFTVSNDSDGFNAIITGLRRHSVALVLMEATGGLEVAVACSLQAEGFEVAVVNPRQARDFARAMGYLAKTDRIDARVLTQMAEVINRHPERKRFIRALPDAERQALAAMVVRRRQLIAMLVAERNRLHPFHPQNKKSINTIIKALEDELVRLEKEMDSHIRNHFKEIAERLSSIKGVGTMTVSAMLAEIPELGTLSRREISALIGVAPVNRDSGTMRGRRTIFGGRAGVRSALYMAALVATRFNPVIKTFYVRLLAAGKAKKVALVACMRKLLTILNAMLRKNEEWNESYHHVAP

SEQ ID NO: 214931 - protein, 342 aa, unidentified
MSYNFIWIDVSNNTLDIHIKQSNTWLQVQNHYKTIFSFFKKEIKIFDNIIVVSEATWVYSSSLVKVCSDLNIKHYEINPKAMNQLWKNIWDRNKTDKIDAEKIANVWKMLFDMQKWVGCKSKLTTTSSNDIKYLKSILSAIHSVKNDRQKFKQRIASISKDIFAPKWFIKDIENSILDSEKIRKKLNEKAMIIIDKLWMKNKIQNLCTIPGVSSEVSLELIIFFIDLSSKWIWINDRAKVKAFAWIDVSLQQSWTSINKKKISKQGNKHVRSILLVWGRCWFALVKRDKYKNTNLWLFFQRMIDKFSSPSKLNWNSISTAMSRKILLIAWWIFWNDTPYNWS

SEQ ID NO: 214932 - protein, 332 aa, unidentified
MVAGTFGSLNKAGSTKMTQISRTAGIDTSKAKLDIAIHGSSEHWQVVNTIVGWRRLADVLRQGGVTRLGIEASGGYESGVVGYLREHGFTVLALQPIQVKAYARVHLRRAKNDKLDAVLIAACAAAIDQPRIEPDQRLARLAQYLTFVEQIEEDIARLKVRLEHVADARLRRWMMADIARLKTRRATELARIILALRAHDDLARRFELVLSIPGLGERTAVALIVRMPELGRISREQAAALAGLAPYDDDSGKHKGQRHIAGGRARLRRSLYAAALPAAFRWNKALIGLYSRLTAAGKAHNAALIACARKLLIYANTVVARGTPWVDKPAPI

SEQ ID NO: 214933 - protein, 361 aa, unidentified
MSGDKDIILVADYHAENIEFRWFNQATGEERTGKYPTGQAGILRQIEQAAQELEPGGQVVWIMESTTGWARVKDLIGPKARFMLVNVLQMPMPPKAKRRKTDKIDTGRILREYLHGSLPQSFQPAAWWRQVRRVVDLRQDLVERQTAIKNWIGSLLHHETWQNRKNLWSERGLLRLRAMKLPAEDRMLVDLKVEQLEQLATQLGQIEGRMRQIYDAWPEAQWVDEVRGIGMVTAVSLLAHIGPIGRFATAEELISYAGLAPGMWQSDGTCHHGRIGGGGTDSHLRYLLIEATTWLCQIPRYRPTYERVVKKRGKKIGRIVVARLLLRSLHKMLSAKVRFNPTPRGAGTATETAPETAGCSR

SEQ ID NO: 214934 - protein, 343 aa, unidentified
MQTITTIGLDIAKSVFQVHGVDAGGQVIIRRQLMRRQVVAFFQKLLPCLIGIEACASSHHWSRELQALGHTVRLMPPAYVKPYVKRQKNDMADAEAICEAVTRANMRFVPTKTPEQQSGLMLHRTRHMFIRQQTAVINSIRAHLAEFGIVAPVGRKGVTELLRIVADPNDKRMPEVARACLAALGTQLLALKEQILEFDRMILAWHRSNQTSKRLHYIPGVGPMLATALVASVADPRTFRSGRNFSAWIGLVPKQHSSGGKERLGGISKQGDRYLRSLFVAGALAVIRYAKIHGTGHRPWLTALLGRRPTKVAAIALANKIARMAWAVMAKGERYKQPAALAR

SEQ ID NO: 214935 - protein, 389 aa, unidentified
MKETIYIGIDIAKYKHDFCIISSTGEVIVQNNSFENNKKGFQLFFSYLKPYNKADVQILFESTAHYSMNLELELIDQGYSFMKMNGLIIKQFFKAQTLRKTKTDKADAFALTQYLMANTYKPNSNRLYHIYSLKSLCRTRDRLVRERSKFKIYITNELDKSFPEIKKFFDNKISITLLYILEKYKNKNKIALMKDYDSIRKVSAANFSFPRFLLLKQLAKDSIGHPTETSDFLIESYVKSINCLSEQIDRIEKQIIEAVRKLNTHILSIPGIAEISAGSIIAEFGDIKNFESPEKMLAFAGLEPSIRQSGTLSTEGHMVKHGSGYLRNTIMRVVNSLVMHDQVFNDYYNKKRDEGKHHLVAQSHVAKKLIRIIYTLETKGIDYDINFVK

SEQ ID NO: 214936 - protein, 462 aa, unidentified
MARGWKRKTKKAVGEERDWTLNLDVVHPNAAGIDIGNEAHYVAVPPDRDPESVRRCACFTEDLRRMAAWLRACGIETVAMQSTGVYWLPVYEILAEEGFRVFLVNARHTKNLPGRKTDVQECQWLLQLHTFGLLNDSFRPPEEICVLRAYWRQRSEHVAAASACIQRMQKALTEMNMQLANVISDLSGVTGMAILKAILAGERDRYKLADLAHPRIQASREEIARGLEGTWRKELLFILRQELNLYETYQRQIEECDQELQAHLKTLEDKIEPGDKLPPAKANKRPGDNAPAGFDLRGELYRISGTDLTRIDGINVMIAQTIIAEVGVDMSRFPTEAQFASFLGLCPDNQITGGKVFRRGTRRVENRAATALRMAATSLWRSKTYLGAKFRRFRMRLGAPKAITAMAHMLARLVYRMLKYGEEYVDMGMSYYEEKYREHEIRSIRKRAKDLGLLVTLSPTGA

SEQ ID NO: 214937 - protein, 344 aa, unidentified
MNKLSRVGVDLAKNVFQLHGVDRHGEKTWCRRLTRDKWLRVLLDKIEPGCVIGMEACTGAHHWVRQLQIKGFTVKLIAPQFVKPYVKSNKNDANDAEAVCEALSRPSMRFVAVKTVEQQEMQATHRIRSELLGQRTSKANQIRGLVSEYGLVAPQQMARLRAAVPTWLEDAENGLTNRFRWLLSGLWNDLQTLDQRVAELDDEIEGVAKSDPVATRLQQLRGVGPLIATALVAAVGQAEQFANGRQMAASLGLTPRQHSSGGKDRLLGISKRGDAYLRSILIHGARSVIRTAKHKDDRLSQWVTSLAARRHPNVAAAALANKTVRIAWAMLRRGTDYQPDRIAA

SEQ ID NO: 214938 - protein, 462 aa, unidentified
MMNVQEQREMVEKANRILSEMKSFTWRDLETQGKFKKNDKLSFISDDMLILGCDIGSEKHYVRAIDTRGRELSRKALAFDNNAEGFQKAHDWAVQLAASNDKKQIVLGLEPTGHYWFCLAAWMVSNRISVVQVNPYAVKQTKELEDNSQQKDDRKDPKLIANLVKDGNYGMPYLPEKVYAELRRLSMFREQLMEDRNRNMNRLHREMKIYFPEYKDAFGKVDGAFCMEVLKEAPFPEDILGLGIEGIREIWHKAKLRGRGYRRAVEIVKYAETSIGLKDGTAAGKEAVRWFAEKIMELDEELAGIENRLNEKCKEIPHTENILEISGIGERILSGILAEMGDISRFDDAKELQKLSGLGLVSCSSGKHKGETRISHRGRKRLRYWLFQAARSAVAHGEEYKWIHAHYTTRAGNPLQKMQSLIVIACKILRVIYTMLKTGKPYDPEKLLKDIRYPENVQTAAA

SEQ ID NO: 214939 - protein, 374 aa, unidentified
MIASTRPTLSVSEPTLFVAFDVGKREWKLAVTSGFGVAPWVRTVASGDLAAVARVVRDGRRRFGLSATARVVSCYEAGRDGFWIHRALTALGVENRVVDSASIDRNRRARRVKTDRIDAIKLVQKLVRVWLGEPDVWREVRVPTVAAEAARHVSRERTTLVQDRTRLINQVRGWLALWGAALPRRHGAWWTGVRDWAGAPLPPEVQARLARAEVRLQGIEAQVRELSAQQRAAVRAAAPRSALAQLVRLKGVAATSAATVLEEGLVWRQFQNRRQVGGLLGFAPTPSTSGDTVRELGISRAGNKRLQHVMTELAWNWVRWQPGSALTQWYHARFGTAKRMRRIGIVAVARKLLIALWRYVTSGVVPAGAIVTPA

SEQ ID NO: 214940 - protein, 331 aa, unidentified
MSMHVGLDVGSRTTAMGWRNDGRFAGACNIDQTPAGRKAAVNRLLELKPLSVVMEATGIYYLDLAMELTAAGLPVSVINPKSFHNFAKLMLKNSKTDAIDAQLLAEYGERMSPKLWTPPTTIQLELRAIGRHINRLTCHRTRAKNELHALKATQTTVKMLIEDEEEAIEAFDKRIERFRLAGRALIDNCPTLSAQFRHMIAAPGMGEISVFSALAELTTLPVTLKSAQVSRHAGLDVRLTQSGTSIDKPGRISKGGNAYLRSAMYMPALTAIRCDSNVKAFYEALIGRGKRKMQAIVAVMRKYLTGLWACMRAGEDFNTAKLFSEKHLAKA

SEQ ID NO: 214941 - protein, 373 aa, unidentified
MVCQAGGEAASLTTMITDDKTETNKSYETIKLGIDAHAKWYYVARQLDGATPQPVQKMTFEALLRFVAKQQALAGEVHTCYEAGAFGYHLHRKLEALGVNLVVQPQDWDKRGKGVKTDRIDALALCQRLDRYVRGNRKAFSVVRVPSEEEERERAFSRQRQQLVRERQRLQAMGRSLLAMQGIHVRGKWWKGQTWAAICREAPAWVVERLEVFMKLIEPVEVEERKLTEGIQKVGRKSRIPKGVGPLSFEVLRREVGDWSRFNNRREVSSYTGLCPREHSSGGKRRGGSVNKSGNPRVRAMLVEMVWRMMRWQPGYHALRKWMAVLGDASRSAAVRKKAIVAVARQLAVDLWRLFTGQTTAEKLGLIYLPEAS

SEQ ID NO: 214942 - protein, 345 aa, unidentified
MINTNVLAIDLAKNSFQVCKTDKFGRVIFNKALSRKQLLILLANEKQSFVAMESCGGTHYWCRKAKGFGHKVIAISARRVKAFRQGQKTDASDALAISQAALQPNTKPSRLLSEYEQCLQGCERIREALVDDKVALTNQVRGLLMELGIVINKGDSHLLKRLPEILEDGENGMSFQFRACLKIQYERLKQLLIDIKLVEKQINIAIQGDVDCQRLQKLEGIGTVNSLSLKIALGNPEHFKNGREAAACFGATPVQHSTGGKERIGSISKYTANKRLRSKLYLGAMAVINQLDKREIKTEKERWLKSLLARRGKKVAAIALVNKTIRTAYALLKNNQDYKPQILAA

SEQ ID NO: 214943 - protein, 340 aa, unidentified
MGDITTIGLDLAKNVFQLHAVDEAGNVVMRKRLRRGQVLAFFAGIPACLVGMEACATAHHWARELIALGHEARLIPPTYVKAYVKRNKHDVADAWAICETVRRPSMPFVPVKTVEQQSALMMHRARDLLIRQRTMLVNALRGHLAEFGLIEAQGLHKVARLVAIVMDENDQRVPDIARQVLKVIVNQIEDTQTRIAGLETQVLAWHKSNPVSQRLATIPGIGPIIATAIAATVADPSMFRSGREFAAWLGLVPRQCSTGGKARLGGISKRGDSYLRRLLVNSAHTVLLCSKQAKTDPWLTSLLSRKPRLVAAVALANKTARVAWVIMSRQDTYRHAAATA

SEQ ID NO: 214944 - protein, 424 aa, unidentified
MATITPVTATVKSEDLMQVCCDVSKEKIDVYSRVGHEGALFEMMDTIRNCGSVLQRQLKAWQELAQAHGHAGVLVVCEPTGGHERKLLALARQTGSRTAYVSGEAVGKARVIESNDTGKTDRKDARIIATLAGMGKTLKVRQLPDEYEQLRELNTTYELECTTVATIRNHMHDQVRQLFPDLDGEEGFIFSATGRAIYQLFGLNPARIRECSWREFVAKVKTFVKAARIERLEKVWAAAASSLLHQCPATVRAMREERLGELFEDLDRHLARKLQLRTRILDAYGETEESRKLADIPDASSFQLARVIAESGPLADFRHGSQLLRYFGMNIRERQSGKWTGKNRISKKGRALGRKVLYQLVFSSLIGEGKLFADPYRRKKADCACGMKAIVCLMRKALKMILGVFRSREEFSRDRVFASLPAAA

SEQ ID NO: 214945 - protein, 465 aa, unidentified
MEKKTKLVDSVSMTVINSHAAGIDVGSREHYVATGQQSSDVCTFGVYSKDNAALVAHLQQKGITTVAMESTGTYWQPLFACIQAAGIAVVLSNNYIKDPQKKTDAKDARWLQRLHTLGLLKTSFIPAAQIEQVRTYHRHRSSLVAQAATCIQKMQKALRLMNIRLDIAIRDITGVSGMAILESIVAGQRDGTFLASLVHYKVKKSKEEIAEALQGQWKTEQLYIVADELESYKHYQLRMVNCDKQIELLLQQMTSAITAKHASEIPAAENVVSPAGAIKPTKIKKNKNSAGYDVSKLSMEYFGIDLLEVEGIGGATVMTFIAEVGSDIIKFPSKKHFTSWLRLSPNNKITGGKVISSRTPKGKNILSNAFRLAANTIAQRKDGVLKKIFSRIAFKKGRAAAITALARRLAEIFWIMTVRKVPYKAQNEKEYDEQTKKSIIKNIQHKMRKMNLTAEDIAMGGLVTN

SEQ ID NO: 214946 - protein, 359 aa, unidentified
MQKYELNFNGENVYVGIDVHLKQWHVCVRTAHVSKKPFSQPPSALALKQYLENNFPGGTYYSAYEAGFCGFSVHYELESAGIRNIVFNPADINDSQKERSRKTDAVDCIKICRNLMKDELKAIYVPSREELGLRGYLGARDTAVKKQRVAKQRIKSLLNRNGVKIPEELFPTNRTHWSRCFNGWLEKVAADLGSGEGYRLIDLLADLHHAHAQVLAAGRRLNDAISTHHLDTNELLLSIPGIGRLTAARICLEVPNVGNFVNSDHLAAYIGFVPDVHGSDDNVYARGITYRRRALLRSAFVESAWRAIGKDPAMGLAYSNYIKRGLKPNNAIIRIARKLVNRVFFVMRERKRYEIAKVR

SEQ ID NO: 214947 - protein, 403 aa, unidentified
MYYVGIDIAKRNHEASVIDSTGKPLSGSISFSNSKEGCNKLIALFEKLGVDVDNSIIGMEATGHYWLSLYSHLLEHGYDLKVINPIQSDAFRKMSIRKTKTDSKDSLNIAQIMRFGEYSSTRLSDENVQAMKLLTRYRFFVVAECASCKCKVIALLDQVFPEYERLFSDTFGSASKELLLNYQTPEDLLEISSAKLASLLTKASKGKFKMAKAEQIRDAAADSFGVSFAKKAFSFQMRQLIEQINFIEKQLGELDKEISSLLAQTNSVITTITGVGPVLGAAIIGEIGDITRFDSPRKLVAFAGLDASVSQSGEFTGTQGKLSKRGSPHLRHAIWMAASRACFCDPTLSDYYKSLRARGKHHLTAVSAVARKMCNIIFTILKENRPYESIPPKKTTLCEVQSE

SEQ ID NO: 214948 - protein, 394 aa, unidentified
MATDNKPWRNRKERKEWARRLQAEDPGLDVVHSHAAGIDVGNGAHYVAVRPDCDPQPVRRFECFTADLHRLADWLESCGVKTVAMQSTGVYWIPLYEVLEERGFKVYLVNARHTKNLPGRKSDVQESQWLLKLHTYGLLNNSFQPPAEIRILRTYWRQRAEHVRGAATCVQRIQKALTQMNVQLANVISDVSGLTGQTIVRAIVAGERDPVKLAELSQPGIQASREEVAKSLEGNWRPELLFVLQQEIEMYDIYQQRITECDQQLQKQLAGFAGTVPLHPPKAEPKRKRIKPAKNAPRFELRAELQRITGVDLTRIDGIDVMVAQTLVSEVGLDMGQWKTEAHFASWLGLCPDNRTSGDKVLKRGTRRVVNRAATALRMAATSFRSFLRMLRAS

SEQ ID NO: 214949 - protein, 370 aa, unidentified
MKKDTLFVGLDTDKKHIDVAVAEPLPRGEVRYWGRTANTPASVDRMVKKLSQGGRELVACYEAGPCGYGLYRQLTGKRGVRCLVVAPSMTPQRPGDRVKTNRRDALKLARLLRAEELTEVWVPDAAHEAMRDLVRARASVVSALTRCRQHISSFLLRQGIAYAGKPWTNKHRAWLGTLKFEHAAHRLLLAELLSALDQAQARRDRLTDHIRELAPTWSLAWLVEALQALRGYDLINAAVMVAELGDPRRFAKPRQLMGFVGLNVSEASSGETVRRGRLTKTGNKRARKALIEAAWTYSRPAATTSKPAAARLPASVQQIADKARHRLSRRYRHLLRRGKLKQVAIAAVARESLGFIWAIAHAAAPLPAQS

SEQ ID NO: 214950 - protein, 341 aa, unidentified
MKLIRVGVDLAKNVFQLHGVDRSEKTVWRRKLVRGDWIKELLERIEPGCEIGMEACSGAHHWARMLQAQGHTVKLIAPQFVKPYVKSNKNDANDAEAICEAMSRPSMRLVAIKTVEQQDIQAVHRVRSGLMDQRKAKANQLRGLASEYGLVAPKELLHLRSAIPRWLEDQENGLTEHFRRLLHGLWRDLKALDERVEELDREIGQIARQDPVAIRLQQVRGIGPLTATALLATVGDATQFASGREMAASFGLTPKQNSSGGKERLLGISKRGDAYLRSLLVHGARAVIRTAQAKTDRLSIWVIRIATTRHPNIAAVALANKTARIAWAMLTKGTDYRSQAA

SEQ ID NO: 214951 - protein, 373 aa, unidentified
MKEVTTIGLDLAKAVFQVHGVDATGGVTLRRAVRRRQVLAFFAKLPPCLVGMEACATAHYWAREIAKLGHEVRLIPPAYAKAYVRRNKNDPADAEAICEAVSRPSMRFVTIKTEAQQAAAGIHKVREMLVKQRTMLINTLRGLMAEFGIVVADGPQHVGELVAILADPADKRIPTPLHEGLLIIVETLRGLERRIEIIEKQIVACGRDNQTCRHLITIPGYGPILSSAMAAMVVNPAAYTNGRHFSASLGLVPRQDGTGGKVKLGPISKRGNGYLRRLLVNGATSVLSSPKAKQDPWLARLLETKERKVAACALANKMARIGWAIMMRQQDYRSRRHDQPRPDLAESGAVLAAVKTASRAPSAVAARCAPGQS

SEQ ID NO: 214952 - protein, 375 aa, unidentified
MQAAEERGYEAGQVLYMAMELSNRKWKLGFSNGARMRRKSVEARDQKRLLEEVSLAKRKLGLPAEAQVVCCYEAGRDGHWIHRWLSAEGFEVLEIDSSSIETARGRKHVKTDRVDVEKLLDLLLRYKLGFRKAFRVVRVPPEAAEAGQRLHREDEYLTGQRTRVTNRMQSLLVAQGITELSLKGDFAARLARVRRWDGQGLSPELKAELVRMHVQYRLIDEQLAELVRAYAAELESGTAVGASRRRLENLKAMGPKTSRILSAEVFAWRKFGKAKELAGMSGLTPTPSQSGDEQREQGISKAGNRRVRWVMIEFAWLWLRWQPDSELSRWYRRRFAHGSRRMRRIGIVALARKLLIALWRYVEFGEIPAGAVLKT

SEQ ID NO: 214953 - protein, 359 aa, unidentified
MKAQGKKIDFTGQNIYAGFDAHLKSWKVTIMAEDTVYKTFTQPPSPELLYSYLKRNFPGGNYHTAYEAGFCGYWIHDKLVSFGIKSMVVNPADIPTTNKERVLKEDKRDSRKIARSLSSGTLVPIYVPSIQTQRDRSFLRTRAMLVKDLARYKNRIKSFLYFYGISIDDTFSNPQSHWSNRFMIWLENIEIDGGSGKEALNVLISECKSLRASILAITKQIRQLSNTEKYKGPVKLLKSVPGIGLLTAMIILTELESIDRFNNLDKFCGYIGLVPSTKSSGEKERTGNITPRGHSVLRTAIIESSWTAIKNDPALMKSYMIYCRRMASNKAIIKIAKKLLSRVRFVLSNNKPYVCLIEK

SEQ ID NO: 214954 - protein, 425 aa, unidentified
MTRPQLTPPAGVLVAIDVAKARNEVLIEVPGSGRRRRLSVLNTRAEHDRLIALLSNLGQPVTCGFEATGNYHRPIAWRLLQAGFAVRLISSVGLARTREALHNGWDKNDPKDAQVMLHMIRIGASQVYHDPLAAGINDVQELSKTHDAVSRAKTEVLHRILTHYLPLYFPEVDRFRHNSRSDWFFAFLDRFPTPACITALSKEAFIAAAWDVVGRKVAKAQLFGDIYETAHSSIGLPVPPDAPAVSMFRLVIGEARGLIQQRDAIEATADALLTDSSDYKLLRRIPGIGPINALTILAEAGDLRRFSHHRQFLKFCGLDLATQQSGTFRGQTKLSKYGNARLRRTLWLAGQVAIRQRENGFRDKFERYIARDRHNADLRRKALTAITAKMARVVHAVIKTGADYRPFVEGPVPGGRTPLSRAVRA

SEQ ID NO: 214955 - protein, 311 aa, unidentified
MTETTIGIDISKATLDVHRLSDDTAAQFGNDKAGFRALKAWLKGCDIARIVYEPTGPYHRDFEIALEAGFPLVKVNPLQARRFAQSLGTRAKTDSVDARMLAMMGAAFSLEPQPPISAKQRELKELHVARLALIKDRARTLNRAKILTLALLKRHSKARLKQLGTQIAQVDEEIRIRLQNSPETVRATEIICSIPGLSKISAAALLIEMPELGTLSKKQAAGLAGLAPMTRQSGQWRGKSFIQGGRKLLRDALYMPALVAMRHNPDLKAKYNALIKAGKPAKVALVALMRKLIILANTLIREDRKWEKTRP

SEQ ID NO: 214956 - protein, 343 aa, unidentified
MQTVTTIGLDIAKSVFQVHGVDAAGQVVIRRQLKRRYVLAFFQKLSPCLVGVEACASSHYWSRELQALGHSVRLMPPAYVKPYVKRQKNDMADAEAICEAVTRANMRFVPTKTPEQQSGLMLHRTRHLFIRQRTAVINAMRAHLAEFGIVAPVGRKGVEELLRIVADRNDERVPDVVRACLSALGTQLLGLKERILEFDRMIIAWHRHNETSRRLHYIPGVGPLLATALVANVADPGAFRSGRNFSAWIGLVPKQHSSGGKDRLGSISKQGDRYLRSLFVAGALSVIRYAKAHGTKHRPWLTALLARRPAKVAAIALANKLARMAWAMMARGERYRTPVALAA

SEQ ID NO: 214957 - protein, 337 aa, unidentified
MRSIGVDLHSNSLTACYLNEDKSEQLKTLSLKELQTFKESLLADDEVAVEATGNVRWFVEQIRPLVWRVVIVNPSKFEVIRKSVKKTDRHDAGALAQFLNKDLLPESRLKDKTAAQMESLCQTRQKLVELRTTLINKVHALHRARGIESKKSEFGSEKGLKAVLEREWDVLERVELEIIISQLRSLEENIKKLEKQITEHGRQMEGHRNLTSIKGIGDKSAAILLSVIGNVKDFADEEKLASYFGIVPRVSNSNETVHHGRITKRGSKLGRTTLVQCTLVAIKYSEYLKSYYTRMKTKKGSGKAIIATAHKFLGIIYRTLKNNWVFADFPKYVLAED

SEQ ID NO: 214958 - protein, 448 aa, unidentified
MVKAEDKECCKKPVFKTLRRIAACLLPLPKGANRLLPVASSNYGLDTGVSMAKNKGRYEQLNIKFMEQATLTQNNIRIGASGTNSDQLLYIGVDVHKDKHTAVALDCFGEILLEKEIDNTKKGFEQLMSVINETAKGRGLTPLFGLEDSQNYGLRLGYSLCKQGCAVKIVSPILVSGFRKYETHPEKSDLLDALGAAKVLIQRTDSLPNFSISKPQEIAKDIKEMVMDREFLIKEKTRIKNQLHRLLHRAHNTEYKEKFKNPFSVKALKYWSRYPVPKKNDNVFVNPDILKNQIRRKIKRIKEIKKDVEIIEQGLRALVDKTGQKIETMNGCGLVLAASLIAEIKDIQRFRSPSALAKYGGLCPREHSSGKKIRHIKTRAGNRRLNTTFHRIALSQIGIHGNERSKNYFNRKVAEGKSKSQALCCLKRRLVDVVFVMMKYKKEYQYPN

SEQ ID NO: 214959 - protein, 341 aa, unidentified
MSKVTVYVGLDYHKDSIQVCVLDPAGKVLMNRSCRNDAIEVARLVAAFGDDVRGAIEACAGAADLADELIGRHGWDLSLAHPGYVNRMKQTPDKSDFSDARVLADLIRVGYLPRVWLAPEEVRQLRSLVRYRQQLVNERRATKLRVTALLRDARVVEPGPGRWGRAWMAWLKATGALGAQARWVVDKHCANLDRLGREVAEVDARLKQVTAHDPVVARLQGCPGVGPVTACVLRAEIGRFDRFRTGKQLARYCGLSPRNASSGQRQADAGLVKAGNEFVRATVIEAAHRLIRYDDRWKALAVSLRAAGKPPCVVAAAVGNRWVRWLYHQVRGEPLAGRPAA

SEQ ID NO: 214960 - protein, 368 aa, unidentified
MNAVGIDVSKGKSTVAAMRPFGEVVLSPYEVSHTNEDLHDLAAMIKSLPGETRVVMEYTGCYHAPVTKVLCKAGIYVSVVNPLLVKDYGNNSLRRAKTDKKDAVKLANYALDRWLSLPRYYPDEDARLMLKTAYRQYEQVVGIQTMQKNNLISLLDSVFPAANRLFSSPPREDGHIKWVDFLERFWHCECVCGLSQKRFTECYRTWCRKQGYHFSEDKAHDIYSEACSHVSVMPKCEGTEFIIKQAIAQLQSTSAAVAALRKQMQALASTLPEYSVVIGMYGVGPVLGPQLMAEIGDVRRFHSKGALVAFAGLDAPAFQSGQLNVREPKHLEAWLAVTSQNTVPCYVCHSSELAGGRTRLPVHEPKAR

SEQ ID NO: 214961 - protein, 401 aa, unidentified
MSGGGQGLPRTLSEVVRFGLSARHVADRFEKPAGVDGLDAPTPAEAGSLGLDLSHLPEQSMDPIAIVGLDLAKRIFQVHGARADGSVALRKKLSRPQVLTFFAQLPTCIVAMEACASAHEWGRAIRELGHEVRLIPPIYVKPFIKRQKNDAADAEAIAEAASRPTMRFVAIKSEAQQARAMIFRTRDLLVRQRTQLINALRGHLAEHGIVAPQGATNVRQLALAIDDVATALDPLVADLSRLYLDQIRDLDARISELEKRVAQEAKRSGMTSRLMTMPGIGPITAMAIETFAPPMATFKRGRDFAAWLGLVPRQFSSGGKQVLGRVSKMGQRDIRRLLIIGAMTVIRWSIRKGAPAGSWLARMLPRKPRLVLAIALANKMARAAWAMLMKNESYRAPVPAA

SEQ ID NO: 214962 - protein, 374 aa, unidentified
MRYYRGVDWADQRQAVWVVDESGTKVAGRTVPHTVEGLSEWGRELDQWRAQGIELWAAIERPDGRVVDFLLDHDVVVYPVNPKALDRARDRFRQSGAKSDPFDARVLADFLRTDHAHLRALQPSSAAAQELKLLAEDYQRQIRQQTRLVNQLTTTLKAYYPRALEMAELTTALAQEFLEAYPTPEAVTALTERRWLRWARAHRLSEVRTRELWDSLQQPQLPVPAHVVRAKARLMLALVAQLKPVVAAVGDYREAIEGFFANMPAAQWVRTLPIGKHGIMAPTLWARLGDAPGRWESFRHLQAHAGAVPVTKRSGKQQRVVHFRFACDKALRYVVDHVAFLSLHSSAWARAYYDQQRARGHSHRQRFGRWARSG

SEQ ID NO: 214963 - protein, 348 aa, unidentified
MAHFVGLDVSVKETSVCVVDDAGKVVLEQKVPTEPSDIIALLTSLGATYGRIGIEAGPLSQWLVNALTAADLPVICVETRHMKALLTAQQINKTDRNDARGIAQMMRVGLFKPVHVKTLVAQEQRMLLTSRKLLQRKLLDVESDLRGTLRNFGLKVGVVSGGRYEARIRELVVGFPRLAAIVEPLLSVRRVMRQQLAVLHKMLLDTVRDDPVCRRLMTAPGVGAVVALTYRATVDQPQRFAHSRAVGAHVGLTPKRYQSGETDYDGGVSKCGDALLRTMLYEAAQVLLTHGSKWSWLKAWGMRVAQRRGIRRAIVAVARRLAVVLHRMWVDGSEFRWSKDSAAAPTVA

SEQ ID NO: 214964 - protein, 424 aa, unidentified
MRSIGLDVGRQFAEAAAIEPGGEVHRLGRITASPAGLRAFAAGLGPNDAVVLEATANTWAIAELLAEHAGRVVVSNPLRTRAIAAAKTKTDQIDAATLAQLLAADYLPEVWQPDAATQALRRLVAHRAGLVRGRTGARNRVHAICARRLLSAPVSDLFGVAGRAWLDKLVLEPDERLALDAQMRLLATLEVEIDAAERAIAAHVLDDRRMRHLLTIPGVGLATAASLVAVIGDVGRFPRPHKLVSYLGLDPRVRQSGARPAFTGHISRAGQAHARGLLVEAAHAAVKVPGPLRGFFVRTRSRRGTGVAIVAVARKLTVLAWHLLTDDVDYRWAPAVRSAEKLRRLELLGGASKRFDLRGRREGVKARRTAELVRERVVLEQAEAAYVALVAARRGARKKDAAATNGERLDGPALNGPGPAVRRS

SEQ ID NO: 214965 - protein, 370 aa, unidentified
MGKSVLHVGLDVHKMSVDVAIAESGPAGEVRFYGRIGGDLEALDKVTRKLQAQGAELRFAYEAGPCGYQVYRHLTARGLECLVAAPALIPRRPGDRLKNDRRDALALARLLRAGELTPIKVPDEDDEAMRDLTRAREDAICVERRARQRTVAFLLRHGRVYQGKTTWGRGHWAWLLQQVMDHPAQQIVLQEYLDAVREASARVLRLTGQIRDLVPQWRQAPFVAAYQALRGVSLIVAATVVAEVGDLDRFNNPKELMAYLGLVPSEHSSGASVRRGRITKTGNSHARRVLVEAAWAYRMQARVTRHLLKRQEGLPERVRQLAWKAQLWLCTRYRRLLARGKARQTIVIALARELAAFLWAIGRAVAQATA

SEQ ID NO: 214966 - protein, 444 aa, unidentified
MAMRKRDDEVFPNAAGIDIGASSHWVAVPRHLAEQAGCEPVREVGAMTDDLNALADWLLALGVDTVALESTGVYWIPMYEVLEQRGLKVWLVDARQMKYVPGRKSDVQDCQWLQKLMSLGLLRAAWRPDGEVCVVRAVARQREVLITDQATWVQRMQKALVQMNIQLTEVLGDVMGATGQAIIRAIVAGERDPKILARHRHSRVKASAEAVTKALTGNWRDEHLFVLGQALAMYDDIARRLNECDAKLQALLGERGKARVDLGRAPKAGSKSRVEFDVRQSLANWAGVDLTRINGLGVTVVMKLLTEIGPDVSRFATVKHFCSWLGLCPGTKISGGKVLSSGTKRSANRARQALKMAAMSLSRSDSALGAFYRRLSGRMDKPRANTATAHKLARMVYFMLTRGEQFVDQGQQRYEDQQRQRSIAALKRRAAALGFQLNPMTVAA

SEQ ID NO: 214967 - protein, 370 aa, unidentified
MLDTTTFVGLDVHARSIKAVSLDVMTGEVRAATFGYDAGAVAGWVRSVDPKAKCVYESGVTGFDLQKRLSGLGVDCVVGAVSKMIKPSADRRRKNDRNDAEFLARMLSVGNVVEVWVPDDECEAARDLTRALEDARDDLSRSKQRLSKFLLRHGLVFDERTPTGRRKGNWTRAHWSWIESIRFAEGADNDVLAYYVDAVRRAAEEKARLEGLVEAEARKPRWRRRVDSLRCLKGVDTATAADLVFEAGEFSRFRNARSFAAWVGLTPSEHSSGESDRRGAITKAGNKHLRKALVEAAWHYLTCSGRPKEPARGQAPDRVARRHAAKGVRRLAERREALLARGVHGNKANVATARVLACWVWAVGLMAEEA

SEQ ID NO: 214968 - protein, 342 aa, unidentified
MTIITLGIDLAKQVFALHGVDAEGKAVLVKPRVSREQLSDTIAQLPPCLIGMEACTGAHHWARLFSQYGHTVKLIAPKFVTPYRMAGKRGKNDANDAAAICEAVTRPHMRFVPIKDEQQQSVLCLHRVRQGLIEERTASYNRLRGLIAEFGIVLPQKVERLRHEIGAHLDHLPTLVKQCVMDLLQHTDTLSTHIDAYDKLIQSAAKQDERSKLLMQLPGIGPTTASALVASIGAGHDFKNGRQLAAWLGLTPGQYSSGGKTRLGRITKAGDSYLRSLLVLGARSVLNSRQDKKDGFSRWARNLQERRGYWKAIIAIAAKNARLIWAVLHYGEAFKAPSMTVV

SEQ ID NO: 214969 - protein, 434 aa, unidentified
MTDPHSTASPRILVAIDVAKAKHDVLVELSDGRRRKMVVRNRRDDFQRLVAYLMSLDGTCEIALEPTADYHRALAYFLGSHGLQLRLVSSIAVARTREALHNSWDKNDPKDAQVILHLLRNGTTQCFYDPVLEQTNDLQELSKTHHQVSLRKTRLQHSLMNHYLPLYFPEAERFLCTTRAGWFARLLIAFPTPATVVALQEAEFVSTAAGLLRTKHSKEAVLRSFYAMAKESIGIPVPLESQAVATFRLLLGEHLELCRKREALERTAHTLLKERLDYQILRSVPGIGPIIALTVLAEAGDLNRFGHERQFLKFCGLDLSTAQSGAYRGRTQLSKRGNARLRAALWMAATVATRMTENTLRKKFDRYVESDPTNSDLKRKAYTACAAKMARTVYGLIKHQQHYRAYHEDAVPTPDGRTRSHGPLRHAAQAAVTS

SEQ ID NO: 214970 - protein, 430 aa, unidentified
MLLFLFLKGGFNLRLVYPVCCGVDVHKKTIVATIVTTDKNNVSTYLQKTFSTINSDLERFHDWLKENNCYHVCMESTGKYWIPIFNVLESDIHVILTHPKYVKAIKGKKTDKKDSKWIADLFKFDMVRNSFIPPKDIRALREITRYRFKLVCMRSSEKNRIQNSMTVSNIAIANVLSDPFGKTATQIMEYVLNSNTFDEKECSTLIKGKAKKKSAEIIESIKGFNLGSDQRFKMSKARDHLEYLEQLICDTEIELYARIQPHLQSVKHLATLPGITELSASLILAEIGTDMKNFESSKHLTSWAGLAPTNNESAGKKKSVRISHAGQYLKPLLVQCALAAVRSKKEPYFAIKYNRIKNRRGHKKAIIAIARMMLTAIYHMLLTGAKFNPIDYKELINPNPQPKKVELTVETALQYLASQGFNVSNVTLTP

SEQ ID NO: 214971 - protein, 372 aa, unidentified
MEKFSKYVGLDVHKDTIAVAIAAEDSEVRFYGEIANNPTAIIKLVKLLSKEGELVSFCYEAGGCGYKIYRQLTAMGKDCIVVAPSLIPRKAGERVKTDRRDSINLARLYRAGELTPVWVPEDEQEALRDLTRAREDMKHFERQAKQRLLAFLLRHGWVYSGKARWTHAHYRWMETVNFDRQAQQIVFQEYKDIVNSFGTRVEEIENQMQIHAKESLSWPVIESLMSLRGVNFITAFTLIAEIGDLQRFASAPKLMAYLGLVPSERSSGNSVRRGGITKTGNSHVRRVLIEAAWTYRFAARRTPIIQRRMDKVPTAIQEISWSAQKRLCQRYKTLQTNGKLKVQVCTAVARELTGFIWAIGQATPMMKNTPTN

SEQ ID NO: 214972 - protein, 320 aa, unidentified
MTILTSPTVIGIDVAKVEIIAYREDEKTTETVNNDRETLGRWLKALPAQSSIALEATSIYHLDTVELAHEMGHRVYVVDAYRLSHYRESIGQRAKTDPCDARLLARYLSSEQERLRLWSPPPQAYKVLKSLLHRRAELINVRVGITLSWSSEPLLKDELARQLKSFKQAEQAIQKLLHKVSKEAGITENIKRCKAIEGIGELTATGLATAFMRGHFANGDAFIAFLGMDLRAKDSGKKNGPRHLSKKGDTEVRRLAHNAAMAACRSPAWKPFYESYLARGLAKTQALVILARKLCRVAFALMKNQSEYQPNLRLQGSPAT

SEQ ID NO: 214973 - protein, 382 aa, unidentified
MDTAATCSFEYTLERVLYMAIELDNNRWKLGFTTGFGQRPRERDVPARDTATLQREIRAAKRRFHLPADCPVLSCYEAGREGFWLHRYLIHHGINSLIVDAGSMESRKRRRRAKTDRIDMEKLLRMLIRYHAGDEDVWSVIRIPSTGAEDRRHLHRDRWTLSGERNKHSNRIKGLLASQGISLFVNGNLPEKIDQVRTWDGSPLPPGLKDRLLREHERFRMVEQQMKAIEQEQRQAIRNPDHPSVTMVRDLMRLKSIHIHTAWPLAMELFSWRQFQNGREIGALVGLEPVTHQSGETSREKGLSKCGNARLRSLAVEFAWQWLIHQPDSELSLWYEERFGKGSSRVRKIGIVALARKLLIALWRYLETGEIPKGAVLKAASV

SEQ ID NO: 214974 - protein, 340 aa, unidentified
MNITTIGIDLAKTTFSLHGTDDRGQICLRKTVSRKKLLLTLANLPPCLIGMEACSGAHYWAREIRKLGHDPRIMAPKFVIPYRKGGKNDNNDAAAICEAVTRPDMRFVPVKSAEQQAVLSLHRVRQGLIQHRTALINQLRGLLSEFGLIIPKGRYQTHEHIPSILEDAENGLPDLARQLIHDVWQRYQVTREQVLEADRSLTALVRESAQAQRLMTIPGVGEQVATAIVASVEPQQFDNGRQLAAWIGLTPRQYTTGGVIRLGRITKRGDKYLRMCLIHGARAVIANLRDKQDRTSCWIRELIARRGYKRAIVALAARNARLIWTLMVKQEHYRAMPVTA

SEQ ID NO: 214975 - protein, 402 aa, unidentified
MQEPSVDRGYAVFLGLDVGKGEHHATAIDPDGHRLHDRPLPQDEHALRALFEQLSGHGPVLVVVDQPASIGALPVAVARDVGVDVAYLPGLAMRRIADLHPGNAKTDARDAYVIAEAARTLPHALRRVDTGDEALADLDVIVGFDDDLAAEVTRVTNRIHGLLTQIHPALERAIGGKLHHKAILELLHRYGGPTGLRTAGKKRIANVVRPRAPRSHHAIVEAVMAALDEQSVTVPGTRAAELVLPQLADQLTSLLAQREQAATQVEEMLDAHPLAAVLTSMPGIGVRTGARILLEVGDGTTFPTPGHLAAYAGLAPVTRRSGSSIRGEHPSRGGNKNLKRAMFLSAFAALSDPTSRAYYDRKRTQGKKHNAALICLARRRCDVIYAMLRDGTPYQPRPASAA

SEQ ID NO: 214976 - protein, 356 aa, unidentified
MESMPAPSAPVTVGVDTHLETHVAAVVDQTGRLLGTQGFSASTRGYVALVTWAERFGPVARVGVEGTGTFGAGLARFVRAYGLQVVEVARPDRSTRRQHGKSDPIDAQAAARATLAGVATVTPKTREGQVEMIRVLRVARRGAMKARVAAAEQLYGVVCSAPEELRQPLLGLTTKALVRACAALRPGPLTSTTAATKTTLRTLARRWQQLQAELDQLDLQLQELVTSAAPALLALPGVGVETAGQLLVTAGDNPQRLRSEAAFAHLCGAAPIPASSGRTDRHRLNRGGDRRANNALWRIALVRMRCHPPTRAYVERRTKQGLSKLDILRCLKRYIAREIYQHLTSPPPTAATACPK

SEQ ID NO: 214977 - protein, 325 aa, unidentified
MNAAEKVVLRKKLRRKEMVAFFKALAPTVIGIEACGAAHYLARLLGSFGHEVKLIAPQLVKPYVKRGKNDGADAEALCEAMSRPSMRFVPLKTAEQQAALMMVGLRDRLIRNCTQLSNAIRGYAAEFGFSAAKGKAHLVPLLERIQADKSVPVLARELFTAQAEEYARLQAQIDAVDAKLLAWHKADESSRRLVKIPGVGPIGAVLLLLKTPAPELFRSGRQFAAWIGLTPKDHSTAGKVRLGGITRAGDEALRSVLVVGATSVIQHVRRGGRGSPWIVNLLKRKPPKLAAVALANKMARVAWKLMVTGERYAARSVSAALANAT

SEQ ID NO: 214978 - protein, 326 aa, unidentified
MANLEKKVIGVDVSLKMLTLNYKDSEGVIITRNIPNLKKDILGNLNFFDKEEYKIIVEATGAYSSKILYFSYELGFEVSMVNPVSIKRYGELKNHISKTDAEDSRLIREYGEQVEFRPYTPKSKTLEYLDQELNLWHDLEQAKKKYGLKLKALQQKALCSKETIKHYERLIRNHDSEIEKVMSRMSRLQDEELKRDVDLLSSISGIGEKTALLLLVATNGFKNFANAKQISKYFGVAPRLYESGTKKKSLGKCRTTKKYVRSILYVCSWTAMRFNSQCRELYERILSKNKSKKVALIAVCNKLLRQCFGIMRNKIPYQKNYLQIGN

SEQ ID NO: 214979 - protein, 409 aa, unidentified
MLKIVYPNCCGIDVHKTFVVAVIAITNNQGITEYHRKHFSTFTNGLTQLRDWLEYYSCFDVCMESTGKYWIPVFNILEEQTNVCLAHPKYVKAIRGKKTDKKDAQWIADLFKYDLVASSFIPPLKIRQLRDLFRYRMKLTQLQVGEKNRYQNCLTWSNLQIASVVSDVFGKSAQAIIKSILDNPQDKPNIEQLVHKRMKNKVQDLEIAMEGALTPEQAEKIRVIKAHYDALAICKEDLEQMIRELGQDYQHQVKLIQTVPGFKEDLSALRIISEIGCDMTVFDSAAKLCSWAGLVPANNESAGKKFSTRISKGGKYLKPFLVQVANAVVKSDKHPELRNKYLKLKKRRGHRKAISAICRRLLVSVYQVLRKQEDYNPVLQGLTEIRNPDKTMSVQDAVRFAQQHGFNVA

SEQ ID NO: 214980 - protein, 376 aa, unidentified
MEHNSEAFIGIDTSKLKNAVAIAEGGRDGEVRYLGEIDTTDGATRKLVAKLAAKYRKVTFCYEAGPTGYGLYRLIKSLGHECSVVAPSLVPKKPGDHVKTNRRDAVGLARNLRAGELNEVWVPDTRHEAMRDLSRAREAAVDDLKSKRQQILSLLLRLGLHYSGKKTWGKSHRNWLASLKLGQREQRIVLEELFGAERQAQERVDRLVDAIIEAVPEWSLAKIVTALMAVRGIDLVAAVTIMAELGDLSRFASPRELMGFLGLVPSESSTGDSVKRGGITKAGNRRARRILVEASWSYRYPPRIGRDKLAKVAAAPEPVRAIAWKAQTRLSSRFRELSKKGKRPTIVATAVARELCGFIWAIHRAVTGPGGQQLVF

SEQ ID NO: 214981 - protein, 344 aa, unidentified
MIWVGLDVHKGFSRMGMFDPASGAVQDLGTVRNEPCALEEKLSELPAPKTVVLEAGRSSYHMAGLLEAMAEQVWIVDPGEVRKLQRRVAKTDRRDAAALAWWAAKGVLTPQWRPDAELLDLRELTRGKTVLIRLSTQVRTRMRGLLARHGYECPHRDLLGERGQLWLDEVELEGHAGQMLAALGEILVVIQAKADEFERLVEQESSTHPVAHRLRTIPGIGPFLGLALAAEIGDINRFPSPPHLRGYSGLVPAVYQSGDKDARGPLTKTGNAWLRYAAVLATQRMAQMRHPDPTLKRIFLSVAFRHGRNPGKVAAARRLLDLVYHLLKEEEDYQAPIARAASTI

SEQ ID NO: 214982 - protein, 347 aa, unidentified
MEIIGIDVHKKESQVCILKSTGKHIEERIPTTAERFQRLFGWREAAQILIESSTESEWVARVLERMGHQVVVADPNFAPMYATRSKKVKTDRRDARTLAEACKLGAYRPAHRVSDKQWRVRSLLTLRETAVRTRTKFISVVRALLRHEGYRVPSGSAEHFVERVESLKLPAPLQDQVMPFVSLCVPINERIAQMDQAIEKITEDDPQVARLQTVPGVGPVTAAAYQAALDADPKRFRSAHQVEAYLGLVPRELSSGEKQHRGSITKAGHSRLRHLLVQGAWNILRYPNASTQALGLWAEGIVRRRGRNVAAVALARRMAGILFAMLRDETAYQPLKIHPPKQLPSAA

SEQ ID NO: 214983 - protein, 368 aa, unidentified
MLSIGIDVSKGKSTVCGMKPGGEIVYTPFEVQHTREGMSELVSLLRGSGEEVRVVLESTGSYHCPVVAALLENGIFVSVVNSLRMKRFCSQSIRRVKTDQIDAMQIALYGLAYWQELQPTRLPENTYRELQLLARQYYQMTSLLIKAKVDFNALCDQVLPGMQELMNDHAGRHKLSDFVLRYRHTTHILEMGETRFRKDYCKWAEKKGYRNHERMAALIFATAQNGIPVLPNAPSTQIVITEAIRVLHTVEASRDAILTQMQALAKTLPEYSLVREMPCIGDTLAPRLIAEIGDVRRFHSKRALIAYAGIDAPPYQSGKFCANNRHISKRGNRYLRKTGYEVMQSYVMHKPANDPICRLCFAILFFCR

SEQ ID NO: 214984 - protein, 361 aa, unidentified
MSGTMTYVGFDVHARSMHAAAIDVMTGELSRVRFGPGIQAPVDWLGTLVGPVRACYEAGPTGYGLYRAAVAAGVAMEVIAPGLTPRGRGDRVKTDRKDAELLARCLIAGSLTPVMVPSPAVEAARELVRAHDACRRDLMSARHRVSKMLLRHGRVYPEPSTWTQKHRRWLAAQQFEQPMSELTWADLIACVDGLSARKQTLAERIGELATDPAWWPTVSRLRAFRGIDTLTALAIHLELGADWARFEKPTRVGSWLGLTPSRQQSGESDRQGSITKTGSMLARRLLVESAWHYAREPRIGATLTNRQAGQPDHVLAISNRAQQRLHHLYTSMRARGKAHNVTIVAVARELSCFLWAAATAP

SEQ ID NO: 214985 - protein, 409 aa, unidentified
MDRTKYLYVGMDIHKETHTAVLLNYLEEKLGEIKIKNTLQGFHKLEDYVLKQKGELIPIFGLEDVTHYGRTLSIFLLDREYPVKEVNPSLSYMERMSYASTRKNDTWDAQCISAVLMRRSHLLPDANPQDYYWTMRHLVNRRNALVKASTKLMQQFHEQIQTAYPNYKGFFKELDCKTSLTFFEHYPSPKYLEHVSEDELGAFLRVPSHNTCSTNRARKILDLVAQETSKERDYQFARDTVIQSITRQLRAYQREIKELERTEKQMYQKLDYQLETMPGIDIVTACALVGHIGDIERFSSSDKLANYAGVAPLRFSSAGKGKDVQNKSQGNRKLYSTLYFLAIQQIYLTNKGDPRNPVFRAYFERKVSEGKTKIQALLCIMRKLVKIIYSMMKQKTAYKLPEIEEKIAC

SEQ ID NO: 214986 - protein, 362 aa, unidentified
MGMKTHPQYFISKPRRSSEAGVTIGIDLGDIWSHYCTLNEDGEVVDRGRFRTNPSGVDKRFRDLEPARVAMETGTHSIWISEQIQELGHEVIVANVRELRAISHSDRKSDKVDAEKIARYARLDPEILRPISHRTVAQQETLTLIRARDVLVRLRTGAVNSVRGLAKPCGYRLPASSTLTFAKRCLAVMPPGLVQALGPLLQQIADMTVKIKQYDREIQKLTETTYSETQALIKVYGVGHLTALTFVLTLGNKQRFQRSRDVGCYLGLRPRRSQSGDSDPQLGITKAGNGYLRQLLVECANHVIGPHGKDSALRRWGLSLGARGGSHARRRAVVAVARKLAVLLHRIWITQEVYVPFYEVAA

SEQ ID NO: 214987 - protein, 408 aa, unidentified
MTVVGIDVSKGKSMVAAMKPGGELVAAPYEVRHSDIELSHLALDVLCMEPDTRVVMEATGRYHEPVAALLHSEGIFVSILNPLLIKQSGAGSLRKVKSDPKDALKIAKYGLDNWSTLLEYTPMEAIRQQLKLCARQCDLYNKNIVMLTNNLISLSDKTFPGVNELFSSPEKADGHLKWVDFYRSFWHCDCINRMSPDAFEERYKKWCKSKGYHFSTDAADALYAASCGPYTTLPRDNNAKLLVTVAADQLIALRENQSKLEAEMLNLCKQLPEYETVMAMYGVGKSTGPHLMAELGDVRRFPHRSSIVAFAGVDPGVVGSGKMQLSSVTTSKRGSPQLRKALFQVVSTYVKCKPENEAVYQFYAKKRDEGKPFFVCTTAAANKFLRIYYARVKECLNAVESATQVEEG

SEQ ID NO: 214988 - protein, 334 aa, unidentified
MENIALIGIDLGKNSFHIHCQDRRGKAVYRKKFTRPKLIEFLATCPATTIAMEACGGSHFMARKLAELGHFPKLISPQFVRPFVKSNKNDFVDAEAICEAASRPSMRFVQPRTESQQAMRALHRVRESLVQDKVKTTNQMHAFLLEFGISVPRGAAVISRLSTILEDNSLPLYLSQLLLKLQQHYHYLVEQIKDLESQLKRKLDEDEVGQRLLSIPCVGTLTASTISTEIGDGKQYASSRDFAAATGLVPRQYSTGGRTTLLGISKRGNKKIRTLLVQCARVFIQKLEHQSGKLADWIRELLCRKSNFVVTCALANKLARIAWALTARQQTYEA

SEQ ID NO: 214989 - protein, 351 aa, unidentified
MKKSITIGMDLGDKSHSICVMQDADKITECEVTNTAKAVEKFFKKYQEATVIIETGTHSPWISRLLGKLGMKVLVGNTRKLRAIWDSTNKSDVRDAEMLARIGRFDPQLLSPIQHRGEQAQMDLELIRGREVMVSARTDMVNHVRGAVKAMGHRIPKCSTDCFHRRAREALKDSQLLLVEEPILKMIELMTEKIHELDKRINIMARESYPETDRLQQVNGVGPLTSLAYVLTLEDGKRFQKSRDVGAFLGMTPRRDQSGETDKQLRISKAGNNELRRLLVGCSHYILGPFGPDCDLRRFGQRLMLRGGKNAKRRAVVAVARKLAVLLHRLWVSGTAYDPLWNTKVHKQAVA

SEQ ID NO: 214990 - protein, 445 aa, unidentified
MSPVHPDAAAIDVGATMHVAAVGPGRAAEPVRTFGTFTVDLHRLADWFAHCGVRTVAMESTGVYWIPVYEILEQRGFEVMLVNARDAKHVPGRKTDVSDAAWLQRLHEYGLLRGSFRPQGEIAALRAYLRQRERLLDVAAAHIQHMQKALTQMNLQIHHVVADITGVTGMRIIRAIVAGERDPDRLAAYRDRRCRASAETVRQALIGNDREEHLFALAQAVELYDVYQGKVAACDTRIEVVLERLRATSAKPAKPLPAARHNTRQPNAPAFAVREALWAVLGIDLTQIHGLGPYLALKLVGECGTDLSAWPSAKHFTSWLCLAPGNKISGGKVLSSRTRRSSSRVAALLRLAAVTVGRTETALGAFYRRLSARIGKAKAVTATARKIAVLFYNALRHGMDYTDPGASFYEERYRRRVLGNLQRRAKSLGYVLQEMAPAPTANSVS

SEQ ID NO: 214991 - protein, 391 aa, unidentified
MSMYFIGIDISKYKHDCCIISATDQKVISKFSIKNDKVGFEELITTFNSLSSPEDIRIGFESTAHYALNLELFLENAHHSFMEVNPVLIKEYKKSTTLRRTKTDSVDCESIARWLMTVEYKPHSKGFYHAYSLKSLTRLRDRLVRQRSFYLVKITNVLDHTFPEFKPFFHERLSKTALYLLENYGSAEKIARMNSASYEKLRSISRGKFSPQQFIRLKELAANTVGVNNSIFDVELNSLLTLYKSLVDEIKTLESEINRLVDEVHPHYMSIPGIGPISAAIIYAEYGDISNFSSPNQMLAFAGIEPSVHESGTEAYNGKMVKHGSSQLRYVLINCCLPLIRFDVTFATYYARKRSENKPHRVAITHVAKKLVRVIYALESQDIDFDPKKLR

SEQ ID NO: 214992 - protein, 341 aa, unidentified
MNSSKNVVGIDIAKRVFQLHWIDQETGEIVSLQLKREQFLDHFANRQKCLIGMEACGGAQHWARELGAMGHQVKLLPGKAVKGFVTGNKNDRHDARAIWTAVQQPHVKAVAIKTEEQQAILALHRMRSQLVKFRTAQINGLRGLLTEYGEAMPQGKAGVRKGIAEALARLADRLPAMVIDTLREQWARIGKMDEEIATIEQRIKLWLKNNDACKRIAEIPGVGPLTATAAVAIMGDAKAFKSGREFAAFAGLVPRQTGTGGRIKLLGISKRGDTYLRTLLIHGARSVLTHAKEPGPWVTELRQRRPLNVAVVALANKMARTIWAILAHERTYQREFVSQPV

SEQ ID NO: 214993 - protein, 358 aa, unidentified
MADKVTEAAVVGGVDTHKDLHVAAVVDQNNKVLGTQYFATTRQGYRQMLAWMTSFGALKRIGVECTGTYGSGLLRYLQNAGLEVLEVTAPDRMERRKRGKSDTIDAECAAHAAFSGIRTVTPKTRNGMIESLRVLKTCRKTAISARRVALQIIHSNIISAPDELREQLRNMTRMQLIRTLGSWRPDASEYRNVTNAYRISLKSLARRYLELHDEIADLDVMIAAIVDELAPELIKRNAIGYESAAQLLITAGDNPQRLRSESGFAALCGVSPVPVSSGKTSRYRLNRGGDRAANSALHIIAIGRLRTDDKMKEYVARRVAERHTKMEAIRCLKRYISHEVYTLLRNQNRRVNSIPIMA

SEQ ID NO: 214994 - protein, 422 aa, unidentified
MLGVGIDWAEEFHLVALGRPGEGVFDVARVEHDPRSLDTLIARIAQLEPDPAEVRVVLETSYGMLVERLLDAGYAVVPVNPDLVARRRGPAKKKDDAEDARIACLLALDRFERLRPLVPHGEAAAELRAIGRDDERASRDERRLLNRLRADLIATFPAALIIAGDDIGAPTFLRMLERWPTANALAAASPDELIVFARAGRHGWPDRFADRIHAALAADNFVARDWLVRAKTDTIRLLASQLLALGTQRRAWERRMGELLLGAPRTGRAKRPKDGDRGPAVPGGEIYLSFPGLGDRLAARVAGEIGDIANFDTPNGLQCYAGKAPVTRRSGKSELVVANRLACNGHLRDACQQWAFCSLRGSGWARQFYDTHRTRGKGHQAALRALANRWLEVLWHCLTRRVAYNEAVHVANRTHALTPTAA

SEQ ID NO: 214995 - protein, 347 aa, unidentified
MRFYTREHRHYCGIDLHARTMYLCVLNHAGEVLLEQNLRCDPTLLLRTLEPFREDLVVAVECIFTWYWLADLCARENISFVLGHALYMKAIHGGKAKNDRIDAHKIAALLRGGMIPQAYVYPPEMRSTRDLLRRRLYLVRKRGQLLAHIQNTHHQCNLPEPTRKIISKSNREGVAEKFSDPSVRKSVEVDFELVAHYDQLIRNLELFLVRTAKQHDPQAFHRLRSLPGVGKILAMTLLYEIHDIHRFPRVQDFASYARLVKCSKESAGKRLGTGGRKVGNVHLKWAFSEAAVLFLRNNPKGQALLAKLRRKHGKGKALSILAHKLGRATYHLLQKEIAFDMAKFLAA

SEQ ID NO: 214996 - protein, 340 aa, unidentified
MDEISIVGVDLAKQVFQIHGATADGRAVFRKKLSRPQFAKFMAALPPCIVAMEACGTAHYWGRELARLGHEIRLIPPVYVKPFVKRQKNDAADAEAIAEAVQRPNMRTVAVKSSAQQARAMLFRTRDLLVGQRTQLVNALRGHLAEHGIVLGKGIANVERLALRLEDDDLPDLVRHLGRIYLDQIAQLGAEIEKLDKRIVAAAKQNGEARRLQTMPGIGPVCAMAITAFAPDMREFRRGRDFAAWLGLVPRQHSSGGKQKLGRTSKMGQRDIRRLLIVGAMSIVHWRGRDGGRPGSWLARMLARKPRMLVAIALANKMARMVWAMLVREEDYRDPTGAVC

SEQ ID NO: 214997 - protein, 332 aa, unidentified
MKYKVFIGIDVSKLTIDAHLHGIGASKTFSNEEKGFASLLSWVKKYSKQSEPAEMIICFEHTGMYSIKLATYLNDLGIPFAMLPALQIKQSIGIRRGKNDQIDAQRIAEYAWLHRETIQATLLPAKSILKLQSLLTLRNRLVCDRGGYEATWKEQKKALEGKEHKEIFQIYKSLIVNLTVQVKKIEEQIKAVIESDESVKVNYQLLTSIKCVGPVMAANMIAYTHNFTRFSTWRKFACYVGTAPFEHQSGTSIKGRTRVSSLSNKQLKKLIHMVAISACAYNPEMKSYYKRRVSEGKNKMSTLNVIRNKIISRMFAVVNRGSGYVDLMKYAA

SEQ ID NO: 214998 - protein, 339 aa, unidentified
MKYSAIDLHSNNSVVVVTDEQDRVLAQKRLPNDLSVIVAFLAPHQSELVGVVVESTYNWYWLVDGLMAAGFAVKLANTAAVRTYDGLKHSGDEADARHLAQMLRLNILPTGYICPPAKRALRDLARRRLQLVRNRTLHILAVENQVTRQTGRNIRSNDVKRLTAEAVDGWKLPPDVATGIKANVAIIGVLNTEIDKLEFRLDAAIAATDEWKLINTVPGIGKTLARVILLEIGEIGRFDDVGCFASYARCVDSARMSNGKKKGEGNRKNGNKYLSWAFVEAAHFAARFYPEAKRFYQKKFAKTNGAVATKALAHKLARASYHVLKTGKSFEMQRCFAGM

SEQ ID NO: 214999 - protein, 468 aa, unidentified
MSKLSTRPTASTQIVKSQSFGSMSRIQPHAAGVDIGAHEIWCCVPAENDTQIIRPFGSYTVDLHAIADWFDQHGIVTVAMESTGVYWIPLFEVLELRGFQCCLISAHSIKRVPGRKTDILDCQWIQTLHSYGLLQASFRPQADLVALRTLLRHRAQLIQHRAPHIQHMQKTLLQMNIQLSQVLSDVTGETGQRIIRSIVAGERDPYKLAALRNYRCKKSEEEIAKALTGTWRQEHLFVLKQALALYDFYTLQLQDCDDQIESTYAVTRPDWPCDAPDDLPPRKPGSNSKNAPKHEQAIRRHLIRISGVDLVAVDGFSVSLAQTILSEIGTDMSKWPTVKHFCSWLGLAPKNDISGGKVLRSRTMKNKNRAAQAFRAAASSVTNADCAFGAFYRRKKSQLGPAQAIVATAHMIARTVYFMLKNKVSYTRISATSYDKRYRDQQIRYLKRKAAKLGFQLVPTQPPPRAVS

SEQ ID NO: 215000 - protein, 343 aa, unidentified
MEHYAGIDVSLELSSVCVVDAAGRIVREAKVASEPEALIAWFRGLDLGVSRVGLEAGPLSQWLFAAMRSAGLAVELLETRHVRDAFKAMPVKTDRKDARGIAQLMRLGWFRPVHCKSLPAQETRVLLTTRKLLQAKHHDVEMSLRGVLRGFGLKVGPTTPRTFPGRIRELVEGHPTLTVVAGALLAAREALGDQLRGLEKRLRDQAREDERARLLMTAPGVGVIVALTFAAAVDDPARFRSSKAVGAHFGLAPRKYQSGETDVTGRISKAGDGGVRTALYEAANVILTRPVKGSALKSWAARLANRAGMRKAKVALARKLAVVLHRMLADGTPFAAERAAAAA

SEQ ID NO: 215001 - protein, 391 aa, unidentified
MIFVGIDIAKDKHDCFITNTDGEVLFKSFTITNNLDGFDELYQKIESVMEDVSKVKVGLEATGHYSYNLLGYLLDKGLPTYVINPLHTNLYRKSLSLRQTKTDKVDAHTIASMLMSDVNLKSYSDTSYHNEELKSLTRYRFDKVKERAQLKQSISRLVCILFPELEKLVPTLHQNSVYELLYEFPGAKHVANAHLTRLSNLVETASKGHYTKDTAITFREVARTSIGSNMPAKSLELKHTIKLIRELDAEIEEIENEIKIIMDEINSPILSIPGISYRMGAMIIAEIGDFSKFDSPDKILAFAGMSPSTYQSGQLDNCYARMEKRGSRYLRYALYNATAYVCLWDPTFKAYLAKKRSEGKHYYVALSHATKKLIRVIYQLESSGQQYIKAN

SEQ ID NO: 215002 - protein, 312 aa, unidentified
MPLQIDPSFIGVDVAKPTLAIQFPDQVWSTTNTAAGHGAFVAKLRALAQPHVICEATGGYQHALVMALHQAGIAVSVINPRQVRDFARACGRLAKTDAIDASILRQYGEKLRPAADPVPAEGAAEFAELVRARQELVALITDETNRREHARLRTLVKLSQARQRQLEKQLAALDALIDAHLAARTTLATKAERLQQVAGVGRVSAFTVLALLPELGTLRDNQASALAGVAPLNHDSGQFRGQRHIHGGRSAVRRVLYMAALAATQHNSILKVFYLRLRQNGKPAKVALTAVMRKLIILMNRLLKNPQFNLVS

SEQ ID NO: 215003 - protein, 346 aa, unidentified
MERYVGLDVSLKSTAICVVDAKGKIVREGTVATDPEAIAAFIALHAPDAVRIGLESGATSTWLWTELKRLELPVVCIDARHAKAALKMQINKSDRNDAIGIARIMQAGWYKEVRVKSLDSHAIKALLTSRALLVKVKRDIENQIRGLLKNFGLVIGRAKQNIFTLRAGDLLEDRPELAAAIEPLLRAREAVGRQIVELDRKVRRLARASEPVRRLMTAPGVGPITALCFLATVDDPSRFARSRNVGAYLGLTTRRYASGEIDWTGRISKCGDAMLRSYLYEAANVLLTRVAKWSALKAWGVRLAKRSGLRKAKVAVARKLAVILHRMWFDGTDFNWSSKEAAQQVA

SEQ ID NO: 215004 - protein, 415 aa, unidentified
MEVLYPRCCGLDVHKETVAACLRIVVNGKVVKDVRTFATTTADLISLSVWLAENKCTHIAMEATGVYWKPVWHILSDGDFELVLANAAHVKNLPGRKTDVKDADWISDLLAHGLIRPSFVPDGPTQEMRTLLRTRKQLSREKSSHILRIQKTLEDANIKLDSVVTDIMGLSGRKMIEAMISGQTNPVKLARLADPRVKASQETLREALRGRVTRHHRFLLRLHLQQIDALDDAIVKIDREVEAGIAPFRTAVEQLSTIPGIKALGARAILSEIGIDMSRFATDANLVSWACICPRNDESAGKRRSSRIRKGSPWLKTTLVQCAWAAARTKGSYLQAQFHRIRARRGPKKAIVAVAASILTAIYHMLKDGTMYQDLGPNHFHRRDKERQKKRLVQRLADLGYAVELAPLTPAHVSP

SEQ ID NO: 215005 - protein, 410 aa, unidentified
MRKENIIYVGIDLHKETHTAVMLDCWNHKLGEITIENKPAEFHKLTRKVSRFVTEEKTAVYGLENAYGYGRTLAVWLLEKGFLVKDVNTALSYAQRKSVPMYQKSDSYDAEAVALVLINLLDKLPDAAPDDKYWTLSQLVNRRDNINIHQQRLKNQMHEQLCMAYPSYKKFFQDIGRPTALYFFHEYPSPVHLRGKTAEELAGELRPVSHNNCSVKRAEKILELVKSDGETCRDCQESRDIITRSLAYDLEHYRKQMEEVEAAIEAMLPEFGCTLITMPGIDIITAANILAEIGNIDRFPNAKKLAKFAGIAPINFSSAGKGKDVCPKQGNRRLQAIFYFLAIQMVQVAPSGTPRNALFREYFLKRLEEGKNKPQALICIARRLVNIVYGMLKNHTEYREPESKTGDETV

SEQ ID NO: 215006 - protein, 365 aa, unidentified
MKKIAYIGIDYHSNSLSIAVIIEGHKKIHEMIRLKNEDKVICKYMKKLSHDFDIKSCYEASCNGYVFQRKMATWGYHCDVIAPSLIPKKAGDRRKNDFRDARDLAQNYAAGMLSIVHPPNEEEESVRTLVRCRTSFKDDEKRVKYQINSLLLAQGLRWPKSKWTFSHKKWLREVKLSSRYTQQVLEEYLGHLNYLESRIAHLDGQIEEIARSEVYAPSVNKLRAFKGIGTLAAMILISEITDFRRFSNPRALMAFLGLIPSENSSGDKRVDGGITKSGNSRCRTQLIESVQHYVRSPQISLKMKSDLSQVDALTANTAIKCLKRLNKRYWALTMKGKIRQVAITAIAREFIGFIWAVMQPQHLSA

SEQ ID NO: 215007 - protein, 405 aa, unidentified
MPEPPNIQRWIGLDIHKAYFVAVGVDAKKQTVFGPHKIPNDQHETWSARHLQPSDAIVMEMTTNTYLFYDTLVPQVGSVIAVHPPNVRLVTGVKVKTDNKAALALAQLHAAGLLTGVWIPPVEVRELRAVIAQRAKMVRMATQAKNRLSSLLIRIHRERPAQPFKPEQRSWWESLPLAPIEKSVLRSNLDTLEFAEKQVKAIEEVLRQEAARDERVPLLTQLPGIAMLNALTILAAIGPIERFEDAKHLVGYAGLGASVHDSGQMHATGHITKAGRRDLRYTMVEAANVAVCHHPFWKKEFVRLEFRLGRSKAIVAIARHLLVAVWHILESETVDRHADLTSVAASMLQLAYQIKKRNLPKGVSGRAFAREQLDRLGIGQDLAAVPAGKKKLNLPPSRLLLPEKK

SEQ ID NO: 215008 - protein, 410 aa, unidentified
MNVIYERCCGMDVHKKTIVACVLSGRKKETRTFSTMTASLLSLVDWLKSVDCQCVAMEATGSYWKPIYNLLEMEEMPALVVNAQHIKAVPGRKTDVKDSEWIADLLRHGLLNGSFIPKREQRELKELVRYRRSMVQERARELNRIQKVLEGANIKLSSVVSEIDGKSSRDMLAMLAAGCNDAKAMANQARRQMRKKIPQLEEALHGFMGEHQRLMLDIMLKHIDFLENHVLSLDKEIREKMEPVRDQTFLVDSIPGIGERSAQVIIAEIGTNMDQFPSAAHLASWAGICPGNNESAGKRKSGKTRKGSDILKATLIECAKVAGHLKNTYFSAQYSRIAARRGKNRATVAVAHTILTIVYHMLKANAPYQELGPDFFERRRKTEIVKKSVKRLEAFGYTVTIDQQIMTNTA

SEQ ID NO: 215009 - protein, 336 aa, unidentified
MVQIYGIDLGMSSFDVSFLSESGSVRHLSGVKNTVHGISKFLLSLPSSAVLCAEHTGVYGDLLLRLCTLNRTCLCFVPGYQIKHSLGLQRGKSDPLDACRIREYAERFYDLLRPCFYPGEEMSELQELYRTRSLLVDSRKRLDTLNIGDNCKSSVSLAADHARRAVLAELNTQISGLDHEIEALIQNSSEFSRNYQILTSIVGVGPVTSCELIIKTENFRKLDTAKKCAAYAGIAPYPKESGKMKCGHKISPMGDKQLKTLLFLCARSAKEHNKEIRLYFLKKHKVEKKHFFVAMNNIANKLLRLIYSLIQKQQTYDRDYIQRDPRCVVISDTNKC

SEQ ID NO: 215010 - protein, 350 aa, unidentified
MLIIGCDYHPSFQQIAFVDTNSGEYGERRLEHMEEAGQFYRDLRARGIEARIGMEASGYTRWFEQLIAEMSFELWIGDAAAISRKRVRKQKTDKQDAELLLTLLLENRFPRIWVANREERDLRQLLWHRHRLVQMQTRLRNQLHAVALNEGVRLKKRLWRPKGRAQMEALPLMPWASRRRHDLLGLLDQVDATIAELTAAIEQEAEKRPEVVRLMTHPGVGALTALAFVLIIGTPDRFARSKQLSSYLGLVPTEESSGERRHLGHISKQGSTLLRFLLVAAAQVAARSDPDWKRRYLHLAMRRERAIAKIAMARVLAVRLYWMWRHGWHYAQLPKLGSHAGQPGNRHGLH

SEQ ID NO: 215011 - protein, 406 aa, unidentified
MKPTYFLGIDAAKHKMRATLSNRSEHVLFEKDLSVEATGLRQLLAAIKRQLNDPEQLLVLIEATGLLHLNWSAALTKAGYAVAVINPLIARRLYTLQNSIRDNKSDPIDARGLCTIGLLHGEKLLVHYRFSLRPEQFTLQRAQSVRKALRSALSNLKKTYQSLMDLSFPELGGLLQLDGVGIRQLLIQAPTPAAIAGKRLSTLEKNWMVRPKAAALKALAADSMADPDLAAASGPALVALLEAVAAMEARLHALDQQIAELACTSVDPQTKALIETIPGFGPVNAAKTLAWLPTEILHSGSNRKVAARLQAFMGNDPRLRQSGQWKGHTKMSKRGVEMLRTAFFQSAFSAAHNDPELRTYYQCKRAQGKTHEVALSHLMRILTRRLVAVLRSGKPYQSHYNLKNAA

SEQ ID NO: 215012 - protein, 353 aa, unidentified
MRRPKDKLIAGLDLHSNNVMIGVINQDGKRVAHHKVDCDLAEVVQFLKPFKAQLQSMAVESTFNWYWLVDGLRAQGYPIDLANPAKIEQYSGLKHADDKDDAFHLADLQRLNILPKAHVYDPELRPVRDLLRRRTNLVHQHTALLLSFKSLYVRTTGQSLELSRAKQMEPKQAPKLYEHPANQLIAQVQAEHIQGLAKSISRIEKAVLACAREIPLYEKLLTLPGIGRILGMTITMEAGDISRFKTAGDFASYCRMVDAKRLSNGKCKAQNNQKCGNKYLAWAFVEAANFARRYNERCRRWYDRKAAKAGKIIATKALGCKLAKAAWHVMAQQCNYDEQRMFPELATQTMKAT

SEQ ID NO: 215013 - protein, 349 aa, unidentified
MTMVGGFDVHRKQITFDYVDDDGLVHSGEIRPATRKTLRGWLGKHCASGDAEFALEGCTGWRYVVEELAMAGVVAHLGDPAEIAGLRGPKKRAKTDRADARLLRTLLVEGRFPESWIPPAHVVEVRTLGRLYCALMEERRAWQQRIHAQLFHQGCPPVTALLSVAGRDALAGAELSGVGRQYVDTALRRIDELGAEIVPLRAQLVNFARHQQGCQALQARHYGIGWLCAAIIWAEIGDARRFSSSDQLVRFAGMDVTVYSSDAKRSPGHLSRQGSPELRWATFEAAKSAARRGSPDYGYYHQLAVKHDGHNGKNPTLAVERKILRRCYHTLRELGDAALSPPQPVREAA

SEQ ID NO: 215014 - protein, 326 aa, unidentified
MHKSKEFIGIDISKKVFDVWSEKWGYKQFKNTSEGFSAFLLLLTSQSWCVMEFTGSYYHQLALFLHDNDVAVSVVNPLVIKRFIQMKLQHNKTDKSDARMIVRYAKEQPLSLWKPQPQYIRDCKDLHTVISLYHKQRTALKNKLHSFVDQGLKGKVVTSVKRHIRQLDAEIKLLESQLETIIKTHEQELLSNLLSIPGLGRKTAILLIVCTNGFKTFENSRQLSAFFGLSPVIRASGSSVRGKTRISKRGNPMVRNHLFMCSFTAYSKNHQCKALYERIVNKGKSKKLALIAVTNKLLAQSLAIAKSGVRYDPDFKSVNPSNNFSF

SEQ ID NO: 215015 - protein, 374 aa, unidentified
MTKIIRIGVDTSKSIFVLHGVDSAERPVFCKQLRRRQFLEFFAKLEATRVGLEACGAAHYWARELRKLGHEVVLLPPQYVKPYVKRNKNDSADAEAICEAMSRPTMRFVAVKTAEQQAALMLAGTRDALIRRRTQLTNTIRGYAAEFGLTAAKGLDKIEPLLARIAAAEDVPDLTKELFAIYGQEYARLKVQLAEIEAKQMAWHKHNEASRRLAEVPGVGPIGGAMAVMKVADPKAFRCGRDFAAWIGLTPKDHSTAGKTRLGVITRAGDEALRSVLIAGATSVIQQARKRRGQHSRWLLELIGRKPPKLAAVALANKNARIIWKLLVSGERYDAARAAGRLGRLAESAGHDAPLRRAPRSPASQIAAIAMIEV

SEQ ID NO: 215016 - protein, 338 aa, unidentified
MEVIRQNVGIDIAKDSFVATFTILQKGQIIKHVKTKKFKNSKDGIDEFFSWSTELRKDGSEVNFTMEATGIYYENLAYYLFDRDVTVHVLLPNKAKKFAESLNIKSKTDKIDSRVLGQMGVERVLEKWELSSKIYRHLRTLSRERQQLIKERTIIKNQLHAEEHTGDPIKTTITRMKNRIKYLDKQIDSIERELEAVVSKDDYVFGKVKKITTTPGLAFKTVVAVIAETQGFANISNIRQLNSFAGYDVSIKESGKWKGKARISKKGNSHIRQAMYMPSWSSVKYSETYKSFYNRLNEKKECGLIAGTAVQRKLLGLIYTLWKNDTEYIENYEMKKVS

SEQ ID NO: 215017 - protein, 402 aa, unidentified
MNCVGIDVSKGKSMIAVMRPFGEVVISPFEVQHTASELSELAKLLKSLDGETRVVMESTGNYHTPVAWLLHDAGLYVSVVNAMLVHDYGNNSLRRAKTDKKDAVKLANYGLDHWLTLPRYVPEEDTRLLLKNCYRQYQQYSKVQTMLKNNLISLLDAVFPEVNRLFNSSPRADGSEKWVDFVSTFWHCRCVSTLSLKSFSARYLKWCRKHGYYFSQEKAFEIHSKAQSCISVMPRNETTKLLVQQAIAQLKATSAALAALKQEMQSLAAALPEYPVVMEMFGVGSTLGPQLMAEIGDVRRFHSKKALVAFAGIDAPPCQSGQMDIHSRSISKRGSAALRRTLFLVMGIYLQSAPLDEPVYQFMDKKRSEGKPYKVYMMASANKFLRIYYASVTAYLNTLARI

SEQ ID NO: 215018 - protein, 401 aa, unidentified
MASVRENSQRIKRFRELKATLRTDRTRLLVGIDVAQAEHVVHLRHAHTRVVTPKLVIPNTTRGFAQLWARVQQAQQTTGGREVVVGLEPTGTYHQAVATFLEQQGADVVLISSSVAHWNRRTQDGTWDKNDRKDAANCADLLEQGKVLFYSQPTGPLADLRRLVKVLRRARAELASCKARWRTSLRPALAPMGDALPQRLWAELPGVLQAWERAAPGRPAVPKGRLPLGLATACADLGTQVTAVQARIAALEATLTPVAERLPAYALLRTIPGIGPTVGAILVAEIGDIAWYTAFSQLRKLAGLDIVRVQSGQFTGQHRISKGGRSLLRWACYQAAVGLVRTTAGQHRFAAAKAKRRGDRFGGFKAMVELAAKQLRVVWGVWRSGQPYDPRRAGGVRRPRR

SEQ ID NO: 215019 - protein, 445 aa, unidentified
MEIVNPQAAGIDVGSRSHWVAVGQSEQDVQEYGVFNDDLFAMADWLELHKIKTIAMESTGTYWQNLYAVLLSRGFQVILCNGKFTKNIKGKKTDVKDCQWIQKLHSLGLLSGSFLPDGDTEQLRTYCRHRANLIHSSASTSKKMQKYLRLLNLRLDVVVKDICGLTGLAIIAAICDGEKDPQRLASLRHGNCRKSEEEIAKALHSNNREDYLFALKQELDTYGYLQEKIAQCDLEIEKKLNEIIGNDQNKKQHYIDPKVHKRINKNTPKNIDLNLKSYQMFEGTDLLAIEGMSYSTVLALMSEVGIEGIKKFTTAKHFASWLRLAPNNKISGGKVLSSRVPKGSNRLKIALRNAANAIGNLKESTPLRDFFQRINFRKGRVSAISATARKLAVIIWNMIVKGTPYINPEGYLFLDQKRKLGLVKRIKKQIDKFALTDKDLGFTND

SEQ ID NO: 215020 - protein, 342 aa, unidentified
MVEFSKVRTFVGVDAHGEHCNLKALSRQGRGVLEVEVSTRAAELCAAVKPLPGPVWVMLESSSVAPFVAWALEPVVDRVIVCETRENRWIAKSEDKSDPADADRLARLLRMGEFKAVHVPKRERQELRELVLLYDKAVGDTVRSKSRLKAKFRQHGLAVSGSAVYSEAGRAVWLQKVRRRTVRFMLETLYAKLDAAEEIQERLARRLSAMLGHRREYRRLKTIPGIGEVVASILVGVIDDPGRFPDKRKLWKYAGLSVRGPWTGDPRQAKTGGSCTGNRLLKYAAMVAAERAAIGDNHFARRYREMLARGLDRIMALKTTARSILATALAMWKSGTEYRDAG

SEQ ID NO: 215021 - protein, 407 aa, unidentified
MEVLHPRCAGLDVHKDTVVACVRVSQGSSVRREVRTFGTTTPQILVLVEWLQAEAVTHVALEATGVYWKPVWHLLAGHFDLILANARQIKNVPGRKSDVRDAEWIADLLAHGLIRSSFVPPAPVQELRDLTRTRKQLVRERGQHVQRLQKVLEDANLKLASVITDLLGQSGRAMLEALARGQWDPAQLADLAHPRVRASRATLVEALTGRVTEHHRFLLRLHLSQVDALDSAVSALEGRIEEALAPFRRSVEHLVTIPGVSDTAAAVIVAETGAELSTFPTAGHLLSWAGLCPGQNESAGKRGSTRTKRQRWLKTTLVQAAWAAVKKKDSYARAQFHRIKARRGSKKAIIAVAASMLTAAYHMLQRDTDYQDLGADFFQRRNRDRGAYQLVRRLQSLGYDVQLRTAA

SEQ ID NO: 215022 - protein, 331 aa, unidentified
MKNVEESVGIDVSKLTIDVHLFKKNKHHQFVNNNKGFKDMLKWLSKEGLDMNLVLFCFEHTGWYCLKLSFYLHELSLKYTCVNPIEIKRSIGLKRAKTDKDDAGYLAHYAWIRREEIEQSIPPSSSIVELQRMMSLREQLVKHTVSLKNLRTGMLQLVSDQTTDPSVLILDKTIEELELQTRTIEKEMELLIKTDDTLNTNYKLSKTVKGVGKILAIQMLIHTHNYSRFMSWRQFSSYCGLVPYPYQSGTSIKGRNKIHSISDRKMKSLLSMSAISAIRCDKELKIYYDQRIQEGKPKMVVLNIIRNKIVSRIFATVKRGTPYVELNQFAA

SEQ ID NO: 215023 - protein, 455 aa, unidentified
MARRRKQEKNVYSLPVIRPETAGIDIGATQIYVAVSPDRDPEPVRMFGTFTRDLRAIADWLRATGVKSVAMESTGVYWIPLYQYLESCGFEVVLVNAHHIKNVPGRKTDVRDAAWIQLLHSVGLLSGSFRPAVEICAIRALVRHRQNLVEWSSQAILWMQKALTQMNLQLHNVIDDITGASGMRILRAVVKGERDREVLASLCDKGIRASREVIINSLEGDYRSEFLFILEQTLQQYEDLQKRIGACEAEAARLMDELPEKVDLKEKPLPAARIRVKRRASQPAAVPNLREKQYRVLGVDLTAAPCINTTTVEVFLSEVGPDLSKFKNASHFANWMGLPPNNRVTGGKRLSSKRRKVKSRMATALRVAAQSAARSENAIGDVYRRMKSRIGPEQAITATAHKLARIIYHMVTTGEAYDESVFAKAQQKFRRNQESKLRANAKRLGFKLIPLEEAA

SEQ ID NO: 215024 - protein, 315 aa, unidentified
MTVVGTFVGIDVAKRQLDVRVRPSGQRWTVVNDAAGIAGLVDRLRSEASVALIVLEATGGYEIPVVAALSAAKLPIVVVNARQVRDFARALGTLAKTEAIDAGVLARFAEAVRPELRTLPDELTQTLQGWLGRRRQLLEMLLAEEQRLPMAGREIRPQIQHHVDWLRRQLHDVDEELRTAIRRSPVWREQEDLLRTVPGVGPVLATTLLADLPELGRLNRKPIAALVGVAPLNWDSGQQRGTRHIWGGRAAVRTALYMATLAAVRHNPVIAGFFERLCWAGKPKQVALTACMRKLLTILNAMMRRRTPWAPALVA

SEQ ID NO: 215025 - protein, 426 aa, unidentified
MDRMVERPAALDVHKEQVTACVRVPGEGGERRQEVREFKTTVRSLLGLRDWLTESGVTHVAMEATGCYWWPVWAILEDGFELLLCNAAHVKNLPGRKTDVGDSQWLCQLLEFGLLRSSFVPPKPVRELRELTRRRRTLVRERSQEANRLHKALEATGIKLDCVATDILGVSGRAMLAALLAGERDPQALAGLAKGRLRVKNAALVEAFEGVRFGSQNALLIGGILRHIDFLDAEIAALGEAIETHLTTEREDSTPPFESAVRLLCSMDGIQARTAEMLLGEFGTDMTRFPSDAHFASWAAQCPGNHKSAGKRKSGKTRMGPKWLDGSLHDAAMGAIRVKDGHFARKYRRIKARSGHKIAIGAVKHALLIAIYHMLTTGELYRPPTPNPEAEQRARERTTKRLIAQLERLGHSVTLQTATTEAVVSP

SEQ ID NO: 215026 - protein, 367 aa, unidentified
MNDVSYVGLDVHKATISVAIANPGRDGEVRHVATITNNPDAIAKMVRQLSKAHPALEFVYEAGCCGYNIYRQIQGLGHTVQVCAPSLIPRRPGDRVKNDRRDAMSLARLLRAGELTSVWVPDPSHEALRDLVRTRHAASQDVRRGRIRIQAFLLRHDLRYDGKAWSTRHRRWLENRQFDHPSQQVALQFYINALEHDERHRSEIERSVRDFIAQSPWADQMLALQALKGVGPIVAATILAEVGDFSRFAHPRQLVSYFGLAPGEHSSGSSIRPRGITKAGSAIARSVLCEAAWNYRTTPKVGQWMKQHRPDVPQDIIDLAWKAQLRLHKTSRKLTMKGKKSVVVTAAVARELLCFIWSIGQRVPLQT

SEQ ID NO: 215027 - protein, 357 aa, unidentified
MGKLSESSASVTRMALDLAKNVFQAHGVDARGEVVLARKVRRSELLRFAGKLGPCEIVMEACGSAHHWARELMALGHSVKLIPPAHVKPYVRRNKNDAADAAAICEAAMRPGQRFTPVRSVENQAQLMRHRVRDQLVGQRTALLNGLRGHLSEIGVVAAQGAQNAYRLKRMLTDGVDEDGVVQVPDNVRLALAPLARQIDALDAAIETIDRHLAAGATANDKTRRLMSIPGIGPVTASAIAATVPDMRAFASGREFSAFLGLTPRQHSSGGKERLGRITKMGDRYLRRLLVVGATAVLHHATGHNDALRRWARQMLERKGGRSGFKLTAVALANKLARLAFAILRSGSVYDDRPVPA

SEQ ID NO: 215028 - protein, 414 aa, unidentified
MDVLVERCAGLDVHRDSVMATVRLPGKRSRQREQHTRGFGSTIAGLHALGDWLQGFGVTLVGMEATGIYWRTVFDALEPRFQCWLLNARHLRNVPGRKSDVIDSAWICQLVEHGLVRPSFVPPPEIRRLRDLTRLRKAQIEERTRAIQRLEKVLQAAGIKLTSVASATYSVSARAMLEALLGGVTDPAELAELARGRLRAKIPQLREALAHRFDLAHHGVLVVQLLTHIDSLDLAIETLDQRIAHVTEPMAEPTELLCTIPGVKLRTAQVLIAECGTDMSVFPTVGHFPSWAGICPGTNTSGGKRYSAKTRPGSKWLRQALSESAQAAARSKGTHLASHYWADPRPPRHAEGDWRHAARHPRRLLPHRPRPCALPRARPGLARPPLLARAPRPPARPPARGTRLQRQHGGHRLS

SEQ ID NO: 215029 - protein, 360 aa, unidentified
MDSSKEHPLMTAGLDLGDKYSYLCLIDQQSAEVIEEGRLRTTPEALGRRFASEQPPMRIAIEAGTHSPWVSRLLEECGHEVLVANARKLRLIYANKRKTDEVDAENLARLARLDPKLLYPLKHRGEDSQAHMAIIRSRQTLVDCRTQLVNHVRGTVKSFGARLPKCPARSFHKRAKEHIPEPLLPALGAILEQIGSLTERIQKYDRELEAIAKESYPETELLRQVEGIGPLTALTFVLTIEDPYRFEKSRSVGAYLGLVPARDQSGDSDPQKRISKEGDEMLRKLLVSCAHYIIGPFGGDSDLRRHGEKIASRGAKNSKKRAVVAVARKLAVLLHSLWVSGEVYEPLRNAHRSGGREEAA

SEQ ID NO: 215030 - protein, 498 aa, unidentified
MIIKSPSQKNHPLIQLGAAKKAPLQFESSERAALFRCTAIRLSRTGGRWPTAPDGRQPLPRRGPGTCCRRGGRGRGERLIEMCRARTGPRPGNVGVASAANGRLKGEDTPCLQQRRPWPTWGSTSGRARTARCALDAGGGVAFRAELANRPDDIDRLLERAGSGALVVVDQKRNIGALVLARAHAHGNPCAYLPGYAEKQARGMFPGIAKTDAIDAEVIARTALGVPRALRPAPEEPEGAASLRILSSQREFASSARTRAKNRLRATLLEADPALEGAVDPSSRWQVSMLAEFGGAAGCSAAGWRRFSNAARRAGAPAAGARRLWEALLASSRSGRRLPAGEDVAVRMLAREIASLDADIEELDSLVADSLAGDEVYECLLTVPGIGPKTAAALVTSIDISAFRGHDELASYCGVAPSDRRSGSSIRSTSPQHGGNRQLKNLLIFSCNSLIGTDNRFGRYYGECRARGMRHSKALKAVARKRLKVIYAIMRDAVPYAA

SEQ ID NO: 215031 - protein, 349 aa, unidentified
MLIIGCDFHSRFQQIAMVDTETGELIERRLEHGNGEAKKFYAELQKPGRVGMEATGYAQWFEGMLAKLGHELWVGDAAEIRAAMVRKQKTDSRDAVHILDLLLTNRFPRIWIPSPEERDVRQLLRHRHKLVGLRTSLRNQLQALAMGQGVCRKKKLWASRGRAELEALGLDPWARRRRQELLEILDRVDPSLAELDRAVAQEAEHRPAARYLMQQPGVGPVTALMFVLTIGPIERFQRSKQVVSYLGLNPRESSSGGRQRLGAISKQGNSLARFLLVEAAQTASHYDEDLRRDYQRLKFRRGSAVAKVAIARKLAVRLYWKLREYSSPAPSTRTQGSPETPVVGASLSS

SEQ ID NO: 215032 - protein, 414 aa, unidentified
MQVLYPRCAGLDVHKKTVVACLMLTSDTAQVYKELRTFATTTAGLLALSDWLSSQHVTHVAMESSGVYWRPVFNLLEGLFIVILVNAQHMKAVPGRKTDAKDSEWIAELLRHGLLKASFIPPQPIRDLRDLLRYRKTLVYERSQEVNRLHKLLETANIKLASVASDILGKSGRRMLDCLLEGLSDPEALADLARGSLRGKIAQLREALDGRVDAHHRILLQQLLAHIDFLEQSMQTLLAAIESRLLPYEQAMQLLLSIPGIQRITAATIVGEIGVDMTRFPSAKHLASWAGVCPGNKQSGGKRLSGKATKGNPRLRAALAEVVWVISHMKDNYLSAQYHRLARRIGKSRAIVAVSHSLLVIIYHVLREQKPYRDLGSPYFETLDQQQQRSRAIQRLEALGYSVTLQARQQEVPA

SEQ ID NO: 215033 - protein, 369 aa, unidentified
MTTRQRSTSSTSTGPPARDEVVLGVDTHGEAHVAAVVCPLGQVLGTKSFPATAVGYRQLLAWARKLGTVRRAGVEGTGTFGAGLSRYLLAQHVAVFEVNRPDRSARRLLGKSDPLDAQAAARAVLSGRARARAKTGNGPVQSARMFKVAKDSAVRARTQAINQLKAVLVVADPALRERLSGLGNRELFRTCARLGPREGEVGGGDEGTVTDATLIALSMLAQRIEQLTGQIDELNQRLTGLVERHAPQLLAPVGIGPDSAATLLITMGDNPERLSTEASFAALCGVSPIEYSSGGRSSHRLNHGGDRQANAALHRIVFTRLRHDPRTQAYYERRTQEGKTRREIIRCLKRYAAREVFNLVRAVSTNPPL

SEQ ID NO: 215034 - protein, 391 aa, unidentified
MIYVGIDVAKDKHDCFITNSNGEVLFKAFTISNNQDGFNVLYQRIESVMEDVTKVKVGLEATGHYNYNLLGYLIDKGLTTYVINPLHSNLYRKSLSLRLTKTDKVDARTIAYMLMSDVNLKSYSDTSYHNEELKSLTRYRFDKVKERAKLKTSVSRLVCILFPELEKLVPTLHMASVYALLSEFPGAKHIAGAHLTRLTNLLSDASKGRYGKDTAITFREAARVSIGSNMPAKSLELKHTIQLILELGSEIEEIENEIKIIMDEINSPILSIPGINYRMGAMIIAEIGDFSRFDSPDKILAYAGFSPSTYQSGQLDSAYSHMEKRGSKYLRYALYNAAKYVCHWDSTFAGYLAKKRAEGKHYNVAISHSVKKLVRVIYHLVKSNQQYIKVA

SEQ ID NO: 215035 - protein, 354 aa, unidentified
MIAIGVDVHKRQCTVAIQQEDGELECFGPMENTREGWRELLEQLPPEAEIALEVSTSGYFAMSVLEEAGWRERAHWVHTAGIDSLRKQKYDRLDAKRLARKLSVADRDPLPEAWFPPPAIRALRLRARQRCWLAVLRTQVKNRLQSLLQMHGLRPTVTDVFGVAGRAWLAAQALPEATRESVEQLLRVHDFLCQELAKAEGYLHAVDRQFPELARLRTLPGIGEILAPVIWSEMGTLERFRSAEAWVNYTGLVPSLYESGEVSIRGGITHQGSAWVRWALVQAANSVIQGVSPLARRYRRLRRRKPANVAKTAVARSLARCVYGVLKSGGNYQEARWGRRPTGVVSSLEQASLR

SEQ ID NO: 215036 - protein, 340 aa, unidentified
MSEITTIGLDLAKHVFQVHGIDAQGTTVLRKRLRRGQVLAFFSRIPRCVVGLEACATAHYWARELGAHGHEVRLMPAQYVKAYIKRNKHDAADAEAICEAVQRPTMRFVPVKTAEQQATALLHRGREQLVRQRTMLVNALRAHLAEFGIVAAQGLRNVGELIAIVRDDGDTRLPDVARQVLQVLANQIEQIETAVAALERQLLAWHKTNPMSQRLASIPGIGPIIATAIATTVTDPNVFRSGREFAAWLGLVPRQNSTGGKTRLGGITKRGNRYLRRLLINGASANLLRSKATKADPWVIGLRRRRPALVVAVALANKTARIAWAVMLRQKEYQPRAVAA

SEQ ID NO: 215037 - protein, 392 aa, unidentified
MVVSVGIDVSKDKHDCFVLSSEGEVLADVFTVSNNMDGFHYLLQRIQDCAAPQDNIKVGLEATGHYSYNLLGFLLDNGLATYVLNPLRTNLYRKSLSLRKTKTDRVDARTIASMLLSDAGLKPYTDTAYHNEELKSLTRYRFDKVKERAKLKSSISRLVCILFPELEKLVPTLHMASIYALLKEFPGAKQVAAAHLTSLKALLETASKGRYKRDMALEIRDAARNSIGSCMSAKSLELQHTIRLIRELDNEIAEIEEQIQSIMDELHSPITTIPGLGFRMAAMILAEVGDFTRFDSPDKLLAYAGMSPSTYQSGQLKNCYPHMEKRGSRYLRYALYNATKYVCHWEPTFADYLVKKRAEGKHYNVALSHAAKKLVRLIFAMEKSRTPYRLAS

SEQ ID NO: 215038 - protein, 356 aa, unidentified
MPIPIKRHKGMKKIFIGIDFSKEKFDATVIKAEGVEERAERQHEVFDNKVSGFRRLLRWVKSVADEPDAGLWLFCGENTGGYSKALCNHLYGSGYDMWLENALSIKRSSALQRVKSDKADSGVIAEYAMRNYDQMRLYKPLGKNLERLREVFLYRHNLVKMKASMTVRKGEKKLTQEKSDISRFMAQSSKHLISEFNKKIAECDMRIDKIISEDKELRRNFEIITSVPGVGTQNAVCLMVYTDNFSRFDYDSRKIACYYGVAPFGRQSGTSVNTPPHVSPFANKLIKALLTQAALASINFCPQMAVYYKRLVEAGKKKPVAVNNVKNKLLHVITAMVRNGAMYNPDHDYYAALKVA

SEQ ID NO: 215039 - protein, 427 aa, unidentified
MKKEDSRLEEFRQLRNEIRGSEKHLLVGIDIGKEKQNAFLGTATGKTLYKRLIFENNKEGFEKLLTHTEAAKVQNNLSQVVFGMEPTANYHKPLGEYLITRGHEVVLVSGNAVAKNRQLLDGRWDKHDGKDAANVADLISQGKCQYYEYPCREVRDLRGLLSLKRKLKKQAQGLWLRIRNNLVAQYFPEMDRYYGSCAQDNLAIVKNCLSPSVIAGMEYNEFFKTVVSRKKGLRQHKHLYKIWQLAGDSICCEAGDAAVCEAEVLVEQLKQTRKAIEQVDKEILKLCCLFSEYEFLMSIPGFGPDISAKVLAYIGDQYRFDRASQVVKMAGLDLNANRSGKTTDRAVPVISKKGKADLRYALYQAAMVASSRNQHFIKYFTEKIRGREKEKGIKTKMRVKLSAKLLIIAWTLMKNKEPFNPDYLTVA

SEQ ID NO: 215040 - protein, 432 aa, unidentified
MKDSQNKKLMAIGAGTLIVGVDIAKKVHWARFVDYRGIEYGKPFKFNNTIDGFKSIVEKAENICAANKKTEIIVGMEPTGVYWKPFANYLKILGIKIVTVGTFQTKMAKTLDDNSQTKSDPKDALTIAQLVKNGCYQEVYMPDDIYSELRVLTGLRFQLNDKLYSVKNRIHNVLDEYFPEFTGVFKNPFKGKASIQILKSCPFPAQIVELGEAGVLAEIKKAVKKTVGRKKAKELIDAAGSSIGVKYGYTAAKIKLSMLMEELEMITRQLDEVETEMETALKETGLYETITGITGIGTVSAANILGEVGDMNRFRHERQIHRLAGYNLTENSSGGSKSKTHISKRGRKRLRSVMFQVSMVMVARNEEMKAFYEHLKNRDKNPLKRKQALVVVAKKVLTIIFKLVTKKQAYNKAAVFGTFRTQQIIGYELKAA

SEQ ID NO: 215041 - protein, 466 aa, unidentified
MGKPQVIPDEDHEVIYERVAAVDVAKASGVVCLRTPDPQRPGRFVNRVWHDVGATRARITELGRELLSHQVQMVTLESTSDYWRIWYYVLESIGLAVQLVSASQAKNLKGRPKTDKLDAMWLARLTQLGLLRPGFVPPAVIRRVRDFTRAREDLVRERTRCLQRLEKLLEDAMVKITSVVTDGLKAKSAVAMVQALIAGQRDPRAIAELAKGPLRAKRAQLAEALDGVFASHHGVIAQALLDQVAFLDQQIKVMEEQAIAALAQVRESWGVDATGDTGPGCGTTPGSPVLAAAYRLAEIPGISVWLAIVIIAEIGLTMAAFPTPAHLVSWMGLCRSARQSGTRRGKGQQKKGDSYARCAAGQAAVGASGTATFLGERYRRIAGRRGRKVAQIAVARSIMIIVWHLLADPAARYHDLGPDWHARRGNRDKKIRNHLRGLTALEVTAEDICAALGITAGDIPSGGHAA

SEQ ID NO: 215042 - protein, 391 aa, unidentified
MKVTTLGIDLAKSVFQLDGVDARGVVMLRKQLRRKQVLPFLTRLSPCLVGMEACAGSHYSAREIGKLGHRVRLMSPHLVAPYVKSNKNDRNDAEAICEAVSRPSMRFVPIKSAAQQDLQSLHRVRSQLIRSRTALANEIRGLLGEYGIALAKELRVLRRALPLILEDQDNGLSGVFRETLVEMVERLKFLDERIKRYEQRVKQLFEQDERCQRLAQIQGVGPLIATALIAAVGNAREFRSGHELSAWLGLVPRQQSSGGRNVLLGITKRGDRYLRMLLIHGARAAVRYAERRTDPGGAWISRLRRVADPTSPQSRSRTKTRGWPGSYSAPAKAIVRRNHCPPPTRKRDERAHRLAASGLAGAVQCASSRIRNRQFFRRPPSQREDGRKNRF

SEQ ID NO: 215043 - protein, 354 aa, unidentified
MQYIAFDSHKRYTYAVVEEKEKGRVMEKRIEHRRGEIGAFLSQCEVGSPVALETIGSWYWIVDEIEAAGMLPRLVNARKAKMMIASSKKTDRLDAKGLNTLQRTGTLPTVWIPSSELRDIRELYRTRMVLTQMVIRLKNRILSCFSKYGISFDETSDAFNIKGRASLEAALEILPTQTCFALKELLRQLDLLQEAVKEFEARMLQVQSNDPEIKLLQTIPGVGAILSYVIAYETGDIHRFPSASCFASYAGTTPSVHASGGKVRYGHTASDVNHYLHWAFIEAANVISMRHEVLRFRHTARLYERLRQAKGHGIAVGAVARHLAEATYWILTTKTAYREPNQNKQVVVVSSKEG

SEQ ID NO: 215044 - protein, 355 aa, unidentified
MAEVRKISFKEKSIFIGIDVHKKSWTVCILCEEIEHKVYSQESSASVLGKYLRRTFPGAKYFSVYEAGFCGFWVHEALKSEGINNIVVNPADVPTTDKEKKRKTDGIDCRKLARSLRNGDLNSIHIPERDKQEDRSLVRLRTLMVKDQTRSKNRVKSALSSFGIIIPDEKVGSHWSKKYIEYLRKEIKKSATLSLTIEFLLIDLEKNRNMVAEVTRKIRQLSLEPRYLNKVDILRSVVGISILTAMTVLTEFGDFRKYKRLDKLVSYVGITPDERSSGDKENKLSITKRGNKFLKHVIIEAAWTAVRKDPALMLAYKNYSKRMLKTKAIVKIARKLINRIRFVMLNETEYKLSVI

SEQ ID NO: 215045 - protein, 410 aa, unidentified
MRRCIGLDVHREFAEVAIWEQGVVRLAGRIETTPEALSLFAESLCDQDEVALEATCNTHAIARLLERHVGRVVVSNPMKTRAIAEAKVKTDKVDAQVLAQLLAAGFLPSVWLADEETQALRRQVARRAHIVRQRTRLKNRVQAILHRNLVPRCPAADLFGLKGRRWLAEQQLPADERQAVEALLRQLDFHAEELKLIDAALAQVALARAEVKRLMTIPGVDATVALSIVAAVGDFDRFRSPDKLVSYLGLNPRVRQSGSHPAVHGRITKQGRAHARGMLVEAAFAAARVPGPLRAFYERVRGRRGMQIAIVATARKLAVLCWQLISKGEDYAYQRPSLTAKKLRALELRAGTPSRRGRKGAAGAYSRREVRARENALAEQGELVYRHLVADWQAKRPAKAGAGAATGERL

SEQ ID NO: 215046 - protein, 347 aa, unidentified
METIVRIGLDTSKSVFQLHGVDGMEQPVLRRKLRRGQVLAFFGRLPPALVAMEACGASHYWARELRSLGHEVAMIPPQYVKPYVQRGKSDAADAEAICEAASRPKLRKNFVPIKSAEQQGAQMLTRVRNQFIGRRTQLANSIRGYAAEFGFTAPKGLSRLPQLLIDIRADATVPDLAMELVEALATELARVDDLIAKLDKKLMQLHRSNEMSRRLATIPGVGPIGATLLSIKVVDARGFRSARNFAAWLGLTPKNHSTAGKNRLGVITRAGDGMLRTVLVAGATAVIADVRRRGRSWPWLEDLITRKPPKLVAIALANKLARIAWKLMVSGERYRPVSSAVPMPTPT

SEQ ID NO: 215047 - protein, 430 aa, unidentified
MKSNTQNKKIEAITEKTLVIGIDVGSETHYARAFDYRGIEYSKKPFKFSNTEAGFVTFKEWILDLKEKHEKDKVVPGMEPTGHYWFNLGKYLQDNEMKPVLVNPHHVKKSKELDDNNPTKNDRKDPKVIAGLVREGRYMIPYLPDGVYADLRTASNIRFQLQAELTRIQNRISRWFNIYFPEYKTVYGKPDAKSGMLILKEAPLPEDILTLGIDGVDQIWRDAKMRAVGKARAKTLIEAAEHSVGRKEGAVSARMEIRMLLEDYESRNMRLQEVMVLIEELVKQIPMAEKLLEIKGVGIKTVSGFLAEVGDISRFNSPKELQKLAGLALVENSSGKHKGETTISRRGRKRLRYLLFEVAMLLVAKNPEFRELHNYYTTRRLNPLKKMQSLMAIAAKLIRVFFAMLTKGVDYDPKKMVSDIKRPAVYLQAA

SEQ ID NO: 215048 - protein, 350 aa, unidentified
MIIIGVDFHPEYQEIASVDTDTGEYQEKRLAHPKEAEEFYRSLSCVGQVVRVGMEASGHGRWFERLLEGLGVELWRGDAEVIRAKRGRKQKTDREDARHILKLLLKDDFPRIWVPNWENRDLRQLLWHRHRMVQARTRVMNQLQAVALNEGLRCKKRLFRADGRQQLESFQLAPWASRRRRELLELLDRLNPTIAELSQAVEREAEKCPEAQRLMTHPGVGALTALAFVLIIGETERFHCGKQIAAYLGLVPLEKSSGNRRRLGHITKQGSSIVRFLLVEAAQVTVRSLPEWRSKYIHLMMRRGRKTAKVAMARKLAVRLYWMWRKGWDYEQWKKFGSYVGQPVNRYGVQ

SEQ ID NO: 215049 - protein, 429 aa, unidentified
MVLLQAAEKTRRCGRENRVRLFVGDDWAEDHHDVELMDAAGRVLARKRLPEGVAGMTRLHDLIGQQLGEDADAAEVVIGTETDRGPWVGALVAAGYTVFAVNPLQASRYRERHGVSGAKSDSGDAHMLTDMVRTDSHQLRAVAGDSAEAEGIKVLARTHKTLIWERTRQVQRLRHQLREYYPAALEAFDDLDAPDTLELLGKAPEPARAARLTRAQVSAALKRAGRRNITERATAVLAALRSQQLGQPPAVTAAYAATVRSLIAVIAVLNEQVKALQGQVEENFGRHPDAEIYRSQPGIGAVLGARVLGEFGDDPHRYADGKARKNYAATSPITRASGKKKVVAARYIHNDRLIDALMAQAFTALNTSPGARALYDAERARGTEHNAALRKLANRLVGILHGCLKTRTLYDEATAWPYRQNLPQASVAA

SEQ ID NO: 215050 - protein, 429 aa, unidentified
MTKTYILKTQTVPADRSAVETYLAPPPPSKGKIIGLDCHPDTFTAAFFVGQTPHDARKIGSRENLSLDALLKWAAAELTPQDIILMEAGSNSFELCKRLGNLGLKACVLESCHVGKHAKTYADNDKMAAARIALVYLAGNAPCVWVPDEQSRERRELLHAYRKAVDEHTAATNSIKSYLNCRGLRLCKHSLDEKTTSQWILDQADWSGLQKNILTEHLANITESKERRKRLYRLIAAEMAADPKMMRCMKVLGVGIVSAFALLAVIGDIGRFHSPEKLVAYIGLNPGQRQSGKGKDIRLGVGRRGRGDIRNLLIQGAHAIMRSGRNTPLGQWGWKLFARKGNRNVAVAAIARKLLVQVWHLLHGNPPLALESDTSFRIKLQKLAVALGSTLRTGIGLGKTLEDSVKTLISRCQTHAEPSASPCETPQPA

SEQ ID NO: 215051 - protein, 339 aa, unidentified
MDSHKDTLAVSGVDAAGRQQQTQVFPNTDHGHRRLVAWLQAQPGVVRVGIEGAGGYGRAVAIHLVQAGLVVVEVTPSLTVRERRRLRQRGKADPTDALAIARVTAREPDLPAVRGQDLTEDLRLLVDYREQLLGERTRIANRVHADLVALRPGYQQRLPELRSQRAAGLVRRLLAGQLGVRAELVGRRLDQLDRLDAEIRALKRRIGKLVEATGTSLVQVHGVGPLVAARILGEVGDVRRFGDRHKFAAANGTAPIPASSGRVQRHRLNRGGNRRLNRALYVVAITQARSDHPGRAYVARKQRQGKTRREALRCLKRRISDAIYRQLQTDLGPDPNPAP

SEQ ID NO: 215052 - protein, 351 aa, unidentified
MEEYIAFDSHKRYTWVEHQEANTGNTRAYRLVHGTGAIRQALAGCAPGTAVAIEATANWYWIIDEIEQASCVPKLVHPRKAKLMMGLINKTDKLDAHGFNTLQRNGTLPTVWIPPGGLRELRELTRTRLVLVAQRTRWKNRITATLAKWGLPPSEYSDAYGKKARTELEQQLERLPEQTRWATRQMLAQLDSLSEQARQFEKRLEELVEVNPMMQWLMTLPGVGVILAATIALEIGEIERFANAERLASYSGTTPRVHSSGDRTRYGRTRSDVNRYLKWAFAEAANSVAVNHRRNPERHVSRLYTRLRASKGHSRAVGAVSRHLAEAAFHVLQRKEVYRDPSLNPRPEKGV

SEQ ID NO: 215053 - protein, 310 aa, unidentified
MDAIVVGIDVSKDRLDVAVRPTGEVFVVGRDAEGLDSLIARLVPLAPAAIAVEATGGYETVVAASLAAAGLAVVVVNPAQIRAFAQALGRRAKTDPIDAGVIAHFAEATKPAIRPLPDAETRLLADLVARRRQIVAMIGAERQRQKRLPNKRLQKSIARLLAALQKELSSLESDIDETVRGSPAWRAKEDLLASVPGIGKIIARTLIAELPELGSLDRRQVAALVGLAPWTRQSGQWKGKSFIGGGRADVRTALFLGAMVAARHNPELKAFRDRLVAAGKPKLVALVATARKLLTILNAILRDRTPWQSA

SEQ ID NO: 215054 - protein, 365 aa, unidentified
MTKVRTWAGLDVHAAATVACVVDAPSGEMSVHRLAGRTSEVTAFCGRLPAPVRVAYEAGPTGFELARALDASGVSCVVAAPGKIERPTQDRVKTDRRDAERLVRLLMIGGLHPVRVPSSEEEALRDLVRAREDIRGDLMRSRHRLSKLLLRHDVRYDDSASAWTKAHRAWLSGVDLGEPAAQATLLDYLGAIDGLAIRRDAIERLIAELVPHSPWAVQIARLRCLRGIETLSAVGLCAEIGDFSRFEHPRQLMSYLGLVPSEHSSGQTRRQGAITKSGSRHARRLLVEAAWHYRRPPRRGTTLERRHEGQPAQALAISWKAQQRLHQLWRRLHTRRGKRKTVVAVAVARHLAGFCWAITTIDTDT

SEQ ID NO: 215055 - protein, 347 aa, unidentified
MKKSTDIKTIRVVGIDLGKTYFQLYGVDDQAKERLDKKMSRAQLGKFMAMLPPSLIGMEACATAHYWARQMRQYGHDVKLIAPQFVKPYVKSNKNDRADAQAICEAVQRPHMRFVAIKEIEQQDIQSLHRIRSQVVANRTALVNQVRGLLLEYGIVVPQGRRKVREGLSLIIEDAENGLTARFRGWLLDLYHELVHLDKRIAYLDGQIEISAKEDERAQRLLSIPGIGPMIATALSAAIGDINHFKNGRELSAWLGLVPRQCSTGGKPRLLGISKRGDVYLRQLIMHGARAVVQRVDGKTDKRSRWIQQVLLRRNKNIAIVALANKTVRIAYAVLKHNTEYREAKAL

SEQ ID NO: 215056 - protein, 346 aa, unidentified
MFNLTEKGKSVNNVTTVGIDLAKNVFSLHGVDGQGREVLRRTVRRGQLMALVAQLPACLIGLEACSGAHEWARQFGAFGHTVRLMAPKFVAPYRRGGKNDGNDAEAICEAVSRPSMRFVPVKSAEQQAVLSLHRVRQGFVEERTATLNRIRGLLAEFGHVLPQKTVEVRRRLPPLLEELPALAARALGDLQAHVRVLDERIVAYEQELARLAKADARAQRVQELYGVGPLTASAILASVGSAHEFDNGRQFAAWLGLVPRQFSTGGKTRLGHITRRGDPYLRTLLIMGARAVMQAATRREDRLSRWALSVRERRGYHRACVAIAAKNARIVWALLAKDEPLRTVMA

SEQ ID NO: 215057 - protein, 351 aa, unidentified
MIISQNVGIDGGLKDFKVCLMILHQDQSLKVKGTRTFTNNLKGFEAFFCWAEKKKEQTDPLRFTMEATGVYYEQLAYFLHRKAQHVSVILPNKTKAYFQTLNLKSKTDKLEARALAQLGLERKFAKWEPLSKQMYELKTLCRERVMLLEEKTMVSNRLHAETHCQSPNSSVVKRLKKRIDFIKRQIKEVEKQLKIIVKKDKELDKRMDNICQLKGLSFITVITVISETNGFALFRNRAQLTSFSGYDVVQRQSGSSVLGKTKISKKGNRYIRRALHMPSLCVIKYNEEYRNLYERVFERTKIKMKGIVAVQRKLLLLIFSLFKKNQAYDPDFSKQKTAKNCRQDTIPAYAG

SEQ ID NO: 215058 - protein, 351 aa, unidentified
MSRSSSSAAIATLGIDLGKNTFHLVGQDERGAIVLRIKLSRPQLTQRLANLPPCLIGMEACAGAHHIGRQLQALGHDVRLIPAQYVKPFLKGHKNDYRDAEAIAEAVQRPTMSFVAIKTPDQMDLLALHRVRSRLVSQRTGVTNQIRGFLLERGITVRQGLAPLRQALPSILDSSSDALSPRMGRLISDLMEDWRRLDERIEAVSTEIEALAAQDEHCQRLMSVPGVGPIISSAVVAAIGTGAGFKQGRDFGAWLGLVPKQESTGDRTILGKISKRGNKYLRTLFVQAAHIVLVRRPHGARVGLWPWIEAAGRRLHRNMLVIALANKLARIAWAVLARGHGYQPRSAAHAA

SEQ ID NO: 215059 - protein, 359 aa, unidentified
MRSLQISDRQRGPSVDQISRIGMDTSKHIFQLHGVNAAEAPVLRKKLRRKEMVTFFEKLAPTVIGIEACSASHQWARLLQSFGHSVKLIAPQLVKPYVKRGKNDAADAEALCEAMSRPTMRFVPVKTAEQQAALMLVGVRDRLIRNRTQLTNAIRGYAGEFGFTAAKGKAHLDPLLERIQADESLPALARELFVAQAKEYAQLQAQIDEVEARLMAWHRADECSRRLAKIPGVGPSGAVLLKMKTPEPELFRSGRQFAAWVGLTPKDHSTAGKVRLGVITRAGDEGLRSVLVVGATAVIQHVRRGGRASPWLTDLLKRKSPKLAAVALANKMARIAWKLMVTGENYAAKSAPAALVGAR

SEQ ID NO: 215060 - protein, 311 aa, unidentified
MSRMPHADQPGQSDTSQESVILGVDTHKDAHVAAAVTVRGALLGQRRFPATAAGYQQLLDWGRGLGTVARAGVECISSYGIALTRHLQAAGVIVLEINQPDKAQRRRRGKTDAIDAEAAAHAVLSGRATAVAKTGDGPVEMVRMFKMAKDSAIKSRAQAINQLKAVLVRAEPVLRESLTGLSNPRLIRRCADLDPAAPATTSAAAVYTLRSLARRILGLSEEIDDLTTQITAAITTCHPALLDCYGVGPDTAAALLITAGDNPERLRSEASFAALYGASPIQASSGKTERHRLNRGGDRQANSALEPYRVR

SEQ ID NO: 215061 - protein, 350 aa, unidentified
MIHVGMDLHHRMAYVRAITNDAELLKGRKIYFNDLPRLWEYLDQFGDQPVRVVFEAISNSRWMYRLLRQRPNIEPVVVTPHKVKIIAETVSQTDKIDAAKLAWLSSVNMLPKAWMPDERFEVLRELVRHRSKLVRVRTRAKNEINGVLVRCGIQRPYDNIFGIRGRRWLAILELPKVMRLQVDNWLEQIDAVEAKLALLESRVRRTLKNDAQWAADAELLASIPGLGLISIVTILAELGEYRRFRSRSQIAAYVGLVPTSKRSAQTARYGKMSKRGSPELRRVLTQVALGVSRQAPKYHWLYERIKREKCANIAKSAIARHLIEDAWTLLMKREPFQLRQEQAATLTRAG

SEQ ID NO: 215062 - protein, 415 aa, unidentified
MTKQKQCFAGVDWASEAHHVFLTDNDGRKIAEKVFKHGGEGLAAMAAWLMAMSNADEAGHIRVAIEVPHGPVVETLIERGFKVHAINPKQMDRFRDRFTLAGAKDDSRDAEVMASALRTDPRCFRPLAIADPIVIELREWSRMTEDLGAERNRLTNRMRELLWRYYPALLTLENDLGAEWLLDLWETVPTPAKAARVRETTIARLLKRHRIRRFNAAHIIAVLRQTSVQVSAGTTKAASAHIATITARIRLVNRQIRQAHQQLDKLTDRIAPSEQAEPGQARQHDVEILASLPGVGRIVLATLLAEAFDALQRRDYAALRSLTGVAPVTKRSGKSYIVVRRQACHDRLANAMYHWARVAVQHDARSREKYAALRSRGHSHGRALRSVADRLLNVACAMLKTGTTFNASITAQNAP

SEQ ID NO: 215063 - protein, 454 aa, unidentified
MRKPQVIQDEDHEVVYERVAAVDVAKASGVVCMRTPDPARPGRYVNQIWDNVPATRARITELGLELIRCQVQMVTLESTSDYWRIWYYVLESTGLAVQLVSASQAKNLKGRPKTDRLDAMWLARLTQRGMLRPSFVPPAAIRAVRDFTRARTDLVRERTRCLQRLEKLLEDAMVKITSVARDGMKAKSAVAMVAALIAGERDPRKLAELARGRLRAKRDALAEALDGMFDSHHGVIAQALLDQVAFLDQRIAQMEAGAIAALAQVEESWGVDTTGDTGPHAGTSPDSPVLAAAYRLAEIPGISVWLAIVIIAEIGLNMTAFPTPAHLVSWTGLCRSAAQSGTRHGKGKQKKGNSYARAAAGQAAIGANGTATFLGERYARIARRRGGAIAQVAVARSIMIIVWHLLSDPAARYRDLGPDWHDTRVNRDKKIRNHIRGLQALGVTITITADEQAA

SEQ ID NO: 215064 - protein, 428 aa, unidentified
MTVKDCTSVKEFWQLKKEIRGSKDYLIVGIDVAKHEHKAFFGTANGKTLLKRLSFKNDIAGFGKLLERVKEMKVKHSLDELVLGLEPTGNYHKPLGDFLIRCGHMVVLVSGVSVKRNRELLDGRWDKHDTKDSANVADLISQGKCLYYEYAPVLLKDLRGLLSLKRRLKKQEHGFRIRIRNSLLAQYFPELDKYYSKWEPEILSVVRWCLDPSVIAGLEYDQFVRLVSPGSKNIRQQGRLEWIWKKAVYSIGCDAGEAAEFEAKVMVEELRHIREVIKETDAKIKDVCVRFPEYDYLLTIPGFGPDVSSKVLAAIGNPFRFNSLSQVLKMAGMDLNANRSGKNSDTAVPVISKKGSAHLRFALYQGAFIASCKNKYFIKYYTNRLRGREREKGIKTKMRVKLAAKMLVVAWTLMKKREPFDAAYLKID

SEQ ID NO: 215065 - protein, 339 aa, unidentified
MQLYAGLDLHSRSTFVGILDQDLNRVFKKRMPNDLQRILADLEPFKKQLKGLVVESNYNWYWLVDGLMDAGFQNVCLANPSAIKQYEGIKHTDDQHDAFFLAQLLILGILPQGYIYPKKDRAVRDLARKRMFLTQHKTSNLVSLQSLVERNCAIRLSANRIRSLKVEELEKLLSDKHLFFNARANLETVQFLTGQIRQIEKAIVQQIKPRPSFELLRTVPGIGPILAMTIMLEAGDIRRFAKVGNFASYCRGVSSQRFSAGKLKGSGNRKNGNRYLSWAFVEAAHMARRFCDRFGRYYDRKASQTNTCVATKALSNKLARICYYILRDQVPFREELIHG

SEQ ID NO: 215066 - protein, 339 aa, unidentified
MNIIGCDFHTRFQQIAMLDAETGEMAERRLEHETGEARAFYAGLPGPSRVGMEATGYSRWFERMLGEQGHELWVGDAAAIRAAMVRKQKTDSRDALHILNLLLTDRFPRIWIPSPQEQDVRQLLRHRYKLVCFRTSVRNQLHAQAMGEGSCRKRKLWTAKGRRELESLVLGSWASRRRQELLELLDRLDSSIGELDQAVIEEARSRPLAVRLMEHPGVGPVTALAFVLTIGPVGRFRRSKQVVSYVGLNSKESSSGGKQRLGSISKQGNSMLRFLLVEAAQTAARFDPELQRDYQRLKFRRGPGVAKVAIARKLAVRLYWKLREAAPSSAAGSHAGQPG

SEQ ID NO: 215067 - protein, 424 aa, unidentified
MTGSQYHNRGNAMAQETLSWFAGVDWGSERHQACLVDSQGNIIGEREFPHSGAGLAELGDWLLSIAGAASTVAVAIEVPHGPVVDSLVDRGFVVHAINPKQLDRLCDRFSIAGAKDDRRDAYVLADGIRTDRRLFRRLHVADPKLIELRAWSRLAEELKEERCRLSNRVGQQLWRYYPQMQKLADDFAAAWFLELWSIAPTPAKARQLRKPTVEQILKRHRIRRVDADTVLRTLREAAIKVADGVAEAANIHLRSLVARLHVVNRELREAEVQLDKLCMTIGESVAASGDCLRRQDVLILRSMPGIGRINLAALLCEASGPLGSRDYQALRTLCGAAPVTKRSGKSRIVVMRYAAHVPLRNTVYHWARVAAQRDPKCRARYAALRRRGHSHGRALRGVADRLLALACVLLQRQTPFDPHLAQAG

SEQ ID NO: 215068 - protein, 339 aa, unidentified
MNLHCAVDLHGDNGYYGIVDETGKRVFEKRLPNVLSEVLAALKPYRDQLTSGIVVESTYNWYWLVDGLEGNGYETRLANPAAVEQYSGLKNTDDKTDAFFLAELSRLGILPVGYIYPKKERPMRDLLRRRLLLVRQKTAHVLSFQNLVARERGERIRSNHIQKLHPNEVTQFFDDKRLVLMGQTNIEMIRFLSKQIRGIESAVLCEAKLKPEYEKLLTVPGIGKILALTIMLETGDINRFKKVGNYSSYSRMVKSLRSSNNKKKGENNRKNGNRYLCWAYIEAANFIRRYCPEAKAWHQRKCKRSKQVVATKALASKICKSCYFIMNDQVDFDVKLIFG

SEQ ID NO: 215069 - protein, 339 aa, unidentified
MGRYVGVDLHKNMFVVSFYSPDIHKHEVKSYLLKEMGDFIADSDATDIVAVESTTNTRYFVNCIREHVNEVKVINPSQFKVISNSVKKTDENDAKVIAEFLSKDMLPEVRMKDKKTAQINSLANTRDKLVKLRTALKNKIHNILSSHGILLKKESLSSEKGLQRILEQPVDPVASVELEVIVSQIRGLNEGIKRLDKELEDKGSELPGHENITSIKGIGKKSGSILLSVIGDINDFENEKKLAAYFGIVPRVSNSNTSEWQGRITKRGSKLGRTTLVQCTLVAIRYSPRLRAFYDRIKAKKGSGKAIIATSKKLLNIIYYTLKENIIFEDFTNGVIRTT

SEQ ID NO: 215070 - protein, 375 aa, unidentified
MGHHSEAFIGIDTSKLRNAVAIAEAGRRGEVRYLGEVGTSAAATRKLVAGLAAKYRKLTFCYEAGPTGYGLQRLIESLGHTCIVVAPSLIPKKAGDRVKTNRRDAEGLARLLRAGELTAVWVPDERHEAMRELTRVRDAARQDLTRKRQQVSSMLLRLGQHYPGIKTWGARHRSWLANLRLEHREQRFVLEELLQAERQAAERIGRLEQAIREAIADWSLSSIVPALMAMRGIDLVAAVTILAEIGDLCRFETPRQVMAYLGLVPSERSTGDSVRRGGITKAGNGRARRVLVEAAWAYRHPPRVGYEKQAQVAAAPRPAREIAWKAQVRLCKRFRRLSRAGKKSTVVATAIARELAAFIWAIAREVRNGTPAPAA

SEQ ID NO: 215071 - protein, 465 aa, unidentified
MKRKSSAYLKRNKKIIVDAVWEPVNIHAAGVDIGAREHWACVPREASERPVRKFDTFTMSLEAMAEWFKQCGVTTVAMEATGVYWIPLFQILEKRGFTVILANARQTKNVAGRKSDVQDCQWIQRLHTYGLLQGSFRPADNYCVLRSYLRYRDELIGARSTQCQHMQKALHQMNIQLTQVLSDITGTSGFAIIAAILEGERDSAKLAALVDRRVRASQQTITHALKGDYRTEHLFVLRHAFDLYSVFDSKIRDCEQEIARESGSLCDRVDITEKPLPPRKEGAKPQKEILGGLNMREQLYRKLGVDLTAIEGIGIATALAVLTELGPSVERFPSEKHFCSWLGLCPDNRISGGKVLSSRTRRVINRLTDALRMAATALERSQSALGGYFRRMKARLGAAEGITATAHKLARIIYRLLKFGEEYVRLGLEDYEHKFKERRLQGIKKTARSLGFELVATQTPSSAVS

SEQ ID NO: 215072 - protein, 312 aa, unidentified
MNDEYFGIVGVDVSKARLDIFFNNEYWSVPNVWASISKLAIKLVELQPKLIVVESTGGLEHALLAEFSSLGLPVALVNPRRVREFARSIGQLAKTDKVDAKLLARFGEAVKPEQTKLPTIEEQHLSALMVRRRQVIEMLTMEKNHLNSTHPITQDSVTKIISLLQLELDELNYQISQYIDQFPEFKRKDEILCSTPGIGKVTSAILLSDLPELGSIDRKKIAALVGVAPFNNDSGRFRGKRRIKGGRPTVRTVLYMATISAIKCNPVIKSFYKHLLEQGKVKKVAIVACMHKMLIYLNSIIRDSLTSEPVSS

SEQ ID NO: 215073 - protein, 347 aa, unidentified
MKIIGCDFHPSYQQIAMVDTETGEVREGRLEHEQGEARRFYESLEGPVRVGMEAVGNSQWFEKMLAGQGHELWIGDAAQIRRLVVRAQKTDRRDARHILELLLDGRFPRLWVPSVEMRDLRQLLRHRQKLVEIRAQVKNQLQHLALNQGVRRKRRLWSAEGRRVLEKLPLEGWTARRRSELLAMLDQLDGQVGELDRAVRMEAERRPEVRLLMTHPGVGPVVGLAYVLTLGPPTRFPRGKQVASYLGLIPREHSSGGRQKLGSISKQGNTLMRTLLVEAAQNASRFDEELRRDYQRLKARKHSALAKVMVARKLAVRLYWMLRENRPYSPLPVAPMQGRPSHSVVAG

SEQ ID NO: 215074 - protein, 354 aa, unidentified
MSQILKAAVAVVGIDIGKNSFHIVGHDERGAIVLRQKWSRGQVEARFANMPPCLIGMEACVGAHHLSRKLKALGHDARLMPAKYVLPYSKGQKNDFRDAEAIAEAVQRPTMKFVATKTAEQLDLQALHRVRERLVSQRTGIINQIRAFLLERGIPVRQGQRFLRAELPRILATPPDVLSPRMVRAIEDLAADWRRLDERINSLSDEIEAIARQDAGCERLMSVPGVGPMISSAMVAAIGTGEAFSRGRDFAAWLGLVPKQISTGDRTILGKISKRGNRYLRVLFVQAAWVVLIKPKIWERHGLKSWIEAAKKRLHHNVLAIALANKLARIAWSVLARGRAFEVRKVDGVSAQPV

SEQ ID NO: 215075 - protein, 392 aa, unidentified
MWLTVVIGVDPHKSTHTAAALNARTNRTLESIRIDATLPEYRRLLVWAKRFPERRWALENAWGLGRHLAQWLIAHGETVIDVPSTATARVRELSRGGRRKNDNIDAAAAASVAALRGDAAPVEAEGPNTVLRMLDERRTNLTRQRTRTVNQLHAMMRELLPGGVSTDLTANQATDVLRRVRPSSPVERARKELARELVADVRALDVRLKANQQRMQDTVADSGSSLLDVVGVGPVVAARLLGRTGRASRFRTAGAFAVHTGTAPIEIASAGKSRHRLSRHSDRQLNNALHTIALTQVRMPGTRGRIYYDGKIAEGKGHKEAMRCLKRRLCDHVWRTMIADEQCHTSGAGSGGHSGATTKSCAAGSTPHASSSDQSLPEPAIDQITAQPAPAA

SEQ ID NO: 215076 - protein, 368 aa, unidentified
MSQLTIGAVTSDANNCQSAVVTPLALVIKLGIDVHAKDYVVVRQVDEAVSQPAQRFNLEGLLGFVRRQVAVAQSVHSCYEAGPFGYVLHRQLSALGVHNLVVRPRDWSTYGERVKTDQRDASALCSCLDRHLAGNQGALAVVRVPSEAEEQARAVARQRQSLLRERVRLTLQGKSAALLRGHQLRGEWWRVGTLAKLAPDLPPELLVILQRWQQVILLLDAQVQALTEQLEQAAPPELPCGLGSMTWEILSREVGDWHRFRNRRQVASYTGLCPGEHSSGASRQQGSITRHGNPRLRHLLIEAVWRLLRYNPEYKGIAKWRDQFTAVRVTQARKKKIVVAIARQLAVDLWRLGTGRTTPAALGLQIPS

SEQ ID NO: 215077 - protein, 365 aa, unidentified
MNCVGIDVSHCKSIIVVMRPFGEVVVSPFEVLPTDSELSKLAGLLKSLDGETRVVMESTGYHHTPVAWLLHDAGLYVSVVNAMLVHDYGNNSLKRAKTDKKDAVKLANCGLDHWLTLPRYVPEEDTRLMLKTCYRKYQQYSKVQTMLKNNLISLLDIAFPDANRLFTSPPRADGSEKWVDFVAAFWHCECVCNLSEKAFTAKYHKWCRKHRYKFCEDKTLDIYSSACGHFGVIPKTDTAKLLVEQAVFQIRATSTTLAALKQEMQSLAASLPEYPVVMGMFGIGPALGPPLMAEIGDVRRFHSKKALVSVAVIDAPPYQFGQMDVRSHSISKRGSASLRRTLFLVMSVILQHAPMNEPVYQFMNK

SEQ ID NO: 215078 - protein, 346 aa, unidentified
MRRCIGLDVHREFAQVAIWEDGVVWQAGRIQTTPEALRLFADSLCATDEVALEATGNTYAIARLLERHVGRVVVSNPQKTRAIAEAKVKTDKVDAAVLAGLLAANYLPSVWLPDDQTHALRRQVTRRAHIVRQRTRLKNQVQSILHRNLVPRCPAADLFGNKGRAWLATQDLPADEHQAVGALLRQLDFHGQELRIVDAELGRVGLERAEVRRLMTIPGVDATVALAIVAAVGDFQRFSSPQRLVSYLGLNPRVRQSGGQPAQHGRITKQGRAHARGMLVEAAWAAAKTPGPLRAFYERVRARRGMQVAVVATARKLATLCWHLVVGDQDYAFQRPSLTDKKLRAL

SEQ ID NO: 215079 - protein, 368 aa, unidentified
MKKNTNSKQNASKGKRTEQKETFAFYIGIDLGDKNSDVCVLNSAGEVHKEFRIRMNAAAIDEYFAGIGRSRVAIEVGGQSQWVAEVIEKYGHEVHVANTRKVAYIHESDDKDDPGDAYKLAELVHFKPRLLHPVRHRSQALQADLTWIRAREAAVAGRTHLINTVRSLSKGFGERLQRCSTEAFTAKLAEQIPTAIRSAVAPLLEMIDHFNEQIRYYDQMEEHIARERYGKYTLLSQVDGVGVHTALSYMLTMGDPNRFEKSRQVGAFLGMRPRKKDSGASQPQLGITKAGDEYLRKTLVNCAHYILGPHGRDCDLRRFGQRICERGGKNAKKRAVIAVARKLSVLLHRLWVTGEVYEPLRNSHKKAA

SEQ ID NO: 215080 - protein, 409 aa, unidentified
MKLYVGIDVSSTDLYTCIMDQEGNTCAQFKVDNHLLGATFLRDQILRWANERQPSEILIGMEATSVYSWHPAMFFHQQEELKSWHVKVFTINPKLIRKFKEAYTDLDKTDGIDAWIIADRLRFGRLKVTAVMQEQFIALQRLTRMRYHLVHQLTREKQYFLQHLFYKCSSFTQEVDSSVFGHAILELLLESFSLDEISQMDVQQLADFLRQKGRNRFADPECIAKSIQKAARSSYRLSKCVEDSIDLLLGLSIQSIRSLQAQMKELDKAITRHLEGIPNTLQTIPGIGPVYAAGILAEIGQIERFDNQAALAKYAGLTWSKHQSGRFQAEETSLIRSGNRYLRYYLVEAANSVQRHDASFRTYYRKKYEEVPKHQHKRALVLTARKLVRVIDALLRNGQIYTPRKGEDR

SEQ ID NO: 215081 - protein, 402 aa, unidentified
MNAVGIDVSKGKSMVAIMRPFGEIVSAPFEIKHTASGINSLVELINSVEGESRIVMEHTGRYYEVLAHQLSEANLFVSAINPKLIKDFDNDSLRKVKSDKADAVKIARYTLDKWQNLKQYNVMDELRNQLKTMNRQFGFYMKHKTAMKNNLIGILDQTYPGVNTYFDSPARSDGSQKWVDFASTYWHVDCVRKVSLNAFIDHYQNWCKRKKYNFSQSKAEEIYGKAKELVPVLPKDAITKLIIKQAVDQLNSASTTVESLRTLMNETASKLPEYPVVMAMKGVGTSLGPQLIAEIGDVSRFTHKSAITAFAGVDPGVNESGSYEQKSVPTSKRGSSDLRKTLFQVMDVLIKTHPQDDPVYQFLDKKRAQGKPYYVYMTAGANKFLRIYYGRVKEYLSSLPES

SEQ ID NO: 215082 - protein, 408 aa, unidentified
MQLLIGIDWSQDHHHVCFMNPDGARQVEFQIEHKMDGFVKLDDKRAKFGVPAPKCLVALETAHNLVVDYLWSRQYIVYVIAPGVVKSCRGRFGSSGAYTDASSAYLLADLLRTDRQRFIPWLPDSALTRQMRAQLSLIEALRRDINRWSNRLHSVLLRYHPQIIGLFGKLTTPISLQCIVTYPTPQAIAALDLQAWNAFCRQHDYRRPDWIAKTYAHLQVPAPQPDPAVVQAYQDEAVFEARLLLSLVRQRKQVLQKVRTCFEQHPDAFIFDSLPGAGELLGPSLLVKYGDRRERFPKAAGVQALAGTCPVTLWSGKKRKIVFRKACDRDFRRIAQQFAIASVKQSLWAATYWQEVRPRCDSDSHAYRCVANRWLAVIWKMWQSRQPYDEEYHLRQRLLRRKPRSRQS

SEQ ID NO: 215083 - protein, 415 aa, unidentified
MGDRQQWYAGVDWGSQSHHVVLTDGDGRKIGERSFKHGGEGLAEMAAWLMAASCAAEPGQILAAIEVPHGPVVETLIERGFKVHAINPKQMDRFRDRFTMAGAKDDSRDAEVMASALRTDPRCFRPLAAADPTIVELREWSRIAEDLGVERNRLVNRLREQLWRYFPALLELEDDLGAEWLLELWEAAPTPDTASRLREATIAKLLKRHRIRRFDAAFVVNTLCRPPVRVAAGTVEAASAHVALLVPRIRLLNRQIKDAHSRIDGLTARLMPTEEAEPGQKKQHDAEILASLPGVGRTVLATLLAEAWDALQRRDYAALRSLAGVAPVTKRSGKSCVVVRRQACHDRLANAVYHWARVAVQHDPRSRAKYAELRRRGHSHGRALRSVADRLLNVACAMLKSGAAFNPSSAAQKPA

SEQ ID NO: 215084 - protein, 341 aa, unidentified
MAVAGGLDLHRGQLTFDYVDTGTGESWRGRICPADRESLRGWLRRFHGVPDVEFAVEGCTGWRYVAEELQRAGITAHLAEPAETAGLRGRKRRAKTDWADARHLRDLLLDGRIPESWIPPGHVLEARALVRLYKDLLEERTSWQQRVHATLFHQGIPVVPRLGTADGQQRLDAAELSAAGRRAVQAGLRQIERLTQEMASLRRELARLSSRQPGCRALRRAHYGIGGLLSVAVWAELGDCRRFSSSDDAVRHTGLDITVYDSDGRRARGHIARQGPPVLRWALYEAALYASRPASPDYAYYCGVRDRIDGQRALLSVARKLARRCYHTLRDLGEDALAPAA

SEQ ID NO: 215085 - protein, 339 aa, unidentified
MDQFTKKKYFIGIDISKDHLDVALLKVEDLDVFKDKEVDNSFTGFDAIQNWLLKQRLKLEDCLFCMEHTGTYGLLLFAWLSQLGIDYCVEPGLKIKRSSGITRGKNDKVDARRIADYASTNKAKLIPFQMPSNLLLQIKQFLTYRDQQTKIKVSLKNSLKSHDQYQRVSGVQSISDEIQHQINECDQRIDRIDAQIIELINTDETLKKNFDLATSVKGIGLVIAAFMLVTTNNFTSFENGRKYACYTGIAPFENSSGKYQGKTKVSHLANKRMKTLLSNGANSARRWDPELSGYYDRKINEGKEHKLVINSIKCKIVNRVFAVVKRETPYVTTYQQKIA

SEQ ID NO: 215086 - protein, 427 aa, unidentified
MGGLPALLECCCGLDVHRDTIVACILRGSLDEEPKSEIRTFSTLPDGIYELRQWLELELCMFVAMESTGIYWQPVYDELETAFDGQMVLLVVNARHIKNVPGRKTDKKDSEWIATLLRAGLLRGSFIPTLEIRELRDLTRYRVSLAQELTAQKNRVEKLLQGAGIKLSSFVSDVFGVSGRNMLGYISLHGSLPFELMKDMLKGRLKSKEDEITRALQATLSPHQQEMLQMLLRHLDQLNLNIHEVETKVETRLKRFQEQVELLSSIPGIKFTGAAAIISEIGIDMSQFMDAGHIASWAGMSPGSNESAGKKKSARALKGNPRIKRILCEIAWVVTRMRNTYLSQWYWKVKARRGAKKAIVALGRRILTIIYAILKSGSPYAESKVTKRQTDQTDQTDRRKESLLRELKRLGVEVQVVEKDLSLQVSA

SEQ ID NO: 215087 - protein, 349 aa, unidentified
MTLTIVDEARAVTGGVDTHADTHMAAALDAVGGLLGVQEFPATLAGYARLLAWLRGFGVVHLVGIEGTGSYGAGLARHVAAAGIRVVEVDRSDRQDRRRKGKSDPLDAISAARAAQSGRASGAPRGRDGAVEAIRALMVAKRTARAQRTQTINQARALILTGPDDVRARFAHQTPAGLVAELAALRPRPGSMVRYHTLLSLRELGRRAQFLDAQLARLDELIVPLVTARAPRLLQLYGVGSDTAATLLIAAGDHPRRLRSEAAWAHLCASAPIPASSGKVTRHRLNRGGDRQANHALWRIVITRMGSHPPTRAYVARRSKEGLSKPEIIRCLKRYAAREVYPHLRPGPG

SEQ ID NO: 215088 - protein, 348 aa, unidentified
MNVYVGMDVHRKRSQVAVLDDDGVQQRNRNLPNDPAQLAPILGGLPPGTPVAFEAAYGWGWLVDLLEELELEPHLVHPSRCKAIASARLKDDKVDARTLAQLLRADLLPEAWIAPQQVRDLRALLRHRASLVRLSTTAKNRIHAVLADRGIQQQTGLWTGTGRVWLAGLPLPPTPRAIVEDYLALLDGLAEPIARLEHQIHALAKPDPRVQALMALPGVGRLTAMTLVAEIGDIARFPTARKLCAWAGLTPAVRNSDRKVRHGHITKQGSVWVRWILQEAAQTAKRSPMFATTYAQLARRRGKQIATVAIARRLLARCFHILTQLEAATGEGQTGCARNKRMSLQHGR

SEQ ID NO: 215089 - protein, 416 aa, unidentified
MPATVSISTDGVVMTMMIGIDPHKASHTAVVQTPAETVVGQIKVRATSKQATTLLTWAEPWPERVWAIEGASGLGRLLAQQLIAAGQTVLDVQPKLAARARLLNTGQVNKNDPNDARSVGVAALRSPDVRAVQADDHASVMQLWVRRNRDLSRTYNRIACRLHALLCDLVPGGFAKQITPNLAAALLAGMDSTADPVRQGQLELAEDLVADLRRAAEQRRAVVRRLAAIVAATGTTLTQIYGVGPVVAATVLGDVGPISRFRSRDHFASYNGTAPIEACSGGRTVHRLSRRGNRHLNHAIHMAAVAQIRYPNTIGRAYYDRKRTEGMSGKSALRALKRKISDALYSRMIADTQRATASASTGGPGGQTGNDSASSATGSHPEPALRKSHSRTAPKPTTTRSYTPSPAPAKPRRRTT

SEQ ID NO: 215090 - protein, 410 aa, unidentified
MDVVYSRCAGLDIHKKTIMACVIVPGPKGKPQKTIQAFGTMTDDIVALGDWLAAQQVTHVAMESTGVYWQPLWNLLEQRFALLLVNAQHIKQVPGRKTDVGDSEWIADLLRHGLLRASFVPDRAQRELRELTRYRTALLQERAAEVNRLQKTLEGANIKLAAVASDVLGKSGRQILEALVVGGSEAVELAQLAKGRMRDKIPQLERALTGSFRPHQQFLVARHLAFIDAIDETVAQVSAEIADRLSPVEADVQLLDAITGIGRRTAEVWLSEVGTDLERFPTHSHLASWAGMCPGNNESAGKRKSGKTRKGNSSLRTALVEAAQAAARKRDSYLSAQYRRLAARRGKKKAIIALGHSLLIIAYHILKRRIDFQDLGPTYFDERNRTMVERRLVRRLERLGYKVALEPVAA

SEQ ID NO: 215091 - protein, 321 aa, unidentified
MSKNKQFLGIDVSKDVLDVYDYQGNWYQFKNDASGFKELLLITTDLTHCIMEATGYYHVRLAYFLTEKGVLLSVENPLKVKRFIQVNLSKVKTDKSDAKQLYNYGVSQSPSIWKGDSKEQQECLQIVRLLSVYTKQSTQLKNKLHGESVLGTPSKLVVNSLTRQLKNIQKEIVKLEDLLLENVKKSYQEEITLLKSIPGIGGKTALMLLVFTDGFKRFTSAKELCSYAGITPTIRESGSSIKGRPRISKMGNPKLRNLLFMCSFNACKYNKACRELYDRIVAKGKSKKLALIAVCNKLLKQAFAIVKSGLPYDANYKSTLV

SEQ ID NO: 215092 - protein, 409 aa, unidentified
MARYILGVDWADQSHEICVVDEQGERIKEQTLTNTVDSFSAFGRWLYECTADGLELWAAIEKPEGRIIDFLLDHGVLVYPINPKSLDRARDRFRVSRSKSDAFDAWVLAQFLRTDHAHLSPLCPNSPPAAELKLLTRDYQKLVQQKTRWINQLKATLKEYYPRPLELFELITCPTALDFLQRYPTPEKAQRLTKKQWRTFAQKHRWNAGHLEQVWQILRQPQLPIAAHVVRAKARLMIHLVDQLRLQVHAIEDYKRAIEQMFAALPAATWAQSLPGGKSGTTLPTLWAELGDAVGRWHSFRHLQAQAGTTPVTRTSGKFKQVHFRFACNKVMRYAINWMAQLSLQHCEWAKVYYDRQRARGHSHQQAIRVLGAKWLKIIFTMWRDHVSYDETFHLANIARQEMRQAILA

SEQ ID NO: 215093 - protein, 452 aa, unidentified
MLVIGLDLGRKSRHKAVVLDDMQKQVFSRQVASTTGDLERLLTAARRHSSGGEIHVVMEATGMSWLVPTEFFENAGCRVYRMKADKAADFRRYLSKHTKTDEVDAASLARMRFVESDALEEVHLRDRDRFILKQLIKQREDFLADAVRYRSRLKDLLDSFIPGLSGLSNRLVEKRKFRSVLEKLCNLPWVQTMGRKRFHRYVGRRDADLKEGDVDRIYDACVDALALHDEAYVDFDVLQGQVANYAEAVTFAEARVDELTQEIETAYAVTDADQILKSIPGVGELTAAYAEAYLAPIERFPDEKSVDSWAGVIPRTSASGQMQRKGLRMSKAGPPALRRVLYLAADVARRDDPQLAALYRREMVDKGNPHTKAVVACMRRLLHRIVRVMRDRRRYELRDLEGGPVDKHTARQMISAELQVPPEVRKRLTQRTEASLRMPSKAVRRTPQRSLS

SEQ ID NO: 215094 - protein, 352 aa, unidentified
MGYFAGLDVSLEMTSICIVDADGTVMKEAKVASEPDDLVAFFAQCGMVMKRIGLEAGAPSQWLYGGMAEAGLPVVCIETRHAKAALSAMPNKTDRNDARGIANIMRTGWFRAVHVKTQTAQELRFLLVARQTLVRKLMDIELAIRGMLRSFGLKMGVVSKRDFEARVLELAGDRAMLMRALNPMLTARRALAVEYANLQKVAMDFARDDEVCRRLMTVPGVGPIVALTYRATIDVPSRFRRSKSVGAHLGLTPRAYQSGEVDWTGRVSKSGDAMARAALYEAAHILLVRVKRWSSLKAWGMRLVKNRGHKRAVTALARRMAVLMHRIWVEGTTFLWKTGDGQAIGQKPIPAV

SEQ ID NO: 215095 - protein, 391 aa, unidentified
MVCVGIDVAKDKHDCCILDSEGTPLVDCFTIPNNMDGFKSLLQTIQDCSQKSDKIKVGLEATGHYSYNILGFLLDNDLPVYVMNPLHTNLYRKSLSLRKTKTDRVDARTIATMLLSDVDLKSYTDTAYHNEELKSLTRYRFDKVQERAKLKQSVSRLVTILFPELEQLVSSIHGTSIYALLSEYPGAKQISEAHLTRLANILVKTSRGHYRKDKATHIRDAARTSIGSVMPAKSLELKHTIKLIQELTSEINEIEDAIRKIMDELKPPILSIPGMGFHSAAMILAEVGDFSNFNSPDKVLAYAGCSPSTYQSGKLTNCYAHMEKRGSRYLRYALYTATKYVCYWNPVFTEYLTKKQAEGKHYNVALSHATKKLVRLIYALQKSGKAYLAVT

SEQ ID NO: 215096 - protein, 318 aa, unidentified
MQISGCVIGVDVGKFELQVAGHEKSIVSGVLPNNRSSIVGWLKRLPAGSVIGMEATGGYQELLARLAHERGFVVYVLNPTHVHHYAISLGNRGKTDRLDAEVIAQYIAQRHTKLHPYEPISPELQQVRALQALRSTVVRVSTSLRLSAQRHGCASVHQKKALAGLSSWAEQLERELIAKIEAQSEWAKIYGLLTGICGIGPINGVALTALFTRVHFTSSDAVVAFCGLDPRPKESGRKVGRRRLSKQGDKAARSLLYNAASSAVRTPHFKDYYAALRARGLASTAALVVIARKLLRIAYGVWRTGRAFDPDRLNLKTA

SEQ ID NO: 215097 - protein, 414 aa, unidentified
MLASAQPVSSRSAGVRLEDLVAVPIDVGKHKAMAKVVDFTGAELARPFEFPLDRSGVKALVEQVRRTTPASVSLVRVGLEAAGHYHLPLAGGVLPVDWELRVLNPGHVSMQRKVNGQRGVKTDKIDLAAITDLLLAGRGVIAPPFADPVMTLTGWVAHRRRRSLLRRRTIQQLTTHVDRCFPGLGATMWSVALSKAGRLVISELADPARVARLGPSRLRSFAAKRGVRMTTPLAEKIVEAARQALPVPGAEVSRRLLANDLQLLADVEEQIALADLEIEALLPQTPFGVLTSTPGWGSVRVANYGAAVGDPERWPGHRQLYRAAGLTPRLYESAGHRADGHITREGSVLLRVALVDLGTGLWHSEPVSRTYGAELRARGKPGGIILTAMAHRANKIAFAMVRDHKTWEPSRWAA

SEQ ID NO: 215098 - protein, 436 aa, unidentified
MEEVEDEPLFAERVAGIDIGKAMIMVTVRVPGDSGSGRRQQETREFRTVRKDLLALADWLRSWQVTKIGMEATGDYWKPVYFLLEREGFCCDLYHASQVKALPGRPKTDKLDSAWLAKITERGSLASSFVPPEDIRRLRTHTRYRRHLTQARTSEMQRCEKLLEDAHLKLSSVISDIHGKAGRNMLTAIIAGERNPKVLAQMALTRMRAKIPQLEEALDCSFFTEQHAFILAMMLANIDHLTAQISELTAKINVLCQPYEHQIAQLDAIPGYGVITAQDIIGEIGTDMTVFPTAGHLCSWARRAPQVRESGGKRKGKNATGRGNPYLGAALGEAAVNAGRTQTFLGTKYRRLVRHMPKRKAQGAISRTQLVITHALLSDPEAEYEDLGTDYYERRANIRREVRSHARAIERRGYRVILEPLEPGLDPDILPVTKTS

SEQ ID NO: 215099 - protein, 319 aa, unidentified
MTTVHLFVGIDVCKRWLDAFAEPLGYRRFANSPEGVDELAAWIGGSEASVGLEATGPHHVLAAERLSEAGCSVHVYNPRRVKQLAGGLGFLAKTDRVDARVVACCVAIVQSPFEARSEAGKRLRDLSRHIDYLTRTRADLKKKKGEPGQSDLVAESIRRQLDALDAEIALLEAAWRELVKTSPLHAERYRNLLTVTRIGPKSARAVASELPEDLSRYSRKQLAAYFGLVPYDDQSGDSRRRSRLKCGNPHLRRPLFMAATLASYFDPECKAFADRLRAKGKHHLCVVCAVMHKLARRAIAVVLRNGPWRENMPHPLDKP

SEQ ID NO: 215100 - protein, 357 aa, unidentified
MGKSIIDPSSVTRVGLDMAKRVFRIHAVDATGFVVIARSVNRRTLVKFFDMLPRWVVAMEACSSAHHWGRQLLDLGFAVKLIPPAHVKPYVRRSKNDAAAAAAICEAAGRPGQRFVPVRSVENQAALMRHRARELMVGQRTAALNPLRGHLSEIGVVAAQGVQNAYALKDMAAEGFDANGEIVVPDCVRLALAPLVRQIDALDEAIEVIDRELEASARTDETAKRLMTIPGIGPVTAMALLATIQDFAAFSSGREFAAFLGLTPREHSTGGKPRLGRITKMGDRYLRKLLVQGACSALGHRKGHNDALRRWASGMLERKTVKYKFKLTAVALANKLARIVYALATKGGHYDDRPVAA

SEQ ID NO: 215101 - protein, 314 aa, unidentified
MDKTICGIDVSKDRLDVAVRPSGERFVVARNGAGLDDLVGRLKILKPYLVVLEATGGFETVVVAALAAAGLPVAVANPAQVRAFAKAIGQRAKTDPIDAGVIAHFGEATGVTPRPLRDQATQQLADLVARRRQIVEMIGAERQREKRANSRIKKSIARLVKALERELTSVDTDIDDAVRGSPAWREKEDLLSSVPSVGPTISRTLIAELPELGTLGGKQIVALVGLAPFTRQSGQWRGKSFIGGGRTSVRKVLFMGAMVGLRHNPVLKAFFERLIAAGKPKKVAIIAVARKLLTILNAILRDGRPWRGTVEAVS

SEQ ID NO: 215102 - protein, 336 aa, unidentified
MENIALIGIDLGKNSFHIHCQDRRGKAVYRKKFTRSKLIEFLATCPATTIAMEACGGSHFMACKLEELGHFPKLISPQFVRPFVKSNKNDFVDAEAICEAASRPSMRFVQPRTESQQAMRALHRVRESLVQDKVKTTNQMHAFLLEFGISVPRGSAVISRLSTILEDNNLLLYLSQLLLKLQQHYHYLVEQIKELESQLKRKLDEDEVGQRLLSIPCVGTLTASTISTEIGDGKQYASSRDFAAATGLVPRQYSTGGGGRTTLLGISKRGNKKIRTLLVQCARVFIQKLEHQSGRLADWGRELLCRKSNFVVTCALANKLARIAWALTTRQQTYEA

SEQ ID NO: 215103 - protein, 421 aa, unidentified
MIDHETFTWFAAIDWGTEKHQACVVDVRGGIAEERAFSHDGAGLALLCDWILSIAGNATIVAVAVEVPHGPVVDALLDRGLAVYAINPKQLDRLRDRFSLSGAKDDRRDAYVAADGLRTDRHLFRRLQIADPRLIQLRGWSRLAEELQQERVRLSNRLYSQLWRYYPQMLGLSDDLAAGWLLDLWTMAPTPVKAMHLRKTSVVQLLKRNRIRRIDAETVLRALRGPAINVADGVVEAATLHIGSLVTRLRIVGRELHDAMRKLDELCACLDEPSPTAAEHGGSGRHDVKILKSMPGIGKIILGILLAEASGPLSRRDYQALRTLSGVAPVTKQSGKSRMVVRRYAAHVRLRDAVYHWARVAIQHDPRSHSRYVALRQRGHSHGRAIRGVADRLLALACTLLQRQTVFDRDFSRGEELTAVP

SEQ ID NO: 215104 - protein, 383 aa, unidentified
MKNNTTSDKLTKTRLRHLRAQAAQQRLTIGVDTGDRSSRYCIVNPLGNVETQGSLATSKSGFNTLFAQLPPTFVVIEAGTHSPWISRHLESLGHQVCVANPRNVALISQSKRKNDRVDAEKLARLGRADPQLLSPIQHRSEQTQLDLLVIRGRDQLVESRTGLINCVRGLVKPLGERLASCDADHVTTELLADLPDRLRQSLQPMIQAIEAVTAQIHALNLQINEIAQRYPEIKLITPIDGVGELTALTFLLTIEDVTRFNKSREVGAYFGLVPGQSQSGDSDPQQRITKQGDPLVRKLLVQCAHCIMRHNAADSDLRRWGMKKLQEQNAQPNSGSKKRKGKGKKRILVAIARRLAVLMHHLLATGEVYDPLYQAKQQFRQAA

SEQ ID NO: 215105 - protein, 336 aa, unidentified
MQYVGMDVHWRQTTICILDENGRRVKIFNVQGPWQKVLEELGRIKGDWAVCFEASCGYGWLYERLKRRAQKVVVAHPGQLRLIFRSKRKSDRVDAEKLAKLLYLDEVPPVYVPSAEVRSWRAMIEHRQKLLQERVRTKNQVRALLRTHGIVAPRGLWTKQGRAWIEAQELPTSMDRLQRDVLLERLESLRGLVERVEEALGAIAQSQAGVKLLMEIPGVGIRTAEAVMAYVDDPHRFRSLKSIGSYFGLVPCQDESAGKNRLGHLTRQGPATVRKLLTEASWQAIRRSRTIRAHFERIRQGHPERKRIALVATAHYLLRVMLAMLRTGEVWRAEAA

SEQ ID NO: 215106 - protein, 370 aa, unidentified
MSETSTFVGLDAHKKTIQVALLAPGRTVPLEWEINHEPAAVRKLARRLLKEGEGRVQACYEAGPCGYALQRQLKEAGVDCQVIAPSLIPIKPGEHIKTDRRDARKLAELHRAGLLTEVHPPTPEEEAVRDLCRAREDAKEDLVRCRHRLGKMLLRRGLIWPSGRNPWTQAHREWLRSLSFERESERAAFNDYVLAVDQVEERVRTLESQLESVAQAEPYREPVAWLRCFRGIDTVTAMTIVAELHDFRRFTSPRGLMSYLGLVPKEHSSGESRRRGGITKAGNCHVRRVLIEASWHYRHPHAIGRALRKRREGQPAKVIAIADKAAQRLYRRFYRLGARGKPGCRIVVAVARELAGFIWSVLYPRAAGMA

SEQ ID NO: 215107 - protein, 405 aa, unidentified
MQVYIGIDWSEKKHDAVFVNEAAAVLAIVSFEHTPQGLAQLETVRRDLGVDPKDVLVGLETAHNLLIDYLWARNYTQVYVVPPSVVRGSRQRYRQSGARTDKSDAELLANLLRTDQHRLQPWLPDSLLTRQMRSKISLHMHLTRSSVRLTNRLRAVLLRYYPAALEVFYSLASPITLAFIQAFPTPQDAATLSFEAFQRFARHHQHARPQQLPARYARLQSAQIAASPDTVVVCQGEAVTLAALLLTTMQAKKANTRELGALFAQHPDQDIFASLPGTGDFLQPGLLVKFGDDRRRFPTPGSVQALAGTCPVTDQSGKRKVIRFRRACDREFRHIAQQWARSSLKKSVWANSYYPQVRPGCRSENHADRCLANGWLAIAWKLWQTNQAYDEAYHMQQRMRRAKPK

SEQ ID NO: 215108 - protein, 338 aa, unidentified
MNKFNHFVGIDISKKTFDAALIIGSDTTNIKHQIFKQNAEGFSEFLDWLAYYKITNDEVLICMEHTGLYTYGLIDFLVAAGLKLWVEMPLRIKRSMGLLRGGDDKAAAIQIALYTYRYKDQVLLWKPEQAIVLQLRQFSGQRDRLKQALNQLMIPLQEIAECYHDAAIIKVQLKLQAPVIKAIEKSIASIETQIDKLIAAEPAIQATIARVSSIKGVGKQTAIHVFIYTKGFTTFSSGKQLASYCGVVPFTKTSGTSVRYKTGVSPFANKHLKKLLHLCAMAAIQHNDELKHYYHRKIVEGKNKMSVVNAVRNKLVQRIFAVVRDGRNYVENYQYQRA

SEQ ID NO: 215109 - protein, 394 aa, unidentified
MPQQRKPNDLSRSLIALDMDTTLIAVVELSLSSWLVAGIVPGIERQPLKKLKTDENALLALFNSWRDEAVRSGHKISRIAVAFEAGRDGFWLARWLKARGIEAHVIHASSVAVSREHRRAKTDRLDTELLKRAFVGWLRGERDHCKTAAIPSLCEEDAKRPSRERESLVGEQSRLVNRMKATLIRLGIRAFNPKLRYAEQRLETLRTPEGEPIPANTLAELKRDMQRRRFICGQIRSIEQERLERLERTPDTEPHAMVRLLARVTGIGIETADLLVHEVLLRNMRDRRAVARYGGLTGSPDRSGGTNREKGMARSGNARVRRGMIQLAWRFLLFQKDSALVQWYRRRTEHSPKARKTMIVALARKLLIALWRLAREGVVPEGVAMRPGVMNTSY

SEQ ID NO: 215110 - protein, 344 aa, unidentified
MEYYAGLDVSLRSCAVCIVDTKGKVVLERELACEVSDISDWLRKFTHPIERVGFEAGTMSQHLFFGLQAEGFDVVCMEARQVNAALSAMRNKTDKNDARGIAQILRTGWFSPVHMKSREAHGLRALLSSRKALLNKTIDLSNEVRGLLKIFGLRLPKTVSHGSFDNIVRPMIQMDDVLIHALIPLLDARVALYQHYLELDRRVKRAASHDEVCMRLMTVPGVGPIAALTFKAAVDDPLRFKSSRTVAAHFGLTPRRYQSGESDNPGRISRAGDRDVRSILYSAANAMLMRTMAASQLKSWGMRLMRTKGRRRAVVAVARKLAVLLHRMWIENTEFRLEGVEGIK

SEQ ID NO: 215111 - protein, 405 aa, unidentified
MYYVGVDIAKEKHYVCILDDTKELACKPFWIYSDILGLRELLKRLAELSLDMDDFIIGIESTGAFSENFYSYITDADYKVILLNSYQTSKYRDFSTLKKIKNDSIDAYVIAELLASGKYKASYISNEDYHNLKVLNRLKKSLDDKIKTIKREISTVVATVNPEIEKVFPNIFTKTAIAIIKSYPTAMDISKATPEKLTKIFRHIKGNSFNLEKAKYLIELAKSSIYTGRANESRALMIKTNIKILELYIQERDEVEEQIQILIDNQLDDDSSNIENLKSIPGVSNKTVTAILGECGDLRRFESAKAFIGFLGLYPTLYQSGKSLSTGTLAKRGIPIAKHALYMAAVSSVRHNTELNKIFRDKLSAGKSKKEALIIIAKKLASIIYSLFKYDQPYNPNRVLIQHKR

SEQ ID NO: 215112 - protein, 341 aa, unidentified
MKQFIRIGVDLAKNYFQIHALPSEGAPAIKRKVTRRKMREFFSQIAPCCVGMEACASAHYWARELKAIGHEVRLMPPAYTKPYVKRGKNDAVDAEAICEAVSRPGMRFVPIKTAEQQATLMLHKTRELLVKQRTMSVNAVRSHLAEFGIVAAKGIGRVDELLELAKEDATLPSATMMAVKVLGRQIEELEKGIEDLEKEIAKAHARSETSQSLSEIPGIGKLVASVIAASIPDPSVFRSGRDFAAWLGLTPRQNSTGGKRSLGAITKAGNRYIRKLLVLGATSLLNVVSKRKGGLRDWIVGLLAKKPARLVTVALANKLARIIWAMMKNGECFRTEMFAKA

SEQ ID NO: 215113 - protein, 369 aa, unidentified
MECLAQPLQKGTPLMTIAKYIGMDVHKESISIAVMNSTGKFVMECVIETKASMLLQFIDGLRGDVRVTFEEGTWAAWLYDLLKPHVSEVVVCNPRKNALLKDGSKSDRIDARKLAELLRGNQLKPVYHGEQGLRTLKELARSYLTISKDVTRVMNRLKALYRSWGIACAGTQVYAPRHRSEWLGRISEAGVRRRAEHCYQQLDVLRLLRQQVRRDLLLESKKHQAWRLLGLIPGIGPIRAALLIALIQTPHRFRTKRQLWTYSGLGLETHDSAQYRVVEGQLRSKKSVTLRGLNQDHNHDLKDIFKGAATRVSSSSNGPLHDFYEHLLAQGRKPTMARLTLARKIAAITLIVWKKEVHFDASFLKSQAA

SEQ ID NO: 215114 - protein, 394 aa, unidentified
MNSMTKAASGVVVGVDAHTDTHDAAVLDDCGRLLATRTFPADAAGYVELLTWAQRFGPVAVTGVESTGSYAAGLVRHLRAQGLEVREVNQPHAHTRRRRGKSDPIDAEMAGRHVLAESSVVIAKDTTGIVESIRQLRVARDGAVKARSAALNTLTGLIVSAPQELRAQLQLRKTTRGQATLCARFRPDRWGLHEPVHAAKAALRSVARRVIDLDAEIAALDAQLKPLVARAAPRATSLLAVSTGHAGTLLVTAGENIQRLTGEASFAALCGASPIPVSTGRTDRHRLNYGGDRDANRALHMIAVCRLRYCQRTRAYAERRTAEGKTKTEIIRCLKRYIAARSTTPSRPTSTPAPLHRRAVRPSPSPAALGRPEPRDGPLDIYRNVPACLCEHER

SEQ ID NO: 215115 - protein, 336 aa, unidentified
MFQLGIDVSKNPLDLCLLREGVKGRVKTRRLKNDVNAASSVITWLGKQQCAPADVHIIMEATGVYHEPLAYGLYKAGAKVSLANPHRSREFARGMDILTKNDKIDAYMLACYGALKEPEPWVPQPESIRYLSALLRRRDALVTDRSREKNRLEKCRATDIPPVIAESIENVLRNLSAEIERLDELLLTHLNQHPELKKDFDLLTSIKSVGFQLGLNMLVILRGHRFDTAGQLAAFLGVVPVEKSSGTSVRGKPKLSKNGPPEIRAKLYLASMCGLRFNPVMKAMYERLCLSGKAKMCAIGALMRKLVHLCYGVLKTQKPFDAEHLSSDAPSACKAA

SEQ ID NO: 215116 - protein, 387 aa, unidentified
MPQPNDLSRSLAALDQDSTLIAVIEMSQSTWLVAGMVPGINRQPLKKLAADETALLQLLYRWRDEATRAGHTIDRIAVAYEAGRDGFWLARWLRARGIEAYVIHPTSVAVSREHRRAKTDRLDTELLKRAFLGWLRGEPGHCSMAMIPTLEEEDAKRPNRERENLVSERTRIVNRMKSTLARLGIRGFKPTLRKAPERLARLLTPEGALLPPNTLAELQRDMARLRFAMDQIKEIEAARLVRLEQHPEEPNHTMILLLARIIGVGIETADMLVHEILSRKLRDRKAVARYGGLTGAPDESGAKRREKGLARAGNARVRRGMIQLAWRFLMFQKDSALAQWYQRQTADGRGTTRKTMIVALARKLLVALWRLVTTGEVPQGVVLRRAA

SEQ ID NO: 215117 - protein, 407 aa, unidentified
MRDGALEVETSLELFEADKLFDLERQGAEVSVRQSLRLVAPARESAFQKSEAFCAQPLNKESRMEPKLIVAGIDVHKKMLAVVVIDDDQPQQAREQRRFGTSRNELRNLETWLDSHGVSQVVMESTALYWRPVWLALEGKYVLHLAQAQSNAAPRGRKSDYADALRLARRFLAAELRLSFVPDAEQRTWRCLSRNKHQKRQRRIKIQNQIEALLEECQIKLSSVITDLLGATGYRILKALAKGETDPKKLVELAASNLKASKEQLAEAVGTPMGPRYRSILSLQLDELELLDKHIAELSRQLGEALQSQQAAVLRLCEIPGVREDAAWQMIAELGSAAAAFETAGQMASWIGVCPGREESAGKSTSNRSPKGNRSMRRVLNQIAWSAVRTKDSFFRELYHRLIPRLL

SEQ ID NO: 215118 - protein, 339 aa, unidentified
MPLYAGLDLHANSNYLAIVAGDGKRVFKKKLPNDPQQILEALRPYQGDLVGLVVESTYNWYWLVDTLMGEGYKVHLANPSAIQQYAGLKHIDDQHDAFWLAEMLRLGVLPEGYIYPKEERPIRDLLRKRGHLVRLRTSLVISLENIISRNCGVKLRANDVKRLKEDCVQPLLEENEDLALAGGVSKETIDFLTRKIQKIEATILKRIALKESYAGLLHLSGVGKILALTIMLETGPIRRFAKAGNYASYCRKVPSRWTSNGKTKGKGNQKNGNKYLAWAFSEAAEFARRHDAAARAYYQRKRQKTNLMVAHSALAHKLAKAAYYIMRDQVPFVPEKLFG

SEQ ID NO: 215119 - protein, 364 aa, unidentified
MDNFTHIGLDVHKETIAVAVLRPGTIEADERVIPNTPEAIRRLLSRFPDPGALRTCYEAGPTGYDTHRLIDSLGISCDVIAPSLIPKRSGVRVKTDRSDARNLARLHRAGELTAVRVPTSAEEAARDLIRVREEVKSDRRIARQRIRSFLLRYGKRYPAGSDRWSHRFEVWARALTFEEPHAQAAYQHLLGAYFVRDTQLAALGRQIEDLAREEPFAEPVALLRTLRGIDTLSAMTIAAETCDFARFGSAGSYMAFTGLIPSEHSSGASTRHGSITKTGNRHVRRVLVEAAWAYRHAPAVRGKLRERLEGASPEVAVHSWAAQCRCHGTYRKITARKGAHTAVVATARELSGFVWGLMTGNLAA

SEQ ID NO: 215120 - protein, 348 aa, unidentified
MRNYNGSKTIKAIGIDLAKSVFHLHGVDAQGMVMTRKRLSRRKLAELMAQLPPCLVAMEACGGAHYWARKFQAMGHDVRLISPQFVKPYVKSNKNDMADAEAICEAVQRPTMRFVPIKSIEQQDILSIHRAREQVVRRRTAQGNQIRGLLMEYGLVIPKGMCALHAQLPDILADADNELTLMFRDLLQGLWEELINLDHHIAGYDQQIKTLSEQSAVCKRLMTIPGVGPMVATALVASVSDGKTFKNGREMAAWLGLVARQHSTGGKPRLLGISKRGDVYLRKLLIHGARAALRWVDKKHDKRSMWATSLKDRRGQNIAAVALANKTVRTAWVLITREEAYRTSATTM

SEQ ID NO: 215121 - protein, 370 aa, unidentified
MSETTTLFVGLDVHKDSIAVAHAGADRSSEVVYVGQIGTREADLDKLLRRLHSHASRLVVAYEAGPCGYGLYRKLTERGVCCLVVAPSLIPKKPGERVKTDRRDAAQLARLLRSGDLTSIYVPTVEDEAVRDLSRAREASIGVLKDAKLRLKSFLLRHGLNYSGRASWNDAHLRYLAKVVCPTPAQQIVFQESLRAVGEQTERVRRLEDELVEIAAKWRLHPIVDAFQSMRGVQSHTAVTIAAELGDLTRFDNPRQLAAFVGLIPSEYSTGESRRLGPITKAGNGHARRALVEAAWAYRYPAKVSAHLQKRLEHCAKPIQDISWKAQVRLCKRYRRMVSRGKNPNIVVTAIAREILAFLWAIARAVPIGD

SEQ ID NO: 215122 - protein, 412 aa, unidentified
MSRSNYVFALDFFGKKLLSFEARNNLPGSEEIVSKILTCLNENNLTHLTIAMESTSFYSWHIANTLATHDALVWFKPKIYCLNPRVISAYKKSFVDIDKTDPKDAFVIADFARVGKITTAPWSGGQYIALQRLTRCRLHLMENISREKTYILSNIFLKFSELAVLGKDESPFSNTFGASSLATLTEFMTIEDLANSSLEDLITFLIEKSKNRFSNPEATAKLLQKAARDSYRLDKALYDPLNATIAASLNCIKALEKEVKGLDKAIEKAIKRIDNHQFQCLLSVPGIGPVFAAGIIAEVGDITKFNNQAAVAKYAGLTWRKKQSGNFTADNTFLTKTGNKYLRYYLLEAAASVMRNSSEYLDYYHKKYGEALIHKHKRALALTGRKLVRLIFALLRNNQLYTSNEVVEKATI

SEQ ID NO: 215123 - protein, 335 aa, unidentified
MQGHAGFSGSDLVVVGVDTHKAFHVAAVIDSVGGLLGSTTVPATAAGYAQLVAWARSFGRLERAGVEGTGSYGAGLARHIAERGIAVIEVNRPDKSTRRRRGKTDAIDAESAARAVLSGYAHGTAKSADGPVEMLRMFKLAKDSAMKSRTQAINQLRAVLVNTEPSLRESLSGLGTTRLVQRCARLLPGDGGDALAASKYTLRLLARRIQNLTAEIEDLQREIHRVVTAHRPQLLEGYGLGPDTAATLLITAGDNPDRLRSEASFASLCGVCPVEASSGNTSRRRLSRGGDRRANAAIYRIALSRLRWDQRTQSYLQRRIAEGKTKREALRCLIG

SEQ ID NO: 215124 - protein, 349 aa, unidentified
MNPVVGLDISKGESQVQAFLDKGNPYRKSFKITHTLEGLNDLVIFLEEVKNEAGMKPTIILEATGHYGAPVIHYLEERGYLLIIINPLISYKARGSSLRKVKTDAIDAYLLCELFYKEELEPYKKRGVQLLNLRNLTRQHENITGVMIQTKLQFQAVLEQVFPEYTGVFGDLYSKVSLLTLSKFPSSEDILKASEESITDKIYELCKSRSINWANEKAIQLKAAATRNPFEKTVYQSHILSLDMYIKILLQYKEHLSKLESEIDALAKEIEEYSIIKSIPGIGEKIAATVISEIGEIDRFNNPKKLVAFAGVDPSVFESGKFSATKNRITKRGSSRLRHALYMAVRCGI

SEQ ID NO: 215125 - protein, 393 aa, unidentified
MICVGIDVAKDKHDCFILNSESEVQADVFTIQNNAEGFDTLLQTIRRSTRPEDKIKVGLEATGHYCYNILGFLLNKGLPTYVINPLHTNLYRKSLSLRKTKTDRVDARTIAAMLMSDVDLKSYTDTAYHNEELKSLTRYRFDKVRERAKLKQSVSRLVTILFPELEKLVPTLHMVSVYALLSEFPGAKQVAKAHLTHLKAVLYDASKGRYGREMATTPRDAARCSVGSVMPAKSLELQHTIRLIRELDAEIEDIETAIQSMMDEIQSPITTIPGIGVRMGAMILAEIGDFSRFDSPDKILAYAGMSPSTYQSGQLSLAGTYSHMEKRGSRYLRYALYNATKYVCLWDPTFAAYLAKKRAEGKHYNVAISHATKKLVRLIYAMEKSQQPYNCAA

SEQ ID NO: 215126 - protein, 425 aa, unidentified
MNYKQNEKINQVKESTLVVGIDIGSTTQYARAFDWRGIELGKVFTFSNSREGFEAFKAWMQHLQDKYRKSDVIVGIEPTGHYWFDLGAYLEDEGILLVMVNPYAVKQTKELDDNSQSKNDRKDPKVIAKLVTEGRYSAPYTPDGVYADLRIMVANRKRLIREMTQIKNRFARWFAIYFPEYTDVFGDYEAQSSMLLLKKVCTPEAIVELGAEKINQIWRDAKLRAVGMKRATTLCETAKRSIGLKKGSSAARYEMKLLLEDYEYKKAQLDAVMEEIEKLCRKIPESEQMLAIKGIGVITVAGFLAEVGDVRRFESPRQIQKLAGLSLRENSSGKHKGQTSISKRGRSKLRAVLFNAAIPLIAKNPEFKSLHEYYTTRANNPLKKKQSVIAISCKLIRVFYAILAKGVTYDAQKLISDIHRQPQAA

SEQ ID NO: 215127 - protein, 392 aa, unidentified
MDNKVWVGIDAGKELHWAHVLDASGQQILSRRVENDEVDLLKLIDEVLALSEEPVWAVDQPGGSAALLLALLWERDQQVLYFPGLAVERARDAYPGESKTDARDAYIIAEQARMRSNLAQIVPGEGDLAELQLLLARRRDLVADRTRSINRLRDVLLSLFPALERALDLNAKGALILVRHYQSPSAIRRVGHRRLATFLKNRSVKGAQDIAHKAITAAKAQSVSPPAENVAATICSELAEETLALKESIDDLDRELRRRFFARPEARILASLPGIGPILGAEFLVSVGDLSAFESADRLAAYAGLVPAAFDSGKRVGNHKRMRGGNKVLKRVFYQSAFASLRSSPHSRAFYDRKRAEGKKHTQALIALARRRVNVLWAMLRDGTTFEARPAA

SEQ ID NO: 215128 - protein, 348 aa, unidentified
MIRNKPSAAVYGIDLGKNVFHVVGTDAAGNVIQRARFRRDTLLAFFERAERALVGMEACPGSQWLARKLQAIGHSVRIIPAQFVKPYVKSNKNDTIDAAAIAEAVVRPTMRFVQIKEPDQVDLQALHRIRDQLVGSRTRLICQMRAFCLEYGVAIRQGAGVFKLDLPRVIADESNDLTPTMRRLLAELFDDLSRLEKRIGGVTREIEGLAATDELARRLMTVPGIGPLGATALLAAAGNAQQFKKARDMAAWLGLVPQQYSTGGRTQMLGISKRGNRYVRRLLIHGARSCMMHLDRSRDRLGAWIDRLQSRMHVNKVTVALAAKIARIAWVVINRPGAIYERRDPAIA

SEQ ID NO: 215129 - protein, 423 aa, unidentified
MMKLKYSICCGLDVHKNVIVATIVITNADGISEYKQKSFSTFNSDIRKFHSWLIENNCYHVCMESTGKYWIPIFNYLENDIEVCLTHPKYVKAIKGKKTDKKDSKWIADLYKFDLVRCSFIPPKDFRQLREIARYRFKLVCMKSSEKNRIQNCMTVSNVGIASVLSDPFGKTATEIMSYLLTHTSDSIDEKAVRRLIKKGAKAKSDEIIEAIRGYNIESDQAKKLELARSHLEYLDGMITQSEVELYVRMKPYYKFVELVSTMPGMTELSSTIVLAETGVDMSIFDDAKHLCSWCGLSPTNNESAGKKKSVRISKAGDYLKPMMVQCALAAIKSKKQPYFAIKYGRVKKRRGHKKAIIAIARMMIVCIYHIVSEEKPFNPIDYEELMSPKNQIERVILNENNVFAYLESLGYDSSKLVKRNDN

SEQ ID NO: 215130 - protein, 429 aa, unidentified
MEEVDEVELVVQRVAALDLGKATLEACMRVPHPSKPGRRMQEIRGYATTTATLLEMAIWLRQWGIERVAMESTSDYWKGVYYLLEAEGFDCWLVNAREVKNVPGRAKTDRADAVWLAKVAERGMCRPSLVHPPPIRRLRDLTRYRRALVADRSREMQRVEKLLEDAQIKISSVLSDIHGVSGRAMMEALIAGQRDPRSLARLAKGLARKKTDRLEEALRGFFTDHHATILQMMLDNIDRIGAQIAALDARIAEAIGPFSRQAARLADIPGVNTVAAAELIAEIGVDMTRFPSAAHLVSWAKFCPQIHQSAGKSRSKARGKGNPWLAGTVGRIVFSASHTDTFLGARYRRLARRRGKPKAIVAVGNSVLTVVYHLLSDADLDFCELGPAHYESRINKHRRARDLATQLQALTGQHIVIRDGKAIITDNAA

SEQ ID NO: 215131 - protein, 319 aa, unidentified
MSKAILGIDVAKLKLDVELVIGEKALKKKFDNNDKGFKLLQGWLTSLHIEQVHACLEATGTYGDGIAEFLYEGGHRVSVVNPFQIKFFAKSTLKRNKTDKADAHTIATFCLKMDPRPWQPLPLEVKQLQALVRRLEALERMLQMETNRRGVASVETQPSIDRMIKNLKKEIDNVQRLIKDHINKNPDLKHKSKLLRSIPGIGEKTARLLLAEIESRHFTSGRALAAHGGVTPGRHQSGTSIDCTKLSKLGSSRLRKGLYFPAITALKYNEVIKQFAKRLDRNGKTPMQIVCAAMRKLLHIAYGVIKNNRPYDPTMAISA

SEQ ID NO: 215132 - protein, 355 aa, unidentified
MEREQINFKDFQLYVGLDVHKRQWSVSIYTVSAHHRTFSQPPYPKALKSYLEKHFPQASVKCAYEASKFGYWIFRELASFGYECLVVNAADIPTSNKESSEKADPSDSRKIGKALRAGLLSGIHIPQQHTEGDRQLFRYRKRLWADLVRVKNRIKDKFLFAGIEIPQQHDNPNWTKAFLKWLKEAVLPDVHTRLTLDMLLEQYHFLYRHFLKVSIEVRKLQRTSYYKTNAKLLRSIPGIGPLTTVQLLTEIEDINRFQTFKKFNGYVGFKPTTHSSGEHDWRGRMTYRQNRALRSALIECAWTTVSIDPVMLQRYEDLKKRITAKRAIVIIARKLLSRIYFVLKNQKPYELGIAK

SEQ ID NO: 215133 - protein, 426 aa, unidentified
MQPHYNCVCGVDVHKEFLQVCILKREKDPLSFRVFNNFSGIQKLKKRIEEESCECIACESTGVYWYRLYLAFEGQMRVIVGNAYQIKSIPGRKTDVRDAQWIAELAMNGLINPSRVFQKNDRELRELTRSRESTVKSRTQIKNRIHRILDSAGIALGKGVQDIFGKSGIHLILGLLNRADTDDIISTLPSARVKKKADVLREILSGSLSDLQIILIKRNLDMMAHINEHIRALDEQIIARMTEQDSIRDVEIACSIPGISVTSAVTILAEIGDYRDFENAEKLASWAGLVPSVYQSAGKNCSGKITKHGSEHLRWILVQAAKAAGRTVNTTFRKFFNRIAYRKGGNTATVALARKILCILWHLLIKKELYIDPLKNTKPTKPPVVQKFSKNSRSDVQKAIDFIIECGFEVIHPNSSLDQKFREVSH

SEQ ID NO: 215134 - protein, 412 aa, unidentified
MELIASRAAGIDIGKATLKATVRIQGGPKRATRREVRTFGTTTGQLLALRDWLVAEQVSLVGMESTGVFWKPIYYILEDAVECWLLNAQHLKKVPGRKTDVTDSEWIAELVAHGLVRPSFVPPPGIRRLRDLTRYRTALTEHKTREIQRLQNVLEDAGVKLDCVVSDIMGRSARAMLAALIAGERDPQVLAELALGRMRPKIGSLREALVGHFSDHHGRLCTKMLAHIDDLAATIAELTTEIGTEIEPFRRLRARLSTIPGISDRLAENLIAETGGDMSRFPTAQQLASWAGMCPGNNESAGKHFSGRTRKGSRWLRGSLGEAAAAASRSKGTYLSARFRRLAGRRGKKRALVAVGHDILIAAWYIMCDDVDYHDLGADYLDTHTMDPRRKATRLTQQLQALGYRVTLEHVA

SEQ ID NO: 215135 - protein, 334 aa, unidentified
MKDETYYIGVDLGRQSSYFVVKDASGKLQERMKVINHRPSIEKMVKRFTPSKPLAVIEACCNYYWMYQELSRLGCRVILAHPLKTRAIADAKVKNDRIDAAMLCDLSRANLIPQSYIPTSKIRALREITRQHIRLVQIRTRIKNQCHALLDKLNLHPSECWSDAFGLKGRAWIRKTEMPDIFDFQKHQLLDQIEYYNQLILKTDQKISQELAKFQEARRLMEIPGIGPLSAAMLIAEIGEINRFPSPKKLVGYAGIAPGLYESGKTSHSRGITHQGNKFLRWILCEIAQHHIRKPGVLRDFYLRLKDKKGHGKAIVATARKLLIQIYYVLKEKV

SEQ ID NO: 215136 - protein, 431 aa, unidentified
MKLGEKELEQPIRAWIGIDWADEKHDVSLYDVASGRQEAVVLRQTPEAIQEWLGQLRSRYEGGLVAVVLEQGRGGLLNGLMGCELLVLYIINPKSLSSFREAFYGSGATSDPVDAELMRDMVRQNPGRFRAWRPDDVLTRSLRLLTEGRRNLVNQSTALTNQLTAMLKGYYPQALRWIGALDTAWACDFLEQWPTLQGLQASSRRQILRFYEKHPRASLDLNQQLQEIQQARALTQDAAVLESSALMVQALVSQLRPLLTSITAFDRKIAAIFRKHPDRPIFESFPGAGAALAPRLTAAFGTDRDRFQAATEMQQMAGIAPVTEKSGKNKNFVHWRYACPKFMRQTFQEFADHSRRWCQWAKAHYELLRRRGKSHNAAVRALAYKWIRILFRCWKDRQPYQDQVYTQSLFKHSSPLTQLLTGSCGKPLTGL

SEQ ID NO: 215137 - protein, 288 aa, unidentified
MRRIDNTAAAARRFAKASAKAGVWVILEASGGYDRLLRDALEATQARFSRVNPRQARDFARALGVIGKTDRIDATMLARMGATLDLEARAPKSELLYDLKELHVTRQGLIRDRTAQKNRLNTAILALIKRQQRARIDQIDALMAEIDPAMLDCIKEDETLPQRYDILSSIPGIGLVSACTILIEMPALATMDAKQVASLAGFAPMTRQSGEWKGHAHIQGGRAGLRRSLYMPALVATRFNVPLTEKYQKLIASGKAAKIAITAIMRKLIVLANALLRQNRKWTPNAPC

SEQ ID NO: 215138 - protein, 422 aa, unidentified
MEVLYRRCAGIDVGKDEIAVTVRVPGEGPDGRATHRRVFRTFYGVLREMAGWLSSFGVTHVAMEATGVFSMPVFHALVEHGDFEQVLVCNAGHVKNVPGRKTDFADSEWIARLGECGLLRGSFIPPAEIKAARDVIRYRVKIVQSRTSEFGRLGNALQDAGIKIDSVASSLTTKSARAMIEALIDGERRPGVLAELAKGRMRVKIPDLQLALEGRFDDHHALMCRLHLDHIDQLDAMVVRLDEQIEAMMQPFRAQRDLLTTIPGIAETTAAAVVGEIGVKIAEFFPTAAHLASWAGMCPGNHESAGKRRSGKPRKGNQHLQPILVEAAWAAVRHRGYLKSLYHRHVTKWGGYRNPAAKKKAIMVVAHKMLVIIWHVLTTAKPYHELGEDYFANRRDPTTETRRLVAKLEALGHKVTLQATAA

SEQ ID NO: 215139 - protein, 335 aa, unidentified
METVYFLGVDIAKKTFDASLTIDAKAFDASHCENNAKSVETFFRDLKIKFGLSYGQLIVCMEHTGIYCLPLLNFLVKNRIKVCVESALQIKRSQGLVRGKNDKVDAQRIATYAYKNREHLVFWKPQRLIIQKIKALLVTRDRLVAAKTMLSVPIQECEEFLEKSIHKSMAKSCSRSVKALSDEIKRIEKSMEDLVENDDSIRKQAHQAKSVVGIGQITALNMIVSTGEFVRINKPKRFACYSGIAPFEHSSGSSVRGKTRVSKMANMSIKKLLTMGARSAIVHDPELRTYAERKMAEGKHYFNVINAVRNKLITRVFACVNGNREYQKRSSIGLA

SEQ ID NO: 215140 - protein, 428 aa, unidentified
MSENSTTHPEPEFVAFVGIDWADQKHAWCSQRAGATQREHGEVEHTPEMVEVWVSQLAQRFGPGPIAVAVEQVKGALVYMLSKYECLHLFPVPSTMSASMRKSLYPSGSKDDPRDAELLLDLLLQHRNKLRRLTPDNEVTRRIQNLVEERRTLVDEKTTQLNRLTGYLKVYFPQMLEWFEKLDTKLVCDLLERWPSLEELQKVPPAELRKFFRQRRGRHQELTEWRLEGIGQAMPAIRDRAVLEAKRAMVQVSAQLLRILLEGIANLDSKIEEAASGHPDFFIFESLPGAGSALAPRLLAAFGSQRDRYGSAEEVQTHSGIAPVMEKSGKKKWVHFRWACPKFLRQSFHEWAGHSISQSTWARAYYQQQRGRGKDHHAAVRALAFKWIRILFRCWQDRVAYDENKYLAALARRGSPLSSVLTVTAATL

SEQ ID NO: 215141 - protein, 365 aa, unidentified
MQKISTMQTGGENIFQGQLTIGWDLGDRSSAYCVLNEAGEIVLEHKLASTPEAMKQVFGSMPRCRIAMETGTHSPWVSRLLTALGHEVIVAHAQKVRLITKSRRKDDRLDARTLARLARIDPKLLSPVKHRSAQAQLHLTEIRARAVLVSARTALVNAARGLVKSYGERLRKCGTEQFRRETTSGLSAGLREALEPLLREVESLNERIQEYDRRIEKMAKQMYPETALLKQLKGVGDLIATTYVLTIEDPHRFRKSRDAGCFVGLQPGRRNSGESEPQMHISKEGDEYLRTLLVQGAHYILGPFGEDSDLRRWGRKLSARGGKTAKKRAVVAVARKLAVLLHRLWVSGEVYEPLRNSQKAMNAAA

SEQ ID NO: 215142 - protein, 348 aa, unidentified
MSQNSNTSIAVAGIDIGKNSFHIVGLDQRGAIVLRQKWSRGQVEARFANMPRCLVGMEACVGAHHLSRQLKALGHDARLMPAKYVRPYSKGQKNDFRDAEAIAEAVQRPTMKFVATKTADQLDLQALHRVRERLVSQRTGIINQIRAFLLERGVAVRQGLRFLRAELPHILATPPDVLSPRMVRIIEDLAGDWRRLDERVQNLSEEIEAVARQDAGCERLMSVPGVGPIISSAMVAAIGTGDGFSKGRDFAAWLGLVPKQISTGDRTILGKISRRGNRYLRVLFVQAAWVVLIKPKSWERHGLKPWIEAANKRLHRNVLAIALANKLARIAWSVLARGRGFEARPAVA

SEQ ID NO: 215143 - protein, 411 aa, unidentified
MKITCGIDWAEGHHDVALVDSDGRQVAKLRIDTGLSGFTELMALLAEHTDDPIGVPVAIETDKVLLVVALRAAGLDIYPINPRAVARYRERSAQAGGKSDPGDARVLADVLRTDLHLHRRLPAVSEQGLAVKVLARQHQEAIWARQAAVNRLRSLLVEYYPGALAAFPVLTHRAALTVLAAAPTPAAAMKLTRTRVVTLLRRCGRGNQPGLAESIVAALHAPALRQPGRVEAGFGHAVAALLAVITTMQAGVDDLQAAMTAEFEQHDAAELLRASPGLGPILAARVLAEIGDDRTRFGTAQGLRAFAGTAPITKASGRSKVVRTRHVRNRRLADACHWWAFASITKSAGAREHYDRRRAAGDSHNAALRNLANKLLGRLWWCLANDKPWDEDAAWPRLTTSLESAAEPVAA

SEQ ID NO: 215144 - protein, 330 aa, unidentified
MKQWEFTLGVDVSKNTLDISCSELSEHIKIKNGTEGFVLFLKWCRDFKIDLQRSFLVMEYTGGYEYKLLQFCEAQKILYTRIPGLAIKNSLGIARGKNDKVDSARIAQYGEEKHKSLKASKPLNAAIASLKELLSFRKRLVRENAGYQASIKEREHMYDVNKKDIVVKTLQQKQKANIKSIEAVEVEMMKIVAKDEKINTNYKLITSIRGIGKVNGLMTIAYTENFTSFDNPRSYAVYVGVVPFDHSSGTSIKGRKRVSHIANKELKQELNQAARSAMQWDKELNTYGQRKLQTKCYKIVLNNIKFKLILRMFAVVKKGEMYVDNYNKAA

SEQ ID NO: 215145 - protein, 359 aa, unidentified
MLETMTYVGIDVHARSVHAAAIDVGSGELRRARFGGGSDQVVEWLQTLPLPLKGCYEAGPTGYGLYRAAAAAGLELDVVAPSKTPRAPGDRVKTDRKDAELLARLLLAGQLKPVTVPPPPFEAARHLARAREQVRGDLMRCRHRVSKLLLLHGRVYEGSAWTKTHRRWLSKQRFEESATELAYLDCLAAVDGLVARKQALDERLSRLAFEGDWSPTVGRLRCFRGIDTLTAFVLALEIGDFSRFPRPGKLTGWLGLVPSLEQSGESRRQGAITKTGSGYARRLLVEAAWHYLPRPSEGPTIAVRRAGQPDHVIEIALRAERRLHRVYQRLRARGKPGNVTTVAVARELACFLWAAAVAD

SEQ ID NO: 215146 - protein, 404 aa, unidentified
MTSEVADDTTDKVVFGGVDSHADTLHVAVISDNGGHLADAEFATTAAGYAAALAFPGAHGHVNAIGVEGTASYGAGFTRAARSAGLDVVEVNRPDRAERRRIGKSDPIDAYAAARAALSGRASSAPKDDTVTGIRALHSAARSAVKARTAALNQITHILVTAPESIRAKFGQLKGADRTDALARLRPAGDAAHVAVLTALKSLARRVKELTAEHHALTRALDSEVTAHNPGLRAAYGVGPDTAAQLLVTAGGNPERLRTEASFAALCGAAPVPASSGRTNRHRLSRGGDRAADAALYRIALVRMSSDPRTRDYVARQTAAGRTKKEIIRLLKRAIAREMFRCLTTTVTVPGIADLRPLRQSKNITLTAAARHFGVRPATISTLERRIRRDDDLANTYRDWLTAA

SEQ ID NO: 215147 - protein, 376 aa, unidentified
MTMMHQRQIRYIGLDVHKATISAAIAEESGAPTSYGRIPNDPAAMRTLMTRLGGPQVELRVAYEAGPTGYALHRQLTSMAISCMVVAPSLIPKQPGNKVKTDRRDALKLARLLRSGDLTPVWVPDEAHEALRNLVRARADAKADQLRAKHRLSKFLLRQGCWPPVGVRNWSKRYVTWLHQLEFEHLPDRVVFADYLTEVTAAGERIKRLEVALYECAQSSRQVALIRALQAFRGIAFLSAVTLVAEAGDLRRFRTAPQFMAYAGMVPSESSSGGKQQRGSITKTGNSLLRHVLGEAAHHARHAPRVTSKVKQRQTDLPADIVDLAWRAQVRLHTRYRHLSGRIGALKALTAIARELAGFVWAAGQALQEEEVPTAA

SEQ ID NO: 215148 - protein, 441 aa, unidentified
MRVMYERCCGLDIHKSSITACALISEKGKTQEETRRFGTMTGDLRELAGWLQQKGIRHVAMESTGVYWKPVWNILEPAGLELLLANAQEVKIVPGRKTDQKDSQWIADLHKHGLLRKSFVPPRAIRELRDLTRSRAILTQEHTSVCNRIQKVLEDANIKLGSVASDVFGVSGRAILRALMKEEKDPEVLAELSKGRLRNKIPQLRRALEGQVTAHHRSLLTGHWNRMEFLERQIADCETQIAQGMKPTPEEMALTIQTAAKEAPLPLSPREEAIQLWMEIPGVGWTAACSMVAELGVHMDQFPSAAHVASWAGLCPGNNESAGKRLSGKTRKGNVWLRRTMCEVAWAASHTKDSYSAAQFRRIASRRGNKRALVALAHSILVTAYHMLKHKRHYLELGGDFFDVINRDQVRNRLVQRLTKLGFEVKLKPKGAVEKVTSATN

SEQ ID NO: 215149 - protein, 351 aa, unidentified
MCIQFTLFPVSRNKPIMEYIGLDVHDRYCQVAILDDNTDNPEERRIRTERAELEEFAREHEGAQAAIEATRNYWFVYDCLEPELDVSVSNPHETGLIGDQKVKSDRLDAKRLAVLLRVDALATSYISPDEFREARKLVRRRKALVDDRTAAKNRVRSALADRGITYDGELFRQEGREFLADEELPLSAADRQIIEADLAVIETLDEQIECLQSEIDEIAATWEETQLLMTIPGIGPVLSVTIVAEIGEIERFDNKKQVVSYAGFDMRVRQSGEKETTDAITKEGPPVLRWALGQAALNVVKYDSYLGNFHTRMKDRKHNQKALVATARKLLVSMYAMLTKQEEYDPPKATA

SEQ ID NO: 215150 - protein, 345 aa, unidentified
MKIIGCDFHPSFQQIAICDLETGELQERKLSHADGQAERFYQELGESALIGIEATGNCQWFLDLVQRLGHEVRVGDAAKIRASYVRKQSTDKRDAGHILKLLLEKRFPQLWTPSAAMRDQRQLLRHRDKLVEIRTKVKNSLQHLAMNRGMQKKSRLWTRQGMEQFQQLAMPGWAGTRREDLLQLLKELNGQIEPLDQAVKQAAEQHPQAQLLMTQPGVGPVTALAFVLTVGDVTRFAGSKQLTSYLGLVPSEHSSGSKRWLGAITKQGNRFLRKLLVEAAQTTVRKDEGFRKEYQHRCRRRPKGVAKVAAARKLAVRLYWMLRSNVGYPEIVHIESNPRVPLGEV

SEQ ID NO: 215151 - protein, 466 aa, unidentified
MKPFYLGIDVSKGYADFMIVNAKKQPVIQGFQLDDIFDGHRCLYNLLSRFLADHPESTLFAAMESTGGYENNWYNSLVQFQGSLDIQTARLNPLGVMHNSKADLKKNTTDKISAQNVAEYLVAHPEKVVYQKDDQQAGLRKQWGFIKMLTKQCTQFLNQLNTLVYTASPELLHYCQTGMPDWILKLLVKYPGAAKLRKAHFKTVAKIPYVTTKRAQQIIAEAKRSVASPTDPVTQQLIMATARQILHLKKTIADQTKQMIDQCRLPEVKLLKSFPGISDSSAIGLIIEIQTAERFANAKKLASFFGVHPVYKVSGDGVGGIKMSKQGRKEPRQILYMITLSAIQYNPLIKQIYEEHQKQGKHNMAIMGICMHKILRIVYGMLKHNMPFNPQIDIANRQRGAQTKNDKTVEATDRRFQDYAAKAPVSMCQRKKRLERDRSNSVADTKSGITVPVPLGNIITDILPQL

SEQ ID NO: 215152 - protein, 435 aa, unidentified
MEEVTDEPLYRDRVCGIDIGKAGLVATIRVPSDKDPARRAAETRSFGTTRRQVLALADWLRSWQVPAVVMEATGDYWKGPFYRLEAEGFECVLADARQVKNLPGRPKRDPGDSRWLAACLERGAVRPCFVATPEFRIIRLHTRYRRDLTGERTREKQRAEKVLESAAIKLSSVLTDLHGVTGRDIMDRLIAGERSPKVLAQLARAAARRKISQLEEAVEGAEFFTAGHAALLAVMLARIDRLSADIDGLSQVIEQLLAPYEDQLAQAESMPGWGRHAAQDVLAETGPDMSRFPTGAHLASWAGRAPLDHQSGTRAGRSTAKKGNRYLGAVTGETAVAAGRTQTREGARHRRLARRRGAAKACVATGNTQLRVYHKLLSSPGMRYADLGPDYYERRRDVRRQIAHHVGKLGALGFEVTLCRIPEPGPDRTGQIKHA

SEQ ID NO: 215153 - protein, 352 aa, unidentified
MEQFIGCDAHKQFSVFVAVNEKGHAGEAARVPHERRLYREFLTRLPPHSTIAVEASGQYSWLVDEMEQSGHCPKLANPLEAERRMGLTMKTDKLDAKGLAILLRNGTLPEVWIPPSELRDQRELLRLRIFLVHLKTRVKNRIHGTLARHNVIIPGADLFGAEARLQLGERLPELPVHSREAIEQELATLDFLEGEIKSAEQRLEAIMEVSAEADLLKTLPCVGTILSMVLMLEIGRIERFPTAAHLASYAGLVPRVRASGGRTRMGQVCQNVNRNLKWAFVETGNLVVINQRRLAGTHVVRLYQRIKRAKNHQKAVVAVGRHLAEAAWWILTKQEVYREPRNVRQALSSTHG

SEQ ID NO: 215154 - protein, 471 aa, unidentified
MNVHNKTLELTEVILVQNAHSGNVADRLSIRLARTKNHARSVPYFNQRFSFMKVQSPNDFACLIGIDWADHKHDFCITDQSGNEHTYGVISSKPEAIDKWVLELQQRFPKQQIAISCELKKGPLVHALLKYSHITVFSINPSTVAKYRKAFTHSGAKDDPTDAKIQVDLLRLHMDKLHPIKPDTAEIRALGQLVEYRRSLVQDRVDLTNRITGILKSYYPQVLDIFKERDTVIFCEFLSRWPDLSAAQRARPDTLRKFFNQFNSRYGEINEQRIKQIKGAMPLTEDSGIVEPNALMIKLLIPQLNLLIGAIKDLDQDIKRRHKAQEQHTIFDSFPGAGPQLAPRLLVAFGTVMDRYQSAADLQRYAGVAPVIEQSGKKSWTHWRYSCPKFLRQTFVEWAGQSVRFSFWANAYYRQQMAKGKPHNTVIRSLAFKWIRIAFTCWKTNTPYDESKYLEALKRRGSPLLEYALKS

SEQ ID NO: 215155 - protein, 339 aa, unidentified
MTVKTVGLDLAKDVFQVHGISENGRVIFKKTIRRAKLLTFFETLPRCTVGMEACGSAHYWGRELRKLGHDVRLMPAFYVKPYVKRGKTDAVDAEAICEAVRRPSMRFVEIKSKDQQAFLTVHRTRDLVVRQRTQVVNTIRSILREFGHVLPAGVEAVNRFSQSHMDGDQLDMPELANGILGTLCYQLLGLNARIDGYTQLIKRHALLDANCRRLTRIPGVGPITASAMVATIGDGHQFRTGRDLAAWLGLTPRNKSSGGKEKLGKITKMGDRYLRKLLVVGMTSRALQAKTHPERADRWTANILVQKPFRLATIAMANKSARVIWAILTKKQNYRQPVA

SEQ ID NO: 215156 - protein, 356 aa, unidentified
MSIVAHSHPFVVGVDTHARNHVYAIISTATGEVLETRAFPATGTGINRSIAWVARRTGADLGTLWVIEGAASYGALLAGAVGAAGYPVAEAARMDARARRGIGKSDPLDAHRIAAAVLPLQEEQLRRPRLNDGIRAALRVLVTARESMTTDRTRAVNALTALLRVNDLGLDARKPLTGPQIAEVSRWRRREEPLAVSVARSEAVRLANRISGLDADIKANNAQITELVEISEAAPLLRETGFGPVTAAICLTAWSHHGRVRSEAAFASLAGVSPIPASSGNTVRHRLNRGGDRTLNKALHMIALSRMTFDAQTLGYVQKRQAEGRTKKEIRRCVKRYLARRIYRTLNATTPTHCHA

SEQ ID NO: 215157 - protein, 356 aa, unidentified
METAYDGRQVVGMDLHRRRSVLVRMTEDGRRLGTAKITNSPAELRRAIARAGKHPRVVLEATYGWYWAADVLAAAGAEVHLAHPLGVKAFTYRRVKDDVRDSADLADLLRMGRLPEAWIAPHEVRELRELTRYRIKLVRLRTSCKDQVHGVLAKLGVPVTCSDIFGMAGSAWLDGLRLPQPYAGKVTSLRHLAGELTTEITMLGEVIASLLAGDRGYQVIQQLPGIGPVLAAVITAEIGEVTRFRNAGQLCSWAGLTPRHRESDTKVARGHVTKQGSRLLRWALIEAIQRIPRDSVIGAVKDGIIGRRGKEAKNIAKVAAARRLLTLVYYGMRDGQIRCLSRPPAGPPVTETARAA

SEQ ID NO: 215158 - protein, 340 aa, unidentified
MQVTTIGLDLAKNIFQVHGVNEDGSVAFNRPVRRAQLLKFFEKQPPCLVGMEACGSSHYWGRELTKLGHEVRLMAPVYVKPYVKRGKSDAADAEAICEAVTRPTMRFVPIKSVEQQGVLTQHRVRELLIRQRTQLSNTIRALVGEFGYIIRKGVNYIRDFAIDMRAGGIDGIPSMARSAIIALCRQFLELNEKLIKVEKEIVRVARKDKRVQLLQTIPGVGPINASAIVATIGSGEQFKTGRDFAAWVGLTPINKSSGGKERLGRISRMGNKYLRKLLVIAMTSRVSAAISRPDRVDPWTASILAKKPVRLATVAMANKTARIIWAVLSRGEPFRQPITA

SEQ ID NO: 215159 - protein, 349 aa, unidentified
MGVLIGIDPHKSVNAAAAIDEQGELAGHKTFPANRKGLRALERWAKRFPERRWAVEGAAGIGRPVAQRLAKAGERVVDVPPKLSSKARLLSTGNARKNDRLDATFTAQAALQNERLAPVLSEDGDDAHVEVLRLLTERREDLVAERTRALNRLHVLLRDLLSDTVSKQLSADAASRLLRRVRPRDEPARTRRQLASEVVRDVRALDRRIADLDERIRQEVEASGTTLTEIFGVGPILAAKIVGIVGNVARFPSKAHFASYAGVAPIEASSGEVVRHRLSLAGNRTLNKVLHMIAVCQARSDPRGGVYLRKKLAEGKSRREAMRCLKRRISDAVFKALLADSQLALQTVS

SEQ ID NO: 215160 - protein, 431 aa, unidentified
MKSSQNEKIKAITVKTIIVGIDIAKEYHWARITDSRGVELRKSIKVNNSTSGFENLLEIVEKVKQKYEAEKVVIGFEPSGHYWRAFGWYLKLHESTPMLVGVNPYHVKQSRELYDNSQTKSDPKDAMVIAHLIRDGRYFELYLPEGEYAELRILNEERQRIMKQLTRTINTIVAVLDEYFPELASVWKDVTCKTSLTIMKKAAFPAEILKISKSDLLAVIKEASSGTEGDKLANELVKAAQNSVGVQEGQRAAKSRLLRLIDELEYYQNRLTEVETELETVMAKSESGAILQSMRGIGVVISAAFLGEVGDISRFDDWKQVRRLAGLNLVENSSGQQKSKTKISKRGRPYLRYMLYMAGSSGCLHNAEMKQYYQYLRKRSTNPLNKMQALVATGLKVMRILFYMLKNKENYNSEKALGDVRKRQIESLANT

SEQ ID NO: 215161 - protein, 449 aa, unidentified
MPKKRVKAVSLPIVEPNAAGVDVGATQIFVAVPPERDSDPIRCFHTFTADLEKLADWLQECQIQTVAMESTGVYWIPLFQILEKRKIEVRLVNAQHVKNVPGKKTDVEDCQWIQHLHACGLLRGSFRPADEICAIRSLWRHRDNLIELATIHLQHMQKALDQMNVQLHHVISDLAGATGLAIVDAILAGERDPGKLAQLRDWRIRASEETIMKSLVGDYREEHLFTLRQSLESYRHYQDQIQRVDARVKRMMQTVRSKVAEGEKPPREKNPRKTPWRNEPPQLRDDLYRAFGVDLTQIPGINTLTAQMIFTEIGPDFSRFPTAAAFCSWLRLCPDPKISGGQVLSSRTRPTKNRAALALRMAAQGLHRSQTFLGDYFRRMKARLGTPKAMTAAAHKLARIVYHMITTRQEYDTTVFQELERRVQDRKRMKLRIQARELGFDLVAREAVP

SEQ ID NO: 215162 - protein, 407 aa, unidentified
MRLFVGDDWAEDHHDVELMDATGRVLARKRLPEGVAGMARLHELIGQQLGEDAEDAEVVIGIETDRGPWVAALVAAGYVVYAVNPLQASRYRERHGVSGAKSDRGDAHMLADMVRTDSHQLRAVAGDSPDAAAVKVVARTHKTLIWERTRQVQRLRYQLREYFPAALAAFDDLDAPDALELLAKAPDPARAARLTRAQVSAALKRARRHDIPGKATAILAALRSAQLGQPPAVTAAYAATVRSLIAVITVLNEQVKTLQGQVEADFGRHPDAEIYLSQPGLGPILGARVLGEFGDDPDRYASGKARKNYAATSPITRASGKRKVVAARFIRNDRLTDALMAQAFAAMNASPGARALYDAERARGTEHNPALRKLANRLVGILHGCLKTRTVYDEATAWSHHENKLAA

SEQ ID NO: 215163 - protein, 390 aa, unidentified
MQAISDRSEAPNAIHTDIGAIFISLELSRSTWLITSLSPGGGGKMSKHSMPGGDISALLTRFSEFREKAFARTGKWFPIIVVQEAGLDGFWIHRVLQNEGFESHVVDPASIATSRRRRRAKTDRIDGEALLRALLAYKRGEPRVCAMVKAPTPEEEDRRRLCRERKVLINERVLHVNRIKGLLFSQGVCGYEPLRRDRRQRLDELRTGDGRPLPPHLKTQISRELDRLELLIEQIKAVETERDALLNPAVKTEGRPAPLAMLLAIKGVGPEFAAVLWSEGLFRHFDNRRQVASYAGLAPTPWQSGSVDREQGVSKSGNPRLRTILIQLAWLWLRHQPQSALALWFKERVGRNGGRFKKTTIVALARKLLVALWKYVTAGVIIEGAVMKTA

SEQ ID NO: 215164 - protein, 421 aa, unidentified
MPNIEIGVDFMVKENFIYVGIDLHKETHTAVMIDCYNQKLGEITFPNRPAAFPKLVTKVKKCNTDGKEVVYGLENAYGYGRALAVWLIDKGYLVKDVNTAISHRQAKHRGAMYRKSDSDDVKAIALATLNMLDKLPDACPNDAYWSLGQLVHRRDNIMKQRTRLVNQLHEQLCIAYPSYKQFFNDISRPTALYFWEHYPSRKYLKGKSVEDLRAELVPVSHNKCSTKTCEKILDAVASDKVKNNAYQDARDMVTLSIVSDLQHYDSQLTEVDKMLEQMYKMLGCTLTTIPGVNVITAVKILAEIGDIKRFSNANKLAQFAGIAPLHLSSSGKGKDVATKQGNRRLQATIYFLAIQMVQVSSKGTPRNPVVRAYYEKRKAEGKTSQQALICISRRLISIIYGMLKNGTEYRMLVVENAGEKL

SEQ ID NO: 215165 - protein, 409 aa, unidentified
MMKGKFQSSITMSKESMKTTSLKQKEQLLKYAVGNDISKDKFDACISEINTEQRVKVLASRTFSNKESGFKEFEDWVNRKCNEQIPIVFNMEATGIYYERFAFYLHKRDYCVSVVLPNKSKKYMQSLGLKSKNDKIDAQGLSRMAAEQRLEQWEAPSETVMLLRGITRQRESLQTARTQFNNQLLAYQCGEYINPAIVIQLETTIQLLDKQIKETELLIKEEMDKDEELKVKILKITKVKGLGIITVATVLAETNCFKLFKNQRQLVSYSGYDVIENQSGKHVGRTKISKKGNSHIRRILHMPAMCVVTNNEPVFKSLFERVFARTKMKMKAYVAVQRKLLVLIYTLWKNETEYNPNYEKITSGNDEQKFLLPLGCVATIKEVGGINPPTRDELLYKESQEVLFPLLQS

SEQ ID NO: 215166 - protein, 411 aa, unidentified
MRRVIGMDVHRTFAEVVFWEEGRLRHHGRVDMTRFGLEGFGRSLEGNEEIVVEATGNAMSVVRVLSPFVARVIVANPMQVKAIAHARIKTDKIDAGVLAQLQASGFLPEVWVPDERTERLRRLVARRNQVVRHRTRVKNEVHAILQVHLVPKCPHADLFNGRGRDWLSKQVLPDDERAAIVRHVREIDRLAEDLAGLDGDIARDTVDDPSVQRLLTIAGVNAIVASGIIAAIGDISRFKKPQKLVSYFGVNPRVRQSGLGLAQYGRISKHGRSHDRGLLVEAAWAASKAPGPLRAFFLRIRHRRGHQVAAVATARKLVVLIWHLLTREQDYLWLRPSLVAAKRRQLELKAGAPSEKGKGRRGSAYAYNLKELRDREREGSEQAERAYEHLVRQWKPHGPKRRTDATSEERR

SEQ ID NO: 215167 - protein, 416 aa, unidentified
MKYARTVLPTEPANGLTCGIDWARDDHAVSVVDSRGKEVLRSTIDHSAMGLQTLLSILTRTGVEEVAIERPDGPVVDVLLDAGITVVVISPNQLKNLRSRYGSAGNKDDRFDAYVLADTLRTDRIRLRPLVPDGPATVALRTSCRARKELIGHRVSMANQLREHLNRAFPGAVGMFAELDSPISLAFLTRFDCQDRADWLTPKRLGTWLAKVGYTGGKSPAILHARLTAAPRGVTGEHGTAHAHITHALVATLSALVEQIKALSDQIADQLATHADAHIFTSLPRSGKIRAAKLLAEVGDCRGRFPTPEALACLAGVAPSTRQSGTMRSVGFRWSCDKHLRDAVTDFAADSRRANPWAQDLYRRARARGHDHPHAVRILARAWLYVIWHCWQHGVGYDPAQHRALQALLHDEQPAA

SEQ ID NO: 215168 - protein, 351 aa, unidentified
MIIIGVDYHPSVQQVAFVDTQTGETGERRLKHSDGEAEHFYRDLQRRQVEVRVGMEATGHARWFERLLAELKFELWIGDPAKIKAARVRKQKTDRQDAQLLLRLLVEARFPRIWVPSAENRDLRQLILHRHRLVQMRTRAMNQIQATAMNEGMRRKKTLWSKTGRKQLESLALPPWATRRRQDLLELVDRLDSAIGELTPAIEQEARQRPEVLWLMTHPGVGPITALAFVLVIGSPDRFACGKQIGSYLGLIPCEDSSADRQRLGHVTKQGSSLLRFLLVEAAQAAVRWDTDWRRRFVHLAMRRDRRIAKVAMARKLAVSLYWMWRNGYDYQQHLQFGSHAGEPGYVHGVK

SEQ ID NO: 215169 - protein, 361 aa, unidentified
MVVIGVDAHKATHTMVAVDVGGCKLAEVTVRATTDGHLKALGWARREFGGDLIWGVEDCRNLSQRLERDLLNAGQRVVRVPPQLMARTRASARTRGKSDTIDALSVARAVLREPDLPVASHDPVSREFKLLMDRHDDLVSRRTALMNRLLWRVHELDPTHAVPSRSLAHRRHQQALRSWLETQDGLVAEFARDELAEIITITEVIGRLDQRITARAQAAAPSLLTLYGCGALTAAKLVGETAEVTRFRSEAAYARHAGLAPVPHSSGSKTVRIKPWRSGNRKINAALYWIALCQIKHGAPGEAYYRARRDSGDSHSQAIRRVERRIVRRVYRHMKNDHALTEGATQTAPAQHGGLVPAHSV

SEQ ID NO: 215170 - protein, 406 aa, unidentified
MRVVHERCAGLDVHKSSVVACAQLPEGKQLHTFGTLTWQLEQLAEWLRGLGVGVVAMESSGVYWKPVFNILEVAGFELLVVNARHIKAVPGRKTDVKDAEWIADLLRHGLLKPSFIPSREQRELRELTRYRRTLIEERAHEVQRLQKVLEGANIKLEDVISNIVGLNGRRFLSALIAGEYDPEAVAATANYGLQRKRELLAQALHGTLGTHQRFLLDQLLSHIDFLEQRIAALDQEVKQRSRPFETAIARLDQIPGVGIRAAEEILAEIGTDMSRFPTDRHLASWAKVCPGNNESAGRRRSGYAGKGNRWLRSILVECAWCATRKKDSYFKVQYHRLAARRGKKRALLAVSHSLLTVIYHLLNDGVVYQDLGPNYFDQRDRAHITRQAVRRLERLGYQVSLTEGAA

SEQ ID NO: 215171 - protein, 386 aa, unidentified
MSNVDDLSRSLTAFHQDSTLIAVIEMSLKNWLVAGVVPGVSRAPLKKLEADEGSVLRLLRRWRDEAMKAGHPIKRLVVAFEAGRDGFWLARWLRTHGIECYVIHAASVAVSREHRRAKTDRLDTEMLKRAFLGWLRGEPEHCQMAAVPTLAEEDARRPNRERDCLVRERTRIVNRMKSTLVRMGIRGFNPKLRKAAARLDDLVTPQGEALPPNTASELRRDLARLALLREQIEAVETARLERLEQASSERPHAMVRLIAQIVGVGIETADMLVHEILCRNLRDQRALARYAGLTGSPDESGDRRREKGLARSGNGRVRRGMIQLAWRFLRFQGDSALAKWYRARTETAPNTRKKMVVALARKLLIALWRFTMTGELPAGIALRTAA

SEQ ID NO: 215172 - protein, 520 aa, unidentified
MATTRSRRRPSRPRIATSVGKPRGVLHPRVQRVGPEHFGIVCFDCHKVSSKFLLADFYGRCLIPPTVVQHNRPALDSAVSQIRLAFEQHQIRDGVVAIERTGRYHRVVQRTFAAAGFETRILHPFVTKQYRQPVDPGNKTDDADLAAIHRATITGCALLEATRDEAWTTLQLLIRHRRDLVRKGAALNCQIRDHLEAAVPGYAACFDKLWESAIPWHLLRLYPTAGRLHEAGVASLCQSLRQAGIRFQQRTIQTVVDWAEQAAAADIAAHQHLRIALALYDDRQRKTQEIQALERDIAARLVQTPYLLLLSFPGINVVSAADFAGEAGPIEHYLNAKSITGRAGLRPSRYQSDQLDLASGPLVRNCNHALRAAILGIADNLIVCNHHFQALATQWAAQGKDPRDTRIKVGMRFCRIAFQMVAGRQVFRHPCIQGRHYILDKLNAFHREHDTGMVDVLRDLQAAIGQLPRRAHAAEARPLAQELRKIQDGRRRGPQVLGDILPIVLARLGVGVVQSTESGE

SEQ ID NO: 215173 - protein, 331 aa, unidentified
MTSLPNRSNEAPLTVGIDVAKASLEIGFSDREATLTPGNDEAGHAALLAHLSGLRAAGATIGLIVLEATGGLEQDVAMQLQLAGYPVVIVNPRHARDFARSMGYLAKTDRLDARILAHMGQTLMQRDDLRKLIKPLPDERQRMLQALVTRRRQLIDIRVAEQQRAGAPDKRMRRSLNIILKALDRELARLDKELQEFIGEQYAELAALLDGVKGVGKATISTLLAEVPELGELNSREVSALVGLAPINRDSGTMRGKRTVFGGRPSVRKVLYMAALVASRHNPVIKAFYERLLAGGKPKKLALIACARKLLTILNAIARTRKPFNAALHLA

SEQ ID NO: 215174 - protein, 397 aa, unidentified
MFYLGIDIAKHKHYASIIDSTGKPITKPFPFHNHKEGGQALLTWLYRYISSPTELSIGMEATGHYWIAVYSFLLDHGFSVIVLNPLQTNAWRKGTEIRKRKTDAIDATMIADVIRFGRFLETPLVDEKMFALKQLSRFRNSLVRNISDLKRKALVVLDQTFPEYQSIFSNVFGKTSSQLLIEYTSPSDYERLSIDDLTLIIEQASRCRLGKKTANQLMELASNSFGVTFCKDAFSFQLKMLMEQIRFIETQLRECENQMSQLLSDLDTPITTIPGIGPILGATILSEIGDIGRFDKPSKLVAYAGIDATISQSGQYESTGMSMSKRGSSHLRRALFQAAITAYKHDPVLKAFYEKKRNQGKHYYVCIGAVARKLCYIVYAILKSNKPYKIPPFPVQR

SEQ ID NO: 215175 - protein, 347 aa, unidentified
MYNHTVIAIDLAKHSFHVTVLNKRGEFTTDRTFTRSALIRWLARQPESIVALEACGSAHHWARKAVSMGHQPRILAPKSVTPFREGHKTDQQDARAIATTAIRPKVHNVAVKNLEQQGLQGVERIRQHWVDHVTATGNLLRSLLYEFGLTIPKGHAALQREIPRILEDAENHLPNAFRHQIAALYQAFKGALEELRKVQTTLHSLVHHQPACRRLMQLEGVGPVSALGLYLGLGERGSSFKDGREAAACIGLTPKQYSTGGVTILGGIGRKIGHGRFRATLIQGALATVSVVSRRGPRNDKEAWIQRLIEQKGKRRAAVALANKTVRTAWAMLHRDEAYQAPQALAG

SEQ ID NO: 215176 - protein, 426 aa, unidentified
MTEKIYVGIDWATQSHTVVVLDGSGQRLGKREVEANGAGLEAMVVWLLDLAGGDAGRLQVAIETPHGSVVEALMRHGVAVYAINPKQADRFRDRHTVAGAKDDQLDSLVLGDSLRTDANAFRRVKSSPATVVQLRELSRHHTDLTMEKVRLELQMRDYLSRYFPQFLKLGDLDTDWVLTLVGKIGTPQEAAKSRARTIVHNTLMEQRVRKFTEDQVIDVLRERPIPTAPGVAEAARSLILKLLPRLNLVRTQLKDLKREMDSLLESHQDETPGEQREHRDVEIILSLPGAGTFTAATVLSEAYEALMARDYQGLRTRGGVAPVTKQTGLQRSHPKHRGPKPQVSQRRACNKQLRLALFYLATGAVRQDGYAHWLYKAAIQRGHTHGQALRVVGDRLLKVLISMLKFNQKFQEDRWGARQMIPLDNA

SEQ ID NO: 215177 - protein, 366 aa, unidentified
MRYHGVDLHKRYATISVRDDRGQEVGYLPREVDFHGYVQRLGYEDVVVLEASAGVLWWAERIANTGARCIVIDPHRYRIIRDSWNKTDRRDAAALSLGLWLAEHSQEVKLPVVWQPGPAVRELRRLFSHYQLLTNQIRQLKNEVHGMLTDNGMFDGRRAKAVVEAPQKAEQLLQGIELSEASRLCVRMSLEQLQALSRQKQLLRRQIYGFGRPLEAQVRLLIGIRGITPLLALAFLAEVGDIGRFRSARRLFSYLGVVPRIHSSGGITRSGPINRASRGLARSLFTQAVPHLADSSRSLGRFYADLVERRGYGRARIALLRKVFAIMRRMLMDCTPYAGMELTLYSKKVQEWERELKKLEVMPIVA

SEQ ID NO: 215178 - protein, 375 aa, unidentified
MGKNTRFVGLDVHAETISVAAEVGRNQVRSLGTIANRPEAVRRVLGKLGKLGELKVCYEAGPTGYALYWELTRLGVQCEVIAPSLVPMKSGDRIKTDRRDAERLARSYQTGDLTAVWVPDSKHEALRDLVRAREATKEDQLRAKHRLLKYLLRYGQRPANDARSWTAVWWQWVRALKLPHPEQNTTLLELILEVDHQGQRVERFDAAIDQAVDTAPEQLRAIVDALQALRGVAKVTAVTLATEFGCFSRFEKAGQVMSYTGMVPSEHSSGPKTRRGAITKTGNSHLRRVLVESAWHYRHQPKLCKRQTELQSSLSPTVAAIAWSAQQRLHRRYWALQNKSKPSAKIVTALARELAGFVWAIGVETERALKTARAA

SEQ ID NO: 215179 - protein, 410 aa, unidentified
MEVLHAHCAGLDVHKDSVVACVRHMVEGKVSTQVRTFKTTTEELMALSEWLSTEAATHIAMEATGVYWKPVWHILSDGELELILANAAHVKNVPGRKTDVNDATWLADLMAHGLIKASFVPDEPTQQMRDLLRTRKQMVRERSSHIQRIQKTLEDANIKLDSVVTNILGLSGRRIIEALIAGQTVPQALATLAHRNLKASTNELEASLYGRVTKHHRFLLKLHLDQIDAIDAAVARIDEEVNANVEPFRVAIEMLSAIPGVGQLSATVIVSEIGIDMSRFPTVGHLISWAGLCPRNDQSAGKRRSTRMKKGAPWLKSTLVQCAWCASRTKGSYLQAQYLRLRSRRGAKKAVCAVAASILTTAYHMLKNGTVYQDPGASYFDNRAKDKQALRLVNRLKNLGFQVQITPLAA

SEQ ID NO: 215180 - protein, 321 aa, unidentified
MEPTVVGIDVSKRTFDVALLRGEKPKSGKFKNTAEGFAVFARWLQKEGAGDIPVCMEATGTYGEKLAEYLYEAGYVVSVVNPAKIKGFAQSELSRTKTDKADAALIARFCRAMRPEPWQPVPPEIKRLRALVRRLDELNGMLTQERNRLDTADDVVKPSIADVIKVLEERIEQVRRLIREHIDKNPDLREKRDLLETIPGIGPATSAMILAEFGDMTRFRDARHMAAFCGLTPRQRQSGTSVRGKSMLSKTGSARIRKALFMPALSAITYNPVIQAFRARLIANGKSRMVIVGAIMRKLVHIIYGVIKSGRPFDPAIAAAA

SEQ ID NO: 215181 - protein, 354 aa, unidentified
MKNVKYIGLDVHLSTISAAVLDEQGKLVMESVLPTHSASILDFMHGLRGILHVTFEEGTQSAWLYDLLVRQVQQVLVCNPRKNALLKAGNKSDAVDARKLAELLRAGLLSPVYQGETSTVTVKQLGRSYEALTQDSTRVMSRLKALYRGQAIPSAGQRPYGARREEWLGKLGGAGVQSRARRLYQQLDVLHALRREARQELIGECRKHAAVQLLRSIPFLGPIRAGLLIGRVQTPHRFRTKRQFWAYCGLALETRSSADYRFVDGQLERTRKPAWIRGLNLNHNHDLKNLFKSAATTASARPGPFGTFYQGLLAKGTPPAMARLTLARKMAAITLSVWKKGEKFDAEKLKSPAA

SEQ ID NO: 215182 - protein, 453 aa, unidentified
MHTIRPNAIRVKRFRELKATLRTNRDRLLVGIDIAKAQDVAQVRLAHTQLVDKQLTIPNTAAGFEAFWARLERRRAETGVSEIVCAVEPTGTYHEALARFLESRGADVVLVANHVAHHNRRTLDGTWGKSDPKDAHNLCELLERGLVLFYSLPAGPLAALRRLVRLLRRARVELAADKTRLRNTLLPVLGPAGEPLPPAVVASLPAPLRLLLPRSEAGPRGRRRTGAPQSPARGGALPPALAFECTDLAAHLAAVQARIAQIEAELVRVAAALPAYALLQTLPGVGPTVAAILLAEIGDITWYTHVAQLRKLAGLDIVWVESGKWAGTARISKGGKPLLRWALYQAALGACRSPRWRAYRERLIAKRAGDPHAFFKATVELAAKLLRLVWGVWRSGRPYDPARIGRGPAARPAIAPPVARVGRRGAPPSGEGQAEIVEPSPSLPGYWGGLQTS

SEQ ID NO: 215183 - protein, 423 aa, unidentified
MKPSIEPSFTALVGIDWSDQKHDFCLQAAGSPQREFGVLEHSPEVIALWAKALYRRFGGPIAVCLEIAKGPLVHALQRHEFIVLFPVNPAMLAKYREAFVPSRAKDDPTDAQIALELLLRHRDKLQPLQPQGADIRTLATLVEQRRLLVSDKTRITNRLGSTLKQYFPQALDWFEDRDTVLFCDFLQRWPSLKHVKRARQATLRSFFSAHNLRRAPLIEQRIHGIRSATALTDDVAVIGPHQLLVQALVAQLRVTLQAIDHFDAEITAVAKRLPDYALFAALPGAGSILAPRLLAAFGEQRERYASAAQLQQYAGVAPVLERSGNKCWVHWRLACPTFLRQTFVEWAGSTIPRSFWASVYYHRQRAKGCSHQAAVRALAYKWIRILYRCWQTRTPYDESVYLLALKHRGSPLIAAMATTPQNT

SEQ ID NO: 215184 - protein, 481 aa, unidentified
MSAGKKNANDGAPDGAVAEHGGDGAEVAEDRVQVVEYAAAIDVAKGFGMVCTRVPGSRPDRRRQKVWRVEATYREVTALMDHLRCEGIQRLVLESTSDYWRIWHYLAEAAGLEVWLVNARDVKHLPGRGKSDRLDCVWHCKLNERGMLRRSFVPPEPVRGLRALTRTRARLAQDQARHQARVEKILEDALLKISVVISDLFGASGRRFLDALVAGERSPKALAALGDPRLKATRRQLEDALTGRFRDIHAFEIQTHLRLIDAINAEITRLDDAIGQQLAKVPRTAPCCTACGLAGGGHAPGCPDEQVPLLGLAGRLDEITGIGEGNAQVIIAELGTDPSIFPTPGHAAAWARLTSRSRQSGESAKPGRTGKGNRYIRGALGQAAMAAGRTDTRLGALYRRIARKRGKQKAIVAVSRAICEIAWILICDPGARYQELGPDYYSPRSPARQTRDKIREIERLNPGQKVILAPADPCTGAGQAA

SEQ ID NO: 215185 - protein, 344 aa, unidentified
MSVYVGMDVHRKRSQVALVDEHGVQLANRNLPNDSAELVAVLGRLAPGTPVAFEAAYGWGWLAELLNELSLEPHLVHPSRCKAIAAARLKDDRVDARTLAQLLRAELLPEAWIAPQAVRDQRGLLRHRAALVRVATALKCRVHAVLADRGVSVQESLWGPAGRVFLAELALPGVQRAIVTDCLALIDAISPLVARLERDLVDRARPDPRVQALQALPGIGPITAMTLVAEIGDIGRFPTARKLCAWAGLTPAVRNSDRKVRHGHITKQGSPWVRFVLQEAAQRAKTRPPFASFYAKTAARRGKHIATVAVARKLLARSFHLLTELQATTGEGQAAGCARPITCA

SEQ ID NO: 215186 - protein, 406 aa, unidentified
MGIDIAKDKHHAFFGTANGKTLWRRLIFSNDLIGYTRLIEQAQVLSSQHQLGEVVFGLEPTSNYHKPLAYWLIKQEYLVVMVAGKAVKDNRELLDGRWDKHDTKDSANVADLISQGKCQFYEQPDEDIVVVRNLLVIRKQLKREEHRLRMRIRNGLIAKYFPEMDRYWGNCLEENLAIVRWYLDPRKISNTEFEKFVLHVTTTNRGVRQMQRLRAIHQAAGESVGLPMDEAAGYEAQLLVERLRQVKEQISQTMQRIENECLNLSGYKLLLTIPGFGPYISALVVCALANPFRFTSRKQVIRLAGLDLNASRSGKKSQDSVPKISKKGNADLRYALYQAALIASYRNDAFRRLYHRMLEGRHGERGIKTKARVKLAAKMLVVAWTMLKNNETFDAKRLLGESVQQR

SEQ ID NO: 215187 - protein, 375 aa, unidentified
MKKELYLGLDVHKDCIITAVAEEGRKGEVRDTGVISNDLHALEKRVGRLRKAHGSDVVLRACYEAGPCGFGIARRLKQLGVECEVVAPSLTPKRAGERVKTDRRDARKLARLLRAGELSPVYIPESTDEAIRDLCRARTDAVDDRCRSRHRLKGFLLRHGYHYQGKSSWSAAHERYLRELVLPHPAMKVILEEYLQGIGAAAERIERCEAAMRDLLERWRLAPAVRALMAMKGFQTVAAMILVSELGEVRRFTHPRQVMAYLGLVPRENTSSDRRRQGHITKCGNAHARWLLVECAQHYATAPKVSKELSRRQEGQSAQVRAISWRAQNRLHSRYTRLLARRLQRNKAIVAIARELCGFIWELLRIQPCYEAHPF

SEQ ID NO: 215188 - protein, 405 aa, unidentified
MSVHHAAPVTSSTIVVAVDVGKSSAMVLVSDAGRRRLVGPVGFVMSCSGLSAVVDRIVCVSGPSAQVKVGVEAAGHYHRPVLDYAWPPGWEVLELNPAHVTEQRRVAGRRRVKTDVIDLEAITELVLAGRGQPVLVAETVLGQIAAWAAHRSRRVAVRSATKNQLLGQLDRTFPGVSRALPDVLGTKIGRLVAAEFADPARLAALGVSGLIRFAAGCDVQLRRPLAERLVTAGREALPTADAVVARRVLAADLVLLADLDTQVGAAEAELATLVPHSRFATLTTVPGWGVVRVANYAAAVGDPRRWPGPRQIYRAAGLSPMQYESAGKRRDGTISREGSVGLRRALIDLGLGLRLTDPAARTYAAGLKARGKHGGIITCALAHRATRIAYALVRDHASYDPMRWT

SEQ ID NO: 215189 - protein, 449 aa, unidentified
MREPQEIQDQEYEQVAERVAAVDVAKASGMVCTRVPHPSRPGKRVTKVWQVDATTNAIIELGEHLAGLGVEKVTVESTSDYWRGFFYLLEAAGLEVQLVNARDVKNVPGRPKTDRLDAVWLAKLTERGMLRPSFVPPAQIRQLRDYTRLRVDLTHERTRYWQRLEKLLEDALIKVSSVASTLDTASTRDMLEALIAGERDPGVLAGLARGKMKAKHAALAQALTGRFDAHHAELARLLLDQIDALSGQIGTLTTRIQQLLQAIPAAQGVDADGTTGPGAGSGTDAAVLPAAARLDEIAGIGPGAAQVILAEVGLDMGVFPTPGQLVSWAKLCPRTIQSGAKHHAGTTGKGNPYLRGVLGEAAAAAAKTDTFLGERYRRLVKRRGKLKALVAVARSILVIVWHLLADPAARYHDLGAGYWADRIDKAKKARNHIRQLEALGFTVSLAPAA

SEQ ID NO: 215190 - protein, 360 aa, unidentified
MSQEKYIGMDVHQATVSAAVRDRNGNLLMECILETKAETLLEFVQGLHGTLSLAFEEGTLAAWLHDLLKPHVNRVVVCDSRKAALLRDGNKSDRSDARNLSELLRTNQLKPVYHGEHGLRTLKELGRSYLTVSKEMTRTMNRIKSLYRSGAIPRPGTTVYAPRYRRQWLAKITEPGARMRAEHLYEQLDHLQPMRVRARREFLQESNKHDAVKRLGQIPSIGQIRAALLVALLQTPHRFRSKRQIWAYSGFAIETHDSGEYRYVRGKLQRNRERITVRGLNRNHNPDLKNIFKGAAISASSRPGPLQDFYETRVAMGMRPTMARLTLARKIAAITLCSMAPSATRRATDLSSSECGILSK

SEQ ID NO: 215191 - protein, 344 aa, unidentified
MIYYAGIDVSLRTVNICLINEDGKLVAETKLASDVQDIVAYLDDLEFDVESIGLEAGTLTQYLTYGLQAAGFDVVVMEARQVKGALSAMRNKTDKHDARGIAQILRSGWYSRVHVKSMASHHIRMWLSSRKAVLSKCVDLENEVRGLFKIFGIKLPPKLGHGAFDPAVRDIIEVDETLSHALLPLLDARLVLYHTFRELDNRTRKMAHADPVCVRLMSVPGVGFITALTFKAGVDDPHRFKRSRTVGAYFGLTARRFQSGEMDIDGHISKCGDANVRATLYTAANALLTRSSRWSPLKAWGMKLAKTRGHRRAVIAVARKLAVILHRVWIDDTQFRWGTEGARS

SEQ ID NO: 215192 - protein, 365 aa, unidentified
MDRIYICVDFHERQQTICYLKTETGELVTCELKHQDKQAVGAFYAQFGGQVIVGLEASGYSPWFERLLEELGCEVWLGHATEIRRRARWRQKNDRRDAELILELMLHDEFPRLHRPAGQSREVLRMLRYRQKLIKIRTMSKNSLQAIALQSGLAKRGRLFSKEGQEQLGTAEMSPVMHWQREHWLQLMAPLNQQLLETMVWFKAQSKGDVCITRLRTHPGIGLLTSLCLVHTLQPVSRFRNTRKVAAYVGFDPVERSSAERKCFLGISKAGSRLLRYLLVEAAHTAVRKDEDLKRFYKRLADRRGRPKAKVAAARKLLIRAFIMLRDEIDYAEFRHRAVAARLARRGQGPNVPEVLIGQPASPRQ

SEQ ID NO: 215193 - protein, 351 aa, unidentified
MWIIGVDYHPSVQQIAFVNTDTGECGERRLNHSDGEAEKFYRELKAAGCRVRVGMEATGHARWFERLLAELGFELWIGDPTKIKAKRVRKQKTDRLDAELLLQLLLEDRFPRVWVPSAENRDLRQLLWHRHRLVQMRTRIMNQLQAVAMNEGVRRKTALWSKSGRAQLESLSLAPWAARRRHDLLELLDRLNPTIEELSAVVEQEAKQRPEVLRLMTHPGVGPTTALAFVLIIDSAERFACGKQIASYVGLIPCEDSSADRRRLGHITKQGNTLLRFLLVEAAQAVVRRDPDWRRRYTHLAMRRERRIAKVAMARKLGVRLYWMMRKEWNYEQLKKFGSYAGESEYGHGVQ

SEQ ID NO: 215194 - protein, 349 aa, unidentified
MLYVGLDLSRKRLDFHAADKDGEPVAIGATPPDADGLRHLVKRLGDAEVIAVIETMNGGRFVHDQLELQGWDVRVADARKARALAPLACKTDRIDAWVLSELARRDLVPEVWLPDPTVRAERERARFRLHLVRHRSALKNRIHATLIAFGHPCPVSDLFGVGGRQLLDRLAVPEAWRETLETSLYLVDELDGEIHECERELKQLGADHPYVPLLTTIPGIAWTLGYTIAAEIGDIARFPSPVKLIGYTGLCPRVYQSGESDRRGPLRKNGPRYLRWALIEAAQHAARSPAYPYRAVYEQTRARIGRNRGGKVAKIVIARKLAEAIWHMLNRNQPFNPCSGKRLVSLTAN

SEQ ID NO: 215195 - protein, 418 aa, unidentified
MLENYISVGIDVGSSFSWMSIVDPQENIILKPFKVIHNNSDSLKRALSEIKKAEELHSLKSRTFLESTGIYHFPLFCYLMESGFEAFVINPLIIHSIKNYGIRKVKNDKIDSIGLAKLGLKKDLKTSVLPTKLVLELRSLCRKYYELVDTRSSYVNRLKTDMHTVFPQYLDIFSDITGSTSIMILKEYSTPDKILRGHRTTVIEKISKCSRKGLFKATIKYEQLIQAAKASKIFGCNIDSIYFNISINIKLIEELNSAINSILEQIHSLVEANYSDEFVKQVYWLDSIPGIGFLSAVTIMCEIGDFSSFKNPKQLFAYFGLDPSVNQSGNFNATEVHMSKRGSRIARRAIFAVALASIRTKRNGEAINPILHEYYIKKSSSKPKMVAIGAVMHKVCNFILPSYGMKQILNLELLRSIV

SEQ ID NO: 215196 - protein, 328 aa, unidentified
MDKQYFFVGIDVSKKELVVAVDGRKTTTFKNTKRGVASLHKFAEKIADDLAPWFVMESSGVYSSVPAIRLVEMHNALVSIINPGRIKAHARALGFRSKTDSQDAQVILDYAQKTKPHQWKPAPLPLRILKQYVDQIRACKKIIVMTENRMEAHEFEGVEQRITNSDRATIRHFERQITKLETDIKALVTDDKQLDKQVSLLKTIPGIALDSACKIMAYTRGEITKRSAKQLTAFAGLAPAHRQSGTSLHGQSRIDKQGCAPLRVTLYMCALSAATHNPELSPLYERLITRKNKPLAKKQAQVAVMRKLLLIARAVLISGKPFDRNYQT

SEQ ID NO: 215197 - protein, 354 aa, unidentified
MKLYVGLDVGLEETSLCIVDGEGLTVREVKVMTEPAAIRSAVEGYADRLERVGVEASSLGIWLYRELQPAGLPNIVVEARHMRVSLSTMRNKTDRNDARGIAQMMRLGWYRAVHVKNIDMQKMRTLLTSRKLLKRKLIDLENHIRGALRAYGLLVGAVARGAYEARVRELIERSDPIFVMTIEATLDVRRAILEGYDRLHRVLLQVVQHDAVCRRLMTVPGVGPVAALSFKVGVDDPRRFARSRTVGAHFGLAPRRHQSGTSIDYEGRISKQGDVAVREALCEAAASLLLRIRKWSALRAWGLRIAKRSSMLCAITAVARKLASILHRMWVSETDFHVGFGAKITQRLRLKPAQ

SEQ ID NO: 215198 - protein, 410 aa, unidentified
MEIIVARQSALDVHKAQVTACVRVPGANGERVEEVEQFVTTVPGLLVLGDWLKAHGVTHVVMEATGDYWKPVWHLLEADFELMLVNARDVKQVPGRKTDVSDASWLCRLAEAGLLRASFVPPKPIRDLRLLTRYRRTQIAERRREAQRLHKALEDTGIKLDCVATDILGKSGRAMLDALIGGTTDPEVLAELARGKLRKKIPALREALQGRFESLHALLIGAILAHLDFLDEQITSLSEAIEEQIAPFAGARDLLMSIPGVGQRTAEIIIAEIGTDMSVFPTAGHLASWAGQCPGNDQSAGKRRSGRTRRGSKHLNAALKDAAMAALRTNDSYLQALYRRKKPQAGHGRAIGAVKHSMICACWHMLQTGEVYNDLGGDYFARRNPERQAKRLVAQLERLGHTVTLTEVAA

SEQ ID NO: 215199 - protein, 340 aa, unidentified
MLYVGLDLHTKHITSCVLNSDGKLHDRWQVQQVDQLVERLTRFQQPFKVTYEAGCGYGRFHELLSPIAAEVMVANPGQLRLIYGSKKKNDRRDAENLAKLLYLDAIPMVHVPSADVRAWRELIVFRHRLTEKTTRSKNGLRALLRTLVIRPPRTPGLWTLEGLIWLKTLELPHPLQTCRRNVLVDELESLKRQIALVEQELARFSEGNAAIRRLRTIPGVGPRTAEAVVAFLDDPHRFQNSKQIGDYFGLVPCQDQTGSKNRLGHITRDGSATVRQLLTEAAWQATQRSPTVRAYFERIHKGDKNRRKIALTATAHYLARVMWSMLVKETDWQEQIPAGG

SEQ ID NO: 215200 - protein, 406 aa, unidentified
MNAVGIDVSKGKSTVAVLRPFGEIIVSPFEVYHNPKKLSELVTLLKSLDGDTKIVMEYTGNYYLPVALFLQNVGLFVSVVNPILVKEYSNKSLTVRKGKTDKKDSIKLAAFALDRWNELPVFSSQSDTRTLLKAFNRQYNQYNKLKIMLKNNLISILDQAFPGVNTLFNTPARKKDGHEKWIDFVLKFPHCDCISRKSYSVFSKCYLSWCRKYGYYFYETKAKEVYSFACNCAPSLVDSEAAHALVSTAILQLNTLNETLASLQKEMDLLASTLPEYDTVMSLYGVGSVLCSQLIAEIGDVSRFTNKKALIGFAGIDAPPFQSGNFNPQSRSISKRGSAALRKTLFQIMAVILQHEPSNEPVFLFMDKKRSEGKHFYVYMMAGANKFLRIYYARVMERLNSAQTAA

SEQ ID NO: 215201 - protein, 416 aa, unidentified
MKSESGGSFAAYVGVDWADSKHDFCLQAADSDRREPGVVAHTPEEIADWASGLRRRFAGPIAVCLEIAKGPLINALQRYDFFVIFPVNPAMLAKYREAFTPSGAKDDPTDAELALELVLRHRDKLKVLKPQSRAMRTLATLVEARRALVGDKTRITNRLAVTLKQYFPQALVWFEHRDTLLFCDFLCRWPTLKHVKRARQSTLQSFFREHNVRFSSVTERRIHGIRDATALTEDDAVIQPCQLLVQALVEQLRATLHAIDRFDEAIATVAETLPDYKLFAALPGAGSILAPRLLVAFGEQRERYASAAEVQQYAGIAPVVERSGNKCWTHWRLACPTFLRQTFIEWAGATIPRSFWAAAYYRRQIGKGCSHRVTVRALAFKWIRILYRCWQDRVPYDEATYLNALRRRGSPLLKTT

SEQ ID NO: 215202 - protein, 349 aa, unidentified
MKKIVKQVVAADVAQNELVVCLGRMFDDWVPELYAHKTFANTVKGFAELILWVKKLTDELIPVRYVMEATGVYHESFAYFLEAKGCEVSIVLPNKISNYMRTLEVKTITDKTASEAIARFGLERQLDRWKRPAEIFRRLRQRTRERDQLVTERTLVKNQLHAEQTEAYPSKESITRMKARILLLNKQISQIKAEMDALVKQDKEVSRSVEVITSIPGVGVLTAATALAETNGFELIRNKRQLTSYTGFDVREKTSGTSVKGKPKISKKGNRYLRKAMHMPALAAIRQEGKFKIIFTRLVSRHGIKMKAAVAVQRKLLEMIYTVYSKNTPYDKNYVDQNEADLDKQPCLA

SEQ ID NO: 215203 - protein, 338 aa, unidentified
MPLYGGIDLHANNSMIVLLNEQDQVLYHRRLANHLPTILEQLAPYQAELTGVVVESTYNWYWLVDGLMEADYRVHLANPAAMQQYHGLKYTDDYSDARWLAHLFRLGVLPEGSIYPKAERAVRDTLRKRAHWVRQQTANILSLQNILVRHTGVRLSAKRLNELTKEELQGMLPEADQVLAVTSSLAVLDCLRQQIKTLEQAVMKRLQHSPAYEQLLTVAGIGVMLAQTIVLATGHIGRFPTVGNYASYCRCVKSIKISNGKRKGQGNVKNGNPYLAWAYMEAAQFAIRFNPTVQRFYQRKQTKSHLMVARKAVAHKLARACYYIMRDLMSFDVHKAFG

SEQ ID NO: 215204 - protein, 349 aa, unidentified
MKIYAGIDLHSNNAVCGLVDGSGRRLERKKLANDLGEIEQVLRPHKAHLEQVAIEATYNWYWLVDGLQDQGYPVVLANPAAMHQYEGIKHTDDVSDAFFVAELSRLGILPTAHICERKLRPFRDMLRRRMLLVHQRTSLLLSLKSLYARNTGQRLSQGAVKALELEEIEELFQHPADQLIAGEELKVIEQLNQSIARIEKAVEACADKLPCYGRLKTLPGVGRILALTITMETADIRRFASAGEYASYCRCVNTERQSNGKSKGQNNSKCGNKYLAWAFVEATHCARRCDPPCLKFYDRKKARTNTMVATKALACKLSKAAWHIMSKDQDYDAGRVFPFLKENEKQAGT

SEQ ID NO: 215205 - protein, 331 aa, unidentified
MNYSHFVGLDVGKKTFDASLMSAAEKELSHKSFDNTPEGIQSLLDWIAGYHLSLSKLLFCAENMGSYVTELSVSSVSMGFSLALVCPLTIKKSIGLQRGKNDRIDAKRIANYAVLHYRKLELYKLPNKDLVRLRGWIIIRDNLVKQKVSSIKLLETFSQMAKLADVTESISFLEEQLKSIKEKILEVEEDMEQLIAASTSLYTNYLLLRSIKGIGIINAIVLLCVTDNFQRFDNPRKFACYCGVAPFEHTSGISIRGKTQTSSLANKEVKVYLTRAAITAISWDPQMKAYYKRKIAEGKHKASVINAVRAKIIARSFAVIRRQTPFVTLVV

SEQ ID NO: 215206 - protein, 387 aa, unidentified
MARKRTRSTLDTSIAYEAVGLDLAKEDAAIAAFGPDHEGPYLIDRIPYDKLYELLADMAPTLVAMEPCSGAHQIAEQIQELGHEVMMISGRHVQAWVKDHCNGQKTDLNDAFAILNLAYDRWLTPIRGKTREECRLLALQASYRQLKGQRTKTMVHVKATLHAWGFPIRTGSFNQKALHELIDANREAFGDEVVETLHLMINRVHNLDHDIATVLKLLTEATQRDPRASLLRSIPGFGVLTTSRWCAVVGDIARFDTPKQTMAFIGLVPNNRITGHHTETSSGREARGQGKMSKRGDKMLRSLCILGAASLCLMVRNDRLPDCPFVASIKERLASPRPWFKVLVYVAAKLVRIATALLKYGETFSFEKAGISKTVLKQWELEQAKAA

SEQ ID NO: 215207 - protein, 368 aa, unidentified
MENDITVFVGLDVHKDSIAIAVARAGRDAPRFVGTVGPGLAELLKALRKLGEPERMLLAYESGPSGFALARKLIAAGWRCQVVAVSKIPVRPGQRIKTDRRDALALAGYLRAGELTPVIVPDAGDEAIRDLSRAREDAVRARLKARQQIKAMLLRHGMHYPGKTSWGPAHERYLAEIAFDHPAQQIAWAEYRHAIVDAHERVLRITAALREQIEHWRFGPAVRALMCFKGIDLVVAVTLVAEIGDLHRFEHPKQLMAYLGLVPSEHSTGETRSRGSITKTGNSHARRVLVEAAWCYRHSARMSRPVTDRNKGQPKPVRDIAWRAQLRLCERYRRLAARGMHSNKICVAVARELAGFVWEAARHTQPAD

SEQ ID NO: 215208 - protein, 325 aa, unidentified
MSRMQGKALPKGAQAPNYAGIDVCKDWLDAKLRPSDKAMRVANDASGHKRLSRFMADNGVVLIVMEATGKYHRAAQRSLYANGFAVAVVNPKRARSFAESIGALAKTDEVDASVLAMMGETLRPDATPPASKTLGKMQELVRARQAALADRTAMQNRMGESTCDAVRESLNAVIEAINSAVAKLDAEIAKLIAGDGGLSRRMEILVSIPGVGPVTAASLIADLPELGECDDKAIAALVGVAPFAADSGDFRGQRRIRGGRSALRSTVYMAAVAAARSNPDMKRVYERLKAAGKASKVALTAVMRKLVILANALVKTDRKWTPRTA

SEQ ID NO: 215209 - protein, 340 aa, unidentified
MTITTLGIDIAKSVFQLHGVDADGAVVLQKKLRRGAVLGFLGKLEPCLIGMEACATSHYWSREIAALGHDVRLIPPAYVKPYVKRQKNDAADAEAICEAVTRPNMRFVPVKTEEHQGVLVLHRSRDLLMRQRTMILNAIRAHFAEFGIIAAQGPRKVAELVVRLRDDDTLGLPETARSALLALAVQLGSLAAELLNIERQLMAWHRQSAASQRLETIPGVGLITATALAASVSDPNVFRSGRQFAAYLGLVPRQNSSGGKDRLGHISKMGNGYLRRLLVVGATSVTRRAPTTDTRTGAWVRSLLERKPTRLVTVAIANKTARTAWALLAKEEDYKAVPAI

SEQ ID NO: 215210 - protein, 385 aa, unidentified
MWYVGLDWADTHHDVEVIDERGKRVGTQRFAHSYEGLNQLQAWLVQIAGDREQLACIVETNHGLLISFLLETGIPVYPVNPKMANQLRKTAGAKTDQIDAHLLARMGRFELSELRRLDPDSPTVQELKTLTRDQELLIQTQTRLVNQLTACLKDYYPVALKLFSKLQQRSTLLFLQAYPTPEAVQAASLDEIIATLRTGKHRNPRGVAPKIFEEVHRPQLTAPPVVVRAKSRLMLSLVKQLLVVIEEIAAYDKHIRTLFLTHPDQAIWLSLPGAGKRLAPRLLAEWGEDRARYADASSAQALAGTAPVPFQSGNYAKAHKRFACLKPLRNALHQFAWQSTRQEAWARDYYQRKRAEGKTHSTAVRALANVWVRIVRHVGAYEIPA

SEQ ID NO: 215211 - protein, 455 aa, unidentified
MPKKIRKSKANVSMPTVNPHAAGIDIGAKEIYVAVPADSDPDPVRCFTSFTDDLRAIADWLKACGVKTVAMESTGVYWIPVFQILESAGFQVCLVNSRHVKNVPGRKTDVSDAQWLQYLHAVGLLRASFRPPEAICALRSVLRHRDTLVHLSSRHVLHMQKALAQMNLQIHNVISDITGVTGLRIIDAVLAGERDAQKLAALRDGRIKAPMETIARSLVGDFRREHLFTLDQSLKAYRYTQSLIEDCGMEMEALLRDFDSRIDLPPQPEPRRKSHHKESICERSIHQHIYRVTGIDLTTVPGIEINAARTLFCEIGPVLDRFATAKHFASWLGLCPDNRITGGRVLSAKTRDVPSRAAYILRMAANSLHQSQTRLGDFFRKMKGRLGTPKAITATAHKLARIIYHLLRERVAYDDSIFAQEDEIHRRRKFKQISSQAAAYGFILTPATETGPTVS

SEQ ID NO: 215212 - protein, 371 aa, unidentified
MEPTTFVGLDVHKRTTSVAIAEGERGGEVRVFGEIASTPEALQRLVQRLQRNHRRLDFCYEAGPCGYGVHRQLRGLGHDCSVVAPSLIPRRPGDRVKTNRRDAAQLARLHRAGELTPVWVPDDAHEAMRDLVRARASARRVLGKARQHLQGFLLRHGRIYSGARGWTKAYRCWLTTVRFDHPAQQIVLQDYIHAIEDAEARLTRLESQIRDLLPTWSMAPVVEAIQAMRGVALIVALTVVAEVGDFSRFASPRQLMAYLGLVPSEHSSGASVRRGGITKAGNVHARRVLIEGAWTYRMQARVSRKLHDRLEGLPRAVRDVAWRAQLRLCNRYRRLVAAGKPKVVVTTAIAREMVGFIWAIARLVQPQPAIQ

SEQ ID NO: 215213 - protein, 341 aa, unidentified
MEVSKAKKYTYFIGIDISRNELDFAVMQGNKFLFHREIKNESSEINAIIDSLKKLPKFVMSRAVFGLENTGIYGNHLLNCLKRVKTNIVNENALHIRNSLGNIRGKYDKIDAIRIAQYLYKNRDELNIWKPKRPIVQQLAHLSTLRNRIMTLEKALVTPLKEDTNFVQKKIVAQSKKLIKNSSDALLADFAAIDAFIFELINSDTNLKRMFGIITSVPSVGPVTALQIIITTNEFQDIRNPKKFACYAGVAPFKRDSGLIEGKAKISNMANKRVKALLHTCALSAVRHDPELKAYYERKTKTDGKPKMAVLNAVRNKIVLRIFACLNQDRCFERNYQRQAM

SEQ ID NO: 215214 - protein, 408 aa, unidentified
MKTLHNRCAGLDVHKVEVVACLRLVSKRKVEREVRRFPTTTQGLLALAEWLESAGCTHVVMEATGVYWKPVWHILEGRFALILANAAHVKNVPGRKSDVNDATWLADLLAHGLIQSSFVPPPAIQELRDLTRTRKQLTREIVQHVQRIQAVLEEANIKLCSVITDIMGASGRRMLKALIAGETDAEKLAALGHERLGCTRAELVQVLTGCVREHHRFLLEQHLRTIEQLEDSVAAFDARIEAALSPFHDIVERLKEVPGLGATAIETVIAEIGIDMSQFPSAGHLLSWAGFVPRLDESAGKRRSTRIKKGAPWLKPVLLQSAWGAARKKNSYLQAQFLRLKARRGAKKAAIAVAASILTTVYHMLRDGTYYQDLGPEYFARRNPAKTAARLANRIRNLGYQVEIRAAA

SEQ ID NO: 215215 - protein, 347 aa, unidentified
MRFYTTQHPFYCGIDLHARTMYLCILNQAGETLLHRNMVATPEALLKAIAPYREQIVVAAECMFTWYWLADLCADHGIPFVLGHALYMKAIHGGKAKNDKIDAHKIAVLLRGGMLPQAYVYPAEMRATRDLLRRRMHLARKRGELLAHVHNTNSQYNLPAIGKKIAYKANRDGVAERFADPAVQKSIEVDLALITYYDALLRDLELTIVKTAKHHDAQTLYLLQTVPGIGKILSLVLLYEIHQIERFPRVQDFVSYCRLVKCAKESAGKRSGTSGSKIGNAHLKWAFSEAAVLFLRDNPAAQQLLARLEKKHSKGKALTILAHKLARAVYYMLKRQTAFDLDTFLHG

SEQ ID NO: 215216 - protein, 357 aa, unidentified
MEQFIGCDAHKKFSLFVAMNEDGEYGRAIRVGHDREAFRAFLKDLPPGSQIALETSGSYYWLVDEMERAGHRPQLAHALTAKRRMEGRHTTDARDARGLAMLFRKGTLPRVWIPPAELRDQREMLRLRMSLVRMKTQLKNRIHGVLLRYNLGIQASDLYGDQGRAELISRQGELPQWSRESVLEQLQMVDSVQSQIVDCEKQLEAILYPNAERDLLKTLPCVGKVLSAVIALEMGDVRRFGAAKYLVSYAGLVPSARESAARKRQGRCPRDCNVYLKWAFVEAANLIASKQKAWSGRHAVRLYQRVKQNTKMHGKATMVVARHLAEASYWILTKQEVYREPKSKAAGSFVDARVSAN

SEQ ID NO: 215217 - protein, 375 aa, unidentified
MKEKLRFLGLDVHAETIAVAVAEPEGEVRSLGTIPNRAESIRKLIKKLGPADKLRACYEAGPTGYVVYWQLAELGVACEVVAPTLVPVKAGDRVKTDRRDAEKLARCYRSGDLTAVWVPDEGSEALRDLVRAREAAKQDQTRARHRLSKFLLRSGQRPPTGVRSWTRPYLIWVAQLRFTQIAQESTRQDYLHEVEHMRERVSRLEQAIMEAVKLASPVLQQVINDLQALRGIADISAVTIASELGQVSRFDSARQLMGYCGVVPSEDSSGKRTRRGGITKTGNAHLRRIVVEAAWSYRRPPGIWYGLRRRQESISEEAKEIAWKAQHRLHKRYIKLGAADKDQRKIVTAVARELLGFIWAVGTRAETISRQQLAA

SEQ ID NO: 215218 - protein, 371 aa, unidentified
MGAYYVGLDVHSRETVFVIQDPTGAVIGRGALPTTPEAFARMCHQYQVPPGTPVALETGTSAFYVARALSALDLKPIVIDAHEVRLKAHRPAQKSDRRDAFELCDGLRRDLYRSIVHIPSPAISALRTALSRRRHFVRIQTAEVNATKRLLRGAGWLGGKRGSLRNASGWERLIDALASEPTLQTHTRFHYAVWQQAGEQVRAIDHLLGDLGRGFRDDVRRLETVPGVGPIVALTAVAVFADVERFGSAKHAASYAGLVPSTYQSADRDCHGHITKRGSAELRTMLCEAAHHARRPSHPLHPYFLKLCARRGYKSAVVAVAHRLCRVLYALLRDGTDFQPSRLGIEEGPFTQTVTRRFRLTPKSAGRLALV

SEQ ID NO: 215219 - protein, 408 aa, unidentified
MKDSGKRYIGLDVHKHYLIALGVDEDLNVVLPARRVELSHLESWMKRTLTRQDDVVLEMTTNTWQLYDELCAYAGSVLVVHPPHVALITRSQVMNDKIAASILARLLAKGLLVGIWVPPQEVRELRGLVAQRKKMTGLATQAKNRLHAVLQRHHLVPPEGNPFHASQKNWWLALALGPLEKVNTQSDLDTLQFAEQQLARLTSLMTMLASEDEHITHLLQIPGFGVVTAVTVWAAIGTIERFEDPQHLVGYAGLGTRVHDSGMSTRTGRITKAGRRDLRVVLIEAAQVAANHHPHWKAELARLQPRLGRNKAIVAIARKLLTAVWYILAQHKTDRFAEPDRVAQKLLKFAYQLGKENRPAGQSAAQFVRQRLDALQLGQELTSIAWGSKKPIPLPPSKNKVSDVPNTK

SEQ ID NO: 215220 - protein, 309 aa, unidentified
MSNVGIDVAKSRLDVAARPTGEQFAVDNDEAGHQELIKRLKRLKPERIVLEASGGYEIAVVQALAGAGLPVVVVNARQIRQFAQALGKLAKTDSIDAHVIAQFGEAIRPDLRPLPDQAQRELEALVVRRRQLVDMRSAEQKRKQTAPEIIHENIDAMIKFLSQQIDDLDHDLEKTIRSSPIWRESNDLLQSAPGVGPVLSATLTALVPELGKLNRKQIAALVGVAPLNNDSGAHVGKRTTWGGRAAVRGVLYMATLTARHRNPPLAAFYNRLIERGKPKLVAIIATMRKLLTVLNAMVRQGRPFALQST

SEQ ID NO: 215221 - protein, 372 aa, unidentified
MKEDSVIFIGLDTSKLKISVAIADGSRNGEVRFFGDISSEPAPVASMVSKLSKRGAKLHFCYEAGPTGYGLYRQIVELGHDCVVVAPSLVPKRAGDRVKTNRRDAMSLARLHRAGELTAVWVPDEGHEAIRDLVRAREAASDALKQARQQLKSFLLRHGRIYAGREPWTRAHRRWLTCQAFDRPAHQILLAEYCQAVADASVRLDRLTKLVVETAASWSMAPVVAAYQAMRGVAFMTAVTFVVEIGDVRRFDNPRQLMAYLGLVPSESSTGERVKRGGITKAGNTRARRVLIEGAWTYRFPARVSPKIQARLDDLPRTVREITWKAQVRLCARNRKLLAAGKPKVVAVTAIARERAAFLWAIGQEVALTAKG

SEQ ID NO: 215222 - protein, 343 aa, unidentified
MGTQITGGVDTHLDVHVAAALDERGGLLGTASFATTPAGYAELVGWLASLGSVVVIGVEGTGSYGAGLTRHLQVLGIAVVEVDRPNRQRRRRSGKSDTHDAVSAARAAFAGDALGAAKTRDGNVEAIRVLRLARNSAKRDRTRALNQMRALITTAPDELRAQLRGLSIPRLVSAAVGFRPAGRTDVTNANRVALKTLARRVLELDAEIDMLDELLTPLVAETAPELVERVGVGTDTAGALLVAAGENTSRIHNERSFARLCGVAPLDASSGKQQRHRLSRGGDRQANSALWRIVITRLSYDPATRAYLERRCTEGKTKTEAIRCLKRYVARELYAYLPQERLA

SEQ ID NO: 215223 - protein, 395 aa, unidentified
MSEQGRVVIGMDPHKRSVTIEVMTADEGVVGGGRFATDVEGYRQLLSYVASWSERVWAIEGCRGIGRHIAHRLIADDQEVVDVPPKLSARARVFSTGQGRKTDATDAHSVALVGVRMAGLRPVVADADLDVLRLLVDRRRQMGAEHTRKVSQLHALLLELIPGGAKKSLTAAQARKLLTALRPRDVTGKTRKRVAAELVGDLERIYARKRAADKELRELVAATGTGLLDLHGIGPQGAARLLVEVGDITRFPDRNHFASWTGTAPIDASSGDHVRHRLSRGGNRQINRALHMMATVQLRNATDGRHYYDHKKATGKSSMEAMRCLKRRLSDTVYRTMLSDVAHHAAHRAGTGPGGQRGNDSDSSAAGSQPQYRLFGQATPGPVNDQPKPALPKVS

SEQ ID NO: 215224 - protein, 414 aa, unidentified
MEGAINKSCGLDIHKQFLIATILSRSGEKQQQRFTRDDDGILELKNWVTSEKCDVVACESTSDFWVPIYDLLISHLPVIVGNARDMKAFTHKKTDKIDSEVIAKLALNQMVQPSRVFPKNHREFRSFVRLRLALVRKRTDIKNEAHAILSSQMLHLGNVLKDIFGKNGRAVLSGISSGKTVDQIIESLTPNVRKKSTQIREILDREISQTAAIRLQTCLNLIKHFDDEIKLLEREIFNYAYGKHKDKMEILMSVPGIGEIGAATLIAEINDFNDFPSGDKLASWLGLVPNVYQSADKYHNGRITKRGSKVARWILTQIAQAAARKKNSKLKEFFSRKKKSIGHSKAVIALARKIVTIIWHLIKNNEMYEDETGYEKGEIQKRKIIETEVFSVDERIRIISGIFAIMGKEDREGT

SEQ ID NO: 215225 - protein, 430 aa, unidentified
MGLIVPTTIHPEREDQPLPYEWFVGIDWGSQQHQVSVLDRDRRRVGERVVDHDGASLARLADWLWTLSAGQPQRVAVAIEVPRGAIVEGLVERGFHVFALNPKQLDRFRDRHSVAGAKDDRRDAFVLADSVRTDQPSFRRVHLEEPQLLLLRELSRAEETLLEEFRRSANRLREQLHRFYPQMLQLCSAADEPWLWGLITLAPTPAHAMLLSEEQVQRVLKAHRIRRLTATEVLACLQAPALPVAPGAAEAAQAHCQLLLPCLRVLAEQLQACSQQVSALLSTLAEEPGEGESPSDVAIVLSLPGVGRKITAWLFAEAAQSLTERDYQMLRTHSGVAPVTKQSGKRRLVVMRRGCNPRLRHALYHMARVAMQRDAHFNSVYTTLRAKGQRHGQALRNIGDRLLRILVAMLRHRTCYDASRIRREPVVQMG

SEQ ID NO: 215226 - protein, 359 aa, unidentified
MNNKKYIGMDVHQASISVAVRDSAGKLVMESIIETKATTIREFIRGLGGSLSITFEEGTRAAWLYELLKPEVAEVLVCNPRQNALLRAGNKNDRVDARKLSDLLRAGLLSPVYHGENGVRTLRELARSYLTITKDLTRVMNRIKGLYRSWAIACAGKKVYAARHRGAWLEKIAETGVRRRAELLYEQLDALAKIRRETRRALLQESLQHSASKLLRQIPRLGPIRVALLIALLQTPHRFRTKRQLWAYCGLALQTQVSGEYRVSDGQLQRSKKSPALRGLNHNHNRDLKSLFKSAATQASASAKKDPLGEFYENLLAKGMKPAMARLTLARKMAAIVLRVWKKGESFDPAQLKCQSVCV

SEQ ID NO: 215227 - protein, 435 aa, unidentified
MMPAQSQPGLLNADALVDLRVAVSASESEDLARLGLVETHFRLALGEIARSVVISGGKLAYGGHLDPCKSDRSASARLADAVAGGRPSHPRTSKSGPQRGSPSVVPLNPNSRLGRLRSPIAQGRDQMDTIVVGIDVSKDRLDVSVQPAGTALSYNRDAVGIEGLIEALAPLAPQLVAVEATGGFEAVVAASLAAAGLPVVVVNPAQVRSFADALGKRAKTDRIDAQVIAQFAAAANPPVRALPDAATQALADLVTRRRQIIQMIVAEGQREKRASVRARKSIQRLLKSLRAELSEIDAEIDESVRGSAIWREKENLLASVPGVGSGTARTMLAELPELGTLNRRQIAALAGLAPFTRQSGKWRGKSFISGGRASVRTALFMAAMTAMRCNPALRAFHHRLRAAGKPKMVALIAVARKLLTVLNAILRDKTKWQNA

SEQ ID NO: 215228 - protein, 346 aa, unidentified
MQPVIGCDAHKKFSVFVSVDQHGKPSRPVRVDHDRDLYCEYLRTLPPGSEIALEATGHWYWIVDAMEQAGHHPHLANPFEAKRRMAKSNKTDALDAKGLAILLHCGTLPESWIPHGELRDQRELLRTRMALRDLRTSLKHRIYAAVDRYGLQADAISDLFGTKGRTYLASILKALPTETAHMIAMQLHSIDQLEEKIEAIERRIAETLKASPEIRLLRSVPGLGSILAPLVWLEVGDVERFPRAGHLASYAGLVPRIIASGGHIRHGSTCRNVNHYLKWAFVEAANCAIRMKAHREDHIGLLYHRLYPNKGHGRAVVAVARHLAEASYWVLRKKQHYRAPQSRISA

SEQ ID NO: 215229 - protein, 350 aa, unidentified
MQYIAFDSHKRYTLVSVEDMKDGRVSEKRIEHVRGNIRTFLNCYEPGSPVAVETIGNWYWIIDEIEAAGMVPKLVHSRKAKLMMAMVNKTDRLDARGLNRLQRTGTLPTVWIPPSELRDQRELFRTRMVLSNQCTRLKNRIHATLSKYGLRVETASDAFGKRGRKELLEHFQALPFHTTFAVHQLFEQLEVVEEQIHRFELRMREVFGSTQELKLVTSSPGIGFILGVVILSEVGDIERFPGVEHFASYAGTVPRVHASGGKVRYGQLRPDVNRYLKWAFIEAANAICTNRNRHPYRHVSKLYERIRDRRGHQKAIGAVARHLSEATYWILKKKEPYREPYKRLVSSTGG

SEQ ID NO: 215230 - protein, 351 aa, unidentified
MKEFIAFDCHKRYTLMEREQIKTGQRKQMRIEHCPGAILQCLRGREPGTPVALEATGNWYWIAEEIEQAGLEPKLVHPRKAKLMMGMINKTDKLDVHGLNRLQRNGTLPTVWIPPRELRDQREITRARMVMTRHRTRLKNRILATLSKYGWAGTEASDPFGKKARKQLNEAVTQLPAETARVTEALLKQLDFIQDQIEDLEQRMRELVRDTAEMNQLRMLPGIGWILSAVIGLEIGVIGRFASAERYASYAGTTPRVHASGDKIRYGRLRPDVNHYLKWAYVEAAHSVCMHRRTYPERHVSRLYERICKKKGHPKAIGAVARHLAEASFHVLTRKEPYRDPGLKKGQSREV

SEQ ID NO: 215231 - protein, 343 aa, unidentified
MQTITTIGLDIAKSVFQVHGVDNDGKVVIRRQLKRRYVLAFFEKLQPCLVGIEACASSHHWSRELQALGHTVRLMPPAYVKPYVKRQKNDAADAEAICEAVTRTNMRFVPIKTPEQQSGLMLHRTRHLFIRQQTSVINAIRAHLAEFGVTAAVGRKGIEELLRVIADPSDKRVPDVVRTCLAALGSQLLSLKKQILDFDRMIMAWHRSNQTSKRLNCIPGVGPLLATALVASVADPKTFRSGRNFSAWIGLVPKQHSSGGRDRLGSISKQGDRYLRSLFVAGALAVIRHAKIHGTKYRPWVAALLARRPTKVAAIALANKLARMAWAMMARGERYNYPASLRV

SEQ ID NO: 215232 - protein, 350 aa, unidentified
MQTIYIGVDFHARQQTICYLTTDSGEILLHQLKHEDKAAVRSFYAQFSGQVIVGLEASGYSPWFERMLEELGCEVWLGHATEIRRRARGRHKNDRRDAELILDLMLHDEFPRLYRPPLQSREILRMLRYRQKLIKIRTIGKNSLQALALQAGLAKGPHLFTKAGLQELRHVTMSSAMQWQRKQWLQLLEPLNERLLETMLWLKQQSQADERISRLRTHPGVGLLTALCVVHSLEPVSRFANTRKVAAYAGLDPLERSSAERQRFLGISKGGSRVLRFLLVEAAHTAIRKDAELKRFYQRLAERHGRPKAKVAVSRKLLIRTYIMLRDEIDYAEFQRRAVAARSAPPAHGH

SEQ ID NO: 215233 - protein, 315 aa, unidentified
MTQIICGVDVSSASLEASIGTRGAASSFANNPDGIDALAAFCHHHHVTLVAMEATGGYERQAFALLTQAGLDVAILNPRAVRQFASGMGRLEKTDRIDAAIIAWFAEVKRSRPTLLASASQLHLRALVTRLRQLTALHTAQLNQQRLITNPHVQATFDELLGLLKRQIKDLAAQIAALIDQDPLWRELDMAFRSIRGVAARTVARLCAELPEIGTLPNKTVSKLAGLAPLANDSGKHQGKRSVRGGRAPVRDILFIVASVAGRYEPDFIAFRQRLSDAGKPPKVIRIALAHKLLVRLNAKARDVRTQTLITTQIP

SEQ ID NO: 215234 - protein, 414 aa, unidentified
MIGIVNKSCGLDIHKRFLIATILSKSGEKQQQRFDRNDEGILALKNWVVSEECDVVACESTSDFWVPIHDSLIKHLPVIIGNARDMKAFTHKKTDKIDSEVIARLALNNMIQPSRVFPKDQREFRSYIRLRLALVRKRTDIKNEAHAILTSEMFNLHDVLADIFGKNGVAILSGISSGKTVDQIIDSLSPNVRKKSSQIRETLDREISQSAAIRLQICLKLIKHFDDEIEVLEKEIFIYSYGKHKREMDILMSIPGIGEIGAATLISEIGNLRDFPSGDKLASWLGIVPNVYQSADKYYKGRITKRGSKVARWILTQIAQAAARKKNSRLKEFFNRKMKSIGYAKAIIALARKIVTIIWHLIINDEMYQDETGYQKGEVHKRKIVETEIFSVDERIKIISGIIAIMEKKEEEST

SEQ ID NO: 215235 - protein, 398 aa, unidentified
MLSIGIDVSKGKSTVCGMKPGGEIVYTPFEVQHTREGMSELVSLLRGSGEEVRVVLESTGSYHCPVVAALLENGIFVSVVNSLRMKRFCSQSIRRVKTDQIDAMQIALYGLAYWQELQPTRLPENTYRELQLLARQYYQMTSMLIKAKVDFNALCDQVLPGMQELMSDHAGRHKLSDFVLRYHHTAHILKMGETRFRKDYCKWAEKKGYRNHERMAVLIFATAQNGIPVLPNAPSTQIVITEAIRVLHTVEASRDAILTQMQALAKTLPEYSLVREMPCIGDTLAPRLIAEIGDVRRFHSKRALIAYAGIDAPPYQSGKFSANNRHISKRGNRYLRKTGYEVMQSYVMHKPANDPIFTFIEKKRSEGKSGKLAMVAGLNKFLRVYYGKVTELYRSLPQ

SEQ ID NO: 215236 - protein, 336 aa, unidentified
MYYVGWDLHRDWSQVAALDARGRLRRQVRLANDAETLLGFVKSLGGPVRVVVEATRNWEWLYELLEPVVEEVVLSHPKKTKAIASARIKTDKLDAKTLAHLLRTEMVPTCYIPSRETRLLRELLRYRASLVRVRTRIKNQVHALLAKQGKHSPYADAFGKAGRRFLRSQPFPPVRRRAVDDYLELIDAIDAKLERVSAEIDARAQADPQALLLCTVPGIGHYTALLILAEIADISRFPTPKQLCSYAGLVPSLHASGGRSQYGRITKEGSPWLRWALCEAAQRAGLQSGAIGQFHRGIARRRGRMIAKVATARHLLTIIHHMLTRGEAYRPPASVR

SEQ ID NO: 215237 - protein, 370 aa, unidentified
MKEIITSFVGLDVHKDSIAIAVAAAGRQPPRFIGTVVPSLPSLHRVLRGIGPAARTLIVYEAGPCGYGLARRLNTEGYSCEVVAPARIARSPIEQRIKTDRRDALLLARESRAGNLVAVVMPDERDEALRDLSRTREDVLAARLRAHQQMKALLLRHGRTCPGRIVWSAAHERTLAKIRFPHPAQQIAFVEYRNAIKDAHERLERITAALREQSSQWRMRPLVQALMCLRGFDFVGAATFVAEIGDPRRFAHPTALMAYLGLVPSEFSSGASRHQGSITKAGNKHARRILIEAAWAYCHSPRVSRDLEVRQQGQPKAVRDISWRAQLRLTKRFRHLRMGRKLPQNKVCVAVARELCGFIWDIARQVQPPT

SEQ ID NO: 215238 - protein, 392 aa, unidentified
MSQHFRFDASRSLTALEQDSTIVAVIEMSQTKWLVAALVPGVERQPLKKFDAQEEMLLKLLHRWRREAGQAGRNIERIVVAFEAGRDGFWLARWLRARDVEAYVIHPTSIAVSREHRRAKTDRLDTELLMRVFLGWLRGEKRHCSMVAIPTIEEEDARRPNRERQNLVTEQTRIINQIKAIFTRFGLRTLRPTMRKLAEGLEDLRTAEGTPLPQNTLSELRRHLARLRFVRDQIRAVEQERLRKLAVAPAAETKSPDAMVRLIARVFGAGIETADMLVNEIFSRHWRDRKAVARYAGLTGSPDESGSRRRERGLARAGNVRVRCGMIQLAWRFVRFQKNSALAQWFAARTADGRASTRKTMIVALARKLLIALWRLVTRGEVPQGIVLRPAS

SEQ ID NO: 215239 - protein, 454 aa, unidentified
MQKQDSYDYYVGIDCAQNKHDFAMKNNQDKFLIKKGHFSNTLQGYEKFLNTVLSKCLNKDKILFGMEVTGIYGTNLYKRLKSDGYHVVMISPDSVKNYRDYKRLNKTDKIDSACIAELLLNGDAQIVHVEKNGYTDLKAYIRRRNALKVTYTQETNRFLAKVCLYFPDLLKVFPSGRATLKAIFSIYPTPYSIIEADFDELVSVLQKASKNKFGVDKANELIHAARNSIVVRKSISDGELYNIHSLIDSIDSLESEIRNLEKIIDSKTEEFPAYHVLLTLTGCGKITAATIVAEIGDISRFHKSSQIVSLAGLYGDNSKSGSSVNKRGKISKKGSRYLRHAIYMVAEFARRNNPIFKAYFTRKKNGDRTKHTLAVNAVANKLCKVIYSLMKNQSTYIIQYRDLAKLSESTQNEFFQNAETDFSAKTRRKKYLYEDEYGELHEFVFKSLKTALIE

SEQ ID NO: 215240 - protein, 338 aa, unidentified
MYYTGIDLHKFTSYLTTVDSSGSIVKQADIKNVEHNFVQYFSDLGNENLTTVESTMTWYWLNDLLSSLHIPMILAHAKYVKAIAYAKVKTDKVDSHTLAQLLRMDYIPAAHKISNDKRLLRDALRARLKIVQRHTSVTNSMQLLLAKYNFDSPTQLSGIPNFQYEQLSEVEVLLSEQMLDLEKQLYPYLIPNDDIQRLLWIPGIGKMNAFTILLEVDDINRFPDVKNFFSYCRLIPSARNSGGKSKQRSSKDGNKYLKVAFSDAAIHAVQYYPVIRKYHSSLLRKKNKQIAKTIIAKEIAEIVYYVLKNKSNFNNKFKGQELEHKKSLQWPRVVSPDA

SEQ ID NO: 215241 - protein, 387 aa, unidentified
MARKRTLSTLDTSIAYEAVGLDLAKEDVALAAFDSEHKEPYLIDRIPYDKLYELLADMAPTLVAMEPCSGAHQIAEQIQELGHEVMMISGRHVQAWVKDHCNGQKTDLNDAFAILNLAYDRWLTPIRGKTREKCRLLALQASYRQLKGQRTKTMVHVKATLHAWGFPIRAGSFNQKVLHELIDTNREAFGDEVVETLHLMINRVRDLDHDIATVLKLLTEATKRDPRASLLRSIPGFGILTMSRWCAVIGDIARFDSPKQTMAFVGLVPNNRITGHHTETSSGREARGQGRMSKRGDKMLRSLCILGAASLCLMVRNDRLPDCPFVASIKERLASPRPWFKVLVYVAAKLVRIATALLKYGETFSYEKAGISKAVLKQWELEQAKAA

SEQ ID NO: 215242 - protein, 351 aa, unidentified
MTTMTPERPLVTGGVDTHRDFHVAAALDHLGSVLGTAQFPTTPAGYRALLGWLSGFGPVVTVGVEGTGSYGAALAQHLSSLGVSVIEVGRPNRQVRRRHGKTDVVDAIAAARAVQSGDATAIPKSHDGPVEALRALKMVQRSARKARTQALNQLHALVLTAPEELRGKLRGLKNRDLIATCAAFRVRADDDSLTAMIRLSLRELAQRIQVLEDQKTTVTTRMRRITTSLAPELVAKTGIGPDTATTLLITAGDNPERLGHEKSFAALVGAAPIPVNSGQTQGRVRLNRGGDRDANSALWRIAIVRMATDQDTRDYIARRQSEGKTKSEAIRCLKRYSAREVYNALPFQAIA

SEQ ID NO: 215243 - protein, 355 aa, unidentified
MTSTKYIGLDVHKESISIAVLNSAGKVVMECVIETKASTILQFIHGLGGDVHLTFEEGTWAGWLYDLLKPHVTELVVCNPRKNALLKQGSKSDRIDAHKLAELLYMSKLSSVYHGEHGLRMLKELSRSYLTISKDLGRVMNRLKALYRGWAIPCAGTQVYAPHYRSEWLAKIHEAGVRRRAELYYQQLDALRLVRQQARKELLAEARKHRATKLLRQIPGIGPLRAAHLVALMQTPHRFRTKRQLWNYSGLGLETHDSAQYRVVEGQLQRSTKPVTLRGLNDNHNHDLKDIFKGAAMRASTAAGPLRDFYEALLAKGRKPTMARLTLARKIAAITLIVWKKEVRFDANYLKQQAA

SEQ ID NO: 215244 - protein, 325 aa, unidentified
MTTAGTACWVGIDVAKAQLDVCVLPAVDRWRSANTPPEIDALVTRLGALAPTLVVLEATGGYEAPVAAALAAAGLAVAVVNPRQVRDFAKATGLRAKTDRLDAAVLARFAERVQPAPRPLPDATSTTLAALVTRRRQLLAMHTAETNRLHLESRRTTPAVRRSLEQSVAWLAAQLAEVEHDLDDTVQQSPLWRAQEELLRSVPGIGPVSARTLLAELPELGRLDRRQIAALVGVAPMAHDSGQYRGRRLIVGGRGPVRHTLYMATLAATRCNPPIRQFYQRLRARGKPGKVALVACMRKLLVMLNAMMHANRRWQPPLPALTLDA

SEQ ID NO: 215245 - protein, 412 aa, unidentified
MTVVFVGDDWAEDHHDVHVMDGDGRRLASRRLPEGLDGIRGFHELVADHIADPAEVIVGIETDRGLWVTALVSAGYQVYAINPLSASRYRDRHHLGGAKSDAADAKMLADLVRTDRHNHRLVAGDSAEVDAIRIVARGHQNLIWTRTRQTNALRDALLQYYPAAVATFDDLADRDSVAVLAKAPTPVEGTRLTIGQIQAALKRGGRQRNLQRRAAEIHTGLRRVELTAAEPVAAAFGATTIAAIAIIAELNRQIDQLENTLTERFSQHPDADIYLSLPGFGVVLGARALGEFGDDPNRYANAKSRRNYAGTSPLTIASGKKKAVVARHITNKRLLDALSRAAFSSISRDAGCRAFYDQRRAAGDTHYKALRALSNRLTGILHGCLTHRALYDEHLAWGHRSTQPDQQNEQAA

SEQ ID NO: 215246 - protein, 353 aa, unidentified
MAEDPSSVIAVIGIDIGKNAFHVVGLEGRGAIVLRQKWSRGQVEARFANMPPCLIGMEACVGAHHLSRQLRALGHDARLMPAKYVRPYSKGQKNDFRDAEAIAEAVQRPTMKFVATKSADQLDLQALHRGRERLVRQRTGISNQIRAFLLERGVAVRQGLRVLRAELPGILARRCDVLSPRMVRLIEDLAGDWRRLDERIESLSGEINALARQDAGCERLMSVPGIGPIISSAMVAAVGAGDAFEKGRDFAAWLGLVPKQISTGDRTILGKISKRGNRYLRALFVQAAWVVLIKPKSWERYGLKPWIEAAKRRLHHNVLAIALANKLARIAWSVLARGRGFEARLIASVTQPV

SEQ ID NO: 215247 - protein, 407 aa, unidentified
MIFVGVDWAEAHHDVFVQDEDGKRLAGGRLPEGVEGIARFHEMVGHHAEDPDEVVIGIETDRGLFVGALVAAGYQVFAVNPMSTSRYRDRHSTSGAKSDPGDAKVLADMVRTDRHNHRPVAGDSELAEAIKVLARAHQTMIWSRTRQSNFLRSTLREFYPAALMAFDDLTSGDALEVLKVAPTPTLGAGLSRSKIAAALRRGGRQRRVEQRAEEIQQALRAPQLQGPALVATAMGSSVSAAVAVIAIMNAQVVELAQELDTHFEQHPEAEVVRSLPGLGTILSARVLGEFGDEPNRYATAKCRKNYAGTSPITRASGTKRVVLARYARNMRLADAVYQWAFTSMNASPGARAFYDYRRAAGDTHHAALRHLGNRLVGILHGCLVSHSTYDENTAWGHRAELELTRAA

SEQ ID NO: 215248 - protein, 314 aa, unidentified
MENILGCCAGLDVHKESVEACVRRVEPNGRVHGETRHWGTMTQDLMALADWLAAVGVTDVAMESTGVFWKPIFNILESRFTVLLVNARHLKQVPGRKSDIRDCQWIAQLLQCGLLKGSFIPPRPQRELRDLTRHRTQLVEEKTRTINRIQKVLEDANIKLASVATDVMGVSGRAMIQRLIEGETDPHKLADLAQKQLRGKIPELERALEGKLTNHHRFLLKMLWKQLTQQEELIGDLDVKIEEHTRPFAREIERLDVIPGVDHRVAEVLLAEVGADMKPFPSDQHLSSWAGCVPAMKKAPESGYAGASRRATVG

SEQ ID NO: 215249 - protein, 356 aa, unidentified
MLKVKANFENQTVYVGLDVHKRSWNAAVYLSDQFVRNIHQPPSPEALHHYLCQTYPGADYVCAYESGKFGYWIQRRFQQQGIRCLVVNPADIPSSHKDEVYKTDARDARGIGHGLVCNQLKGIYVPSEDQEADRHLVRQRKKIWRDLVRCKNRIKGFLDYTGVSIPEQYDNSNWSKNFINWLMALEFEHSSNRVSLNYQVRELELLRKELLSISNDIRKLMRSKKYNKLYYLLRSVTGIGPLTAAGLLTEIGDMKRFATFYHLNSFIGLMPMEHSSGEKELKGRITVRKHRQLRSDLVECAWTAKRTDPALALYYSEQIKRGKNGKAAIVKVARKLLSRIRYVWLSGEPYVTAVVK

SEQ ID NO: 215250 - protein, 418 aa, unidentified
MIDDVQWFVGIDWATQSHRVCLIDVEGRHVSERDFAHDGAGLTELRDWLLEKTTAAPGQIAVAIETPHGPVVEMFLDHAFQVFAINPKQLDRFRDRFTVAGAKDDSRDARVLGSALRTDRQAFRRLVVDDPVIIELREWSRMAEELQQERTRLANRVRQQLWRYYPQAIELTDDVADDWFLALWQQVPTPATAATVTEKTIARILKDHRIRRLDAATVLQTLRKTPLFVAPGTTEAACAHIRNLAARLHLVNQQIKEAHRALDGFCAKLEAPTENPSGQSREQRDMTILRSWPGIGRIVLATLLTEATEPLRARDYHALRALAGTAPVTRRSGKQCFVIRRLACNKRLQNAVHHWSRVAIQHDTAARRRYDALRRRGHGHARALRSVGDRLLYALCTTLKRQTPYNPNCQTAQVTASL

SEQ ID NO: 215251 - protein, 344 aa, unidentified
MKKVLIGIDFSKEKFDVAIIVKSTSTQEHSLFDNKVSGYRKMIKWINSVVEDIPCSSWLFCGETTGGYSRMMSDWLYAQGYDVWIENALVIKRTFPLKRLKNDTVDAFMIAEYALRFEDRAQLYEPLSQALTELREIFLYRHHLVRHRCSFEVRRIEKRFTQQKSANKNVISQSARHIITEINKEIAKCDEKIKEYIESDDQLSSIFAIVTSMPGIGTINAVSLMVYTNNFTKFAYNPRKIACYYGIAPFGRDSGTSVHTDPRVGFIANKMLKSLLTQAALASVRTCPQIAKYYQRLIERGKKPMVALNNVKNKMIAIITAMVRTGCMYQPDNICLATQSVIVK

SEQ ID NO: 215252 - protein, 344 aa, unidentified
MKITTIGLDLAKSIFQVHGVDATGQVVVRKSLRRSQMLPFFAKLPPCLVGIEACGTSHHWARELLKLGHEVRLMPPAYVKPYVKRGKTDAADAEAVCEAVTRPTMRFVPVKSPEQQAALSMHRTRDLLVKQRTQLINMIRGLLAEFGIDIPKGLERALLMARQIVDGKPPEVPFEAAKIVSTLSQQVLDTHVRLREIDRDLAIWLRSNDVARRLMTIPGIGPIGASALAASVTDPHQFRSGRQFAAWLGLTPLQKSSGGKERLGRISKMGDKYLRKLLIVGMTSLVRRAKYNPGKIDPRLAALLARKPTRVATVAMANKTARVIWAIMARGETYRAGHRPTLAA

SEQ ID NO: 215253 - protein, 406 aa, unidentified
MFAGIDWASQEHAVRVHDGAGRKLASFTITHSAVGFEELVGRLARFGEPAELPVAIERPDGRLVDRLLEAGHPVVPVSSNAIKAWREAEVTSGAKSDLGDAETICEYLRLRVHRLRPLQPYSQHTRALRAAVRARTDLVTQRVAANNQLEATLDAFWPGAKAVFADVTSKIALAFLERYPTPTSAALGEKRLAAFCAKHGYSGRRSPQELLERLRAAPPGIADGAESTARKEIVLAFVRVLRALNQAIADLDRAVTARLKEHPDAAIFTSLPRSGQINAAQILAEWGDCRDAYDTAESVAALAGVSPVTKQSGKYRSVGFRWACNKRFRNAIVTFADNSRHASPWATGVYRSAIERGHDHPHAIRILARAWIRVIYRCWLDRVPYEPIKHGAATHYGAGSEQESAA

SEQ ID NO: 215254 - protein, 476 aa, unidentified
MAALQKADEKLNRQQRKDLVRRLWSSNPGLDVVHRNAAGIDVGNEEHYVAIAPTQDEVPVQRFNCFTAELIRMAVWLKGRGVQTVAMQSTGVYWIPLYDILEEHGIEVYLVNARDTKNLPGRKTDVQESQWLLKLHTYGLLRNSFRPASEIRVLRAYWRQRDQHVKTAGQCVQRIQKALTQMNLQLANVISDLSGKTGLQILRAVVNGERDPAKLADFRDPRIKASREDIIASLRGNWRTELLFQVKQELARYDFCQTQIAECDRELEQQLQSLPELRAGEEKSGTKETPRPPKKRKRRKDGNIPRFDLHHELQRISGVDLTRIDGIDVMTGQTVISEVGLDMSRWPSENHFASWLGLCPSNELSGGRILKKRTRKVVNRAATAFRMAASTLRTSQSYLGAKFRRLRSRLGPPKAITAMARTLAILFYRMLKFGQNYLDRGTEFYEQRQRDQQLQYLQKKAAQLGFQVVALPETPK

SEQ ID NO: 215255 - protein, 385 aa, unidentified
MTHSSMLYVGMDVHKDSIAVAYVAQDHQAEVVSLGNIGTRPCDIDHLIRRLQSKSPHLVFVYEAGPCGSWLYRDLTQKGHVCWVVAPSLIPKKPGDRVKTNRRDAIKLARLMRSGDLTPVYVPKVEDEAIRDLCRAREDAIRDLKTAKFRLKAFLLRQDIRYTGRATWGPAHLRWLSEVGCPTPAQPIVFQEYVRAVTEHTARLQRLEQELHEHVHTWRLQPVVEALQGLRGVQFTVAVTLVAELGDLTRFDNPRQLMSDLGLIPSEYSSGDRRRQGGITKAGNTHARRVLIEGAWAYRDPAKVSRHLQWRLETLPKPLQEISWKAQVRRCKRYRRLIGRGNNPNQVVGAIARELSAFRWAIAREVPLTPSTETVESPASVGPRF

SEQ ID NO: 215256 - protein, 369 aa, unidentified
MNEHTTHVAMDDSKRTIVLGILRPQATEPELRSIPNEPRHVRRCFERLQREGQVVACYEAGPAGYDLYRQLTALAVPCQVIAPALTPRKPGDRIKTDRRDAAKLVRLFRAGELTPIRVPDEAGEAVRDLVRCREDVQEDLRRWRHRLVKFLARHGRVYRAGRHWTQRHWTWLRGQHFALPALDRTYQEYRWTVEQLLTRRADLDQAIAAVAETEPYRQSVGWLRCFRGIDTLGAMILLVEIGDFQRFQTPRELMAYLGLVPSEASSGERERRGSITKAGNTHARRILVEAGWAYRHPPRLAGSLAQRSQGQPPAIRAQAWRAQQRLHRRYRHLVGHGKRAPVAVVACARELIGFLWAALTQAVPVAQAA

SEQ ID NO: 215257 - protein, 445 aa, unidentified
MKILALDLGKFNSVACFFNAKNRKAKFVTTPTTREHLTAIFTNNKANLVVMEACGPSGWINDLAQEHGLKTLVCSTNEEAWRWANVKRKTDRDDALKLARMAAMGELKGVHTPTPQHREFRSLVKYRKTLDNRINKTKNTIRAWFVNHGIEIASGEKAWHTGREKINSFCKPLADCDADELWKGELDIELTILDSLTEQLAGVVKRLEAIGKTDERLRRVQTIPGVGPRTAEILVACIDDAHRFENGRQVSAYFGLVPRQYQSGETDRNGRITKRGNPLARTILVECAWASLRYNPWAKGVYERICGKQKTRKKKAAIALARKLAVIAWAMLRDERDWDPNKMIDVTKSYGGKLPMDEEALRTMPKKECRHKRKRRLAKERQAAEQAKLHPSAPERPRSADKKSCRGKKAEPSGAKKPITPRSKTTKNPPPSSTRRRARKPVSRT

SEQ ID NO: 215258 - protein, 350 aa, unidentified
MKRLEAEMKHIGLDTHSTRTVATVVNDRGKKILRREIPTRELELIDFMQSIPGPKRVALEESQVADFVARMIMPYATEVIRCQPQHNRLISESEDKCDNQDSYSIAELLYLNKLKSVHHPPWEYRQLREAVRAYWTSSRDLARAKSRLKACFLFNGIHCAGEKVYSQRYRKKYRERFHGRSGNLNLLDLHYEALDSCRHTKAGHVRVLRNLAKPLHEELERLQSIPGIGPIGAYTLLAYLENGWRIPNKRKLWQYCGIGVRRHESNGKGYKGASRKGNRYLKNTLMTAAAAVAARRTGDNALAQRWHAGLAGGVAADRLRRNLARKIAVLAQYVLRFKEEYNDERVVTTP

SEQ ID NO: 215259 - protein, 406 aa, unidentified
MAVMIGVDPHKASHTAVAIDQAEQVLGELRVRSSADQAEKLLTWAAKWPGRTWAVEGAGGLGYLLAQQLVSAGEAVLDVQPKLGSRVRLLATGNTNKNDPNDARSVAIAALRSKDLRPVAAEDHAAVLKLWSKRRRDLGSLRTQVVCRLHSVLCDLVPGGHPKREITAAQAARALAGLGPMGAVQVARYQLALDFLADLRRADAQMKEAKKRLEVAVKASGTTLTELFGVGPYVAGVVIGYVGDVSRFADRDHFASYNGTAPIEVSSGGHKVFRLSRRGNRKLNHALHMAAVSQVSHRHSEGRAYYERKLKEGKTPKEALRCLKRRISDAVFAHLVADAKRKAEAVKAGPGGQRGNGSASSVAGSNPERRPFGQATPGPVPTIRPAATSKVTQAQEPFEKKSRKAS

SEQ ID NO: 215260 - protein, 459 aa, unidentified
MNRKKSKPKIDRKMPMVHPNAAAIDVGATMHMAAVRPDRTPEPVRSFGTFTTDLHRLVEWFKECGVETVVMESTSVYWIPIFELLDAHGFTVLLVNARDAKHVPGRKTDVSDAQWLQRLHSYGLLRASFRPKGQISELRAYMRQRERLLEYAASHIQHMQKALIEMNLQLHHVVADITGATGLRIIRTILAGERDPKVLALLRDYRCHSSAETIEKALTGSYRAEHLFALEQALALYDAYHEKASACDARIEAVLKELSIGRGRCSGTELPSPRRSRTDQGNALAFDVRAALFALLGKDITKIDGLGPYISLKLIAECGDDLSAWPSPKHFTSWLCLAPSNKISGGKVLSSRTRRSGSRAAALLRLAAVTVGRTDTALGAFYRRLSARIGKAKAVTATARKIAVLFYNAVRYGMEYVDPGASFYETRYRTRVVDNLHRRAKAFGFVLMPLEAPPSVVVS

SEQ ID NO: 215261 - protein, 342 aa, unidentified
MKDTMIGVDLAKSVFQLHVASMTGELKLRKKLSRQSFSKFMAEQPPVLVVMEACGSAHFWAREMIKFGHDVKLIAPHYVKPFVKRQKNDAADAEAIVIAAQRPEMRFVEPKSEDQQSRAILFRARARLVRQRTELVNALRACLYEYGYVVPQGLQHLNRVPEILDGSHNDLPSLMIEECRDLLEQISEKTRRIEGRNEKIKALAAAVDTTRRLQTIPGVGPLTALAVEAFAPPMETFRCGRDFGAWLGLVPRQSSSGGKERLGRMSKAGQSDIRRLLIIGAMSRLSWLGRKSIVDGSWLARIATRKPRMLVAIALANKMARTIWALLTKNEDYRDPILVVSA

SEQ ID NO: 215262 - protein, 321 aa, unidentified
MEEEKVYVGIDVAKASLDMAVHQCEQRWRFTNDDEGISQAVSCVKERCPILIVLEATGGIELPLTAALAAAGLPVAVVNPRQIRDFARATGKLAKTDAIDAQVIAHFAAAVKITPRPLPDAEAREFSALLTRRRQVMGMITAERNRLRPTCSKVVRDLIKDHIASLEREVDKLDDSLRDSVRGSSVWREKDDLLQSVPGVGPVLSATLLAALPELGTLNRKQVAALVGVAPLNRDSGNFRGKRTVWGGRAKVRSPLYMATLAATKHNAIIRAFYQRLRAAGKESKVALTACMRKLLTILNAILKHRTPWRYAHSNTIGPCS

SEQ ID NO: 215263 - protein, 375 aa, unidentified
MKEKVRFLGLDVHAETITVAVAEPDGEVRSLGTIANRAESIRKLIRKLGPATQLRACYEAGPTGYVLYWQLAELGVECAVVAPTLVPVKVGDRVKTDRRDAIKLARCHRAGDLTAVWVPDQGSEALRDLVRARESAKQDQLRARHRLSKFLLRTGQRPALGIKAWTQRYMAWARQLVFAQPAQAATLLDYLHEVEHMGQRIGRLEQAITEAIKLASPQMQAVVRDLQALRGIAEISAVTIASELGQISRFQSARQLMGYSGTVPGEDSSGKRMRRGPITKTGNAHLRRIAVEAAWSYRLRPGVGPALRLRQQGVGQEIKEIAWKAQIRLSKRYARLAAAGKDKRKIVTAVGRELLGFIWAIGIKAEAAGKQQMAA

SEQ ID NO: 215264 - protein, 400 aa, unidentified
MRCTDHPAHLRTAVREQDSSLFVALELSKSAWLIAASAPGSEKVSKYRVAAADVAALVALLARLKAQAERYRGGPVQVVSIYEAGLDGFWVHRMLEANGVESHVVDAASIAVNRRSRRAKTDRIDVEGLLRTLMGWARGERRICSMVRPPSPADEDERRLTRERGTLVTERTRHVNRIKGLLATQGVFGFEPLHKNRRQRLEELQQWNGQPLPTRLKTELVRELDRLELVMSQLAALEAERDRALQARRTAVGNTTKAASSGTASAGEVGSQLLRLRSIGPEIASVLSLEAFYRNFSNRREVAAYSGLAPSPWKSGGIDVEQGISKAGNARLRTTMIQLAWLWVRHQPGSALSRWFHERVGDKRGKIKRIAIVAVARKLLVALWRYVTQGVVPEGAELKA

SEQ ID NO: 215265 - protein, 342 aa, unidentified
MSTLVIVGLDLAKDVFQVHGADASGKVLFRKKLRRGQVLEFFNELPACVIAMEACGGAHFWGREIGKLGHEVRLIPPSYVKPFVKRQKNDAADAEAICEAAVRPTMRFVSVKSEETQGAAMVFRVRELLIRQRTQTINALRGHLNEFGQIVPQGVANASKLVALVECSECELPMEAIATFQALIATLGHFETEIAKLDAEITRRAKEDDLARRLMTVPGIGPLIATAIATLAPPPENFRRARDFAAWLGLVPRQHSTGGKQRLGATTKMGERTLRRLLIIGANSVIIKRHIHQEAQPGTWLGNLLLRKPPMLVRVALANKMARIVWALMARGGVYQSPVAAA

SEQ ID NO: 215266 - protein, 331 aa, unidentified
MEQRDFVGIDVGAKEVVVAIRRGGDVLPLSRFENNSRGHRELCRLLTKGKRRARVCLESTGIYSLDIALALHRTEGIEVMVANPGAVKDFGGALLKRTKTDPQDALVILEFVERMPFVTWQPPSEAALELRAIARRIAVLTQQASAEKNRLHAAEATDELGEVVRHDIELNLRHLRRRLRELLRKAVDLVRQDVDLSRKFARLVSVKGLARASAVAILGELAVLPPEMSARQWVAHAGLDPRHFESGTSVTKRSRISKIGNGRLRTVLYMPALVATRHEPNVKAFHAKLVARGKKPIQATVAVMRKLLHSIHGMFERDADFDGRKFYTAAA

SEQ ID NO: 215267 - protein, 376 aa, unidentified
MEKDITLYVGLDVHKDSITVAYALGTGEVELLGKIGTTKTDIDRLCTRLQSKARHIRIVYEAGPCGYGLYRQLVQKGFDCLVCAPSLIPKKPGDRVKTDRRDAIKLVRSLRAGDLSAVYVPSVEDEAFRDLARAWVSAKDDLKRARQRLKAFLLLHGVRYAGRADWGPAHRRWLSAYAFDSVWQQLAFEEYRRTIEDRLAQCDRLEAALREAVVNWRFYPAVLGLQTMRGVQFTTAVGMLAELGDLSRFAHPRQLMAWLGVTPSEHSSGDKRRQGSITKNGNSYARKLLVEAAWSYQHPARVSPEIQRRHEGIPKPIVDRAWDAQMRLCRRYRKLLARGKQKNIAVVAVARELAGFIWDISQLAMSLSVRPEVRMA

SEQ ID NO: 215268 - protein, 345 aa, unidentified
MDLGGAHMKVYAGIDLHSSNNYVGIINDQDQRVYQKRLPNQVEHILEALEPFKESMEGVVVESTYNWYWLVDGLQAHGYKLHLANPSAIKQYEGLKHTDDKWDSFWLAHMLRLNILPEGYIYPKEERPVRDILRRRLLFVKHRTAHILSLQSMINRNRGTGMSVRAIKRLDEGDAEILFDQPHLVLAAKSNIAVIHFLKERIKTIEKAVKTHIKLRDEFKCLLTIPGIGDILALTIMLEVGDINRFPTVGDYSSYCRCVKSEKLSNGKKKDENNRKNGNRYLSWAYVEAANFAIRFCPYSQAFYQRKMAKTNRIVAIKALSNKLARASYYIMRDQVPYDPEKLFR

SEQ ID NO: 215269 - protein, 346 aa, unidentified
MCSLPVFVGMDYHDSFVRVVVQDTDGSEMGNADRTNHWKAIADFGDRFGRPVRAAIESCCGAADLAEELVSCAGWSVALAHPGYVQRMKQNPDKTDCQDAQLLADLERVGYLPRVWLAPRYIRELRHVVRYRLQLTEQRRATKLRLRALLREQRCHAPEGLNAWTKAWQHWVRQTAELSEQGRWLAEQHLDELARLAIRIHEVEKRLEHLTANDVEVQRLQQQPGIGPVTAWTMRAEIGHFDRFRTGKQLARFCGLSPRNASSGQRQADAGLIRAANPALRTVLIEAAHRLVQYDPSWQKFAQRLRARGKPGSVVAAAVGNRWMRRLYHEMKTPSGELAVAVGPAR

SEQ ID NO: 215270 - protein, 323 aa, unidentified
MQGKEPSQQSAKARVYIGIDVCKARLDVYIYPLDKRLVVANDAAGLKQLKKAVAKFDVALVIMEATGKFHRLAHRNLHDSGFKVAIVNPLRSRKFAEAIGTLAKTDRVDARMLAMMGESLTPDAIAPPPELIEDLQELARGRESFVDDRTAVLNQIGASKSAVLIAELKRQLRALDTAIDNLEAEIERRIEDDPVLARRFEILTSIPGIGRVAATALIAGINEIGQLSAKEVTMLVGLAPIACDSGQHAGKREIRGGRKHVRTALYMPANSAAQHNPDIKTFYDRLINRGKLPKVAITGAMRKLLILANTLVRENRLWEPRHA

SEQ ID NO: 215271 - protein, 393 aa, unidentified
MYLVGIDIGKLKHSFCLLEKETGEILVEPVFFENNRDGFNVLLSSFKHLPQKDILIGMEDTGHYNLALLKFLLDRNYQVALINPVATNLTRKMQGGISKNDKLDTLTICDVLSSSQRVKSYRISKYSSFDLYEQKLLTREHHNLKEEENQLTNRLQKCIDVVFPEFNSLFKSKYGIVYMNILKEFGSADAIAHADIRTIRKCFDTGRGKHISLTAEELKEAARNSIGFPSSSEATQIKHLVARIELIKEQIAEIDKKIEEFSIQNNSPILSIPGISHFSGTSILAELGDIHNYSKPSQIIKFAGVAPLTYESSQFTAQHTAITKKGCKYLRKTLYQIITPVIQYNPVFKKFYLLKIAQGKGHRCAQGHCVRKLMRVIYHLLSTGTQFDPALLR

SEQ ID NO: 215272 - protein, 318 aa, unidentified
MSAAENSKVSVGIDVSKNKLDIAVHESGAVWSSNNDSRDCPALAIKLKQLQATSIVLEATGGCETLVTAILAAAGLPVIVVNPRQVRDFAKATGQLAKTDRLDCCVLAHFAAAINPPVRPVKTEETQHLEALLGRRRQIVEMLTAEKNRLASNRDRAVSKDLQAHIAWLERRLKSSDDELQRVLKNSPAWRERDQLLRSVPGVGPVLALTLLAQLPELGQLNRREIAKLVGVAPFNWDSGLWRGSRHIWGGRAEVRSTLFMATLSAIRFNPTIKPFYKRLIRAGKAPKVAIVACMRKLLTILNVMLKTQTSWRTVHSS

SEQ ID NO: 215273 - protein, 419 aa, unidentified
MLTARWFVGIDWATKAHEVCVLDPEGQVCDRRSVAHSATALQAFVDALLERAHGDASKVAIGIEVPRGALVDVCVERGFGVYAINPKQLDRFRDRFTAAGAKDDRRDAHVIGDSLRTDPQAFRRVRLDHPLVIQLREWSRVDEDLAGDLTRMTNQLRDLVYRIAPGLLTLCPAADERWLWTLLRDAPTPADQRRLSLRRLERLLRDHRVRRLEAAQVREVLQQPSVYTAPGVVDAVAAHIQLLLPRVDLLAGQRRDAEKQLERLLDALDAQEPAAGDQREHSDVAIVRSMPGIGTRVAARMLAEASQPLVERAYHVLRATMGVAPITKQSGRRRTVSMRYACNARLREAGYHWARTGAQKDPASRAYYAQLRARGHSHGRALRSVADRLLRVLMTLLNHGQLFDLTHGQHAPAAIGAGA

SEQ ID NO: 215274 - protein, 387 aa, unidentified
MPQPNNLSRSLVALDQNSTIIAVVEMSQSSWLVGGMLPGIERQPQKKLEPSAERLLGLLHRWRDEAVRAGKKITRIALAFEAGRDGFWLARWLNARGVEAHVIHPSSVAVSREHRRAKTDRLDTALLKRGFLGWLRGERGHCSMARVPTIAEEDAKRPNRERECLVGERTRIVNRMKATLARLGVRNFKPTLRKAAERLATVHTPEGTPLPRNVLAELQRDMARLGFVVSQIREIEQARQKRLEQEAETGPHAMVRQVARVIGIGIETADMLVHEVLSRPMRDRKAVARYAGLTGSPDESGARRREQGLARAGNARVRRGMIQLAWRFLRFQKQSALAQWYRARTADRRLGTRKTMIVALARKLLIGLWRFVTTGETLDGVILRPAG

SEQ ID NO: 215275 - protein, 346 aa, unidentified
MTETMVGVIGVDTHRDTHTAAALTGTGGVLAERRESADSGGFRRLYDFGVEYLPDARRWAIEGTGSYGAGLTRFLVEQGEEVVEVERPKRPARRSHAKSDELDAIRAARQALADDGLSNPKQGSAREALRVLLATRKGALSARVEAINLLKGLIVTAPEEIRDQLRGLSTRRQVAVCAKFRARPSGDVAMNATVQAMRSAASRIVDLDSEARCLESTIAKIVDDTGTNLTALPGIGPISAARVIVAWSHPGRFRSEAAFAALAGVSPIEASSGQTTRHRLNRGGDRLLNAAIHTIVLVRLRADPETKAYAARRTLQGKSSREIRRCLKRYVARQLHRHLTAHPPAT

SEQ ID NO: 215276 - protein, 430 aa, unidentified
MKNRTNQRLEEITAGTLIVGVDVAKEEQWARIVDYRGVEIGKAVKFKNNRQGFETIVAKIHEICKLKTLKYSVEKVLIGMEPTGHYWKAMANYLMKTEFRVVCVNPYHTKKAKELDDNSPTKSDKKDALTIARLVKDGRYFNPYLPKEEYGELRGLSNARVNTMKRSNAVKNTITAILDEYFPEIWTVFKNPLKGKASRQILKSCPFPVFIIALGEDGVLEEIKKAVKKTVGIKKVRQLMRAAEVSIGVDYGQNAAKIRLCCLIDELELIEKHLEKIEQAMEREIHSTGYSTQLLGIKGIGIVTAASFLGEVGDPLRFQNARQIANYAGYNLVEDSSGKSKSGTCISKRGRKQLRSLLYQMAFTMVGQNAEMKELYRHLTTRKNNPLKKKQALVVVSKKIITVIYSLLKKQETYKPELVLGVVRKEQLAA

SEQ ID NO: 215277 - protein, 323 aa, unidentified
MQGKVSFQEDAMPVVYAGVDVSKEWLDVHLHPLGESRRFSNDKTGIRQLKRLLARHQPKSIVMEATGKFHRPAHRSLWLDGFAVAVVDPLRARMFARACGYLAKTDRLDARFLALLAESLRPPADTPPSPHIEALQELVNARSAAKCDITALQNRSKTATTALLRGELNRLLRRLEQHVERLDKEIERCVGEDPQLCRKAEILTSIPGIGRVTALALMAGMDELGSCSGKQAAMLAGLAPIANDSGARTGRRSIRAGRPAPRRALYMAALSARRYNPALARFADTLKAAGKPAKVILVAIMRKLLVLANCLLAHDRIWTPNPP

SEQ ID NO: 215278 - protein, 406 aa, unidentified
MNTGTITAVGIDVSKHKSTVTARRPGGEVVLLPFDVEHTAEGLKKLVAKLRQLDGEIRIVMEHTGMYWRPIAMTLKETGFYVSVVNAILIHNFSDNSIRKVKTDRADAMKIANYGLTFWSDLQEYAGEDENRQLLKIQSRLYERTATTAGMLRNGLISLLDQTFPGANKLFRDDSRNSKGHVKWIDFVLRFWHKECVAALSLATFTDTFQKWCKRTGYKFSASDAERIHAIARNAVATLPKNDSTKLLITQATNSLNAIYDSLQAIRTEMDRLASMLPEYELVMGMEGIGKVTGPQLMAEVGDVRRFSHKGALVAYAGVDASPYQSGSFDSKSRHVSKRGSPHLRRVLFVIMSMTLIRANTANPVFCFMDKKRAEGKHFYVYTVAGSAKFLGSVKYFSQNGLQALA

SEQ ID NO: 215279 - protein, 424 aa, unidentified
MKVTYQTCCGVDVHKSFLVATIVKTTGGVEPSYQKKRFSTFNNSILEFKHWLLDNDCLDVCMESTGKYWVPVFNLLEDEINVVIANPKWVKAVKGNKDDTKDSKWIGDLFRLGLVRGSYVPCKKIRILREYTRYRYKLVSYRSSEKNRYQNALTVCNVALDSVVSDIFGKSSTSIIDYLLEQSGTSINHEEIASKLLRSLKSKEDAVIESVEGYQMTDAQKYRMRLVRAHMDYITAEINDVDKQIESLISSDPDYEKAIQLLTTIPGVKHDSAITIISEIGIDMSQFCNSKRLCCWAGLTPGSNESAGKKKSVKITRAGVYLKPALVQCAHAAVKSDKSPYYKKKYESLVKRRGKKRAIIAIARMILTAIYQMLSTGEIWNPSDLYKIDMPANLLERQKAKAIKQAKKLLQREGIIPPDVPVAS

SEQ ID NO: 215280 - protein, 347 aa, unidentified
MRFYTQQPKFYCGIDLHARTMDLCVLNQDGESVLHRNMQAGPEPFLKAMAPYREDLVVSVECICTWYWLADLCTQEGVPFVLGHALYMKAIHGGKAKNDKIDAHKIAVLLRGGMLPQASVYPAEMRATRDLLRRRMHLVRKRAELLAHSQNTNSQYNLPEIGKKLAYQANREGVATRFPDPAVQKSIDLDLTLIGAYDRLLTDLELDLVRTAKEHDAQTFYRLRSIPGIGKLLTLVLLYEIHDIRRFPRVQEFVSYCRLVKCAKESAGKRSGTSGKKIGNAYLKWAFSEAAVLFLRNNPAGQKYLARLTKKHGQGKALTVLAHKLARAVYYMLKRESVFDLDKFLHD

SEQ ID NO: 215281 - protein, 405 aa, unidentified
MKGPIVSIDVSKGKSDYQAFKDLNVKYTGSRSIKHNKEGFDEIVNLVREMEKKLETEVCVVYEATGVYHRVLKKVLEDNNIKQFIINPLLSAKTRKNDSLRSPKTDKLDPKSIAKTYYSHSLHNSHKQETIYHEQLRELSRYYEDILVHIRKDKVAFRAQLDIVFPGYDTLYDDLYGPVALAIIEKYPHPEMLQKKKINTVSKVIQNKTCHRQAVSDTMADKAIEYSKTIYSGCDKDDIEVLILQRFIKKLNEDMAEAERTIGEMIKLAQELPDFNIIKSIPGIGDNLAARIIAELGDMTRFKKKNELVAFAGLDPRISESGQNDGDHMHITKKGNKRLRCLLYLAVTCSIRLKRDDNSIKDFYIKKKQQSNPMCSKAAKTACASKLVRIIYSMCKTGELYQYNK

SEQ ID NO: 215282 - protein, 343 aa, unidentified
MQTITTIGLDIAKSVFQVHGIDAEGNVALRRQLKRRYVLNFFQKLPPCLVGIEACASAHHWSRELQTLGHTVRLMPPAYVKPYVKRHKNDAVDAEAICEAVTRANMRFVATKTPEQQSCLTLHRTRHLFIRQQTSVINAIRAHLAEFGIVAPIGRNGVEQLLSVAADANDKRLPEVARACVAALGAQLQTLKAQILEFDRMIMAWHRSSEASRRLDDIPGVGPALATALVASIADPSVFRSGRDFSAWIGLVPKQNSSGGKDRLGNISKRGDRYLRSLFTTGALAVIRYAKIHGTTHRPWLTALLTRRPTKVAVIALANKIARMAWAILAKDERYKEPAALAA

SEQ ID NO: 215283 - protein, 316 aa, unidentified
MTANNEFVGIDVSKANLDVACWKSKEYKRYSNNPKGIQDLVEWLKELQPELIVLEATGGLELPFVVELAYAKMPVAVVNPRRIREFARSIGQLAKTDKLDAKVIAHFGAATHPEARKIPTQEEEKLSALMTRRRQIIEMLTAERNRLHSARFAMQERIEMHITWLEKELQDLDDEISKFIQQSPLWKEKDALLKSVPGVGPVTSATILAMLPELGALNRQKIAALVGVAPVNKDSGKRQKKRRVFGGRANVRSVLYMAALSATKHNPKIKCFYDRLIRMGKEKKVALTACMRKLLVILNAIIRQNQIFCSEFVTLS

SEQ ID NO: 215284 - protein, 408 aa, unidentified
MNTLYVGIDVSSKSNVVYLMLPNGDKHSNFSVANSHEGSTQLVKRILSALTSHSLDTVLIGLEATSVYGDNLVYFLREDATLAPFNRKIHVINPKQVKKFHDAYNDLPKNDYVDSFVIADCLRFGRINKEVYLGDYRYKALQNLTRARFFAVQNLVKEKQRFMNVLFKKYSTMTQEKVFSDTFSTTALAVYDEFESAEALANMDLHELTDFIIEKGKNRFPDPDAVAKAIQKAARSSYRLPKTVNDSVNQVLSISITSMKALESQIKEFDKAIKAQMELLPNVLISIPGIGPVYSAGIMAEIGDINRFNSQAALAKYAGLAWKQHQSGGFESEVTRLIPSGNRFLKYYLCEAAFSLVRCDKEYSDFYHLKYKEVNRCQHKRALALTARKFVRLVFRLLKDNRLYCPAK

SEQ ID NO: 215285 - protein, 343 aa, unidentified
MKLQVLGIDLGKTVFHLVGLDSTGRAVIRKRCSRTQLLAFTANLQVQLIGMEACSGAHFLGRALRKQGHEVRLMPAQYVKPYVQTNKSDYLDAEAIAEAVQRPRMRFVPIKTEDQLDLQALHRVRERWVMRRTAVVNQIRSLLLERGLTLPKGRSHLDEQLPRILEDAELNLSDSFRVLLAQLKLELEQLAARIEEMDQVIQKTAKENEACQRLTEIPGVGPVTATALIAAVGNGSTFKKGRNLSAWMGIVPGEYSTGGKQKLLGISKRGNKYLRRLFVQGARSVLQQRHKQTPGLSSWLAQLLGRTHQNVVVVALANKLVRMAWAVLCKNERYRAPVFSVTT

SEQ ID NO: 215286 - protein, 429 aa, unidentified
MRTESTPGARGPVFCGVDTHADSHWLCVLDWRGRRVLSRRFPADAAGYEALAGAIAAAGEPACVAMEGTSSYGAGLTRHLASLGMPVREALSPARTQRRRPGQGKCDESDAERAARAAMSGSKLGTPKSQDGWVDGVRCMLAARSGAVKARTSAINTARSLLTTAPEGLRSRFRGMGGPRLMEELPSVRAEGALGAALGALADLWAAARDAALDMELAIEASLEENCPALLAMYGCGPVSAAKLAVAAGDNPGRLRSEASFAAICGACPIPASSGKTVRHRLNRGGDRQANSALHEIARQRVMRDPETAEYAERARARGKSDREVMRCLKRYVAREAYRALMRPHEIRRPEDASGLVAARRAAKVSQVRAASILGTSEKYISMLERGQRELKPIRRAYEAWVEAGLPLDWDRQAFEAERKMDSKKHLAK

SEQ ID NO: 215287 - protein, 365 aa, unidentified
MHSITNTELSSHEGTRCQFNGGRCAIKMGIDVHQDFYVVAEQVGGTNPKPPQRFHKQAFLHWAAKLKEKSAGAEVHAVYEACGFGFTLQRQLAALGIHCHVVCPQKLDELAKRVKTDGLDAKALCLKLDRFVQGNRDALALVRVPTEEEEHSRAIHRQREQLVGARKRLEAQGRSLMVNHGLEPVQNWWKARTFAALPVPQWMRELLLNSQPILLALQQKIAALTLQLQSAAASNQPRGLGKMTSVILDREIGDWYRFNNRRQIASYTGLCPGEYSSGNTRLQSCVTKHGNPRLRAALVELAWRLVRFQPNYKPVVKWRQILAKGALATGAAHKKAIVAVARQLAVDLWRVRTGRCKAQALGLEI

SEQ ID NO: 215288 - protein, 343 aa, unidentified
MDHFAGLDVSVKETSVCIVDDTGRIVREVKVASEPEALLQVLTTPAYHFKRIGLEAGPLSQWLFSALAEMGLPVICVETRHMRAVLKAQINKTDRNDARGIAQMMRAGLYRPVHVKTLRSQKLRMLLTHRKLLQSKAIAIENDLRATLRNFGLKVGVVGATKFEVRIKELVENLPDLVVLVEPLLIVRRVLHEQLDILHRRLLAVVRNDDVCRRLMTIPGVGPVVALTYRVTVDVPARFKNSKAVGAAFGLTPARYQSGESDRTGGISRCGDEMMRMMLYEAAQTMLVVSTKWSWLKAWAMKIVKNRGMKKAIVALARRLAVIMHRIWIDGTEFRWTKEVAAA

SEQ ID NO: 215289 - protein, 392 aa, unidentified
MVVSVGIDVSKDKHDCFILSSEGEVLVDVFTIPNTMDGFNCLLQRIQDCTTPQGKMKVGLEATGHYSYNLLGFLLDSGLATYVINPLHTNLYRKSLSLRRTKTDRIDARTIAMMLMSDVDLKSYSNTAYHNEELKSLTRYRFDKVKERAKLKSSVARLVNILFPELEKLVSSLHIAVVYALLSNYPGASYIANANTEELAETLCTASKGRYTKSKTAEIQVAAGVSIGSKMPAKSMELKHTIALIRELDKEISEVESAIDKITSQMDSPIFTIPGIGRHMGAMILAEVGDFSNFASADKLLAYAGLSPSTYQSGQLQNCYAHMEKRGSRYLRYALFNAAKYVCLWCPTFSAYLEKKRSEGKHYNVAISHAAKKLVRLIFAMQRSGKAFLADY

SEQ ID NO: 215290 - protein, 334 aa, unidentified
MLACFSELKQKALSRTRKSFSIIVIQEAGLDGFWIHRVLEREGHESYVVDPASIATSRRRRRAKTDRIDGEALVRALLAYKRGEPRVCAMVRAPSPESEDSRRLSRERKTLTVERVQHVNRIKGLLFSQGVSGYEPLRRNRRQRLDELKTGDGRPLPPHLKAQISRELDRLELLIEQVKIVETERDALFAPAVKTGQLPAPQAMLADLKGIGAEFVAVLWSEGLCRSFTNRKQLGAYAGLAPTPWQSGSVAHEQGVSKAGNPRLRTTMIQLAWLWLRHQPQSALALWFKERVSHNGGRLKKTTIVALARKLLVALWKYVTAGIVIEGAVMKSTA

SEQ ID NO: 215291 - protein, 383 aa, unidentified
MPYRIAGIDVHKRMLAVVVSEVEIDGEYDFERRQFDSNPAQLQLLAAWLVEQQVEEVVMESTAQYWKPVWGALERYWKPICQKREGARPMSGTLHPAQAQSNRARRGRKNDFADAERLLKRLVSNELILSFVPDPEQRLWRTLMRSKYQLKCNQVQLHNRLEALLEEAHIKLSSLISDLLGLSGRRILKALAQGETDPASLAALGDRRLRATKEQLSDALGACQELNPVYRRLVKMALEEWNLLEKQIGQLDQQMADLLRPHQDQVKRLAEVPGLGVDSAQQIIAEVGATAATFPSAGELSSWVGACPGDHQSAGVSRSHRSPKGNRHMRRILNQAANAAVKYKGSVFEILYHRYVTRLRVCAERGWLRLRDRCQHASRSERI

SEQ ID NO: 215292 - protein, 431 aa, unidentified
MKKQKSKRLEEITETTLVIGIDIAKTIHWARFTNYRGIETGKAISFKNDRVGYGSIVMRIELIRKNKTMKKPFDKVIIGMEPTGHYWKALAYYLKKAGYTVVGVNPYHTKRAKELDDNSQTKNDRKDALTIARLVKDGRYFNPYLPEDVYAELRILSNSRVRVVKRGNAIKNAITAIMDEYFPEIWAVFKYPLKGKASRQILRDCPFPALITAMGEKGVLAAINKAVKKTVGIKKVRELLNSAEDSIGVEYGMETVKFRMGQLLDELEMVENHLAGIEASMEEKLKETGYAESLLSIKGIGIVTAASFLGEVGDPLRFGDARQIANYAGYNLVEDSSGKNKSGTCISKRGRSQLRSLLYQMAFTMTSRNEEMKSLHMYLTTRAKNPLKKKQSLVVVSKKIITVIYSLLKKQATYEPALALGTVRREMMEAA

SEQ ID NO: 215293 - protein, 493 aa, unidentified
MSNFKTRPPHVRTPPRPSPTPIATDLRRAARHAEKTRRHAEECAKLVSMPVQHAHAAGIDAGDISHWACVESTPDDSDTVREFPAHTPGLRQLVDWLRQCGVTTVALEATGVYAHVLFLTLLEAGFVVVMTAPQFARQIKGRPKTDKRDCQWIQRLHKHGLLPAVFQPDEATQTLRDYVRQRANLVRLSGQHIQRMQKALQLMNLKLTRVLGDVTGVTGLKIIRAILAGQRDPQQLAKLRDRRCRHSVADIAQALDGRYRPEHVMELRCGYTLWQKYQEVIGELDEAIDAHLRTMRRQTALPPLPPKPRLRGRKPHDPRFDVRGALYLATGVDLTAIEGIDEVHALTLVSELGSDFTKWPTVKHFTCWLGLCPNWHKTGGKVKSSQTRRGKNRAAHALRLAAWALMRSKSYLGAYLRRQRSRLGAPKAIMALAHKLARIVYHLVRYGLAYVKQTEAAYAAQVRERLERQLRRRALELGFELKKIEPPVIPTRT

SEQ ID NO: 215294 - protein, 387 aa, unidentified
MGRCIGIDLHRNRFSVCVLDEEGDIEVESEYETSRRGVERFRETLMSMDTVVFEVSELAFGMHDALVSRVSRVIVADPAKTRERSSGEAKTDRLDARRLARLGQDKHIAEVWVPDPETRRLRELVRFHQQLTKITTKMSNIEYAKGASRSIGLSGPGGKGLWANDRERAELLREAGREVAESARKQKAKLDMMFADWAVKTPEALLVMRHAGVGPWVAAVVIGAAGDIRRFENAQGFASYTGLVPRVYQSGEGCHHGRITKAGRKELRHALVQAAWSAVRSDPALKASFKRIARTRGEGKAIVAIARKIATRLWHLMTEGHCDGLMSDEAFALKIKRIIRDNRIHIPAHHQATTGAATSRPKTDKNKSGEKGRCTPARGLSLCRQRV

SEQ ID NO: 215295 - protein, 440 aa, unidentified
MPTPSLPVLDPTAAAIDVGSEQLHVSIAGGPPKVFGTTTGQLHALRDYLLEQGVKSVAMEATGIYWLCPYEVLEQAKLAVVVVNGKYVKNLPGRKTDMKDCQWQATLHAHGLLKPGFVPPEHIRRLQDYLRLRSDHIVMAGSHEQHMQKALERMNLKIHDVISDLTGMSGLKMVEAILAGERNPETLLALCDAQIQKHKAGRLQEALQGTWKPEHLFALRQAHELWQFYQSKIRECDQAIEAVLREMTGPEDPQAPPPPAATKRGGVNAPQIAGLHGLLWRLCGGKDPTTLPGVADYVLLQLLAEVGTDLGGQWKTEKHFTAWLGLAPGSKQSGKRKGSQRRSRNRAGRLFCVIARSVGRSVDKALGGFYRRLKGRRGGLVANLALARKLAELFWRLMVHGKAYVEQGLKQYEIKVAQTEQRLLAKLARKYNMVLQPKAA

SEQ ID NO: 215296 - protein, 399 aa, unidentified
MGQQLWAGVDAGKSDHYCVVIDAEGQRLLAQRVANDETALLELISTVSTVVDGAEITWAIDLNGGGAAVLIALLVGAGQRLLYIPGRTVYHASGGYRGDGKTDAKDAAIIADQARMRRDLQPLRPGDEIAVELRILTSRRADLVADRTRAINRLRAQLLEYFPALERAFDYSTSKAALILLTGYQTPDGLRRAGAAELAAWLRKRKARNADAVASKALAAANAQHTIVPGQHLAATVVARLAKEVMALDIEIDDTETMIEERFRRHRHAEIILSMPGFGVVLGAEFLAATGGDICGFDSVDRLAGVSELTPVPRDSGRISGNLKRPRRYHRRLLRACYLSAQIAIRTDAASRTYYDRKRSEGKTHTQAVLALARRRLNVVWAMLRDGTAYQPAPTAAAA

SEQ ID NO: 215297 - protein, 419 aa, unidentified
MTRRIAGIDVHKRVLMVVVLSVSEDGAAASTREKTKCGTLSTELEELRQWLREKGVTEVVMESTAQYWKPVWLALEGGFELGLAQAWSNRAPRGKKSDFRDAERLARRHVAGELTMSLVPGAEQRQMRELTRRTAQLNRELVRIQNHIESLLEPARIKLSSVLSDLFGATGRRILQALAQGESDPEKLAALADDRIRCSPARLAEALRGSRTPMQRRLLKQMLQDAELAEAHKKELEEMTGELMKQHSGAIRRLTGVPGIRLRTAEDVIAEIGPDARAFPSAARLASWVGACPGREESAEHNHSARCAKGNMSLRRALCEAAQAAVNTKNCRFQQKFRRLLPRLGYAKAIRAIVRLLCIVIWNILHQGADYIERGGQTTPGAIRRRAQRLNKELRAAGLSLIIVPLTSQTRTISAATPV

SEQ ID NO: 215298 - protein, 412 aa, unidentified
MIYCGIDWAERTHDVALVDDVGMLVAKRHITDDSAGYKILLELLAEYGDTQENPIPVAIETSRGLLVAVLRTGKRPVFAINPLAAARYRDRHAVSRKKSDPGDALVLANILRTDMHAHRPLPDDSDLARAIAVLARAQQDAVWNRQQLANQLRSLLREYYPAALAACAKWDNGLCRPEARELLKLVPTPARAARLTRPQITAALKRAGRKRGIEAEAERLREAFRQDWAHQPPLVEDALGRQMLALLGQLTAACTAADELAQAVEEVFPQHPDAEIILSFPGLGTQLGARVLAELGDDRTRFADARGLKAYAGASPITRASGKKSSITRRWVKNDRLNHAGYLWAFASLTASVGAKAHYRRRRDEHADWHAAAQRNLFNRLIGQLYHCLKARQLFDEKAGFPTPPELKVSAA

SEQ ID NO: 215299 - protein, 346 aa, unidentified
MEHYAGIDVSLELSSVCVVDAQGKIVKEAKVASEPEAVVAFFEALGFAVKRIGLEAGPLSQWLHAGLKEAGFETVLLETRHVKAALSAMTVKTDRKDARGLAQLLRMGWFQPVHAKSMASQEVRALLVGRKQLLGRLIDVELSIRGILRGFGLKVGAVTRKGFEARIRELVTGQATLERVAEAMLSARAALKAEYEKLHKAVLAIVREDAVCRRLMTVPSVGPLVAITYKSAMDDPSRIAKSKAAGALFGLTPKKYQSGEKDVTGGITRAGDEMVRTALYEAANVLLSRITRFSKLKRWGMDVAKRRGSKRAKVALARKIAVILHRMWIDGTTYRWAEAKPIAAQA

SEQ ID NO: 215300 - protein, 384 aa, unidentified
MRANHTDAPAGCEYATVYVAFELSKSKWQLGVMTPGSEKMSRYRIEGGDLAGLSSVLARARSKAEQVGKPVRILSCYEAGLDGHWLHRWLADNAVVNHTIDASSIEVSRRARRAKTDRIDLALLMRAFLAYLRGEPRVCSMVRVPTPEDEDRKRRTRERERLLKERTAHSNRIKGLLHGQGIRDAMPLQPSFLSDLDQMRTGDGRPLPPRLKDEIRREHERLLLVHKQIKGLEAENVAAHRAPAARSAEAKAVQLAQLRGLGPLIAQVLANEVFYRDFQNRRQVGSCFGLTDTPYDSGGSRRQQGISKAGNHRARTTAIELAWLWLRHQPDSELSRWFHGRVGNLKGRIRKIAIVALARKLMVALWRYLETGLVPTGAVMRPSF

SEQ ID NO: 215301 - protein, 455 aa, unidentified
MYLPDWKWIPIRKGLLLMSNKVIFNLDELFISVGIDVGADFSWMSIALPNQQFVGKPYKILHNSIDSLTTAVSKIKEAEELYSLESRIFLESTGIYHYPLFCYLRDKGFNCSVINPIITKNSTNINIRKVHNDRFDSKKAALVGLKPDLKVSLMPSDLALNCRNLCREYYDLMDNRSAYVNKLQGELRMAFPQYLGIFSKVTINTSLTLLETYTSPSAFLEADKQEIIDIIKSTARFGLTYAQNKYNAIIQAATDANQFGYIIDSNIKRIRLYISFIRKYDEEINSILESLHELVDANEDSDFVKQIHLIETFKGAGFLSAVSIMGEIGDFSAFSKPKQLFAYFGLDPAVKQSGKFEGTKVQMSKRGSAIARRVIHTLTLQSISISRNREAKNPVLREYYLKKCDSKPKLVAMGAVSHKVCNMIFAILRDNKPFKIIAPQEHIKQYNSAKCDIAA

SEQ ID NO: 215302 - protein, 379 aa, unidentified
MKAIKLYIGLDVHKDSITIAIAQNGRQGEIRLYGTITNDLHALEKVLAKIRKAHPKARLEICYEAGPCGFGIARRLKQLKVPCLVAAPSLIPKQPGAPFKTDKRDARSLARLHRAGELTAVYIPEPTDEAIRDLCRARTDAVDDLRRSRQRLKSFLLRHGYRYSGRANWSQPHMRYLRELVLPHPAMKIILEEYLQGIDAAHDRVSRIEASMLLLLEDWRLKPAVEALMAFKGFQLVAAMITVSELGDIHRFTHPRQLMTYLGLVSTEHSSGPKQHLGGISRCGNGHARWLLVECAQHYAVPPKISMHLSRRQQDQPPAVRALSWKAQHRLHHRFMRLLARRLHRNKIKVAIARELCGFIWALLRQQHCYLQSNGGAAS

SEQ ID NO: 215303 - protein, 352 aa, unidentified
MSMVCGLDLHRGQITFDALEVNSGEAWRGRIWKPDRQRFRRWLEEEVGPRAGGDGQVAIAVEGCTGWRYVVEEIQAVGFEAHVAEPADTQAMRGRKRHAKTDRTDARLLRDLLHAGELPESWIPPAAVLEWRERTRLYKSLVDQRAVWVQRIHAELYQHGVALPVEHIRSDQTRQILGDRAGLELSEAARQRIEVGYRIIDATHTEAEALREQIARFARRQKACRALMAQIYGFGPTAAVVVWSELGDCRRFRRSRQVVRHTGLDVTVDASDTRRGGGYLSRQGPGTLRWALFEAGLCGARATSPDRDYYRSVKARADGKLAAMCVARKLARRSYHILRSMDPADVYAIVDT

SEQ ID NO: 215304 - protein, 354 aa, unidentified
MQKTSSQNVSAFSSLGVDIGKDVFHVVGFDLEGKVVLRRKIKRLGLEREFKKLPRCIVGMEACLSAHFVSRRLRELGFEPRIIPAIYVKPFAKGQKNDYNDAEAIAEAALRPNLKLVQEKTQDQLDLQACHRVRARLVSRRTATINQIRAFLIEQGIAVRRGAHALRKSLFAILRNREDEISPRMSDLIVGLYEDWLWLDERIETVTREIEQIGHSEANCQRLMSIPGVGPMISTAMVAAIGTGEAFARGRDFGAWLGLVPRQYSTGGRPILGRISKRGSKYLRTLFIQAAHIILMRPHNWCRLSFGAWLEQAATRLHRNKLATALANKLARIAWSVLRNGKQFDAHRIEVAAI

SEQ ID NO: 215305 - protein, 355 aa, unidentified
MERYIGMDVHAASCTLAVISQTGRRLRDFPVETNGQALVEAVRMIPGHKHLVFEEGLQSAWLYETLSPHVDEIVVAGITESRGPKSDKRDAYGLAEKLRVGDLDKPVFKAPREFTRLRELSRSHMTLVGDVVRVQSRIKSLYRSRGVLVTGVDVYSPRRREEWQKQLSSSAQPRATRLYDYLDFLLEQKKQAEADLLREAKKHPIVRILETAPGFGPIRAARLVPIVVTPHRFRTKRQFWSYCGLGIVTRSSSDWVQTADGTWIKARVPQTRGLSRQHNRFLKHIFKGAATTIITQRNKDPIYARYERLLDGGTKPTLAKLSLARMIAATVLRMWKDEEEYDTGRASPFAETRES

SEQ ID NO: 215306 - protein, 457 aa, unidentified
MKPQKGKCLKTDGSPDFPVLHGHAAGIDVGNAEHYVAVPPGSDPQPVQRFGSFTADLHRMAHWLKSCGIQTVVMQATGVYWIALFEVLQTYGFQVQVVNAQHTKNLPGRKTDVQECQWLQKLHTFGLLNASFRPAEDISVLRSYLRQRENLVTGASICVQHMQKALTQMNLQLANVISDITGVTGMAILRAIVDGERDPRRLAALKHKQIHASPQEIARSLEGHWRPELIFVLAQNLALYDFYLASIEQCDHRIQSHLSTLRSKVDASTQPMPASRHHRKIRKHGPRFDLRQQLYRIAGVDLTQIDGFDVQIAQSVISEIGVDMSCWPSEHHFASWLGLCPDNRSSGGKVLKRGTRHVVNRAATALRIAAWNLIRSQSALGAKFRRLRSRLGAPKAITAMAHQLARLVYRMLKFGHAFVDRGQQYYEQKYRLQQRKWLEKQAAAFNLQLVPLPGVTQ

SEQ ID NO: 215307 - protein, 422 aa, unidentified
MKKIETKKLKFVNDKTLIATVDIGKGLNMGYARCPDHSEVKPFEFANNRAGFDKFWDCLEKARDAKSLDSIVVGFESTGAYGEPLQHFLKNNPVRLVQVNPMHTKRVKELQGNSPNKTDRKDPKIIADIIELGHSLTVVIPEGAAAELRRLTFARERANKRCTALYNQLQDLIFISFPEFSQVIKDVKTKTARYLLQTYPDPQDIIALGLENLGTVVKRVSRGKMKPAKAKGLFEAARTSAGITEGRFSVALEIQATLEAIASSDDFVSRLEKEMSRHLEDIPYSHLLLSMKGIGRVTVAGLIGEVGDFNSFDTQRELLKYAGFDLFEISSGKLRGSRRISKRGRPLLRKLLFFAALNTVRKGGVMHGHYQRHLKKGMKKIKALVAIARKLLGIIFALVRSKQEYQEDYQKIQAAATMPMAA

SEQ ID NO: 215308 - protein, 342 aa, unidentified
MEHYAGIDVSLECSSVCVVDAKGKIVREAKVASEPQALVDWFGSLGFGLERIGLEAGPLSQWLFAGMKRASLAVELLETRHVRKAFEAMPVKSDRNDARGIAQLMRLGWFRPVHCKSMSAQETRSLLTARKLVQSKLHDVENSLRGILRGFGLKVGKTTGQKFAGRIEELVTGHPHLQTIAKALLAVRAVLRAEFAAFEKQTRRMVQSDMQARLLTSVPAVGPIVALTYASAIDDPTRFKSSKQAGAHFGLTPKKHQSGETDYTGRTSKIGDASVRTALYEAANVMLTKPVKGCSQLKSWAMRIKRRAGTNKAKVALARRLAVIMHRMLADGTPFNAAAAAA

SEQ ID NO: 215309 - protein, 348 aa, unidentified
MQVSIIGIDLAKHVFCVHGCDADGKPVLRKQLARRQLLSFVANLPRCLVAMEACASAHYWAREIEQLGHQVRLIAPKLVRPYVKANKNDASDAEAICEAASRPSMRFVAIKSTAQQDVQAVHRLRQQLVKTRTSLVNQAHGLLAEYGIVIARGLAPLRRAIPVILEDLDNGLSGVMRELLAEIGERLRFIDERLRKYDLTILRLFRDDERCQRVAAVEGVGPVTATALVAAVGNATDFKSGRELAAYLGLVPRHRASGGRTVLLGISKRGNRYLRTLLIHGARSALYRIERHRGARASWAARLKLRRGANVAAVALANKNARVLWALLSRGQSYRPAPFPARVPQAGS

SEQ ID NO: 215310 - protein, 358 aa, unidentified
MNKSNNLDFSGSAIYCGLDVHLKNWRVNIRDQEMELRDFSQNPDPVTLHTFLTKNYPNASYKVGYEAGFCGFSIQRQLSVLQIECVVLNAADIPKSDKDKRQKNDKRDARSISEEIKNNKKVGIHIPHAAMEYARSLVRQRQRLVLDSTRQKCRIWHCLHFHGLELPDKADVGQYWSSKFIKKIESNACNGDTWLKMNLQLMIKDHQQKRALILETTRGIRSLCRQEPFKKSIEFITGIPGIGEINAAIILFELEDINRFKSPDQLYSYAGLVPDTDDSGDAKKSKGITHRQNSRLRKAIIESSWVIVRQDPAMLMLYKQYCKGMHKNKAIIRIGKHLLSRIRYVLKEQKPYVQAVLK

SEQ ID NO: 215311 - protein, 392 aa, unidentified
MIYVGIDVAKDKHDCFITNSDGEVLFNSFTISNNRDGFETLFQKIESVSDDLNNVKVGLEATGHYSYNLLGFLLHKGCPTFVINPLHTNLYRKSLSLRKTKTDKVDSRTIATMMMSDMNLKSYSDTSYHNEELKSLTRYRFDKVKERAKLKSSVSRLVCILFPELEKLVPTLHMVSVYALLSEFPSANAVASAHLTRLSNLLSESSKGRYGKVTAVMFRDTARSSIGSHMPAKSLELKHTIKLIQELTIEIDEIEAAIKRIMDEEIQSPILTIPGISYRMGAMILAEIGDFSRFDSADKILAYAGMSPSTYQSGKLDNCYAHMEKRGSRYLRYALYNATKYVCHWDESFAVYLEKKRLEGKHYNVALSHAAKKLVRLIFAMEKSGLAYIPAS

SEQ ID NO: 215312 - protein, 371 aa, unidentified
MFGNQATFRQKGGPPMNYVGIDYHKKYSYVTAIDEEGRVIRSKRLENKPESFQDFFKRLEGPSEAVLEASRTWGVMYDLLEELEEVESVELAHSQKVRAIAEAKIKTDKIDSHVLAQLLRADLIPAAYIPGKQTRSYKEMIRQRVFLVRMRTRLKNRIHVLLDRLHVALPSVTDLFGKRGVDYLRKLNLPGVDGEILRENLQLLEAFNTLIKEAEREIELLLRETPLVKLLRTVPGLGPILAAVVALEIDRIERFLSPSKLASYAGLVPSTYASGGRIFHGKLLPMSNKWLKWALVEAAWGSIRTSPYCRSYFESHKRHKGPHTAAIALARRLCEIIWHVLKENRGYEERPFQRRRWASSMTISPAALTAT

SEQ ID NO: 215313 - protein, 437 aa, unidentified
MVPHAGGAVEEEKTMDILHERVSGLDVHKNTVVACARIMTGKETTRECRTFATTTDGLLALRAWLSECRCTHVAMEATGVYWTPVWRILSEGDFELIVANAAHIKNVPGRKTDMNDAMWLADLLAFGLIKASFVPTEPMHELRSLTRTRKQLVREQTRHVQRIQKTLAEANIRLDSVISDIMGASGRRIIEAMIAGVRQPHKLADLAGKQIKATPKELYDALHGRLTDHHRFLLDLHLRQWDGLDTTIRTIDLEIDQRIDRMDKDRAAGEPPFRSLIGNADTVPGVSAVSAPAILSEIGCDMSRFPSAGHLLAWAGMCPGQNESAGKRKPSRLRKGAPWLKTMLVQCAWAAIRKKGSYYQAQFLRLRHRRGPQKAICAVAASILTAIYHMLKDGTEHHDLGADYFDHRSTETKAKHLVARLTKLGFTVQLQPSAKAA

SEQ ID NO: 215314 - protein, 364 aa, unidentified
MEQITRGSAGGEVARVGVDLAKRVLQAHAVDAHGRVVVRRALRRDAFVGWCAQLPPGCVVAMEISSSAHHWARRLAAVGLQPRLMSAQLVKPYRSEGATGKNDANDAAAICEAASRPTMRFVPVKSVEQQSMLCVHRLREGLKADRTACINRIRGLLAEFGLVFAQGPDRLSSVLADVLEDGSNEMNALARRVIEHARAQWRELDAHIAWCDERIAQHARDNAAVRQAAQLMGIGPVTASAAIATVDDFAQFKNGAQFGAWCGITPRQDSSGGKTKLGRITRRGDAYLRSLLVQGAKSAVLTAHKRSDPISRWTLALRERSGWQVAAVALANKNARILWAVMTKGVRFDPSHVSVKPCAVVAAP

SEQ ID NO: 215315 - protein, 315 aa, unidentified
MDNSLLQTVGIDISKATLDVYVHPAGCQRQFANTVKGHKELIGWLAQWQIDRIAYEATGAYHRQLEHALADLPCVKLNPARARRFAQAAGTLAKTDKIDALILARMATTLQPPVRPATTPQQARLAELISARDRLVRDKIALQNQAKNLTVPLLKRQYKHRLDQIDRHIEQVDAELATSIAADPTLARRHQIISSIAGVGTRTADQLVATMPELGALDPKQAASLAGLAPVTRQSGQWKGRSFIQGGRANIRRALYMPALVAARYNPDLKAKYQSLIDAGKPAKVAVVTLMRKLIVMANALIKADRLWVSDRTCA

SEQ ID NO: 215316 - protein, 320 aa, unidentified
MTISTAAGVDVGRDWLDVAIARSSEAGVAGRHFRLPNTPAAIAGIPARLRRAGVTRVVIEATGAPAARLVRTLAEAAMPLGVVDPRRIKALRLAEGRKAKTDKLDAGLIARFALLMTDAVRPAPSPAALELRALSTRRRQLVEMIAAEKTRLKQAFEPVLMASFRLTIELLGEERARIEAMIEARTSATPEDRRKGELLRSIPGFGPVISATLMADLPELGALDNKAIASLAGVAPHIQQSGAQAGRAHIQGGRPCVRAALYMAALSAVRHDAGFKADYKAMRAAGKPAKVALIAIARKLIVAANAILKHGEPWKPAQRS

SEQ ID NO: 215317 - protein, 353 aa, unidentified
MANPMANLTIGVDLGDRYSELYGVDAAGACVETGRIRTTVAGLEQWFGGRPPARVVLEAGTHSPWASRVLPRLGHEVLVANPRKLRGLYENDSKDDRVDAEYLARVGRLDPALLKPITHRGEAAQADLAVLSSRDVLVRARTLLINHTRGVVKALGGRLPRCSAEAFARRVGPHVPPAVRPALAPVLEQLQQLTTTIRGFDRAVEHRCAQSYPETARLRQVTGVGPVTALAYVVVLDDPTRFRRSRAVGAYLGLRPRRSQSGEQDPQLRITKAGNPFLRRLVVQAAHYILGPHGPDCDLRRHGERIAARGGKNAKKRAVIAVARKLAVLLHHLWISGEVYEPLRHRPALAQAS

SEQ ID NO: 215318 - protein, 320 aa, unidentified
MRNAVGLDISKLTFDASAMVGNAEYSAKFDNDSKGLNQFSDRLKSLGCQNLHICMEATGNYYEEVADYFAQYYSVYVVNPLKISKYAESRFKRTKTDKQDAKLIAQYCRSAQESELVKRQKPTDEQYRLSRMTAAYAQIKSECAAMKNRYHAAKDEEAAKAYAEIIKAMNEQLEVLKEKIKEQTEKPKCKEGVKCLETIPGIGRMTAAVLFHHLTSSKFETSNKFAAFAGLSPQQKESGTSVSGKGKLTKFGNRKLRAVLFMPAMVAYRIRAFPDFIKRLEEKKKPKKVIIAALMRKLAVIAYHVHKKGGDYDPSRYKSA

SEQ ID NO: 215319 - protein, 316 aa, unidentified
MTDNSMICAGIDVGKSHLDIAIHPDDARLRVTYDTAGLKALDAFLQEHDVCRIGFEASGGYEWRLMVHLRAGKRPAARLQPAQLRFFAKSRLRRAKNDRLDAALIALFTASLERLPALPDARFDSLAAELTYVEQIEQQIALVKTFAETALSEAVKRRHAREIARLETCRKARLLRLEKTVRDDCDLARRLDLLISIKGIGLRSALCLIIRLPELGHAGRAEIAALAGVAPYDDDSGKHHGRRRIQGGRERLRKSLFMCAFTATRHNPDLASFYARLRRSGKEHLSAVIAVARKLIILANAILIRNTEWTPQYPQK

SEQ ID NO: 215320 - protein, 380 aa, unidentified
MDVHSTNFTLCSFEPGYGFEADKIFGQTQIKEDIFNSTVKYINKLKSMRPDVDVVCGYEAGCLGYNLHRKLKAKEIESVILAPTTMAVSRNCSKKKNDYRDAITIAKCLASSAYKAVYIPDDKDEDIRDFIRMRDDHKTALKQIKQQLNAFCLRHGHHYDKTKWTGLHLNWLRKLELSKVKRETVEEYLATYEALTSKIAALDVRIEDIASEERYAEKVNKLKCIKGIKTHTALSFVCEIGDFNRFKSADKFAGFIGLVPGECSSGNTERMLGITKAGNRHLRRLVVEISNTYRRGAVGRKSAVLKERQKDMPKDVVAYADKATNRCQKKYQRMMFKGKNSNQAVAAVARELCCFIWGMMTGHHSRTAQAEASVYRSELD

SEQ ID NO: 215321 - protein, 355 aa, unidentified
MLIIGCDYHPGFQQIAFVDTETGELSERRLAHREEAEQFYRQLSEQDRKARVGMEASGHSRWFERLLVELQFELWIGNAAEIRTKRVRKQKTDRQDAQLLLRLMIEDRFPRIWVPDSENRDLRQLLWHRHRLVQMRTRVMNQLHVVALNEGLRRKKALWRPAGRQELESFALAPWASRRRQDLLDLLDQLTPKILELTRALEAEVEKRPVTRRLMTHPGVGPLTALAFELVIGTAERFHCGKQVASYVGLVPSEESSGDRRRLGHISKQGNALLRFLLVEAAQVTVRSQPQWRSRFFHLAMRRGRKIAKVAMARKLAVHLYWMWRQGWDYGQLQELGSQGRKLSSHTVVTEGSTR

SEQ ID NO: 215322 - protein, 203 aa, unidentified
MELYIGLDLHSRNIFIGILDKEFNQVFKKRVPNKIELILETLNPFQDQLKGLVVESTFNWYWLVDGLMDAGYHDVHLANPAAIKQYGGLKYSDDQHDAFFLSQLLILGILPQGYIYPKKERSVRDLARKRMFLVRHRTAHKLSLQSLIRCCCAHNGSADKSRTWRITKQGPPYLRTALVEAAQVIPRMKKTRLNVFFRKKIVP

SEQ ID NO: 215323 - protein, 485 aa, unidentified
MILGDRQKSGGYKIELFIVTWILIRKLIQRFPACTPDCASQSNMRWTNGKKTYTGFGVWTPGKLKPLLPITTECEEEYIMLTPIVKRCAGLDVHKMVVVATVLLEREDGSLREETKQFGTFRKHRRQMVRWLDRLGVELAVMESTGIFWKSIYACLEEAGIATYVVNARHVKKVPGRKTDVSDSQWLATLGRLGLLKPGFIPPKDLRELRLITRQRIKLRRMLAAETNRLHKVLDDAGIRLGGVVSDINGLSARALIEGLIEGKAPEDIVPHVHGRLKEKIPQLLEALDEPLSERHCFLLHSLEEHIDYLEKEIATVDHYLFAAMSPYKTQWEILQTIPGIDALSAAMLLVEIGIEMQCFGSAHRLASWAGMCPGNNESAGKQKGGRTRKGNRVVRQLLCEIANAASKSKSQFKGHYQGLVIRRGHKRAIIAVGHKVLRVVYAMLKSLQPYRDPEIDYSRLVVQRNAPRWLRALKQYGYLPATAI

SEQ ID NO: 215324 - protein, 318 aa, unidentified
MTKLTSTAAHLDLVWWADQFGPVRRWAVEDCRHLSRRLEADLLAAGETITRVPPKLMAHCRDSARTYGKSDPIDALAVARAALREPGLPAARLDGPERELRLLTDHREDLVAERTRAICRLRWHLHELDPDWDPGPRTLNRKHTIAAVAGKLEAMTDLVARLAADLAARIASLTAQINALEKEIAVLVRQLAPSLLALPGAAELTAAKIVAETPGIDQFKSEDAFARHNGTAPLPVWAVGRRRHRLSRTGNRQLNCAIHRIAVTQIRCCPDAQAYLKRRMSAGDSKIEALRALKRRLSDIAYRKLLADAQLCTSTQAT

SEQ ID NO: 215325 - protein, 313 aa, unidentified
MYYIGIDVSKKALSVYDGKSSLEFANQEGLRPFYRYLKKYFKSFENLGLIFEATGIYSDHLREFCAQHCIKVYILNPKQSHNFAKSLGVRSKTDKIDAHTLWQYRSLIPEEKMKVPVIDQEVKRLASYLTSYQFTQVQRTALANHLESVTDKTLQQLLQQELARKKKLEEKILTDIKDYISEHPKLAEDYQRLMRISGIGEKLAFSLLFLFRHYQGTNRAQITALAGLDPIYKESGTSVRGKVKISKNGNHYIRKMLYLPTLCAIQNNNKIAIFYKRLIDNHKPKKVAVIACMRKLLLVAHAVYQQKTEYVPG

SEQ ID NO: 215326 - protein, 402 aa, unidentified
MAYDCVIGMDVGKYFHHACVLDPQGRQVLSKRINQHEGSLRKLFGTYLADNASVLVVVDQPNNIGRLTVAVAQAMGADVRYLPGLAMRQLSRIHVGNSKTDVRDAYVIAHAGLNLPDALRSVDRVEEVFLQLKVLNGIDEDLARAYTRLINQMRSALVGTYPAFEHVLHGQMIHRKWILHLLAKYGGPTKIRRVGKARLAAFARVHRARNPEPVIDAMLAAIEGQSVTIAGAEYAELGVAMSAKDALAKLEHRKEIEAQVLELIQDIPQTEILLSMPGIGPRSAAQILMTVGDMSDFPDAAHLASYAGLSPRTNQSGTSIMSNSPNRAGNKKLKNALWQSSCASIRFHERSRQFYERKRKEGKRHNAAVVALARRRLNVLFAMMRSGELYRDISTVQEAAAA

SEQ ID NO: 215327 - protein, 343 aa, unidentified
MYYIGLDVHKKTISFCVKDAAGCVHREGKIGSTRHELDAWIRTLPQPRMIAMEATIFTGWIYDHLLPHAEKVKVAHPLMLRAIAAAKRKNDRIDAVKIADCLRCDFLPECHMASTEIRNRRRILRYRGLVLRQAVQMKNRVSGLLMETGVSYNKLRLHRMGYFAELMTTNEEVSESIRPLLKLCREHIDRSIRLDTTLLRSLEQDPLLADRLRRLRTIPGVGPITALTWALEVGDTSRFRSIKQAISYCGLCSAEKSSADKVMRTPISKQRNKHIRQVLVEAARLAPRYSDELALLYEKERQRGNGNRATLAVARKMVALMLAVERRNTDFVPAAEFRRTAAA

SEQ ID NO: 215328 - protein, 333 aa, unidentified
MVEGTKGSHHKEGTTKMAKHSMVCAGIDTGKHKLDVALDQGPEQLQVDNSPDGHTSLAAWLRQRRVRRIGIEASGGYEQAVVAALRRDGFSVILFQPAQVRAYARFILQLAKNDKIDAALIAACTAATKTIREPPDPRLTALAGHLTMVEQITEDIARLKTRCESCRDERIRQCWKEEITRLRTMARSEFKLLLAAIREHRDLAERLDLMVSVEGVGLKTAVDVLIRMPEIGSLSREEATALAGLAPYDDDSGTRTGQRHISGGRERLRTSLYAAALPAAFKWNPQLIAFYRRLIAKGKSHKQALVACARKLLIFLNTVVARGTPWASNTAEV

SEQ ID NO: 215329 - protein, 365 aa, unidentified
MLKAELSCEADSENDLGGSSEAMYYIGLDVHKKTISYCVKDAAGKVHQEGKTGSTRRDLDSWIKTLPQPRMMAMEATIFTGWIYDHLLPHAEKVKVAHPLMLRAIAAAKKKNDRIDAGKIADCLRCDFLPECHMASTEIRDRRRTLRYRGLLVKQMVQMKNRVSGLLMESGVSYNKQRLHKLGYFTDLLSTNEEISQSILPLLELGREHIVRAQRLDSALIGSLEKDPLLSERLRRLRTIPGVGPITALTWALEIGDYTRFRSVKEAISYCGLCSAEKSSADKVMRMPISKQRNKHIQHVLVEAAKMAPRYSPELALVREREIQRGNKNRATFAVARKMVAYMLAVERRKQDFVPAEEMAGRAVA

SEQ ID NO: 215330 - protein, 336 aa, unidentified
MKYSGIDLHSNNSVVTVTDDSDRVVAEKRLPNDLRKIVDFLTPWREELVGVVVESTFNWYWLVDGLQASGFRVHLANSAAIKKYDGLKHSGDETDARHLAHLLRLDILPTGTILPKEERAVRDLGRKRLQLVRSRTSHILAIENIIARHGGRMNSNQVKRLQPETIDKLELPADVALAIKANHAVIATLSAQIAILEKCLHEKVAPRPEYKWLNTVPGIGQTLSTIILLETGPIDRFKQVGNFASYARCVDSVHKSNFKKKGEGNTKNGNKYLAWAFVEAAHSALHWCPEAKRFYDRKKAKTKAVIATKALAHKIARACYHILKEKKPFDVTRCFA

SEQ ID NO: 215331 - protein, 340 aa, unidentified
MSEITTIGLDLAKHVFQVHGIDAQGTTVLRKRLRRGQVLAFFSRIPRCVVGLEACATAHYWARELGALGHEVRLMPAQYVKAYIKRNKHDAADAEAICEAVQRPTMRFVPVKTAEQQAAQLLHRGREQLVRQRTMLVNALRAHMAEFGIIAAQGLRNVGQLIAIVRDDGDTRLPDMARQVLQVLANQIEQIETTVAALERQLLAWHKTNPVSQRLASIPGIGPIIATAIATTVADPKVFRSGREFAAWLGLVPRQNSTGGKIRLGGITKRGNRYLRRLLINGASANLLRSKATKADPWVIGLRRRRPPLVVAVALANKTARIAWAVMLRQKEYQPGVMAA

SEQ ID NO: 215332 - protein, 400 aa, unidentified
MLSIGIDVSKGKSTVCGMKPGGEIVYAPFEVQHTREGMSELVSLLRSSGEEVRAVLESTGSYHCPVVAALLENGIFVSVVNSLRMKRFCSQSIRKVKTDRIDAMQIALYGLAYWQELQLTKLPEDTYRELQLLARQYYQMTSLLIKAKVDFNAICDQVLPGMQELMSDHAGRHKLSDFVLRYRHTTHILEMGETRFRKDYCKWAEKKGYRNCERMAALIFATAQNGIPVLPNAPSTQIVITEAIRVLHTVEASRDAILTQMQALAKTLPEYSLVREMPCIGDTLAPRLIAEIGDVRRFHSKRALIAYAGIDAPPYQSGKFCANNRHISKRGNRYLRKTGYEVMQSYVMHKPANDPIFTFIEKKRGEGKSGKLAMVAGLNKFLRVYYGKVTELYRSLSAIE

SEQ ID NO: 215333 - protein, 367 aa, unidentified
MMGWMAPVRHLGARMVVGETRHQGEPSMSEITTIGLDLAKHVFQVHGVDASGATVLRKRLRRNQVLAFFAGLPRCLVGLEACATAHHWARELQLVGHEVRLMPAQYVKPYVKRNKNDAADAEAICEAVRRPTMRFVALKTAEQQAALLLHRVRERLVRQRTALANALRAHLAEFGVTAPRGLRNVAPLIAMVRDESDRRVPDLARQVLHVLAVQLEQLGAAVAALEQRLMAWHRSNPVSQRLASIPGVGPIIATALAATVVEPVGFASGREFAAWLGLVPRQHSTGGKARLGGISKRGNQYLRRLLINGASANLLRSKATNADPWVKGLRCRRPSLVVAVALANKTARIAWAVMRREESYRPRAAAA

SEQ ID NO: 215334 - protein, 371 aa, unidentified
MPKLYVGLDVHCKDCVYAVQDEAGTLIGEGSVSTTPEGLLLLRNRFALPEGTTVGLESGTMAFYVARMLHHMGLSPLVVDAYEVRRKAHRPNQKSDRRDAREICDGVRQGSYRSIVHVPPEAITELRETLGRRRHFVRVRTAEVNATKRMLRAHGMGVLARISLGTEKGWGRLESALAADAPMARFVRLHHALWSSAGVQIAALEEWLEQQRVAFAEPVARLQGVPGVGPIIALTAVAVFSDVDRFASAKHVASYAGLVPSTHQSGERDAHGRITRRGSTELRAMLCEAAHHARHVDHPLNPYFRSLCARRGHKMAVVAVAHRLCRILWAMLKRKTPFDLHKLNIEEGPFARTTEHRFRLKKPSAMTPAMA

SEQ ID NO: 215335 - protein, 338 aa, unidentified
MEHFVGIDLHSSNSYIAIIDNDNKRVFKKKVKNDLQNVLHVLEPHRKQIKGIVVESTYNWYWLVDGLMDAGYKVHLANPSAIKQYEGLKHADDVTDAFHLANLLRLGILPEGYIYPKEERPVRDLLRKRLQLVQQRTALILSFENLLSRNLGTRINVNEVNKLREEDVEDIFPEEYLVLSGKASIATINFLGVRITQIEKVLHKCAKVKGEYKKLMTVPGIWRILALTIMYETGPIKRFAKVGNYASYCRCVGSKRISNGKQKGKGNRKNGNKHLSRAYVEAAHHARWNYEYVDRYYQRKMAKTNNVVAIKAIAHKLARACYYIIRDQKEFDPGKLFV

SEQ ID NO: 215336 - protein, 421 aa, unidentified
MERGTQEEFAALVGLDWADAKHDVCIQATGTARREFLSFEHRPEAIDAWVQTLRTRFHGHPVAVCLELNKGPIVSALRNYDFLVLFPVNPLTVAKYREAFTPSRAKDDPTDAELQVELLLKHRDKLKPLQPQSPAMRALAQLVEHRRRLVGDKVRCTNRLTSALKNYFPQVLQWFPEKDTAIFCDFLSRWPTLKAAQLARRSTLEGFFRAHHVRATDVIATRLQAIKSAIALTTDDGVIIPHVLLVQALIAQLRVTLQAIADFDTAIAQRAQDHPDFPLFDALPGAGAVFAPRLLVAFGEQRERFTAADELQKYAGIAPVTERSGKKSWVHWRLQCPTFLRQTFVEWAAESTRHSFWAQVYYQQQRDKGKAHQAAVRALAFKWIRILYRCWQDRTPYDESVYLQALKRRRAPLLHHLANGS

SEQ ID NO: 215337 - protein, 394 aa, unidentified
MSKQYTAEASMNNISIVFIGLDTHKEFFEVAHELDGRDNHVIHDGRISSAKSSVIKMARDFQSKYPQATLHFVYEAGPCGYWIYRLLTSLGHCCYVVAPSLLPKKPGEKVKTDRKDAMKLAHLLKMNDIPIIYVPEAEDEAVRDLSRARQTATNDLNHARCQLKGFLLRNNICYDGTANWSLKHLRWLNELILPHPAQHIVLQEMLNTINERMKRLARLVNELEHQVKQWRYYPVVKAIQAMRGIRFLIAASIIAELGDLRRFDNPRKLMKYLGLTPSEDSSGDKRKLGKISKCGNGRARRLLIEGAHSYKFPAKISPEMQKRQEMLSKEVIDIAWQAQLRLCRRYQRLMHRSKHRNVVVTAIAREMIAYIWAISREVVIAPIDVKKRTARVPA

SEQ ID NO: 215338 - protein, 368 aa, unidentified
MNRVQMVEVPEQAGHTAHRPPPDSAVVMAIDLSRSKLVYCLRWDGAEQRRLSTPAGLEHVRAVVEQYQGCRLHVVYEACGFGYELAWWLQEQQVLTTVIAPSRVERAPGLAVKTDGLDVGMLARKLEERQLRGIYIPPREIHERRQLGRTYAQCVKERKRAQIRLRSLLQEQGRLGPPPTAGWPVYTQWLARQALPAPVQRCVQSLQRIRTIADEEAKRLHAEVLQLGRHPDYAPLTRALSAQPGVGPLSAIRLVLELGNMARFPTAGSLPRYLGLTPSEYSSGEVVRRGHILKCGPGALRALLLQCAWAAVSKAKSPELRAVFERLAPRIGRKRAIIAVARRLAIAVRRRWLAARRAPTVPGAAANV

SEQ ID NO: 215339 - protein, 347 aa, unidentified
MRFYTTQHPFYCGIDLHARTMYLCILRQDGEGMLHRNMPAAPEPFLKAVAPYRDGLVVAVECIFTWYWLADLCAREGIPFVLGHALYMKAIHGGKAKNEKIDSQNIAVLLRGGRLPQAYVYPAERRATRDLLRRRVPLTRKRAELLGHSQNTNSQYNLLESGQKIAYKANRDGVAERFPDPAVQKSSEVALALIGYDDQLLRDVEWTVVQTAKQHDAQTVYRLQSVPGIGKILSLVLLYEIHDMRRFPRVQDFVSYCRLVQCAQESAGKRYGTSGAKIGNAYRKWAFSEAAVLFLRNNPVGQKYLTRLEKKHGKGKALTVLAHTLARAVYYILKRDIVVEVDNLLEG

SEQ ID NO: 215340 - protein, 496 aa, unidentified
MSKLYGGIDIGLKEFHFHAMDGDGNPIGKPRRFTNNVPGMNQLVDHLDVHIHKEGATSVSLGMEATGLYWFPLFQALQQDERIGQWNTQLLAMNPKLVESFRQAYPDVDKSDPVDALIIADRVRFGRGIAPQHIHSEQFLSLQRLTRFYVHLVQQQTDLKNYASSFLYLTFSEWIRCKPFSDRYGATACRLMKKYKSAEEMAEMTSDELEALLKDFSKNHFRDPKQKAEDVLEMARNSFTIPPGLVDSVHLLIKQTLQQLDLLEKHLDRLTKQIEKAMKGIKNPLVSIPGIGLVSAALIIAEIGDISRFEIESKLAKYAGLTWRTKQSGNFRAEETFMTKTGNVYLRRGLMIAAQSMVNHNDEYNDYYQRKFNEATRHAHKRALSLTARKLVRLVHAMLSTNQLYMTPEERMKRNKEVDNQSTATTSVDNVAGEETPAVDAVRNEGNPASDLKKEHKKVKGTAAATSSTRQRVGTHPIQNPRLTQSARNTLHLTPM

SEQ ID NO: 215341 - protein, 403 aa, unidentified
MNAVGIDVSKGKSMVAVMRPFGEVVFSPFEVSHTDKDLTDLAKRLKSLPGETRVVMEATGSYHAPVAWMLHSAGLYVSVVNAMLVHDYGNNTLRRVKTDKKDALKLANYALDQWLTLPEYAPEDDTRQLLKSCYRQYRQYSKVHTVLNNNLISLLDTVFPNANRLFTSPPRPDGSEKWVDFIASFWHRECVSKLSEKAFIVKYQKWCIKHRYNFSEKKAKEIYASAKSSVGVMPKTDAAKCMVEQAVSLLCASSCTLAALRKQMLSLASSLPEYPVVMKMFGVGPTLGPQLMAEIGDVRRFNSKKALVAYAGIDSPPNDSGQVVGKHKGMTKVGSSSLRRTLFLVMTVYLQNAPQDEPVFQFMDRKRAEGKPYRVYMMASANKFLRRYYATVKAYLNSLEKAA

SEQ ID NO: 215342 - protein, 465 aa, unidentified
MSKLRKPILPRQPKDQPIQPQPPKLDALAQINHHAAGLDIGDAEIYAAVPESAADPAVRVFRTFTTDLQGLADWLATCHVDTVAMESTGVYWIPIYELLEERGFQVYLVNARQLKNVSGKKTDILDCQWIQQLHTYGLLQPSFRPPEDICALRALIRHRGNLLQSCTAEIQHVQKALQQMNLKLTNVLSDITGLTGLAIIRDIVAGERDPHKLATHRDPHCRKSEAEIAASLTGNYKREHLFALKQALAAHDFYQEQLAACDAETESLYHTLDAQVDAMAHPLPPPRRPHSRRGNEPRFDLRTELYQLAGVDLTTVDGLDVLTVQAVLTETGVDMSRWRTSKHFASWLCLCPENAKTGGKIIKRGTKRSANRAALALRLAARSLHHSDSALGAFYRRMCSKLGKPQAVTATAHKLARIIYAMLQSKTPYKDPGADHLEAQVQERKVKQLQRQAKELGYELTPSAA

SEQ ID NO: 215343 - protein, 413 aa, unidentified
MDKIYDICCGIDVHKKLIVACLNHKRKKELREFGATTRELMELAEWLQKNECEIVAMESTGSYWKPLYNIMESYGLHAIVVNPAHMKAVPGRKTDVKDAEWIAELLQHGLLQPSYIPSKDQRELRELVQYRKSLVGERTRELNRLQKMLEGANIKLSGTVTNINGKSARKILEYILSGNEIDEKKYDEMYEKRIIAHNLKASKEQILDDLKGFMSPLQRRMLKELLQHLDELNVHIENLNDEIDNFMKPEEKQASQVIQDVTGIGNTSAQTIIAVIGTDMERSPTDRHISSWAGLCPGDNVSAKKRKSGKIRKGNALLKSTLVLCAHAAVRHKSSYFHAQFKRISTHRGKKRAYVAVAHSILIAIYHILKDGVKYQDLGAEYYNQFNAERKIHAYLKKLKALGWEPPKEAVPA

SEQ ID NO: 215344 - protein, 329 aa, unidentified
MNQFVLGIDISKDTFDVALFKAERYQHRVFANTPPGFKRLHRWLRSQGVEYVHAGLEATNRYWEDLAEHLYKQGHAVSVINPVRIKRYGESKLHRNKTDKADATLIAEFCWKEKPRLWEPLPLHVKQLRQMVRRLDNLQTMQQQERNRLQPGITSAWVVADLEDHLSDLQQRIKSLKAVIQQHITATPELKRNVDLLVSIPGIGLLTAARLLGEIGDITRFDNPGQLTAFAGLNPKGHLSGSSVYKKTRISKEGRPFLRRSLYMPALVARKHNPIVRSFCDRLAESKLHPMAVVVAAMGKLLHLTYGILKNQIPFDPNYAKSLPLTLDI

SEQ ID NO: 215345 - protein, 372 aa, unidentified
MKKVSTVAAKQAKNFPARSFSEQKLTVGLDLGDRSSWYCVIDDSGAVQMEQRLNTTPKAIGEVFGGMPRSRIALETGMHSPWVSRLLTELGHEVIVAHARNVRLIGESRKKDDRLDAQTLARLVRIDPQLLCPVKHRSAQAQANLTVIRARAGLVRARTALVNTARGLAKSYGERLRSCNVRNMNPEKAAGLSPELQSALEPLLIALQSLSQQIGEYNERIEKLAEQSYPQVALLKQVKGVGTLIALTFLLTLEDPHRFAKSRDVGCYLGLQPGRRNSGQSQPQMHISKEGDPYLRTLLVQGAQHILGPFGPDCDLRRWGLKLAERGGKSGKKRAIVATARKLAVLLHHLWVSGEVYEPLHTHQRTTMLAAA

SEQ ID NO: 215346 - protein, 351 aa, unidentified
MNSIDYIGFDIHKKTISFCAKAQDGRILDEGTIPARRTDLSAWAKRRSRPWWGAMEATLFTGWVYDHLKPLAQELKVAHPAMLKAIAASKKKNDKVDARKIADLLRCDLLPECYMAPSATRELRRVLRYRNLVVRQATRMKNRIAGLLMETGTLYNKERLHGKAYFSELLGSLREIPASVIELLKLSRAQLEFFATIQKRLVKGLRADAGLKERVERLQSIRGVGEILALTWALEIGEVKRFPSIADAVSYCGLTSAQHNSAGQEHRGPISKQRNKHLQTILIEAGKLAPRYNPQLAAVHEGELKRGNCNQATLAVARKLVAYLMAVDKSGKPFQVRISAGEASQHGQPVG

SEQ ID NO: 215347 - protein, 444 aa, unidentified
MSKHTFNPDGAEVRSFEVVLPPQSRGSLREQGMRRRKLARVRDRLVVGLDLAQTRQAVTFSYQGQMLKRMRVDCAAQHLAQALEPRIREICTEFGATGVVIAMEPASYYWELAAEGFEAAGLDYVLLHTLSVKREREATRYTPEKMDPRDADLACSLAESGRFTEGRLARCEKRAALDAIAREYMLLRARSAAEVARLKSFWGRLLPEFQELLKEPDGVCALAISRALLPFSAMAALSEEKWIERVRAHAEGRILVGVAARLLELVKAAHADPHRRSGEGMPLRIHMAGQRRALLECQKAEAAQQAMALYNGFDEAVLMDSIPGSSPLYNALTLGLAGDFRDYDCGRAVVKLAGSEVNEFASGEWRGRSRISHRGRAQLRTAAYQQAKMLVKGSTVFQARYTHLLGTLTKQQAYVAVANAYLRTAHLLVTTGELWNEEARVRRS

SEQ ID NO: 215348 - protein, 321 aa, unidentified
MTPAKVYVGIDVAKEWLDIAQRPGAETWRLSNDEAGIAELVGRLGRLQPVLALLEATGGLEMPLVGALMAAELPVVVVNPRQVRDFARATGRLAKTDAIDAQVLAQFAEAVQPALRPLPDAATRQLRALLTRRRQLVEMLTAEKNRLRTAPPAVREHVKKHILWLERSLSDLDSDLGQAIHSSDIWRAQDDLLQSTPGVGPVVSTTLLAELPELGILNRKQIAALVGVAPLNRDSGSFRGRRTVWGGRSQVRAVLYMATLVASRRNSAIRAFYERLLAAGKPKKVALTACMRKLLTILNAMVRHQSSWRIMHLTLETQDSC

SEQ ID NO: 215349 - protein, 287 aa, unidentified
MSEQIRFDRNLATYVGIDVHPATHTAFAMNRFEEGRGSLRFENTHNGIQQFLSWLSCVDGERSNIIVGVEGRGGNGHALVGQLLDNYDKVYEVNPLYTKHRRSFGTKQEKTDERDAKLIAEVLTRKLHELPAITKQEYLPRQVVLKKSVEFYDEATLSGARFKNQLHRLQRELTLATNKQEKHILTIAIKEKQADILRFAKRQKAFVKQFELLLEGNSKNLTTFRKINTIAAARIVAHVNGVGRFHSLDSFIRYTGIAPVERSSGKTTKYKQNYGGNRQLNTEVLQS

SEQ ID NO: 215350 - protein, 394 aa, unidentified
MILVGIDIGKNQHTFSIVDMNTGEILSNPSLFNNNQDGFLFLIKKLNSYSKSDLLIGMEDTGHYHFALLKYLLDIRYTVALINPTTTDLTRKLQGGITKNDPLDSLTICDVIGSNQRKKPYRIIKVNRFDLYEQKQLTRHHHNLKEELNIYKNRLQKCIDIVFPEFNSLFRSKYGIVYMNILKTFASAENIAAADIRTIRKCFEYDGRGKRITLSADQLKTAAKTSIGIPSVAEEIQIRHLVCQIEMIEEQLSEIDKKIEEFSLQNNSPILSIPGISHFSGTSILAELGDICNYTKAAQIIKFAGVAPYHYESSQFTAQHTAITKKGSRYLRKTLYQIIFPVINHNKVFTTYYNKKLAEGKGHRSAQGHCIRKLLRIIYHLLSTGQTFDPALLI

SEQ ID NO: 215351 - protein, 412 aa, unidentified
MDVYCGIDWAEDHHDIALVDRDGQLLARRRTGDDAAGLAALLALLAEHGDSPDDPIPVAIETPRGLLVACLRATGRQVYPINPMAVARYRDRHSVAGKKSDHGDSVVLANVLRTDLHAHRPLPADTELTQAIAVLARAQQDAVWDRTTAHNKLRSHLREYYPGFLAAFVPVSGGIMRPEARTILAAAPTPADAAKLTLAQLRGLLKKAGRSRGIDTEAARLRDAFRVAQMRQLPLVEAAMGRQALALLGQLDAACAAAADLERAATESFNLHPDAGIITSFPGLGALTGARVLAEIGDDRSRFQDAKGLKAYAGAAPITRASGKTRSVTHRKIKNNRLNAAGYCWAFSALTASPGARAHYDRRRDDGDRHAAAQRNLFGRLLGCLWHCLLTGQDYDETTAFPATTKKISQAA

SEQ ID NO: 215352 - protein, 350 aa, unidentified
MEYIAFDSHKRYTFASVEEHTGTILRDARIEHQRGAVKEFLSAWKAGTPVAIETIGNWYWIVDEIEKAGMVPQLVHARRAKMMLASVNKTDKLDCHGLNRLQRTGTLPTVWIPPAQIRDLRDLPRTRMVLSKERTRLKNRIHATLAKYAISIEGTSDLFGKRGREELKKSLDLLPPHSRFSVERLLDMLDMVQKQIGLFEERMKETFATSRELEILQTLPGVGFILAVVILLEVGDIGRFPDATRFAAYSGTTPRVSSSGGKTRYGQLRPDVNRYLKWAFIEAGNVVCLFHRRRPYRHVSRLYLRIRQRKGHQKAVGAVARHLAEATYWILKKGEAYREPQKKTVSSTKG

SEQ ID NO: 215353 - protein, 400 aa, unidentified
MLSIGIDVSKGKSTVCGMKPGGEIVYTPFEVQHTREGMSELVSLLRGSGEEVRAVLESTGSYHCPVVAALLENGIFVSVINSLRMKRFCSQSIRKVKTDRIDAMQIALYGLAYWQELQPTKLPEDTYRELQLLARQYYQMTSLLIKAKVDFNAICDQVLPGMQELMNDHAGRHKLSDFVLRYRHTTHILEMGETRFRKDYCKWAEKKGYRNCERMAVLIFATAQNGIPVLPNAPSTQIVITEAIRVLHTVEASRDAILTQMQALAKTLPEYSLVREMPCIGDTLAPRLIAEIGDVRRFHSKRALIAYAGIDAPPYQSGKFCANNRHISKRGNRYLRKTGYEVMQSYVMHKPANDPIFTFIEKKRGEGKSGKLAMVAGLNKFLRVYYGKVTELYRSLPTIE

SEQ ID NO: 215354 - protein, 345 aa, unidentified
MPIVGGLDIHRKQLTFDYFDTVTGEVKRGQVAPADRAHLRSWLGRFADQDDVAFAMEGCTGWRYVAEELAAAGIAAHVGEPADTAAARGRKRHPKTDKTDSRHLRTLLAEGRLPGCWVPPAHILEYRALLETYHDLRTAHTAWVQRIHAVFFHQGAPALGEGALRTEQDLARLRAAAAAHLSAAGQLQVATALEMITAVEALMDVLRRQLREAARQLTGAKVLAERLYGVGPVTALALTCWLGGAGRFSSSRKAVRFTGLDVTVWSSDRKGPPGRLSRQGPPVLRWAVYEAGKAHARSSAPDHGYYAQVKDRTNGKRAALSEARKIVRQACHILAELGDDALTAA

SEQ ID NO: 215355 - protein, 415 aa, unidentified
MSRPRCKRSTKSRKTFLLQKPNGELTPRVQKVGPEHFGIVAVDCGKVRSRYLLADFYGRAILEPTPLPHTRGDFQAAIERLRQAMSQHDLRDVVVAIERTGTYHRPVQEAFRRSGFETRLVHPFTSKQYRQPADPGNKTDDTDLPAIFRATSQGFGLSEPIWPDDYLTLHLFRRHRSDLVAKNSMLCCQIREVLHAAMPGYAECFSNLWEAPVALALARQTTSVESVRQAGLQGLQEIVAQAKIVCRRDTLHKLLAWSEQAPPGHPHSLDLRRILHSLDDDRRGKTQQILELERTLAHLVVRTPYVLLLAIPGINIVTVADLAGELGPMYFYLNANAITGRAGLMPSRYQSAEVDHANGPLRRRGHRRLRAVLMQTADNLVACNHYFHARAELWYRAGKDARWIRVKIDGRIDKQ

SEQ ID NO: 215356 - protein, 320 aa, unidentified
MGVLSPLGYYGVRMNSYVGIDVSKDELVVHVLPAQQDRVFPNTTQGLVELVGWLVELGGCRVAFEASGGYERALLDALHQAGVVAMRLPARRPRNLARALGLKAKTDALDARVLALAAQMLPATATPPATAPVQELREWLQLRTALVQERDNHRRRIQQIRQASVQTFLRSVIDSLQQRIAEVEQQLRCALERCPVQIAAAPGLGPILRATLAARLPELGQLDRRQIASLIGLAPYNRDSGRWRGQRCIGGGRADVRRVLYMATWAAIRARSPLASTYQRLVAAGKPKKLAVTACMRKYLTMLNAMARDQAPWAPATSTA

SEQ ID NO: 215357 - protein, 467 aa, unidentified
MARRHKNVKRKNRKGQERSLKAVQPHAAGIDLGSREHWVAGPPLPDGSPNVERFGATTPELLRLAGWLEQQHIVTVAMESTGVYWIPLFEILDSRGFEFHLVNARQLSHVPGRKTDMIDCQWLQLLHACGLLRGSFRPCDDICRLRALIRERNTIVDQRSDWVRRMQKSLDQMNVCVHHAVSDITGVTGMAIIRAIVNGERDPHVLARLRDGRCRKSEEQIVAELTGNWRPEHLFNLEQALKVYDQLCAVVADYDAEILKYIESLQSPEDKNSSAPPPASKAKERKFVTRGQEPLRQALYRMSGFDLTRIDGIGLDTAAVVVGELGADFSAFADESHFVSYLRLAPNISISAGKKVPSKFKSTTCTRVGQALRMAATTLRNSKTALGAYYRRISWRKGASVAVFSTARKLAQLIYRLVRYGQAYIDEGADAYEARFTQRRLKLYAKTLKEMGYKIEPLITHKTAEAL

SEQ ID NO: 215358 - protein, 368 aa, unidentified
MGTLYIGLDVHKVSISVSIAEDGRDGAVRFLGEIPNTPTDVAKLAKRLAKDGNRLEFCYEAGCCGYGIYRQLTELGHGCTVVAPTLIPRKPGDRVKTDRRDAQKLAVLHRSGDLTRVWVPDPVHEAMRDLVRARLDAVMALMRARQQLLAFLLRHGRTYEKGKNWTQRHRVWLAGQVFDQPVHQIVFQDYVEAIFTAQDRRDQLVARITALIPTWSMGPVVEALRGLRGLETISAVTFVAGIGDLSRFDSPSQLMAYLGLVPSERSSGDHIRRGGITKTGNGEARRMLVEAAWSYRYPPRVAQEKVEVLVRLPKPVRDIAWKAQVRLCDRYRKLTHAGKKPTVVVTAIARELAGFAWAIGQQVKPAAP

SEQ ID NO: 215359 - protein, 339 aa, unidentified
MQVTTVGLDLAKNIFQVHGVTETGEVAFNRPLRRAQVLTFFERLSPCLIGIEACASSHHWARELSQLGHTVRLMPPMYVKPYVKRGKSDAIDAEAICEAVTRPTMRFVEIKSEEQQALLSLHRARDFIVRQRTQLINMVRSLAAEFGITIARGVARAIEFAKSIIDGKQPELPDLAQDVLRVLSRQLMDLHNRLDWFETMLRIQARLSRQAQLLQTIPGVGPVTASAVAATIGSGRQFRSGREFAAWLGLTSRNHSSGGKERLGKITKMGDRYLRQLIVVGMTSRVRQVATHPERADPWLTKLLQRKPARLATVAMANKTARIMWAILTRGEPYKPHAV

SEQ ID NO: 215360 - protein, 331 aa, unidentified
MKYNNSKGTLKVLGIDLAKQSFQLHGVDEAGHTVLKKKLKRKQLSAFIANLPPCLIGLEACGGAHFWVRRFTEQGHTVRMIAPQFVKPYVKSNKNDAVDAEAICEAVQRPHMRFVPVKSIEQQDIQSLHRIRSQLIARRTAQANQIRGLLLEYGIILPKGISYIRKEIPEILENAENALTSLFRELLNELYDEMVHLDDRVCSLEQKLEAICARNQDCQRLLTIPGVGLLTATALIAAIGDITVFKNGRELAAWLGLVPRQHSTGGKPMLLGISKRGDSYLRTLLIHGGRSVVRVAHKHQDKRNQWIDEIKQRRGENISNSALKVSNELCG

SEQ ID NO: 215361 - protein, 451 aa, unidentified
MGGEPVEIDAEEHEQIVERVAAIDVAKASGEVCTRVPHASIPGQRVTRVWAAAATTNAIIELAETLARERVERVVVESTSDYWRPFVYLLEARGLTVWLVNARDVKQVPGRPKTDKRDAVWLAKLNERGMLRPSFVPPVEIRRLRDYTRLSTDLVRERTRHVQRLEKLLEDALIKLSSVASDIMGVSGRAMIDALIAGERDPYALAALAKGQLRKKHDPLVEALTGRFDDHHAELARLLLDQIDGLSANIDTLTLRIDELIKGIPAAQAPIGDQPPGSGGDTAAAALPAVERLDEITGIGLKTAQVLIAELGLDMAQFPTPGHLVSWAKLSPRTIQSGTRTRPSTTGKGNGYLKAALGEAAAAAANTNTFLGERYRRLVKRRGKLKALVAVARSILVIAWHILADPTARYSDLGADFYATRIDRNRRQRHLVRQLQALGYTITVETPPTAA

SEQ ID NO: 215362 - protein, 313 aa, unidentified
MTPSTIGIDISKDHLDVHRLSDGARARFANDKTGHKALIKWLSKVPVARVVYEPTGPYHRGLEHALGSVGLPLAKVNPRQARRFAEATGRLAKTDRADAAMLARMGELLALQSGPMHGKILNDLKELHVARQALVKDRTAAKNREKTLSIALLKRQNMARLKEIGRALAAIDQVMKTLIASDASLHRRFDILLSIPGVSMLTACALLIDMPELGTLDGKQAASLSGLAPIARQSGHWIGRAFIRGGRANVRQALYMPALVAARFNPDFKHTYGRLIGAGKPPKVAITAIMRKLVVLANALLRDDRSWSPNLAC

SEQ ID NO: 215363 - protein, 421 aa, unidentified
MRGFGLDVHRDFCEVAIAEEGRVRSAGRIATRVASLELFAGSLGPGDVVALEATSGTDKIVSILQRHGVRVVVANTRKLKSITEAKAKTDRLDARTLARLLMSGLLDEVWTPDERTRTLRRLTNRRERIVRARTRAKNEAHGVLARNLCERPPVTDAFGKAGRRWLAELQLPIDERLTLDGCLRQVDFLDAEVAALDREIARLALTWPEVLRLMTVPGVNVHTAATFMASVGDIRRFSTPRELVSYLGLDPRVRQSGNAPARHGRISKAGASEARHMLGEAAWKVTLTPGPLHAFFERVRARRGPQIAATATARKLVVLFWHLLSREQDYAFARPAMTRNKIRRLELLSGAPSQKGRKGIAGGKSTAVYSAERELSRQAEAAYRRLVSDWKASGPTKVGAGATPGRASQRPSKGKAARQTP

SEQ ID NO: 215364 - protein, 336 aa, unidentified
MQLHCGVDLHGDNGYYGIINELGQRVFNKRLPNDLKEVLGALSPHREGLSSGIVVESTYNWYWLVDGLAAKGYRVRLANPAAMERYNGLKNTNDETDAFFLAELSRLNILPEGYIYPKEIRPVRDLLRRRLMLVHQKTAHILSFQNLVARERGERASVGSITKLYPAEVNPLFADKRLVMMGQTNIETIRFLNKQIEKAVLGEVKLKPEYEKLLTVPGIGNILALTIMLETGDIGRFREAGNYTSYCRCVKSLRTSNEKKKGENNRKNGNRYLCWAYVEAANFCRRYCPEAKRWYQRKLARSKRVVATKALASKLSKACYFIMRDHVEFDVKKIFG

SEQ ID NO: 215365 - protein, 416 aa, unidentified
MLFVGIDWSDRVLDFHLRTSDGKVLAQGEVRPSVEGLAELFTTLERHGRPEEIGIAIETSHGAWVQALLDRGYKVYPVNPKTVERFREALSAAGDKSDKIDRKVLAMFLVTFHRDNKPLRPDAPEIISLRISCQDRLRLVEERTAKLNELGAMLKCYYPAVLGLFGDFKSYIALDFLLRFPTQDQMQALSERRFRNWLKRHHYPSVQRIDDMVDILERPALSVAEHLQKSKKSLICYLANSIKLLNAQITERDKQITEQLNELPEANWIRSLPGAGDVLAPSLLACLGRDQQRFDSAADARAFMGTAPVTKASGNYRSVHFRRGCWKFARRTLQLFADKSRHQCPWAQAFYEKQRNSGHNHHAALRALAHKWLKIILAMRRTGTRYNEQTFTNSQRRYLLKIPKLTTKNSNFLIGA

SEQ ID NO: 215366 - protein, 402 aa, unidentified
MNAVGIDVSKGKSMVAIMRPFGEIVSSPFEIKHTTSDINSLVELINSVEGESRIVLEHTERYYEVLAHQLSKANLFVSAINPKLIKDFDNDSLRKVKSDKADAVKIARYTIDKWQNLKQYSVMDELRNQLKTMNRQFGFYMKHKTAMKNNLIGILDQTYPGVNTYFDSPARSDSSQKWGDFASTYWHVDCVCKMSKNAFINHYQNWCKRKKYNFSQSKAEEIYGKAKELVPVLPKDDITKLIIKQAVDQLNSVSTTVESLRTLMNETASKLPEYPVVMAMKGVGTSLGSQLMAEIGDVSRFTHKGAITAFAGVDPGVNESGSYEQKSVPTSKRGSSILRKTLFQVMDVLIKTHPQDDPVYQFIDKKRAQGKPYYVYMTAGANKFLRIYYGRVKEYLSSLPES

SEQ ID NO: 215367 - protein, 431 aa, unidentified
MHMVTPIALQDRKYVLSVGLDWADQTHAVCQRAWSDGQRQVLQIGADPASVQAWLAQLKTLAGPQGRVAIGFEQNRGALFEMLRPHTDWIDLYPLNPLTVSKYREAFFTSGAKDDPIDSQLIEELLYHHLDRLRPYQAPQSELRELDLLCQQRRKAVDAAVACQNELCSLLKVYYPVALELHEELRCTLSLQFLKRWPSLQVLKKAKPQTLRAFYYQHHSRSQSLIEERLQKIAAAQAVTDDPALIRPLVLSLQRLVNQLLTLQASIAAFDKATREIFAKHPDHLIFESLPGAGPQMAPRLLAAFGSNRAALTNPSEMQKKSGIAPVLDRSGKAKTIRRRWCRSKFLCQTFHEFAAYSIPHSTWAKAYYEELLARGKSHNAAVRALAFKWIRIIFRLWQDRTLYDENRYLQTLKNRRSPLSQKFLTPTFKT

SEQ ID NO: 215368 - protein, 401 aa, unidentified
MNAVGIDVSKGKSMVCVMRPFGEVVLEPFEVLHTAQNLHDLAEKLKALDGETRVVLEATGNYHKPVAFVLHDAGLFVSVVNPVLIHDYDNNSLRRVKTDKKDAVKIANYTLDKWTRLRQYLPEDDTRLALKSCYRQYQQAVAIRTMLKNNLISSLDLTFPDANKLFSSPVKNNGCEKWVDFIGDFWHSECVSSLSANAFAKKYLKWCQKHGYVFTRSKSDEIYACAVNSASLPKSPTSKLLIQQQVAQLKAVSQSVAAFRQEMLRLSQQLPEFDTVMEMYGVGPSLGPQLMAEIGDVRRFSSKKSLIAFAGIEPQPNDSGKVVGNDKGISKVGSAVLRRTLFLIMTVILQTQPQDEPVFQFMNKKRSEGKPYKVYMMASANKFLRIYYAKVKAVMDSERSQ

SEQ ID NO: 215369 - protein, 386 aa, unidentified
MTVRAINLPAAMHVETARCLFALELSKQSWVIGFIRPFSSKVSRRILSGGDWEGLLKLIEEVQTRASRETGRAVEVMSCYEAGYDGFWLHRLLEAHGIRNYVIDPASLQVDRRARSVKTDRIDTERLLRSLMAYLRGEPKVWSVVRAPSIAEEDARRLHRERDRLISERVQHVNRIKGLCALHGIYDYQPLRPQAMARLEELRTAEGLSLPPRLKSEIKRELQRLELVVEMIATLEAERDAIIEDAASTHINAKKIRDLHKLKAIGPEFAAVLVGEIFHRTFNNRRQLASYVGYAPSPFQSGNVARDQGISKAGNSKGRTTGIELAWLWLRYQPSSDLSVWFRARVGATKGRIRRIAIVALARKLLVALWRYLETGLVPRGAVLKG

SEQ ID NO: 215370 - protein, 408 aa, unidentified
MDVVNNHCCGLDVHKKSITACAITPKGKEIKTFGTMTHDLFQMVDWIKTKRCTQVAMESTGVYWKPIYNLLELEEIQPMVVNAAHIKAVPGRKTDVKDAEWIAKLLRHGLLQHSYVPNREQRELRELVRYRRSLVEERAREISRIQKVLEGANIKLSSVASDIMGVSGRAMIGAIINGVNDPEILSSLAKRSLKKKKDQLERALVGSVGPHQKMMLKTQLSHIEFIDQQIELLSVEVQQRMQPYEEDIELLDTIPGIGRGHAEQLLAEIGIGMEIANQFPSAPHICSWAGMVPGNNESAGKKKSGKTRKGNKKLRSALVEAAHSAAKTKNTYLSAQYQRLAVRIGKKRAAVAVGHTILTIAYHILNRRVPYIELGADYFDKRKKEIVIKQSIKRLETLGCKVSIEAIA

SEQ ID NO: 215371 - protein, 410 aa, unidentified
METVFARVAALDVHKARLTACVRVPAAAGGREQLLAEFETTVPGLVVLRDWLEAHAVTHVAMEATGVYWQPVWHLLEDRFELTLCNARHVKQVPGRKTDVSDAAWLCQLMEAGLLRASFVPPKPQRTLRMLTRYRKTQIQERQREANRLQKTLEDTGIKLGCVASDVLGVSGRAMLEALVAGTSDPAVLAELARGRLRKRLPQLRQALQGRFEPQHALVIGAILAHLDFLDEQIELLSTAIEEQLAPFFPGAVRLASTMPGVKARSAEVLIAEIGADMSRFPSAGHLASWAGRCPGNNQSAGRRRRGQARKGSKWLAIALEEAAQAAIKTNGSYLQAQYQRLRPRIGHGRALGAVKHSMLIAYWHMFTTGEPYRDLGADYFTHADPQRATRRLVAQLERLGHHVTLEEAA

SEQ ID NO: 215372 - protein, 443 aa, unidentified
MSRAKALTRGDRRRNERLVRLRSIVRRDYAIVAVDLASAKQAAVVADHDSIVLGRRMFSGDAWVIDDILDWAEPIAAKAGFAGVVLGCEPTGHRWKPLLDRARARERELVCVNPMLVHRGREEEDFTRDRSDFKDATIIAKRVAELRCYVPYALEGHWCRLRHLGARRNDVLVAAGSARLRLRDLLECAWPAVLSAASEALDALTWRAAMAVATDPEQIAAMSLDAFAAAVREQLPRWGGARRNLRILRAIHAAAQAPGGVATERAAACERAAYALDDWHRALDQLADVEARMTAVLDTLGLTELVTTIDGLSAVGAAAILAETGDPARYDCARTWAKHAGLCPRANESGNFHGATTVSRRGRPALRTAAWRAIWGALRHNKIYADRYTHLTTRPGNPLRDGQARAAIAAALLRQLFVVVTRRVAWDPALAAAPAEGVAPQAA

SEQ ID NO: 215373 - protein, 485 aa, unidentified
MAKHRMSTFERLESGRLNRKQRRELGRQVAAADPGLTIVHANAGGIDVGNESHYVAVPPDRDPNPVQEFGCWTAALNQMAKWLKSCRIDTVAMQATGVYWIALYDVLEQHGIRVVLANAQHTKNVPGRKTDVQECQWLMKLHTYGLLRDSFRLAQEMEGVRTIWRLRDRHVKEAGRAVQHMQKALTKMNIQLANVISDINGLSGQQIIAAILQGERDPWKLADLKHYSVRASREEVARSLEGNWREDVLFELQQAVDSYHFAHRQMLECDRKLEGYLASLPPRMLDIPAQPEDTQAATLKKKTKKKKKPSGNQPHLDLKTELKRICGVDLTSIDGVDVMTALTIVSEIGTDVSRFKDENHFASWLGLTPAKDISGGKTIGRGKRKVKNRVAVALRTASTTLLKSDSYLGARYRSLRRQLPSFTAAVKAMGRYLAVLIYRLLTKGEVWVDRGATQFERRRTEQELASLTFKARVKGFKLIPITDPS

SEQ ID NO: 215374 - protein, 389 aa, unidentified
MIYVGIDVAKDKHDCCILGSEADKLFPVFTIPNNKAGFDELYEKMFSVTDDKTKIKVGLEATGHYSLNLLGSLIDKGLPTCVINPLHTNLYRKGLSLRKTKTDKVDARSIAMMLMTNKTLKPYSDISYHNEELKSLTRYRFDKVQERAKLKSSVARLVNILFPELEKLVPSLHMASVYSLLSKLPGASYITECHLTHLKNLLETASKGHYGRDMAITLRNTARDSIGSVIPAKSMELKHTIHLIKVMTEEIDEIEDSIKSIMDTCNSPIMTIPGISYRMGAMILAEIGDFTRFNYADQILAFAGLSPSTYQSGQLDSSYSHMEKRGSRYLRYALFNAAKFVCKWDENFGAYLSKKIGEGKHYNVAIGHATKKLVRTIYQMELTGEAYRR

SEQ ID NO: 215375 - protein, 347 aa, unidentified
MAIVGGFDVHRAQITFDYLDTETGEIATGQIRPATRPTLRSWLGRFDGRGDAAFAVEGCTGWRFVVEELRRAGVAAHLAEPADTATQRGRKKRAKTDRADARLQRDLLGQGRLPESWIPPAAVLEVRTLARLYVALMAERRAWQQRIHAQLFHQGVAAVGQLLTGEGRAALVDAELSPAGRQMVQTALAAIDALTALILPLRAQLQTIGARQPGCRALTEEYGIGALSGAIIWAELGDCRRFATSDQAVRFAGLDITVWSSDTRRAPGRLARQGSPELRWALYEAATCAARPTSPDHAYDVAARDRLDGKLATLSVARKLARRCDHALRRLGDDAWTTSPTAAQAAA

SEQ ID NO: 215376 - protein, 412 aa, unidentified
MNQDKLYVGIDVSSKNNVCYLMYSDGSKHSSFSVPNNRNGAKLIVDRVISVLLSQDIPQVVIGMEATSVYGDNLMRFLRESGSLGRFERSLHMLNPKQVKKFRDAYSDLPKNDYVDSYVIADHLRFGRINKEVCMDDYKYQALKMYTRARHQLVQELTREKQRLLNTVFISFSGLTQEKIFSDKFGATSMALIEEFSSLDELAYMSTDELVDYIRKKGKNHFENPEEIAEAVQRAAKNSYRPPQVIADAAKQMLAISMNTIRLLQKQIKEYDKAIEKMLEAFPQTLTSIKGIGNIYAAGIIAEIGDINRFPSQAGLAKYAGLVWTQHQSSDFEAEDKRMIQGGNHHLKYYLCEAANALRRCDPEFKRFYALKYKEANKHNHKRALALTARKLVRLVYTLLKTNRLYIPPEEY

SEQ ID NO: 215377 - protein, 343 aa, unidentified
MKLSYVGVDLAKNVFQLHGVDRSGKAVWRRRLRRHQWLGALMEAADPSCVIGMEACTGAHHWARQLQARGYTVRLIPPQFVKPYVKSNKNDANDAEAICEAMTRPHMRFVAVKSMQQQDIQATHRIRAELKDQRNAKTNQIRGLVAEYGLVAPQTLLALRRAIPDWLEDAENGLTDYFRALLHGLWGDLLALDDRIKELDKQIEQLANGNEVTRRLQQLRGVGPMVATALVATVGTGEQYRKGRQMAAALGLTPRQNSSGDKHRLFGISKRGDAYLRTLLIHGARAVVSQAKHRDDRLSRWVTDIAKRSHPNVAAVALANKTARMAWAMLQHGTDYDPALAVS

SEQ ID NO: 215378 - protein, 460 aa, unidentified
MNPKRSKSTNGGEMPMVHPNAAAIDVGATMHMAAVRADRAPGPVRSFGTFTADLHRLVDWFTECGVETVVMESTSVYWIPIFELLDARGFTVFLVNARDAKHVPGRKTDVSDAQWLQRLHSFGLLRASFRPKGQIAELRAYVRQRERLLEYAASHIQHMQKALTEMNLQLHHVVADITGATGLRIIRAILAGERDPEALACLRHYSCHSSAETIAKALTGSYRAEHLFALEQALALYDSYHEKASACDVRIEAVLKELSIHRGHGHGSAPRASRRRNRTDQANALAFDVREALFALLGKDITTIDGLGPYLSLKLIAECGDDLSSWPSAKHFTSWLGLAPSNKVSGGKMLSSRTRRSGGRAAALLRLAAVTVGRTDTALGAFYRRLSARIGKAKAVTATARKIAVLFYNAVRYGMDYVDPEASSYETRYRTRVVNNLHRRAKAFCFVLQPLEPKVCAAVS

SEQ ID NO: 215379 - protein, 345 aa, unidentified
MKCNLVSIDLAKSIFQICGFDDDRKVLFNKKVKRSNLIYELSKIDPTNIVMEACYSSNPWGRRIERLGHNVFLIPPFAVKPFVIGNKNDHNDSIAIGEAFFRPRIRFVAVKTVEQQDIQSLTRIKDLLIKHQTALINQLRGLLAEYGLVMPKTRAALCHAIPYFLEDAENELSPVSRSFINRQYENLKHTIEQIEAVKQELHELVKDKADYQRLLTIPGVGPIIAATLMGTVPDPESFKNGRQLAAWLGLTPSQYSSGEVNRMGAITKRGNSTLRRLLIHGARSVLNWCDGKSDSLSCWLKRLKIRMPGNKAAVALANKLARIIWRVLAKKEVFNVRLACAGSSS

SEQ ID NO: 215380 - protein, 372 aa, unidentified
MSEITRALIARVGVDLAKRVIQVHAVDAAGRRVVSRAFKREQFIAWCVQLPAGCLVAMEACSSAHHWARKLRALGLQARLIPANFVSPYRMQGKSGKNDANDAAAICEAASRPNMRFVPIKSCEQQGVMSLHRVREGLKEERTGCINRIRGVLAEFGLVFGQGPKLLRAELADVIEDASNELSAMARRVLQRAFDHWRELDEHMRWCDRQVGQHVRTSAAAQRAAKITGIGELGASALTAGVGDFNQFKGGHQFGAWLGIVPSQNSSGGKTSLGRITKRGDDYLRTLLIQGAKAAVMSAGKRDDPISRWLVQLVARVGWQKACVAMANKNARILWAVMTREQGFDPRHVSEKPQPANERIAAVAPPQAGCPA

SEQ ID NO: 215381 - protein, 331 aa, unidentified
MAEDPSSVIAVIGIDIGKNSFHVIGLDERGAIVLRQKWSRGQVEARLANMLPCLIGMEACVGAHHLSRRLRALGHDARLMPAKYVRPYSKGQKNDFRDAEAIAEAVQRPTMKFVATKSADQLDLQALHRVRERLVRQRTGISNQIRAFLLERGVAVRQGLRFLRAELPAILAKRCDVLSPRMVRLIEDLAGDWRRLDERIESLSGEIDVLARQDAGCERLMSVPGIGPIISSAVVAAIGTGDAFEKGRDFAAWLGLVPKQISTGDRTILGKISKCGNRYLRALFVQAAWVVLIKPKSWERHGLKPWIESAKKRLHHNVLAIALANKLARIA

SEQ ID NO: 215382 - protein, 434 aa, unidentified
MNKRNKKNKRSNNLLQIREAHALIVGVDIAKKSHWARILDGKSGIEVDTAFNFKNSTEGFERLLGRASRTKERIGAEKIIVAMEPSGHFWKPLASYLLRVGITVVLVNPYHVKQQKELDDNSPTKNDRKDALIIAVLAWQGRFFGCYLPKGIWAELRGYTQSRMQQRGKLNAAQNNLVAILDEYFPEYEEVFNDLLGKASMHILAQMPFPEYILQKTEDELTKELKSASSNKVGRKRAALLLAKARSSIGVQEGLRAARLRLDHCLEEISFWKKQLMQTEEAMADALFQTGLAVSLLSIKGVGVVTAASFLGEVGDLTRYEDWRQLRKIAGLNLIENSSGDRKGKTGISKRGRPGLRSILYQASLALVAKNPEFKALYQHLKTRRENPLKGKQALVVIACKLLRVMFTLAKENRLYDPKKALGTYREQQLKHAA

SEQ ID NO: 215383 - protein, 388 aa, unidentified
MYYVGIDIAKYKHDCYICTSEGVTVLESFSFDNSNTGFKELQSALDHLDHSQQIKIGLEATGIYGKNLKLFLSSIGYDFHEFNPLLVKRFHDSLSNRKTKTDKIDARIIALYLSTGASRTYLYSSYHIEALKQLSRARNKLIRSRSDQYVIITNILDVEFPEFKAFFHNKLSDTALFLLNKYKTVDRMKRLTHQDCVLLHNKSRRIPTSSFEELRDLAKHTIGHHFNYNDLILSSALQIVNTLERQIESIEKEILAIMEELHSPIDTIPGISTLSAATILGEFGDFSKFSNPKQLCAFCGVEPAIYQSGTSSHKGKMVKHGSSQLRYVLFNAVPYLVIHNITFREFFYKKLHEGKNYRVAQSHVVKKLLRMIYHLELTGESFDPTLLY

SEQ ID NO: 215384 - protein, 355 aa, unidentified
MNDEKYIGLDVHQATIVVAVLDSTGKLVMESILETKAATILQFFAGLRGPLSVTFEEGTWSAWLYDLLHSRVDKLVVCNPRKNALLKDGNKSDRIDARKLAELLRGNQLKPVYHGETGVRMLRELSRSYLTIVKDLSRVMNRLKAVYRSWAIPCAGRDVYYRRHRAQWLAKIREAGVRRRAERLYEQLDMLQHLRQQARRELLAESRKHTITAKLRQIPYLGPIRSALAVALMQTPHRFRTKRQLWAYSGLALETRISAEYRMVDGQVRRSKKLLCIRGLNKDHNHDLKGLFKGAATMASVRPGPFQDFYTAALAKGIKPTMARLTLARKIAAITLTLWKKGENFDAEKLKSQAA

SEQ ID NO: 215385 - protein, 312 aa, unidentified
MTDQIFVGVDVAKDWLDIHHSSHGAARINNSHAAVRSFAARCAKEGAWVVFEASGGYDHQLRDALGSARVRFSRINPRQARDFARAMGVIGKTDRVDARMLAELGARLTPDPTQPLPPERRALQAQATRRRQLVEMRKQEATRLQQTADPVARADIRGVIAMLDRRIAKIEARMTDLVTADPELAAIERRLRTAPGVGPVVAATLIAELPELGQIDRRSIAALAGLAPIARDSGRRSGPRSIGGGRPIVRTILYLAALQASRRSPQFIHFRDRLQAAGKSVKAAIIATARKLVVTLNAMLASGTDYRLTAVV

SEQ ID NO: 215386 - protein, 427 aa, unidentified
MTYRIAAIDVHKKMLAVVVADVAGEGEYQFERRKFGATPDQLHLLAQWLCQQEVEEVVMESTAQYWKPVWGALEQYWQPERQKREGARKMSGKLHLCQAKSNRGRRGRKNDFADGERLIKRLVAQELVLSFVPDAEQRLWRTVTRRKYQLTRDKVRFQNQLESLLEQAHIKLSSLVSDLLGVSARRMLKAIAEGETDPAALAALADYRLRATPEQLRDALGACGQLHGVYRRLLKMALEELKLMEEQIEQLEQEASKLLQQHQNAVQRVAAVPGFGVDSAIQAIAEVGPEAAAFETYKNLSSWVGACPGEEESAGETKSTHSPKGNRTMRRLLNQAAHAAIKVKGSIFEVTFRRLLPRLKYQQAIWAIAHRLCRLLWKILHEGVRYEERGPAVSAKSKRTRTARMIKELKALGYRVEGGPLPAGTPA

SEQ ID NO: 215387 - protein, 243 aa, unidentified
MAMRVSKSIVGVDVAKVELVTYQADLDLLTSITNEKAAITRWLKTLPNTAAIAVEATNIYHVDLVELAYQAGFDVYIIDGFQLSNYRKGVGGRSKTDASDARLLARFLKNEGECLRPWTPPPAVYGKLQSLLRRRASLIQAKTSLTQSWANDASLKASFAAFLKSIERLDLLVKKKLKDALREAGLLEQVARCQAVEGIGFLTATALVMAYSRGDFNSSDSYIAFLGMDLRVTDSGQKTAADH

SEQ ID NO: 215388 - protein, 361 aa, unidentified
MIVERTHVGLDVHAHAVVAAAIDSETGELIRRRLTSDSQEVVEWIRTMPGPVAAAYEAGPTGFALARALRAASVRCEVLAPSKLQRPVGERVKTDARDALHIAKLLRLDEIVTVTVPSEAQEAARDLVRAREDARRDLMSAKHRLGKLLLRKGIVYAGKTAWTSAHNGWLRRQRFELPGLQAAFDAGFEAVMAVLERRERLDEAILALAADSEFSGVTHRLGCLRGISTLSGFALAVEIGDWTRLDGRRIGSYLGLVPSESSSGQSRSQGALTRTGNAHARRLLIEAAWHHRSQYSAASPVLRARWELASREARERGDKGNRRLHRRWQAFKARGKRNVVANAAIARELAGWCWSLAVMDA

SEQ ID NO: 215389 - protein, 433 aa, unidentified
MVKINYMSTLFVGIDVSSKTNSVYAMDFEENKYLSTSFGNNQPGADELVNRIAACMQKHKNLDTLLIVLESTSVYSVHISNFLASSEVLMPYKPYVFCVNPKTTANYRKSYIGMEKTDPTDAYLIADFGRVGRTKKLEPWRGGQFIALKRLTRHRMHLSECITREKTYMVSNLYLKFSELQLLEGDDKPFGNLYGATSSAVLTEFLSPQEIIDMPEEDLLAFLAQKSRNCISDLSKTSELLRKAARDSYRLDKCMYEPLNISLASSFNCIQAYQKEIRLIEQAIDKCIKGMNTNALIILQSIPGIGPVWASGILSEIGDITAFHSSDALAKYAGLYWPKGDSGDFISEDNQMSKAGNPYLRYYLGEAANSVRKHIPEYADFYARKYAEVSKHQHKRALALTSRKFVRLVFGLLAKNQLYTGEKLDAEHNIEPN

SEQ ID NO: 215390 - protein, 343 aa, unidentified
MQAVTTIGLDIAKSVFQVHSVDAAGQVIIRRQLKRRHVLAFFEKLPPCLVGIEACASSHHWSRELQALGHTVRLMPPSYVKPYVKRQKNDAADAEAICEAVTRANMRFVPTKTPEQQSGLMLHRTRHLFIRQQTSVINAIRGHLAEFGVIAPVGRKAIEELLRVIADPSDKRVPDVVRACLAALGSQLISLKGQILEFDRMILAWHRSNQTSKRLNCIPGVGPLLATALVASVGDPKAFRSGRNFSAWIGLVPKQHSSGGRNKLGSISKQGDRYLRGLFVAGALAVIRYAKIHGTKYRPWVAALLARRPTKVAAIALANKLARMAWALMAKGERYNYPAGLRV

SEQ ID NO: 215391 - protein, 443 aa, unidentified
MRFVGGDVQALFVDQVRGLDPEQCLLVPVDVGKSTAMALVADLFGEIVVDPFGFGLTEGGVSVLLAAVSEAEAEREAVMVRFGVEAAGRYHRTLMASLRRRGLEVVELNPGAVKEARSGQGKRRLKNDVRDLAAMADLLARGGGRPPQPVDTEMAVQAAWVGHRRRKLKARTALQNQVIGQVDVVFPGLTGCFSDLLETKAGRVIVRHVCEPSRIRRLGVEGLRSYVAKRGCLMSRPKAAQVLAAARDALRLDDAEHQAASTVLAADIDLLATVQTEVERAEEILGEMLDQTPAGVLSSLPGIGVVRASNYGAALGDPHRFANAAAAYRFSGLVPTDYESAGRRRPGPHISREGSVELREAIIELGRGLASHQPDFAAYKKQKLAEGKKPSVAGVAVGRRAHRLCFAMMRDQTRYDPDRWIEAVAAGRSVMTQTRKRVDVTAT

SEQ ID NO: 215392 - protein, 318 aa, unidentified
MADSTLSFVGIDVSMATLDLAWCDDPAEGRSFTNDAAGIAQIVQLLREMTPQLIVVESTGKIEQPLLLALLDADLPVARVDPKRVRLFAYGIGQLAKTDPIDARVLRKFAALAAPRLTEKKSQNRAELAELLVCRRQLIDTRTAHQNQLTRTVSSFARKSLESVLRHLQSRLQRLDRQIARIIDDDDEMRGLEKLLRSFKGVGPVLAATLISQLPEIGRLGHAQLTALVGLAPYNRDSGTQCGRRSIRGGRAAVRQMLYVCTVAAIRHNPTLKQTYARLREAGKVAKVALIACARKFLRILNAMVRDHLTWSPTPVGA

SEQ ID NO: 215393 - protein, 347 aa, unidentified
MQHLLTISSLQEIIFKNMKNYSDVIGIDVSKLTIDAHIHNRVVHRVFSNTPKGYKALLSWTETYLKEQVYFFCFENTGHYSTNLSVYLSENILDYVEESPLAINRSSGVVRGKTDKLDSAMIARYAWLYKEELILSSPKAQDIQELGRLLSFRDQLVRDRTGKMSSLKEMQTLLSSPSTDDCCKIIKKTISYLTKQIIALENHIKNLMSSDESLQKNYELLNTLKGVGLVLSCQLLYHTSNFKRFDSWRQFSSYCGVAPFEHSSGTSIHRKNRIHHIGDRKMKTLLTLASVSAIQCDQELKQYYKKKVAEGKPKMVAINNVRNKILSRAFAVVKRGTPYVALQKFVA

SEQ ID NO: 215394 - protein, 344 aa, unidentified
MDAAYDGRQIVGIDLHRRRSVIVRMSQAGEKLETVRIDNDPVALGLEIAKAGESPEVVLEATYGWYWAADVLAAAGASVHLAHPLGVKGFAYRRVKNDARDAADLADLLRMGRLPEAWIAPPAVRELRELVRHRAKLVALRSGLKASVHAVLAKQGLHIPVSDLFGVGGRVLLAGAPLDGAFRGRVDSLCRLIDAVDFEIDAVARPVKARLVGHHGFTAIQAIPGIGPVLAAVFVAEIGQVGRFTRPEQLASWAGLTPRHRESDTTIHRGRITKQGATLVRWAAVEAAQGARNAGWLTTTRTRIGERRGRNIATVAVARKLLTLVFYGLRDGHIRALHPAKAAA

SEQ ID NO: 215395 - protein, 367 aa, unidentified
MSHIIYCGVDFHARQQTICCLKTETGELVSHELKHDHKEALRKFYSELGGPVIVGLEASGYTPWFEQLLEELGHQVWLGDATEIRRRARRRQKNDRRDAELILELLCHDEFPRIHRPSPESREILRMLRYRHKLVKLRTIVKNSLQSLSIQAGLSLQARLFTRQGTQQLEALAMSPVMRQQRQQWLELLQELNQRITETEGWLKQQALADPRISLLRTHPGLGLLSSLGIVHTLIPVSRFPNPRKLAAYGGFDPMERSSADKKRYLGISKAGSRLLRFLLIEATQTAVKTDPDLKRFYHRLVQRRGKPKAKVAVARKLLIRSFIMLRDEINYAEFQQRAIAARLAREFARPNVPVPLIGQPASPAKG

SEQ ID NO: 215396 - protein, 346 aa, unidentified
MKIATVGIDLAKNVFQVHGVDGRGKAVLRKSLKRAEVVKFFAKLEPCLVGMEACGSAHCWARKLIELGHTVKLMAPQFVKPYVKTNKSDARDAEAICEAVARPNMRFVPVKTAAQQAVLALHRARQGFVKARTAQANQIRGLLAEFGIVMPQGIAHVVAKLPDILEDGENGLPGSLRQLLAGLLAHFKELDRQTGELEREIKLWHREHEASRKLERIPGIGPITASALVASVGDAKSFKNARQLAAWLGLVPRQHSSGGKSTLLGISKRGDVYLRTLLIHGARSVLRHLQRHTDQAEGWLARLAARRNPNVAAVALANKNARIVWALLAHGRDYHAGYGAVAAKAA

SEQ ID NO: 215397 - protein, 424 aa, unidentified
MSKKKSSPAGLQALYARACGLDVHKKLVVACVRILDSKDGTMQSTLRKFGTMTTDLLELRQWLAELKVTHVAMESTGVYWQPVFNLLEDHFKVWVVNAQHIKKVPGRKTDMKDAEWIAQLLQCGLLRPSFVPERQQRELRDLTRQQTKLVQQRNAVDNRIQKVLETANIKLGSVASDVLGVSGRKMIEGLIAGEKDVTALADLAQRQLRGKIPELQRALEGELTEHHRFLLRQLLGQYDFLEKEIASVSERLGAVAPPSFRAAVEQLDAIAGVGERGARALLAETGTDMSRFPTHKHFASWAGRCPGNHESAGKRRSGKTPAANRHLDAVLTEMAHAAVRTKNSYFKAQYHRLAGRRGKKRAIGALKHSLLVTVYFMLRDNRPYKDLGVDYFDKLNPQQRIRYHVRRLQELGQEVELSPIPDAA

SEQ ID NO: 215398 - protein, 360 aa, unidentified
MNQHTVGRKIAGVDLGDRDSWVCIIDGASGEVLERATIPTSGEAFGEYFARCEPMLVALETGTHSPWASRAVTDAGHEVIVANARQLPLIYGSKHKSDARDPEKLARVARLDVRLLAPVEHRPREQQRDLSVIRSRHALVRSRTLLINAARGMVKAFGSRLPKCDADVFHKVAWAFVPSELGLSLHPIFESITTLSRQIRALEDEIERLAREEYPHTQLLTQVSGVADLTALAFVLTLGDPRRFSDSRMVGAYLGLAPGRRQSGDRDQPMSITKAGDEYLRWLLVQCANFILRRDSPDTDLKRHGRKLAKSGSKIAKRIAKVAVARKLAVLLHALLVTGEVYEPLRNTSVRRRRQAPLSA

SEQ ID NO: 215399 - protein, 349 aa, unidentified
MDRTTYGLDIAKNVMQLHWVDAQTGEIGRKKLARAKLAAYFAQLQPVRIAMEACGSAHHWARALGGLGHEVELLPAAQVRPFVRSNKDDAADARAIWVAAQQSDIRRVPQKSVEQQAVLALHRTRSHWVSVRTATVNSLRGLLYEFGVVLRGGRQAGLKALAEQRVVIDEQIPATMRTLVDGQLNTLQHIGQRIEQLEREIAALHKQLAGARELDQVPGIGVLGSTALAATLGDGKAWRSGREFSASLGLVPAHAGTGGKVRIGHLSKRGDPYLRTLLIHGARSVIEHAKHKPKWLEQLLARRPKNVAVVALANKMARTAWALVAHGRAYQRDWQSARPGSAAAQAAGA

SEQ ID NO: 215400 - protein, 413 aa, unidentified
MEVWLGGISCLISEGGARMYSLLVGIDVSKDFFATAGIDSEGKESFSRSCSMDSNGFDDLLKTITSHCEDLSMVMVAMESTGCYHINLFSFLTCRGVRTMVVNPLLIANFAKLSLRKTKTDKKDAMTIARFLMDHHEEVSHLSLSQDHQDLRDLSRERESLCHLMAATKVEIKRVLRTTFPELESIGNLYTGAMLRFLQQYPSARLVRGAKPRAIAKALKGPYVGDKLTFSAEDILRAAKTSIGTLSPAKEVIVQGKIATLLHLQKRLYEMTKLLTDLCKATRIDDLKILRSIKGVGPKTAAPFLAEMGEVQNYASHKKLIAFTGIDPSLHQSGNYIGMSKLSKRGNRHLRRAVYLMTMAVVSKNPFFKAYFLRRKREGLPPQKALFATAHKLLRTIFAMLSNRTYFKVKEAI

SEQ ID NO: 215401 - protein, 353 aa, unidentified
MHYGRIPSSKVSVKKLIRQFESKYPGATIHVVYEAGPCGYWIYRLITSLGHCCYVVAPSLIPKKPGERIKTDRRDALKLVKLLKSEDLTPIYVPEPEDEAVRDLSRAREAAMKDLKEAKYQLKALLLRNNIRYEGTANWSKKHLRWLTELILPHPAQQIVLQEQLQTIEERIRRLERLDNELTHHVHQWRYYPVVKAIQAMRGVRLLVAVGVVAELGDLNRFDHPRKLMAYLGLVPSEHSSGGKRHLGAITKAGNGRARRLLIEGAHSYRYPANVSTDIQLRQEGLPKDIVDIAWKAQLRLCKRYQRMSKKGKHYNLIITAIAREMAAYIWAIAKEVVLTPVNPKLRLSRVPA

SEQ ID NO: 215402 - protein, 323 aa, unidentified
MSGSIGIDVAQGDFVVAHEGVSGSKSYPNTDRGCRDLVKDLLRTAGDAGSVERIVVESTGGYERRVVAALGAAGLPVVVVNPRHVRDFARSKGQLAKTDQIDAHILADFAATIKPKIKPLPSEDQEDLRELLTRHEQLVQMLVAEKSRLLQAQGQSRHTLRKKIKNHIKFLEREIMMLDSDLDDTLKKSEVWREKDDLLQSVPGVGKGTSRTLLGLVPELGTVSSTEIAKLVGLAPFNRDSGKSRGSRHVGGGRGRVRVMLYMATLCATRRNPVVRTWYQRLLAAGKPRKVALVACMRKLLVVLNQMLKTKTRWQAPLALTTA

SEQ ID NO: 215403 - protein, 352 aa, unidentified
MNQIKYIGMDVHKATTVIVVLNVAGKAIAEAVIETTSSSILDFLKSQRGTLHVTLEEGTQAAWLYDLIRPHVANVVVCDPRKIPKQGTKADKIDAKRLAELLRTNALTPVYHGEQSTKDLKELIQSYTSVVEDGTRIKNRLKALFRGRGIDCSGSSIYNPDEWKQWLSKLDTVAVRARANRLWEELEFVERLCEEAQQELMAEARKHAAFKILLSIPGIGPVRAAVILGVAGTPHRFRSKRQFWTYCGLSVVTETSSEYTMVNGRVGRSKKPPFVRGLNRNYSRTLKWTFKSAAKTTASGPWKSHFDVMVANGTRESLALLTLARKIASITLALWKRGERYDQKKVKMLHAA

SEQ ID NO: 215404 - protein, 482 aa, unidentified
MVVPNEEPKKPTKPNKPTKPNKLTKPNKSRERSLPVPVPVSAAALHVINPDAAGIDVHSDMHMVCVPADRDANPVRQFGANTADLQEIVAWLKKCRVRTVALESTGVYWIPLFELLESEGFEVNLVEPGQLSRCGARPKTDVLDAQWIQRLHSYGLLRASFRPPDSVLALRAYWRQRQMQVRYAASHVEHMQKAMEQMNVKLTEVVSDITGLTGMLIIGAILEGERDPIKLAQLRDRRGQHSEEQIALALEGTWRPEHLFELRQAHELYQFHHRQITECDQQVQAELANFPNRAGEKTRTVKRRKRGRKSNDVRFEATGPLFQALGVDLTSIEGIDVGTALVILAEIGVDVSRFPTEKHFASWLRLCPPQDESNKTKKRRGHRKGTNRVTIALRMCARSLGKTMTPLGLFYRRIRSRIGGLGAVKATAHKLACLVYRMLKYGQQYVTQSMEEYEAKVKANMLKALKRKAAALGFQLSPLPTQ

SEQ ID NO: 215405 - protein, 419 aa, unidentified
MANNSTSRKIRQVQPGTLHIGVDLALEKNQVTVISERAEHLDRFSFPQDRGGFEYFFQRVESVRQKQAAAAIVVAMEPTNYFWKLLAREAEERHISYHLVNAYTVKKHREGNQLDVSKDDPRDADQIAELSRTGHYTETRLQKGTYEELRQYATLYNQLVQAIRREEQVLSALAGQSFPEITQVLKDLEGRTSRAILVSCGCAAAIRQMTEEQFLAEVQAAYSGKRLLISRVRHVYQLAATSIGLTEGLQALQMALRLHFSQLEALQTQLKQVTNAMAASLVALPEAPYLLSMTALKAPTVALFLAEVGDPKRYRMAAQWVKLAGIQPAPNTSGKKQRSKTPMSRHGRARLRTLLYFACLRLIRFDPFFAQLYSQLQRRSKNPLTKMQAIGVLMNKLLHILWALANNRTFYNPSFAQAS

SEQ ID NO: 215406 - protein, 418 aa, unidentified
MYYLGMDISKKRTDYLVLDSEGKRFQRPFSLENTKEGFKTLAERLKELNLTPDNLLSGLEATGNLWENLYSFLTGKGYKVILLNPYQTNKYHQALRQKATTDQLAALVIADLLRSNRYLSSSVPKEEIEALRELVKLQFQLQEEKKKLSRQIFSLLSVVFPEYEGTALKRVFGIASRKILERWPTAKDLAEAKPKQIEKIVRSIKGNNFNISAIKDLIEAAKNSIYSGRAREVRSFTIRLLLSQLGRTLSSLQQIKERIEKILSSKDGSSSFPGNNILSIPGVGKGTLATFLAIAGRRGDFFLSAKKVIGYLGFYPQIYQSGEKKRGNIISHQGPNYARKAMYMAAVSCIRHNREMRTLYNKKVSQGKSPKQALIYVAKKLSQMILSMLKTGEPYRPERVFIPPTALPRFIEKNPAYF

SEQ ID NO: 215407 - protein, 356 aa, unidentified
MLYLGIDQHARQITISLRDDHGDVLLARQVSTHPEKVNAFFQQLTRERLRDGEPFVAVLEVCGFNDWLIRMLQDYRCHRVILIQPEDRKKCKTDRRDAAALSELLWVNRERLLQGQPVRGVRQVEIASPTDQEDRRLTALRKDAGGARTRLINKVKQILRRHNLQWQMPTKTFPTAAAVAWLKGLALPEIDRLEMDHLLADLEQAEQRLKDLGRVIARRGAASAGVKVLSSMPGVGGGFTALALACRVGRVERFPRARSLANYWGLTPGCRNSGESDQRLGRITKAGSPTARWLLAQLVHKVLRRDARLRDWFRRVKRRRGPTVARVAVMRKLATIIWHVLSKRKTYAECRAPAAA

SEQ ID NO: 215408 - protein, 344 aa, unidentified
MDHFAGLDVSVKETSVCIVDDTGRIVREVKVASEPEALLKVLGKEAWRFKRIGLEAGPLSQWLFSALAEAELPVVCVETRHMQAVLKAQINKTDRNDARGIAQMMRAGLYRPVHVKTLRSQKLRMLLTHRKLLQSKAIAIENDLRGTLRNFGLKVGMVGKVRFEARIQELVENQPDLAVLVEPLLIVRRALREQIVILHRRLLAIVRDDEVCRRLMTTPGVGPVVALTYRATVDVPARFRKSKSVGAVFGLTSSRYQSGEVDWSGKISRCGDEMMRTMLYEAAQSMMHSKKWSWLKAWAMQIARRRGMKRAIVALARRLAVIMHRIWVDGTEFRWTREKAAAAA

SEQ ID NO: 215409 - protein, 408 aa, unidentified
MNPLYVGIDVSSKSNVVYLMLPNGDKHSNFSVANSHEGSTQLVKRILSALTSHSLDTVLIGLEATSIYGYNLVYFLREDATLAPFNRKIHVLNPKQVKKFHDAYNDLPKNDYVDSFVIADCLRFGRINKEVYMGDYRYKALQNLTRARFFAVQNLVKEKQRFMNVLFKKYSTMTQEKVFSDTFSTTALAVYDEFESAEALANMDLHELTDFIIEKGKNRFPDPDAVAKAIQKAARSSYRLPKTVNDSVNQVLSISITSMKALESQIKEFDKAIKAQMELLPNVLISIPGIGPVYSAGIMAEIGDINRFNSQAALAKYAGLAWKQHQSGGFESEVTRLIPSGNRFLKYYLCEAAFSLVRCDKEYSDFYHLKYKEVNRCQHKRALALTARKFVRLVFRLLKDNRLYCPAK

SEQ ID NO: 215410 - protein, 350 aa, unidentified
MLIIGCDYHPGFQQIAFVDSDTGEFQEQRLPHREEAEKFYRNLAGQGMKVRVGMEASGQARWFERLLAELNFELWIGNAAKIRAKRVRKKKTDREDARHILKLMLKDDFPQIWVPSWDNRDLRQLLWHRHRMVQMRTRIMNQLQAVALNEGLRRKKRLWREHGRQQLEGIRLAPWASRRRRDLLELLDRLNPTITELTQAIEQEVEKYPAAQLLMTHPGVGALTALAFVLIIGEPERFECGKQIAAYLGLVPEEDSSGESRRLGHISKQGSGLMRFFLVEAAQVTVRSDTEWRNKFFHLAMRRGRKIAKVAMARRLAVRLYWMWRKQWDYEQLKKFGPHAGKLGTGVGVE

SEQ ID NO: 215411 - protein, 353 aa, unidentified
MGIVVALDVHRKQITYKTLDRETGEVKRGRIAPAARADVRAWLARFAGCEVEFALEGTTGWRFVVEEVERAGHRAHLADPAETAAKRGRKRRAKTDSADCDLQLRLLCAGELPESWIPPAHLLELRTRVRMRKTLVDQRTAWQQRLQAQLFHQGVPAGLRPRTRAGREALVRAELSPAGRELVSLALRMIDAIDRELAPLDRQLCSFARRQPGCRALIARLYGVGPVSATAILAELGDCRRFARSDDAVRHSGLDVTVYQSDEKRAPGRLSHEGPELLRWALFEAALSAARAGSPDHGYYLQVAERIDHNRACLSVARKLCRRAYHILRELGDEALAPVEGDPHAEEAIAAAA

SEQ ID NO: 215412 - protein, 423 aa, unidentified
MKYALVRLLPDVPPGGVCAGIDWADADHAVCVVDMAGRVRDRFAAAHDRAGIAGLIARLRKNQAGEVAIERGDGVLVGALLQAGLTVVVIGSRQVKNLRSRYGSSGAKDDRFDSYVLADTLRTDRARLRPLVPDAPVTTALRAAVRARKDLVAHRVAACNQLRAHLAVAFPGAIGLFHQLDSPLSLAFLAAFPSRRAAAALDEQAIAAWLATVPRRGKAAPAAVLAARLAAAAPGCGDDAAQAAVTTQLAGAVADLAARTGALDGQIAAQLAAHPDAHIFTSLPRAGTLRAARLLAEIGDCRARYPDPWSLAGIAGVAPVTRRSGSYLGHEFRWNVNRQLRDAVCDFAADSRNASCWAAGIYAAARNRGKDHPHAVRITARAWTYVIWRCWQDRTAYDPAKHRAFQDTLTRQDATTPDSAGKA

SEQ ID NO: 215413 - protein, 419 aa, unidentified
MPSKKDNTSVVSVVHHICCGLDVHKKMIAACIISSDAGEGQRSEVMEFETFTDDLIKLRDWLLERECPVVAMESTGPYWTPIHNILEGYVQVILVNPRHMKNVPGRKTDISDSRWLSGLLRYGLLKAAFIPPKYQRQWRDLTRMRKNYMETAGHFKRRVHKLFQEANIKIDSVLADLFGTTGRNLMRLLVSKESSLTFSEVENCLRGSLREKGRELYRSVKGFFEEHHRILLAVLLDTIEKLEGQIVELELRIRQVLKTSEELIERLKEIPGVGDVSAHAVLAELGPTLEAFPTAAALAAWCGVCPGNNQSGGKRFSGRSRVRNHHLKTIMVEIAWPAVKKSGSYYKAKYYALKSRIGAKKAIIAVAHRILKAIYYIIKHGVCFKDLGEAYLLERSKASKIRYLSKQASLLGFELKPVI

SEQ ID NO: 215414 - protein, 409 aa, unidentified
MTVFCGIDWAERHHDVAIVDDTGTLLAKARITDDVAGYNKLLDLLAEHGDSSATPIPVAIETSHGLLVAALRTGSRKVFAINPLAAARYRDRHGVSRKKSDPGDALVLANILRTDMHAHRPLPADSELAQAITVLARAQQDAVWNRQQVANQVRSLLREYYPAALHAFQSKDGGLTRPDARVILTMAPTPAKAAKLTLAQLRAGLKRSGRTRAFNTEIERLRGIFRSEYARQLPAVEDAFGHQLLALLRQLDATCLAADDLAKAVEDAFREHADSEILLSFPGLGPLLGARVLAEIGDDRSRFTDARALKSYAGSAPITRASGRKHFVGRRFVKNNRLMNAGFLWAFAALQASPGANAHYRRRREHGDWHAAAQRHLLNRFLGQLHHCLQTRQHFDEQRAFAPLLQAAA

SEQ ID NO: 215415 - protein, 324 aa, unidentified
MIDGILGIDVCKNTLDVSISSYTKVRTKSFTNSPDGWRHLLDWLIAQKIQRVHACLESTGRYSLGIACALYEADHVVSIINPAQIRDFVRTKLGRNKTDGVDASHIREYCELFKPSPWAPPSKAHRRLGELQTIRSGIIAGLTEWKNRKNSGIVDAEAQALADATISHFTSQLGAVDKAIALTIDNDCNLQSKRDLLLSISGVGETLAAVVLAELPGPDVLRSSAEVVAYAGLNPRQHQSGTSIDRATRISKIGNAVLRAALYMPALSAMRYNSAIVALVTRLKSRGRLKPKQIVVAAMRKLLVLCFGVLKTRRPFDAAIAMGG

SEQ ID NO: 215416 - protein, 411 aa, unidentified
METIVRRCAGLDVHKESVVACARVIDDNGELQLSTQTFGTTVSDLLILNDWLASHGVTLVGMESTGVFWKPVYMLLETEFECWLLNAQHLRNVPGRKTDVGDAAWIAQLVAHGLVRPSFVPPKEIRELREVTRYRKALIEDRTREAQRLHKIIEGSGIKLANVATDILGVSGRAMLNALIGGTHDPEILAELAKGKLRKKLPALRKALSGWFSPTHRLLVGELLAHLEYIDESIERLSNDVATMIAPFARSIDLLDTIPGVNLRSAEVMISEIGVDMGRFGSAGRLVSWAGMCPGNNESAGKHFSGKTRKGSKWLRIALIESAKAASRTKDSYFAAQYARIKGRHGHQKATVAVAHSILVVAYHLLERGEPYNELGGDYFIERQQKDAYQRRLVKQLERMGYEVALTKHAA

SEQ ID NO: 215417 - protein, 345 aa, unidentified
MKLIRVGVDLAKNVFQVHGVDRTEKPVWRRKLSRTDWLKTLLERIEPGCEIGMEACGSAHHWARQLQAHGYVVKLIAPQFVKPYVKSNKNDANDAEAICEAMSRPSMRFVAVKTVEQQDIQAVHRIRAELISQRTAKGNQIRGLCLEYGLAAPRELMQLRAAIPYWLEDQTNGLSGRFRRLLTGLWEDLLGLDKRLKELDAEIALIAERDPVAKRLQQLRGVGPIIATAMVATVGNATQFANGRQMAAALGLTPRQNSSGGKERLLGISKRGDAYLRMLLIHGARSMIRTAGSKTDRLSQWVMRIANTRHQNVAAVALANKTTRIAWAMITKGSDYQPNRVAAYS

SEQ ID NO: 215418 - protein, 343 aa, unidentified
MQAVTTIGLDIAKSVFQIHGVDAAGNVIVRRQLKRRYVLPFFQRLPPCLIGIEACASSHHWSRELKALGHTVRLMPPAYVKPYVKRQKNDAADAEAICEAVTRANMRFVATKTPEQQSCLMLHRTRHLFIRQQTAVINAIRAHLAEYGIVAAVGRNGVEELLGVVADPSYKRVPEIARACLAALGAQLRMLKAQILEFDRMITVWHRSNETSKRLDAIPGVGPALATALVASVPDPKAFRSGRNFSAWIGLVPKQHSSGGKDKLGSISKQGDRYLRSLFTAGALAVIRYAKIHGTKHRPWLTALLARRPAKVAAIALANKIARMAWAMMAKGERYKEPVALAV

SEQ ID NO: 215419 - protein, 353 aa, unidentified
MDKIGFENFLSSTYQFKDSSICVFEPTMIYHTNLLNFLKTNGYNVSMVNPYKVKQFSKFIKNKPTKTDKIDSKILAEFIQFSQDNTPSISEEKENFRQLIREKEFISVQIAYIKSEIKRLLYLVFPEIARNGNVFSSGIISILKIFPSAFSIKNISEEKFISSIEKYLPKKGRKLDLKFIYQLAKNSIAYYYPHYEKILKMKIDYLTFLEKQKSQICEIINQLADKIYKREIEILTSIPGIGETSAIYFISEIMDIKRFENSKKLIGYCGLDPIIKQSGKYKGQWKISKKGNSHARRIVFIMGSCVRKNCPYFKQYYEKKRNEGKSYMEAVIATSTKLLKVIYSLLCENRVFI

SEQ ID NO: 215420 - protein, 307 aa, unidentified
MEYTTIGVDVSKAHLDVFFLPTGEVATFANTPQGFRQLQRRLSTSPGARVFMESTSCYHLPLARFLAANGVAVFVVNPKHVRDFAKACGRLAKTDRLDAEIIARFGELMPQKNVVVSEEARENLKRLSCRRRQVVMLLSMEKNHLEKAEFCAEKEVLSSVRNNIRSLEKQVAKWDAKLLEIIAANAELSELYARMTAVQGIGQATAVALIADLPELGRIGKRQIAALAGLAPMNCDSGSLRGQRHIRGGRRSVRCALYMATISATRCNDVIRTYYKRLRTAGKPPKSALTACMRKLLLHLNSIAANL

SEQ ID NO: 215421 - protein, 355 aa, unidentified
MSQEKYIGMDVHQATISVAVMDAGGKLIMECLLETKAGTIVEFLRGLHGTLWLTFEEGTSATWLHDLLKPHVNRLVVCDPRKNALLKDGNKSDRVDARKLAELLRGNQLHAVYHGEHGVRTLKELGRSYLTITQDVTRVMNRIKALYRSWAIPCAGTTVYAARHRAEWLAKIAEPGVRVRAQRLYQQLDLLQPVRLEARREFLAESHKHSAVKLLRQIPSIGPIRSALLVALLQTPHRFRTKRQLWAYSGFAVETHDSGEYRSVRGKLQRNRERMTVRGLNDNHNRDLKNLFKSAAISASTRPGPLRDFYVARVEKGMRPTMARLTLARKMAAISLTIWKNGVEFDAQQLQRQTA

SEQ ID NO: 215422 - protein, 428 aa, unidentified
MRLTGRPGRTGGDVSETVQWFVGIDWGTAEHQVCLVEATGQVAGTRTVAHTAEAVHEALQWVRTRTAAAVETIAIGIETPRGPLVDAAIEQGWAVYAINPKQLDRFRDRFTAAGAKDDRRDAHAIADGLRTDRRAFRRIRPDDPAIIHLRELGRLVDDLRVDEGRLTNRLREQLYRVNAAWLTLCPAADEPWLWTVLHAAPDPDTWAQLPRRRITPALRAHRIRRLAVDDVIGRLRQPRLPVAPGVTAAVATRVASLVPQLILVHEQRTQAERQIDRRLEHLAAADPTDGESREHRDVEILQSLPGVGRMVTATMLTEATGPMADRDYPTLRAYAGAAPVTKRSGKRAAFVHMRYACNRRLRQALYHWSRVSIQHDLAARAYYDALRARGHGHARALRSVADRWLRILVAMLTTRTLYNPSRFVSAAA

SEQ ID NO: 215423 - protein, 350 aa, unidentified
MNIIGCDYHPGFQQIAFVDTETGDYGEQRLEHSEGAEKFYRDLAAQGKKVRVGMEASGHARWFERLLAELNFELWIGDATEIARKRERKQKTDRQDAQHILQLLVENRFPKIWVPSGENRDLRQLLWHRHRMVQMRTRIMNQLQAVALNEGLRYKKRLWRQHGREQLESFRLAPWASRRREDLLQLLDRLNPTIADLTQRIEQEVEKCPEAGRLRTHPGVGALTALAFVLIIGRTERFQCGKQIAAYLGLVPLEDSSGNRRRLGHITKQGSSMLRFLLVEAAQVTARSIPEWRSKYFHLAMRRGRKIAKVAMARRLAIALYWMWRKEWNYEQLRKFGSHAGQLGTGDGVQ

SEQ ID NO: 215424 - protein, 392 aa, unidentified
MYIVGIDIGKNHHEASIVSPEGKQIGRSLRFATTHKGAHSLMSFIFKNIGNSPCVFGMEATGHYWYPIYSFLKAKGYTIYVINPIQSDSLRKMYIRQTKNDSIDSFLIAEVIRFGQFGTTSMADENILAMRQLCRYRDSVISSRTEIKLRIGTIMEQIFPEYEKQFSSLWVSTSMGILEKYLTPENIENAPIDELFEIIKDKSHNRLTRAKAISIKEAAADTFGIKIAQDAFSFQLKQLIDRMNFLDKQIEALDCQILEYYEKFDCYLHTIPGIGIIGAATILAEIGDISRFKNSSSLIAFAGIDPTVRQSGEFNSTHNHMSKRGSPYLRHAIFLAATTCSFHTSPLNAYYKKKRDQGKHHLTATGAVARKLTTVIYAVLRDSKPYEPKKFC

SEQ ID NO: 215425 - protein, 367 aa, unidentified
MEMYIGMDIHCKKTVYMIQECSGKAVAQGSVPTSVEGFSRMLDELAVPSGTKIGLESGPQSWWVSGVLSGLGMKPVVIDAREVRAKARRINQKSDFRDAFEICDGLRRGIYTAIVYVPEAQIQRLRQVLSRRRHFVKICTSQVNAAKFLLRSVGLSSEAASLRSDGAWQRLIRRPAVRPLRQYLEMHQDLWKLAQEKVVAVEKELDKALEPFRETAGLLQSVPGIGPVTSASYIAVVGQPNRFPDSSHLVSYIGLAVSTYNSGERERHGHITKRGSGELRMLLCEAAHHAANPRHPLNPYFRRIAARHGYKKAVVAVAQRLAKILFQMWRTGQGFDVNQLNVIRARQSRARCVYWQIKETKEEIVSV

SEQ ID NO: 215426 - protein, 313 aa, unidentified
MAKIICGVDVSSFSLEAGIGRSGPNRSFANTAEGVTEFIAFCRQHHVEMLAMEASGGYEKQPFALLWAQGWPVALLNPRAVRRFAEGRGLLEKTDRIDAGIIAWFVAVKGSVPSVPASAEQERLKALVTRLRQLTELQAAQRNQRLLVSAATVQCSFSEVLAVVAAQMRILQAAIAALIAADPLWQKLDQAFRSIKGVADRTVARLMAEVPEIGMASNKAVSKLVGLAPLARASGKHQGKRVVRGGRRNVRALLYVVAAVVRRHEADFAAFHQRLTAAGKPKKVIRIALAHKLLVRLNAKAREVRSEFAMLTS

SEQ ID NO: 215427 - protein, 345 aa, unidentified
MESMYYIGLDVHKKTISYSVKDGSGIVHGEGAIPATRWDLDRWMKMLPQPWTAAMEATIFTGWIYDHLKPHAAALKVAHPLMLRAIAAAKKKNDRIDAHKIADCLRCDFLPECYMASTEIRERRRTLRYRNLLVHQAVQLKNKISGLLMEAGVSYNKQKLHKVGYFKELLATNPDINEGLRPLLRLCRETLVRLQKTESALVRSLQRDSLLAERVQRLMTIPAVGPITALTWVLEVGDVKRFSSIKRAISYCGLCGAEKSSADTVKRTPISKQRNKHLQSVLVEAAKMAPRLSPELALIYDREKQKGNANRASLAVARKLVAYLVAIDRSQRDFLVVEKENCAAA

SEQ ID NO: 215428 - protein, 345 aa, unidentified
MNYIGIDYHKQYFVATMMNEQGEVIRRDKASTDRASIKRYFQAADSRGETKAVMEACYGWEYFYDEVSGLVDDLIMAHPLKTRLIAEARIKTDTIDSETLAHLLRTDLIPRAYAPDSETRDKKNLLRYRSSLTAMKVRIKNIIHSVLTRNHIEDSVFTSLSDKFGKQGMIYLRSVTLKGDDTAILNNYLDLLEETEKKIKMAEKQIRSVCREDKICALLSSVPGIGNILAVTIRYEIDDIERFMSAGKLCSYAGLVPSTYSSGNRTYQGKITKQGNKWLRWAMVEAAQRAPLNDLWLRSFYQRISKNGKKIARVAVARKLLEIIYRIWKEEKPYYKKGTVALPLV

SEQ ID NO: 215429 - protein, 350 aa, unidentified
MQGNGRWIGLDLSKRTYEMRYFDQKGKVNGSGGLTTTAGRAKLYATLKAEDIVAMEANSLAFVMEREMRVIGCTVVILHACQLSIIYASTKKTDKEDAVKLARLIKLYEKEDLPIVDVPTDTEWNRRKLVRETKSLKEDRTREINRLHALFVQCGITTITKSDLKRDTKRQHVLPQLFGYEADQAKRVCERLTVLEGHIQTLEGMIKKECEEDESIKRAQTIPGVGEKTALAFAAYVGDGKRFSNGDQVANYLGLVPRIDCSGTINKYGHITKQGNRVVRALLYQAAWALVRSKYGGALQAKYFYMTGGGKGKKVSITAIARKMAKLLYLIMKNKGMEYKQLPARVLQAG

SEQ ID NO: 215430 - protein, 324 aa, unidentified
MRIIGCDLHARQQAVAMLDTTTGEVVNMTLTHEGDNVREFYSSLPRPVRVGIEATGSMQWFVNLLEELGIECRVGHPAEIRAAEPRKQKHDRRDADLIMKLLVENRFPAIWLPSKELQDLRALLRHRHQWVRLRTRIQNALQSIALANGLRRGPSLWSRDGQSKIASLPLAPHTAYRRSELQAMYAKFEVEIEKLNQRVEEQACERPGARLLMTHPGVGPVTALATEVFLGDPARFADSKALASYVGMIPREYSSGERQRLGGLSKQGNPLLRFLWGEAGAHAVRRDPELQRFYRRKLVQKGLGKASVAVARKLGIRLWIMLRD

SEQ ID NO: 215431 - protein, 335 aa, unidentified
MTYLGIDISKSTFVVAYPKEKGYTIREFKNTPAGIHSFMHTLNKDEHHCIMEATGNYCVTLLYMLDKGGYRVSLINPLKTHNFAKTELSVTKTDAEDAKLLSRYGQEKQPPVYKMPTETILILKQKRTVLRQLKKQHTMLTNMQQSLDVLPVQDQLSKNAVKKVIISIEKQIRALEEDMTNITKKEYKHQLELLTSIKGINNKIASALITATGGFTYFDNAKQFSRYLGLCPTIIQSGSSVNVKGHINRNGDSYLRSQLFISAMPTMRFNKACRELYERLRANGKSGKVALIAVANKLIRQAFAVIKSGSPYIDGFVSQPPLLKPATKAIYTSSL

SEQ ID NO: 215432 - protein, 344 aa, unidentified
MKVTRIGLDIAKQVFQMHGVDEHGKSRLRKQLARAKVLEFFAQLPPCLVGIEACGSSHYWGRELTKLGHTVRLMAAQFVVPYRKRGKNDANDAEAICEAVGRPNMHFVAIKSEEQQSVLMVHRARTLVMANRTAQVNQIRGLLGEFGLVVAKGVARLRRELPEILEDAENGLPALAREVLAGLLDQFHHFDARVAAYDRQIRALAAASEPARRLMQVEAIGPQTATALVASMGDPHVFNSGRSYAASIGITPRQRSSGGKERLGRITRQGDGYLRTLLVHGARAALRVIDTKTDAKSAWARRLRDRRHVNVAAVALAAKHARIAWAILAHGTEYRPAGPEVVAA

SEQ ID NO: 215433 - protein, 414 aa, unidentified
MIIAEEPTGARVCAGVDWAKDDHAVCIVGAEGEALQRFMVTHDRAGLTNMVHRLLRAGVDEVGIERPDGPIVDALLAAGLTVLVIPPAQVKNLRSRYGSAGNKDDRFDAYVLADVVRTDRRRLRPFERDTVATSALRTTVRARRDLVIHRVAAANQLRAHLQIVFPAAAGLFDSIDSEVSLQFLERFTTQGQADWLSVKRLSSWLASIGYSGGTDPGVIYARITAAPRGTIGADAATHAVMTHAYIAVLRTLNTQIRTLAVNIGAQLDVHPDAKIFTSLPRSGSVRAARLLAEIGDARGRFPTASSLACLAGVAPSTRQSGKVKAVTFRWGADKELRDALCDFAGDSRHSNPWAADLYAKARARKCDHPHAVRILARAWATIIWRCWQDHTAYNPAEHGGLQRILTQDQQTVAA

SEQ ID NO: 215434 - protein, 316 aa, unidentified
MTTQIETFIGIDVSKATLDVAIWQSDQYRKFSNDAKGIQELIAWLSELAPTLIVLEATGGYERLIVAELVLVGLPVAVVNPKRVRDFARSTGLLAKTDKLDAHVLAHFAAAVRPAVRPLHSEEEERLAALVSRRRQLIEMLTMEKNRLSNSHATMRTHLQTHINWLMDEQKILEAEIDQFIQGTPLWKEKDELLRSVPGVGNVTSITILAELPELGTINRQEIAALVGVAPVNKDSGIKSGKRRVFGGRASVRSVLYMAALSATRFNRTIKAFYDRLIKAGKPFKVAITACMRKLLTILNAIIRHNQPWKQPLITA

SEQ ID NO: 215435 - protein, 395 aa, unidentified
MDISKDFFDVCIKDVRNNPLFVDKKYEQNKKGFEQFDRDLIPFWKLSKGQLVFGMESTGIYHLNLYEHLRKNGISPHVFNPIEINKKAKNRIRKTTTDKIAADIIAQKLITDARPEQQYFLEPNLYRLRELCRILYRLRNEMQICKVKLTRDLDILCQGYDKLFDNNLSPSSIAVMKLAFRKTRFLDVTESELVKTISPYYGKLTNAIEKAKKLRILFNNTEPPEYLKEPVLLELHILIAQYELLKYQMDRVKTKIEKSSKQLKTRITSIIGIGDFTSGLILSELGDVRRFESSKQVVAFAGLDPVLKESGNSRREGHISKRGSPLLREALYLAAFPASKYNPVCKQLYDRLRAKGKHHNVCLTAVARKLLLIVYSVLKNDRDFYIPEHLNKPEK

SEQ ID NO: 215436 - protein, 345 aa, unidentified
MSMVRMIVGGVDTHADSHVAAVIDANGGILGVESFPTDESGFEALVGWLTSYGEIQVVGVEGTGSWGVGLARFLHDHEIPVVEVDRQNRQNRRRVGKSDSTDAISAARAALSGSASVIPKTRNGPVEQIRILMVARRSARSQRIETLNQLRHLIFTSPEEIRSRFKDRPRTGLVTDVAKLRPRKGSDPVTYIAMVTMRGLARRIQHLNSEIKALDGMLTELVIDTAPSLVDLYGVGTDTAATLLVAAGDNPDRLHSERSWAHLCGVCPIPAGSGKTDGRHRLNRGGDRQANAALYRIVLTRMSGDPTTKTYVARRRDEGKNTAEIMRCLKRYVARETYKHIHHDT

SEQ ID NO: 215437 - protein, 346 aa, unidentified
MMIIGCDFHPSWQQVSWVDTETGDCGERKLVHAAGDAKLFYQQLGAPVLIGMEATGNSQWFIELVEDLGHEIWIGDAAQIRASYVRKQKTDKRDAAHILKLVVEGRFPRLWTPDREQRDLRQLVLHRHKLVIIRSRVKNELQHLSLNKGVQRQHKLWSQAGQKMLRELPLKPWAACRREDLLGLLAMLNQQIGALDDAVQQAAEENPQAKLLMTQPGVGPNTALAYVLTLGDVGRFPRGKQVASYLGLIPREESSGGRQKLGAITKQGNRMLRALLVEAAQVAVQHDPGLRRQYLHRCHQKAKGVAKVATARKLAVRLYWMLRTNVAYPEIVRVESSSGLPLVGAS

SEQ ID NO: 215438 - protein, 371 aa, unidentified
MLYLAIDQHRKQLTVNLRNEAGDVVLKRQVSTEWARVREFLEEVRTRSVPEGGFIAIVEVCGFNDWLLKLLVEYGCRETIVIQPEKRSKKKTDRRDANALGELLWVNRRRLLAGKKVQGIRRVQLPGPTDAEDRQVTAWRKRLGQLRTRTINKIKHILRKHNLEQECPTKGLDTIKAKQWLWEVSLGTIDRLEMNQLLAQWKLWDEQIEKVEAEIQKRQAENHTAAVLATIPGCAAYGSLALASRIGSIERFPRPASLANYWGLTPGCRNSGEATDRLGSITKQGSAMARFILGQVILHVLRRDARIRTWYGRIKRRRGSKIARVAVMRRLATIIWHMVKHNEPYVMGGPPARKLATQAARGCTTTGAKHA

SEQ ID NO: 215439 - protein, 351 aa, unidentified
MSHQTTTEAITTIGIDLGKNTFHLIGMDARGKILLRRKIARGQLQSCLANVPVCLIGMEACAGAHHVGRQLAVLGHDVRLLPAQYVKPFLKGHKNDYRDAEAIAEAVQRPTMRPVPLKSAEQLDLQALHRVRRRRIGQRTAVINQIRAFLLECGLPVRQGLAGLREALPTLLSQRTDVLSPRMIHLIEDLSDDWRQLDERIETLTRDITALARQDAGCRRLMDVPGVGVITASAMVAAIGTGAAFSKGRDFAAWLGLVPKQISTGNRTILGGLSKRGNRYLRTLFVGGAQAILQHPHNWPRYRFGRWLMTAAPRLRRNVLAAALANKLARIAWSVLYRERGYDAGIAAQVP

SEQ ID NO: 215440 - protein, 450 aa, unidentified
MRGCVPDVVFPHCAGLDVHKKRITACRVSPDPTGQNADGVMEVQDFGTLTIELLALSDWLNKAGVTHVAIESTGEYWKPVYNLLEGTFVVFVVNAAHVKNVPGRKTDKADARWLAKLMRYGLLQASFIPPQGQRDLRDLTRYRTKLVQERSREVNRVQGVLERANIKLASVATDIMGVSGRAMLEALIAGRADPATMAELARGRMRTKIPVLAQALTGVVRAHHRRLLAIQLAHVDFLDEQIATLSEEMQHVLSALCPSEPPGSPTDEAAPTLTAPESNPSTPPMTFLRAITLLDSIPGVNQQGAELLVAEWGIDMERFGTAPRLAAWSGIAPGNNESAGIQRSGRTRKGNRALRTGLVQMAHAAAHTKDTYLSALYHRLAARRGKKRAIVAVAHSIVRSAFHMLSRSEPYHELGGNYFDEHRREHLVDRLTRRIERLGYRVALEPAVTS

SEQ ID NO: 215441 - protein, 319 aa, unidentified
MFIGIDVAKAELVVAVHPSEARWTVANDERGVRTLVDRLRETTPTLIVLEATGGYELLAVAALAAAELPVVVVNPRQVRDFARATGQLAKTDRLDADILARFAEKVRPALRPIPNADAQELDAMLTRRRQLIEMLGAERNRLGQVFGKGKRAVKKSLKTHIAFLERELHIADSDLNDAVRRSPAWREQDDLLQSVPGVGRVLSHTLLADLPELGRLSRREIAKLAGVAPLSRDSGTFRGRRFVQGGRGPLRGVLYMGALVAARYNPVIRAFYLRLVAAGKPKKLALVACMRKLLTILNVMVRTHTRWIAPIVGEVLVST

SEQ ID NO: 215442 - protein, 348 aa, unidentified
MIIIGVDFHPEFQQIAWVDTDSGEFREQRLGHRQEAENFYRALAGQKVRVGMEASGHARWFERLLAELQFELWIGDAAAIRTKRVRKQKTDRQDAQLILQLLLEDRFPKIWVPSWENRDLRQLLWHRHRMVQARTRVMNQLQAVALNEGLHCKKRLWREAGREQLESFALAPWASRRRRDLLELLDRLNPTIVELSQAIEQEVEKCPAAQRLQTHPGVGALTALSFVLIIGRADRFQCGKQIASYLGLVPLEDSSGNRRRLGHITKQGNSLLRFLLVEAAQVTVRSDPEWRSKYFHLAMRRGRKIAKVAMARKLAVRMYWMWRQGWDYEQWKKFGSHAGQPGHRDGVQ

SEQ ID NO: 215443 - protein, 366 aa, unidentified
MKKISTVAIQGIQIFKENQLTIGLDLGDRFSHYCILNEAGEVIWEDKLPTTPKGIEEVFGRISRSRIALETGTHSPWVSRQLNQLGHEVIVAHARNVRLIGESSRKNDRLDARTLARLARIDPGLLGPVRHRSAKAQIHLTVIRARATLVSARTALVNAARGLTKSYGQRLPKCDTEQMNWEMAQGLSQELREALDPLLREIESLNERIAEYDGRIEQIAKEVYPQVAVLKQVKGVGPLIALTFVLTLDDPYRFRRSRDVGCFAGLRPGRRNSGMSEPQLHISKEGDRYLRTLLVQGAHYILGPFGQDSDLRRWGLKLAERGGKNAKKRAVVAVARKLAVLLHKLWVSGEVYEPLRNNRKGMAAVA

SEQ ID NO: 215444 - protein, 450 aa, unidentified
MAQGSGLTRGDRNRNRKLEGLRKAVRPDRAVLAVDLGEDKQVAVVMDHEGRVLARKIVRVKAHQLAGLLEWGAERAAKAGFAGLAVACEPTGHRWKALMGLADEAGYAFVCVQSLAVHRAREGDDYTLGKTDHRDAYLIGKLVIRLECYLPERAEEQWARLRHLGARRAGLVTDVTACRQLAADLLGCCWPAPLGVAARPLESASWLAGMAVITGRCCGDPRRLRKLGYEKFLAAVRRELPRWGGKQARHAIVRGLWDALGDTGGVAAQRPGALERLHLLLEDWRTLRIRLAATEQRMVAVLGELGLAELVASIDGMSALSGAVILAETGDLRRFMSGRAVVKHAGLNPSEHTSATISGQTRISRRGRPGLRCAAWRAAWPALLHNTVLRAKYAHLTGRDANRLAGGQARIACAAALLRWLHAVVTTGQAWDASIAAGEIPARPAAAAAA

SEQ ID NO: 215445 - protein, 334 aa, unidentified
MTMVTLSVGLDYHPGCVQVCVMDPQGKVLANGTRPNCAEELNRVVRTFGDRIRAAIEVSPGAAHLAHELVTRFGWSVEMAHPGYVARIKQSPDKTDFGDAKLLADLTRVGYLPKVWLAPPEIQDLRTLTRHRAELTAQKRATKLRVRALLRNYRLVGPANAWTKAWLAWLRDEAPLPEHARWVMERHLDEIDRLTADIKRVEQRMAEVTKDDPFVQFLMSQDGIGLVTAVTLRAELGRVDRFRNAKQMSRFCGVSPRNASSGARQADAGLIKASNPELRRVLIEAAQRLMRFDEHWVDFYKRMRERGKPYCVIVAAVANRWLRRMYHELKTLAA

SEQ ID NO: 215446 - protein, 346 aa, unidentified
MSKIAYLGLDLHANNSTLGHMNEHGNFIGDIEFQTSEKNIVRALKSIRIKKKYLTIEEGNLTFWAAQIAGPLVTQVIVCDPRENALIYKSPYKKDKIDTKKLCRLLRLGELNHVYQPENDERAVFKASARHYIDLRDQVTRIKLKIKAMYRHWGIINVFSDSVYNKSKRNHYLEQVKHLPIRNQLLRLYHLMDQSDEMRISALKSMKQLGRKYDEIREFKKIPGIGDIGAHLFDAIIQTPHRFAKKSRLWKYCRLSIIDRTSDGKPLGYQRIDPSGNGELKAVSYRAFVAAMKGNNEVKRFYLDSLQRTHSPKHARLNTQRKILATMYTIWKKGVAYRSELFTVFA

SEQ ID NO: 215447 - protein, 410 aa, unidentified
MDLLRREVPASALVVAVDPGKAFNRVWLTTGERGMIGEPVSLPVLRDGVDELERLIDASGVIGAPVIGLEATGALHRAWAAEIERRWPGSLRLFAPSETTAARAQLGSRRFKTDDRDCAALVWLVRQGAGRRAEADTVEALRATVRHRAQLVDARRVLQQRLHDQLNALCPGLSAPPGHGRALKLESPTGQSVLACAAAFAGRPPSARSLLARAPGRMTRATAVFWAQRWKRLLAPPADAELRAERVGRELRRWQELQHDIERAERQLEALLGQTAGQILTTVPGVGIVRAAAFSAYTLPIERWPTAEHLYSATGLTPATYQSSTVTRRGRISRQGLPEHRDALMGIAWGLGQHSDAFGARDAELRARGFAPIQARVALARNACRLCWRLLQTQQPYDDRRYARARRRGR

SEQ ID NO: 215448 - protein, 341 aa, unidentified
MITLGIDHHKRYSQVAALDANGTMLMNIKVNNNKDSFQSLLNELGEPCEGVMESGYAWGPTYDLFDELGVQMTLAHAQKVRAIADAKIKTDSIDALTLARLLQADLIPEVHVPDKDIRQQKEVLRQRCWFIRMRTMLKNRIHALLDRNHVDTSGYSDIFGRAGRSLFKTLSLPATEQQLFEQDLSLLNTINDHIKRTETWLKALLTNNRTYDIVLSVPGLGIILSALVALEIGDISRFHSPEKLASYAGLIPSTRASGGKVYHGHLIQGCNQWLRYAFIEAAWAAIKTSAYYRSYYARMKAKKQASVAIVAVARKLSETVYHCLTDNRYYEERAYVYKRSF

SEQ ID NO: 215449 - protein, 411 aa, unidentified
MHPLYGKIAGIDVHKKLLFVVIAEAEEGTRRLRARTGATVSELNEMADWLAAHQVQTVVMESTALYWRPVWLALEARGFRLLLAHAQSNQAPRGRKRDYADAERLIKRLLADELRLSFVPDAEQRDWRLLTRARVNFDRDRCSLRNQIECLLEEGQIKISSLLSDLLGVSGWAMLRALAQGETDVEKLADLRTGRLKATRAQFCQALAGKLRMPQRLLLGYCLDRIEQIDQQLAGINKALQSLLVSHQQVLARLCTTSGIAASSAEQLLAELGPRAASFPSADQLTSWVGTCPGRQESAGVSTSNSSPKGNCWVRRLLVQCAWAAVKTNGGYFQSLFRRWVPRLGKQKAIWAVANKLLRIVWRILHLGESYIERGPVGHNLDSLKRRFNRLSKDLAKHGYTAQLTHPQLSA

SEQ ID NO: 215450 - protein, 314 aa, unidentified
MMFYLGIDVSSKTLDVAFFSPEQGTTRCEQYANTAAGAKKLLRALVPLDVRHVVLEATGGYENRILDAVAASYPTTRIASHRGTAFARSLGLFAKTDRVDAMVLARMAQAMPAQPYVPLAPAVRDLRGLVKGRDQLIQQRDDNRRRIKQCDCAISLASLTRVGRVLANEIKALEVHIREAVKAADAERAAQLLEVPGVGKIAVATLLAFLPELGQRGNRQISALVGVAPYTKQSGRKDGPRQIMAGRPFVRRILYMATLAAIRSAKSSLRGHYQALIARGKPKKVAIVACMRKMLITLNAMVRDGTSWNAPMTA

SEQ ID NO: 215451 - protein, 372 aa, unidentified
MRFYTQQHRFYCGIDLHARSMHVCVLDQAGAVLFDRNLPARPEAVLRAIAPFREDLIVGVECMFAWYWVADLCQAEDIPFALGHALYMKAIHGGKAKNDRIDAGKIARLLRGGTFPVAYAYPKGMRETRDLLRRRTYLVRRRAELLTHLQILNAQYNLAPFPKKLSFAANRTAMDIAQRFADPSVQKSAAVNLDLIDRLDELIGELELYLVRTAKVDDVQTYHRLQTIPGVGKVLALILLYEMHDVGRFGDAGPFLSYARLVRCLHESAGKKLGCGGKKIGNAHLRWAFAEAACLFLRASERAKRWKQQQAARRGEGKALAILAAKLGRAVYRMLRKREAFDEGRFWQGGPGRTGTGSSSLSRTEEACHAGD

SEQ ID NO: 215452 - protein, 313 aa, unidentified
MAQIVSRAGIDVSKRSLDVALWPAGKTLHLERSDPVWSDSLAAWLKAHDVGRIGLEASGGYEAEVVEVLQSHGFEVVVFNPQRIRLFARATGRLATNDRVDAAVIAQASAVLSARLAPKRPAALTALIELLTYRRRLQEWITDCTNQLEHLKDAALRRRTQQRKAALQRERLAIDARIAGLLAGCANWQALSVRLQTVPGVGPVLAQMLLALLPELGRLSRRQIASLVGVAPFDRDSARRRAWRHIEAGRAALRHVLYMAALSAKRYNPVLAAFAKRLAGKPPKVVTVACMRKLLVILNAMVRDGTDWTAAAV

SEQ ID NO: 215453 - protein, 338 aa, unidentified
MAREETGELLVERRLDHESGEADAFYRSLQSSQEPVRVGIEATGPIHWFERLLAELGHELWIGDSARIRASEVRKQKTDERDARLILDLLLAKRFPRIWVPTPAERDLRQLLWHRHKLVSLRTMLGNQLHFLAMSQGLCRKKKLFTKKGRGELAGLALGPWARRRREELLKLLDQLEPPIAELDRAVLEEAQRRDDAVLLMTHPGIGPVTSLAFVLAIGPVTRFPRSKKIASYLGLNPSEESSGGRRRLGAISKQGNTMVRWLLIEAVYPAVRKDLALRQDYQRLKFRRGHAVAKVAIARKLAVRMYWMLRSGAAYAQLVRRQGSPAATLLDASPSLG

SEQ ID NO: 215454 - protein, 379 aa, unidentified
MRASTRRRGPGPSHVLLTPDHAGNVVGIDPHKRTLTAAVVDARGGIVASEHFRVSGDGHRALEAWARQFGAIARWGVENAAGWGRHTAVFLAARDHDVRDVCPNRTPRSDRARQRGKSDTLDAERIARETLAHALLPRAFKRAAGDQTGPDEQTELLALWHRTRRSILTSRQHLLNEAEFLLCELPLELRDQLPDSKAVRPRLAALARCRRPRRDAATALRLRLLADYRQRIAALDSDEQAVCRELAALVHASGSTLDQLCGLATRSVAELLAEIGDPRRFTTLGFARFNGSAPIPASTAEGPGEPVRHRYNPGGNRRVNAILHRMAVTQLRCEPRAQAIYANARARGHTNKEARRILKRHLSDVIHRRMLRDLAPQPS

SEQ ID NO: 215455 - protein, 405 aa, unidentified
MLFVGDDWAEDHHDVEIQDESGHRLAKARLPEGVVGMARLHALLGEHLDSDADSGQVAVGIESDRGPWVRALVAAGYQVYAVNPLQAARFRQRRSVSGAKSDAADAHTLADMVRTDRHQLRPVAGDTELAEAIKVVARAHKTLIWERTRHVQRLRNALREFFPAALEAFDDLTSGDALELLGKAADPAAAARLNRAQITAALRRAGRRHVAERAEQIQDALRGEHLTQPPTITAAYAATVRSQVAVLITLSAEITTMQGEVEAHFGQHPAAEVYLSQPGLGAILGARVLSEFGDDPARYADAKARKNYAGTSPITRQSGKHKFVLARYVHNDRLLDALGRQAFTALTASPAARAYYDQLRDRGKDHNAALRQLANRLVDILHGCLKTNATYDEATAWPASSRAAA

SEQ ID NO: 215456 - protein, 416 aa, unidentified
MLGINQISFNQVVSRGCGIDVHQKVVVATIGGEGLTKATREFGTFTRSLTELKDWLLENGVTHVAMESTGIYWKPVYHVLEPTTLKVWIVNARHIKYVPGHKTDKQDSAWICKLLLAGLLKPSYIPAKEQRELRDLTRFRTKMIQDVASEKNRIVRILEDCNIKLSSVLSNTQGVVATKLIDKLCEEGTITMSDIEEVYHKRLEASKEDLYEACQGLIDKHHIYLLGLIRQDIASTEAVIKNLNGRIKEVLSGYDNVLENLKAIPGLSTKTVEDLVAEIGLDMSVFPTEKHLASWAGMCPGNNESAGKKKSGRTTHGNKQVKAVITEAAWAATRTKNTFYSARYHRVAARRGKKRALIAVGHSILKSVYHVINGMEGYKELGADYVTQRVEKRRKLYLKKELEKLGYAVQLIQPVP

SEQ ID NO: 215457 - protein, 361 aa, unidentified
MTTTTPTAASTILAIDLGKYKSVACLYSGSPDSARFDSFTTDRARLAQLLQRCQPSVVVIEACLLAGWVHDLCAALGFTCLVANTASEAWKFKHLKRKTDKDDALRLAQLHALGQLPTVALPPPATRQWRSLIAYRQTLVGRRVAVQNRIRALFVAQGLPAPRGAKAWTATGLEGLALQAKPLGECGPDDLWRGLLHLALAEYRQLRALLDDAEGRLDALAKSDRNVQLLESTPGVGPRTAEAIVAHLHQPERFLSGKQVSAYVGLAPKQFQSGETDRRGRITRRGPALLRKLLVECAWVMLRYNGWARAVYLRLTHGGKTHKKQAIVALARKLLVRCWAMLRDGTPWRDKTPAPAVAAST

SEQ ID NO: 215458 - protein, 339 aa, unidentified
MGRYVGVDLHKNMFVVSFYTAESGKHTVKSYLLKEMAGFIGDLRPSDTVAVESTNNTRYFVNSISEYASEVKVINPSQFKVISKSVKKTDENDAKVIAEFLSKDMVPEVRMKDKKTAQINSLANTRDKLVKLRTALKNKIHNILSSHGILLKRESLTSKKGLQRILQEPVDPVAAVELEVIVTQIRSLNEGIKKLDKELEDKGSELPGHENITSIKGIGKKSGSILLSVIGDINDFENEKKLAAYFGIVPRVSNSNETEWQGRITKRGSKLGRTTLVQCTLVAIRYSPRLRIFYDRIKAKKGSGKAIIATAKKLLNIIYYTLKENIVFEDFTNGVIRTT

SEQ ID NO: 215459 - protein, 371 aa, unidentified
MSQYNTDTVWVGMDVHQDSITAAILFGNTSEPQVERLPGDLNAVRRMFRRLNEHGTPRSCYEASGAGFVLQRCLEHDGFHCEVIAPSLVPKKPGDRRKTDRLDAIHLAHHYRAGNLVPVTVPSQEQEEIRQLVRSRLAVQSHVVRLKHRIVRVLATHGHRFTEGKSNWTQKHRTWLRKLHRELEGPLGTILAHHLEHLEYLEGQKNALEMEIDRYARSEPFRQKVEALCCFRGVKTLTAMTILTELGDIRRFKKATGLMAFSGLVPSERSSGNVRRRGRITKSGSQELRRILVEASWHYRKQATSDLVLRRRRMGQNPEVVSIAIKAQHRLQKTYWKIATRKHPCTAVTAVARELCGFIWSALWALESQED

SEQ ID NO: 215460 - protein, 338 aa, unidentified
MTTGLAAGTYELFVGIDIAATTAEVSIQRPGAKAGRSFKIDQTPEGFHRLVHTLQATDNEPSHVLVVMEATGSYWMSLATRLVHEGFRVSVINPSQAHHFAKALLKRAKTDAIDAQTLAQLAMVLQPEPWMPPPKIYYELQQRLAQRDDLLNLRQQVRNQLHALDQHPEVSASVRTRMERLLVLFQSQIDEVEGEIAAALNQESAWAAAAERLQSIKGVGWVTAAWTLVTTLNFTTCDTVDALTAYAGLAPMPRQSGSSVWHRPSIGHSGNGRLRTAFYMATLTAARFNPAIKAFDNRLLEAGKPEKVARCAAARKLLHIAWAVVKKDQPFDPNYAQG

SEQ ID NO: 215461 - protein, 365 aa, unidentified
MLIIGCDFHPSWQQVSWLDTETGDTGERKLVHGSGDAQQFYEQLAAPVLIGMEATGNSQWFIELVEDMGHEVWIGDAAQIRASYVRKQKTDKRDAMHILKLVVQGRFPRLWTPDREQRDLRQLVLHRHKLVEIRSRVKNELQHLSMNKGVQRKHKLWSQAGQRMLRELPLKPWAACRREDLLGLLSMLSQQIGKLDAAVQKAGEENPQAKLLMTQPGVGPNTALAFVLTIGDVSRFRRGKQVASYLGLIPRKESSGGRQKLGAISKQGNRMLRSLLVEAAQTAVRLDPGMRKQYLHRCHQKPKGVAKVAAGAQVSRTPLLDAAHECGVSRDRWHREQLAGGPGRRKLDRRIDWALSHPARGGMFA

SEQ ID NO: 215462 - protein, 355 aa, unidentified
MKYYAGIDASLGSCSLTVVDGNGKIFREGKVASEPVALIAWFLALGVTLERIGLEAGPLSQWLYAALREASLPIELIETRHVRAALATMSVKTDRKDARGIAELMRVGWFRPVHCKSLAAQEVRAILTSRKLVQKKLNDVAMHLRGILRNFGLKVGRATQSSFAGRIRELVAGHATLEEIATALLSVHETLLREFGKLEKRVRAMARADKLVRRFMTAPGIGPINGLTYASAIDDPLRFASSKKVGAHFGMTPRKYQSGETDINGRISKVGDASVRTALYEAAHIILTHPVKGSALKSWGMRLAKRAGMKKAKVAVARKLAVILHRMWVDGTDFDFSRGAAPAQPAKAARSSPTD

SEQ ID NO: 215463 - protein, 349 aa, unidentified
MRFYTKTHRHYCGIDLHAKTMYVCILNTDGEILVHRNIRTDQQRFLALIEPYREDLVVSVECIFTWYWIADVCAREHIAFVLGHALYMKAIHGGKVKNDKLDSHKIALLLKGGMLPQAYVYPAVMRATRDLLRRRLHLARQRAHLIAHIQNTVHQYNLPALGIRLGKPTERDGVAECFPDPVVRRMVQLDLDLITYYDQQLAQIEWQLVKQARGHDVQMYHLLNSVRGIGKILTLVLLYEIQDIQRFPTCGQFLSYARLVRCTKESAGKIVGKSNKKIGNSYLRWAFGEAAVLFLKGNPEAQHWIEKQASRHGKGKALAILAKKLGQTVYAMLTKNRCFDEAKFMAHLQ

SEQ ID NO: 215464 - protein, 426 aa, unidentified
MNEAEDTRLKEFRQFKKEIRGSKDHLIVGIDVAKEKHHAFFGTATGKTLFRRLIFDNTIEGFEKLLTQVRAIQVAQGLPKAVFGLEPTANYHKPLGEHLIKCGRMVVLVSGVAVKRNRELLDGRWDKHDTKDAANIADLISQGKCLYYDYPEMGLRDLRTLLSLKKRLKKQEHSYRVRIRNHLLAQYFPELDRFSGRPEVEAIVRWCLDTSELAGLEFDQFVQRVVPGRKTLAQQQRLQTIQQLAIDSIGCEMGEGAHFEAEVMVDGLRQLRETIKTTDERIRETCRQFPEYGYLLTIPGFGPDVSAKVTGALGNPFRFQNRKQVLKMAGLDLGAYRSGETSNTATPVISKRGKADLRYALYQAAFIASTRYRPWIEKYTDQLQGRAKEPGIKTKRWVKLSAKFLIIAWTIMKKKEPYDPSYLTRD

SEQ ID NO: 215465 - protein, 342 aa, unidentified
MNIPVRIGMDTSKSVFQLHGVDENEVVVVRRQFRRAEMIRYFERLPPVLVAIESCGSSHHWGRLLQSFGHEVKLIPPQYVKAYVKRGKNDAADAEALCEAVTRPSMRFVPVKSKERQAACMLMTVRERLVSVKSQLSNASRSYAAEFGIVGPAGRQNVAALIKRVLEDDILPEMARDLFRFQADEYAAVEARLAKIEAKLMKWHRNDDISRRIATIPGIGPIGSSMLSMKAPPPETFRSGRDFAAWLGLTPKDHSTGGRQRLGGITKAGDSVLRSTLIVGATALLRHIRKGRHKPTPWLASLLERKPPKLVAVALANKFARIAWRLMISGGVYNQPVAAMPT

SEQ ID NO: 215466 - protein, 410 aa, unidentified
MNPLYVGIDVSSRSNVAYLMNPDGSKHSVFPIVNSKAGCQQLVKRIVSAMTGNGLSEMKIGMEATSIYGSHLVYTLKEDFSLSAYTKEIHVLNPKQVAKFKESYNDLPKNDYVDAYVIADCLRFGRINNEVYLGDYRHEALKKLTRARYSAVVNLSREKQRFLNTLFLKYSTFAQEKVFSDTFSTTALAVYEEFESADQLALMDLHELTEFIKEKGKNRFPDPDAVAKAIQKAARSSYRLPKTVNDSVNQVLSISISSMRALEASIKQYDKAIAEQMNAISNPLISIKGIGPVYSAGIIAEIGDIHRFKNQASLAKYAGLAWKQHQSGGFEAENTPLIHTGNRYLKYYLCEAVMSLVRCDTEYNSYYHLKYKEVNRAQHKRALVLTARKFVRLVYCLLSENRMYIAPEER

SEQ ID NO: 215467 - protein, 353 aa, unidentified
MLTIGVDAHKSVHVALAIDEAGREVGDWQGPNSESGWRSLTKWATCLGEARQWGIEGAWGYGRGLAQHLVDLGETVYEINARWTAMRRRSAHKPGKTDQLDASAIALFVRQESGSLPRVLAEDDTAILELLTAQRDGAQAEANRLRNQIHALFLQVDPEYKQHLPQLNSKAGLEALRHYASPRDGTLSQERARAIRRLGERLVLALVQAEELAEEIRQAAAVSYAPLTRLCGVNLLTAGRLAAILGPGNRFATDAQLAAYAGVAPLEASSAGHTRHRLNRGGNRRLNHVLYFIVLTQAHHLPEAKAYLDRRVAEGKSRREAHRALKRFVVRAIWKLWQEYQANRNSAICEVAA

SEQ ID NO: 215468 - protein, 353 aa, unidentified
MSYIIGCDAHKHYSQFAVYEGDQTRGKQVRVEHERGAIREFLSEFPEGTPVALESIGNWYWIVDEMEQAGCKALLAHPAKAKAMMGNVNKTDKLDARGLAMLLRNGTLPTVWIAPSQVRDERELPRTRMALCKIRVALKNRIHASLAKYNLSLPTESDIFAPKWNSQLKEVIEQLPAETQKCLQQELELLDKVQGQISAMEDRMKVCISLTPSMQLLKTVPGVGDILAIVIGTEIGLIERFSSAEQLASYAGTVPAVKSSGGKVRYGHTPKESNHYLKWAFVEAANGPAQYSKKPHWQHRHVTRLYERVKLRKGHSVAVGAVARHLAEATFWILNKNEPYREPTHQKVLPKQA

SEQ ID NO: 215469 - protein, 343 aa, unidentified
MSEISIVGLDLAKNVFQVHAVDGSGKVVLRRQLRRGAVEKFFAQLSPCTVGIEACGSAHHWARVIGRYGHQVRLMPPAYVKPYVKRNKNDGRDSEGICEAVGRPTMRFVAVKSVEQQATMAVHTARALLVRQRTMTANSLRACLSELGIVAAQGMEGLRQLMTKLEAPSEDIPEVMRSALLILARHWQALDADERALEQQIAKAARGDRQARRLMEVPGVGPIIASTVLAKVPDAKVFRSGRDFAAWIGLTGRDHGTGGKHRPGRISKQGDRMLRALLISGASAHLRQQKRRGVSDPWLRDLLARRPYKVVMVALAAKTARILWAMLVKGEPYRDRASAPAAA

SEQ ID NO: 215470 - protein, 416 aa, unidentified
MEQIFMIKENYMYVGIDLHKETHTAVIIDCYNQKLGEITFPNRPADFPKLVTKVKKCNTDGKEVVYGLENAYGYGRALAVWLIDKGYFVKDVNTAISHRQAKHRGAMYRKSDSDDAKAIALATLNMLDKLPDACPNDAYWSLGQLVHRRDNIMKQRTRLVNQLHEQLCIVYPSYKQFFNDISRPTALYFWEHYPSRKYLKGKSVEDLRAELVPVSHNKCSTKTCEKILDAVASDKVKNNNFQDARDMVTLSIVSDIQHYDKQLVEVDKMLEQMYKMLGCTLTTIPGVNVITAVKILAEIGDIKRFGNANKLAQFAGIAPLHLSSSGKGKDVATKQGNRRLQATIYFLAIQMVQVSSKGTPRNPVVRAYYEKRKAEGKTSQQALICISRRLISIIYGMLKNGTEYRMPVVENAGENR

SEQ ID NO: 215471 - protein, 367 aa, unidentified
MKKVSTVATKQSRNFSQPKLTIGLDLGDRSSWYCLLDEVGEVLQEQKLGTTPKAMWEVFGGMPQCRIALETGMHSPWVSRLLSELGHEVIVAHARNVRLIGESRKKDDRLDAQTLARLARIDPKLLCPVKHRSAKAQADLSVIRARAGLVRARTALVNTARGLAKSYGERLRGCNVRNMNPEKAEGLSPELQRALEPLLASIESLSERIREYNERIESLAQESYPQVALLKQIKGVGTLIALTFLLTLEDAHRFRKSRDVGCYVGLQPGRRNSGQSEPQMHISKEGDPYLRTLLVQGAQHILGPFGADSDLRRWGLKLAERGGRNGKKRAIIATARKLAVLLHRLWVSGEVYEPLRNSNQRAMPAAA

SEQ ID NO: 215472 - protein, 355 aa, unidentified
MNQEKYIGMDVHQATISVAVMDGKGKLIMECILETKADTILEFLHGLRGTVSVTFEEGTSAAWLHDLLKPHVAHLVVCDPRKNALLKDGSKSDRIDARKLADLLRSNQLHPVYHGEHGVRTLKELGRSYQTLTKDVTRVMSRIKSLYRSWAIPCSGTTVYGPRHRAEWLAKIPQPGVRLRAERLYQQLDLLQPVRQEARRDLLRESHKHHAVKLLRQIPSIGPIRAALLVALLQTPHRFRTKRQLWAYSGFAIETHDSGEYRYVRGKVQRNRERITVRGLNDNHNHDLKNLFKGAALSASTQPGPLHDFYTALVEKGMRPTMARLTLARKIAAITLTIWKKGASFDAKQLHRQAA

SEQ ID NO: 215473 - protein, 338 aa, unidentified
MPLYGGIDLHANNSVVVLLNEQDQRIYHKRLPNDLATIVEQLAPYHADIEGLVVESTYNWYWLVDGLMDAGYRLHLANPAAIQQYSGLKYTDDHSDARWLAHLLRLGVLPEGYIYPKAQRPVRDLLRKRAHLVEQQTANVLSVQNIILRNTGARLSTNRIKSVSQAEVEALLPDADQALAVSSALAVLHCLAEQIKTVETRVRTRIQSTPLYELLQTVDGIGPILAQTILLETGDIGRFPSVGDYASYCRCVDSTKVSNGKRKGQGNVKNGNPYLAWAYAEAAHFARRFNLKVQRYYQRKQAQTNVPVAHKTVAHKLARACYHMMRHQVPFDAAKAFG

SEQ ID NO: 215474 - protein, 340 aa, unidentified
MRALYAGCDLHGNNNLIGVIDGEGKRVFKKKLSNDLTLVRDTLKPFQEELVGIAVESTYNWYWIVDGLMEEGYEVHLANPSAIQQYSGLKHADDQHDAFWLAEMLRLGILPEGYIYPKEERPVRDLLRKRGHLVRLRTSLVNSLQNILSRNLGRKVNVNDVKALKEDRITLLLEMSEDLALAGRVSKEAIDHLTRQIYKIEWAVQKKIALKEEYRYLLTLHGVGKILSLTIMLETGPISRFATVGDYVSYCRKVPSQWTSNGKRKGSGNRKNGNKYLAWAYSEASEFARRLYPEPRAYYQRKMQKTNAAVAHSALANKLSRAGYYVMRDQVPFQPEKLFG

SEQ ID NO: 215475 - protein, 356 aa, unidentified
MNNRKYIGMDVHQASISIAVSDAAGKVLMECIIETKAATVLEFIQGLRGSLWVTFEEGTSAAWLYDLLKPHVTKIVVCDPRKNALLKAGNKNDRVDARKLGELLRAELLTPVYHGESGVRTLRELSRGYLAVSKDLTRVMNRLKAIYRSWAIPCAGQQVYSPRHRAAWLEKLREAGVRRRAEQTYQQLDFLMEIRKETRKELLAESRKHPARKLLEQIPRLGPIRVALLIALIQTPHRFRTKRQLWNYCGLGLRTRSSGEYRYTGGQLQHARKPPALRGLNVNHNHDLKHLFKSAATQAGNDPLGAFYQNLLAGGMEPPMARLTLARKIAAIALKIWKKGERFDPAKLKTTSSLSV

SEQ ID NO: 215476 - protein, 321 aa, unidentified
MARRREATPIWIGIDVAKQSIDVAHGPAGDLERVERALEPLQRWARTLPKEARVVVEATGGVERIVTTVLRARGIAVCVVNPRQVRDFAKATGQLAKTDRLDARVLAHFGAALRPRVTLARASDVDALRALLDRRRQLVETRTAEKHRRHTAPAAVRGSIDDHIAWLDEQIEQLDHAIEVAATACTLLTEPLGRLQAIPGVGRVVGLTLLTHLPELGTLDRKRIAALAGLAPFAHESGRQRGRRAIWGGRGDARAMLFLAAQSAARWNVPLRLFYERLVGRGKSKKAALAAVARKLLIAINAMIRDQRPWQPAIVAEPSCC

SEQ ID NO: 215477 - protein, 347 aa, unidentified
MLADELDYVLGVDTHRDEHVIAVVTAPAGAVIAATAAAASSRGYRELLAVAGQHAPGRRVWAVEGSGSYGAGLARFLAERGETVLEISRAGAPQRRLKGKDDALDAARIARAALAADTLASPRAGGRREALRLLLIARGSAVDVRREALTQLRAVIVTAPDELRQELRGMPVGKLLDRCSRLRRTPAAADQLATRLVLRSLARRIQAATVEADELEREILAHVRALAPRLLDEPGVGPIVAARLIVSWSHHGRVRSEAAFARLAGVAPIPASSGQTTRHRLSRGGDRQLNRALHTIVLHRRHHDPATKAYIEKRISEGKTRRDATRLLKRYLARHLYRLLNGAPIMT

SEQ ID NO: 215478 - protein, 353 aa, unidentified
MRYLGLDVHMTATVWCLLDEDGETVERGKTPTTAATLTALVGRLGEEHELLAGQEVGTMSYFVHDVMAAAGVKLLSFNAHHLRMIASSRKKTDKRDAYWIAKTLQTGMTPHPVYIPTGEVRRLRQLLSQRDAVSCAQKRWLLRARTSVRATGRAVPPGRTVAAILRALLSEPEGIDDGLAEALERCQRMHEALSGELKQLEATIRRESRDIDAIQRLQTIPAVGLWVSVTIYAWVGEVSRFPTARSLAAYAGVVPSVWQSGASTRSGGITKQGSSALRRILVQAGHVLMWRCQSAEAALLRAIPMRVHTARKRRKIAVIAAARHILRIAYYVLRDGTVYDPARLAAAEPAAAE

SEQ ID NO: 215479 - protein, 337 aa, unidentified
MRNVCGLDVHKDNVLVCIDKENGEKIQFKSGILTQELDNLRDLLVKEGVGEVAMESTSIYWMPIWRVLDADFKLFLVNPYAIKQLPGRKSDVKDAVWIATCLRKDLIRGSYVPSSIIQELRQYNRRLFDINKMLVYLQNKLDAALQRCNIRFSNYVSNVDTKSYQEIVKLISNGESRAAELIKKVHGRTINRWGRASILASLEGVVWQADRDILKQYLEELEMLRRHKAECLVAMRSICREHFSEQLKNLTTMPGVTEDSGVRIIAELGTDMSMFATASMLVGWTGLKPRNDESKTASSNPEALHMGINTYASCSLNVLGEPAGHKDASSTDSRITK

SEQ ID NO: 215480 - protein, 311 aa, unidentified
MNPPEVYVGVDVSKAVLDLSPFDEQSCKVPNTPTGIESLLGRLKRLGRAVMLCCEATGGYEKLLVAMSLKAGIAVAVVNAKRVRDFAKSKGLLAKTDAIDARILAEYGACHHPRAAVAAPDWQPKAHALLVRRSDLLAMIHQERCRLDPEPEKCVRAGIKAHIRHLQALVDRLERDLWDLCKTDSDLAKQVQRICQIQGVGRLSALAVLAFVPELPSLTDKEAAALVGVAPFNDDSGKSKGRRRTAGGRKRVRRFLFMAALAASRCNPVLKEFYARLRAKGKPFKVALIAVMRKLIETIHRVLTNPSFQPA

SEQ ID NO: 215481 - protein, 370 aa, unidentified
MQNNIFVGLDVHKATLAVAAAEGKRGGEVRAMGNIAHNPTQVAQLAEKLGKAGQRLCFCYEAGPCGYDLYRQLTALGHDCIVVAPSLIPMKAGDRVKTDRRDAVMLAKLHRAGELTAVWVPDRAHEAMRDLIRARATAVQILGKARQHLQGFLLRHGRVFAGRKGWTFAYRRWLSAVHFDHPAQQIVLQDYIHAVTDAEARVGRLTKQIEELVPQWSMAPVVEAMQAMRGVALIVAVTLVAEVGDFSRFDNPRQLMAYLGLVPSEHSSGATVRRGGITKAGNALARRALIEGAWTYRLQARVSLTLLRRIDHLPQNIRDIAWKAQVRLCARYRRLAAAGKPKTVVNTAIAREMLGFLWDIARQIKVSSAI

SEQ ID NO: 215482 - protein, 334 aa, unidentified
MDQITTVGIDLAKSVFSLHGVDAAGRVVLRRTVRRDQLVATVAGLSPCLIGMEACSGAHEWGRRFQALGHTVRLMAPKFVAPYRKSGKNDGNDAEAICEAVARPSMRFVPVKSVEQQALLALHRVRQGFVVERTALINRLRGLMSEFGVVLPLRSITVRRQASAGAEGLPELARRAVGDLLEQLRVLDERIGGYDREIEAQARLSEPAQRLMKIRGIGATTALAIVATVGNAREFKNGRQFAAWIGLVPGQYSTGGKPRLGHISKRGDAYLRNLLVQGARSVLNSAASHQDHMSRWILDLQPRRGYYRTLVAIANKNARIAWALLAKNETLRAA

SEQ ID NO: 215483 - protein, 342 aa, unidentified
MNFIGLDIHKKTISYCVKDISGKVLSEGKIPATRQGLREWVGTLAKPWTVAMEATMFTGWIYDYLRPHAAAVKVAHPLMLRAIAVAKKKNDRIDAGRIADCLRCDFLPECYMAPTEIRQRRRTLRYRKLLVRQNVQLKNKIAQLLMESGVTYNKEKLHQQGYFHQVLPANPEIDPSLWPLLKLTREMIERTQKTERALLRSLEADPLLAARVERLMTIPAIGHVTALTWVLEVGEVERFHSVKQVISYCGLCSGEKTSADSSRRMPISKQRNRHLQTVLLEAAHLAPRLNPELAVLYEREAAQSNRNQATIAVARKLAAYLLAIDRGERAFVTHQVHSRVAA

SEQ ID NO: 215484 - protein, 392 aa, unidentified
MRTIALDLGVRKIVLCEVRDGEVVHRKTARSLHELDDFLGADRPPARVAFEACREAWHVHDRLIALGHEPFLIDTTRVRQIGVGQHGRKNDRLDAEALARALAQGRVPRAHVLSPARRQLRAELSARNALVMTRAQYVTTVRGLARSEGVMLPTCATETFVARVRAASLSPAMTAIVAPVLVVLDLIGAQLAEVETRLETLARTEPVIALLATVPGVGLIVASTFVSALDEAGRFRDGHSVASYLGLAPSENTTGMAGRRLGAITKQGNPWARAALMQASHTILRVAPAEDALRLWGEAVIARRGKMIGVVALARRLAGVLWAMWRDDRPYDSARLAARSAEGLREDAYATLSQADRLAAIADAEKKIYARTTPRRPRRALARKTTEVTRPG

SEQ ID NO: 215485 - protein, 431 aa, unidentified
MKNLTSQRIEEITIGTLIVGVDIAKEVHWARFVDYRGVEHGKAISFKNSRKGYESIVAKIQEICKIKTLRYPIEAVIVGMEPTGHYWKPFANYIMIEGYRVVCVNPYHTKKSKELDDNSPTANDKKDAITIARLVKDGRFFDPYLPQEVYGELRGLSNARVSAMKRSSAVKNTLTAIIDEYFPEIYTVFKNPLKGKASRQVLRGCPFPAIILEMSDDEILAEIKKAVKKSVGIKKVRELIDAAKDSIGVRNGIDAARLRLTWLLEELELLEKQLAEIESAMETALNKTGYAEQILGIKGIGVVTAASFLGEVGDPLRFQSARQISNYAGYNLVEDSSGKSKSGTIISKRGRAQLRNILYKMAFNMVGNNAEMKTLYLHLIARKGNPLKKKQALVVISKKIIAVIYSLLKKQETYKPELVFGAARIELMQAA

SEQ ID NO: 215486 - protein, 361 aa, unidentified
MQNQAQSNKINFAGQNIYVGIDVHKKEWTVCIFSENLEHKQFSQPPKAEALKSYLLNNFPGARYYSVYEAGFCGFHVHHDLEASGITNIVVNAADVPTTHKEKVNKTDKRDSRKLGRSLRAGELTGIHIPSRKTQEDRSLMRLRYTVRKDLSRIKCRIKSLLNFYGIEHPPEFSEPSKHWSRRYMEWLRKAPMTEDSGRKTLEFLIAEAEELRRVVLSATRQIRILSRTASYSKNYDLVFTVKGIGLITGMSLLTEIEDINRFASTDHFASYIGLVPLCHDTGEKENDGSITSRANRLLRDMIVESAWIAARKDPALLLAFSNLCKRMEPNKAIIRIARKLLNRIYNVLKTKTKYVCGKVK

SEQ ID NO: 215487 - protein, 426 aa, unidentified
MRVMHERVAGIDVHKDMIKVGIRGPGHRAWTRTSEVLEYRTFYGVLQTMAADLRERGVTHVVMEASGVYTEPVYYALMERDFEQVAVINPAHAKALKGHKTDARDALRLAELFECGLLRGSYIPSQALKDLRDLTRYRIKTVQARTSEIQRLAKALESAGIKLDSVVSDLAGKSAGLMIEGLISGERRGQVLADLAIGRMRTAGKLADLSQALVGRFTDHHAALCRLHRDRIALLNTAVGDLEARIAVKAAPYQRELELLKSIPGLGDAVASAWLAEIGPAPHEYFATHEKLASWVTLCPGNHMSAGKRKHGRTGDAGTYIKPMLVQAAWSAIKTEGRLQARYHKLVRRFGGPKNPAAAKKAILAIAHTLLKIAYQVLKSGKPYEDLGTDFYAQRESPEQRRAYLLRQLEKLSPGCTITITPAETA

SEQ ID NO: 215488 - protein, 467 aa, unidentified
MSGKADAMQDRDRNNAGSPKQIAGLPVVRHKVAGIDLGSERHWVCGPTIEGSGREVADFGATTSELIRIAKWLQERKVESVAMESTGVYWIAPHEVLEAEGLEVLLVDTRKLAQVPGRDKKSDPQDCEWIQRLHSCGLLMGSFRPKEAVCMLRTLVRDKGNLVAEAGDWLRRMQKSLDQMNVRVHRAVSDIDGVTGMAIVRAIVGGERDARKLATLRDPRCHKSEEEISEQLNGHWREDHLFSLRQGLKMYDSIQERITDYEKEILRKLAEMEREECRGKAVPKVNNTKKGQAIKRHGEEPMRQALYRMSGVDLAGIDAIGVETVQVVLSEYGPDLSRFPTEKQFVKHVTLAPHRPTSAGKPVKKKKRNSASTRVAAALRMAATSLRHSQTALGAYYRQHARRIGGDVAVFATARKLATIIYRLLRWGQPYIDEGAEAYERRFREGRIKSLKARAKDLGFQLSPITA

SEQ ID NO: 215489 - protein, 376 aa, unidentified
MTQTDVQYPTIHLAIELSRSVWLVAARMPGVEKPSLHRIDGGDTAALLALAAALRARAAARLGAPVRVACCFEAGRDGFWLHRLLTAEGLAAYVLEPTSIPVSRRARRAKTDRLDALGLLRVLAAYLGGDRQACSMVRVPTPEEEDAKRPHREREELVRERVRLENRIAALLATQGARERPSLRSWERDLAALRTGDGRPLPPHLRAELDRLRRRLVLTLELIREVEAERDAALAAGPRDAAGRKIAALCRLRGVGANFAAVLTREVFYRTFDNRRQLAGYVGLAPVPHQSGEADRDRRISRAGNARARATLIQLAWLWLRYQPDSAPARWFRDRVGALRGRTRRIAIVAMARKLLVALWRYVETGLAPEGVEVGA

SEQ ID NO: 215490 - protein, 429 aa, unidentified
MNYTQNEKIEQVADTTMVVGVDIGSQLHYARAFDNRGRELTRRVFSFRNDIEGFNTFNLWVETLKTENEKTDVIIGCEPTGHYWFAFAKYVTDRKHKIVMVNPFSVKKIKELDDNSPKKTDAKDPKTIAKLVVDGRYSEPYMPEGIYAEIRDLVYSRDRIIKQHNISANRIQRWLAIHFPEYLGLYTRFDASSGLAILEKAPLPEDVIALGVDGIRKIWHEKKLRGRGVTEVRAMTLVEAAHNSVGLSGGYGTRSELYMLLEEHRLWTVQMESINKVLEETIRKVQYVEKLLAIKGVGMITIAGFIAEVGDIRRFKSPKQIQKYAGLELIENSSGKHKGKTRISKRGRRKLRKILYQVMIPLLARNKEFREIYDYYLTRVKNPLKRRQAMIAVSCKLIRVFYAVLTKGVDYDRTKMLSDIHRNSGFIAA

SEQ ID NO: 215491 - protein, 376 aa, unidentified
MNDSSKIYIGLDVHKATIAVAVAHSGRGEPEYYGEIPNDGKALRKVLRKINPDGEVLELCYEAGPCGYGLYRELQGLGHECTVVAPSLIPRKPGERMKTDRRDALALARLHRSGELTAVWVPGEDQEAVRDLTRCREDMKAAEKRIRQRLVAFLLRHGRVYSGKSRWTQGYWRWLEAQRFEYPVQQVVFQEYVESVKEARRHVRWLEDEMGRVCERWEWRAVVEGLTALRGISLVAAMTTMAELGDVTRFDSPRDLMGYLGLVPGEHSSGGQRRQTGITRTGNGHVRRVLVEAAWNYRFPARKSRCIEQRAKKAPVRVQALAWACQKRLCGRYRKLIWDGKNNKETTTAVARELAGFIWAIVCEVMGKPHHSRALA

SEQ ID NO: 215492 - protein, 316 aa, unidentified
MNEQVFVGIDVSKQNLDVAVRPQGRHFVTPNNDRGIKQLVKRLATLKPQLIVLEASGGYEFLVTAALAEALQPVALVNPQMVRKFAGATGKLAKTDRIDAQVLAHFAEALRPEPRPLPDQAHQVLKAALQRRQQVVKMIGQEENRLEKTFIPSVRQDIEVHLTWLRRRLEQLNRDLDTQIRQSSLWRDRDRLLQSFTGIGPVVSKAIIAQMPEIGTLPGKKASALAGTAPYNRDSGRFRGKRMIRGGRSYLRRMLYMAAVVAARFNPVIRAFYQRLLAAGKPKKLALTACMRKIVIILNAMVKHNQPWNQFVTQVP

SEQ ID NO: 215493 - protein, 403 aa, unidentified
MSYFVGLDWASQEHAVCVIDEQARVIWRATIPHTADGMTALRTKLTKFAAPSSLPVAVERPSGLLVDTLIDAGFPVIPIHPNVLKASRPRYSAAQGKSDPGDAFILADLLRTDGHRFRPLLPLSDETRALRALVRTRDDLVKQRLVLANQLRALLERFWPGAAALFFDIDSPIALAFLRRYPTPLSAQHLGEKRLQAFLARYGYCGRRPIQDLLARLHRAPTGHVGESEMEANGELVRALVAVLEPLVAQIQRLTAAIEHAVAAHADGPVFTSFPRAGRLNAAQIFAEIGDDRQRFTSAEHLAAEAGVAPVTYQSGKHRGVAFRWACNKRLRRALTTFADNSRHASPWAAAIYARARARGCAHPHAVRILARAWLRVLWRCWQDHTSYNPTIHGALVRMARPA

SEQ ID NO: 215494 - protein, 349 aa, unidentified
MEAYDGPQIVGMDLHRRRSVLVRMRPDGQKLATARTGNDPAKLRKQIARAGECPRVVLEAAYGWYWAAGALEAAGAEVHLAHPLGVKGFACRRVKNDEKDAADLADLLRMGRLPEAWIAPPEIRELRELTRYRIKLVHIRTSCKDQVHAVLAKLGVPVTCTDIFGVWGSTWLDELRLPQPYAGKITSLRKLASELTAEITLLEKVIADLLEHHDGYHALQQLPGIGKVLAAVIVAEIGDIRRFRHPGQLCSWTGLTPRHRESGTKIARGHITKQGSRVLRWAMAGAIQRLPADTPVRDARDRIIARRGKEARNIAKVAAARQLLTCVFYAMRDGQVRSLTARAAAKEAA

SEQ ID NO: 215495 - protein, 427 aa, unidentified
MIGLDWADQKHVWSMRTADGHRQRGELNNSPEAIEVWAAELALRFAGQSVAIGMEQSRGAVISMLSKYAHFVLFPVLSTSVSNYRKSFIPSGAKSDAKDSDLILDLLIKHPEQLQPLRPDTVETRSLQFLTEERRKQVDLHTSQVQSLTNWLKQVFPQVLRWFDNVSTPLVHDLLLRWPTLPDLQKASAKTLLNFFHRHNCRSEERNQQRLAEIRQAVPATHDPALLKAGVLCIQNTVRLLAQMQTGLSALEKQIAEVFRSYPDRAIVESFPGAGAALEPRLIAAVGTQRDRFTSAQSLAAFAGTAPVTESSGNSRWIHWRWACPKFIRQIFHEWANCSIKSCDWARDLYDQLRARGKSHHAAVRALAFKWIRIYFRLLARSCALRRATLPPVPTSTGGENANANPTGNQKSQSQVPVQNQWRFSKD

SEQ ID NO: 215496 - protein, 470 aa, unidentified
MKKSTRTTPLVSKGISKTEPIPRHLEQINQWAAGIDIGATSHFVAVPEGCTTTAVREFKSFTPDLYSLAEWLKECGIQTIAMESTGVYWIPVYELLEEKGFEVKLVDARRVKNVSGRKTDVLDCQWIQQLHTYGLLNGAFRPDNEICALRSYVRQRSMLIRSASRYIQQMQKALTQMNLQLHHVITDITGDTGMRIIRAIINGEREPALLANHRDPRCKSSKEDIEASLTGNYREEHLFTLRQSLELYDYFQEKIQACDSEIEKSLSGFSTNTLGKDFSVERLKFNKKKVSKNAPAFNLREELYRLTGVDLLAVPGINNISALQLLSEIGFDMTRWKNSKQFSSWLGLCPGNKVSGGKHLSGKTKPSNNKAAATLRMAASTLYRSQTSLGAYLRRLKSRIGPMKAITATAHKLAIIIYNMLLHGVDYIESGQAYYDEKYRERMIKNLKRKATEFGMSLIENQINFAPNIN

SEQ ID NO: 215497 - protein, 346 aa, unidentified
MEQIIRIGMDTSKHIFQLHGVDAAEKPVLRKRLGRKAMVDFFGQLPPTVIGIEACGASHQWARVLAPLGHQVKLIAPQHVKPYVKRNKNDGRDAEALCEAMSRPTMRFVAVKTAEQQAALMLAGIREQMIARRTQVSNMIRGHAAEFGITAPQGLNQIVPLLARLAQDESVPELARDLFALQGRDYAQLQVELNAIEVRLRVWHRANADSRRLAKIPGIGPVGATALVMKVPDPRAFPSGRHFAAWLGLTPKDHSTAGKTRLGKITRAGDERLRSVLVAGATAVIQQARHGRGHPSPWLIALLKRKPPKLAAVALANKTARIAWKLMATGQSYDGARMPGASALAA

SEQ ID NO: 215498 - protein, 381 aa, unidentified
MDTAARDQQCSSEPVLFMAMELSASKWKLGFTVGLGQKPRERTVDAGDVDGLSEAVARAKRRFHLGEGARVVSCYEAGRDGFWIDRYLRGHGIENVVIDPASVEGNRRRKKRKTDRLDLGKLVRCLIRWHGGEEKVWSVVQPPSEEAEDARQFHRELEALKAERTRHVARIKSLLALQGIRVTRVGADFVTELEGARMWNGSSLPPQLRARLVRERERLQVLRQQICELEGQRREAIRTSRDRRMEQVRHLMRLRGIGENGAWLLVMELFGWREFRNRREVGSIAGLTPTPFASGQEDREQGIDKAGNRRVRALMIELAWCWLRFQPHSELSMWFERRFAAGSKRSRRIGIVALARRLLVALWRFLVDGLVPKGAVLMAPS

SEQ ID NO: 215499 - protein, 428 aa, unidentified
MKKTESYKLEAITPNTLIVGVDIAKNTQWARFTDYRGIEFGKALKFLNDKNGFDSILASIEGICKLKGLDRVILGLEPTGHYWKPFANYLILNGIKVVMVNPYHTKRAKELDDNSPTKNDKKDSLTIARLVRDGRYYEVYMPRDIFAELRGLSNTRISLLKRQNAIKNTITALLDEYFPEIKKAFKHPLEGKASIQILKSCPFPSLILQLGEEGVLAEINKAVKKTVGRKKTRELVEIARNSIGVDYGLSAAHLRMETMIEELELHNKQLEKIEVKMEEALEETGLKEIILSIHGIGVITAAGFLGEIGDPLRFEHPRQINKMAGYNLIEDSSGKNKSGTVISKRGRKNLRSILHQMAKVMVAVNPEMQELYKYLKTRDCNPLKKKQALVVISKKIVTIIYNLVKKQTKYNANLVLGDYRKNQIKQAA

SEQ ID NO: 215500 - protein, 419 aa, unidentified
MKDTAARKRKQIPEGYLVVGVDPHKKRHAAVAITQDFTTQSKFKFDNTSEGLEMMLDRARMEMVKSGCRGVMFAIETGGHYWRNIAYYLDERGIPFRFINQYTLKRRREGKDLNRRKNDYRDSEVAAQLLCTGEFVESVIPQGVYAELQTSHNAYQRLVKERTGITNLLKGLLDALSPEFTQVFKDPGGLTALSVLSACPIPRVIATMTEGEFVATIKARHKGRRLMRKKLRALHYWARRSIGIHPGARLLSFEIGFMIDKIELIRQQIRTWEGILVKLVAETEEGKYLLPIRGLNYIAVAGLLAELGCFKLYRSAKQMIKMAGSNPTESESAGKSRSKTPMSKQGRPLLRYCAWTAVIPMLPFNPDFHAWAKQRRQRPAHANPLNGREIVGAALNRLLRLAFALVRNQRPIIRMQDRL

SEQ ID NO: 215501 - protein, 359 aa, unidentified
MADRTSYVVAVASGGLRGEVREYGRIANTATALDRLLRKLGGDGTTLRFCYEAGPCGYGIHRRLSGRGHECMVVAPSLIPKRAGDRIKTDRRDASSLAKLHRAGELTAVWVPDAAHEAMRDLVRARLDAVHALRRARQQLSGFLLRQGCHYGRPAWTQLHRRWLAGLKFDQAIHHIVLEDYIQAVEAAAIRRDRLTTQIEAMLPDWSLAPLVAALQTLRGMALVNAATLIAELGDLTRFTDPRQLMAYLGLVPSEHSSGASVKRGGITKAGNSAARRLLIEAAWSYRFPPRLSRELLLRQEKQPKPIRDIAWKGQVRLCTRYRRLARTGKPANIVTTAIARELAAFIWAIACQVTVTTG

SEQ ID NO: 215502 - protein, 456 aa, unidentified
MEKTETAVFTELRRNVAGIDIAWRADHYVCGPRREDGECDIEAFGTTTPELYRMLKWLQQRQVESVAMESTSVYWIPIADLLEAHGIETVLVDAREVRMVPGRKSDVKDCQWLQKLHSCGLLRGAFRPPEAVAAVRTILREKDTLLTMRVQAIQQMQKSLDQMNIRVHHAVSAIDGKTGTLIIKAIVEGERNPHKLAALRDGRCKKSEKEIADHLTGTWREEHLFTLKEAFKTLQFLDERIASYEEKVSQMFEALAGSTDKGPPPTLPDKKLSVKERADYADKANLQHFMGFDLTSIPGIGYGTAAIIASELGAKLDCFPTEKHFASYIGLAPSLGKSAGKNVRQKKRCKNTSRVGGALRMAASVLYRSHCELGAYMRSIARHTDKKTAVKATARRMAHMIYRGVKYGKEYIDRGAQAHEDRLRERTVKTVNRLIKSFNIASSELPGAGAVLADLV

SEQ ID NO: 215503 - protein, 392 aa, unidentified
MVISVGIDVSKDKHDCFIVSSEGEVLADVFTIPNNLDGFRCLLQRLQACAAPQDKIKVGLEATGHYSYNLLGFLLDNGLTTYVLNPLRTNLYRKSLSLRKTKTDRVDARTIASMLLSDAGLKPYTSTAYHNEELKSLTRYRFDKVKERAKLKSSISRLVCILFPELEKLVPTLHMTSVYSLLEEFPGAKQVAAAHLTRLKSLLEAASNGRYKRDMALEIRDAARNSIGSRMPAKSLELQHTIRLIRELDREIDEIEEQIQSIMGELHSPITTIPGLGFRMAAMILAEVGDFTRFDSPDKLLAYAGMSPSTYQSGQLKNCYPHMEKRGSRYLRYALYNATKYVCHWDSAFADYLAKKRAEGKHYNIAISHAAKKLIRLIFAMEKSRQPYCSAA

SEQ ID NO: 215504 - protein, 459 aa, unidentified
MVVEGSHENRGLLPSSTSVRLLKSSSPPRDRHLPIIHVFEKAEVTVDLVHPRCAGIDISKRDAKVCVRVASAGRAKATSTVTTWGSVTNQVLALREHLVAEQVTLVVMEATSDYWKPFYYLLEDGPFEVMLVNARHVRNLPGRKSDVSDAAWLAQLGAHGLVRGSFVPPEPIRQLRDLTRTRTSIVRERAREIQRLEKLLEDAGIKLSAVATDITGVSGRAMLEALIEGQRDPVVLADLAKRRLRSKIPELTEALTGRFGEHHGFLARLHLDLIDNHTHAISELAARIEVVIEPFRGARDLIVTIPGISTNVADVIIAETGADMTRFPTAGHLASWAGTCPGSNESAGRIKSTHTRPGNPYLKGALGVAAMSASRSKNTYLAAKFRRIASRRGPIKAVVALEHAMLVAVWNMLDTGTFYGDPGEDFFTRLNPDRAKNRALEQLRKMGYAVTLSPLAASA

SEQ ID NO: 215505 - protein, 429 aa, unidentified
MDVEDRIRIEEFRQLKKEIRGSERHLIVGIDVAKDRHNAFFGTGTGATLLRRLVFENNGDGFEKLLTFTEANKVKYGLKKVVFGFEPTANYHKPLGEYLVERDFCVVIVSGKAVKNNREMMDGRWDKNDSKDPANIADLISQGKFMYYDHPVLPLRDLRNLLSLKRRLKKQEHGLRVRIRNHLIAQYFPELDRYYDQWERAGLSIVRWCLSPSCIAGMEYKEFESLIAPGSRMNVSQQERLKAIWHKSAESIGCEVGETLQFEAEMMVEGIKQVREAIRKNDDKIEQVCLHFPDYSYLRTIPGFGPDVSAKVLAAIGNPFRFDNAKQVLKMAGMDLSAKRSGKHSQTVVPVISKKGKADLRYALYQAAFVATSKNRHFVTYYTHKLRGREKEKGIKTKMRVKLAAKLLIIAWTLMKKEEPFNPDFVNLD

SEQ ID NO: 215506 - protein, 339 aa, unidentified
MTQVIRIGLDLAKTVFEVHGVDGQETMVLRRSLRRRKVLAFFAQLPPCLVGMEACATGHYWARELTKLGHDARLIAPHYAKAYVRRHSNDAADAAAICEAVGRPSMRFVDVKTEAQQSAACLHKLREMLVKQQTMWINHLRGLMAEFGIVVAAGPQHVGELLAVLADPEDQRLPAAAREVLIQAAEALRDTQRRVEAIEKRVVAWGRDNETCRHLITAPGYGPILASAMAVFVVNPAAFTSGRHFAASLGLTPRLEGTGGKVWPGPISKRGNGYLRRLLVNGAMSVLCSRRAKEDPWLAQLLATKPRKVAAVALANKMARIGWALMMRQEDFRARPAAA

SEQ ID NO: 215507 - protein, 343 aa, unidentified
MEAKRYIGIDLHRNCFTACLRLESGREYLKEWKLEDMGKFTAKLRPTDQVAVEVTGNTRLFHDAVAPHVERVVAVNASQFKVITHSVKKTDPNDARNLALYLAKDLLPEVRMKDKTQAQIASLTQTRDTMVKLRTALKNKVNNLCSAHGVNLNKESLASEKGLKAVLEMHFDLLVNLELKIIVEQIRSLNKSIAELEETIGQEGHKLEGHKNLTSIKGIGGLSGGILRSIIGDISDFADEGKLAAYFGIVPRVSNSNETEHSGRITKRGTKLGRTTLIQCALIAQRYSPYLKTYYEKMKSRRGTGKAIVALARKFLGIIYRTLKNKWVFADFPNFVLAAEATA

SEQ ID NO: 215508 - protein, 330 aa, unidentified
MTNAIRETAAARHVDYIGIDMAKARFEWAVHGERSSHSLRNDPADFEVLLGHLRERRVGLIVIEATGGLEHALASVLLQHGFAVAVVNPRAAREFARSMGHLAKTDAIDAQALAHYAHTLAHKADQAGVQMTPPPAHLEALQVMVLRRQQLVDMRTAELNRRGGPMRVLRRSIDAVVKTLEAQIRALDQDIGAHLDEHFQDLQQRFDRIAGVGPNTCATVIAFMPELGRISNARAAKLAGLAPLNQDSGSCHGKRRIWGGRKLVRRALYMATLSAVRFNPVIRAFYQRLLAAGKCKKSALTACAHKLLRILNAMARNGQPWNPQLHGVTA

SEQ ID NO: 215509 - protein, 410 aa, unidentified
MGLFCGIDWATEHHDVAVIDDDGHVVARGRVSNDAPGFAALLTLLAQAGDSAADPIPVGIETDRGLWVAALRETGRTIYPINPLAASRYRARYGVSGAKSDATDAVLLANIVRTDPGAHRPLPADTELAQAIRVLARAQQDAVWARQQIGNQIRDLLKDFYPAALTAFADLPEGRLARRDARTVLAAAPTPAQAAKLTPARLRRLLIKAGRKRYLDRDIARLCEVFTDTYLHQPPVVENAIGIHLAALLGQFEAACTAADALAEAAVAHFEQHPDAEIITSFPGLGMLVGARVLAEIGDDRSRFADARGLKAFAGSAPITRASGKKTVVLHRYIKNRRLAAVGPIWALGSLRASPGARRHYDARRAAGDWHQQAQRHLFNKLLGQLHHCLHTGLRYDEHLAFPPPLQLAA

SEQ ID NO: 215510 - protein, 423 aa, unidentified
MMKLKYSICCGLDVHKNVIVATIVTTNKDGISEYLQKSFSTINSDIQRFHNWLIENNCYHVCMESTGKYWIPIFNYLENDIDVCLTHPKYVKAIKGKKTDKKDSKWIADLYKFDLVRCSFIPPKDFRQLRELSRYRFKLVCMKSSEKNRIQNCMTISNVGIASVLSDPFGKTATEIMSYLLEHTADSMDEKAVRKLIKKGAKAKSDEIIEAIKGYNIETDQAKKLELAQGHLEYLDDMITQTEVELYVRIKPYYEFVEFVSTMPGMTELSSTIVLAETGVDMDIFDDAKHLCSWCGLSPANNESAGKKKSVRIAKAGDYLKPMMVQCALAAIKSKKQPYFAIKYGRIKKRSGHKKAIIAIARMMMVCIYHMVSEKKPFTPTDYEELMDPQNHVESVVLNENNVFAYLESLGYDSSKLVKRNDN

SEQ ID NO: 215511 - protein, 410 aa, unidentified
MAERFVGIDVALREHRVAVLDRDGEAAGPSFTIAASKDGMATLLRTLAARDATAAQTLIGLEASGHLWENLEAALVGAGYRVLVLNPLQTRRYRDVLRRKAKTDDIDAHVIAGLIRSGAAQASYVPDEHIQSLRELARLRARLMDDWQDYLRQLIAQLDVVLPEHRTALGDLRSARARGILAQFPTAQHLAQASPRAIRRAAEDAGTRGFTLDDAIAVRDAARQSLYSGKAAAARAQVVRTLVNQLDRLSTAIDEVDRAAIALLPPSEPGTGPSDADLLQTIPGIGPHTAATLLGELGAPMRFTDAPALVAYVGFYPVITESGQRVGTPRLSAVGSRIARRALYLAAVNAVRRSAEWRTIYLRKRAQGKSAKQALIVVAVKLLHTLYAMLKHRRPYNPSRLLVATATIGT

SEQ ID NO: 215512 - protein, 352 aa, unidentified
MNLKQDSKEETENIYVGIDVHKKNWSVSIMSDYLELKSFSQPPNPEVLVDYLTKHFSGGKFHSAYEAGYSGFWAHRALTKLGIENIVVNPSDVPTTDKEKKRKRDAVDCRKIARALRNKELKGIHVPEQEIDQDKAMVRCRQKLLADIKRCKNRIKSNLHYWGISIPEEMDNSYWPGKFRHWIRRLTFENDSAKLCLEVQLDELEFIEVEKKKLEKQLVMLSRARYKDISGWLRSIPGIGLLGAMTLITEIKDIHRFKNLDHLHSFVGLVPNINSSSDKEIIGGITQRHNRHLRSILVQCAWKAVYLDPVLFKDYNRLCRKMKASKAIIRITKKLVNRVSFVWKNECEYIVK

SEQ ID NO: 215513 - protein, 360 aa, unidentified
MSRIAEAAGPVTGGVDTHADTHVAAVVDPVGRVLGTESFPAGADGYARLLAWLRGHGELARVGVEGTGSYGAGLARYLTAAGVQVLEVVRPDRQRRRRRGKSDVVDAVSAAIAALRGEDCGTPKSSDGTAESIRALRVARTGAMKARTQAGNQLRDLITTAPDLLRAQLQGLGTPQRVRAAAAFTCGDAADPAEGAKAAMASVAARWLKLDAEVTRLEAVLDDLVARVAAPEFLASCGAGHLSVAALIAAAGDNPGRITSEAAYAALCGVSPVDCSSGKQERHRLNRGGDRQANSALWRIAVTRIQHDPRTQEYYARRIAAGKTRKEVIRELKRYIAREAYRKLIRPGFLPTATPLEQAA

SEQ ID NO: 215514 - protein, 464 aa, unidentified
MQRHRRRSSPKPRTSPLALDCLHPDAAGIDCGASEHYVAVPPDRDPRSVRAFPTFTTSLQALADWLATCHVTHVAMEATGVYWIPVFEILEARGFQVILVNARHVKHLPGRKTDVQDCEWLRDLHMLGLLRGSFRPADAIVVLRGYLRHRTTLVESTAALIQRMQKALVQMNVQLPVVVSNIVGVTGLAILRAIVAGERDPQHLAQHRDPRCHASPADIVAALTGNYRREHVFVLQQNLELFDRYQEQLRSCDAAIESYVHELAATPLTSAPVPPARRPGRPRGNEPRFDVRTPLHQLTGVDLAQIDGIGPYNALRLIAELGTDMTRWPNEKHFTAWLTLAPRNDISGGRLLRSRTQPSANRAATILRLAATNLGRTQTALGAFYRRLAVRIGKAKAVTATARKLAILVYRTLKDHLVYTDPGADAYDRQHRARVVRRLQQRAANLGYALLNVSTGELVPGTVS

SEQ ID NO: 215515 - protein, 397 aa, unidentified
MYIVGIDIAKRKHEAAVIDGEGTVIIKPFSFTNNCSGYNRLLAMLAKAKLPLDEVSFAMEATGHYWLALFTRLQKEGFRVQVINPVQTNSIRSFYIRQAKTDPRDALLIAEVIRFGHFSESTLHPENIYELRELCRGRHAIVSMQADVKRKVVALLDQVFPEYETAFTNMFSDTSMAILQTCPTPKELSEMPLEELCHLIEVSSHKRFRMAKAQELQALARNSFGFAMAGDVFSTMIRLYAKHLDFLKQQVREMDRKIAEIMETLDTPITTITGIGPTLGAYILSEIGDISRFSSAAKLAAYAGIDPTMRQSGEYNGVRNRMSKRGSPYLRHAIWLAASSAVLHDPALKLYFQKKRDEGKPYMASVGHACRKMVSIIYAVMRDNKAYTPCIPNEISA

SEQ ID NO: 215516 - protein, 377 aa, unidentified
MKRILKIGMDVHSTNYTLCAMEPVIGAEDRVFANIQVAPDYKNIILFIENLKQKLGMNDTYDIECGYEAGCLGYSLYNQLTGAGVKCVILAPTTMLTEQGQRIKTDSRDAHLIAQCLSYGGYHPVHIPTEQDDSVKEYLRMRDDHKKALKKIKQQIGMFCIRHGYCYEGTKWTIAHMKWLKKLELVPMYQETLDEYLASYEEQTAKIERFDARIEEIASQTEYAEKVKKLGCLLGIKTHTALSLIVETGDFTRFAKGNVYAAYLGLAPGEHSSAVKVNRLGITKAGNSHLRLLLVEAAGGICKGAIGHKSKALRQRQQGNSAEVIAYADKANARLRSKYYRLIRHEKKRNVAVAAVARELACFVWGMMTDNINVTTA

SEQ ID NO: 215517 - protein, 343 aa, unidentified
MSITTIGLDTAKSVFQIHAVDEAGKAQIRRKLRRSELIPFFEKQDACRVVLEACGAAHHWGRVLSCLGHDVKLIAPEAVKPFVKKGKKNDAADAAALCVAASRPDVKFVPIKNTGQQDILALHSARSLLVKQQTMLANAMRSLATEFGLTAPKGMDKLEDLAALVNADKAFPSRARQAFTELFLQCRALDESVATFEAEIVAHARHDETARRLATIPGIGPITASLIAVTVVDFSVFKSARHFAAWLGLVPRQFSTGGKTRLGKITKAGNKEIRKLLVLGATSMVHRAPKWNSTVGVWTRGLLERRPVRLVTVALANKIARIAWALMTRKEVYQAKGRIASVA

SEQ ID NO: 215518 - protein, 345 aa, unidentified
MKRIAIGIDFAKEKFDVTVKDVETGVSEYGQYPNTPSGGRSMVRMVKKFAKGIDSSQWLFCGEDTGYYSQTIARYLTEKGYFVWLQNPYGIKHSEGGIRRGKDDKADSAAIADYAHRYQDKACKWEMPSKVSEELHLLLTRRDAYVRAKRVIQSGANEIPKRDRQGQSVSLIKSSAKRLLREIDEEIELLEAQMEKIVKEEEQMQKSYEILRSFTGIGLVNSMCFIAYTDNFKKFDLNARKIATYWGVAPFGKDSGKTVHVGPHVSHFCNHWLKALISNAANSAIKWNPIIIAYNKRLEERGKCEGIRKNNVKNKIIQTVVAMIRKGEKFNPEFKFTKEMVTAEC

SEQ ID NO: 215519 - protein, 309 aa, unidentified
MKEEVVYLGVDVAKAYLDAAIGKHKRRLVNDPKGHRQLINWIKQMEAQVQVICEPSGGYERMLIQGLVGAQVKVSLVQANRVRQFARAAGILAKTDSIDAEVLRAFGQAMRPQTLSASKLQQEQLRELESQRRHLSRLLVMEQNRGARLGDSSVRRLKRSLNKQIQKQIERIDLLINEHIAGSQELSAKARKLTAISGVGPRTAALLLAQMPELGQLNRREVAALAGVAPFNRDSGKWRGKRTIFGGRRHVRHGLYMAALVAARHNPILRAFYQRLRAAGKPAKLALTATMRKLLIVLNSALKPDPIYA

SEQ ID NO: 215520 - protein, 345 aa, unidentified
MLIIGCDFHPGFQQVAIFDKQTGEITGKRLQHPQEARAFYAGLAGRARVGMEACGYTQWFERLLDELGHELWLGDAAQIRASVVRRQKTDRRDAEHLLELLLEERFPRLWVPTAEQRDVRQLLLHRHHLVRSRTQVKNQLQALALNQGVQKKRQLWSKAGRAELEKLALPAYTAGRRDECLQRLDYLDGQIRQLSQKVVAEAEKREAARLLMTHPGVGPQTALAFVLTIGEVERFPNAKCVASYVGLMPTEYSSGGKQRLGRISKQGSPLLRFLLVEAAQSAARYDASLKRVYVRLCMRRSRGQAKVAVARRLATRLYWMLRSGKNYAQLTASGAGKPVSSRGAA

SEQ ID NO: 215521 - protein, 401 aa, unidentified
MEPHLCVGIDVGRRTHRVGIARPDGSILEEFDILHDQVGFAMLFGRIEKRRQDLSLPVAVAMEGFNGHAQPLDRLVQEKGYELYNVNNLKLARFKEVFPGAAKTDAIDARKILELFVLKDHLPVAKNALQEVVGAPEVNNKLKRLTRRRKGLVLEKARLLNRMQSDLQAVSSELLAATVSADNLWFLRFLTCRKDLRQLARLQRKTVLEIRGVGQKYARVIEAWQKKAHFSSEVEYVGPMIIADAKRILELHRQIHALDQTLEGLAQESKITRRLSSIGGFGKTSVAELAGEIGTRRRFASEGSLALYLGMCPLTRQSGETSKTKQARQVNRRAKAAMMTAVAHHARCVPESKAYYDRRRAQGKRHNQAVRALGRHLVRVIWAMLRDERDYEAREDIHPVT

SEQ ID NO: 215522 - protein, 353 aa, unidentified
MNATTYAVDTAKNVMQLHWVDAQTGEIGRRKLARGRLSAYFAQLQPVRIVMEACGSAHHWARVLGALGHEVELLPAAQVRPFVRSNKDDAADARAIWLAAQQGDIRRVPQKSVEQQAMLALHRTRSHWVSVRTATVNSLRGLLYEFGVVVRGGRKAGLKALVEQRALIEAQIPATMRALVDGQLQMLASIGQRIDQLEREIAALQRQLPAARELDRVPGIGVLGSTALAATLGDGKAWRSGREFSACIGLVPAHAGTGGKVRVGHLSKRGDPYLRTLLIHGARAVIEHASDQPQWLGQLLGRRPMNVAVVALANKMARTAWAIVAHGRAYQRDWQGVKPSTRPGSAAAQAAAA

SEQ ID NO: 215523 - protein, 318 aa, unidentified
MNQKTNKDQPHYIGVDVCKDKLDVFCRRWSRPRVFANNLAGIRSLLKELSKTNQNIHVVCEATGGYEKQLLSLAFESDVAISRVNPRQVRDFARAKGQLAKTDEIDARILCEYGEVFAPAPTKALSPTQNELSAVIRRRHHLVSQLVGEKTALQKATDKFVRKDLKAAIAFLQRHIASCDQQIKALISSDEVMSQKQRRMAQIKGVGPGVCSLILGELPELGSISDKQAAALVGLAPMNRDSGKWRGTRTIHGGRALVRRGLYMPALCAAKHNTILSEIYQRLRAANKPHHVALTAVMRKMICLLNRILGDPQFVPSS

SEQ ID NO: 215524 - protein, 409 aa, unidentified
MLLIGNDWAEAHHDLEIVDESGLRLARRRLPEGVEGLAALHALIADHLAEDAEADQVVIGIETDRGPWVQALIAAGYTVYAVDPLQVARYRERHGTSGAKSDPGDAHVLAELVRLDRAHHRPVAGDSEVAEHVKVLTRTHQSMIWSRQRQTNALRSMLREFYPGALAAFGEELAGRDSLAILAIAPSPEAGRRLSINKIVAALRRSGRQRNLQVTAEDMQAALRAPQLEAHPGVIGAYTAAVRSLVAVITELVTPTEVLREQVEAGFGRHPDAEIYLSQPGLGTVLGARVLAEFGDDPHRYADPKARKNYSGMAPITRASGTKHMVLARYARNRRLADALYQQAVSALTASPGARAYYDRQRARGATHHQALRALANRLVGILHGCLRLHTGFDEATAWHTGVKEAAAA

SEQ ID NO: 215525 - protein, 350 aa, unidentified
MLIIGCDYHPAFQQIAFVDTETGELQERRLQHREEAEKFYRDLAAQGMKVRVGMEASGHARWFERLLAELQIELWIGDAAEIRTKRVRKQKTDRQDAQLILKLMLQDDFPQIWVASWENRDLRQLLWHRHRMVQARTRIMNQLQAVALNEGLRCKKRLWREAGREQLEAFQLAPWASRRRQDLLELLDRLNPTITDLTQTIEQEVEKCPEAQRLRTHPGVGSLTALAFVLIIGRADRFQCGKQIASYLGLVPLEESSGNRRRLGHITKQGNSLLRFLLVEAAQVTVRSIPEWRSKYFHLAMRRGRKIAKVAMARRLAVRLYWMWRQGWNYEQLKKFGPHAGKPEHRDGVQ

SEQ ID NO: 215526 - protein, 455 aa, unidentified
MCVPLDYAKKDHLAMFCNGYGDILRKPFSVKNSPEGIAYIDDQVTRSCRRRGIKKEHVFFGGEDANSFAKNFVSTLRSKGFLVANVNAHDAKKQRGNLQASTDRIDLMGIATMLLNCRANCGPAQSGIYRNLRTLVRHRRKLVQMLTEVKNRVHGIVDELFPGFLNEKNSGIIPFTQSSLYLMEDRFSPKQIRRRRRQKLIEILKRFGTSKAEKTAAKLQHYATKVLHAPVEYVDTMQLSLAQHVKHIRCLKESVVLMDKEIALNLAQTQGAFLTSVRGIGLVLAAGVTAEIGDLNEQKPLNNLASYSGIIPRVKQTGGLDGKTYTGLVAKRCNRILKDYVVKSAYHLGLHGPQDLMADYKRRDASGQHADFSMGRRYLRMAINLMRTSQVYLPPNLRKGNFTLEERAGYYLMSWPYLREKWKKVDALEEAFEKNRPLGLWRLIVQELYDVKLKL

SEQ ID NO: 215527 - protein, 402 aa, unidentified
MNAVGIDVSKGKSMVAIMRPFGEIVSTPFEIKHTTSDINSLVELINSIEGESRIVMEHTGRYYEVLAHQLSEANLFVSAINPKLIKDFDNDSLRKVKSDKADAVKIARYALDKWQNLKQYSVMDELRNQLKTMNRQFSFYMKHKTAMKNNFIGILDQTYPGVNTYFDSPARSDGSQKWVDFASIYWHVDCVRKMSQNAFIDHYQNWCKRKKYNFSQSKAEEIYGKAKELVPVLPKDDITKLIIKQAVDQLNSASATVESLRTLMNETASKLPEYPIVMAMKGVGVSLGPQLMAEIGDVSRFTHKGAITAFAGVDPGVNESGRYEQKSVPTSKRGSSDLRKTLFQIMDVLIKTHPQDDPVYQFLDKKRAQGKPYYVYMTAGANKFLRIYYGRVKEYLSSLPEF

SEQ ID NO: 215528 - protein, 347 aa, unidentified
MKFYTTFHKYYCGIDLHARILYVCILDERGNKVVHQKIKADKTALLSLITPYLEDIVIGVECMHCWYWVSDLCAEQNIDFVLGHALYMKAIHGGKAKNDKIDSYKIASLLRGGNFPLAYNYPANMRSTRDLLRRRTRLVQHGAQLKAHIVNTNSQYNYPPLELHMKNKCVRQEFQTRFDDQAVQRNVNFDLAILDAYAEELKKLEYYLESKAKKHQPNYYAQLRTIPGIGLILAMTILYEIGDINRFESVQKFASYCRLVKCKAESAGKTYGTSGNKIGNGHLKWAFSEAAVLYLRGNDKARRYLNKLQKRMSKAKALSVLAHKLGRCVYFMLKNKTVFDDERFLKS

SEQ ID NO: 215529 - protein, 452 aa, unidentified
MEVIYERCAGLDVHKKTVVACRVVSQGSGRKEQETRTFGTVTAELLEMVDWLTEWECTHVAMESTGEYWKPVYNLLEGQVEILLVNAGHIKAVPGRKTDVGDAEWIADLLRHGLLRASFVPPRPQRELRDLTRQRSNLVRERASVMNRLQKVLEAANIKLASVTKTGSVSAREMLEAMVAGESDPVALAGMARGRLRAKRSQLEQALTGRVSAHHRFLLESHLQHIDFLGKQIERYSAEIAARMEQNDLASVRPLNGPGGTAPGPDKVPHQPEAPEGRENTLSAVQAVALLDTIPGIDRWQAEVILAEIGLDMGRFPTAAHLASWAGVAPGNNESAGKRRSGKTRPGNPTLSKTLVLAANAAARGKNTYLAAQYSRLAARRGKKKAIVAVAHSILVIVYHLLSRQEPYQDLGGNYFDERKRESVTNRLVRRLEKLGYHVALASKPASGTIAA

SEQ ID NO: 215530 - protein, 407 aa, unidentified
MEILHQRCCGLDVHKKSVVACLLTPGSRGEPGKETRTFSTMTADLLAMAQWLEGEGCTHVAMESTGSYWKPIYNLLEDRFELLLVNARHLKAVPGRKTDVKDAEWIAQLLRHGLVRGSFVPNRRERELRELLRYRTSLIRERSSEVNRVQKVLEGANIKLASVAANVVGVSGRAMLEAMIVGVDDPAALASLAMGRMRSKKTTLESALEGRMSAHQRFILAEQLRHIDDLDATIARLSAEIEERQRPFVEAAGRLMTIPGIGLRTAQLILAEIGPDMSAFPSAGTSRFLGWTGPGQDESAGKRRSGRTRKGNPWLRSALVEAAQTAGRTKTYLAEQYHRIAGRRGKRRAAIAVAHSIIVIIYHLLAKGSTYEDLGYRYFDERDQQRTTRRLVQRLSALGYTVTLRPA

SEQ ID NO: 215531 - protein, 316 aa, unidentified
MKSPQLFVGIDVSAKRLDVAVMPDGTHFRVAHSELGITSLVGRLRELGPHIVVLEATGGYEIPVAYALSEASLPVVIMNPKVLRHFAKSTGKLAKTDKLDARVLAHYAQAIQPPVRPLKAPEQAELATLMSRRRQLRDMIVMEGNRRRTSTPKVRGNIDQHLAYLRQLLKDLDGEIHDSIRRTPLWHENSEILQSFNGVGPKVSASLIADLSELGNAPGTQISALAGLAPMNRDSGQWRGKRTIQGGRPAVRQALYMAALVASRRNPVIREFYQRLRQAGKPAKVALTACMRKILVILNAMLKNRTYWNPQLPLAA

SEQ ID NO: 215532 - protein, 332 aa, unidentified
MSSLIHVGIDVSKDWLDVAVSDGRARRFDNGAAGHRSLLTWLSRRHGCRVVLESTGTYGLDLALTLHAADRCEVMVVNPRLVKGFAQALSQRLKTDAADAKTLLAFVERMPFEPWSPPSPAVVELRAMSRRIEDLTVERTREKNRLSSLRSSVNHSHLIARDIEVNLRHLDRRINQMLDQAVAHVKEHRVLTTAYGHVTSIKGIAAKSAIALLGELLVLPPNMTPKQWVAHAGLDPREYESGSSVRRRARISKVGNAHIRRALYMPALVAAAREPRVKSFYDDLRAKGKNGQVANVAVMQKLLRSIHGMLRYGTDFDGERFRATSQKDTIGT

SEQ ID NO: 215533 - protein, 299 aa, unidentified
MEHELHYIGIDTAKEKLDVDVLRPDGRHRTKKFANTTKGHDELVSWLKGHKIDHAHICIEATGTYMEPVAECLYDAGYIVSVINPALGKAFAQSEGLRNKTDTVDARMLAEFCRQKRPAAWEAPHPLERALRALVVRHQALTDMHTQELNRTETAREVQRPSIDAHLLWLEAELKRLEKQIKDLTDDDPDMKHRRKLLESIPGIGEKTSAVLLAYIGLKDRFAHARQFAAFAGLTPRRYESGSSVRGASRMSKADRLAANGKKGKVILGAMMRKLAQVAYGVLKSGVPFDASRHNPVAA

SEQ ID NO: 215534 - protein, 350 aa, unidentified
MIIIGCDFHTRYQQIAMMDTETGELVERRLEHENGEARAFYASLPKPVVVGMEATGYAQWFERMLAELGHELWIGHASEIRAGVVRKQKTDARDALHLLHLLLEKRFPRIWIPSPAERDTRQLLRHRHKLVCFRVSVKNQLHALAMSQGVCRKKKLFTARGREVLEKLSLGPWARRRCQELLGMLDQLNTVIDELDRAVQQQAESHAEAARLMRHPGVGPVTALAFVLTLGPVTRFRRSKHVVSYLGLNPKERSSGGKQRTSTISKQGNTMMRWLLVEAAQTAARYDPELLRLYQRLKFRRGANVAKVAIARKLAVKLYWMLRATASCAQLAPMQGSSRGTLVPQAGSSF

SEQ ID NO: 215535 - protein, 385 aa, unidentified
MQKLNDLSRSPSPLDPDGTLIAVIELSLSSWLVAGIVPGVERQPLKKLAVDESALLKLLHRWREEAAKAGHRIKRIAVAFEAGRDGFWLARWLSARDIEAHVIHASSVAVSREHRRAKTDRLDTELLKRSFLGWLRGERDHCKMVAIPTTKDEDAKRPNREHESLVGEQSRIVNRMKAALIRLGIRGFNPKLKKAAERLDGLRTPEGEPIPPNTLAELRRDMVRRRLVSDQIRQIEDARLERLKQAPSDGPHAMVRLLARVIGVGVETADMLVQEVLSRRMRDRRAVARYAGLTGSPDESGRKRREKGLTRSGNARVRRGMIQLAWRFLMFQKDSTLAQWFRARTESARGTRKTMIVALARKLLIALWRLVREGVVPDGVVLRPA

SEQ ID NO: 215536 - protein, 350 aa, unidentified
MENIAFDSHKRYTLCLVEDKRGKFIEETRINHEQGEIRKFLRRFSPGSPVAVETIGNWYWIVDEIEEAGMKPRLVHARKAKVMNGCINKTDRLDVQGLNRLQRAGTLPTVWIPFRELRDKRSLARTRMYLVSQRTCLKNRIHATLSRYALEVKGVSDVFGRKGRRILDEHILKLPEHTRFAVMRQLEQINVLDREIKHLDIKMHEVFDENEEIKLLRTLPGIGFILSIVIWLEVGDIDRFAGPQKLASYSGTTPRVHSSGGKTRYGNLRPDVNRYLKWAFVEAANTISINKKHWPFRHSVKLYQRIRNKKGHSKAVGAVARHLAEATYWILKRKQEYRDPALKTDKPTVA

SEQ ID NO: 215537 - protein, 411 aa, unidentified
MNQITSVGIDVSKGFSMVAIRQPGGVIVEPPFRVNHTSRELNALVQRLHILPGEIRIVMEHTSCYWRPIGLTLVNAGFFVSIVNAMLIHDFHDNSIRRVKTDRADALKIANYALTFWTELKPYSPEDELRQLLKMQCRLYERTLSTSVTLRNGLISLLDQTFPEINRMFHPLVKQSNGHVKWVDFVKTYWHKEKIATMTESRFMDSYRRWCKREHYQYYTSHARRIYGLAKETVASMPRSESTRQLICQAVDSLNAVYEALHQLRKEMLRLAQQLPEFEAVMSLPGAGNITGPKLMGEIGDVRRFTSKRALVAFAGVDAMPYQSGIMDSHSRRMSKRGSPLLRKTLFQICSICLQLSRVDDPVYLFMDRKRREGKQFYVYMVAGAAKLLRMYYARAKSAFDIDNKENKITA

SEQ ID NO: 215538 - protein, 414 aa, unidentified
MESGYRLMVGIDWATEAHQVCELDGQGRLLEQRRVEHRAESIAAMIDRLIGLADGDPASIAVAIEVPRGAVVEALVERGLHVFAINPKQLDRFRDRHTVAGAKDDRRDAFVLADSLRTDLAAFRRVHLDDAWTIRIRELTRVEENLNTEINRLANQLRDLLLRFYPQLLRLCPAADQPWLWALLKLAPTPRKAQRLRRSSIERLLHQYRIRKWTADQVRTELKTAPLSVAPGVTEATSAHIALLLPRMELLMAQLKLCSKAVQTALNEKVAEEEQRREHRDVEILLSLPGVGRVVAATMLAEAPQLLAQRNYHALRTLGGVAPVTRQSGKRLAVRRRYGCNHRLSNAFYHWARVSSQCDPRAKHHYQTLRQLGHGHGRALRGITDRLLALLVAMLRDQTLYDSTRTLAPNPIAA

SEQ ID NO: 215539 - protein, 383 aa, unidentified
MSSVAEVVPATRSIIYLGMDVHKESITIAVLPNEARAPTRLDRLPNDLPKLRRYLERLAQGGDLRACYEASGAGYVIHRAMREWGYACDVIAPSLVPKRPGVQRKHDKRDAADLSRLYRAGELTAVRIPSETDERVRDVVRCRETFQREILKSRHYILKFLARRGFVFREGTNWCTPHLRWLQYLTTDASPLAAHDRLVFREYHALLLYKLQRRDDLDRTIEQLALLPTLAPMVERLQCFRGISLHSAMVLATEIVDWRRFEHPRQLACYLGLVSREDSSGDRTRLGSITKAGNSHCRHVLVQAAWSYHHRPQISVDLKRRQQGQPPAVIAHAWKAQQRLHKRYNHLAYRKRPQIAVVAVARELVGFLWAVMRDLEPAAQRAA

SEQ ID NO: 215540 - protein, 410 aa, unidentified
MHVKLHHIYVGLDLHKDTHTAVIIDCWNEKLETIVIENKPSDFTKLLNKVEKKAGKLTPVFGLEDVHGYGRSLAVFLLEKEQIVKEVNSALSYSERMSYPTTKKSDDWDAQCIANVLVRMLDKLPDANPLDLYWTIRMMVNRRNAIVKSITTLTNQLHGQLCNNYPSYKKFFSDVNSKTALVFWENYPSPRHLKGVTDEDLAELLRKPSHNSCSTRKAREILELVESDGDTLREYQEARDFIIQSIVRDIGFKSEEIKKVEAEMKKLLALLEFKLESIPGINIVTATNLAAGIGDINRFHNADKLARFAGIAPVNFSSAGKGKDKQSKQGNRELYAVFYFLAVQQIQVAKGKKTPRNPAFLEYYNRKVSEGKTKVQALICVMRRLVNILYGMMKNKTEYVMPNVELKEAV

SEQ ID NO: 215541 - protein, 343 aa, unidentified
MGHFAGLDVSVKETNVCIVDETGKIVREVKVASEPEALLEVLRNPAYRFKRIGLEAGPLSQWLYSALAEASLPVICVETRHMRAVLKAQINKTDRNDARGIAQMMRVGLYRPVHVKTLRSQKLRMLLTHRKLLQSKAIAIDNDLRGTLRNFGLKVGMVGAAKFEARIKELIENFPDLAVLVEPLLAVRRVLREQLGILHRRLLAVVRNDDVCRRLMTVPGVGPVVALTYRATVDVPARFRKSKAVGAVFGLTPSKYQSGEIDRTGAISRCGDEMMRTMLYEAAQSMLFHSTRWSWLKAWAMKIARHRGMKKAVVALARRLAVIMHRIWVDGTEFRWTREAVTA

SEQ ID NO: 215542 - protein, 406 aa, unidentified
MLRVGIDQASQHHDVCLAPEGQAPSYLRVPNDADGLEELLTAIRRLEPNPAQVHVAIEGSGQGLFVAALLAAGFRVDPVNPKAVDRYRDRLSPAGSKDDRRDALVLAEILRTDRHRLQPLRLESDTLRQLRVAYSHHQTLVEERTRLLNQLTACLRAYYPRALELFADLGRPVAWTFLRAFPTPAHFARARRSRIEKLLRQHRYPGVAAKTAELLELARKPQLPADPATVALWARRMLFLVDQLEAVCRELEACHEQLETLVQAHPDGDLFRSMKGIGTVLAAGMITVFGEDRQAVPSVRPIQCRSGTAPVTVRSGKTVRVRFRHACNKQARNTVQLLAQQLVLHHDWAREIYQTHRDRGRHHHEALRIVAHHALRVLFAMWRDRQPYDPTRFEAARRQRQQPKAA

SEQ ID NO: 215543 - protein, 339 aa, unidentified
MHVTTIGLDLAKNVFQVHGITLDDEVAFNRPLRQAQLLPFFSKLNPCLIGMEACSSAHHWARELTNFGHDVRLIPPIYVKPYVKRGKSDAIDAEAICEAVTRPTMRFVAIKTVEQQSLLSVHRARSLLVRQRTQLINGLRGMVAEFGVYIARGLARVIGFAENILTGEVLELPDIANEVIHNMCEHLMALHARVHWYEDRLKQVAKEDARVRLLRTIPGVGAVTASAIIASIGDGHQFSNGREFAAWLGLTPANKSSGGKEKLGRITKMGDQYLRSLLVVGMTSLVRQTKSHPERASKWLTSLLERKPARVATVAMANKTARIVWAVLTRNEPYTPHTA

SEQ ID NO: 215544 - protein, 420 aa, unidentified
MDRVVADIIHPIACGLDVHSAVIAACLVRPGPQGGPHYEERSFSTNLRGLRELRDWLVGHGCQAVGMEATGVYWIPVFAVLEGHVPMVVGNPNHMRNLRGHKTDRKDAKWIAGLIRHGLIRPSFVPTAEFREARELTRCRRQLINTRTGIRNEVTRLLAHQGIPLGADGLLANIFGVSGMGILEALAEGRDIQKELPKLLHRSVKHKQELLSAALEAGLGAVARKLLAIHLGRLEAAEEDLQKVEALIAAQLAPYKDRLDLLMTIPGISYLSACVILAELGVDMTRWPTHRHLAAWGGVAPGCRESGGKAHRAATRKGNPFVCTTMVECAGAAVMKKDCHLAGKYRHLCARTGSKMKARVAIARKLLVIVYHVLSTLKPYEEPKPQMASKQAKQRAIKKHVRELQKLGQDVQISPILTSA

SEQ ID NO: 215545 - protein, 346 aa, unidentified
MRQITRIGLDIAKRWFQVHAVDSDDREVLNRKLPRDKVLTFLSALPPCEVALEACSSSHHWGREISRLGHRVRLISPNYVKPYVKRGKSDAHDARAICEAASRPDMRFVRVKTEDQQAALMQHTSRQLLVDQRTAVANSLRGQLAEFGVIENKGIENVGELVSMLDGEDECLAHVPPTALLVMKVLANQLHAVDEHLAMIDEQIDAWQKANAPAQALKTIPGIGVLISAALAAYVPDPSAFRSGRDFAAWLGLVPRQNSSGGKERLGRITKQGNPYLRKLLVLGATSSLRWLRKRTDAVADWTRKLLQRRPARLATVAIANKLARIAWAIMRTGELFRSQSVAAAA

SEQ ID NO: 215546 - protein, 403 aa, unidentified
MNNVVGIDVSKGKSMVSVLRPFGEVVAKPFSVGHTGSELKELADYLKSLDGETRVVMEHTGRYYEPVARFLHDEGVFVSAVNPKLIKDYGNNTLRKVKTDKADSRKIARYGIDNWAELRQHTPMDTIRMQLKTLNRQQSLYSKTKTMMKNNLIALLDQTYPGVNALFDSPVREDGSQKWVDFATTFWHVDCVRNMSLTAFAERYRKWCKRHGYNFSQSKAVEVHAGAQDLIAMLPRDALTKTMVRQAIDALNAISASLERLKAEMQALAAQLPEYPVVMTMHGVGDSLGPQLMAELGDVTRFTHRNAITAFAGVDPGADQSGTHEAKSTRVSKSGAPELRRALFLVMDCLLKTQPQDDPVYRFMDKKRAEGKPYLVYMTAGANKFLRIYYGRVKEYLAQLENS

SEQ ID NO: 215547 - protein, 415 aa, unidentified
MPVNDFHPGSISPADLGGRLIFAIDVAKVDMVAAIATPEGRVLQTISWKAPEENLRVLEVLRSFRSAGISVEPVMEPSGTYGDVLRHQLEQDGFPLFMVSGKRTFDAREIFDGVPSLHDAKSAAIIARLHADGLSTRLRDEGPDRRQLRAALSIMDLHQERYLQLVHRLESWLARHWPELPTLIELTSSSLMALLARVGGPADVAAAPDKATKVLLGISHRLIPDDKVAAIITSAKSSVGVPLVGLERDALMAIADDAYRAHRAFTTAKTQVDKLAATTPAIALAPAVGHTTAAAVFAEVGDARSYSCTRAFVKAMGLNLKEKSSGTIHGQLKITKRGPSRVRQYLWLAVFRWIQTDPIANAWYQRKKKRDGGRSSRAAVALMRKLAKALYHVGRGATFDSSKLFDVRRLQLSEG

SEQ ID NO: 215548 - protein, 344 aa, unidentified
MENYAGIDVSLELSSVCVVDSQGKILKEAKVASEPDALVEFFETLGFAVNRIGLEAGPLSQWLHAGLQRAGFETVLLETRHVKAALSAMTVKTDRKDARGIAQLIRMGWFRAVHAKSIGAQEIRALLVARKQLLGRLIDVELSIRGILRGFGLKVGPVTRKNFEARIRELVAGQATLERIAIAMLSARSALKAEYGRLHKAVLAIVRDDAVCRRLMTVPGVGPLVAITYKSAIDDPHRIVKSKAAGALFGLTPKKYQSGEKDVTGGITLAGDEIVRTVLYEAANVLLSRITRFSKLKRWGMDVAKRRGSKRAKVALARKLAVILHRIWVDGTTYRWTDAAPIAA

SEQ ID NO: 215549 - protein, 338 aa, unidentified
MSKVTTVGLDLAKQVFHVVCCDAHGKVVGKRMLRRAQVLRYFANLPVALVGMEACGGAHYWARELQALGHTVKLLPARSVKAFVQGNKNDYNDALAIAEAVVRPEMRAVAVKTAAQQDIQALHRMRQQCVATRTRLCNQLRGLLGEYGMVLPRGVGSLRRRLPALLEDAENGLSTFFRRLLAEGYQQLRALDEHIATYDTEVVQHSRQDDACQRLRTIPGFGPIVASVFHSQVGDGQAYRRGRDVSAAMGLVPRQHSSGGKTVLLGISKRGDRQLRSLLVHGARAVVRQAAHKDDRLSRWVNRLKAQRGHNKAVVALANKLARIGWAVLHNRSTYQAA

SEQ ID NO: 215550 - protein, 340 aa, unidentified
MKTLYAGIDLHSNNSHVGILDQDDKRIFHKRLPNMQDVILAELEPFKKGLSNIVVESTFNWYWLVDCLMDTGYEVLLANPAAMQQYKGLKHVNDKHDAFWLAHMSRLGILPQGYIYPKEDRPVRDLLRKRGHLVRLRTSLINSLQGIISRNCGCSLSGNKMKQLRENHVAPLLAGQEDLAFSGEVSKETIDFLSGQISKVESLVLKKVKLRKSFQCLQSMPGVGKILSLTIMLETGKIDRFPDVGDFASYCRKVPANWISNNKKKGKGNTKNGNKYLAWAFSEAAEYARRYNDHAKAFFNRKASKTNQAVAYCALGHKLARAAYYMMRDQVEFDEQKLFA

SEQ ID NO: 215551 - protein, 357 aa, unidentified
MTSITPQNAPIIDIAGGVDTHQDTHTAAVIDTVGRVLGTEQFPATPTGYTALLTWMHAFGQLMKIGVEGTGAYGAGLARLLRAEGIEVIEIDRPNRKTRRFQGKSDPIDAIAAAKAALAGDRTGTPKQRDGRIEALRNLRIARRSAVDQRADTQRRIKALIVTAPDDLREQLRHLPAKKLITTCAALRPDTADAASPATATAIALRSLARRHQQLTAEISDLDDLLDPLVAAINPHLIAANGVGTDVAAQLLITVGDNHDRVHSEAAFAMLCGVAPLPASSGKTTRHRLNRGGDRQANAALYRVALCRLRWDPRTRAYMERRTHDGMSKKEIIRCLKRYIARELYKAITQNDQENTD

SEQ ID NO: 215552 - protein, 458 aa, unidentified
MSPRSKGKKKIPSVSKTPSSLPVLHPHAAGIDIGAREIYVAVPPGSDAKPVRAFATFTEDLHALRDWLKACGVTSVAMESTGVYWIPLFQILEAAGIEVCLVNARHCKNLPGRKTDVQDCQWLQYLHSVGLLRGSFRPPETVCAVRSLLRHRDGLVRAAATCVHRLHKALTQMNVQLQHVIADVTGVTGLAILEAILAGERDPRALAKLKDGRIRASTDVIAKSLRGDWRNEHLFTLRQGLETWKHYQAQITACDEEIARLLQGFTAKVDVAAQPLPPRTSTHRSPQKNEPRFEARAELYRTCGVDLTQMPGIQSGTALVLLAELGPDFAERFPTAKHFGSWLGLCPDNRITGGKIMSSATRDVKSRAATALRLAAQCLNKAQNYFGDLYRRWKARLGTPKAITAMAHKLARILWHLFKYREAFNPEVFRKEEEAMQRKKLARLHNTAAALGLKLIPT

SEQ ID NO: 215553 - protein, 364 aa, unidentified
MKKISTAKIKNQAANKKVTIGMDLGDRSSRYCLLDEEGVVMGEGSTPTTKAGIAKVFGAMARCRVALETGCHSPWVSRQLEAYGHEVIVANPRNVRLIGERTRKDDRLDARTLARLARIDPNLLSPVRHRGAEAQADLAVIRARRVLVRARTMLVNAARGLTKSFGERLRQCGVRQVGPTLAAELSPEIRAAVAPLLAEVEALNQRIAAYDLQIEQLAKEHYPEVARLKQVKGVGTLIALTFVLTVDDPNRFRKSRDVGCYMGLRPGRRNSGKSEPQLHISKEGDRYMRTLLVQGAHYILGPFGIDCDLRRWGLKMAERGGKNAKKRALVAVARKLAVLLHKLWVSGEAYDPLRNSRQLVARAA

SEQ ID NO: 215554 - protein, 343 aa, unidentified
MTQISTIGLDLAKNVFQLHGVDASGAVVLRRQLRRAAVEKFFAQLPPCLVGMEACGSAHHWARVIGKYGHEVKLMPPAYVKPYVKRNKNDGRDAEGICEAVTRPTMRFVAVKSVEQQATLAVHGTLALLVRQRTMAGNALRAALSELGIIAAQGYEGLRALMARLEEPSEQIPEMMRAALLVLAKHWQALDTDERALEQQIAKAARRDRDARRLMEVPGVGPMIASTVLAKVPDAKLFRSSRDFAAWIGLTGKDHGTGGKHRPGHISKQGDRVLRALLISGASAHLRQQIARGVSDPWLRNLLARRPYKVAMVAFAAKTARILWAMLVKGEHYRDRASASAAA

SEQ ID NO: 215555 - protein, 387 aa, unidentified
MAQVNDLSRSLTAFDPISTLVVVVEMSKASWLVSGAVPGVERQPLKKLEPDATALLRLIERWRNEAMRSGRPISRIALAYEAGRDGFWLARWLIARGIEAHVIHSASVAVSRERKRAKTDRLDAAMLMRVFLGWLRGERGHCGMVVIPTMEEEAARRPSRERESLVNERSRITNRMKSALARLGIRGFKPHLRKAPERLADLRTAEGTGLPANVIEEFRRDMARLALVREQISSIEKTRAERLERAPDTGPHAMVRLLARVIGIGIETADMLVREILSRRLRDRRAVARYAGLTGSPDESGLKRREKGLAKAGNARVRRGLIQLAWRFLMFQKDSALARWYRTRTEGPSGARKTTMIVALARKLLIALWRLVTTGEVPDGVELRPAA

SEQ ID NO: 215556 - protein, 310 aa, unidentified
MDATYVGIDVSKEKLDVHLRPSAEAFAVARDGKGLHELVERLRGVAPELIVVEATGGFETIVTAALAAAALPVVVVNPAQVRHFAKALGQRAKSDPIDAAVIADFAAAVKPQLRPLPDVAARLLAELVGRRAQLVEMLAAERQREERVANARVRKSLKRLIAALAKELKTIEDDIDGLIRSSPLWREKEDLLKTFPGVGETLARVFLADLPELGQLNRRKIASLVGVAPFTQQSGQWKGKNMIAGGRAAVRSAVFMAAMSAIRCNDMLRAFYQHLLALGKPKMVALIAVARKLLTILNAMLRDQKPWQHA

SEQ ID NO: 215557 - protein, 319 aa, unidentified
MRKVVFVGVDVAKDKLDISFTCDGQKYDSLTILNNEGSILGFFDYLKTTYKKSEFFVGYEATSNYMHLLQKLLCQQDFKQIMINPYMMSHYLKHLNSRTKSDLADSQGIAKFIQTLDQEDFKTIFNQNDKTLRKYTSSINLLRKLDTQLKNFIHSQKENPIDFLDSFLLSLKLKIKETKKGLEKEAENVLKQLFPHVIELKDQIKGVGYALLLELVPIFLKSQNYTLKQLQSFVGLSPRIFQSGTSVHKKESMSKRGSSLVRKLLYLSAMSAVRYNDIIKEKYNRLVEGGKNKMVALVACMSHLFRAVYVKFHQGLVNV

SEQ ID NO: 215558 - protein, 414 aa, unidentified
MELLHERCAALDIGKKDLKACVRTPSPKGKRSRRQEIRTFATTTNALLELRDWLVGERVSLVVMEATGDYWRGAFYLLEDDLEVILVNAAHAKGLPGRKTDVCDSSWLCQMGECGLLRASFVPPEPIRHLRDLTRYRTTLATERTREAQRLEKELEDAGIKLSSVATDILGVSGRAMLAALIDGERDAQVLAEMAKARMRPKIPRLVQALTGNFGDHHAFLCRLHLERIDQLTAAIGELSARIEEQMLPFARQLEYLATIPGVGQSVAEVIVAETGADMSRFRTAAHLASWAGVCPGHHESAGKRRSGKTRHGNRWLTGALGTAALAAARTKDTTYLGARYRRLTRRAGKKKALVAVEHSILIAVWHMLTNDVEYTDLGGDYFARLDPERAMRRIVRQANALGFTVRFDPIQAA

SEQ ID NO: 215559 - protein, 311 aa, unidentified
MKTFVGIDVAKAHVDLYDTITETHLQFENHSEGISRCTDYLLALDTELIVMESTGGYETMLAVALQSAKLPVAIINPRRARDFGRAVGRLAKTDRIDAMLLANYAATIKPPERPLGDRKSRQMKALVARRHQLLQMRSAEKNRLEHSHDKAIAQSVTAVIKIFDRELNKIEKQLQTIISASTELSQKVKALISVPGIAEITATMLVTEVPELGQLNRRQIAALIGVAPVNRDSGSFRGKRMTGGGRRRVRARLFMPTLVACHHNPVLKAFYQRLQEQGKSKMTALVAAMRKMLTILNTMLAKNELWTPKRT

SEQ ID NO: 215560 - protein, 422 aa, unidentified
MSYCPVAGIDVSKRFSDMCILSPDNKIFAQEKIYHDETSINRANALLQKAERLFFSKPVIVMESTSHYHLILFQFFSGHGYDVIVVNPLQSNSMKDFSIRKRKTDRVDAFKLAMMYRTKTLRPSQIPQTATRALRQLCRHRAELLNDVSSYKNRLTALLDQTFPGYDKVFSDVGGVTSCAVLVRFPTPTILLVEEESELVDVIAAASKAGYNFAKKNAGLLISAAQKAQTLGIHSCADETLIVCTIQMLRTLSESVLQIETAIDNLLAQIKEMRNNVSLLQSIPGVGSHSAALLLGEIGDISLFKKPKQLAAYFGLDPTERQSGSFRGTKNKLSKRGSPYARAALHMGVVNSICKRGKDSAANPVLLSYYEKKCKNKPAKVAQAASMHKLVFIIFAVLRDQKPFELKTPEQHAVEQGFVKAA

SEQ ID NO: 215561 - protein, 302 aa, unidentified
MIIIGCDYHPGFQQIAFVDTEAGDYGEQRLEHSEGAEKFYRDLAAQGKKVRVGMEASGHARWFERLLAELNFELWIGDATEIARKRERKQKTDRQDAQHILQLLMENRFPKIWVPSGENRDLRQLLWHRHRMVQMRTRIMNQLQAVALNEGLRCKKRLWRQHGREQLESFRLAPWASRRREDLLQLLDRLNPTIADLTQVIEQEVEKCPEARRLRTHPGVGALTALAFVLIIGRTERFQCGKQIAAYLGLVPLEDSSGNRRRLGHITKQGSSMLRFLLVEAAQVTARISWINPHPSVIPSGV

SEQ ID NO: 215562 - protein, 340 aa, unidentified
MDNIGLDLHKRESQLCILTEDGALMERRIVTDRDRFTAVLGGRPAARILVEASTESEWAARHLEALGHEVIVADPNFAPMYATRSRRVKTDRRDARTLAEALRVGAFRPAHRLSEPQRQVRGELAVRDALVHTRVRWISVLKAAVRREGLRIPGGAAEQVAGKLAALPLPASVQAELAPVLALLEPLNAQIAAADARLAARAATDPVVARLTTAPTIGPVTAVAFVATLDDVGRFAEASRVAAYLGLTPTERSSGEQQRRGRISKTGNPRLRSLLVEAAWRILRSTQPGAAALRAWAEQIAARRGRSVAAVALARRLAGILYAMWRDGRAYRAPRLAASA

SEQ ID NO: 215563 - protein, 341 aa, unidentified
MSLIAPVFSFDLNGYTGSGLALQDKAEKSLMQITIGIDISKETLDAYRFPDNHHIQVANGRAGHKTLVRWIGKQNGSLVVFEATGAYHRNLEAALAANGTAFAKVNPRQARRFAEATGRLAKTDRVDAIMLAKMGAILGLKAHEPRTEALHILRELITARRALMKDKVAAKTRLQTTRQTLLKNQINARLKQIKIQIQQVDAAITEKVAQDEALSNKLDILTSIPGIAETTAFSMLIEMPELGTLEGKQAASLAGLAPMSRQSGKWQGKERIKGGRAFLRRAIYMPALVATRYNPGLKAKYDQLIRAGKSGKVALTAIMRKLVVMANALLRDGRTWSELRP

SEQ ID NO: 215564 - protein, 348 aa, unidentified
MGDLSMNISVLGIDIAKNIFQLHGVDSSGKRILKPRIEREQLSAYVASFQWCTIAMESCGGANYWARVFQRQGHIVKLISPQFVKPFVKTNKNDANDAEAIVEASSRPSMHFVPVKQVEQQDIQSLHRVRSRLVKNRTALINEIRGLNLEYGITIPQGALKVKSHLRSVIDDKENELTISSRELMEELYNELVELEERLKKIEKKVKLICKENDQCQRLLSIPGIGELTATAIVAAVPNANEFKNGRHMAAWLGLVPRQSSSGNKQILLGISKRGDRYLRTLLIHGARAALCRYKNTNNKYGEWLSHKKESLSLNKAAVALANKNARIIWSLLKTGEEFNSNQQKVAA

SEQ ID NO: 215565 - protein, 405 aa, unidentified
MDVIYERCCGLDIHKASITACVIVGKNKEICTFGTMTDDLLRMTAFLKERNVQMTAMESTGSFWKPIFNIMEVEGVPAILVNAAHIKAVPGRKTDVKDAEWIADCLRHGLLRPSFVKPRDQRELCELIRYRGSLIEERAREYNRMGKVLEGANIKLTSVASKLDTVSGTNMIRALSNGVVEPALLASMAKGVLRKKTDELKRALNGLIQPHQQMILKAMLGHIDQLSGLINTLDMEIEVRMSQDVELVEALDEITGVGKVSAQTILAEIGTDMSRFPSANHLASWACICPGNNESAGKKKSGKTKKVNSTLKKTLVQSGRAAANSKDTYLSSLYHRIASRRGAKRATVAVGHAILVICYHMIQNRSRYNDLGSDYFRKRNKDALVRQSVKRLEALGYNVSLEAAA

SEQ ID NO: 215566 - protein, 357 aa, unidentified
MLSSNVKYIGLDVHKEAIAIAVLNGAGKLVMESIVETKSDTLLDFLHGLRGELHVTLEEGTWAAWLYDVLKPHVREIVICNPRRNALLKEGSKSDKIDARKLAELLRSGMLRAVYHGENELRTLRELARSYLTVSKDLKRVKNRLKALYRSWGISCAGKQVYTPRHREQWLSKIAQVGVRRRAELLYQQLDGLQVLRHTVRGELLAESRKHKAVKILRQVPLVGPLRAALLLALMQTPHRFRSKRQLWTYSGLAVVTYDSAQHRYVDGQLQRSKKPQQIRGLNQNHNHAMKDIFKSTALSASCCAGPLQDFYARLLAKGMKPDMARLTLARKIAAITLTLWKKGGSFDAEHLKSQAA

SEQ ID NO: 215567 - protein, 361 aa, unidentified
MKKPTHHLIAEAPRKRGQVELTIGIDLGDVWSHYCTLNQQGEVVDRGRFRTTAKAIEKWFAPVPHARVAMEAGVHSIWISEQLEQLGHEVIVANVRELRAISHSDRKSDDVDAEKLARYARLDPEILRPISHRTVEQQEALTLIRARELLVRLRTAAVNAVRGLTKACGHRMPASSTKCFAQRGQAAMPPGLKLALGPILAQIAEMTLKIKQYDRDIQRLTQTEYAETQAMMTIHGVGHITALTFVLTLGDKTRFGRSRDVGCYLGLRPKRSQSGERDPQLGITKAGNVYLRSLLIECANHILRPHGRDSALRQWGLHLAARGGKQAKNKSVVAVARKLAVLLHHLWTTQEPYVPFHQQVA

SEQ ID NO: 215568 - protein, 434 aa, unidentified
MRLKEYSRKESHRKAYVSQEGLLLVGVDVSKDKHDVCTGTRADILRRKVQVSNSRAGFDRLSELIESDLHKTGCKRVLVAMEATGIYWYGLYHEMASRGYEVCLVSSQGVSHNRRTMPGGSSKTDRKDAYSIYDLLSQGKFFLPVKRDDQLQASYRLMRRHASLEKRITRIRNQMRGTLHMAFPELQEELGKITMPTALRFLRSNPTPASILRQGRSRFLERWKPRRRCGQWKRDRFERIYELAKTSIGLKDPLRMTEYEIREQAEDLADAVAKSKAWKDKAISLLEGRADFKHLLQLPRMGKATVTAVLTATGGADEFSHGKQFVKLAGIDVREFQSGSSVHGRAHISRAGSAYLRHWMYFYSVQLVGHDAYFKAYFERKKKASPGPGSGKRALVAVADKMLRIIYRMLVTREDYSPDVHQRLEERYRLSQAA

SEQ ID NO: 215569 - protein, 373 aa, unidentified
MYKDTTVYIGMDVHKESFTLSSYVLGEEEPGHVQTIPSDYILVVKYANRMRKIYGEESEIKCGYEAGCLGFSLYHQLKRCGMNCVILAPTTMMEEKGKKKIKTDKRDAKKIAQCLAYHTYSPVHIPTDEDEQVKEYIRMRNDLKAELKRIKQQTLAFCQRHGLKYTLTKSPWTQAHLKWLQSLQLEGLYQETLDEYLLHLNQLTEKLERMDKRIEEMSNLETYRESVDRLTCFMGVKRLSALAVMVEVGDFKRFATAQHFASYLGLVPGEDSSGGGQNRLGITKAGNTHVRKILIEAAQSYGRGKIGYKSAVLKARQQGNPSQIIAYADRANERLRRKYYSMLFRGKKANVAKTAIARELACFFWGMLNNKVI

SEQ ID NO: 215570 - protein, 374 aa, unidentified
MKGASLGGAFEWTLEGVKPNHKEAWKIMLHAGLDLSRRRLDVCLLGADGSRLQELQVPPDRDGLRWLALSIYDRHGEQPVQAAIESMTGARFVHDQLELAGWEVEIADAVKAKGLAPLACKTDRVDAWVLAELSRRDLVPAIWLPDPSQRAERERARWRLHLVKHRSALKNRIGSTLMTFGHPRAMSDLFGLRGRQLLEAIELPPPWRGDVAAAVELIDDLDRRIDECAAELQRLGADHPYVPLLLTLPGVAWVLAYTIAAEIGDIHRFGSATKLCGYTGLCPRVRQSGEHDERGPLAKNGPRYLRWALIEAARHAARTPYFRAKYERTCQRLGKRGTKIGAVEIARQLAQAIWHMLTRNQPFAPAGAPLPLVA

SEQ ID NO: 215571 - protein, 329 aa, unidentified
MAIVGIDVSKSKLDICWLKDPQAMRIKTRVFSNTDSDIRKLNDWLVSQTGKRPEAVRVMMEATGIYHERLAYALYEAGFQVYVVNPQHVHSYAKSFGRRSKNDRKDSVIIARFLSDRQQELPLWQPEPQEVRHLKAMLARLNALDADIQREQNRLEKALVQKASQRVESSIRTMIDALQQERKKLEQDIDNHIDGTPSLKEDRRLLESIPGIGRVLSVELMATMRSRDFKSASQVAAFLGLVPIMRQSGSSVDERPRLSKGGSSRIRAKLYMGSVVAIQHNPMIQRQFARLVGRGKSKMSALGAAMRKLVQIAYGVLKHQTRYDPQWAA

SEQ ID NO: 215572 - protein, 348 aa, unidentified
MTKKLMAGIDLHSNNLVIGIVNQDGERIKHQKLECDLQLVDKFLSPYKHRLQSVAVESTYNWYWLVDGLRARAYPVVLANPAKMDQYSGIKHADDTNDAYFLAELQRLNILPTGYIYDPVLRPVRDLLRRRMSLVHQRTALMLSFKSLYTRTTGQDFSLSRLKSLEAAQAEALYEHPANGLIATLQKEHIEKLDQSIAKIEKVVLQCARKLPCYEKLCLLPGIGRILSMMMTMEIGELSRFKTAGNFASYCRTVDSQRLSNGKKKGDNNQKCGNKYLAWAFVEAANFAKRYDERCRQWYDRKAAKTSSVIATKALACKLAKAAWYLISQNADYDPNRMFPAPSRKPTK

SEQ ID NO: 215573 - protein, 452 aa, unidentified
MEEPQEVQDEEYERVYQRVAAIDVAKASGVVCTRVPDESRPGRRRTKVWTVIATMNAVTELADHLRCHQIQVITLESTSDYWRIWYVVLEAAGLKVQLVNARSVKNVPGRAKTDKKDAVWLAKLTERGMLRPSFVPPPEIRRLREFTRLRADLVHERTRYWARLEKLLERALIKISAVASSLDTLSVRAMIEALIAGQRNPKALADLARGRLRIKRAQLAEALDGRFEPHHGELARIILDQIDALTAQIDQLTARITELIAATPAAQGIDADGTTGPDAGADPGAPVLPAVARLDEITGCGTVAAQAIIAEIGLDMTVFGTPGRLVSWARRCPQTRQSGTKTSAGKAGKGNPYLNGVLGEIAASAGRTDTFLGERYRRLARRRGKRKAVTAVARSVLVVIFHLLADPQARFRDLGPDYHDNRISRDRKIANHVRQLQALGLTVTLTPAEEAA

SEQ ID NO: 215574 - protein, 310 aa, unidentified
MTMVCGLDLHRRQITFDAVEVEFGQVWTGRVWQPDRERFRRWLRDDVASRADGGPVSIAVEGCTGWRYVVEEVVAAGFEAHLAEPADTQAARGRKRRAKTDRSDCRLLRELLAEGRLPASWIPPTVVLEWRERARLYKTLVDQRSTWVQRIHAELFQHGVTLPETSIRWAKTRQLLEDDSLEISPAGRQRVLTAYRMIDAITIESRPLTADLQRFGRRQPGCRALADSQYGIGGLLAVAMWSELGDCQRFARSEQVVRHSGLDVTVDSSDRRRAGGFLSRQDHRRCVGRSTKQPRTPHTTAAPTTTTTPT

SEQ ID NO: 215575 - protein, 323 aa, unidentified
MQGKVSPERSAATRVYVGIDVCKAWLDVYLHPIGRQFRVTNCREGLKRLKRELANLEVALIVMEATGKYHREAHRSLHASGFIVAVVNPLRSRLFAEAAGSLAKTDRLDARVLAILAESLAPKAKPPAPETLEELQELVRAREAAVADLTALTNQQGESKTAILRRELARRIKATQASIARLAAEIERRIERDPALARRYLILLSIKGIGPVAAAALLVGLSELGVCSGKQMALLAGLAPVACDSGESQGERHIKGGRGDVRAAIYMAAITAARYNPDLSTFYRRLRDKGKKFKVAITAVMRKLVVLANTLIREDRMWQPTHA

SEQ ID NO: 215576 - protein, 334 aa, unidentified
MLYAAIDIHKRTFQAAVLDVETGETSERRFGATREELNDWAMPLQGRLAAVAIEATNGWRWVWRELSARGFDVRLVDPAQAKALRGRIKRAKTDRLDARWLCVLLAKEMLPESWLPPAEIQTLRDQTRLRKALAEDRTRWAQRLHALLTHEGWPCQRARLLTVEGRRWVQSLSLSPAARAQVDRLLRLIEAVESELRSLETELRRFARNDRRCIALQTIYGVGPILACHLLAELGEAARFRRARQAVRAAGLDPVVDESGDTRRRGRLAKHGAPVLRWALVEAAQHAQRANSPDRALYTQAATRVGDKRALLTVARKIGRRAYHVLHELETQAA

SEQ ID NO: 215577 - protein, 389 aa, unidentified
MKIFVGIDIAKLNHFAAAISSDGEILIEPFKFTNDADGFQLLVSKLESFDKNSIIIGLESTAHYGDNLVRYLVAEFYQVCVLNPIKTCQMRKNNIRKTKTDKVDTFVIAKTLMMQDDLRFITFFDLDMMDLKALGRFRQKTIKQRTRLKIQLTTYVDQVFPEIQYFFKSGLHQNAVYALLKEAPSPKEIASMHMTHLANLLKVNSHGHFTKEQAKELRVLAQKSVGANDSAISIQITQTIQQIELLDSQLDKIEAEMTDIMKFNDSVIMTIPGIGYINGGMILGEIGDIHRFSNPNKLLAFAGLDPSVYQSGNFQAKTTRMSKRGSRVLRYALVNAAWNVVRNNATFKAYYDAKRAEGRSHYNALGHCAGKLVRVIWKMLTDEVEFNLE

SEQ ID NO: 215578 - protein, 364 aa, unidentified
MYEFTHIGLDVHKDTIAVAVLRSGTTTCDERVIPNTPEAVRKLLSGHPDPSLLRTCYEAGPTGYDTQRLIASLGIACDVIAPSLIPRRAGVRVKTDRSDARNLAHLHRAGELTCVRVPTPAEEAVRDLVRTREELKSDRRIARQRIRSFLLRYGRRYPAPGARWSWRFEVWMRALRFDEPASQAAFEHLLGAYFVRDSQLCAVDRQIAELATLDPLAGGVARLRAFRGIDTLTAVTLLTETGDFRRFGSAGFYMAFTGLTPSEHSSGATIRHGSITKTGNRHVRRVLVEAAWAYRYAPAVRGAHAKRLEGQPPEVAAYSWAAQCRLHATYRKLAARKGPNKAVVAVARELAGFVWGAMTQDIGA

SEQ ID NO: 215579 - protein, 356 aa, unidentified
MNKISKLDFKGQQIYVGMDVHKKSWSISIFTDKFEHKTFTQPPEVDTLVNYLKRNFPGASYKSVYEASYCGFWIHDRLQEHGVQCMVVNPADVPTKDKERTKKTDRVDCRKLARSLRSRELEGIYVPSRPKVEDRSLIRTRYSMVRKQTRCKNQIKAILQFYGIQVPEELANGNWSKRFITWIEAIRMERASGNYALKVHLEELNNIRKIIADITRNIRTLANSEEYRQNVRLLKTVPGFSTLTAMTLLTELYDIGRFTNFDKLCSYLGLIPDTDSSGETERKTGITKRRNAQLRGILIESCWVAVRKDPALLMSFNTLCKKMPKNNAIVRIARKLLNRIRYVLKNQQEYVSAVVQ

SEQ ID NO: 215580 - protein, 352 aa, unidentified
MRFAKVDSKYYCGIDLHSRSMYISVMDKEGEVLFHRNMPNDFDIFKNYVERFQPNMAVGVESSCYYYWLADACKEAGIPFYLGHAYYMKAINGGKVKNDRVDSKKIADLLRCNLFPLAYDYPREMRPTRDLLRRRHFFMWRRASTYSHLQVICTQQGIIDLEPKIVKDKQRRNELLKLFDDKELQMMISLDLMFIEFLDPVVAQLERHITQKARNHNHLDYQLLRTIPGVGAILSLIILYETHDIKRFKTVQRYSSYCGVVKCERESGGKKIAAKNTKIRNPYLKWAFGEVILKAQVSEPQIGKLYKRLKSKYGLGRAKSIIAHRFAVATYFMLKNKQTFDAERFVQTSKYK

SEQ ID NO: 215581 - protein, 307 aa, unidentified
MSEVRTIGLDLAKNVFQVHGADETGAVVFRKQLRRGQVLKFFGGLPRCLVAMEACGSSHFWAREIGHLGHEVRMIPPAYVKPFLKRQKNDMADAEAICEAAQRPTMRFVAVKSEERQAAAVVLRTRDLLIRQRTQTINALRGHLAEFGEVVPQGLSFASKLIAMIEDPQTALPETARTALRFLTASLSQLNDQIRVLDAQIVRRAREDETARRLMTVPGIGPLIATALVALAPSPETFKRGRDFAAWLGLVPRQHSTGGKQRLGSTTKMGDRSLRRLLIIGANSELVWRARPQGCNTRHVAGQDAGA

SEQ ID NO: 215582 - protein, 335 aa, unidentified
MVKENFIYVGIDLHKETHTAVMIDCYNQKLGEITFPNRPADFPKLVTKVKKCNTDAKEVVYGLENAYGYGRPLAVWLIDKGYFVKDVNTAISHRQAKHRGAMYRKSDSDDAEAIALATLNMLDKLPDACPNDAYWSLGQLVHRRDNIMKQRTRLVNQLHEQLCIAYPSYKQFFNDISRPTALYFWEHYPSRKYLKGKSVEDLRTELVPVSHNRCSTKNCEKILDAVASDKVKNNAYQDARDMVTLSIVSDLQHYDSQLAEVDKMLEQMYKMLGCTLTTIPGVNVITAVKILAEIGDIKRFSNANKLAQFAGIAPLHLSSSGKGKDVATKQGNRRL

SEQ ID NO: 215583 - protein, 354 aa, unidentified
MLIIGCDFHTRYQQIAMAREGTAELLLERRLDHESGEAHAFYRNLQSSHEPVLVGIEATGPIHWFERLLAELGHELWIGDSAKIRAQEVRKQKTDERDAALILDLLLAKRFPKIWVPTPAERDLRQLLWHRHKLVRLRTMMGNQLHFLAMSQGLCRKGKLFTKKGRAELVSLGLAPWARRRREELLQLLDQLDSPIAELDRAVLEEAKRRDDAVLLMTHPGIGPVTSLAFVLAVGPVTRFHRSRKLVSYFGLNPTEESSGGRRRLGAISKQGNTMVRWLLIETVHHAVRQDPELKQDYQRLKFRRGHAVAKVAIARKLAVRMYWMLRSGADYARLVRRQGSPGATLVDASPSLG

SEQ ID NO: 215584 - protein, 387 aa, unidentified
MPQPNDLSRSLVALDQNSTIIAVIEMSQSSWLVAGMLPGIERQPRKKLDPSPERLLGLLHRWRDEAVRAGRTITRIALAFEAGRDGFWLARWLAAHGVEAHVIHASSVAVSREHRRAKTDRLDTELLKRGFLGWLRGERGHCSMARVPTIAEEDAKRPNRERECLVGERTRIVNRIKSTLARLGIRNFKPTLRKAAERLATVNTPEGMPLPPNTLAELQRDMARLGCVVSQIREIEQARQKRLEQQPETGPHAMVRRLARIVGVGVETADMLVHEVLSRPMRDRRAVARYAGLTGSPDESGAQRREQGLAKAGNARVRRGMIQLAWRFLMFQKESALAIWYWARTADSRMGTRKTMIVALARKLIIALWRFVTTGEPLEGVVLRPAS

SEQ ID NO: 215585 - protein, 372 aa, unidentified
MTSIIYIGMDVHTTNYTLCCYTVDSDDAFAVVNVKPDYHEILKYMERVRSTRGGNCDFICGYEAGCLGYSLYHQLAKHGVACIILAPSTMPQQKGKSIKTDKRDAKNIAKCLAFNLYSPVYVPTAEDDAIKEYIRMRDDVKADLKRTKQQIISFCTRHGFHYEGKSRWTQGYFKWVDSLVFENAIYKETLQEYLALYYTLDEKIAVYDARIEELAHQKRYEENVRKLCCFKGVSTHTALSLLVEVGDFHRFRTAQHFSAYLGLVPGESSSGEKVIHTNITKAGNSHLRTLLVESANSYSRGVVGKKSKVMKDKQGGNSPEIIAYADKANERLHRKFYKIAIRSKKNVAKTAIARELSCFVWGMMTNHISRAV

SEQ ID NO: 215586 - protein, 391 aa, unidentified
MIYAGIDVAKDKHDCFITNSDGEVLFKAFTIPNNRDGFDELYQKITSVTDDLTKVKVGLEATGHYSYNILGYLLDKGLATFVINPLHTSLYRKSLSLRKTKTDKVDAHTIATMLLSDVNLKSYSDTSYHNEELKSLTRYRFDKVKERAKLKSSVSRLVTILFPELEKLVPVLHMASVYALLSEFPSASAITDSHLTKLTNLLSTASKGRYGKDTAILFREAARTSIGSHMPAKSLELKHTIKLIQEITSEIDEIEAEIKAIMDSIHSPILTIPGIRYRMGAMILAEIGDFSRFDSPDKILAYAGMSPSTYQSGQLESSHSHMEKRGSRYLRYALYNATKYVCHWDPTFAAYLEKKRSEGKHYNVALSHATKKLVRVIFQLEKSGQCYIKAA

SEQ ID NO: 215587 - protein, 420 aa, unidentified
MKVYNVNDFAALIGIDWADTKHDICEHPNLTKKYQYTIIKSKPEALHEWAMSLKQRYPNQQIAVACELKKGPLIYALAKYNHLTLFTINPSTVAKYRKAFTPSGAKDDPTDAFIQVEILTLHMDKLCVIEPESAAIRSLAQLVEYRRSLVQDSVDLSNKITAALKNYYPQALEWFKEKDTFIFCDFVSKWPSLVHAKKAKKQTLLSFLNTHNSHYPDVNEARILSIKNAMPLTDDTGVIVPNQMLVEVIITQFKVLLKGIETLDKAIKLAYKAQQDNIIFDSLPGAGPQLAPRLLVAFGCNRDRYHDASELQKYAGIAPVIERSGKKMWTHWRYSCPTFLRQTFVEWAGFSVRYSFWAKAYYDQQKSKGKPHNSIIRALAFKWIRIVFICWKTKKPYDESKYLEALKRRGSPLLKYAINS

SEQ ID NO: 215588 - protein, 353 aa, unidentified
MRKMQEFIVKGNKIFIGLEDSKRTWKLCVRCDRMNVHETSMPAKYGVLQTYLLNRYPDCEIELMYEAGFQGFWLHDLLEADGYTCIVTPANKVTLAKDDRVKTDKRDARRLAQNLENGDYVSCHVPDRERREDRQISRTLIQIQKDITATKNRIRRFLDYYGLNDGLKTGTWHDKDYMNLASIELSRPLKVSLDMCLRLLNEQLEIKKELLKELRALCEKERYKAGVSTKKSCPGIGWLTAIRLTLEWGNMARFQTGKHIASYTGLTSREYSTGDTVRRGRITGQSSEYVRSWLIECAWRAVRKDPVLLDKYRAVYRNSGSKKKAIVAAARKLAVRLWALETTKQLYCIGIIE

SEQ ID NO: 215589 - protein, 355 aa, unidentified
MNSEKYIGLDVHQATIVVAVMDSTGKVVMESILETKAATILEFLAGLRGTLSVTFEEGTWAAWLYDVLKPHVAKVVVCNPRKNGLLKDGNKSDRIDARKLAELLRLNNLKSVYHGETGVRMLRELARSYLNLVKDQTRVMNRLKAMYRSWAIPCAGRDVYYARHHAEWLAKIREAGVRRRVEHLYQQLDMLQHLRQQARRELLAESRKHSITAKLRQIPSLGPIRVALAVALIQTPHRFRTKRQLWAYSGLALETRTSGEHCYIQGQLRRSKKQISIRGLNKDHNHDLKGLFKAAASRASVQPGPFQDFYQASLAKGIKPTMVRLTLARKIAAITLTLWKKGENFDAEKLKSQAA

SEQ ID NO: 215590 - protein, 323 aa, unidentified
MLIIGCDYHPGFQQIAFVDTETGECGERRLTNCAEAEQFYRQLQERSLRVRVGMEASGHARWFERLLSELQFELWIGDAAEIRTKRVRKQKTDRQDAQLLLRLMVEDRFPRIWVADTENRDLRQLLWHRHRLVQMRTRVMNQLHVVALNEGLRRKKALWRPEGRNQLQSLKLAPWASRRRQDLLDLLDQLTPKIQELTRALEAEVEKRPVTRRLMTHPGVGPLTALAFELVIGTVERFDCGKQIASYVGLVPTEESSGDRRRLGHISKQGNTLLRFLLVEAAQVTVRSSPQWRSKFFHLAMRRGRKIAKVAMARKLAVHLYWM

SEQ ID NO: 215591 - protein, 331 aa, unidentified
MTTISQNSVTKQENNEIFVGIDVSQDNLAVHILPTNEQLTIPNSAKGIKELVKRFQKIQPTQILFEATGGLERNLLASLIAAGMAVVVLNPKQARDLAKGFRQLAKTDRADAKILAKIAQKCGFEPRPVPSGETMKMNDLVTRQRQLIRMRTMEKNQLHAAKQQNHAKYILATHKQMIASIQKQIDEIAKRIRDMIAANPDWNELDKIIRSIPGCGLKTAQMVIAAVFEIGRLNRQQIAALIGLAPMADESGKHFGKARIQGGRADVRGVLYMAAMNAIKKPGVFKALHDRLMAKGKLFKVAIVAVMRKLITTINAMIKTKTQWNERGVRS

SEQ ID NO: 215592 - protein, 349 aa, unidentified
MNKSTSESAIVTLGVDLAKNIFQLHGVDAAGQVVMQRVVRRREFLRLLSGIPRCLIGMEACATSHYWARCLMELGHEVRLIPPTYVKAYVRRQKNDAADAAAICEAVSRPSMRFVPVKSETQQSRLMLHRARELLVRQRIALINALRGHLAEFGVVAPQGARHVGGLVALLEDASDGRLPAVVRVALMPLAAQLRNLDMSIGALDQQILMQHRNDPTSRRLARVPSVGPLIASAVTASVTDVSMFGSGREFAAFLGLVPRQSSSGGKERLGRISKMGDRYLRKLLVVGATAVLRHAKKGNSALKLWAQRLLAKKPFKVVAVALANKTARIIWALLRRGGVYRTQVMQAA

SEQ ID NO: 215593 - protein, 356 aa, unidentified
MSATIIGVDPHKRSQTTAVVLDDAEQIASKLRVTAGAGQVDELLGWALDQERVWAIENANGLGRLLAQQLVARDEAVIDVPATLSSRARKLSGHSGRKTDEHDARSVVIAAAHNSRLRRVSVENNTVVLGLLLDRRWHLVAQRQRTLCQLHVLLAELVPAGAAMHLTSKKAAVMLRKIAPGGVVELERKLLARELLEDVRWLDRRIPVAMQRLSQALTAYGTTLTDIHGIGEIGAATILSIVDDPARFPDPGHFAAFNGTAPLEASSGDVRRHRLSRRGNRQLNKVLHVAARTQIRRGGPGRTYYDRKLAEGKSKMEALRALKRQLSDVIYRRLLADARQRQAARGGQTGTRPKSA

SEQ ID NO: 215594 - protein, 401 aa, unidentified
MNAVGIDVSKGKSMVCFMRSFGEVVLEPFEVLHTAQNLHDLAEKLKALDGETRVVLEATGNYHKPVAFVLHDAGLFVSVVNPVLIHDYDNNSLRRVKTDRKDAVKIANYTLDKWTRLRQYLPEDDTRLALKNCYRQYQQAVAVRTMLKNNLISSLDLTFPDANKLFTSPAKSNGCEKWVDFIGDFWHSECISSLSANAFAKKYLKWCQKHGYVFTRSKSDEIYACAVNSASLPKSPTSKLLIQQQVAQLKAVSQSVAAFRQEMLRLSQQLPEFDTVMEMYGVGPSLGPQLMAEIGDVRRFSSKKSLIAFAGIEPQPNDSGKVVGNDKGISKVGSAVLRRTLFLIMTVILQTQPQDEPVFQFMNKKRSEGKPYKVYMMASANKFLRIYYARVKAVMDSERSQ

SEQ ID NO: 215595 - protein, 347 aa, unidentified
MRFYTKQHKFYCGIDLHAKTMYLCILDQEGEIKLQRDIKTDPEIFLRTIARYREDIVVGVECIFTWYWLADLCARENITFVLGHALYMKAIHGGKAKNDKIDAHKIAALLRGGMMPIAYVYPPEMRSTRDLLRRRMHLVNKRAELLAHVQNTNHQYNLPEIGKNLGKKGNREGVADRFPDVSVQKSIELDLSLIDHYDQLLHRVEHEISLIAKKHDADSYFRLRSVPGIGRILGLVILYEIHDISRFERVQDFVSYCRLVKPARESGGKRLGSSGKKIGNVHLKWAFSEAAVLFLRRNPDAMKYREKLAKKHGKAKSMTILAHKLARAVYYILKRKEVFHIETFFAR

SEQ ID NO: 215596 - protein, 316 aa, unidentified
MSGAESWIGIDVAKATLDVAVRPGGDAWQATNDEPGRAALVERLRGYEPVLIVLEATGGLERALVAELVAARLPVAVINPRQVRDFARSANILAKTDRLDAGVLAHFGEALQPAPRALADAELDELQALVARRRQLVGMLVAERNRLGLARARVRPSITAVIELLRQQLEALDREIDRFLKSSPVWRERDDLLRSAKGVGPGLTSTLIADLPELGQLRRQHISALVGLAPFNCDSGQFRGQRHIWGGRAKVRAALYMATLVATRFNPTIRETYGRLLAAGKPKKVALVACMRKLLTILNAMVRTGTHWRAETEPLS

SEQ ID NO: 215597 - protein, 488 aa, unidentified
MSDRKTKAPPPRPRPPDDLRRAARRAALDRRPAEDCARIAALPVRHEHAAGIDAGDASPWACVDATPDGSDRVREFPAHTAGLRQLVAWLQFCGVTTAALEATGAYGHVLFLTLLEAGLATIMIPPQFARQIKGRPKTDRRDCQWIQRLHSHGLLPGVSQPDAATQALRGYVRQRANLVRPSGQHIQRMQKVLELMNLKLTKVLGDVTGVTGLKVVRAILAGQRDPQQLARLRDRRCGHTAAEMAQALDGRYRPEHLLELRCNLTMWEKYQEVIAVVDTAIAAQLRSMRRQAELPPLPPRIRVRGRKAHDPGFDVRTALYYATGVDLTAIEGIDEVHALTLVSELGTDLSKWPTVKQFTSWLGLCPNWKKTGGKVQSSQTRRGKNRAARALRLAAWCLMRSQSYLGAYLRRQRSRLGAPKAITALAHKLARIVYNLLRYGVAYVRQTEAADAEQVRARLEKQLRRRAAELGFTVQPLAAPVPPAVEEQ

SEQ ID NO: 215598 - protein, 350 aa, unidentified
MIIIGADFHPAYQEIASVNTETGEYQEKRLAHPQEAEEFYRSLASEGQAVRVGMEASGQAQWFERLLEGLGVELWRGDAEVIRAKRGRKQKTDREDARHILKLLLKDDFPRIWVPSWENRDLRQLLWHRHRMVQARTRVMNQLQAVALKEGLHCKKRLWRASGRQQLESLPLAPWSSRRRRELLELLDRLNPTIAELSQAVEREAEKCPEAQRLMTHPGVGALTALAFVLILGNTERFGCGKQVASYLGLVPLEKSSGNRRRLGHITKQGSSIVRFLLVEAAQVTVRSLPEWRSKYHHLMMRRGRKTAKVAMARKLAVRLYWMWRKGWDYEQWKKFGSYVGKPGHRYGVQ

SEQ ID NO: 215599 - protein, 398 aa, unidentified
MADRTYVGLDVHKESIVVAVASGGLRGEVREYGLTYVGLDVHKESIVVAVASGGLRGEVREYGRIANTAAALDRLLRKLGVDGMALRFCYEAGPCGYGIQRRLSAQGHECVVVAPSLIPKRAGDRVKTDRRDAASLAKLHRAGELTAVWVPDARHEAMRDLVRARLDAVHSLRRARQQLSGFLLRQGCHYGRPAWTKLHRRWLAGLKFDQAVHHVVLEDYIAAVEVAQIRRDRLTAQIETMLPDWTLAPVVTALQTMRGMALVNAATLIAELGDLSRFTNPRQLMAYLGLVPSEHSSGASVKRGGITKAGNGAARRLLIEAAWSYRFPARLSRELLLRQENQPRSIRDIAWKGQVRLCARYRRLTRAAKPANVVTTAIARELSGFVWAIARQVTVTAG

SEQ ID NO: 215600 - protein, 346 aa, unidentified
MYHHNVIALDLAKRVIQISKVTPLGEILFNKAVSPNKAKEIIANTKPCIVAMEGCGSFHYWGRFAQEHGHIVRGMPPKKVKPFVGKQKTDANDTIGITVAVRAPNMTFCQVMTIEQQNLQSIQSSRRFLDKSLTQIGNHIHALLYEYGIALNVGKKSLRQGMAEYLASDNETLPLIVKRLLSTLQIQWLKTEKHHKAADKLLLQQVKESEPCKRLMALEGVAEIGAAGLFCSLGNGKGFKNGRQAAVYIGATPKQHSSGGETIMVGIDKKGGDKKLRSVLYLGALSYISNLPGEPKTLKQRWLIDLVKRAGVKRTCIALVNKTIRTAWALLYSGESYQRLPLPMEA

SEQ ID NO: 215601 - protein, 467 aa, unidentified
MALRVYVGLDLASKGKHEVFAVSQDGEVVASGLSFATEASEMTRVREKIRALRPGAEIWWISEPTGTQWMTIGHYFVGSGDSYFLVSNQKAHDLRRFWARHVKNDSVDAEALARIGFMAPQVLRPIKIDARANALTRWVKRQFRAGRAFGKLKRAFWDLADVLVPGVRRVLDDPLSVVGKAFFERYANPFTVVRLGRKRFTAVMERAAGRYAGPAVISALYEACERAVEAHLKAGASLDFADLHEELRLALEELEQSVSRQARIRKRLEELSKELDPQGIVRSIPGLGVVTGAACLAALVSRDFRNGKAFRAYTGLVPRVAESGQSLSKGRSLTKAGPAWLRSALYIAAETARRWDPQLAAIYHRAMVEKGHPHKKAVCAVATHLADRVYAIWRDQRKYIVRDLEGNAVTPRLARTVITHAIEVPEEVRGRLRKTLPLKRKGSMAAATKGRGSPEGLPKQHMLPSRE

SEQ ID NO: 215602 - protein, 372 aa, unidentified
MNQTIVYVGLDVDDTQYHGSALNKNTGEVIDFKCRPTLKGLLGQLEKLRKHFPGCSLRLGYEASYIGYSLQLDLSEKGHHCDVVAPTSIPDSRSKHIETDRIDAAQLAQFYANGLLTFVSIPEPEVEQDRDLMRSRQNLLQQQTELRKHIQALLRRNGLHYKAQTQNKTHWTKHHYCWLDRTIDELSGRLKVNLELLLRQLKGLNNILADYAQHIEALAKTRRYERPVQALTCYKGIKNIFALTMITEIGDIKRFPHPRQLMSWIGMDIREYSSGGKHNRFGITKHGNRYLRTAFIEANQRGYRTARISKEIKARRAHTAPEFVDIADRCLRRLNQKGNWLLIAGKHPNKVKVACAREMVGFVWESLHKAVA

SEQ ID NO: 215603 - protein, 371 aa, unidentified
MNEFSKYVGLDVHQETIAAAVAEAHGGEVRYEGEIANTPEAVLKLVRRLKKEGATLAFCYEAGPCGYGLYRQLVKLGLDCQVVAPSLIPKKPGDRVKTDRRDSLTLARLHRAGELTAVWVPDEPQESLRDLTRAREDMKHMERLAKQRLLAFLLRHGQTYPGKKRWSQAHFRWLETLKFNQPVQQIVFQEYVDTIQAMTRRVAAFDAQIETAGTDSVFSPLIAGYMAMRGIDRLTATIVVAELGDLRRFPQAPQLMKYLGVVPSEHSSGDSRKRGGITKTGNGHVRRVLVEAAWTYRHPARKSAVLQRRAERTTEAVQALAWAAQKRLCGRYRQFEARGKKKVQICTAIARELAGFLWAIAQAMPRPQAKA

SEQ ID NO: 215604 - protein, 408 aa, unidentified
MGIDIAKRTHYACFVDDRGRVLRKSFPIFQSKEGFQQLYKAIQGAMQAFGKSEVIVAVEPTGHYWLNLAYFLEEHGIPLVMVNPAHVCRSKELDDNLPTKHDAKDALVIARLAKDGRFLVPRLLHEIEADLRVGSTLKEKLRKEQTAVKNAIVRWTDRYFPEFWTVFRDLGKTALSVLEWTPLPADMAGRTVEELLEVYRQSEGMKCPQKAKIQALINTAKDSIGVTEGTAMARFEIAALVRRYRQLEAEIAALDAELKALVQTTMEYQWLKTVDGLGDATIIDLLAEIGSFAHYRDPRQLVKLAGLTLKENSSGQRKGQKHISKRGRKRLRSVLFRAMIPLIRHNEAFRELHEYYTTRSVNPLTGKQSIVALCRKLLNVLFAICTKKQAFDAERMKQDVLSQVQRAA

SEQ ID NO: 215605 - protein, 366 aa, unidentified
MKKSITPIGTPVGIDVHKRRCKVVEFHQGEIKVRKPMGNTQEDWLELLPELPPDAEIGLEVSTAGYFAMSVLEAAGWRERAHWVHTAGIDSNRRQKNDRLDAERLARKLAAHHVDPLPEAWFPPPAIRALRLRARQRCWLALLRTQAKNHVQSLLEMHGLQIPGSDPFGTTGQRWLAEQKLPPPLTESIPQTLRLLGLLEEEIHTREQYLQAADKQFPELMLIRTIPGIGPILAPVIWSEIGTIERFRSAKALANGTGLVASFYDRGEVKTTGPITHQGSRWLRWAFVTAANVAIQGRNPFARRYHRLRRSKKANVAKAAIAHSLARCVYGVLKHGCPYREDRWGRKVGALEPETRAGARSTKTAL

SEQ ID NO: 215606 - protein, 340 aa, unidentified
MEKSEQTQSYSWILGIDVSKQSIDTCLIRSLDGQIFENKFNNNASGFRQLKQWCKQQQCECDATTLCCMEHTGLYTRLLVHYLVSREVAIWLESSLQIKRSQGLLRGKSDRIDAQRIARYAHVFQNKANVLEISTLTLEKLKDLQSNRKRLLTALQMLRTSTEELKQFDSSTGKLIDQTNREAVRGLEKSLEKVDDQILKFISEDESLKQKYDLMLSIKGVGKVLAAMLLVYTHGFNRLADGRKLACYSGVAPFVYESGSSIRGRTGVSKFANGDLKKVLHMAAISSAHHNPELKEYYERKVKEGKNKMSVINAVRNKLLHRIVAVVNRGTPYTPELKNS

SEQ ID NO: 215607 - protein, 313 aa, unidentified
MTQIALHVGIDVAKDRLDVAILETGELFTLDNDEAGHAALIERLSGSAIDTIGLEASGGYERAALKALWQEGLPVRRINPHRLRQFARAAGINAKNDRIDARLIARFLAALPVHPTDLDPRLELMTELVTARRQLHAELSRVNNQLEHVRDTALKRLAKRRAARLHADILLLDKRIAQAIAADHSLAHRDRLLRSTPSVGPVLSATLIALLPELGRLSNRQIAALVGLAPYDHDSGKLKGKRSIWGGRESVRNVLYMAALSAGVHNPVFAAFRRRLRENGKLAKVAIVAVMRKLITTLNAMIRDDKPWNPAAV

SEQ ID NO: 215608 - protein, 334 aa, unidentified
MKYQFVIGIDISKHSFDMAILSVNNPENIFHNAFTNDVSGFSEMISFLDDTMQGFDITKALFCMEATGLYCNALLEFFQKHRANVWVENAVQIKRSLGIKRGKTDKVDSISITKYALKNTELVRLWKPSGIVLEKVKQLATLRERMVVTQKRLLTPINELRDAGQEKMADLLYKSIKKSINAIETDLNKIETQIMECLKEDASLHHLFSLITSVVGIGFVTAINLIIYTQGFNVMCESRKLACYCGVAPFPYQSGISIKGKTKVSNMANKKLKTNLHLAALTAIKHDPEIKAYYDRKVLEGKAKMSVINAVRFKLLARIVAVVSNDREYVKRAA

SEQ ID NO: 215609 - protein, 344 aa, unidentified
MTYYAGLDVSLRTVNICVIDDQGDFFAETKLCSDVQDIISYLDDLSIEIESVGLEAGTLTQYLTYGLQAAGFEAICMEARQVKAALSAMRNKTDKHDARGIAQILRSGWYSRVHIKSMQSHHIRMLLSSRKAVLSKCIDLENEVRGLFKIFGIKLPPKLGHGAFDAAVRGIIETDAALSHALLPLLDARLVLYHTFRVLDNRTRHLAHDDPVCVRLMSVPGVGFITALTFKAGVDDPLRFKRSRTVGAHFGLTPRRFQSGEMDNPGRISRCGDSDVRCTLYTAANALLTRSSRWSPLKAWGMKLAKTRGHRRAVIAVARKLAVILHRVWIDDTQFRWGTEGARS

SEQ ID NO: 215610 - protein, 433 aa, unidentified
MKALPVLDPRATGIDVGSEHLHVSIGGGAPRVFGTMTRDIGSLVRWLREEGVRSVAMEATGVYWMCLYAALTSAGIEVLVVNGRHVRNVPGRKTDMADCQWIATLHAHGLLSSGFVPSVAIRQLQDYMRLREDHIRMAATHVQHMQKALERMNVKFHDVISDVTGASGMRVIRAMVAGEQNPQALLQLCDVQIRKSKAERVVESLRGTWQSEHLFALRHALAGWDFYQQQIRECDVAIEQVLHDIGEPPEAAGKTGAGKPGGPNTPRITGLHRMLVSMCGDVDPTMIPGMADHSLLRVISETGVDLSHWPSAAHFTSWSGLAPGAAQSGKRRKSQARPLNRVGHIFCDMARSVTKTKDSAFGGFYRRLKARRGGLVALKALARKLAAMFWHVMLHGTEYVEEGLRRYEERAQLSEQRVLSKLARKHGMQLVAQ

SEQ ID NO: 215611 - protein, 329 aa, unidentified
MEAVFVGIDIAKDTFVVVVRRNGQNGKARIFHNNARGIASLMHWLPVRSEGLVYSCQEATGAYGQEVAEQLHSQGVQVSVVNPLATKRYAQSSLMRNQTDSVDAGMLAEFCQTKHPRLWVPPTPAQKTLKALSRRLEDLQKMLQMERNRLGSSQHLPETIQDSLYQVIERLTEQIQTIKAELRVHIQQDPELIRQKKLLMSIKGVGELTAIRFLAELGDLRQFESAKQLAAYLGLTPTWKTSGTSVQTKPRLSKCGPAEVRQFLFMPAIVAKKHNPIIHAFCDRLARARKCDMSIIGAAMHKLAQLMFGVIHSGIPFDPDYLKNLQVPA

SEQ ID NO: 215612 - protein, 338 aa, unidentified
MNYMGIDHHKQYSHITLMDEKGEKLKSGRVANLRSELENFLSGIEEVKAVIEAGRSSYAMVDLLDDMGMEVTIAHPKEVRAIAKAKVKTDQRDSYKLAHLLRTDYIPEVYKRSRENRSYQRILRQRVFYVGSMTRVKNRIQALLSQQSEDIQGEISRVKNIFGRKGLAVLKGLDLPEREKKLINALLMTFRHMEERIKESSALVEELYEKLPFARLIHTVPGFGKFLSVLVAVEVADVNRFEDLGKFHSYAGVIPSTHSSGGRTYHGKIVKEGNRGLRWAAVEAVWPAIRADFDLRCFYERLKKRKGANSAKVATARRLLTIIYRMLKEGRPYIPYKR

SEQ ID NO: 215613 - protein, 319 aa, unidentified
MDRTATFVGIDVSKARLDGHCRPDGSAFHEPNDEPGIAAVVDRLTALRPTLIVLEATGGLEAPLAAALAAAGLPVAVVNPRQVRDFARATGTLAKTDAPDAAVLAHFAEAIRPEARGLPDEQARQLEAILARRRQLIRMRTAERNRLGTTAAPKAVRQDLASHIKYLDRRIKQMDGELEEAVRSSAAWREKDDLLRGVPGVGKVVAQTLLAALPELGTTGNRRIVALAGLAPMARDSGTLRGRRRIVGGRGEVRGALYMAVLSAVRFNPVLKAFYGRLRAAGKPPKVAQTAAMRKLLTILNAMVRSGRAWDPKLAESLG

SEQ ID NO: 215614 - protein, 340 aa, unidentified
MNRTTYGVDIAKSVMQLHWVDGETGEIGRKQLTRAKLSAYFAQLQPLCIVMEVCGGAHYWARKFQALGHEVGLLPARQARPFVRGNKDDAADARAIRRAPIKSVEQQAVQSLHRLRQHWVSVRTATLNALRSLMYEFGVVLPGGRQVGVKAIGERHTQIDAQLPALMQRALDTQLAALKDVERQITQLESEIVAQQKQSTPAQKLTQMPGIGRLGSTALAATLGDGKAWRNAREFTASLGPAPVHRDTSGKTRMGHISKRGNPYRRTLLIDGARAVIANAKQKPEWLSKLLQRRPANVAAVALANKMALVAKGAQYSGITARPTEAAPHQRQRHDINLLR

SEQ ID NO: 215615 - protein, 381 aa, unidentified
MEQIINQSIGIDISKETFTACICQRELSGEEHLRDVIEFKNSRTGFNQFVKWSRKITQPLPEVIFVMEATGVYYENLAYHLYNLKQSVSVLLPNKVKHFGKSLNVKTKTDNVDARVIARLGVERKLSLWKPPPPIFKQLRDLTREYTELMKERTVFVNRLDAMSSGFEPHPAIMKSRKAIIKKLNEHIEKIKEEIKRLIFSEEWLALKVEKLLTIKGVGLTTVATILAETQGFEFVQNIRQLCSYAGYDVVHRESGTSVMGKTKISKKGNGRIRAALHYPALVSSMHNPLLKKTYHRINQNKASKMVGATALQRKILVLIYTLWRKNEAFDYNHRNNPKDKSVKPQAVIQDKGCEKQTGRYYNLPAQDELQLNLPKLSLVK

SEQ ID NO: 215616 - protein, 379 aa, unidentified
MSFHSFDAYIGLDVHKSQISIAVADSLRGSEVRYWGQVESTAVALRRLLVKLKKVHGDILVCYEAGPCGYWIYRELVQDGTPCMIVAPSQIPKTSSQVRMKNDRRDAVMLARLLRAGELTSVWVPDEIHEAMRDVVRARQACSNDRRRARQRVQSFLLKHHLSYSGKAWTVRHRTWLADRSFSITAQQIAFQNYLNALEQIESRMAELEEQIRLLLPDWSLAPQVVALQALRGVALTIAVSFVCEVGDIRRFSHPRQLMAYLGLVPGEHSSGGKLRGRGITKVGNRHLRSLLFEAAWNYTRTPKVGQYMRKHRPAEVPQSAIDIAWKAQVRLHRRYKALIARRKKGTVATTAVARELVGFMWAIAIAAAPAPEPGFTVG

SEQ ID NO: 215617 - protein, 369 aa, unidentified
MDDITFVGLDVHKATVCIAVAEGRRGGEVRQLGVFENRPEILSKVVSRLGKGGRRLSLCYEAGPCGYGLHRLLTGYGHECVVVAPSLIPMKAGDRVKTDRRDALMLAKLHRAGELTAIWIPDAAHEAMRDLVRARATAVRVLVKARQHLQGFLLRHERIYRGARAWTLAYRRWLSTVRFEHPAQQIVLQDYIHAVQEAETRRDRLTQQIEELLPNWSMAPVVAALQSMRGVALIVAVTVVAEVGDFRRFANPRQLMAYLGLVPSEHSSGRSVRRGGITKAGNALARRVLIEGAWTYRMSARVSRKLHDRVEGLPAAVRDIAWKAQLRLCARYRRLAAAGRPKVVVTTAIAREMVGFIWAIARLAQPALV

SEQ ID NO: 215618 - protein, 425 aa, unidentified
MEATDETVQLVERVAALDIGKASLMACIRVPNERAAGRRRQEVTEYATTTGALLRLADRLRELGVTQVAMEATSDYWKPVFYLLEAEGFQCWLLNATHVKNVPGRPKTDKLDAVWLAKVVERGMCAPSFVPPVPIRRLRDLTRYRRSLIRDRTREKQRLEKLLEDAQIKLSVVASDMFGVSGRAILAALIAGQRDPAVLAELSRGRLRAKISQLREALTGHFQDHHALLCAKMLDRVDAITADIIEVSTAIEAAISPYQAQVTQLDEVTGIGVTCAQELIAELGVDMTIFPTAAHLASWARFAPRANQSAGKTKPATTGKGNPWLASTLGEITAVLARSDTFLGERYRRLSRRRGKLRAIVATGNSILTVVWHLLNDPDARFHDLGADFHDTRYRQRHQHNLITQLERITGQKVTLTARDEPAAA

SEQ ID NO: 215619 - protein, 348 aa, unidentified
MGEHSEAFVGFDTSKLRNAVAIADVGRDGEVRFFGEIENTAEATAKLVRKLAGKYERLTFCYEAGPTGYGLYRQITGLGHACNVVAPSLVPKKPGDRVKTNRRDAVSLAKLLRAGELTAVWVPDEGHEAMRDLTRARETAVNDLRAKRQQVSALLLRLGRHYPHKRKTWTKAHLNWLASQKFEYPQQRFVFEEMMLAVRQAQERLTRLEDAIRGAVPEWSLAEVATALMAMRGIDLISAATLLAEIGDLSRFRTPHELMAYLGLVPSEDSTGSPSPRSPVNSPASSGPSIARSPRPAVRPGKRALQREQDGTFKPFSGSHAPGQGPVKDKSRATAGARPRQGEFPIIL

SEQ ID NO: 215620 - protein, 322 aa, unidentified
MQVKADRPEAPSAIRSDLGAIFVSLELSRSIWLITSLSPGAGEKMSKHSVPAGDIGALLARFSEMKQKVFARTGKSFPIIVIQEAGLDGFWIHRVLQKEGIESHVVDPASIATSRRRRRPKTDRIDGEALLRALLAYKRGEPRVCAMVKAPTPEEEDRRRLCRERKVLTTERVQHVNRIKGLLFCQGVSGYEPLRRNRRQRLDELKTGDGRLLPDHLKAQISRELDRLELLLEQIKAVEAERNALFAVAKAAAPTAAPVAMLLDLKGIGPEFAAVLWMEAFFRSFANRKQIAAYAGLAPTPWQSGSIDREQGVSKGAMWDFR

SEQ ID NO: 215621 - protein, 325 aa, unidentified
MQSETNYVGIDISKSFFDVAVIQQGKYRHYKFNNDESGFQALLKEVITDSHIVMEASGPYYLRLACYVHSRGVAVSVVNPLVIRRFSQMRMSRVKTDKKVAVMIAEYGKTEKPSLWQPPHQHEVDLQQLEALLFNLNKERTALSNQLESFKSSGMLDKSLEKIIAKELVHKRELMDKLTVAMQKLAQIHYSEMLSNLESIPGMGNKTAMMLIVLSGGFTKFEDYRKLSSYIGLSPRIFESGTSVKGKARICKMGMSRIRAMLYICSWSAKRYNKTCKELYERLVAKGKAKKLALIAVANKLLKQAFAIAKKRKTYNENYSNIICF

SEQ ID NO: 215622 - protein, 357 aa, unidentified
MGKSIKNLSSVTIVGLDIAKNVFQVHGVDAGGALAVAKAVRRGQLLSFFASLPQCLVGIEACSSAHHWARSLIALGHQVKLIPPAYVKPYVRRNKNDAVDAAAICEAVGRPNMRFVPVRSVENQAQLMRHRARELLVGHRTRMLNALRGHLGEIGVVASQGVQNAYALKRLLADGCDDNGEVIVPDCVRRALAPLVHQIEAIDAEIAAIDEEIKTLVKADETARRLMTIPGVGPITAQAIVATVRETSAFASGREFAASLGLTPRQNSTGGKERLGRITKMGDRYLRKLLVVGACATLCHRKGHNDALRMWADRLLARKTIKHKFKLTAVALANKVARIVFALMTRGGEYNEPPIAA

SEQ ID NO: 215623 - protein, 353 aa, unidentified
MGNILAIDLGKFNSAVCIFDRSSLKSKFKTIRTRKQIMHDLFVDYQDDIEIVLFETGSQMGWVADILWALNIPFKVANTNHSAWKWKNNPNKSDRKDAQRLAMMYNTGFFPTVHVPKRDVRQKRSLIVYRDDLVKRITKIKNSIRAILSREDIHQFGGKKGWTIKALAPIRELAININEITDPEKLWKGQLDTELQALDSATALLKNIETKLNALGDADEKVKRLRTIPGVGPRLSEAVVAIIDDPHRFKNGRHVSSYLGMVPRRWQSGAVDITGRISKCGNKLLRTLLVEVSWLGLREPWMREIYDKVRRGDKKRSKVAIVAVARQLLVRCWAILRDESCWDADHAKRLAKC

SEQ ID NO: 215624 - protein, 394 aa, unidentified
MKLIGIDIGKNKHFFCVMDQQTGEIISQPVSFSNDKEGFDFLVQKIKSYPKDSILIGMEDTGHYHFALLKYLLDLQYTVALINPKTTDFNRKMQGGITKNDKLDTINICDVLDTPERKKQYRITKVNSFDLYEQKQLTRHHHNLKEEENVYKNRIQKCIDIVFPEFNKLFNSKYGIVYMNILKMFGSAENIANTDIRTIRKCFEIEGRGNRTSLTPERLKECARSSIGISSSAEVIQIKHLTAQIEPIEEQLTEIDKKIEEFSIQNNSPILSIPGISHFSGTSILAELGDISNYSKPSQIIKFAGVAPLHYESSQFNAQHTAITKKGSKYLRKTLYQIILPVIKFNPVFNEYYQLKISQGKGHRCAQGHCVRKLLRIIYHLLKTNQQFDPQLLR

SEQ ID NO: 215625 - protein, 406 aa, unidentified
MLFVGDDWAEDHHDIEVQDEAGRRLVKARLAEGLSGVAQLHELIAEHLGQDQGDQVAIGIETDRGPWVVALIAAGYRVFAINPLQVARYRERQSVSGAKSDAADAHVLADMVRTDSHQLRQVAGDSDSAEAVKVVARAHKTMIWERTRHAQRLRNALREFFPAALLAFDDLTAADTLELLGKAPDPDTAARLTITQIGAALKRAHRHHVSQKAPLIQAALRSEQLRQPSAVTAAYAATVRAQAALIATLNAQIKTMGAQVEAHFGQHPDAEIYLSQPGIGPILGARVLAEFGDDKTRYADARARKNYAGTSPITRASGKKKTVLARYVHNNRLIDALGQQAFSALSASPGARAYYDDLRRRGTGHRAALRQLANRLVGILHGCLKTGTVYDEATAWPRHAELTTAA

SEQ ID NO: 215626 - protein, 338 aa, unidentified
MTIVMGFDQHREQIAWDALDTSTGELRRGRIRPAERESFRHFLRRFGGERIEAALEATTGWRFMVEELRAVGAEVHLAEPAETRTLRGPKRRAKTDRADAKHLRDLLQQGRVPESWIPPEQILELRSLVRLRRALVEQRTAWQQRIHAQLFHHGHPARRDLLVRERRAWLVGLELPQAARTQVEVALRLIDQINVQLEPLDRELRALAARWPGTKALQAHYGIGPLTAVAFLAELGDAGRFSSSRKAVRYAGLDITVSQSDSKRAPGRLSRQGPATLRWAAYEAAQVARHPRSPDRDYYLQASDRLGGNRACLALARKLVQRAYHTLRELGEEALQPA

SEQ ID NO: 215627 - protein, 410 aa, unidentified
MEVLHPVCAGLDIHKESVVACVRHMAQGKVSTQVQTFKATTEALFALSEWLSQHGVTHIAMEATGVYWKPVWHILSDGEFQLTLANAAHVKNVPGRKTDVNDATWLADLMAHGLIRASFVPNEPTQQMRDLLRTRKQMVRERSSHTQRIQKTLEDANIKLDSVVTDILGLSGRRIIEALIAGQTMPQALASLAHRRIHASADELEAALRGRVTRHHRFLLKLHLHQIDAIDAAIASIDKEVDGNIEPFRQAIELLSAIPGFSQLAARVLVSEIGIDMSRFETAGHLVSWAGLCPRNDESAGKRRSTRMEKGAPWLKTVLIQCAWAAARTKGSYFQAQYHRLRSRSGAKKAIGAVAAALLTTAYHMLKKGTLYQDLGPHHFDQQAKARHVMRLLNRLENLGFEVQITPKAA

SEQ ID NO: 215628 - protein, 376 aa, unidentified
MIKTDVQYPTVHLAIELSRSVWLVAARLPGVEKPSLHRIGGGDTAALLALAETLRARAAAKLGAPVRVACCFEAGRDGFWLHRLLTAEGLAAHVLEPTSILVSRRARRAKTDRLDALGLLRVLAAYLGGDRQACSMVRVPTPEEEDAKRPHREREDLVRERVRLENRIAALLATQGVRERPSLRNWERDLAALRTGDGRPLPPHLRAELDRLRRRLVLTLGLIRELEAERDAALAAGPRDAAGRKIAALCRLRGVGANFAAVLTREVFYRAFDNRRQLAGYVGLAPVPHQSGEADRDRRISRAGNARARTTLIQLAWLWLRYQPDSAPARWFRDRVGALRGRTRRIAIVAMARKLLIALWRYAETGLVPEGVEVAA

SEQ ID NO: 215629 - protein, 323 aa, unidentified
MSPIVGIDVAKHSVALAIELDNGKHRTKAKLANDPKGFATLHAWLCTHAQPDSWVVMEATGIYHQALAEFLYAHGYRVCVLNPAQLALYARRQLQRVKTDRSDAKLIASYGLRHRDQLRAWHPDLPALKTLKALVRRRDDLLQMLQMERNRLEAAQANGQPSIQGLIDHLHARISEIQQAIEDHIDQDPDLRRQRSLLTSIDGIGDISAALLLAELGPVKRLADAAAVTAVAGLNRRLHESGRYQGKVCICRTGSARLRAGLYMPALVAMRHNPVVTALKQRLHARGKHGKQIVCAAMRKLLHLAYGVLKSGTAFDPHNALAR

SEQ ID NO: 215630 - protein, 370 aa, unidentified
MSQSSTLFIGMDVHKDSIAVAYVAQDHGAEVMYLGAIGTRQCDLDQLIRKMQAKAKHLIFVYEAGPCGYWLYRYLTKKGYDCWVVAPSLIPKKAGDRVKTDRRDAMQLARLARSGDLTPVYVPTVEDEAIRDLTRAREDTLSDLKDAKFRLKAFLLRHDIRYPGRATWNPAHLRWLAEVVCPTPAQQIVFQEYVRAVTEHTERLQRLEQELQERVKSWRLRPVVDALQALRGVQFTVAVTMVAELGDLTRFDNPRELMKFLGLIPSEYSTGERRRQGSITKAGNTHARRALVEGAWAYRYPAKVSRHLQLRLEQQPKAIQDISWKAQVRLCKRYRKLLARGKHANQVVVAIARELIGFMWAIAKEVPVAP

SEQ ID NO: 215631 - protein, 354 aa, unidentified
MKCMTKYVALDVHQATTVASVRGESGRVLARTILPTEEPALVEFFRGMRGAVHVTFEVGTQSQWLYELVSPLVDRVVVCDPRRVARQGNKGDRVDADRLSELLRLGGLRAVYAQSAHRSDLKELTRTYRTLVEDGTRVMLRIKALFRARGIKTPGSAVYHPTKRVEWLAQLTERGVRFRAEALYAELDVLRELRPKAKAMMVAEARRDPAWPLLQTIPFYGPVRVALLLATMQTPWRFRTKRNLWAYSGLAVRTSSSADHRFIEGQVVRRRRAPMTRGLNRNHNRVLKDVFKGAATAAASQPGPLQEFYAAMVARGTREEMARLTLTRKLAAITLRLWKRGEQYDPTKLTRQAS

SEQ ID NO: 215632 - protein, 426 aa, unidentified
MNCNTQNAKIASITEKTLIVGIDVGSETHYARAFDWRNYEYTKRPLEFSNTEAGFQTLKAWMEELAEKHGKTAVIPGMEPTGHYWFALGKFLQNNGMKPVHVNPHHVKKSKELDDNNPNKNDRKDPKTIAALVNEGRFSYPYMPSGIYAEIRGLSNLRVQTQEELTRIKNRLARWFAIYFPEYKDVYGDLKAVSGRMVLKAAPLPEDIIRLGAEGVNQIWRDAKLRGAGMKRAKTLVSAAEHSVGSKEGPEAARMELKNLLNAIDVYTSRMEELLQRIEEKLKEIPYIDNLLAIKGIGMVTVSGFIAEVGDIERFDNPKQLQKLAGYAIVANDSGKHSGESRISYRGRKRLRYVLYEAAVSLVGKNAEFRQIHEYYRTRKENPLKKMQSVVAVACKVLRIFYAILTKGVEYDPEKLLGDIRRPQAA

SEQ ID NO: 215633 - protein, 451 aa, unidentified
MAEFRIFIGVDWATQSHQVCAVDQKGKVIRERSFEHSGMGLAQMAAWIAELSEDATEIAIGIEVPRGPVVEALLDRGFVVHSLNPLQMDRFRDRQSPSGAKDDRRDARIIADALRTDPKAFRVVVADEPAIIELRAWSRIAEELTGEQQRLANQMREELWRYFPQMLKITDDITAEWFLRLWEFVKTPELAKRANVNRISRLLRTHRVKRATAQEMLDVLREKPLVLVAGATEAAVAHVELLVGRLLLVGQQRKHAQKRLDALCTALAQPAAEGESPGQKGEHRDAAILQSLPGVGRIVLATMLAEASEPLRRRDYHAMRTLSGVAPLTKRSGRMVSISMRYACNQRLRNALFYWAKTAINVDPASRARYDALRQRGHNHARALRTVGDGLLAVACAMLTKCTTYDPSRRRLNQMSESGPGERPAGAPSRKRNSAAKERAASKRPTKSSPS

SEQ ID NO: 215634 - protein, 337 aa, unidentified
MKRYLGVDLHRTQITVCTRLGNGRTYVRQWFMRDLKLFAAQLRQDDEIAVEATGNTRLFYDAVVKQVARVVVVNPSQFKVISQSVKKTDSNDAELLALYLSKGLLPEVRMKDREHRNMSHLAQTRDLLVKQRSALKGKINNLLSAEGINLKRETLSSQKALARVLALPLSPILATEVRVLVAQIRSLTGSIAELEDVIEEEGPKLAGHKNLISIKGIGPVGATVLLSAIGKIEDFADAGKLAAYFGLVPRVQNSNERERSGSITKQGNKLARTALVQCSLVAKKYSPYLQKFYQRIQRRRGGGKANIALARKFLGVIYYTLKNNWVFEDFPNFVLAS

SEQ ID NO: 215635 - protein, 389 aa, unidentified
MSPTFEASKSPTGLDQDSTLIVVVEMSQSSWLVAAMVPGISRQPLKKLEPDEETLLKLVHRWRGEAVSAGREVTRIVLAYEAGRDGFWLARWLNARGIEAHVIHPSSVAVSREHRRAKTDRLDTQLLMRAFLGWLRGELRHCTMAAIPTVEEEDARRPSREREKLVGERTRIVNRLKATLARFGIRGFKPTLRNAAERLDELRTAEGSALPENTRAEAKRSIARLTVVRDQIKEIEQERLRKLSTTSPVRERPNLMVSLLAQVIGISVETADMLVAEILSRPLRDRKAVARYGGLTGAPDESGRRRREKGLARTGNARVRRAMIELAWRFIRFQKQSALAQWFEKRITGAGRGERKKMIVALARKLLIALWRMVTTGEIPEGVALRHAA

SEQ ID NO: 215636 - protein, 370 aa, unidentified
MNYSNTLFVGLDVHKEAIAVAYVAEAPGAEVLSLGSIGTRQCDIDKLIRKLKGKASKLFFVYEAGPCGYWLYRYLTKHQLTCRVVAPALIPRKPGDRVKTDRRDAVQLARLMRSGDLTAVYVPAIEDEAIRDLSRARQDTMPDLKAAKYRLKAFLLRQDIRYEGRASWSPAHLRWLAEVVCPTPAQQIVFQEYVRTVSEHQDRLQRLESELQTAVKTWRWGPVVEAIQALRGVQFTVALTLIAELGDLTRFDNPRQLMSYLGLTPSEYSSGPMRRLGGITKAGNTHARRALIEGAWAYRYPAKVSRHLQLRLEKVPKAIQHISWKAQVRLCKRYRQLTARGKHANKVVVAIAREMAAFVWAIARVVQEAH

SEQ ID NO: 215637 - protein, 314 aa, unidentified
MALTIVETRAITGGVDTHADTHVAAALDSVGGLLGVQEFPVTPAGYAGLLGWLGGFGTVCLVGIEGTGSYGAGLARHVTAAGVRADRQDRRRQGKSDPLDAVSAARAAQSGRARGAPKGRDGQVEAIRALIVAKRSATGERTQTINQARALIVTGPDDLRARFARHTAAALVAELASLRPRPGDVVGYATRIALRELGRRAEFPGAQLERLNELIVPLVTARAPGLLALYGVGPNTAALLLIAAGDHPGRLRSEAAWAHLCGAAPIPASSGKTVRRRAGAAAGTRRSGSRRPGSSLGGDRLCRPACIRRLPTRH

SEQ ID NO: 215638 - protein, 342 aa, unidentified
MDHFAGLDVSVKETSVCIVDDTGKIVREVKVASDPEALLAVLTSPAYHVKRIGLEAGPLSQWLFSALAEAGLSVICVETRHMQAVLKAQINKTDRNDARGIAQMMRVGLYRPVHVKTLRSQKLRMLLTHRKLLQSKAIAIENDLRATLRNFGLKVGMAGTVKFEARIKELVENLPDLAVLVEPLLLVRRVLREQIVVLHRRLLAIVRDDDVCRRLMTTPGVGPVVALTYRATVDVPARFRKSKAVGAVFGLTCSKYQSGEIDRSGRISRCGDEMMRVMLYEAAQAMLRSKKWSWLKAWAMQIARRRGMKKAIVALARRLAVIMHRIWVDGTEFRWTREAATA

SEQ ID NO: 215639 - protein, 358 aa, unidentified
MKNITRVGVDLAKNVLQVCGVDALGKVVFNKSLSREKFLPWCSAELEPGCVVAMEACSGSHFWARELIKRGFNAKIIAASHVSPYRMEGKGGKNDANDAAAICEAVNRPSMRFVPVKSSNQQDQQGILCVHRLREGLKEERTSCINRIRGLMAEFGIVVSRSPDKLRENLQDLIEDAENGLDWLARLAIQEQYAHWDAIDQRIAWSDQRINAHIAEDAQAKVAKQLIGVGPLTASALVATVVDFKQFKNGAQFGAWLGLTPRQSSSGGKAKLGKITKKGDTYLRTMLIQGAKAAVMTAHKRDDPISKWLLNLKEKSGWQIAAVAMANKNARIVWALMTKGTSFDPRHISVQQFRVSEA

SEQ ID NO: 215640 - protein, 338 aa, unidentified
MKKFSGIDLHSDNSLVVVSDEQDRIVYQRRLANDLAGIVQALEPHREELIGVVVEATYNWYWLVDGLMEAGYCVHLANTAAIKKYEGLKYSGDAADAAYLAQLLRLGLLPEGYIYPREARAGRDLARKRTRLVQSRTAQILAIENILARQTGGRMKSQEIKRLTAEGVQGLGFSADVTLALQANVAVMHTLQSQITVLEERLQERVRLHEDYALLTTVPGIGQTLATTIMLETGSIGRFAKVGNFSSYCRCVDSLRESNGKKKGAGNAKNGNQYLAWAFVEAAHFALRYCPQAKRFYERKKQQRNAIVATKALAHKLARACYHMLREHRPFEVQRCFA

SEQ ID NO: 215641 - protein, 342 aa, unidentified
MQITTIGLDIAKNVFQVHGIDAKEKVVVRKQLRRGQVMEYFKALPPCLIGMEACATAHYWARELTKLGHEVRLMPATDVKAYVKRNKNDAADAEAICEAVRRPTMRFVRIKSAEQQGQLMQHRTRDVLIRQRTQIINALRAHLAELGIVAAQGDAGVNELRAIVADDREERLPIDARASVIVLAAQLEALQTLIGSIEKRIKMQHRSNETSQRVETIPGIGVLGATAIVATAADPTVFRSGRDFAAWIGLVPRQDSTGGKQKLGPISKQGDRYLRRILVVGAIAVLRRAQENPGKYPWLTQLLARRPFKVVAVALANKMARTAWALMVHGGTYRAPELAEAA

SEQ ID NO: 215642 - protein, 331 aa, unidentified
MNYSHFVGLDVGKKTFDASLMSADEKELSHKSFDNTPTGIQSLLDWIAGYHLSLSKLLFCAENMGSYVTELSVSSVSMGFSLALVCPLTIKKSIGLQRGKNDRIDAKRIANYAVLHYRKLELYKLPDKDLVRLRGWIIIRDNLVKQKVSSIKLLETFSQMAKLADVTEFISFLEEQLKSIKERILEVEEDMEQLIAASTSLYTNYLLLRSIKGIGIINAIVLLCVTDNFQRFDNPRKFACYCGVAPFEHTSGISIRGKTQTSSLANKEVKVYLTRAAITAISWDPQMKAYYKRKIAEGKHKAVVINAVRAKIIARSFAVIRRQTPFVTLAV

SEQ ID NO: 215643 - protein, 354 aa, unidentified
MRLYQTTTKFNCGIDLHSKCMYACVVDQAGKVLVHRNIRGNDFGYFLTLVEPYRHELTVCSECTFNWYWLADACEDAGIEFVLAHALYLRSIHTNKKKDDKTDSEMIAQLLRTNMIPYAYVYPRDMRPLRTLLRTRMNYVWQRSEMLGKQTCRLMAEGKQLKKMPQRPRKRWEQAVFELHTDPYLKALVQTDCAIIHEYDRQIDRLERLITAAAKKQRWRDLHILLSTPGIGKVLALTILYEIGDINRFPRHQDLASYARLVRGTVASAGKIEGMRGAKMGNGYLKWAFKECILVAKRSHPEIKAMAQRLERKHGKATANAILAHRLARAIFYMLKHGMSFSIELFSKRMRDAA

SEQ ID NO: 215644 - protein, 491 aa, unidentified
MINTSIFSAQSKDLRKLFEQAGHRSKVLCAPLDYAKKQHTVLFCNGHGDILKKPFSVDNSPAGLKFLLDQLQHTLTGRHLQAKHVFFGGEDIPAYAENFITQLRQKGYLVAQVNAWEAKKRRENFQASNDHLDLTAIAKLLLDWRGNVAPAAHGTYRSLRELSRTRRRVVRDKTALSNRIHTYVDRLFPGFLDVAQSGLAPFSKASLALMGERFSAPQIRRRRRPSLSHQLQRHGVEKADEVAGQLQQLAAQVLEPASEHVSVWQVSLQQQVLLYNATQAACQALEAEVAHWLALTPGAFLTSIRGIGVTLAAGLSAELGDPNRLRRLACLCSYAGIIPGSKQTGGPQSPAHTTGVKPRCNRILKDWAVQASVKIGQCGPPELKAAYLALEAQEQHAQFIMAKRLLRLCKCLLRTQSIYRPSHLLAADTPRGKLAAYYLELWPALLTKWKGTCDLRHVFAAQHPLGGWRLMVQDLYGLALPLPKETTMTPD

SEQ ID NO: 215645 - protein, 355 aa, unidentified
MNNKVAIAAIDLGKHTFHLHAQDDRGHEVQRKKFNRTALIQHLANLDPCTVVMEACGGAHFMAQEIAKLGHTPKLIAPHLVRPYVKSNKNDFADAEAICEAATRPTMRFVPPKTQAQQALAMSNSIRESFIKDRTATANRIHAALLEVGISLAPGFKSINTLPALLEASSISQPFKKNLTKLYQHFKYLDEEVKSQDKDVACQAAEDDLAARLMTMPCVGPITSTALAAELGDGKQFKCGRGYAASIGLVPKQHGTGDKTVLLGISKRGDRNQRRLLIQCARVYVMHLDRQKGRLADWVRQLLASRHHSNLVVCALANKLAELDALGGYTPATAQGYEQVLEKLGNDLAGCLESL

SEQ ID NO: 215646 - protein, 385 aa, unidentified
MGTQTFIPRDYDVFAGLDVDKKSISVTFTDHQGFLKSLNMPYKVEHLVNYVRKHYGDKKVAFAYEAGPTGYGLYDGLQAQAYPCLIASPSMIPKAPGQRVKTNRLDSRGISENLRGGQLKGIHVPTPLYRELRHLTQLRDTLVSEMVRMKQRIKSLLLMEGLEFPPAPAGSQWSFLVKNKLRDLPCSTTVRFKLDRLLDSLEFDEKQVLKATREIRRFCQTDPELSQCIEYLKTLPGIGWIVASKLLARVGDWRQIKNIRQLPAFLGLVPTENSTGVRTERGSITHTGDGRLRSKLIQASWSAIRQDGELREFFRTVAKKHPRHLGSRVAIVAVAHKLSVRAAVVLMKQRPYEVRQKVQSAPLTQEETVPQGTTRRLAVPGETNS

SEQ ID NO: 215647 - protein, 353 aa, unidentified
MDSKKYIGMDVHKESISIAVRNAAGKLVMECVIETKANAILDFIHGLRGELQVTFEEGTWATWLYDLLKPHVTRLVVCDPRKNSRQGNKNDQIDARELADRLYMNKLSSVYHGGAGVRTLKELARSYLTISKDLARVMSRVKAIYRSWGIPCAGKQVYALRHRAEWLAKITEVGVLRRAEFYYQQLDALRPLRHEVRRELLAESKKHPVTKLLCQIPTIGPIRAALLIALIQTPHRFRTKRPFWKYSGFAIEMHSSADYRSVKGQLERTQKQVSVRGLNRDCNHDLKNLFKSAATIASVKPGPFQEFYAALVAKGMRPEMARLTLARKIATIVLIVWKKGVSFDAQHLKPQTV

SEQ ID NO: 215648 - protein, 355 aa, unidentified
MSQEKYIGMDVHQATISVAVMDAKGKLIMECVLETKAATILEFIQGLRGTLAVTFEEGTSAAWLHDLLDPHVNRLLVCDPRKNALLKDGNKNDRVDAQKLAELLRTNQVKPVYHGKHGTRALKELGRSYLTITKDGTRLMNRIKSVYRSWAIPCAGTSVYTRRHRAEWLAKLVEPGVRIRAEHLYQQLDSLQPLRLEVRRQLLLESHKHAAVKLLRQVPAIGPIRAALLVALLQTPHRFRTKRQLWAYSGFAVEVHDSGEYRWVRGKLQRNRERITVRGLNDNHNKEVKSLFKAAAISASTRPGPLHDFYVARVESGMRPTMARLTLARKIAAITLTMWKKGVSFDPKQLYRQAA

SEQ ID NO: 215649 - protein, 397 aa, unidentified
MIAVGIDISKAKSTVAVINSDGTILASPFPMAYTRPDMESFVTYLKGLGEPTTILMEYTGHYHYPVLKKLQDEGFPVCIVNPYQMKKYGDVEIHKAKTDKKDALRIATYALEKSYKLVPYSSMEQKYEDLKFLSRQYNQRISYVTKLKVQLISLLDQTMPGITKILPLNSRNPEKCALLLFIKRFKSFDEIQRIGKARFLASYDVLAKKASERSASSKGLSIYELAADSITTRGEDPYIWLSQNQCVDLLSATQNAADDIISQMRNIAETIPEYKILRAMHGVGDRLGPIILAEIGDIRRFHSGKALNSYAGNDAPPYQSGQFESRNRHISKRGSSALRKACYEVMQALKLTKPQDNPVYLFMLKKEQEGKPFNVAKMAGVNKFLRIYYARAMELYK

SEQ ID NO: 215650 - protein, 369 aa, unidentified
MGKCITYVGLDVHKNSIAVAFADGGCDSEVRSYGTIDSDLASLDKVARKLVSGGSEPRFVYEAGPCGYEIYRHLKRRNFACIVAAPSLIPKKSGDRIKNDRRDARMLARLYRSGELTPVYVPSSEDEAMRDLSRAREDAKKAERKARQQLGAFLLRHGHRYSGLSNWTLTHWRWISDIKMAHAAQQFTLQEYVDAVRSSAERVERITEQIRLLVCNWRLGPVVEALQALRGVSLIIAVAVVSELGDLSRFDNPRQVMAYLGLIPREHSTGERIKRGPITKTGNGHARQMLTEAAWSYRMPARVGRRLRDRQQKLPEKVWQIAWKAQVRLCARYSGLFARGKPSQLVITAIARELAAFMWAIARTVEISA

SEQ ID NO: 215651 - protein, 438 aa, unidentified
MSNKVIFNLDELFISVGIDVGADFSWMSIALPNQQFVGKPYKILHNSIDSLTTAVSKIKEAEELYSLESRIFLESTGIYHYPLFCYLRDKGFNCSVINPIITKNSTNINIRKVHNDRFDSKKAALVGLKPDLKVSLMPSDLALNCRNLCREYYDLMDNRSAYVNKLQGELRMAFPQYLGIFSKVTINTSLTLLETYTSPSAFLEADKQEIINIIKSTARFGLTYAQNKYNAIIQAATDANQFGYIIDSNIKRIRLYISFIRKYDEEINNILESLHELVDANEDADFVKQIHLIETFKGAGFLSAVSIMGEIGDFSAFSKPKQLFAYFGLDPAVKQSGKFEGTKVQMSKRGSAIARRVIHTLTLQSISISRNGEAKNPVLREYYLKKCDSKPKLVAMGAVSHKVCNMIFAILRDNKPFKIIAPQEHIKQYNSAKCDIAA

SEQ ID NO: 215652 - protein, 355 aa, unidentified
MHSTPSDAIIIGVDTHKDVHIAVAITGFGAHLGTLSIPATATGYRQLVRWAVACGSIRAFGIEGTGSYGAGLSRALVSQGYRVIEVDRANRRLRRQHGKSDTIDAEAAARAVLAGEANTSPKSGDGNVEMIRHLKIARDTALKARTQTMVTLKTLIVNAPQPLREAFIAVTGPMTLIRALAALRPGPMTSTTASAKTALRMLARRWLTLAAEIRELDDALERLVRRQASALMAAPGIAVGTIAEMLIVLGDNPERIRSEAAFAKLCGVCPIPASSGKTTRHRLNRGGNRRANAALHRVAVVRMRSHPETKAYVHRRTAEGKSLREIRRCLKRYIAREIFNSLCRPTAQSAVSNGP

SEQ ID NO: 215653 - protein, 347 aa, unidentified
MLIIGCDFHPGFQQVAIFDNLTGEIQEKRLQHRADAEGFYRRLAGQEVLVGMEACGHYPWFEQLLEKLHIELWFGDAARVRASVVRKQKTDRRDAEHLLDLLRQDRFPRIWVPSLEVRDVRQLLVHRHKQVQTRTRTKNQLQAMALSFGVQKKRKLWSKAGREELEQLPLLPYAAQRRKRLLEALDALEVEISELDRRVAEEARERPEAVRLMTHPGVGSVTALAMVLTLGPAERFGSAKQVGSYFGLIPSEESSGGKQRLGKISKQGSSFLRFLLVEAGQTAARIDPQLKRFYRRLAVRRNRSIAKVAVARKLATRLYLMLREDWTYAQLSQAVMQVSPSHSVAGE

SEQ ID NO: 215654 - protein, 311 aa, unidentified
MDAQHVGIDVSKDRLDVHAHPSGEAFAVARNGEGLAQLAVRLQAMTPALIAVEATGGFETVVAASLASAGLPVVVVNPAQVRHYAQALGRRAKTDPIDAAVIARFIEATKPEVRVLPDEATQALADLVARRRQIVEMMAAEGQRERRAARRLKTSIVRLRKALEKELAELDGEIDDHVRGSPVWAEKEDLLASVPGVGPVIARTLIAEMPELGTLDRRQIAALAGLAPWTRQSGQWKGKSFIGGGRRSVRSLLFLGALTASRHNPVLKAFRDKLVAAGKPKMVAAIAVARKLLTILNAILREKKPWRVEIA

SEQ ID NO: 215655 - protein, 343 aa, unidentified
MQSISTIGLDIAKSVFQVHGVDAAGQVVVRRQLRRRNVLAFFQKLQPCLVGIEACASSHHWSRELQALGHTVRLMPPAYVKPYVKRQKNDATDAEAICEAVTRPNMRFVPTKTVEQQSCLMLHRARHLFIRQQTAVINSIRAYLAEFGIVAPVGRRGVEQLLEVVADKAEDRVPAVARMCLAALGSQLRALKVQILEFDRRIVAWHRSNATSKRLDAIPGVGPALATALVASIADPKAFRSGRDFSAWIGLVPKQSSSGGKDKLGSISKQGDRYLRSLFTAGALAVIRYAKIHGTDHRPWLTRLLARRPTKVAAIALANKLARMVWAMMARNERYQEPPALAA

SEQ ID NO: 215656 - protein, 337 aa, unidentified
MVYGAIDLHMRYSQVRIITAEGRVLREGRVVTTPERLVGVFAPHGPMRILLESGTESEWVAQALEGAGHTVIVADPNFAPMYGEVRRAVKTDGRDVAALAEANRREWYRPAHRASADQRARRQVLCARRQLVQMRSGTISVMRALLRQSGYRVGTGGSAAFVTRLARLALPAPLTETLAPLARTLTALTTEIAALDRQLAVTAQQDPIAHRLQTVPGVGPVVALTYRAFVDDVRRFPSAAHVSAAIGLVPREASSAERRHRGHITKAGPSELRSLLVQAAWVCWRSCRQGPLRQWADQLAARRGKRIAVVALARRLSRILFAIWRDDSVFEGSRVAA

SEQ ID NO: 215657 - protein, 357 aa, unidentified
MTSLTDVVDLVIGVDTHVETHTAAAVDARTGAVLGHLTVATTSEGYAALVAFADDLTEQVGALRVWAVEGTAGHGAGLTRVLTERDEVVLELDRPVRPARRNGAKSDPLDAVRAAREALARPVQATPRGGGNRQALSVLVTTRRSAVEAAAVAQRQLFSLVIAAPEPLRDRLRGHRTAELVERAARLRIHPSWDTETATTATALRTLARRIQAMSAEAADLQQQILAIVRAWRPDLLAQPGIGPIVAATVLCAWSHPGRIHSEAAFAMLAGAAPIPANSGQVTTRYRLNRHGDRQLNRALHTIALTRQRTHQPTREYTARRTTEGKTPREIRRCLKRYIARELFRLLEHPHPTLDAT

SEQ ID NO: 215658 - protein, 487 aa, unidentified
MSCSCRLDTTADENGVRLGESCTHEVVTFNGAASPQMSLALDAFRNNGLLPFSEEHARETLAIYASLRRTAREAAMEVLYETCCGLDVHKSSITACVLHEQGHKPQKHLQRFGCTTRDLLELVGWLKSFEVQHVAMESIGVYWKPVWNVLEEHFQMLLANAQHVKGVPGRKTDMKDCQWIAELLKHGLLHGSYVPTVLVRDLRDLTRTRATLSQEQSSVGSRIQKVLESANIKLSSTASNTMGKSGRAILDAIVSGEDSAERLADLALGKLRSKIPQLQLALDGCIRDHHRFLLDSLLRQFRFLEAEIKSLDLRLEQLGEQHKELADAVARWITVPGVERVAAWAFVAEIGPDMAQFPSAAHLASWAGVCPGNHESAGKRLSGKSRKGSPWLRRMACQTAWAAARTKNTYLSAQFKRLASRRGSKRAIIAVAHSLLVIGYHLQTNRSEYQELGGNYFDHLHAEGLKRHLVKRLESFGLTVTLQPRPV

SEQ ID NO: 215659 - protein, 425 aa, unidentified
MQRSFGLDVHLDFCEVAVCEEGRVSQLGRIASTPEAIREFAAGLTGSDQVVLEASCGAMRIARLLEESPVARVVVCNAAETRAISHARVKSDRFDAAMLAKLLAAGMLNAVWIPDQETSALRRRVARRAGLVRARTRVKNEVHAVLARCLIGRPPVSDLFGKQGRVWLAGRELPEEEAQTVTSCLRHIDFLDGEIAQLDQRIAKQALALPGFHRLLTIPGVDVGTAAAVIGAVGDITRFSTPGQLVAYLGLDPRVRQSGSEPARYGHISKRGDPQARAMLVEAAWRAIRTPGPLRAFGERVRARRGAQIAAVAVARKLLVLCWHLLTKDQDYAFARPSLTRQKTRRLELLAGATPLPRRHIGPPVSPTGSQREAEKALQAQAEHAYRRLIADWHTTPPRGGAGATPGRASNRPSKGKAARQATNP

SEQ ID NO: 215660 - protein, 371 aa, unidentified
MPVTLKEINSVDIIAPGPRDVIVGVDTHKEEHVAVALDGLGARLCEISIPANVAGYAQMLEWSKAWGEVRIFAVEGTGSYGSGLARFLRRNGRTVAEVSRPARKGERRLRGKSDAIDAEHAAREVLAGKQLSTPKLGDGIVEAIRLIKIARDSAVRAHSQAMITLKAVLVTADDELRAALEPLSDFRLVVACSDLGGQAKPDMPAAASRYALTALARRWLELHEEIKAHSTHLRRLTKRAAPDLVAAFGIGPDIAAEMLVTAGDNAERVHSEAALAKLCGACPIPAGSGRTNGRHRLNRGGNRHANAALYRAVVVRMRWHPQTIAYVERRTKEGLSKREIIRCLKRYVAREIYRYLPRPSVAVATSSPRGA

SEQ ID NO: 215661 - protein, 388 aa, unidentified
MKYCGIDVAKRKHSAMVINEQSETVKQNFTFKNDRQGFDKLLHELAPYAEQMLIAVEATGHYWLSLYEVLTMAGYQVVVLNPLQVHAYQRSGIRKRKNDRIDSFWIADFARISNPQATPQQATEHLQLRDLSRFRFRLTENMGNCKRKIISILDKVFPEYEKLFSNVFLTSSRQLLAHAVTAQEFADFDLGELTALLSSASRGRFGKEKAEALQTAARQSIGIHFLADSVRVQMRCLLEQLDLLEAQRQEVDLMLEHLMQQIPQFITSIPGIGLATGAAILGEIRDVNRFESPEKLVAYAGIDATVYQSGEFEALETHMSKRGSPYLRHALWQAASMAVMYDPQLKDYYQSKKSEGKHHGTVIGAVCRKLVARIYIILKENRPYEIRY

SEQ ID NO: 215662 - protein, 404 aa, unidentified
MFYFGIDWSEEHHNLCIQNQAGAIVSELELRHTLEGFEQIDLERRKLDVPTRECLVAIETSYNLLVDYLLDRDYAVHLIPPQATDNYRSRRRSSGARTDESDAAVLAKALRIDRDCHQRLRPNSALTQQILAQVRLIEILRRSIQRQSNQLRAVLVRTYPQALGLFGKLTSQVSLHFLMTYPTAQEALTLDKGRFETFCRSHRYCRAGLISRRYAQLMAPAPEANPSAVQAYRDQVRILAELLLSQVKSRIQAQSQLRQLFPQHPDAFIFESLPGTGDLLAPGLLAKFGDHRDRFPKAGSVQALAGTCPVTRASGKRKIVSFRRGCDRDFRRIAQQFARASLSQSGWAFAYWRDVRPHCGSDSDAYRRLANRWLAIVWKMWQDRKAYDETYHLKQRAQRRRPRS

SEQ ID NO: 215663 - protein, 430 aa, unidentified
MNSTQNKKIMQVTEKTMIVGIDVGSVKHYFRAFDWRGIELTKRPIQFTNSMEGFDAFYDAVNELMDKNHLEVPLAGLEPTGHYWLNLGQYMNGKNIKFVMVNPHHVHKSKELDDNSPSKNDCKDPKVIANLVRDGRYFYTYMPSGIYADLRNASNRRFTLVEEQTRCKNRIHKWISVYFPEYKGIYTHIDAKGGILLLKNAPTPEDIAGIGVEGIIKIWKNAKLRGNGHKKAMTIYNRALNSIGYKEGLNEARIEINDLIEDYEKHTKRLEQINDLIKNLTLQIKHVDKLLEIKGVGIITVAGFIAEVGYIKRFDNSKELQKLAGLELVEDSSGKHNGKTKISKRGRKRLRYLLIQAAISVIGKNTEFKQIHNYYTTRTDNPLKKMQSVTAVACKLIRVFHVILVKGVSYDASKMLEDIKHPGGAKLIAA

SEQ ID NO: 215664 - protein, 317 aa, unidentified
MKQHQSTRKIAGVDVGKLRLDAAVHGVDDLTWVANGPAGIAELIGWLGAREVVRVGLEATGGYERAVRAALEAAGFEVVVHQPIEVRLFARLERRRAKNDKLDARLIAAATAQTEAVKAAQDPGLWDLAERLTAYEQITDQLAQLRGFMEHVTLEDLAKTLKAQIGSLERLKAKLAGEVLRRIKARADLAERMKLLISLPGIGPIVAASLVVRMPELGAMDRGQAASLLGVAPFDRDSGQFKGMRFIAGGRSRPRRMLYLTALSAKRCDNDFKAFAARLLARGKPPKVVLVAVMRKLIEAANLVLARRQPWVKHAPT

SEQ ID NO: 215665 - protein, 343 aa, unidentified
MQAIMTIGLDIAKSVFQVHGIDASGQVILRRQLKRRYVLAFFQKLPPCLIGMEACASSHHWSRELQALGHIVRLMPPAYVKPYVKRQKNDATDAEAICEAVGRANMRFVPTKAPEQQSGLVLHRTRHLFVRQQTSVINAIRAHLAEFGIVAPVGRRGVDELLNIIADPNDKRVPEIARACLLALGAQLHRIKEQVLEFDRMMVAWHRSNEMSKRLDDCPGVGPALATALVASVADPKAFQSGRNFSAWIGLVPKQHSSGGKDRLGSISKQGDRYLRGLFVAGALAVIRYAKIHGTKHRPWLTALLARRPTKVAAIALANKIARMVWAMMAKGERYKEPVALAA

SEQ ID NO: 215666 - protein, 361 aa, unidentified
MNATTVAVDLAKSVFQLAVADENWKVVESHRLTRTQFERFFSNRNVKLVIMEACGSAHHWARWLEGLGIRVRLLPAAHVRAYVKRNKTDAADALALLEAARASDIVPVRVKSVEQQGLQALHRTRSLWMGTRTSRINALRGFCREFGLAIPQGARTGVETISRVLADPHSAVPDLIRGSMKLLVEEIRLLEARIAQLEHELSALAKQSPACGRLLTIPGIGLLTATAMVAATGGEVMHFKDARHFASWFGLTPKEFSSGGHRRLGRISKRGDRYLRMLLTHGARAVLRAASLAARAGRSLDGLREWGLKVQGRANHNKAACALANKLARICFAVLRDAVPFGQPIARPARKINRVAFALAG

SEQ ID NO: 215667 - protein, 404 aa, unidentified
MIYVGIDWAEAHHDVCVLDIEGEVLASTRIAEGLEGVARLHALIGEHTEEPGEVIVGIETDRGLFVGALVAAGYVVHAINPLSASRYRERHTTSRAKSDPGDARVLADIVRTDRRHHRTVAADSELLGAIKVLARSHQDLIWSRQRQLNVMRSALREYYPGALTAFPVLGHSDALAVLAVAPDPVRGRRLSEARIVTALRRGGRQRNLERRAKEIRAALRIPQLAAPPLVAEAQAAKTLALVAVITTMSEQIARLEAELVAAFDRHPDAEILRSLPGLGPVLGARVLAEFGDAPDRYVDARARRNYAGTAPITRASGTSHVVAARFVRNKRLFDPLYAAAFSALRASPGARAYYDAHDPGPRTGRTARRKLANKLVGIIHGCLTHRTLYDEATAWRRVLEALAA

SEQ ID NO: 215668 - protein, 347 aa, unidentified
MEKASQAEVQVFVGIDVSARELSVAVQCGIKEGIAITTFRNQAAGHKALLAYLLRAKGRARVCLEASGNYSLDLAFTLQAHPQVEISVVNPRRARRFAESLGERSKTDPVDARVLCEYALRMPWVPWVPPSLAALRLRSITRAIEDLVAMQAQEKNRQHALLASDALPALLIRELEQHLRYLKLRITRLRREALRLIARNPELNRRFHLMLTTPGLGETSSLQILGELVVLPETLDARQWVAFSGLDPKQFSSGTSVEKKPRISRGGNRHLRRALYMPALVATRHEPFLRDFYQRLLRRGKAPLQGVVAVMRKLLHALFAMFRRDEAYDGSKLCPAEFARHTAVVCV

SEQ ID NO: 215669 - protein, 354 aa, unidentified
MPQDSGIVGIDVGDKHCQVCTIDPDSGVVFENLRIPTKRASIIRHFKTSPMRITLETGPHSPWISRLLNDLGHEVIVANARAVRLIHGGPRKSDQLDAEKLARLARYDVKLLAPVEHRSEQSQADLACIRSRASLVQARTALINHVRGSVKAFGTRLPKCGAAVFAQRALERLPELLRPALEGVLKVIGELTREIKASDKRIEQLATEAYPATALLKRVGGVGSKTALTFVLTLEEPERFRKSREVGPYLGLTPGQWQSGDRDVRRRITKQGDGDLRWLLVQCANIILGPKVGDCDLKRFGERLLARGGPYARSKAVVAVARKLAVLLHRLWVTGEVYDPFFNSRRTQASAVGV

SEQ ID NO: 215670 - protein, 404 aa, unidentified
MKGPIVSIDVSKGKSDYQAFKNLNVKYTGSRSIKHTKEGFDEIVNLVREMEKKLETEVCVVYEATGVYHRVLKKVLEDNNIKQFIINPLLSAKTRKNDSLRSPKTDKLDPKSIAKTYYSHSLHNSHKPETIYHELRELSRYYEDILVHIRKDKVSFRAHLDVVFPGYDTLFDDLYSPVSLTIIEKYPHPEMLQKKKINTVSKVIQSKTCHRQAASDTMADKAIEYSKTIYSGCDKDDIEVLILQRLIKKLKEDMAEAERTIGEMIKLAQELPDFSIIKSIPGIGDNLAARIIAELGDMTRFKKKNELVAFAGLDPRISESGKNDGDHMHITKKGNKRLRCLLYLAVTCSIRLKRDDNSIKDFYIKKKQQSNPMCSKAAKTACASKLVRIIYSMCKTGELYQYNK

SEQ ID NO: 215671 - protein, 346 aa, unidentified
MNSMNYAGMDIHKKSISCCVRQADGTIIQESTITATRDALDEWMRQLPDRWIAGMEATLFTGWIYDHLVSGGAMVKVAHPAMLQAIASGKKKNDRVDARKIADLLRCNYFPECHMASREIRDRRRVLRYRNLLVRQAVQMKNKVSGLLMEAGVPYNQQKVHQKKYFAELLQTQKKEMPPSMPELLRLSRSTVEALTGMQRQLIRALESDSLLAARVERLASIPGVGRVVALTWALEMGDISRFGSVKKAVSYCGLCGAEKSSGGKTERTPISKQRNKHLQTMLIEAAKLAPRWSAEMALVYERAKQKGNRNRATLAVARKLVAYLMAVDRERRPFDTQIRVAGNAA

SEQ ID NO: 215672 - protein, 344 aa, unidentified
MNKNWFIGIDVSKKTLDASIFVAGEVINKFPHVQVRNDKQGFKDLFRWAKEQGMKTKDTLFGLEFTGYYSDALEQFLTKKQISYTMLPTTVVKHYQRGPHDKNDKIDSAKIADYLFRFNGTECIKLRVLPSKALQQLKDLKSERKFLVQQRVACENRQKVAKSKSEEKHLQKLIDLYKAEIEQVELQIADVIVQDEEIYTTYRLLNSIPGIGFVNAVNTIANTQNFTAFETARQYAKYVGVAPSEHSSGTSVQWRRRPSPHADLQAKADLSMAALHAIELSREMRQLYERKLGNKPKDKDMQKKALNAVKFKLIREMFSVAKQARNFELRGLDKAQAEAHSTEE

SEQ ID NO: 215673 - protein, 474 aa, unidentified
MIKSVGIDFHQGKHVARCLDEKARLCDGFSFQTTPEGLATLEEHIFRDGSNPVIVFEPAGLTWFILAICIRARHPDCRLVRAKGQKVAALRRYLRGSSKSDRIDALTLAKMTFIDPEQLDEVYLPPAKIHALQRLSRQRKRLESDISAHKTRIGAIVESYVPGVRKAFSDPWSTQARAFLRCQLNPLAVAHDGEKALHSFLVRARHRNKTDKEESHRIYLACQSAADLYELSSRAEAVDDEFFSVFQEEIERELRLMELEEAESEAIAKRMEELYRELHPSDNLRSIPGVGRVTAPMFLATVGDPARFHNQSAFVSWTGVVPRTRQSSDVEAKGLRMTKAGPAIMKWALFQAGDIGRRFDPQLASLYYREMVHHGKNHKQAMGAVMSHLAARVIKVLQDGRPYELRDNEGKAISPAEAKKLILLNYQVPENIRRERRRRNPVKRGSLKSQGTELPRTNEAAVAPQPVKATIPEN

SEQ ID NO: 215674 - protein, 339 aa, unidentified
MNQVSTIGFDIAKHVFQVHGTDAQGRVFRRKLRRKEVIAYFASLPPSLIGMEACGSAHYWARQLQALGHEVRLMPPAYVKPYVKRGKNDAIDAEACWEAVGRPTMRFVAIKSEEQQSVLMLHRARDLLIGQRTQTSNALRGHLAELGIIAKQGRGGTDELLALVEGNEEGQMPELARTALLVLAGQLRELRLQISKIEREIHAWHRSNAVSRRLETAPGIGPITASAIVATVPDPSRFKSGRQFSAWIGLTPNEDSTGGKQRLGRITRAGDPYLRRLLVVGAHAVLRYSGNAKSAPTKWAAELLGKKPYTVAAVALANKMARVIWAMMMKGEAFRAVSA

SEQ ID NO: 215675 - protein, 348 aa, unidentified
MKKIVKQVVGIDVAQKELVVSLGRMYDDWSPEVYANKSFANTQKGFMTLVAWVKKWSDPGCSVRFVMESTGVYHESLAYFLDEKGYELTVVLPNKISNYFRTLDVKTITGKTAADAITMFGLEKKLETWKRPKKIFKDLRQLTRERDQIVQERTMVKNQLHAEQAEANPNPSSVQRIKKRIEFLNKQEREIKTEIATVVKADQEVSSAIKITSSLTGVGLLTSVTVLAETNGFELIRNKRQLSSYAGYDIREKQSGTSVKGKPRISKRGNKYLRKAMHLPALTAIRHDERFRATYARLVSKHGIKMKAAVAVQRKLLEMIYIIYKTNVPYDKNYLKKHNVANADAATE

SEQ ID NO: 215676 - protein, 318 aa, unidentified
MEATVVVGIDVSKDRLDVAIYPSDEPGFAVARDAAGLDALAARLKPLGPATVAVEATGGFESVVVASLAAAGLPMLVVNPAQIRAFANALGKRAKTDPIDALVIARFVAATKPEPRPLPDEATQRLADLVARRRQIIAMMVAERQRQKRLLAPRLQHSITRLLEALQKELSEVDREIDAEVRGSDIWREKEKLLASVPGVGPIIARTLLAEMPELGRLDRREIAALAGLAPWTRQSGQWRGRSFIGGGRASVRAVLFMGAITAARHNATLKAFHQRLIDAGKPKLVAIVAVARKLLTILNAIIRRGQAWQSQVQAASI

SEQ ID NO: 215677 - protein, 392 aa, unidentified
MDSPPPRHHSATVVFEEANGSEGETMKKHSSKHDSLSSTDVELCTTICVDLAKQVFQLAGEDATGRVIYEDRIKSRQAFHDFLLRLPTTVAVLMECGPGAQAWARLLQAKGNPVRILPAQRVAEHRSGAKNDRNDCYAILRAGRDTSIASIPIKSTTALAIQALHRIRRGNIKRHTALGNQIRGLLLEHGVSMPQGDAAINKHVPQALEDASLPLPDLLRELLDELLMDWLSLGERIAALSRRLEATAQEDKVAQRLITIRGVGPIIATAIVAKQTDPSRFASGRMYSAFFGIVPDQHSSGNKIRLGKMSKRGDGYIRSLMIQGAHAVLSQLRPDSDQPDDRRLLRWLSRLGRKEAAIRLANRNLRIIWALLQSDQVYQRKPNEKPEAAMSL

SEQ ID NO: 215678 - protein, 415 aa, unidentified
MALKIVYKICCGIDVHKTFVVACIASTNDKGVTSYESHRFSTYTSGLKTLLQWLLDRDCKDVCMESTGKYWIPVYNILESDCSIVLAHPKYVKAIRGKKTDKKDAKWIADLFKHDLVAGSFMPPSDIRQLRDLMRYRFKLTCFKSSEKNRLQNCLTVSNIQLGNVVSDTFGKSAQAILDKLLENPADTSFDLEPLVYKSLKKKLPELRDAIDGFITPEQAGKLKIIKDHYDNLESRKAELEELILALAAPYQQELTILQTAPGISSNFTAIGIISEIGTNMEAFPSAKHLCSWAGLTPTNNESAGKKKSVRVSKAGCYIKPLLVQCANAVVKSTKHPEMRNRYLHLKKRRGHKKAIITIARMLLTALYHMLKNGENYNPELYQKTDLPPVDREITIEQALMLIRNQGYKIKSATT

SEQ ID NO: 215679 - protein, 320 aa, unidentified
MAQQGRIVGIDVAKLKADACIRSLQLRLSQPSTAQGQQDMITWLRRNEVGLAVMEASGGYERVWAEALRAAAIAVRIVDPKRVRYFAKSAGRLAKNDPIDAEMIAWFAETFAVAAEPAHDADRDALNRLVTARSLLVRLATPIRQLGEHGQPRVVENAQRAILKTIKAQLAKLEAAIEAKIAANAQFVARRAIIASVPGFGDHFVAGALAWLPELGRISNKAAAGLVGVAPYDDDSGQHRGERHIKGGRRDIRTLLYMAALGAATRHNPVVMAYYKRLRAKGKKTKVALVACMRKLVVILNTMLARGEMWNPTPRTTAVA

SEQ ID NO: 215680 - protein, 421 aa, unidentified
MKKIKPKNSKAVNQKILIATIDGGKEKHYGYFRCPDGTEGKSQPFLNNGRGFQEFWERISSAAKTHSLEEIVVGFESTGPYMEPLAQFLRSKQGVRLVQVNPMHTKRLKELSGNSPLKTDRKDPKVIADIIELGHALTVVIPEGPAAELRRLTQGRERTITSRTRLFNQLQCLLASIFPEFLQVMKDVKTASALYLLRHHPMPQDIVKLGESALASLLRKVSRGKLREDRARALFEASSASVGIRDGRDSMLLEIRLILETIASHEHFIEGLEVEMERYLEQIPYSHIILSLKGIGPITTAGLIGEVGDFTKFGTISEVLKLAGLDLYEVSSGKHRGKLRISKRGRPHMRKLLYLAALSAVRKGGVMHEWYQRALGRGMKKTKALVAVSRKLLGIIFALVRNHSVYVENYTKQKPTFQEAA

SEQ ID NO: 215681 - protein, 346 aa, unidentified
MEQIIRIGMDTSKHIFQLHGVDAAERPVLCKRLGRQQMVAFFAKLPPTVIGIEACGAAHYWARVLGEFGHEVKLMAPQHVKPYVKRNKNDRRDAEGLCEATGRPTMRFVPVKTAEQQAALMLAGLREQMVARRTQLSNAIRGYAAEFGVTAAKGLDKVEPLLAQISRDESVPALARELFAMQGGEYAQLQVELKAIEVKLRAWHRGNADSRRLAKIPGVGPIGATALVMKTPDPRAFPSGRHFAAWLGLTPKDHSTAGKTRLGKITRAGDERLRSLLVAGATAVIQQAKHGRGHPSPWVVALLKRKPPKLAAVALANKIARIAWKLMATGESYDGAQMPGASTFAA

SEQ ID NO: 215682 - protein, 312 aa, unidentified
MPCKTEVAVARTIGIDTGKNTLHMVGLYQEGAIVLREKVSRTRIAARLVNVPRCLVGIEAGMASHHVARELLALGHEVKQVPPAYAKPFRQGHKNDFRDAYAVAEAVQRPSTRCVPVKTADQLDLQALHRVRSRLIGNRAAVINQLRGFLLEHGIPVRQGLRFLRQQLPQILATRNDVLSPRMVRIIGELIGDWTYLDERIERVTDEIETLARADENCRRLMTVPGIGPIIASAMVAAIGNGAAFAKGRDFAAWLGLVPKQMSTGDRTILGRITKRGPNRARDQIGAATRSRDPVSRPGCSGLRIHFRLNGS

SEQ ID NO: 215683 - protein, 417 aa, unidentified
MKCFVGLDVSSTKLDVCIMLSDTTTPFTASLSNDLTGASEIKKHILELNETYSFERIVIGMEATSLYSFHPAMFFHEDSQLKALNVEVMVEQPNKIKKYRETFEESKNDTIDAFYIADYFRAERFSPAFLKEEKYLALQHLTRTRLQLIEQLTRTKQHFIENIYYKCNTLSTEIKNESLTTSLWSSTIISLMTEDYTLDELATVPLNDLADFIQKLGRGRFKAPDKLAKAIQAAIRGSYRLPKLQQDSVNVILGLLAREIRNLEQMIKDIDKAIEDMVEVIPEYQCLTSIPGVGKVYAAGIIAEIGQIERFKDHPQVAKYAGLNWKQNQSGNANSQNTDLVKRGNRYLRYYLVEAANSVRRHDSEYQAFYKKKYQEVPKHQHKRAIVLTARKFVRLVDALLRNRQLYTPPRRLMEDK

SEQ ID NO: 215684 - protein, 416 aa, unidentified
MINQQQFAAYVGLDWGDQQHSVHLQVVGEAKPESFQLEQKPEALHEWIARLQQRFQGCFVAIAIEQRKGAVIHALMMYAFLVLFPINPKALARYREAFHTSGAKDDPTDSALLLDFLSKHSDRLRPWIPDSEPTRKLQALCEQRRKLVNRRVALTNRITSLLKQYFPQALDWIGEVASVQACDFLESWSTLAAVQLVAPDQLRVFYRRHNGRKASVIDDRLQQIAQARPLTTDLAIIEPYSLIVEASAVQLRGHIHAIQRLDKLIAELFAQHPEHDLFHSFPGAGPVCGPRLLTVLGTDRSRWTSAVELQSHSGIAPVTERSGNSCWVHHRLACAKFVKQTFHEFADQSIRYSPWARAYYDLQRSRGKDHHAAIRALAYKWIRIIFRCWKDKKPYDEATYIQSLRRRASPVVEKLS

SEQ ID NO: 215685 - protein, 388 aa, unidentified
MPRQRKPNDLSRSLIALDMDTTLIAVVELSLSSWLVAGIVPGVERQPLKKLKTDENALLTLLNRWRDEAMRSGHQVSRIAVAFEAGRDGFWLARWLKARGIEAHVIHASSVAVSREHRRAKTDRLDTELLKRAFVGWLRGERDHCKTAAIPSLGEEDAKRPSRERESLVGEQSRLVNRMKATLIRLGIRGFNPKLRHAEQRLETLRTAEGEPIPANTMAELKRDMQRRRFICGQIRSIEQERLERLERTPDTEPHAMVRLLARVIGIGIETADLLVHEVLLRNMRDRRAVARYGGLTGSPDRSGGTNREKGMARSGNARVRRGMIQLAWRFLLFQKNSALAQWYRQRTEHSPKARKTMIVALARKLLIALWRLARDGVVPEGVAMRPA

SEQ ID NO: 215686 - protein, 400 aa, unidentified
MMTPDDIDVWVGLDVGKSAHHAHALDHDGNTLYDKPLKQDEKAIRTMLGKLSKHGRVLLVVDQPNTIGSLPLTVARNMGIAVAYLPGTAMRRTAQLLPGDAKTDRRDAHVIAWAALKLPETLRDAGPDDETLAALKLLAGHDEDLAHESTRHVNRLRSLLLQTHPAFERALKGERITRDATLALLERYGGPMGVKRAGIEDVKDWAKSNGLRAGRIIDDMFKAIGEQTVTVPGTLMAETIIPSIAHDIKTIRDRRREVGRQVEKLLEDHPLLTVLTSMPGIGVRTASNILLGIGGDIANFKSSAHLAAYAGISPVIGQSGTSIKGERPSRRGNKRLKNALWQTAFVASTKHPPSVAYYKRKREQGKHHNAAIICLARRRCDVIYSMLKNGTLYQEPALVA

SEQ ID NO: 215687 - protein, 377 aa, unidentified
MKAPSTRPAAVLGLDVGKSSHWACLIDRDGEVLASAPVRNREAELDALFASAPAGTLVVVDQFRNIGSLAVRRARAAGLGVAYLPGLAASRAAGLFAGEAKTDERDAAVIARTALGVPDSLSGVPGRGEALEAARALSSQRDHVVACATRDKNRLRAVLLESCPALEAAVDLSDRRWLELLAGFGGAWGIARSGAEGPRAEAAGEAAAASTAPPPALVEAENRQVRFLAARISEALDEAGALEAETAALLEGDETYACLLTVPGIGPRTAAQLAVSVDIGRFPDHDHLASYCGIAPRVRSSGTSVRSVRASRRGDARLKSPLIFSCNSLVRSSGRYGEYYRACRARGMGHGRALKAVARKRLRAIYAVMRDRVPYRE

SEQ ID NO: 215688 - protein, 408 aa, unidentified
MSAAPVPIIRYIGLDVHKHYLVAYGVDRDQHPVYGPRRVEYIDLESWLARELRPSDAVALEMTTNTWQMVDLLAPVVGAVTVVHPPEVKAIVKARVMTDKKAARILAQLLAAGLLPPVWVPPQGVREIRSLVAGRRRTVALSTEAKNTLHAVLHAHHLLPPAEVKDIFHPKARAWWDALPLSPVEMTRVQVALETLDFATRQRERYEAVLAQLAAGDERVPLLAQLPGIGLVAAMTLLGAIGDITRFPTATQLVGYAGLGAQVHDSGQTRWTGRITKAGRRDIRRVMVDAASHAVKMKGHWKDVYERLKPRLGRPKALVAVARKLLIAVWHVLTGATADRFATPEQVAAAFYALAYKVGVRNLPNGVGARQFVRDQLDRLGLGDEITHIPWGSKRFRLPPSRVGEAGD

SEQ ID NO: 215689 - protein, 346 aa, unidentified
MAHYAAFDVSDKETAIHVLDEHGKLVWKGKRPSEPEALAAALRRHAPELVRVGLETGRLTPWLFHALKGLGVPVVCLDARHARAATALQRNKTDARDAETLAQLVRTGWFREARVKSWAAHAVRHLVGARAQLVGMATDLSNQIRSLLRTFGLRVTGLAGGTFERKVREQITGSPEVAAVAEPLLAAWRAMRDQIAALDRKLIEAARSNATCRLLMTCPGVGVVVATSFAAAVEAPDHFRRSRAVGAYLGLTPRRHQSGESDHSAGVSKRGDKLLRSYLFEAAACLLIRVQRPSALKAWGVGLVQRLGFKRAAVAVARKLSVVLHAMWRENRPFQAWPTPAVAAAA

SEQ ID NO: 215690 - protein, 464 aa, unidentified
MTEKKIWRNRKERKEWGRRLQSEDPGLEVVHSHAAGIDVGNGMHYVAVRPDRDPQPVRRFECFTADLHCLAEWLQRCGVKTVAMQSTGVYWIPIYEILEERGIQVYLVNARHTKNLPGRKSDVQESQWLLKLHTYGLLNNSFQPPSEIRVLRTYWRQRAEHVHGAATCVQRMQKALTQMNVQLANVISDVSGLTGQAIIRSIIAGEHDPRKLAELSDPRIHASREEVAKSLEGHWRPELLFVLQQEVVMYDTYQQRIAECDQQLQKHLASFADIIPLLPTAEEPKRKKSKPAKNAPRFELRSELQRIAGVDLTRIDGIDVMVAQTLISEVGLEMSRWKTEAHFSSWLGLCPDNRTSGDKVLARGTRRVVNRAATALRMAAVTLMRSRTYLGAQYRRLRTKLGAPKAITAMAHRLARLVYRMLKYGQHYVDKGAEYYEHRYRRQQIEFLRKKATKLGLQITLAQT

SEQ ID NO: 215691 - protein, 376 aa, unidentified
MQEISKIHVGLDVHKDSIAVAVAEPGRAAAKVIGTIRHDVPKLLKLLVKLGDTEAVHVVYEAGPTGWGLQRALTAKGYSCEVIAPSKMPRRPGDRIKTDRRDCAQLAECSRAGQLRAVWVPRPEDEAIRDLARAREDALNDRRHLRQQLKALLLRHDVRFPGKTSWTQAHHAWLGKLNFSEVATQAAFMDYWMAVQASDERLKRLSSALLEYVKNWRFAPQVSALQALRGIDVTCAIALVAEIGDFSRFDHPRKLMGYLGLVPSERSSGERTARGSITKTGNAHARRMLSEAAWSYRFKPRLGERARRRQEGLSQQLCAIGWTAQLRLTQRFAKLDARGVHRNKVCVAVARELTGFVWAVAQAADTPSQATQGGTT

SEQ ID NO: 215692 - protein, 411 aa, unidentified
MRLFVGDDWAEDHHDVELMDAAGWVLAKRRLPEGVAGMARLHELIGQQLGEDDRDAEAVIGIETDRGPWVAALVAAGYTVHGVNPLQASRYRERHGVSGAKSDGAGAHMLTGMVRTDSHQLRAVAGDSADAEGIKVVARTHKTLIWERTRHIQRLRHQLREYFPAALEAFEDLDAPDVLELLAKAPDPARAARLTRAQVSAALKRARRRHIADKAAAILAALRSPQLGQPPAITAACAATVRSLIAVITVLDEQVKTLQGQVEAHFGQHPDAEIYRSQPGLGAVLGARVLGEFGDDPHRYADGKARRNYAATSPITRASGKKKVVAARFVHNDRLVDALNAQAFAALNASAGARAFYDDLRARGIEHNDALRRLASRLVGILHGCLKTRTLYDEATAWSHREKSSPSAVAA

SEQ ID NO: 215693 - protein, 314 aa, unidentified
MTLHPCCIGIDISKAMLDIFEGDTGRHARIANSDEAIAAACRPWSERGATVVFEATGCYDTRLRTALDRAGIRHVRVNPERARHFARYAGFSAKTDRIDARMLAEMGHRGGLMPEPPIDPSREALRALHRRRDQLVADRKAERQRIADAIDDTERGSIDRHIAFLDTEIETLDRAITRQLADDPNLRRLEIRLRSIPNIGPVAATTLIALMPELGTRSPKAIACLAGLAPINRDSGTHLGARSIAGGRKRVRDALYMAAVSASRSDKGFGAFYKKLREAGKPPKLALIAVARKILTTANAVIRDDTPYRYTSPT

SEQ ID NO: 215694 - protein, 344 aa, unidentified
MIVLGADTHKRSHTIAGVGATTGELLGERTVQVGRAGFGALLAWARALGGERVWALEDCRHVSGSLERFLIERGERVLRIPTNLMAETRKSARQRGKSDAIDAVNVARAALREGLATFPAAHLDGPELDLRLLVDHRERLVIHRVELNNTLQWHLHDLWPELELPGGALFSKKWSTRIARRLSRAEQTMRVRIARDELRRLRELTETIKALAREITQLIEQIAPRLLAEPGFGPLIAAKLVGEIAGAQRFATDAKLARAAGAAPIPASSGNTRRQRLDRGGNRQINAALHRVIVTRARCHQPTRDYIERRRGEGKTTRDAIRCLKRYLARQVWNLLRASPRTRP

SEQ ID NO: 215695 - protein, 448 aa, unidentified
MRKPQVIDDEEYERVFDTVAAVDVAKKDGVVCLRGPHASRPGGRQSTVWTVPATMNAVAALGEQLAAAGVQKVTVESTSDYWRVWYYVLEAAGLDVQLVSASQVKQLSGRPKTDKLDAMWLARLTEKGLLRPSFVPPAEIRALRHCTRARTHLVQDRTRCFQRMEKLLEDALIKVSSVASKLTTASARDMIRALIAGERDPQVLAALARGRMKAKHDALVEALTGMFTGHHAQIAQILLDQIAFCDTAIARLTTQIEDAIDAIPAAWGADPDGVTGTGSGTGPDAAALPAIMRLEEIPGLSAELACSIIAETGLDMSRFPTAGHLVSWAGLCPRTLQSGPRTRHGTNQGNSYLRGYLGQAATCAAGTATFLGERHARIARRRGGAKAQVAIARSILVIIWHLLADRSARFTDLGPGHYQAKIDTSRKARNHIRQLEALGFQVTIAQAA

SEQ ID NO: 215696 - protein, 315 aa, unidentified
MDTIYVGIDVAKDSVEVHVRPTGETFRHATDAAGLRELVRRVKPLSPRIIVMEATGGLEAIVAAALDQASLPLAIVNARQVRKFAEGLGFLAKTDKIDAAVIARFAEVAELTPRPVPKPEQVELRALLARRQQLVEMKVAETQREAHAANKLLRRSHAAMRRSLEAEIVRVERAIGQIVDGSPLFRAKEDLLRGIPGIGPIVARTLIAELPELGTVNRHEIAALAGLAPYSRDSGKFRGRRWIRGGRPRARTVLYLAAMVAARGLGPLASFYRRLVDAGKVKSVALIATMRRMLVIANAILRAGQPWKEEAAASR

SEQ ID NO: 215697 - protein, 340 aa, unidentified
MSEISIIGLDIAKHVFQVHGADALGRAVLRKKISRAKLLPFFASQPRCRVVLEACGGAHHWARELARLGHDVQLIAPAYVRPFVKRQKNDAADAEAICEAAQRPSMRFVPLKSETQQAAAMVFRGRDLLVRQRTQISNALRGHMAEYGWIAPKGLAHLDKLATLLADPAAVPEGVRSVCTVLLESLALLDRQIATLDQEIVRRSREDAVARRLMTIPGIGPITATAIAALAPPPGTFAKGRDFAAWVGLTPRQHSTGGKQKLGAISKMGERTLRRLLIIGSSAVVLQASKRGAPKGSWLEQMLARKPRMLVTVALANKTARIVWALLMKNEDYRAPVVAA

SEQ ID NO: 215698 - protein, 413 aa, unidentified
MELVHARCAGIDISKKDAKVCVRVQGTGRRRTAASVTTWGSMTNQILALREHLLAEKVTCVVMEATGAYWKPFYYLLDDGLDVMLVNARDARNVPGRKSDVSDAAWLADLGAHGLVRASFVPPPPIRELRDLTRARTVITRERSREAQRLEKLLEDAGIKLSSVATDITGASSRRMLEALIDGQQDPTVIADLVHWRMRPKIAALMEALTGRFSEHHRFMTRLFLDRIDAHSADIARLDARIEAAMEPFASARDLLMSIPGISRITAEAFIAETGADMSVFPTVGHLASWCGLSPGSNEAAGRVKSTKTRPGNPYLKGALGVAALSVVRRKDTYFWAKYRRITVRRGPMRALVAVEHAMVVAAWHMLTNGEFYHEPGPDYFTRRMPAKTQARAVAQLESLGYKVTLEPLADTA

SEQ ID NO: 215699 - protein, 312 aa, unidentified
MEGTAAVVGIDVSKDRLDVHIRPSGETFAVERTAAGLDALCRRLREIAPRIVALEATGGFEAIATAALAAACLPVAVVNPAQVRSFARALGRRAKTDPIDAAVIAHFAAATGVEARPLRDAATRLLGELVGRRRQITEMIRAEHNRAHRTTEPHLQKSIARLAKALEKELAVLDADIDAAVRGSPLWRATEDLLTSVPGVGPVIARTLIAELPELGTLDRRRLASLVGLAPYTRQSGRWKGLSRIGAGRSPVRTALFMGAMVAKRFNPTLKAFHERLLAAGKPKMVATIAVARKLLTILNAILRDQRPWQSA

SEQ ID NO: 215700 - protein, 283 aa, unidentified
MSIVGAFDVHRRQLTFDYLDIETGEVRRGRIVPADREHLRAWLARFAGRDDVRFAVEGCTGWRYVVEELLAAGIEPHLAEPADTAALRGKKRHAKTDKADAAHLRARLLAADLPECWIPPAHVLEARAVVRLYKDLLDERGGWHQRIAATMFHQGVPAGSSMDTAAGRAAAAEAQLSPAGRQAVEAGLRQIDRLTGELDPLRRQLDLISRRQPGCAALRAAHFGIGAVTAVAIWAELGDVRRFGNSDDVVRHTGLDITVYSSDGKRSAGHLARQGPPLLRWAL

SEQ ID NO: 215701 - protein, 322 aa, unidentified
MNKYKETFGVDISKDVFDVHGSNKGHDQYKNDETGFKKFLKELPKSSLVVMEATGYYHYRLAQFLYKKGVIVSVVNPLSVKRFIQMKLAKVKTDKSDAKAICEYALINEAPIYNALTDIQSECLQLFRLLDIYLKQRTATKNKIHGEAVLGIPSKFVYRSLIRNKKLLNKEVAAIESKILSLVKEDQQEQLTLLMSIPGIGQKTALFLIVVTDGFKKFENAAQLCSYVGITPTIRESGSSVRGRARISKVGNRKLRNLLFLCSFNACKHNRACREVYERIVNRGKSKKLALIAVANKLLKQSFAIAKSGRPYDETYVSILPR

SEQ ID NO: 215702 - protein, 345 aa, unidentified
MELHTIGIDLGKTVFHLVGLNLRGEVVVRKRFSRSQLLRFTANVRVGLIGMEACGGAHFLGRALREQGHEVRLIPAQYVKPYVKTNKSDYIDAEAIAEAVTRPTMRFVPIKTDDQLDLQSLHRVRERWVMRRTAVINQIRGRLLERGITLRKGRRYVDDALPLILEDAEAKLSGAVRMLLAQLKMDLDQLAVRIDEADAVIHKTAHENEACQRLLAIPGIGPVTATALIAAVGNGGAFHKGREFAAWLGIVPRQHSTGGQQKLLGISKRGNSYLRRLFVQGARAVLQQRTKQSSSLSAWLAQLTSRTHRNVVAVALANKLARIAWAVLAKNEQYRPPVLADGAAA

SEQ ID NO: 215703 - protein, 355 aa, unidentified
MSQEKYIGMDVHQATISVAVMDGNGKLVMECLLETKAATILEFVQGLRGTLSLTFEEGTSAAWLHDLLKPHVSRLVVCDPRKNALLKEGNKSDRIDARKLAELLRTNQLKAVYHGEHGIRTLKELGRSYLTLSKDVTRTMNRIKSLYRSWAIPCAGTSVYAPRHRAEWLAKIVEPGVRIRAERLYQQLDGLQSIRQQARRELLQESHQHPAVKLLRQIPSIGPIRSALLVALLQTPHRFRSKRQLWAYSGFAVETHDSGEYRYVRGKVQRNRERITVRGLNDNHNRDLKNLFKGAAISASTRPGPLHDFYVARVAKGMRPTMARLTLARKVAAITLTMWKKGVSFDPQQLSRQSV

SEQ ID NO: 215704 - protein, 335 aa, unidentified
MQQFDYFIGVDVSKATLDFAVAKANQILFHQQVTNDKRGITQFLKELRQLTKASLKQCLFCVEFTGIYNNPLLNVLHRQGAPIWVERAAHIQESMGLTRGKTDQVDAKRIALFAYKNRDEARLWTPPRAIIAQLDRLTAQRARLVKVIKMLQTPLTDTEGFVGKTERKADQQACAASLKSLKADLQSIDQAIAKLAQRDPELKRLFERVTSVVGISQTTAAEIIVATNEFTTISDPKKFACYAGVVPFERSSGQRRGKPQVSHMVNKKVKSLLHLGAMSAIQHCPQLKLYYKRKVAEGKNKMLVLNNVRNKMVHRIFACVRQDRNYDENFSHSFV

SEQ ID NO: 215705 - protein, 345 aa, unidentified
MWHVGLDVHWRTSTGCILDENGREVKTATVKGGWDKMLAWLDREVRRPFAICYEASCGYGALYDRLRLKASRVVVAHPGQVRLIFRAKRKTDRIDARKLARLLFLDAVPPVYVPSADVRSWRRLIETRRRLVAKRTRAKNGLRSLLRSHGVRPPMRGLWTRRGLAWLREASWPSEGAALERDLLLEELETLAEQVHRVTRVLDRLGRGHPGVMLLRTIPGVGPRTAEAVVAYIDVPDRFADSRQVGAYFGLVPRQDQSAAVNRLGHITKEGPPSVRHLVVESSWQVIRRSPTARARFQRISGGQKERRKIALVAVGHWLVRCMHAMLRTGECWRETVSAASSVAA

SEQ ID NO: 215706 - protein, 355 aa, unidentified
MTSTKYIGMDVHKESISIAVMNAAGKIVMECVIETKASVILQFIHGLSGDLQVTFEEGTWAAWLYDLLKPHVTKLVVCDPRKNASMKEGNKSDKIDARRLAELLRLNHLSPVYHGEHGLRSLKELVRSYLTITKDLGRVMSRVKAIYRSWGIPCTGKQVYAPRHRAEWLGKISELGVRRRAEFYYQQLDALRALRKQVRRDLLAECKKHQAWKQLCQIPSIGPIRAAVLLGILQTPHRFRTKRQLWTYSGLGIETRSSADHRNVDGHLERAKKQISVRGLNQNCNHDLKNLFKGAAIVASSKPGPFQEFYTTLLTQGIRPEMARLTLARKIATIALIVWKRGASFDAQHLKPQTA

SEQ ID NO: 215707 - protein, 402 aa, unidentified
MAYDCVIGMDVGKYFHHACVLDPQDRQVLSKRINQHEGSLRKLFGTYLADNASVLVVVDQPNNIGRLTVAVAQAMGADVRYLPGLAMRQLSRIHVGNSKTDVRDAYVIAHAGLNLPDALRSVDRVEEVFLQLKVLNGIDEDLARAYTRLINQMRSALVGTYPAFEHVLHGQMIHRKWILHLLAKYGGPTKIRRIGKARLAAFARGHRARNPEPVIDAMLAAIHSQTVSIAGAEYAELGVAMSAKDALAKLEHRKEIEAQVLELIQDIPQTEILLSMPSIGPRSAAQILMTVGDMSDFPDAAHLASYAGLSPRTNQSGTSIMSNSPNRAGNKKLKNALWQSSFASIRFHERSRQFYERKRKEGKRHNAAVVALARRRLNVLFAMMRSGELYRDISTVQEAAAA

SEQ ID NO: 215708 - protein, 435 aa, unidentified
MKRIRKNASGIDIGAKKVFVALENQPVVSYFTFTEDFETLRDYLLENKIESVAMEATGVYWVILYAILEESGIDVWLVDGRETKQVPGRKTDIKDCQWILQLHCYGLLNRCFVADPDIKELRSYMRLREDHIRSASMHINHMQKALTEMNIRLKEVLSQIQGKSGLTIIEAILAGERDKDVLVNLCHGSILKNKKELILKSLQGRYSSTGLFALKQAYEAYLFYNNQIKECDSQVNRVVNRMGDYGNEQLETRSRKPIRHHKPKIEKFGSNMLSIFDGKDATLISGITDYTWLQLLSETGRDLTKWTTEKHFTSWLGLAPGQNNSGNKRKRPRKKGRPAAGQIFRIIAQSLINSKDIAIGAYGRRLRARKGPSIAIKAMARKLAELYWRTMVKGLDYAEYGVKKYEQQLIAQKMKTTLRLAKELNLQIIDNQVYV

SEQ ID NO: 215709 - protein, 328 aa, unidentified
MQPGVPTKGLMLEDKPMTDKPIVGIDVSKEWLDLAVAGDGKVERIDNTEQAIERWLKRAKPGLVAFEPTGGYERVLQRCLRARGIVFVRVHPNDVIAYRKSRGIKAKTDRIDARLIAEFAAEVSSRRGLKLSIAGDDALREMVSRRRQILQAIQAENCRLAIADTKAVRKSITSVIASLNRNQKAIEAEIAQRLKADKQACELAGLLQTVTGIGPIGATTFLADLPELGHLSGKQIAALIGVAPLTQQSGKTNRHSRTGYGRPAVRAILFNAARAAIRHPSPFKTFYDRLVIQNHKPGKVALFAVMRKILVTANAVARDRQPWRFSEA

SEQ ID NO: 215710 - protein, 343 aa, unidentified
MQTITTIGLDIAKSVFQAHGIDAEGKVVLRRQLKRRYVVAFFQKLPPCLVGIEACASSHHWSRELQALGHTVRLMPPAYVKPYVKRHKNDATDAEAICEAVTRPNMRFVATKTPEQQSCLTLHRTRHLFIRQQTSVINVIRAHLAEFGIVAPVGRNGVEQLLEVAADASDKRLPDVARACVAALGAQLRMLRAQILQFDRMIMAWHRSSEASRRLDNIPGIGPVLATALVASVADPKMFRSGRDFSAWIGLVPKQNSSGGKDRLGHISKRGDRYLRSLFTTGALAVIRYAKIHGTRHRPWLTALLARRPTKVAAIALANKIARMAWAIMARGDRYREPVALAA

SEQ ID NO: 215711 - protein, 360 aa, unidentified
MTTSIPSKTTVSYDSVKLGIDAHAKYYWVSRQLDGATPQPVQKMTYDELLLFVVKQQKLTPNLVTCYEAGAFGFHLHRKFEQLGIKNYVVQPQDWDERGKGVKNDRLDAAALCQRLDRYQRGNTKAFSTVRVPSEDQERERAISRQRQQLMRERQRISAMGRSLLATHNIHVTGKWWKGKTWTVVQKLAPAWVVERLEVFIIILKPLEEHELKLMHQLQEAAQEQKIPRGVGPLTFEILRREVGDWGRFNNRRQVSSYTGLCPREHSSGGKRRSGSVSKSGNPRVRAMLVEMVWRMMRWQPEYKPLRKWAHVLYSLTPNAAAKKKAVVAIARQLAVDLWRIFTGQCKAETYGLIYLPEAA

SEQ ID NO: 215712 - protein, 312 aa, unidentified
MDSIVIGIDVSKDRLDVATPDGTAQWPNDPDGHQQLIKHFAKWPLEAIVLEATGGYERAAVAELAAAGLPVVVVNPRQVRDFARATGRLAKTDAIDAGILAQFGQAIRPEKRPLPSEKQLQLQQQLARRRQLVGMLTAENNRSQQATDKLVRKTIEAVRKTLRTQLDQMDDQLQRTIEQTPAWREKENLLRTVPGVGPQTALALLAELPELGTCSRQQIAALVGVAPFNRDSGAKRGQRTTWGGRPAVRTALYMATLVATRHNPVIRDHYQRLQGAGKRKKVALTACMRKLLCMLNAILREQKPWRNQFATT

SEQ ID NO: 215713 - protein, 344 aa, unidentified
MDITTTGLDLAKSIFQVHGVVASGEVVVRKALRRAQVLPFFAKLPRCLVGIEACGTSHHWARELIDLGHDVRLMPPAYVKPYLKRGKTDAADAEAICEAVTRPTMRFVPVKSPEQQAALSMHRTRALLVKQRTQLVNMMRGLLAEFGIDIPRGLERALVMARQIVDGADPDVPAEAVKIIGTLSQQMLDIHVRLREIDLDLLRWQRASDVARRLLTIPGIGPIGATALAASVTDPHQFRSGRQFAAWLGLTPLQKSSGGKERLGRISKMGDKYLRKLLIVGMTSLVRRAKYKPETVDPRLADLLARKPVRVATVALANKTARIVWAVMVRGETYRADHAPALAA

SEQ ID NO: 215714 - protein, 343 aa, unidentified
MDHFVGLDVSVKETSVCIVDEVGKIVREVKVASEPEALLAVLKKPAYRFKRIGLEAGPLSQWLFGALAEAELPVVCVETRHMQVVLKAQINKTDRNDARGIAQMIRAGLYRPVHVKTLRSQKLRMLLTHRKLLQSKAIAIENDLRGTLRNFGLKVGIAGTVKFEARIRELVENFPDLAVLVEPLLIVRRVLHEQISVLHRRLLAIVRDDAVCRRLMTIPGVGPVVALTYRATIDVPARFKNSKAVGAVFGLTPSKYQSGEINRTGAISKCGDEMMRVMLYEAAQVMLTRTNKWSWLKAWAMKIARQRGMKKAIVALARRLAVIMHRVWVDGTEFRWTRKVVAA

SEQ ID NO: 215715 - protein, 422 aa, unidentified
MNFGPVVGIDVSKRFSDMCILSPDNQIFAQTKIYHDSTSMKRAEILLKKATEAFGSCPAVVMEATSHYHLILFQFFSDCGYNVLVVNPLQSNSMKDFSIRKRKTDKVDALKLAMLYRTKTLRPSQIPQSAIRVLRLLCRERVELLNDVTRYKNRLTAFLDQIFPGYDKVFSDVGSITSRAVLSHFPTPAILLASDEYELVEVIATASKSEYKFAKKKAEALIKTAETAKVLGIHTCADESMILSIIPMLNTLSDSVTYLEQSIGNLLAQVKTVRKNVELLQTIPGVGPHSASLIMAEIGDISLFKKPKQLAAYFGLDPSERQSGTFRGTKNKLSKRGSPYARAALHMAVVNAVFKHANAPAANPVLSGYYENKCKTKPAKVALAASMHKLIFIIFAVLRDQKPFELRTPEQHAREQGFIKAA

SEQ ID NO: 215716 - protein, 347 aa, unidentified
MLADQLDYIVGVDPHRDVHAVAVVPVPSGAVVFEASVAASSDGYARALALVEEHSPGRRAFAIEGTGSFGAGLTRFLTGKGERVLEVGRLRRERRSGGKTDPLDAVRAARSVLAQERPATPRAGGERQALQALVAAREGAVNAKRAGLCQLRDLLITTPEPLRSELRPLTRARLLQRLAATRAEGRRDPELRGSMLALRSIARRVLQLTGEERELGREIETITRKLAPQLLEQPGVGPHSAAQVVLSWSHRGRIGSEAAFARLAGAAPIPASSGQTIRHRLDRSGDRKLNRALHMILVTRKRSHPATIAYIERRLQEGKTRREANRCLKRYLARNLYRLLEHPPIRT

SEQ ID NO: 215717 - protein, 396 aa, unidentified
MDVHRSFAQIAIVEDGLCRDEGRIGVRPEDLRAWAATLAPDDEIALEATTNSDAIATMLRPLVRRVVVSNPRKTRAIAEAKVKTDKVDARILAQLLAVDFLPATWVADDRTRMLRRLVMRRTHLVRQRTRLKNQVHGTLSRNLVPTCPHADVFSGVGRRWLATQTLPADEWRSVDALVRQLDFHGDELADVERDIAIEAINDPVVARLMTVPGIDVIVAMSVVAAVGDFSRFEDPDRLVAYLGLNPRVRQSGNAPAVHGRITKAGPAQARGMLVEAAFSASRAPGPLRAFYRRVKDRRGFQVATVATARKMAVLCWHLVTKGEDYAFSRPSLDAHKRRRLELAAGAPSRRGPVRGATRDYHIKQLRDQERAIVEHAERAYEVMVAHWQPQKSATNA

SEQ ID NO: 215718 - protein, 351 aa, unidentified
MNTIDYVGVDYHTKFAVATRMNKDGDIISTDKIDNTKQDIRAYFSQLPQGSRVALESTGNWYAFVEWCHDLPLDLVLSHPQKTRVIAESRIKTDTIDSKILADLLRTNYLPQSYLAPAEVRDIRELIRFRTTLVRMKALFETKIYNAVYKNGEKIMATRPDGRKARAELAKMDLRPVYQDEINSCLAVCDYFKTQIKQYDEEVERKAVLDDDCKLLMTIPGISFFGALLITSELGDWKRFPSSRKLASYAGLVPSTYASGGRTRHGSITKQGSKNLRFILLQAITHLARRDSRFGRMYTRIKIKHGAKTARIAVSRKLLCVIFAMLKSRQSFQITKDRQHVKTAQSSDVTS

SEQ ID NO: 215719 - protein, 344 aa, unidentified
MGEVSTIGLDIAKSVFQVHGVDGTGAVLMRRRVGRSKVLEFFAGLSPCLVGIEACPSAHYWSRELQALGHTVKLMPPSYVKAYLKRSKNDANDAAAICEAVTRPSMRFIPIKSEQQQSGLMLHRTRQLLIRQRTMLSNAIRGHMAELGIISAKGRNGTAELLQIIAANVTDERIPPVARFCLELLARQYLSLVAEVSSIDKRIHAWHRSCQESRRLEEIPGIGPIAATALVAEIGDWGTFRSGRSLAAWIGLVPKQHSTGGKERLGSITKQGNRYLRWLLVAGAMAVIRYARQHGTKRAWLTRLMDRRPAKVAAVALANKIARMAWAIMVRSERYREPKLLLAA

SEQ ID NO: 215720 - protein, 313 aa, unidentified
MSQNTMTTIYTGLDIAKLNLQLHLAGRIHDLPNTAAGHRRLLKLLATQPGVHVVCEATGGYERDVVAALHKARVPVSVLNPARVRHFARATGQRAKTDHIDAAVLSAYGQALQPKPTAPRTQQEQQLAELIRRRVQVLEVLVGQRQQAERLTVPALRRQAQSLVRRLQRDLEQIETQLKELRTQAAALDTKVQKLEAITGVGTITALAVLAELPELGTLNRRQAAALAGLAPHPRESGQWHGRRSIGGGRAPVRRALYMAALVAAHSNRQLKEFYQRLRAAGKPAKVALTAVMRKLIVLMNHILKNPNFVPQN

SEQ ID NO: 215721 - protein, 322 aa, unidentified
MAMLSFGGIDVSKDRLDITVLPDEQCSSVSNDAAGWAELIEQLRGSSITAIGVEASGGYERGVVRALLAAGMSVRQINPFKLRQFAKASGTLAKNDRLDARMIASFVAIMPTRPVQRQAPMIEQLAAMLTVRRQLSDHKVATENASRLLEGAMLQRLSRRRVAGLTADINLLDQRLVEIVTADAALAHRFWLLTSMPGVGAVLACTLIALLPELGQMSRKQVAALVGLAPYDFDSGKLKGRRCIWGGRARVRHVLYMAALSASNWNPALKAFHDRLAATGKKPKVVIVAVMRKMITTLNAMLRDGTAWVDRYSGRRSASTAR

SEQ ID NO: 215722 - protein, 420 aa, unidentified
MKSFVPVAGVDVSKRFSDLCVLSPDNNVLLRQKIYHDMVSMKLAEKKLHEIELEYGTRPVVVMESTSHYHLILFQFFTDAGFEVVVVNPIQSGALKNINVRKVKNDRVDAYRIAMLYRLKVLRPSQIPTSSLRGLRLLTRQRSELKGDVARFKNRLTAYLDQIFPGYGEVFSDVGGSASRAVLHMCPTPEELLNADGSLLAKVICEAGNKGPKFGAEKAAKLREAAGSAQVIGVRSASNASLIKNVLDIIEGLLAAIQRIEGEIKELVTQDTRLDEDVKLLCSIPGIGFSSAVVIAAERGNISLFGKPKQLAAYFGLDPGERQSGTFKGRKNKLSKRGSPQVRAALHMAAVSSVSRKRDGTYRNPVLAEYYERKCAEKPCKVARVAVMRKLSNIIYAVLRDRRPFELRTPQEHMALLAAA

SEQ ID NO: 215723 - protein, 411 aa, unidentified
MQVVYQRCCGLDVHKKIIVACLMVMGVDGRLSKEIRSFGTMTQDILALSDWLLAAGCTHVAMESTGSYWKPVWNILEGKFELLLINAQHIKAVPGRKTDVRDCEWIVELLRHGLLRGSFIPDREQRELRELTRYRTSLIGERAAEVNRVQKILEGANIKLASVASDVMGTSGRDILAALIAGSTDAAAMAELARGKLRRKLPELRQALAGQMGAHQRFMLTEQLAHIDDLDETIAHLDREIGERMHPFEELITRLDAIPGVGRRTAEVIIAEVGADLSRFPTAGHLASWAGMCPGNNESAGKRQVGKTRKGDSALRVALIEAANAASRKRDSYLQAQYQRLVARRGKNKAAVAVGHTILVIAYHLITNKESFYKDLGAHYFDERDREHIERRLVHRLEALGYAVSLQPVAA

SEQ ID NO: 215724 - protein, 409 aa, unidentified
MRYYLGVDWADQTHAIWVVDEGGTKVATRTVPHTAEGLAEWGRQLDEWRAHGIELWAAIERPEGRVVDFLLDHGVVVYAVNPKALDRARDRFRQSAAKSDPFDARVLADFLRTDHAHLRALQPSSEAAQELKLLTDDYQRQIRQQTRLVNQLTTTLKAYYPRGLEVAEVTTALAREFLQAYPTPATVTALTARQWQRWARTHRLSETRTQQLWVVLQQPQLPVPPHVVRAKARLMQSLVAQLTVVLEGVTAYREAIEDLFARLPAAQWIRTLPIGDRGITAPTLWARLGDAPGRWQSFRHLQAQAGTVPVTIRSGKQQVVRFRFACDKSLRYVVDHVAFLSLRWSEWAQAYYAEQRARGHSYRQALRALSAKWLKIIFVMWERQIPYDEQYHLAVMARQQLRQRQEKVA

SEQ ID NO: 215725 - protein, 421 aa, unidentified
MGKLIERCAGIDIGKRFLVCCVMTGAAHEEPRSETRRFDTTVPGLKRLRNWLNEERVTDVVMESTGSYWIPVFNLLEGHVTVVLANPEEVKNRKGHKTDRKDAGHLADLLRHNHVKSSYIPAQPVRQLRDLTRRRVQLTQDATRERNRVQKLLEQVNVKIGSVLTDVFGVSGLHMLLALLDGRAAPEEIAGLARGSAKRKTPQLIEAIEGNRMSDHVRFLIRGCLRHLACLEEEVEELDTEILRRMQLSTFQKAFTLLQTIPGVGQLSAATILAETGPDLDSFPTIEQMASWAGLCPGNRESAGIQKGPQTTHGNPYLCTALVQCAWAATRKRDSVFRSRFQRLAPRRGEKRAIIAVAHHMLIILYCMLKRGVPFLGAEHAPKQRRRERRAHHHLRCLRRLGFSVEIRLSSESTPPDTISR

SEQ ID NO: 215726 - protein, 314 aa, unidentified
MTDPAETFVGIDVSKAQLDVAVHNQPSSWQAANTEAGIAELVKQMQAMNPTLIVLEATGGFELRLVAELAAAKLPVVVTNPRRVRNFARSTGKLAKTDKLDAKMLAHFAAALRPEPRPLPSAQEEQLTALLTRRRQIVDMLTVEKNRLHTVRTPMRSDIEEHIAWLTEKLAKLDADIDQFVQGSTLWQEKATLLKSVPGVGRITASTLLAMLPELGTLNRQEIAALVGVAPVNKDSGRKQGKRRIFGGRATVRSVLYMAALSAKKHNPKIKKFYEHLLKQGKEKKVALTACMRKLLVILNAMLRTKQSWQAEAA

SEQ ID NO: 215727 - protein, 379 aa, unidentified
MIKGEASMKQNIIYVGLDVDDVQYHGSALNKQTGEVLTFKCRPTLKGLLNQLDKLNKYFPNSILRICYEASYIGFTLQRDLTEKGYHCDVIAPGSIPSPRGRSIKTDRIDAAQLAQFYANDLLTTVAIPESEHEQDRDLIRTRQKLVEQRSALRRHIHGLLRRHGRHYCAETKNKTHWNVHHHCWLNRVAEGFSGSLKINLKLLLGELKHLSTILSEYDKEIESLAKSPRYEKQVLALTCYKGIKNLFALTMICEIGDVKRFPHPRQLTSWIGMDIREYSSGGKHNRFGITKQGNRYLRTAFIEANQRGYRSPMITKDLKARRKNTEPELIHIADRCLKRLNKKGKHLLHAGKHPNKVKVACAREMIGFVWESLNKVAA

SEQ ID NO: 215728 - protein, 343 aa, unidentified
MRLFVGLDVSLEKTAICVISEHGKIVREAQAASEPEALLRWIGEQDGSIAAIGLEAGPLSQWLHRGMDEAGLDVVLMETRQVKGALKAMPSKTDRRDAEGIARLLHLGWFRPVHCKSVSAQEVRAVLGARKAVQQGFIALEMSLRGLLRNFGLKVGTISRGRFEYRIRELAAGNPMLEAATGPMLRARAALRKELAGLERSVRQLAQDDPVCRRLMSMPGIGAVVALTYRSAVDDPARFTSSKKVGSWVGLTPSRNQSGERDVSGGITKAGDVNLRRALCQAATVMMHRGRSTWLRTWAAQVARRRGGKRAMVALARRIGVILHRMWVDDTDFRSDIPIPHAA

SEQ ID NO: 215729 - protein, 402 aa, unidentified
MAKVAGIDWASEEHALCVVDEAGLPVRERLVRHDEKGIARLCRELVELGVLRVAIERPDGILVDRLLETGITVIAVHPNQAKATRDRYAVAHGKSDRFDAFVLAELARTDSHRLRAIRPDSDETKALRALVRTREDLIKARVELANQLRAQLEAFWPGALVFWHVDTPISLAFLRRYPSPADAKGLGPKRLEAWLARHSYSGRRRPEALLETMRQAPAGRAGALEAEARRVAVLGLVGALEPIVAEIGALTKQIGGALRSHPDAAIFAPLFRDQKTVVCPAALIAELGDARERYPTEAALAADAGMSPVAVESGKRRTATFRRACDKRLRFAVATLADSTRHWHPWAKEVYRRARARGQDHPHAIRTLGRAWIRVLWRCWQDGVPYDPALHGNLRRLQTAGG

SEQ ID NO: 215730 - protein, 342 aa, unidentified
MEHYVGIDVSLEWSSVCVVAANGKIAREAKVASEPQALIAWFGSLGFGLERIGLEAGPLSQWLFAGMKAAGLAVELLETRHVRKAFEAMPVKSDRNDARGIAQLMRLGWFRPVHCKSMSAQETRSLLTARKLVQSKLHDVENSLRGILRGFGLKVGKTTGQKFAGRIEELVAGHPHLQTIAKALLAVRAVLRTEFAAFEKQTRRMVRSDMQARLLTSIPAVGPIVALTYASAIDDPARFKSSKQAGAHFGLTPKKHQSGETDYTGRISKIGDASVRTALYEAAHVMLIKPVKGCSQLKSWAMRIKRRAGMSKAKVALARRLAVIMHRMLADGTPFNAAAAAA

SEQ ID NO: 215731 - protein, 365 aa, unidentified
MIVIGADTHKSTHTLAAVQALTGRILATKTVDADAPGMLAAWRWSHTLGDGERVWALEDCRHVSGRLERCLVGQGERVVRVAPKLMGQTRRSERRPGKSDEIDAVAVARAAIKEGIEELPVAFLDEPSFEIRLLADHRDDLVAERTRHQNRLRWHLVELDADLEAKLPARALDRECWVERVSRRLAKLEQTARVRVARDELRRIRALTRAERELERELRAAIGTLRPDVLAEQGIGTITAATLIGHTAGAARFPTDGHFARLAGAAPIPASSGRSQRVRLNRGGDRQLNCALHRIAVTRARISPHTRAYLDRKLAEGKTNAEAYRCLKRHLARRVWHLLTQAPDPRPAPPLTIHCNTPAPTPALT

SEQ ID NO: 215732 - protein, 429 aa, unidentified
MNYNQNHKISQVTPSTLVVGIDIAKDKHVARAQDDRGYEFGKRLIFENRIEGFELLINWISKLQKENDKTHVIIGAEPTGHYWMGLGYYLASKDYDFVLVNPMHVKKSKELDDNSPTKNDTKDARVIAQLVKDGRYSIPNLLDGIYAELREAIKLRDQLIKQQGITEGRIQNNIQRYFPEFNDVFKDWDGKTALYTLRAFPFPSDIRDKTPEDILAEWKTVVKRGVGIKRAASLVEKAKKSIGIGIEIGLRFAKRELHSLLDQYELYADQLEELNQEIKTLLEEIPGAKEMLAIKGLGVTTVAAFFAEVGDLSNYHHPQQLVNMAGLSLREHSSGKFKGETKITKRGRKKLRKAIYLAIRPLVANNPTFQSLHKYYTTRPENPLKKQQSLIALCGKLLRVLFVIGQKQCEFDGSKLLKGLPQIETLQAA

SEQ ID NO: 215733 - protein, 315 aa, unidentified
MNTLPEKIPAVYVGLDIAKATLQLHCQNQPCPLAHTPEGHRHLIQLLRVVPGAHVVCEATGGYERPVVAALQAAAVPVSVVNPAQVRHFALAQGGRAKNDPLDAAVLTAYGHALTPPPTPLPDAVLGELRALVQWRDHLKEQLVRTRQYSQHLTARFAQRQQTKLIQHLEKQIAAVEKELAAALARAPRVQDQVKELAQLDGVGRLTAVSVLSQMPELGQLNRQQAAALAGLAPWTRQSGPWEGQRHIAGGRAVIRRALYMSAVGLARQTKTTLGKFYQRLRLAGKPAKVALTAVMRKLLLQMNQTLKDHALKTT

SEQ ID NO: 215734 - protein, 352 aa, unidentified
MLIIGCDYHPGFQQIAFVDTETGELGERRLTHREEAEQFYGTLKERGVRVGMEASGHARWFERLLRELQFELWIGDAAEIRTKRVRKQKTDRQDAQLLLRLMMEDRFPRIWVADAENRDLRQLLWHRHRLVQMRTRVMNQLHVVALNEGLRRKKALWRPAGRNELESLILAPWASRRRQDLLDLLDQLTPKIQELTRALEQEVEKRPVTRRLMTHPGVGPLTALAFELVIGTPERFHCGKQIASYVGLVPSEESSGDRRRLGHISKQGNALLRFLLVEAAQVTVRSHPQWRNKFFHLAMRRGRKTRRSRWPGNLRFICTGCGARDGITSRGRSSVRTRESSEIAMVCSRSPA

SEQ ID NO: 215735 - protein, 467 aa, unidentified
MTPHKDYCLDPRPPARTPLLPQSPVLSEALQVCHPHAAGIDIGEAEHWVAVPPGCDLQPVRRFGTFTADLDALADWLIDCGVTTVAMESTGVYWIPLFELLEARGLQVLLIDPRQAKRAPGRPKTDRLDCKWLQRLHAYGLLAGAFRPADQVCVLRAYLRHRHMLLTYAAHHIQHMQKALQQMNLKLTQVVSDITGVTGMAVLKAILAGERNPQRLAQLRNPHCHHETDEIAKALQGNWRAEHLFALRQAVELYEVYHQQITQCDQQIKTHLATFGDHSDGQPLPPKARRHKKRNEPRFDARTSLYRMAGVDLTTIEGIEEGTALVILSEIGTDMTRWPSVKHFCSWLGLCPQHKISGGKVLSRRVRPGAQRVTVALRLAARSLHHSQSALGAFFRRMKARLGTPKAITATAHKLARLVYSLLQHGTAYVQQGMEAYETHYRQRTVKAMARQAKTLGYALVPLAEQG

SEQ ID NO: 215736 - protein, 353 aa, unidentified
MIGVDPHKGSHTAVMIDRAEMVLGQVRVRASAAQAERLLAWASAWPERTWAVEGAHGVGHLLAQQLLAAGERVLDVQPKLGARVRLLATGATNKNDPNDARSVAIAALRSPAGMPVRPDDHAAVLKVWSKRHRDLSRSRNQVVCRLHAVLCDLIPGGVSKRISAAGAARVLDRTEPSGAVQQARHELAAEFLADLRRIDAQLRETRKKLATAVRASGTTLTEVFGVGPAIAATAIGDVREISRFPSRDHFAAYNGTAPTEVSSGNRVIYRLSLRGNRRLNHAVHMAAVTQIRYKHSDGRAYYDKKIAEGKTPKEALRALKRKVSDAIYKHMKADAARAAAGPGGHPGTTLPPA

SEQ ID NO: 215737 - protein, 391 aa, unidentified
MIFVGIDVAKDKHDCFIISSEGEVLFKPFTIENTLDGFDFLFDRISSVTDKLDKVKVGLEATGHYSYNLLGYLLAKGLTTFVINPLHTNLYRKSLSLRKTKTDKVDSRTIAMMLMSDVELKPYSNTLYHNEELKSLTRYRFDKVSERAKLKTSVARLVNILFPELEKLVPTLHIASVYALLSEFPSAHHIAVAHLTRLTNLLYYVSKGRYNRDKAVEIREAARRSIGSVMPAKSLELKHTIKLIDELTSEINEIESEIKVIMDEINSPILTIPGIGLAMGAMIIAEIGDFSNFASPDKILAYAGLSPSTYQSGQLTNCYSHMEKRGSRYLRYALFNAAKYVCNWDDTFKTYLAKKRSEGKHYNVAISHAAKKLVRVIYHLEKSKQVYTIAA

SEQ ID NO: 215738 - protein, 351 aa, unidentified
MLIIGVDYHPSFQQIAFFNRGTGECGERRLDHSDGEVEKFYRGIQSQGVPTRVGIEATGYARWFERLLAELGIELWIGDAAEIRTLRVRRQKTDRQDAQLLLKLLMEDRFPRVWIPNPENRDLRQLLWHRHRLVQMRTRILNQLQAVAMNEGERWKKRLWNKQGRALLENLPLAPWASRRRQDLSELLDRFNPVIAELTTAIEREAHQRPEVVRLMTHPGVGSLTALAFVLIIGDPFRFARGKQIASYVGLVPCENSSAGRQRLGHISKQGNKLLRFLLVEAAQVAVRFDPDWRRRYLHLAMRRDRRIAKVAMGRKLAVRLFWMWRKGWDYSQFVEFGSHAGQLERTPGGQ

SEQ ID NO: 215739 - protein, 517 aa, unidentified
MAPRKGKTRAVRTLQQPLQPTPTPPIEKPTPAAAAAAAPARPPDAAADLRRAARFVEQTRQQAEACAQVAGLPVQHPHAAGVDVGDASHWVCVETTPDGSETVREFPAHTAGLRQLVAWLRQCGVTTVALEATGVYGHVLFLTLLEAGFPTITAPPQFARQIKGRPKTDRRDCQWIQRLHKHGLLPSVFQPDDATHTLRDYVRQRANLVRLSGQHVQRMQKALELMNLKLTKVLGDVTGVTGLKIIHAILAGERDPRKLAKLRDRRCQHTQAEMAEALDGRYRPEHLTELRCCLAMWEKYQEVIAALDGEIAAHLRTMRRQTELPPLPPKTRQRGRKPHDPRFDVRTALYYATGVDLTAIEGIDELHALTLVSELGTDFSKWPTVKQFASWLGLCPNWQKTGGKVKSSRTRRGKNRAAHALRLAAWSLMRNSSALGAYLRRQRSRLGAPKAITATAHKLARIVYHLVRYGAAYVKETEAAYAEQVRERLEKQLQRRARELGFEVKKIEPAAEEAEAE

SEQ ID NO: 215740 - protein, 392 aa, unidentified
MTTAATHHEQSNTTEAMLFVAFELSEKTWKLGFTTGHGQKPRERTVTARHHEHVLDEIAQAKRRLGLPETAPVVSCYEAGREGFWLHRFLQAHGITNHVVDSSAIEVNRRRRRAKSDGLDVRKLLSMLMRYEQGERHVWQVVKVPAVEAEDQRHLHRDLETLKQERASTTTRIQGLLSSQGIRVTSLSNLPEQLEALRLWDGSPIPPGLRRRVLRVYAHHTFLSEQIAAVEAERRAQLQASTDANIEKVRQLMQLKGIGINGAWLLVMEFFGWRAFKNRREVGGLAGFTPTPYQSGESAREQGITKSGNRHVRWMTTELAWSWLRFQPDSALSVWFRERFGGGGKRLRRIGIVAVARKLLIALWRFLETGVFPEGAELKDQAGHDGLCTSAD

SEQ ID NO: 215741 - protein, 363 aa, unidentified
MEREKRRYVGIDLGKREYTMAIIGKNGKMSISHGKMNDSGRQAMYHLLERGDKVALEAGNLAFITAREIQERVGSEVRVLNPAKLPFIWAAPTKTDKEDAMKLAHLVEERRDEKLPIVPLPGEKEMTRRKVLANYSREMKSRTRLINLLHAMFVHQGQTTIVRKNLATAKNRQEAVILLYGQEREEADWILKHLELYEQRIKELKGKIQKEARKDEDMKKLQTIPGVGPVVAYAFAAHVGDGSRFSKGAQVSNYIGFVPRLDYSGTIERHGHITKHGNGYLRGLLILAAWAMVRSRKDSSLKERYICLTMFGGRSKKKTIVSIGRRLTELMYSVLQNKTNYEAHIWAGRKEYLSKLKQLKNSA

SEQ ID NO: 215742 - protein, 416 aa, unidentified
MEMIVERPGALDVHKESVTACVRVPGADGKRAQHVEQFSTTVRGLLVLLDWLKAHGVTQVAMEATGVYWKPIWAILEDDFDCLLVNARHVKQVPGRKTDVQDAAWLCQLLEAGLLKRSFVPPKPIRTLRNLTRYRKAQIAERQREANRLHKILEDTGIKLDCVATDILGVSGRLMLDALCKGTTDPLVLADLAKGRLRAKIPALQEALEGRFSSEHALVVSAILSHIDFLDEQIERLSDAVEEQIRPFAAAVELLCTIPGVKQRTAEVIIAEIGTDMSVFPTAGHLVSWAGLCPGHDESAGKRRSGKTRKGSKWLRIALLESALAAANAKDSYLAAQYRRLKARRGHGRASIAVCHSILAAAWHMLQTGEVYRDAGADYFTHLDPERQTRHLVRKLEALGHQLTLAPTQHPQEIAA

SEQ ID NO: 215743 - protein, 341 aa, unidentified
MMSNITTIGLDIAKSVFQVHAVDTAGEVVVRRKLTRGRVLAFFESLPRCLVGIEACSSSHYWARELIALGHDVRLLPAQYVKPYLKRQKNDAADAEAICEAVTRPTMRFVPVKSPEQQSVMMLHRVRLMLNRQRTQISNALRSHLSEFGVVAPIGRNGIEQLLVVINDENDARIPADARLCLRMLEAQLRVVKQQILENDRRVRASARESELGRRLMEIPGVGPLLASAFVATVADPHAFRSGRCLSAWIGLVPKQNSSGGKERLGSISKAGNRYLRQMLVVGAMAVIRFAERNGTRRPWLVQLMARRTTKVAAVALANKTARIVWALMTGGERYREPAIT

SEQ ID NO: 215744 - protein, 411 aa, unidentified
MDVIVERCAGLDVGKEEVVVGVRTPGEGGRRHQEVRTFATFTGELEALADWLGAEGVSQVVMEATGQYWKPIWYVLEDRGFDLSLVNARHVKILPGRKTDVADAAWLAELLEHGLLRSSFVPPAAIRELRDLTRYRKRLIQEHTAECQRVQKALEDAGIKLDSVASDVLGVSGRAMLRALVAGERDPEVLADLARGTLRKKIPLLRQALSGRFNAHHALLVRLAMDHLEHLEGMIAALDGEVDRVIAPFAEARDRLDTITGVGRQAAECIIAEIGLDMTRFPTAAHLASWAGVCPGNNITGGKRRSGKTNKGNRWLGEVLHECAWAAAHSRNTYLGAQFWHLARRIGKKKAAVAVGHSILVIAWHLLSRNVDYDDLGDDWFTRGADPERRKARLIKQLQDLGYAVTLRPAA

SEQ ID NO: 215745 - protein, 338 aa, unidentified
MKYVGVDLHKNQFTVCFRDEKGKEELREYSTEKEGIEKFKKRLDKRTKIAFETTGNSKYFYDQVAGSVKEAKIINTNKFKVISKSVKKTDKEDAKVIAEHLSKDMLPEVRVPNKEQRELNSLIQTRDQLVKTRSRLKNKIHGILMENGLKSEREMFSSDKALQRVLASDLSETNRFELEIIVEQIRSISESIKKIDEKIKDKGKGLKGQKNLQSITGIGELSSTIIINKIGDIKDFSDSKKLVSYIGFAPSVRDSDKTIRHGHITKRGDKILRTTIVQVTLIAIRYNQYLRSFYLKLKKAKGSGKAIIATSRKMVDIIYRTLRYNLVFEDFNNGVLVS

SEQ ID NO: 215746 - protein, 357 aa, unidentified
MKKRLNADTINVNGKTVNVGIDVHKVSWHVTALAEGIVVESATIKPSYRVLKKLLAQYKGARIRIAYEAGFSGFNLYDELNADGIECIVVSPSLIPVESGNRVKTDKRDSRKLAQYLENNLLKRVYVLSKQERAHRQYVRTRRQLSNHRTDVMRQIKSLLLFHGLPSFDGNRGFWTRPVLRALRSITPDEYVSRSLNTLIDLYEYLTQQVKHMTREVRRLARTEKYARRVELLTSIPGVGVLSAMEILTELQDVSRFATADQIAAFLGLTPSQYSSGQHVRMGKITHAGNHRLRTRMVECSWIAIKKDPGLNKTYQAIKMRRGGKRAIVAVSRKLIIRIRRILLDEVTYRLDYAPAA

SEQ ID NO: 215747 - protein, 367 aa, unidentified
MGGADMAQPKSVVGLDVHATQTHACLLCPETGELRSRRLSGPPRRALDFLEGLDAAILAVYEAGPTGFGLARGGAERRLDVRVCAPGSIPRAPSDRIKTDRRDAERLARLCLAGELRFVRVPSPEEERFRDLVRAREAIRADLMRARHRLGKFLLRRELRWEGPGSAWTQAHWRWLEAIEFADSPSRAVLEDYLAAVATLQQRRSVSERAIEELWPQSPWAETIARLRCLRGINTLTALGLCAEAGDLRRFERPAALMAYFGIVPSEHSSGERRQRGPITKAGSPHARRLLVEAAHHYRHHPRVGGALEQRQRGVDPRACEIGWRAQRRLYRRWQRLRVERGKPANVVRIALARELGCFVWEVGQLR

SEQ ID NO: 215748 - protein, 320 aa, unidentified
MSASSVVVGIDVAKAHVDVSVLGAKLDAQRFDNQAEAHSALTAALKPLDVALVVMEATGGYETELACALQGAGLPVAVVNPRQARDFAKSMGRLAKTDTVDARMLAEFAAVLLRRDDLARFLRPLADPQQQWLAALVTRRRQLLAMLLSERQRLQITPKGLHPSIEAIVAAIKAQLDEIEAQMVGHVREHFGELDRLLQSASGIGPVASATLIAELPELGRLNRREIAALVGIAPMANDSGSSKGRRRIQGGRFDVRRVLYTAALTATRRNPVVKAFYERLIAAGKLPKVALVACMRKLLTTLNAMVKSNKPWDNSLHGA

SEQ ID NO: 215749 - protein, 393 aa, unidentified
MFIVGIDIAKRAHEAAILAQDGTVVQKPFSFKNDSDGFAKLLSILNAVSEDKTEFVFGMEATGHYWLNLYCKLVDKGFKVHVVNPVQSDALRNLYIRKTKTDKVDAKIIADLIRFGRFSETVLAKPDVVALRELTRQRFYLVDCTSDVKRKVISLVDKVFPEYEEIFSDMFGATSIELLAKYTTPDDLVSVSTARLANFLIKVSKGRFGQEKAQEIKRFAKNSFGSSIFNESSVFSIRQYLEQIELLEKQISDLDKYVCETLKAIPQTLTTIPGIGSTIAAVLVAEIGDISRFESPDKLAAFAGIDPTVKQSGQFTGDKARMSKRGSPYLRRALYLAAVSCNLHNEAMHAIYLKKRAEGKHHNVALSAISRKLVNIIFNLLKTQKSYIMVHPA

SEQ ID NO: 215750 - protein, 311 aa, unidentified
MSNTKIYLGADVAKHTIQYCLLGENFILPNTLQGHRQLLKRIGSIKQPLQVICEATGGYKRGLVEALQGAKVALFLVNPRQVRDFARACGRLAKTDRIDAQILAEFGTCFAPQSNAAPSAASAQLCELVTRRNQLQCAVTQQQNQLEHLRDAALRRAAKGLLRSLQNQIAKIDQRLQASIQSDSSLRARHDRLRQISGIGPVTAATLLACLPELGTLSKGQAAALAGLAPLNRDSGMHRGQRHISAGRAPVRRALYMAALRATQTNPILKSFYQRLRLAGKPFKVAITATMRKLLLAANAALKNPQLALAQ

SEQ ID NO: 215751 - protein, 412 aa, unidentified
MTEESFTWFVGVDWGSEKHHACILDTRGTVVGERQFPHSGVGLAELGDWLLSIAGTTATVAVAIEVPHGPVVDSLIDRGFVVYAINPKQLDRLRDRFSVAGAKDDRRDAYVLGDGIRTDRRLFRRLHVADPRIVELRAWSRLTEELQEERVRLGNRVQQQLWRYYPQMQKITNDLAAPWFLALWVMAPTPGKARQLRRSTVEQILKKHRIRRIDADTVLRMLREPAIKVAEGVAEAARIHLRSLIARLHVVNRELRQAEQKLDQLCAGIGETEGAPGECLQGQDIKILKSVPGIGRINLATLVCEASGPLRSRDYPALRTLCGAAPVTKRSGKSQIVVMRYAAHARLRETVYHWARTATQHDAKSRCRYAALRQRGHSHGRALRGVADRLLGLTCVLLQRQTMFDPHFGQAG

SEQ ID NO: 215752 - protein, 409 aa, unidentified
MLFAGIDWSEKFLDFHLRTAEGKILAQGRVKPSAEGMADLFAELESHAPTSEIGIAIETAHGAWVQALLDRGYQVYPLNPKTVERFREALSANGVKTDKIDRKVLAMFLVTFHKENKPLRPDDPEIIQLRILCQDRLRLVEERSAKVNELGAILKCYYPAFMGFFGDLDSGIALDFLQQYPTQKQFQKLSERRLLNWLSRHRYSYPKRIDEMVGLLKQPALPVAEHLQQAKKTLICYLARSIKTLNAEMAQRDKQINDHLDSLAESDWIRSLPRAGKVLAPALLACLGRDPERFSSVGEARALMGTAPVTKASGKSRVVVFRRGCWKFARRTLQLFADQSRHQCHWAQAFYEKQRNSGHKHHEALRALAHRWLKILLAMRRSGSLYDEGVFLNSQRRYQLKTPILKTFK

SEQ ID NO: 215753 - protein, 321 aa, unidentified
MTYIGIDVSKDSFVVAYSPEKNSKTKTFKNTTRGIHEFIRTISKDEHHCVMEATGNYSALLVYLLSEAGITTSLENPLKVKNFARAMLSTVKTDEIDARLIALYGEKMQPAPYKLRSDAILTLKQKRTVIRQLKKQLIATRNLKGSMEVLPFFDAKCKKSIDKTIAFLEKQIKDLEEDLASLAKSEYKKQMDLLTSVKGIGITLAAALIMATGGFTYFDNAKQLTRHLGLSPTYQQSGTSVNFKGHINRNGESSLRSQLYVAAFASLRCNTECKACYDRLRSNGKPGKVAVIAVANKLIRQAFAVVTQEKPYVDGYVSSKK

SEQ ID NO: 215754 - protein, 377 aa, unidentified
MHSENIAAYIGLDVHKETLAVAIAAPERLGEVRYYGTINNEAQAVRQLFQKLQGLYGNILSCYEAGPCGFGLYHQLTAMNIKFQVIAPSRIPKSPTDRIKNDHRDAISLARLLRAGELTPVWIPDLTHEAMRDLIRARAAAKRDSRVARQRILSMLLRTDKRYAGKHWTGKHRTWLANQSFSQPSQQIAFQHYCQSLEQIEDRILQLDQEISRLLPEWSLCNLVCQLQALKGVGQLIAITLVAELGDFSRFSNPKQLMAFLGLVPGEYSSGNSIRPRGITKVGNSELRRLLYEAAWSYRTPAKVGAWLIYYRPDSVTQYSKDIAWKAQQRLCSRYRTLTAKGKKSQVAITAVARELTGFMWDIALAAQSSFSQQKQN

SEQ ID NO: 215755 - protein, 362 aa, unidentified
MIDQRTSVGLDVHARSVVGCGLDVQTGEVLRTRLTPAHEHVIGWLRSLPEPIKVTYEAGPTGFGLARALAAAQIECVVAAPSRLLRPSGERVKTDAKDALHLAQLLAVGQVTAVAVPDEETEAARDLVRARDDVRGELMSARHRVTHLLLRQGIVYSGGAAWTGVHANWLRSQRFPRPALQMAYDAALAALAAAEDRRDRLDEAITQLADDSRFTPVTDRLACLRGISTLTGFGLAVEIGDWTRLSPATIGAYLGLVPGEHSTGENRTQTGVTKTGNSHVRRLLIEAAWHHRPPYRPTTRLQRRWSRAPGAVAAHAAKGNRRLHARWRAFDARHKRPVVANTGIARELAGWCWALAVMDSDH

SEQ ID NO: 215756 - protein, 372 aa, unidentified
MKKDSKRKPRSPQGGASKRSQTGRTIGMDLGDKTSRYCVLNQVGEVVQEASVATTPTALVQLFGAAAASRVALEVGTHSPWVSRLLSRLGHEVIVANPRQLKLITESSRKNDQVDAKTLARLARIDPELLRPIRHRGEKAHMHLIQIRVRAGLVEVRTALVNTLRGLAKSMGDRVPQCDPDALDQTRLQELPPPLRTALEPLVEQIESLTERIQECEGKLEQIARSEYPETTLLKQVFGVGTLIALTFVLTVEDRERFSKSREVGCYVGLRPRRSQSGQSDPQLRITKEGDRYLRQMLVQGAHRILSPRAPDTDLKRWGRKLCERGGRNAKKRAVVAVARKLAILLHRLWATGEVYEPLRNANLVPPEKRAA

SEQ ID NO: 215757 - protein, 384 aa, unidentified
MSNRTATTTTPAKESSTTTTTTATTATMSMLAIDLGKFKSVACRYDPASGNHAFETIATHPSAVHDLLIEAAPQLLVIEACGVCGWVHDLAESLSIEVRVANTLGEAWKWKRVKRKTDRDDALKLAKLAASDQLPLVHVPQLSVRQHRSLIRHRHALIDRRTGIKNTIRSLLDAQGLSMPTRSRGWTTESIRELKTLSRPLDRCDGNTLWRGQLDLELRLLEAVSTLIKEADKRLDQLASQDERVTRLRTIPQVGARLAELVVATLDDARRFKNSRQVSAYAGLVPKQYQSGQMNRLGRITGQGPGLLRRVLVQVAWGLQRRTETRGHAVFERLCHGQRTRRKQAAVALARKILIWCWAMLRDGSTWDDSRGGGGGDRRLPAAT

SEQ ID NO: 215758 - protein, 317 aa, unidentified
MIHLGIDIAKLKFDVALLTQGKFKTKVFANDSAGISACLKWLATHASGPVHVCLEATGPYGEALAYALHDAGHTVSVINPARTKAYAQSLGLRQKTDAADAKMLARFVQTQQPVAWTPPPAELRALQALLRRLDALGDMRTQEKNRLGVAESAVSASIAQHLDYLQAQIDALKAQIENHIDQHPGLKQQQDLLDSIPGIGPATSAWLIGELNLTRFDSARQAAAFVGLTPRMRYSGTSVHDKPRLSKQGNSLLRKLLYFPAITAMTHNPLVRVLCLRLKAKGKHNMAIIAAAMRKLIHIAFGVLKSGKPFDPTLADT

SEQ ID NO: 215759 - protein, 342 aa, unidentified
MTEITRVAIDTSKSVFTIHAVDAQDRPVVRRNLRRLEVAAFFGKLPPVDVAIEACGASHHWGRTLIALGHRVRLIPPQYVKPFVRRGKNDRNDAQAISEAAARPDMPCVPVKSAERQAEAMLLSVRELLVRQRTQLVNALRGHAAEMGLAAPMGDKGLAQLRAEIAADAAMPPAAVLALKMLGGEIDRVEARLAEADARLMALHKAADGVGPVSRRLAEVPGVGPISALNFALRVDAAAFTSARGFAAWLGLTPRDHSSGGKQRLGGITKAGNEQLRQLLVLGASAAIRHARPGRASAWLLALLERKPRKLAAVALANKMARILWAMMTSGEGYRRPMPAQA

SEQ ID NO: 215760 - protein, 419 aa, unidentified
MNKIETKKQRFVNSKTLIVAIDLGKTADIGYCRCPDGKDIKPFEFSNNAEGFKIFWDRVCWMKAAHHLEEVVVGFESTGAYGEPLVHYLRQKPVKLVQVNPMHTKRMKELQGNSPGKTDRKDPKVIADIICLGHALSVVIPEGAAAELRRLTLARERSLQRRTALYNQIQDLVFILFPEFLQVMKDVKSKTAQYLLGHYPTPQDIVACGPEALTLILKRVSRGKLGEARAQALYNGAQQTVGLKEGTRGILLEVEEILSSVEACQRFIEKVEEEMLPSLEQIPYSRSLLSVKGIAEVTVAGLIGEVGDFRQFHTLREVMKLAGLNLFEISSGKHQGNRHISKRGRPLLRKLLYFAAINTIRKGGVMQGCYQRHLAKGMPKTKALIAIARKLLGILFALVRDHNQYVDNYSPEEVLKLAA

SEQ ID NO: 215761 - protein, 437 aa, unidentified
MAKVITFEQVNARAAAIDIGAEKIFVSPDGIEVFIYQTFTADYRRCVSDLQLWGIERVCMEATGVYWIALYELLEQAGLEVCLVNPKEVKQVKGRKTDPKDCRWIQKVFSAGLVRQSYVPSGKLKELRMMVREREDIISMGSAYVNKMQKCLELMNIKLTTVLSQIHGASGIRLIEAIIDGERDPGKLLLLCDSRIIDNKAEKVIKALEGNYNESWLFLLAQNLYMWKLHQQHIITIDKKIEELLDELQKGKSFVEGKVAPKLVRHHQPKITDLHQKLLNIYGVDGNSLSGVNDYTLLRLLGEVGTDMERFPTIKHFVSWCQLAPICNQSGKMQRRIKMRNGSKAGQIFRSIAQGLLNSKHIAIGAFMRRLKAKKDSKIAIKAGARKLAEAFYNLLTKGAAYVEQGVAKYQQQIQQREKAFLEKLASKHNLTLVKIE

SEQ ID NO: 215762 - protein, 346 aa, unidentified
MLDTNTGEFMEITLTHEGNNVREFYSKLPRPVRVGIEATGSMQWFVNLMEELGIECLVGHPAQIRAAEPRKQKHDRRDADLILKVLVENRFPAIWLPSKELQDLRALLRHRHQWVRMRTRIQNALQSIALANGLRRGPSLWSHDGQNTIASLPLAPHTAYRRNELQALYAKFEAEIEKLNQRVEEQACKRAGARLLMTHPGVGPVTALATDVFLGDPARFADSKALASYVGMIPREYSSGGRQRLGGLTKQGNPLLRFLWGEAGAHAVRRDPELQRFYRRKLAQKGFGKASVAAARKLGIRLWIMLRDQIEYNEFCRRGQKQQKSSDACAGMPEKRYGAKSHRHVD

SEQ ID NO: 215763 - protein, 405 aa, unidentified
MSELEKDLVFAGVDTHKDTHTLCLLDHMGRAIGTFRFAADAKGYDALAGKIGGPATCVGVGVEGTGSYGAGLTRRLLELGYCVYEVMVPGRARRKPGRPKSDPADAEVAARQVLARANLSKPKDQSGWTEELRQLMIARDRLVQATAAMINAAKSLIVTAPEDLRRSLEGLSRKNLRNALSTLDPAAGGIILALGSLGKAWDLQDREADAIEERMKRVLEANAPALLAIYGCGTVSAAALAVAGGGNPERLRSEAEFASLCGVAPLLASSGKTERHRLNRGGDRRANRALYQIAVTRMSYDQRTKDYVGKRKRDGKSKKEAIRCLKRYIAREVFRALRNPLEIKGPSWKDLRPARQALGITLVEAGKALNVGFQKVSYAETGRLMNVRFLEEYDAWLKSQAKSES

SEQ ID NO: 215764 - protein, 358 aa, unidentified
MRSTAATGLVVGVDTHRDTHRDTHTAALCDLAGQALAVRQFIAGPGGYAAALAWARQEAGEAGLAWAIEGTRHYGLGLARYLTAAGEHAGEIDASKHAGKRRNGKSDALDAVRAAREMLARPVAAQMRAAGDREALRLLMCDRDNAVASAKTARTLLTSVIVTAPATVREQLRHLSRDRRATVCASLTSPPGADRQTRVLYQTLARLGQRITTFARTAADLQKQISALVEDMTPGLVAAEAGLGALTAAQLLLSYSHHGRIRSEAAFGMLPGTAPVPVSSGRTDRHRLNRLGDRQLNRALQVIAVARMRSHPPTQAYVQRRLTEGKTLREIRRCIKRYLARHFYRALRNQPGLELDRT

SEQ ID NO: 215765 - protein, 341 aa, unidentified
MDHFAGLDVSVKETSVCIVDDTGKIVREVKVASEPDALLPVLTNPTYHFKRIGLEAGPLSQWLFSALAEVGLPVICVETRHMRAVLKAQINKTDRNDARGIAQMMRAGLYRPVHVKTLRSQKLRMLTHRKLLQSKAVAVDNDLRGTLRNFGLKVGVVGKVRFEARIRELVENLPDLAVLVEPLLTVRRVLREQFCILHRRLLAIVRDDEVCRRLMTTPGVGPVVALTYRATVDVPARFRKSKSVGAVFGLTCAKYQSGESERSGRISRCGDEMMRVMLYEAAQAMLHSKRWSWLKAWAMKIARHRGMKKAIVALARRLAVIMHRIWIDGTEFQWTREAAVA

SEQ ID NO: 215766 - protein, 402 aa, unidentified
MNCVGIDISKGKSMIAVMRPFGEVVVSPFEVCHTVNELSELARQLKSLDGETRVVMESTGNYHAPVAWLLHDAGLYVSVVNAMLVHDYGNNSLRRAKTDKKDAVKLANYGLDHWLTLPRYVPEEDTRLMLKSCYRQYQQYSKVRTMLKNNLISLLDTTFPDANRLFTSPPRADGSEKWVDFVAAFWHCECVCGLSEKAFTAKYQKWCKKHGYNFSEDKALDIYASACRHFGVIPKTDTAKLLVEQAISQLRATSAALAALKQEMQSLAASLPEYPVVMEMFGVGPALGPQLMAEIGDVRRFHSKKSLVAFAGIDAPPYQSGQMDIRSRSISKRGSASLRRTLFLVMGVLLQCAPMDEPIYQFMNKKRSEGKPYRVYMMASANKFLRIYYASVKTYLDSLKHD

SEQ ID NO: 215767 - protein, 344 aa, unidentified
MNIIGCDYHPSFQQIAWVNTETGEMQERKLTHGDGEAERFYRQLRGPVRVGMESTGNCHWFVDLLTEMGHEVWIGDAARISAKQVRQQRTDRRDAVHILELLVKDDFPRIWTPSRQERDQRQLLIHRYKLVTLRVRVKNELQHLALNQGLQKGRSLWSKAGQKSLLDLPLQFWAGTRRKNLLELLKQMDQQITMLDQAVKKVAEENERSRLLMTQPGVGPITALAFVLTLGDVTRFRRGKQVASYLGLIPREYSSGGKQRLGGISKQGNRFMRMLLVEAAQAAVRHDPGFRSEYRHRCHHKPKAVAKVATARKLAIRLYWMLRTNTPYPEVVRIESSSRVTLAG

SEQ ID NO: 215768 - protein, 451 aa, unidentified
MSRRIEQSTAKKVKRQLKPTNPHAAGIDIGATSHFVAVPQGTDPQGKEVREFEAFTCGLHELAAWLKVCKVTSVAMESTGVYWIPLYELLEAKGFEVKLVDASRVRNVPGRKSDVLDCQWIQQLHAYGLLSAAFRPEEQICVMRAYLRQRGLLVESMAQHIQHMQKALTQMNLKLQHVVSDLSGVTGQKIIRAMLAGERDPKKLSELRDERCKNSKETIAKALEGTYRPEHLFALRQAMELYDVYQRKLAECDQQIEAHLESFTDKSAGAELPRSAKRPRGNAPEFDLRSALYRMTGVDLTAINGLDAYTAAKVISEIGTDMSRWPTARHFASWLGLCPGSRISGGKRLSSKTKPCANKAATALRMAAQTLYRSKSALGALLRCMKSKLGPAPAITATAHKLSRIIYAMLKTGKPFTEEDDNEYTRRRTQRTIRNLSRTAKTLGYQLVPVL

SEQ ID NO: 215769 - protein, 459 aa, unidentified
MSKKRPAGKSPAPRQVDWKALEIMHPEAAGIDVGGSEHWVAVRPDRDPEPVRHFDCFTADLRAMARWLVEKGVRSVAMQSTGVYWMPVLEVLEEYGLEVYLVNAQHTKNVPGRKSDVQECQWLLKLHTFGLLNNSFQPTDQIRIARTLWRQRGNLVAQASSVIQRIQKVLIEMNVQLSRVLSDLSGVSGMSILAAILEGERDPATLAALVQPEVKATPQEIAKSLEGNWREELLFVLRQEVELYRVYQKKIDDCDLQLRQHLKTFGSVVDLQKQPLGPRPKGKKGSKNAPQFDLRTELYRITGIDWAQVDGIDVLTAQTVIAESGADLNAFASEKQFASWLGLVPTNEQSGGKILNRRTRKVVNRATVALRNAATTLLRSRSYLGAQYRRLRTRLGAPKAITAMARKLACLFFRLIKHGQQYVDKGNEYYESRYREQQIRSLTKRAQRLGLELVIPTAM

SEQ ID NO: 215770 - protein, 344 aa, unidentified
MDATTVGIDLAKNVFEIALADERGHIFDRQRLNRARFDRFFVNRSPCRIVMEACGSAHHHARRLRAQGHEVCLLPAQYARAYVRRNKTDAADAAALIEAARCPDIRPVPIKSPDQQALQQLHRLRSQWMGARTSRINFLRGCLREFGVSISLGPKRAIETVRASLADPAGPVPSLLHACIFELLEEIEALEQRCRHLDRELKRLHLNDPVIERLLKIPGVGDLTATALRASVVDIQRFPSGRHFASYLGLTAREHSSGERRRLGCISKEGDTYLRTLLIDGARSVLLAARSAQRRGLTLDRLRNWALDLQERRGHNKAAVALANKLARIVWASWRHERDFVSHP

SEQ ID NO: 215771 - protein, 446 aa, unidentified
MNYYLGGDVSKGYCDFIILDKSKKVIEQGFQLDDTKESHTILYNILASLLKKESSSVIYAAIESTGSYENNWVKSIQKFQLTLNIHIARLNPYGVSHSSKANMERIITDQISARTVAEYLINYQPKIRFIEEDNFSTLRRQWKYISLLKKQKVQFYGQLESLVYNSFPEILTFCKNGFPNWVLELLLNYPTAERVSRARVKTLSKMPYITNEKAEILISKAQRSVASENNSTIEGIIKSIIEQIIGLDKTIAYQKKMMTNSVSKENLPEVQLLTSFKGIGDYSAIGLIIEIGSVDRFATSKQLASYFGLHPVFKKSGDGTYAMRMSKKGRTSPREILFNVAFTAIRDNELIKEIYARHLKKGMSKMAAIGAIMHKILRIVYGMLKNNESYNPEKDRNDTKVVHELGQKKTDNTRRHQDYDIYAPISSRQSRKRTMIKKELELNVPK

SEQ ID NO: 215772 - protein, 413 aa, unidentified
MKEVYRRSCGMDVHKETIVVCVLPPVGGEGKAIRKVYGTFRNDLVRMRVWLKQLKVTEIAMESTGIYWRPVWNVLEDEGFRLLLVNPAQVKALAGRKSDGRDAQRIAEYLQDGRLDGSFVPTAEVRRLRAMLRHRISLLEQRNEVHNHIRDLFETASVKLSSVVSDLMGVTGRRIVEALIAGEDSPDILSWKVRGSLRKKEKLVKESLKGYFNEFHRTMLESHYKHYQFLTSEVASFEDLIAKAMEPYAGQAELLDSIPGVDRIVAWHLLAELGLDLKTFPDADHCCSWAGMVPGENESAGKQKSNRCRKGNKTLRRVLAQAAWAASHCKKGYLKAYFRRIKARRGWGKAIVATGHKILAIAFRMLRTSTPYRERGDDYFDQLNPARATKRLVQRLQALGHQVQLSTAPGSNA

SEQ ID NO: 215773 - protein, 360 aa, unidentified
MEKITRGVKFGEAARVGVDLAKRVIQVHAVNEAGKVQVTRALKREQFIEWSAQLPRGCMVAMEASSSAHHWARKLNAMGLDARIISAQLVSPYRLQGHTGKNDANDAAAICEAASRPHMRFIPVKSVEQQSMLCVHRLREGIKADRTACINRIRGLLAEFGLVFAQGAQELQKILSEVLEDADNELGTLARLTLQRAQAQWSELDEHLAWCDERIAVHAKTNPEVKAAAALMGIGPVGASAAVATVGDFKQFKNGAQFGAWIGLTPRQHSSGGKSSLGGITKRGDTYLRTLLIQGAKSAVMTAHRRQDRISTWALALRDRSGWQKAVVALANKNARILWAVMTRGEAFDANHLSIKPSGT

SEQ ID NO: 215774 - protein, 412 aa, unidentified
MNERVEKACGIDIHQAFLIATVLDLAGTKETRRFSTCIEDLLNLREWILDRKCQRVAIESTGIYWIPTYTLLEGKVETIVANPYQIKNIPGRKNDDIDSEWIAEVCLNGQIKPSYIPPIEIREIRELTRSHVKITQTRTSFKNRVHKILTRSGIHISGVLTDIFGKSGMIILNGLMDGKKIDQILNEIKNKKIRIKKAQIKESLKGELSQNDIFVIKECLDSIKFLVQKIKEFDSKINQNLKGMNEEMDILMSIPGVGFTTAAAIMAEIGNIEVFSKPKKLVGWSGLAPAINESAGKSSNGHITKKGNKFLRTILVLAANSIAKGKPNKLRFFYQRIKAKKGHKKAIVALARKLASIIHHLLTFKEVYSEEEGKEKKFKVPKFIPVPDFSIDDMIGILCEAGYSINKPAANT

SEQ ID NO: 215775 - protein, 454 aa, unidentified
MAQGSGLTRGDRNRNRRIEAVREAVRRDRAVLAVDLGEDKQVAVVMDHEGRALARKVVKAKAHQLSGLLGWAAERAGKAGFSGLTVACEPTGHRWKALMGLADQAGHGFVCVQSLAVHKEREKDDYTRDKTDHRDAYLIGKLVIRLDCYLPERADEDWARLRHLGARRFALVADVTSCMQQAGDLLGCAWPAPLAAARRPLESVSWLAGMAVITSRCCGDPRRLRKMGYEKFLAAVRRELPRWGGKFVRHSIVQGLWEALAGTGGVAAQRPGALERVHLLLEDWRLLRARLADTEARMTALLDELGLTELVASIDGVSALSGAVILGETGDLNRFASGRAVVKHAGLNPSERTSATINGQTRISRRGRPALRSAAWRAVWGALRHNRVLAAKHAHLTGRDAGRLADGQARTACAATLLRWLWAVITTGQPWDARIAAGEIPAPRRAAGTIAAAA

SEQ ID NO: 215776 - protein, 369 aa, unidentified
MSKVRFVGLDVHKESITIAVADQDGSAPQVVATVPHQARALLKQLKKLGTNGQLRCCYEAGPTGFGLCRTLQAAGIECIVVAPSLIPKQAGDRVKTDSRDAVKLARFLRSGDLTPVHVPDEHTEAMRDLERAREDAKRAERSARNVLSKFLLRHGCRYSGKSRTWSSSYLDWIRTLHFEFEAQQRVLVSYLHAVEQATERVVQLTGDIAEMVETWSLKPLVKALQALRGVQLVSAVTIAAELGEMSRFTRAPQLMAYLGLVPSEHSSGGTTRRGAITRTGNQHVRKILVESAWSYRHKASMSYEIRRRNEGVSEQVREIAWKAQQRLHRRYQRLQGRGKNKQQTITALARELAGFIWAIGRQPVLLQSA

SEQ ID NO: 215777 - protein, 425 aa, unidentified
MNYKQNEKINQVKESTLVVGIDIGSTTQYARAFDWRGIELGKVFTFSNSREGFESFKAWMQHLQDKYRKSNVIVGIEPTGHYWFDLGAYLEDEGILLVMVNPYAVKQTKELDDNSQSKNDRKDPKVIAKLVTEGRYSAPYTPDGVYADLRIMVANRKRLIREMTQIKNRFARWFAIYFPEYTDVFGDYEAQSSMLLLKKICTPEAIVELGAEKINQIWRDAKLRAVGMKRATTLCETAKRSIGLKKGSSAAQYEMKLLLEDYEYKKAQLDAVMEEIEKLCRKIPESEQMLAIKGIGVITVAGFLAEVGDVRRFESPRQIQKLAGLSLRENSSGKHKGQTTISKRGRSKLRAVLFNAAIPLIAKNPEFKSLHEYYTTRANNPLKKKQSVIAISCKLIRVFYAILAKGVTYDAQKLISDIHRQPQVA

SEQ ID NO: 215778 - protein, 408 aa, unidentified
MKTLHKRCAGLDVHKAEVVACLRVVTNRKVGQQVRRFPTTTQGLLALAEWLENAGCTHVAMEATGVYWKPVWHILEGHFALILANAAHVKNVPGRKSDVNDATWLADLLAHGLIRSSFVPPPAIQELRDLTRTRKQLTREIVQHVQRIQAVLEEANIKLCSVITDIMGASGRSMLKAMIAGATDAEKLAALGHERLGCTRAELVEVLTGCVREHHRFLLGQHLRTIEQLEDSVAAFDARIEAALSPFHDIVERLKEVPGLGATATETVIAEIGTDMSPFPTAGHLLSWAGFVPRLDESAGKRRSTRIRKGAPWLKPVLVQAAWGAARKKNSYFQAQFLRLKARHGAKKAAIAVAASILTTVYHMLRDGTCYQDLGPEYFTRRNPAKAAARLANRIRNLGYHVEIRAAA

SEQ ID NO: 215779 - protein, 409 aa, unidentified
MEVITAVGIDVSKGKSTVAAMRPGGEVVIVPYDVEHNTEELHRLARSLKLLDGEVRVVMEHTSTYYLPIATILSKAGMFVSVVHAKLVHDFGNNSIRRGKTDKKDAIKIANYALANWTSLAPIQQQEDIRQELKKLNRQVNLYTKIEVALKNNLIVLLDQSFPGVNTLFPPYPKANGHEKWVDFVARFWHRDCVSTMSRSAFSESYRKWCKRTNCIWSADKANMVYDHACKQVVTLPKSNVTKIIIKQAAAQLNSVLETVLTIQREMSRLAAQLPEYETVLAMFGVGWVLAPQLVAEIGDVRRFHSKRALTAFAGLDSPPYQSGQFESRERKISKRGSPHLRRALFRVMTVLMMNQPEEDEVYQFLNKKRAEGKHYYVYMTAACNKFLRRYYGRVRECLAAVGLPETAA

SEQ ID NO: 215780 - protein, 318 aa, unidentified
MSQPNQHCIGIDIAKLSLDIAGTEDFSHFSTSNDEDGFMAILKVLKERRISLILMEATGGLEASIACCLQAAGYEVVVINPRQARDFARSMGYLAKTDKLDAAMLAQLAQIIDRHPDRSRYIRALPDEARAVLTAMVVRRRQMNNMLVAERNRRYPSHPQSRKSIDNIINALESELDHISQEMKQHVKVFFMEQAELIGSVKGVGEVTVASLIAELPELGKLNRREISALTGVAPLNRDSGKMRGRRTTFGGRAGVRATLYMAALVATQFNPAIKMFYQRLLAVGKPKKLALVACMRKLITILNTMVRKGEKWDASFR

SEQ ID NO: 215781 - protein, 314 aa, unidentified
MSTCFVGVDVAKHHLDVAVRPSAAAWRVPNDGAGLVLLVERLRTVRPTLVVLEATGGLEMPVAGALATAGLPVVIVNPRQVRDFAKATGKLAKTDALDAHVLAQFAEAVRPAIRPLPKPAAQALSALLARRRQLVEMLTAEHNRLGTATRHLRADIQAHVTWLERRLARLDDELATTIRESPVWREKDDLLQSMPGVGRVLAMTLLANLPELGMLDHKQIAALVGVAPRNRDSGLHRGKRTVGGGRAPVRAVLYMGTLAAVRHNAALKAFYHRLRAAGKATKVALTACMRKMLTMLNAMMKHGLRWQPLAVHAA

SEQ ID NO: 215782 - protein, 402 aa, unidentified
MRYIGLDVGRDFAHAAVVEGTGSARKLGRLRMGEELAAFAATLGPDDAVALEASGNTWALVELLGRHAGRVVVSNPLRTRAIADAKRKTDDIDAATLAELLAADYLPAVWIPDEATRRLRRIVAHRAGLVRDRTATRNRVSAILGRRLVRSPLSDPFGSRGRAWLAALELPPDERLALDSALRLNAVLDAEVDLADRAIATALIDDPRVRHLLTIPGIGLVTAAGILAVVGDIGRFPRPAKLVSYLGLDPQVRQSGDRPAHPGHISRAGQAHARGLVTEAAHAAVRAPGPLATFFLRLRARRGGGIAIVAVARKLAVLVWHLLTKDEDYRDARPDLVRAKQRALGRLAGRATARTRPSHRGATGSSHDQGRARLRGGDDPHHPALRHAIDRVQLDDTPVPGA

SEQ ID NO: 215783 - protein, 367 aa, unidentified
MKKVSTAASKQSRNISQQRLTIGLDLGDRNSCYCVLDEAGRIQLEQRVRTTAKALQEVFGAMPRSRVALEIGTHSPWISRLLSKLGHEVIVANARKVRLIGENRKKDDRLDAQTLARLARIDPQLLCPVKHRSAQAQADLMMIRARASLVRVRTGLVNAARGLAKSYGERLLGCNVRNLNPEKAEGLSPELQRALEPLLSAIEEVSERICEYTDRIEALAQTSYPQVELLKQIKGVGTLIALTFLLTLEDPHRFRKSRDVGCYLGLQPGRRQSGKSDPQMHISKEGDPYLRTLLVQGAQHILGPFGIDCDLRRWGLKLAERGGRNGKKRAIVATARKLAVLLHHLWVSGEVYEPLHNSSPMTSAAAA

SEQ ID NO: 215784 - protein, 350 aa, unidentified
MNATTYGLDIAKSVFQLYWVDPGSGEVFNRRFSRDQLIRFLSNREPGRVALEACSGAHWWARKIVSLGHQAILLHAKYVRPFVQTNKTDAADARAIWTAAQQPGMRTVAIKSEAQQAILSLHRIRSALVDTRTRQVNQIRGLLGEYGLHFRYGRKALMNELRARIAEIEQTVPPLIWRALQRQMAHLRQLETDIAEAERENLNWMKADPDAQTLATINGIGPLTATATVGVMGSPDAFRSGRTFAASLGLVPAQTGSGGKIRLGHISKRGDPYLRKLFIHGARIVVTRSKQRPEWVEALLKRRPVNVVIVALANKMARTAWALLAHGQTYDRQHVSVRPRASGPHAVESI

SEQ ID NO: 215785 - protein, 319 aa, unidentified
MAQNDLVVAGIDVAKDKVDVCIRALSLRRTFAATAEGRRELASWLRRQKAAKAVMEASGGYERDWAKALRGAKIEVRIVDPKRVRSFAQSAGRLAKNDTIDAEMIAWFAETFDEARSQAYDATREQLHQMVNARQALKGMQAKLESQGEHALPAAVQRMHARILKTITVELVKFEAAIAAMIQATPRFTELAEIIESVPGIGRTTSAALIAAMPELGQANNKIVAALLGVAPYDDDSGRRRGERHIKGGRRRTRNVFYMACLGAATQHNPVLKAFYDRLVAKGKEKKVALIACMRKLISILNIMIERRQKWDASRYALS

SEQ ID NO: 215786 - protein, 323 aa, unidentified
MGHAGAPPHDTPAFIGIDVAKDHLDVHVLPQGTAWRCAQCPQALADLAARLAALRPALAVLEATGGLEYPAAAALAAAGVPVAVVNPRQARDFAKATGRLAKTDAIDAEALALFAQRVRPPARPLPDAAAREFDALLQRRRQLLEMRAAEQNRLQTAHAAKVRASLQAHIAWLSKQLDKVEAELSAAIQASAVWRVKDALLQTIKGIGPTVARTLLAALPELGTLTRQQVAALAGLAPVAYDSGKLRGQRHIRGGRADVRSALYLAAWSAARFNPALRAFSDRLQAAGKATKVRLVAVARKLLTVANAVLRDGRAWDPALAAR

SEQ ID NO: 215787 - protein, 375 aa, unidentified
MLPPYQQRMLAGGTEDKEHAMSQNLDVSPTAIGIDIGKNSFHIVGQNQRGAIVLRQKWSRGQVEARLANLPPCRIGMEACVGAHHLSRTLKALGHDARLMPAKYVRPYSKGQKNDYRDAEAIAEAVQRPTMKFVATKTADQLDLQALHRVRERLVGQRTGIINQIRAFMLERGIAVRQGLRFLRAELPNILATRTDALSPRMLRILEDLSADWRRLDARIEDLSNEIEALARQDKGCERLMTVPGIGPIISSAMVAAIGTGDAFSKGRDFGAWLGLVPKQLSTGDRSILGSISRRGNRYLRTLFVQAAWVVLVKVGPKHWDRYGLKSWIEAAKKRLHHNVLAIALANKLARIAWAVLHKGRAFECVKPNEAYRPA

SEQ ID NO: 215788 - protein, 452 aa, unidentified
MKETLSPINDAKTENQQPPYAAWIGLDWADQKHFWSMRTADGKLQRGQLDNTPEAIKIWASDLDQRFAGRSVAIAVEQARGAVINMLSMYAHLVLFPVHSTTVANYRKSFAPSGAKSDSQDGDLILDLLIKHPERFKCLRPDTVETRKLQFLTEERRKLVNLHTSQLQYLINWLKQVFPQILVWFDKPSTPIVEDLLLRWPTLPQLQKVSPKKLLKFLQQHNCRSEDRNQQRVTEIRQAVPATNDPALLTSGTLCIQNAVRLLAQMRAGIAAFDSQIDEVLQSHPDRAIVESFPGAGPALEPRLIAAVGTQRDRFKSATNIASFSGIAPVTESSGQSRWIHWRWACPKFVRQTFHEWAGCSIQQCQWARAYYDKQRASGKGHHAAIRALAFKWIRIYYRCWRDRVPYDEQLYLASVQARLPKTAPAATPAPAKPTLVLKTCGDFKKLVEVSY

SEQ ID NO: 215789 - protein, 341 aa, unidentified
MTKNIYYVGIDIAADNFVASIYQSPKQPVITKEGLDNTFDGFNMLSSWLEAQKIDPTNCVICMEATGVYSEGIAHFLVSQGFRVSVEPPLKVKRAFDPIGHKTDPVDSRQIAEYAYRYNDELRFWQPKDEIIEKIRHLLTAREQFTKQSVALQNSMGAYKRHMVQVTLITTAHSHILKELKKQIAEIDKELEQLVRKNPTISNMKNQLMSLPGYGLLLSSSLIAMTGAFREITSYRTLAAFIGICPYQHQSGSSVYRTPHIRPFGPAYARKLLMLAARSVVTHNADFKKYYLRKLAEGKAKKLVLNNVSNKLIKIACAMIKNNSRYESTYRSINPMCLISA

SEQ ID NO: 215790 - protein, 342 aa, unidentified
MLETMIGVDLAKSVFQVHGASMTGVVKFRKRLTRSQFRRFLAAEPRSVFVLEACGSAHYWAREMVKTGHEVKLIAPQYVRPFVRRQKNDAADAEAIVIAAQRPEMTFVGTKDEDQQASAVLFRSRERLIRQRTVAVNALRSILYEFGHVVPAGIRNLRRIEEILADENSDLPSLVRTEGLDIIAQIREQTVRIEAKTKTAKELASKDDVARRLQTMPGVGPLTALAVETFAPEMSTFKGGRNFAAWLGLVPRQFSSGGREKLGRISKAGQADIRRLLIVGAMSRLNWMGRKTVPEGSWLARMIAKKPRMLVAIALANKMARTIWAMLTKQEDYREPATGLAT

SEQ ID NO: 215791 - protein, 425 aa, unidentified
MKRTQNEKILQIKNETLVVGIDIGKETHYARAFDFRGIELSKLLRFSNTNQGYEALENWMQEIMKEKGKTEATVGFEPTGHYWFTLGDHLQRKGHRLAIVNPFHVKCTRELDDNSQTKNDKKDPKTIAMLVKDGRFREVYIPEEMYQELREAVSERERLVEQMISLSNQVIRWLDIRFPEFSGVFKRWSGLAALLTLKNFPTPAKVVETGVSGIVSTWRKGMKKPSRKKAEKLFKLASESIGRTAGSEAAEAALQNLLKQYEMVMQQIQEIEKLMQELLLKVPNASKLVDIKGIGMVTAAVIVSEIGNISRFKDPRQIQKMAGLSLRENSSGKHKGKTTISKRGRKRLREGLFKAIITMLATNQEFRMLHKRNLSRENLKSEDIKFVDENGQEIDLKTGDETKFKYTGIKNVELTIIYKFKKCNY

SEQ ID NO: 215792 - protein, 341 aa, unidentified
MTLQLIGIDLAKNVFHLHGVDGNGREVFRKRVYRDELLASLRAVSPCKVVMEACGGANHWARSIESLGHRPQLIAPQYVKPFVQRNKTDWKDAEAICVAARQPHMRFVPRKSVEQQDVQNLHRVRQRLVGARTALVNEARGLLHEYGIIIPQGRRVFAKLLPELLLIHGEGLSSLTRETFYDLLDEYRALDARIDQLERKMKTLCVTHPICRRLTTIPGVGYITASAIVAAVGDIGVFKNGREFAAWLGLTPREYSTGGKQRLHGISKRGDVYIRTLLIHGARIALRYAPRHNDRQSRWALDLMQRKGANRTVVAMANKNARVIWALLAKDEEYKSFPLAA

SEQ ID NO: 215793 - protein, 388 aa, unidentified
MMESNTMTIGCDLGDKYTQVCVLDQLGNVLEKTRIRTTRTSVEKYFMKRARLRVVLEVGVHSRWTSELLEDLGHEVIVANPRQVKLIYARKSKDDVADAEVLARLGRVDVKLLAPIRHREKKAQIDLVAIRARDALVQARTKLVNGVRGFVKSFGHRLPSCTAESFHQKTRQAVPVELVGNLTSLFEMIEALTTRIRQYDKAIEQVARASYPETEILRQVGGVGPLTALTFVLTLEQPARFTKSRRVPAFLGLCPKRDQTGETDKQLGITKAGDQYLRRLLVTSAHYILGPFGPDADLRRWGLKLAERGGKNAKKRAIVATARKLAVLLHRLWVTGEVYEPIGYTEKYRRAQIPAGDQRLSFHDRPPPDPTLLQGRTCPPPLETPDHV

SEQ ID NO: 215794 - protein, 370 aa, unidentified
MLDTTTFIGLDVHARSIKAVSLDVMTGEVRAATFGYDAGAVAEWVRSVDPRARCVYESGVTGFDLQKRLSGLGVDCVVGAVSKMIKPSADRRRKNDRNDAEFLARMLSVGNVVEVWVPDDECEAARDLTRALEDARDDLSRSKQRLSKFLLRHGLAFDERTPTGRRKGNWTRAHWSWIESIRFAERADNDVLAYYVDAVRRAAEEKARLEGLVEAEARKPRWRKRVDSLRCLKGVDTASAADLVFEAGEFSRFRNARSFAAWVGLTPSEHSSGESDRRGAITKAGNKHLRKTLVEAAWHYLTCSGRPKDLARGQAPDRGARRHAAKGVRRLAERREALLARGVHGNKANVATARELACWVWAVGLMAEEA

SEQ ID NO: 215795 - protein, 368 aa, unidentified
MEITTIGIDLAKSVFAVSGADRRGKVVMGRQLRRAQVLEFMGKLGPCVVGMEACGGAHHWARAIGKLGHEVRLLSAALVRPYRSGPNKHDRNDADAICEAVRRPQMRYVAVKSVAQQDQLALHRVRAQLQKQRIGQSNLIRALLHERGVVARLGAAGLRQALTQALQAETSELSGAMGELLLELSGGLRELERRIAVLTRRIERAAKDDERCARLMEVPGVGPLISSALVATVGNAREFKRGRELSAYLGLTPRQHSSGGKTVMLGISKHGDRYLRTLLIHGARALLYRQGRGRAHPRAAWAARLVARRGPNVAAVALANHNARVLWALLSRGDGYRPPTSSFPSRPSAGAVIKRARAGKLLLATKRA

SEQ ID NO: 215796 - protein, 396 aa, unidentified
MGDGIRWVGLDVHAHESTVAIFDQGTGELSTRRVVGRPHELLPWLRGVARPARMVYEAGPTGYGLARRARAEGIEVAVCAPGRTERRPGDRVKTDKRDAVRLARLLAAGELALVTVPSLEREQLRDLVRCREDIRVDLMRARHRLGKFLLRREVYWEGPGQAWSRRHRAWLASLRFADRASQLTIADYLHAHDVLLARRDRVEDELAKLAAGSPCKVAIGRLRCLRGIDTLSALGLCAEVGEWERFDHPDQLSAYLGIVPSEHTTSRQRRQGSITKAGSTHARRLLIEASYHYRRQPGVGTVLEVRQRDQPPEVINIAWKAQRRLHARWRQLKDARKKPNGIVAVAIARELAGFCWEIATWSPHPDPVPPASMPAGDPLTQPHSVPHKHEHEHAMR

SEQ ID NO: 215797 - protein, 483 aa, unidentified
MDGSVEVVVDDAEQILDRVAAIDVAKASGKVCVRVPHDSREGRRVTRVFGVTATVPAVEELADHLVCQGVQRVVVESTSDYWRVFYYLLEERGLTVWLVNARDVRNVPGRPKTDKIDAVWLAKLNERGMLRRSFVPPVAIRRMRDVTRMRVDLVADRTRVKQRAEKLLEGALIKLSSVVSDVFGVAGRRILNALIAGERDPRRLAALGTGLKASPAALTAALTGRFSDHDAFMLTIYLEQIDALDKHLATLSARIDQMTAAIPLPTRRTDTPGVAEITTVPGVGTVSPVTGEIIPPADAPPAGGTPPPAGGLPGPQTVADLVDLLDAIPGIGRDAAQLILAEIGTDMAPFATSGHLASWAKLTARTIQTGASLRMGRTGRGNRYVRRTLGTAAASVARTNTFLGARHRRLRARRGALKALVATSRTILEIIWRMVHDQVPFRELGADYHTRHQDPDKRKRTLARQMKNLGLSPEEAAAMLAAA

SEQ ID NO: 215798 - protein, 409 aa, unidentified
MLSVGVDAAFKEHQGEMRNDSGKVYWNYRITNDREGLDKLIDRIQEIEKMTGDRVIGIYAEAMGTYFAPFQYHLTQRGYRVILVNPKEVKSARTLKNLNKNKSDIIDATTLASLPWMDEKYRDRDTHQRYPISELTRLYQKMQRIETQLKNSLNSDLARVFPEFLRFVNDRDSKTVLKLLEKYPTPAKILEASEAKLLKLVRSASRCGFGIEYVKKLREMAKDTIGVPDTDGMLAYRIKYFIRRIWEIKESLKKFERDINKKTKDIDEIQMIDDIRGIERLKAVSIYGEVGPIEQFETARKLQGYGGITPRRSQSGSMEWIGRPTKIANHYLRNIVSVLSRPLARHNEEFKEIYFREKTKGKTNTQAYIIISNRLLYHVFTIMKNKKPYRKRLPMSALQHPRPSTSCKG

SEQ ID NO: 215799 - protein, 337 aa, unidentified
MEARIGEYPVPYYVGIDLHKRYSYVVVLNEVGEVVEERKVSNEELKEFAEKYRGSKAVIESTGSYRFAYDILDRYMDVKLAHPSKTRIIAEARIKNDSLDAKMLAHLLRTNLIAESYIPPKEVRELRDLTRARRALIEDRNRIKNRVHAILIRNGINDYPNPFTKKGREFLKELQLPELDKALLESNLSIIDKINEEIKEIDKIIQEKAREDNDAILLTTIPGISYYSALLIKAEIGDVNRFPNKFKLISYAGLCPSIRQSGNKEIKGHITKQGSRMLRWILIQCANIAIKHDEYLRSFYLRIKRRRGHNIAIVATARKMLVCIYFMLKRGEVYNPR

SEQ ID NO: 215800 - protein, 310 aa, unidentified
MEIIAVGIDVSKDRLDVAVRPSGEAFCVERNAAGIDGLVVRLRELAPPIIALEATGGFETVVTAGLASAGLPVVVVNPGQVRAFAKALGLRAKTDPIDAALIAHFAEATKPEIRPLPDEATQMLADLVARRRQLIEMIVAERQRERRATRPHLKKSMARLIKTLEKELSSLDTDIDDAVRGSPAWREKEDLLRTVPSVGPAIARTLIAELPELGRLNRKEIAALAGLAPFTRQSGQWHGKSFIGGGRTAVRTVLFMGALVAKRHNPVLKVFFDRLVDAGKPKMVALIAVARKLLVILNAIIRDNRPWQNA

SEQ ID NO: 215801 - protein, 398 aa, unidentified
MNATTASATATGTMLALDLGKFKAVACAYDRATTSARFDTVTTSRRERRRLLEQHRPAVVVIEACTLAGWVHDLGQERGVPGKVANTAREAWKCPHTKRKTDKDDALRRAHLEALGQLPTVTIPPKQTRAWRSLIASRQRLVGRRVALQNRIRALLVGQGLAAPRGAKAWTVLGLAGIAQPARPLADGVPQEWWRGLLDLARTERRQTHALLNQAEAKLDALAKANADVQVRESIPGVGPRTAEAVVAHLGDATRCDNGKQVSADAGLVPKQFQAGETDRRGRMTRRGPGRLRQLLVACAWVMLRYNPWARAVYQRLTKGGTTRTQPALVALARKLLVRCWALRRDGTAWRAAAVPAVAGTEPPRNPGGAHPNRSPNSPVTGPGTTTKSLEGARGVRA

SEQ ID NO: 215802 - protein, 387 aa, unidentified
MIYLGIDVAKNSHVAAAMSSEGEVLLMPFPFANSADGFALLREKLNSLPRLPLLVGLESTAHYGENLIYFLCRNGYHVAVINPLQTAAIRKSAIRKTKTDKVDAFVIAKSLMMEGYTELQQADLQILKLKGLCKTRQNLILMRTRCKIQLGSFVDQLFPELNQFFRSGLHINVSYTLLKAHPRPAEVCSLHLTYLSNLLRKASRGKYTKKDAIRLRELARNSIGTDSPALALQIRQAVSQIELFSTQLEQVENEISTIMDSLNSPIMTVPGIGHLNGAMILSCIGNIQRFSSPAKLLAYAGLDPAVVQSGNFNAKSTRMSKRGNSMLRYALINASHNVVRNNETFAHYYNSKIAQGKSHYCALGHTAHKLIRVIFTLLTKNIAFNLA

SEQ ID NO: 215803 - protein, 346 aa, unidentified
MNTLKQVIGIDVGSKELVVCLGKIFANLDKKLCDYGNFRNTDKGLVKLHGWVQAHTSSESPIHFVMEATGVYHEKLAYFLESKGYTISIILPNKISNYFRTLEIKTITDKTCSEAITLFGLERNLEIWRRPDPTYKRLKQLTRERNQLVQERTAVKNQLHAEQTEAEPNTNSLNRIKERIAVLQKQEKEVLTEIKLIVKENSVLRQETDNLISIPGIGLLTAVTVLAETNGFEMIRNKKQLVSYAGLDVKEKQSGISILGKPTISKRGNRYLRKSLHLPALAAIRHDEHYSNTFTRLVSKHGIKMKAAVAVQRKLLELMFIIFKSKQRYDSQYHIQKQTYNQVATK

SEQ ID NO: 215804 - protein, 326 aa, unidentified
MEHELHYIGIDTAKEKLDVDVLRPDGRHRTKKFANTTKGHDELVSWLKGHKIDHAHICIEATGTYMEPVAECLYDAGYIVSVINPALGKAFAQSEGLRNKTDTVDARMLAEFCRQKRPAAWEAPHPLERALRALVVRHQALTDMHTQELNRTETAREVQRPSIDAHLLWLEAELKRLEKQIKDLTDDDPDMKHRRKLLESIPGIGEKTSAVLLAYIGLKDRFAHARQFAAFAGLTPRRYESGSSVRGASRMSKAGHVSLRRALYMPAMVATSKTEWGLAFRDRLAANGKKGKVILGAMMRKLAQVAYGVLKSGVPFDASRHNPVAA

SEQ ID NO: 215805 - protein, 422 aa, unidentified
MSYCPVAGIDVSKRFSDMCILSPDNKIFAQEKIYHDETSINRANALLQKAERLFFSKPVIVMESTSHYHLILFQFFSEHGYDVIVVNPLQSNSMKDFSIRKRKTDRVDAFKLAMMYRTKTLRPSQIPQTATRALRQLCRHRAELLNDVSSYKNRLTALLDQTFPGYDKVFSDVGGVTSCAVLVRFPTPTILLVEEESELVEVIAAASKSGYSFAKKKAGLLISAAQKAQTLGIHSCADETLIVCTIQMLRTLSESVLQIETAIDNLLAQIKEMRNNVSLLQSIPGVGSHSAALLLGEIGDISLFKKPKQLAAYFGLDPTERQSGSFRGTKNKLSKRGSPYARAALHMGVVNSICKRGKDSAANPVLLSYYEKKCKNKPAKVAQAASMHKLVFIVFAVLRNQKPFELKTPEQHAVEQGFVKAA

SEQ ID NO: 215806 - protein, 377 aa, unidentified
MTTIGAERPDTTEVAVILGVDTHLDFHVAVVLDHLGRRLGQASVPTTAKGYERLLCWAEDFGPLRCAGVEGTSSYGAGLTRHLRARGIEVLEVERPKHRRPSSRSNLEKSDPSDAERAARAVLAGEASGVPKSSDGRVEMIRTLRAARRSAIKARTQAANQLQGLRATAPEGLRHRLRGLTTKELVSVAGRFRLAHGPRDVPTATKFALRSVARRYEALSEEIAELEAHLDRLVAQAAPELVSLAGIGTDNAATLLIVAGDNPQRLRSEASFASLCGVAPIEASCGKVVRHRLNRGGNREANRALYMICLARMRRDRRTQEYVARRTAEGKSKREIIRCLKRYVAREAYRVLICCGARSSPTGPQDEAHISSGSSAA

SEQ ID NO: 215807 - protein, 340 aa, unidentified
MTIVMGLDQHRAQITAEWIDTETGEIGRARVRPADRAGVRRFLGRFGGQQLEVALEATTGWRFVVGELGAIGARVRLAEPAETAARRGRKKRPKTDRADARHLRELLMVDRLPESWIAPEHILDLRARVRLRHTLVDQRGEWQQRIHAVLYHHGCPHHHGIGLLTAKGRAWLEGLGLPSTAREQVTVALEMIDMLDVQLAPIDNELRAYARRQPGCKALMGHYGIGHLTAVTILAELGDARRFSSSRDAVRYSGLDITVKQSDQRRAPGHLSRQRPPALRWALYEAAQSARRHSSPDRDYYHHAAERRGGNRACLAVARKLLKRSYHTLRELGDEALQPA

SEQ ID NO: 215808 - protein, 415 aa, unidentified
MEDVIYRRCAGIDVHKRVIAVCLRIGRKTEIREFGTLTHELRNMTAWLKENGCQMAAMESTGPYWKPLYNIFEMEGVPAMVVNACHMKAVPGRKTDVKDAEWIAKLLSQGLLKPSFIPDREQRELRELTRFRKSQIEERARNLNRLQKMLEGANIKLSNFVSDIDGKSATEFLELIIGKPDFTVEDVAAHRYGRLKASAEELFLSLEGVITSLQRELFKHVMHVIREQTVQIEQTNLLLQEHTQDAYAEAATALATIPGIGKVSAQQIVAEIGHDMSRFPTAAHLCNWAGICPGNNESAGKRKSGKTNYANKTLKSTLVQCAQSAKKNKSSFFSAQYQRLVVRRGKNRATVAVAHSLLIAIYHVLQGAEFRDLGADYYTQFNREKKINSYVKQLSKLGVTIPDDVLRCSIAEAAA

SEQ ID NO: 215809 - protein, 361 aa, unidentified
MKIVGCDFHPSWQQVAVFDPETGEIAELKLLNGDGGEAERFYRELEAPALIGIEACGNSQWFVELAERLGHVVWVGDAAQIRASYVRKQKTDRRDAGHILKLLMESRFPRLWTPNAEQRDLRQLLIHRHKLVEIRTRVKNGLQHLALNRGFPKQSSRLCGVRGRAYMEKLPLAGWTARRREDLLKLLAELDRHVDELDTAVQRAADEHPQARLLMTQPGVGPITSLAFVLTIGDVGRFKHSNQVASYLGLIPREHSSGGKQRLGSISKQGNRFMRQLLVESVQTVNRLDEGFRKQYAARCHHKAKGVAKVAAARKLAVRLYWMLRQNVGYPEIARIESSPRVALRGESHLATVNGRSRIQQ

SEQ ID NO: 215810 - protein, 391 aa, unidentified
MSANRWNDFMWHQQQHMHNPIKVSLDLHDESTYVYSVDLATGGLLSDCRVMGHYAKVKKHLKKIGPKGRIMIILEAGPHGFAPYRMFHNAGYEVKMIAPSSIPRAARDRKRKTDRDDAINNLHYHLSGNLRYVDIPSMEEESGRECLRFRCRSVWNITREKQRIHSLMKRQGKVFTLTKSYWTKKHYEWLRQIELSPSIRVVLDGHLMQIQLMEQQVVLLEKQLASFFNANPILQKRLNFYQLLAGFGPINSMAMVLEGRDFNRFRHPKQIMSFTGLNPGKRQSGNKDPIIAITKSGNTALRTAFVGAAKYYGDYRLLHSSKKIEKMPKVLGEFIQRCQTRLNHVYRSLKARGKATNKARVAVARELCGWLWEFCTKIIPVLDKEPLAVAA

SEQ ID NO: 215811 - protein, 342 aa, unidentified
MIKVSTIGLDLAKNVFQVHGISDDGTVVIRRRLRRAEVVPFFSRLPPCLVGMEACATSHYWARELGGLGHEIRMIPPRYVKPYVKRGKNDALDAEAICEAVQRPSMRFVPLKTAEQQGALVIHKTRDLLVRQRAILVNALRSHLAEFGIIVAKDIGNAPQLAAVVRDKTDRRVPTTARSALVTVVDSIDALSRRIKVLETRIRHWHRANLASQRLATIPGIGPITATAIAATVPDPKAFRSGRHFAAWLGLTPRQNSTGGKERLGGISKQGNCYIRRLLFIGAVGVVRYARRRSPLEEWIRHLRERRPTRLVMIALANKLARIAWAVLAHDQNYRAGQPVAA

SEQ ID NO: 215812 - protein, 412 aa, unidentified
MEGETVIAGVDTHKDVHVLCLLDGLGRKIWSGSFGADPEGYDRLAEAIGDPGSCMVVGVEGTASYGAGLTRRLVELGYNVVEVLRPKRDKARPGEGKSDPLDAERAARKAASGRGCSVPKSQDGWVEAVRQLYVARRLAVATSTSCVACAKSMLTTAPSALRERFRGRERPKDLMPLLARGRKAGDALEESVLASLRSVAAVWKEARSQVESLDERIRALLEANAPALLGIEGCGTTTAAALVVAAGDNPGRLKGEAAFSMMCGASPIPASSGKTERHRLNRGGNRQANWALYEIAIKRMAYDERTRRYVARRTSEGKSRREAVRCLKRYIAREVYRVLMDPNPDGAAPEGPELAKMRKAMRVTQKQAAAGLGMSAASLGHLEHGRRRSTKLERRYYELLCELKGALPQTAY

SEQ ID NO: 215813 - protein, 403 aa, unidentified
MHDPTVRYGGVDWATDTHAVCVVDDDGRVVVEFDVDHTAEGLSALCRRLRAAGVARVAIERPDGPVVDALMAHDFEVVVISSRSVKALRERYGTAGNKSDRSDAYVLADCLRTDGHRWASLKPDTPATVTLRSHVRARKDLVEARVAACNQLRAHLRVVFPGAVGLFAHLDSAISLRFLERFPSATRAAWLSEKRLGAWLRANGYSGRTHPAELYRRIATAPRGHDDDDDTSATVALAFVAVLKALRTQIDELDHRIAELLDAHPDAHIFTSLPRAGVIRAATLLAEIGDCRDRFPTPDTLACLAGVAPSTRASGRHRVITFRWSADKKLRDALCDFAGDSRHANAWAHTRYRQLRAAGKTHPHATRILARSWTHIIWRCWQDHTAHDPTRHAAFQHLHQHAA

SEQ ID NO: 215814 - protein, 344 aa, unidentified
MDHYAGIDVSLECSSVCVVDASGKIVREAKVASEPEALIGWFASLGLELARIGVEAGPLSQWLDAAMKDAGLAVELLETRHVSDAFKAMPVKSDRNDARKIAQLMRLGWFRPVHCKSIAAQEIRAMLTARKLVQSKLLDLENSLRGILRGFGLKVGKTTRTKFSERIEELVHEHPNLQTIGQALLRVRAVLLTEFNALEKRVRAMSRLHEKARLLMSTPAVGTIISLTFACAIDDPSRFTSTKQVGPYLGLTPKKYQSGETNYTGRISKHGDASAREALYEAAHLILTKPIKGCSELKSWAMRVSRRAGANKAKVALARKLAVIMLRMLKDNVPFNPAAKAAAV

SEQ ID NO: 215815 - protein, 409 aa, unidentified
MEVVHEVCCGLDVHKKSVTACVLWASGRRKQIREFGTFTRDLLELADWLRSCGVTHAAMESTGVYWKPVWNLLEGQFEVLLVNAQHIKAVPGRKTDQKDSEWIADLLQHGLLRASFVPPTPTRELRDLTRYRASLAQEINRIANRIQKVLEDANIKLASVATDTLGASGRAMLEAIIKGEQDRQRLAEMSQGKLRNKIPELQQALEGRVTAHHRFLLRELLDHLYFVESKMWRIEQEIAERLDPFQSEVARLCTIPGVDRVTAWGLVAEIGLNMAQFPDAQHLASWAGLCPGSHESAGKRKSGKIRKGSLWLRRCLCQGAWAVSMQKNNYLSALYRRLAARRGNKRAAIAVAHNLLVIAYYILRDKVCYRDLGPDYFDRLNPEGLRRRLTKRLEGLGFKVTLEPLAQVG

SEQ ID NO: 215816 - protein, 407 aa, unidentified
MTAVMIGVDPHKATHTAVVIGPAGEPLGEVRIRASASQAEKLVAWAADWPERTWAVEGAAGLGRLLAQQLVAAGERVLDVQPKLASRVRLLQAGDTNKNDPNDALSVAVAALRSKTARPVMAEDYPAVLKVWSKRHRDLARLRNQVACRLHAVLCDLVPGGISKEISAAQATRILEQASPSGAVDQARAELAAEFLEDMRRLDAQLHRTRKKLAAAVRASGTTLTEVFGVGPVIASTIIGDIAGVSRFPGRGHFAAYNGTAPVEVSSGNRKIHRLSLRGNRRVNHAIHMAAITQIRHRHSEGRAYYEKKLAEGKTHKEALRSLKRRISDAIYARLQADARRAGQRPARRAREGNRGTALIPARPAHTPNAGSSDKPLPDLGTTIRPGTRAATPSPSKPTSKKTLTTT

SEQ ID NO: 215817 - protein, 314 aa, unidentified
MKYYAGLDVSQQTTSICIVDEEGKTVAERKVASCPEAISEALEPFAVTRAGLETGPLSVWLWNGLKERGVPIVCMDARHANAALKMMPAKTDRNDAIGLAQIVRTGWCKSVHVKSTASHEARALLATRSQFVRTRCDLENQIRGVLRTFGILFGKRVGGFAKRAEEIIDGELDASPTIQAVVEALMRARANILEQTRHLEAKVRLIARQNNVVRRLMSVPGVGVITALGFAATIDDPTRFKRSSSAGAYLGLTPRIYASGETMRSGRVSKRGDDFLRRSLYEAANALLTRIPRFSALKSWGYASRGVAATEKLR

SEQ ID NO: 215818 - protein, 369 aa, unidentified
MSDCITMHVGLDVHKDSIEIATADVRGGEIRHVGRIGGDLPALDAALARLRCPVAGMQVVYEAGPCGYAIYRHLVARGIACAVVAPSLTPRRPAERIKTDRRDALKLARLSRAGELRAIRVPDTQDEAIRDLLRAREDTVRVQRNARHRLKALLLRQDVRYTGKTAWTPAHERWLARVRLPTPAQQIVFQEYVDSVHQATLRIARFDTVTGDLLPHWTRYPLVRELQALRGVRQLHAAMLVAEVGPFERFDSPRQLMGFLGLTPSESSSGSRRRQGAITKTGNAFARRALVEAAWQYRFPARVGITIARRQGECSETARAIAWKAQVRLCARFRTLQARRMLSTKAVVAIARELSGFVWAIACAEAASH

SEQ ID NO: 215819 - protein, 339 aa, unidentified
MDSIGLDLHKRESQICILTPAGEVVEQRIVTTRERFTAVLGGRPRARVVVEASTESEWVARHLESLGHEVIIADPTYAPMYATRSRRVKTDRRDARTLAEACRLGAYRAVHRASDAQRHVRAQLAVREALIRTRSRYVAIVKSVLRRDGWRLPSGMPAHTVRKVAALPLGPEMAAELAPLLALLVPLQAEIDAANAELAAVAAQDPVVRRLRSVPGVGPVTAVGFVAALDAVDRFASARQVAGYLGLTPTERSSGEQQHRGRISKTGNPRARMLLVEAGWRLLRARQAAAAPLRAWGERLAARRGRAIAAVALARRLARILYALWRDGSEYRPGVPRAA

SEQ ID NO: 215820 - protein, 341 aa, unidentified
MEKATIIGVDLAKHVFQIHGAGADGSVAFRKKISRVKLLPFLSSQPRCVVAMEACAGAHGWARDIQAQGHEVRLIAPAYVKPFVKRQKNDMADAEAITEAAGRPTMRFVAVKSAEKQASGMVFKTRDLLVRQRTQTINALRGHLTEHGIIAPQGVFHIGRLAAEVENVNSHLPVIVTELCTLLLRHIATLDEQIASLDRRIRDRAREDETARRLMSIPGVGPVCATALEALAPPPETFARGRDFAAWLGLTPRQNSSGGKVRLGRISRMGQRDLRRLLIIGATAVVRWAARRGAPAGSWLAGMMARKPRMLVAVALANKIARIAWALMAKGGVYRSLAATA

SEQ ID NO: 215821 - protein, 356 aa, unidentified
MRSPAGGAAIHCSKLEPLNERARMHRAGLAFASMSQNNIPTLYAGIDVAKDTLQLSLCGASENLPNEAKGHARILRLLSAAEAARPGAKVHIILEATGGYEAALCAALHAAGKTLSLLQPARVRHFARAKGEQAKTDPIDAAVLAAFGEALRPAPTPAPSAAQTHLGELVGRRAQLIETRTAETNRAAHYTDTLLCRQSRALLALLDKQIAQCDDAIAALLAADEAMNARAQRIQQVPGIGPVTAAILQAGMPELGTLNDGQAAALAGLAPYNRDSGPHHGARSIRGGRTPVRCALYMAALSAVRHDPILRDFYARLRTAGKKPKTALAAAMRKLIVLLNRMLKNPRFRLQNPTCK

SEQ ID NO: 215822 - protein, 402 aa, unidentified
MITNNPQTIPPATAATATPPTATAVPSVKPHRVIKLGVDVHWREHVVVRQIDGTSPQPAQRFAPEAFVAWVAKQAQQADVVHCCYEAGPFGFVLHRRLVGLGVKSLVVRPRNWDEYGKKVKTDRRDALALVSCLDRYVVGNTEALTSIRVPTETEERARSLTRQREQLLEHRKRLAAQGLSCARYYGHDLPDEWWRAKKFEALRAELPEFLCTLLESVQRIALLVHAELEARSADVESAQTQELPTGLGALTAQILDREIGDWGRFKNRRQVASYTGLVPSEHSSGERRQRGAITKHGNPRVRHILIEASWRLQQFQPDYRALKLRQAAFDTAKRKGDKPTRKKLCVGLARQFIVDWWRIRTGRTTPAKLGLQMSWPAAYVLRGKAPQAVAVPVAVPQPAAA

SEQ ID NO: 215823 - protein, 338 aa, unidentified
MKYYGGIDLHSNNIYLVIIDEDDKILYEKRLANDLELILEKLKPYQEKLEGLVIESTYNWYWLADGLRELGYDVRLANTWAIKVYEGMKHTDDKTDAFWLAHVYRLGLLPEGYIYPKEKRGLRELLRHRLGLVREQTRRILTMQSVIVRYDNVKLTATKLKNSDEEKLLSYVKDEKVKLVVQANYKILELVMTQISLLEAEILKELKQDACFKRLKTVPGIGVILAMTILLEAGEIKRFERVGNFSSYCRCVGSLKVSNAKKKGENNKKNGNAYLSWAFMEAAHHAIRSYPEIQKYHQRQLAKKHKMVAFKSVANKLARATYFVLRDEVEFDMKKLFV

SEQ ID NO: 215824 - protein, 365 aa, unidentified
MNIVALSGGPIHLGLDVSKNKIAVGILRWDEQVPDTEMLFNDEPSVRRLINRFEDPGGLRVCYEAGPTGFGLHRLLRSMGVACDVIAPALIPKAPGDRVKTDRRDCRRLARLHRAGELVAIRVPTEAEEAVRDLCRARAAVVGDRTRIRHRLSKFLLRHDRVWRQTAWTFAHERWLLGQRFDDPALRTTYAHYRAMLTAREAELAAVDADLAHWYTHGPFTDAVARLGAYRGVASVGALTIASEVGDWRRFPAARTFMGFTGLVPSEYSSGEAVHRGHITKAGNTHLRTQLIESAWAYQHHPNLGVTMRRRQAHVDAATVARSWSAQQRLCGRFRRLSARKSNRSVVAVAIARELAGFLWAEMTA

SEQ ID NO: 215825 - protein, 340 aa, unidentified
MKSVGIDLHKKTITLCVLDHEGASVTTRTFACTAPEKITAFFAALGPFQAVIEATASYQWLWELLEPLAQRLVLAHPGKLRIIAQSTRKSDKFDARVLAEFLCLDMIPQAYRPTPRQRAHRALVRQRQFLMTQRTQLRNKVRRLLSDYNADRRDLFSPSGLEALASVPLSPTDRLIVNQLLEQLQFLEGQRQALQKQLREFAQGGSPREAENRRLLRSMPGVGEVTCEVVLAELGDVQRFRSAKQVVAYAGLAPGRRESAGKTRDLGITKAGSGLLRWVLVEASWQAVRRSRHWSGIYEGLKRRRGGRRAIVAVARRLLEVMMALLRSGRPYREDLGTAA

SEQ ID NO: 215826 - protein, 390 aa, unidentified
MYKTIVHHEGAGSRETAVGKVKLDRVVIKLGLDMHLKEYVTVAQYDQLLPKPARRFRPPEFVPWVEGLLRAGHEVHVVYEACGFGFNLYRQLERAGAHCYVIAPRKLDEQSTRVKTDRRDATTLCQRLSRYLEGNTRELAVIRVPTEEEEQARHVSRQRAQLVHHRQKLEAQGRSLLLSHTLPAPAHWWKKQTFSRLSKLLPSWIVERLEVYRPVLFALEEQIALLSRQLQAAAPGALPRGLGKLTTVVLTREVCVWERFKNRRAVSSYTGLCPGEHSSGSKRVPGSVTKRGNPRMRAALVELAWRMVRFQPQYPPVAKRLGVLCKGSRATGARRKKAIVAVARHLAVDLWRLQTGRASAPQLGLTLGKSQEKANKGSRSRGTVTRAKKS

SEQ ID NO: 215827 - protein, 435 aa, unidentified
MRKIRENAAGIDIGAKKVFVYVEGQNVRSYYTFTEDFQTLCSYLVAHKIETVAMEATGVYWVILYDILEEAGIDTWLVDGRQTKQVPGRKTDVKDCQWIQELHCLGLLNRCFVVKDDIKELRSYHRLREDHIRSSSMHINHMQKALTEMNIRLKEVLSQIHGVSGLNIIEAILEGERDKNVLLQLCHISVIKNKKEEILKSLNGRYTKSGLFALKQAYDGYKFYQGQINQCDKEIEKIIHKMGNGRKDSDLPKKRKVIRHNKPEVENLGANLLDIFGGTDATVISGITDYSWMQLLSEVGTDLSRWKTEKHFTSWLGLAPGQHNSGKMHRNKRKQGHPKGGQIFRQIAQSLITSKKIALGSFGRRIRSKKGPAKAIKAMARKLAELYWRVMVKGLEYAEHGIKKYEEQLLAQKQKSVQRLAKELNLQLTYIQPVT

SEQ ID NO: 215828 - protein, 364 aa, unidentified
MKKNNTVTTGRKQILKQAKLTIGLDLGDRSSHSCMLDEAGNVILERSLPTTANGIRQAFGRIPRCRIALETGTHSPWVSRQLSQMGHEVIVAHARNVRLIGESSRKDDRIDARTLARLARIDPGLLGPVRHRSAQAQIHLTVIRARAALVSTRTALVNAARGLTKSYGERLNKCGTEQMSRESSKGLSQELRDALDPLLREIESLNERIAEYNRRIEQIAKEVHPEVARLKQVKGVGTLIALAYVLTLDDPHRFRRSRDAGCFLGLRPGRRNSGQSEPQLHISKEGDRYLRTLMVQGAHYILGPFGQDSDLRRWGLKLAERGGKNAKKRAVVAVARKLAVLLHKLWVGGEVYEPLRNNQQAAVA

SEQ ID NO: 215829 - protein, 390 aa, unidentified
MKNSTAHLDHDNARFFGLDVHQKTITIALATRLGEPRHLATIDNRPSVVKRFFEKHTKTGGPIYVVYEAGGCGFHLARQLEAMGIIVIVAAPSKIKKASGEVKNDKRDAAKLAKLLRSHILMGHKELHPVAVPEQDDEAIREKSRQRNALLKKVRTTQNQISAMVRRHGLRYDLTKTLWTKTHRAWLERVDFGNLDLNEVFREYLDHLAEEEARLAKCERQLEAMCASWNRAEVVKALCALKGVGALTASSLVAEIGSFARFASATELMSYLGLTPSEHSSGEKVTRGRITKAGNKRARTLLIEAACSVRHKPKSKQAFMQSCPTGLPREVIEHAYKAQVRLYKRYWQLINKGKNTNAARTAVARELAGFVWGIALIAETVLDARDSVAA

SEQ ID NO: 215830 - protein, 463 aa, unidentified
MNTPKSSPRPKNQKQVKAKGVESILVINPNAAGIDIGSGEHWVAVSPDRDKKPVRRFGSYTAELIALAAWLKKCGVTTVAMESTGVYWTSLFRILESRGFEVKLVNAAHVKNVPGRKTDVKDCQWLQQLHSCGLLRGSFQPDEKIRVLRSYWRHRDNLVRYASSHIQHMQKALEQMNLKLVKVVSDITGVTGMSIIRAILEGERDPVKLAAMKDPRIKSSAEEIAMALEGDYRREHLFALKQAVELYDIYHQQIRSCDCEIENYVQEFEPKVNPESNPLPPPKKRKNRVRGNRPEFDLQSHLYRISGVDFTQIDGLSVMTVQTIISEVGLDPDAFPTEKHFASWLGLCPANKITGGKVKSSRTRKVVNRAADAFRMAAQAVIRSNSALGAFFRRMRAKLGGPKAITATAHKIARLFYRLWKTGVAYKDPGADYYDQKHKDRVVKNMVNRVKQLGYDVVLTQTA

SEQ ID NO: 215831 - protein, 362 aa, unidentified
MQKVTTWAGLDVHAERIVIAILTGQGRELDVRDIPNDPKIIRRTFQRLLAGTYELRCCYEAGPCGFELHRQLTSMGVACEVIAPSLIPVKAGDRVKTDRRDAQKLARLYRAGELTAVTVPSVSQEAVRDLVRARDDVRKDLTAARHRLGKFLIRHGHYFSAGKNWTQRFWAWASKLTFEREGERLTFEHYVAEVKHLVERRAALDRELERIAGAEPYVAPVRRLACLRGISTLGALALLVEIGDFRRFKSPRQLMAYLGLVPREYSSGGKEKRGGITKTGNGHVRRLLVEAAWAYRHRPALGERVREALQGQPAAVAAVARRAQERLHRRYGRLVSRGKPSQVAVTAVARELCAFTWSLMTA

SEQ ID NO: 215832 - protein, 414 aa, unidentified
MLKIVYRVCCGMDVHKSFVVACIASTNEYGVTTYKSKRFSTLTGDLRRCAVWLAENNCKDVCMESTGKYWIPIYNILESTCNIVLAHPKYVKAIRGKKTDKRDAKWIADIFKHDLVAGSFIPPADIRQLRDLFRYRWKLTSFTTGEKNRAQNCLTVSNFKLDDVFSDVFGKAASAITSRILENPTERITDVSSFRTKGMRATNEQVLAAVDGEMCAEQAEKLRIIRSHMSSLELCKLHLESLILATAEKYLPQLNLVMTAPGIQSFAAIGIISEIGVDMSVFPTSKHLCSWAGLTPQNNESAGKKKTTRISRAGAYIKPLLVQCALCAIRAKQFPEVRNRYLALKKRRGHKKALIAIARMLLTVIYNMLKKNEPYNPELYHKDDRPPEHREVSVEEAIFILQRQGYLVTAPSTT

SEQ ID NO: 215833 - protein, 310 aa, unidentified
MEQIFIGIDVAKDRLDVHVLPSGEAFAVARDSEGVATLADRLGSLNPTLIVLEATGGFETLVAGALAAAQLPLAVVNPRQIRDFARAVGQLAKTDALDAKIIALFAERVHPAPRPLPDDQTRALAELVARRRQIVEMMTAERNRRRMLTSRRLLKSVDRLLAALQKELSELEADLDDIIRGTPAWRDAEDLLTSVPGVGDKLARTLIADLPELGRLDRKQIAALVGVAPINRDSGTMRGKRTTWAGRAKVRAVLYMGALVASRHNATLKSFYQRLLAAGKPKKLALTAVMRKLLTILNAILRDRAPWQNA

SEQ ID NO: 215834 - protein, 353 aa, unidentified
MIVIGIDPHKSTHTATAVDPVTNTDLGSIRIDATLADYKKLIAWAKAWPTREWAVENAEGLGHHLAQWLLVLGEIVLDVPATATARVRQLSRGGRRKNDRIDAAAAACVAALQGDARPVAPEGPTDVLALLDERRTNLSGSRTRIVNQLHALLRQLLAGGAPTSLTAAAATALLRGFRARSEVDRIRVGLCRDLIADIRRLDGQLAENEKQMTRALDAQGTGLREVDGIGSVTAARLIGRTGRVSRFPTAAAYANYNGSAPVQIASADTDRHRLSRYGDRQLNSALYTIAMVQIRMPASAGRAYYDKKIAEGKSPRAATRSLKRHLSDHVWRIMLADEKHSHRQHEKESDRAA

SEQ ID NO: 215835 - protein, 367 aa, unidentified
MKKVSIAATKQSRNISPQKLTIGLDLGDRNSWYCVVDEAGQIRLEQRVRTNAKALQEVFGAMPRSRIALEIGTHSPWISRMLSDLGHEVIVANARKVRLIGESRKKDDRLDAQTRARLARIDPELLYPVKHRSAKAQADLMMIRARAGLVRARTGLVNAARGLAKSYGERLRGCNVRNMNPEKAEGLSPELQRALEPLLACIESVSEQIREYNERIEDLAQGSYPQTALLKQIKGVGTLIALTYMLTLEDPHRFGKSRDVGCYLGLQPGRRNSGKSEPQMHISKEGDPYLRTLLVQGAQHILGPFGIDCDLRRWGLRLAERGGKSGKKRAIVATARKLAVLLHHLWVSGEAYEPLHNSQSASMPAAA

SEQ ID NO: 215836 - protein, 398 aa, unidentified
MLSIGIDVSKGKSTVCGMKPGGEIVYAPFEVQHTREGMSELVSLLRSSGEEVRAVLESTGSYHCPVVAALLENGIFVSVVNSLRMKRFCSQSIRKVKTDRIDAMQIALYGLAYWQELQPTKLPEDTYRELQLLARQYYQMTSLLIKAKVDFNAICDQVLPGMQELMNDHAGRHKLSDFVLRYRHTTHILEMGETRFRKDYCKWAEKKGYRNCERMAVLIFATAQNGIPVLPNAPSTQIVITEAIRVLHTVEASRDAILTQMQALAKTLPEYSLVREMPCIGDTLAPRLIAEIGDVRRFHSKRALIAYAGIDAPPYQSGKFCANNRHISKRGNRYLRKTGYEVMQSYVMHKPANDPIFTFIEKKRSEGKSGKLAMVAGLNKFLRVYYGKVTELYRSLPQ

SEQ ID NO: 215837 - protein, 351 aa, unidentified
MKFVGVDLHKHVIKLCVVRVVRGKRKVVARNGFDCRDTERIRGFFEGLGRFQVAVEATASYEWFFLLIEDVADRLVLAHPKKLRVIAESTRKTDKIDAEVLAVFLALDMIPQAYRPTPRVRQHRVLVRHRRWLQGRVTSIKCKLRNKAAHYNADVKEMFSRRGGSHLAALPMSEADRFEVAALQEQLALFERQLREANGQLERFAAKASPAEAEARAVLDTIPQVGTVTIDVVLAELGDCRRFRSAKKVVAYAGLAPGIRQSAGRRRELHITKEGSRLLRWAMIQAAWRLVGRSPRWGRMFDRLKHNTGSKKKAIVGVARHVLSVMFSMLQTGQAYRPLMAREVKHPAHVA

SEQ ID NO: 215838 - protein, 345 aa, unidentified
MELHTIGIDLGKTVFHLVGLNLRDEVVVRKKFSRRQLLQFTANLQVDLIGMEACGGAHFLGRALREQGHEVRLMPAQYVKPYVKTNKNDYIDAEAIAEAVARPTMRFVPIKTDDQLDMQSLHRVRERWVMRRTAIVNQIRGLLLERGITLQKGRSHVNTALPGILEDADSKLSGALRVLLAQLKLELDQTTMRIDEADAVLNQTARENEACQRLVTIPGIGPVTATALIAAIGNGAAFRKGREFSAWMGVVPREHSTGGKQKLLGISKHGNSYLRSLFIQGARAVLQHRTKQTTGLSEWLAKLISRTHHNVVAVALANKLARIAWAVLAQGKRYQPQALIGPEAA

SEQ ID NO: 215839 - protein, 373 aa, unidentified
MAVGKKRRKVKGCKMNSIVAGIDLGDRESLATVLSPIGDVTDRFTFPMNEEGYAFFASRVPKDARVAFESTIMAYPISRALRTHGYSDVTVAHPKTLAWIVRSKKKNDRVDSLKIAKLHMAGMLPESHLLDRDEQIVRDLLVQRVKLGVEIGRLKSSLIGYLKREDVYNSLPKTEDNFSVRRRRAVRSLRFNDKRDLILGTMMDRLEFLERQCIPLGDSVRENARVSDDVRILMSITGVDYYLASLLSSFIGDVNRFPSDDHLASFLGIVPTSRDSADVKRRGKMTKDGSSIARWALSVMVDTVMQHNAPIREHYQSVKKRTGSGKLAHVSTMRKLTRMLYHMLKTKQHWKWENPLLTERKMAKLGMDGGDGS

SEQ ID NO: 215840 - protein, 341 aa, unidentified
MYSIGLDVSKATISIHVPLNSLDLEIENNLKSLKSFYAKLKKLYKKDLDKLVFVYEPTGSYSVILTKFCSTKNIKAFIINPKQSSNFAKALGHRSKSDRIDALMLSRAIAVARIDEIKVPVVNATAETIKELMSYYMFTLKQRVAINNHHEALKAKDGNAYALKDLLKRHKEMKEKEAEILNKIKNTIEKDESMSLAYSNIKTIPGIGEIAGIVLIHLFIRYPQANQKQITSLTGLDPVVKDSGTSVKSKPKISKSGSRLYRGVLFMATMVSIKYNNEMREFYDRLKENGKHSTIAQIAVMRKLIVIAHSLYKNNTTYSSEIYQKACGTKLKKDTNIELVA

SEQ ID NO: 215841 - protein, 581 aa, unidentified
MRVERKVPSPPSPLPPTREKGGKVGRPEAPYWLPSGVSWDRLPEGLKHAAVEILEPAYRRLVLEAASELERSAGGRRTEKGRSRSWRFAAPGMMKMGSNWCLMMAEVAAGSEADSHWSRKPVEKSGPDADTNPELLPPWLGSTWSRVFCPSASPGGPPPWSNCVMDTIYSKVAGLDVHLKSIQCAVRCGQPSGKLVREVRSFGTMTRDLRALADYLGSLGVTHVVMEATGVLWKPVWNILDGRFRLLLVNPRHLKKVPGRKTDVSDAEWMAQLLQYGLLRGSFVPPRAIRELRDLTRHRAQLAGEHTRVANRIHKLLEDTNIKLGAVASDVLGVSGRAMLRALLDGQDDPQRLAELAVGRLRKKLPELRLALEGHSTEHHRFLLRRLLSHLNYLESQSTQLSQRIARKLDELLSAEEQRRLDAIDGVNQTTIENVIAEIGVDMAVFPDEHHLCSWAGICPGNEESAGKRLRSRTRKGNRWLRRALAEAAWAASRTKDTYLAAQYRRLAARRGKKRALLAVGHSILVIVYHVLTHHVEYHDLGGDYFDRLEPERLKRYLVRRLQHLGFDVALTAKQPDDRAA

SEQ ID NO: 215842 - protein, 425 aa, unidentified
MNSNTNQKINQVSENTLVIGIDIAKHKHFACAVDDRGRVLQKSFPIMQSRCGFEGFYERLLALKATHEKQEILVGFEPTGHYWMNLAAFLTHYGIPFVMVNPMHVNRSKELDDNLQTKNDQKDALVIARLMRDGRFSYPRILDGVEAELRNGATLRSKIQEDLNALQNRIIRWLDRFFPEFTHVFKSFGKMAYAVLEMTPLPSDIKGRTPEELLFLYRQVDGMKSPQLPKAKQLVEVAQNSIGLTDGVVMAKLEIATLLSRVKLMQAQLDELTAQLIELAKQMTDYEYLASVPGIGDVTIVDLLSEVGSLTQYAHPRQLIKLAGLTLRENSSGQQKGQKRISKRGRRKLRALLFRVMMPIILHNPAFKQLHEYYTTRTKNPLRKKQSIVVLCGKLLKILHALCKKKTMFNEHQMMNDFASLQTAA

SEQ ID NO: 215843 - protein, 406 aa, unidentified
MRVYTGIDWSENKHDVVFMNQAGAVFAQLTIAHTVDGFLQLDAARQQLQVMPEECLVCLETAHNLLIDFLWSRGYVHVYVIPPSVVKANRGRQGQSKARTDPSDAELIADILRTDQGRLQPWHPDSVLTQQIRAQVSLVRHLTRDVVRSSNRLRAALVRYYPAALQVFSSVRTKVALAFIRTYPTPQAAAALSFAEFEAFAKAHRYPRPSQLRRNYLRLQEPYPEPMPGTVSVFQAEAVQLAGLLLEELRANKEAKRRLKTLFDQHPDAPIFASLPGTGDLLAPALLAKFGDDRQRFPTAASVQALAGTCPVTVSSGKRRSVRFRFSCDRTFRDIAQKWAMCSLSQSLWAAAYWQQTRPRCHSNSHAYRCLANRWLSIAWAIWQKRECYDESYHLQQRALRSKKRP

SEQ ID NO: 215844 - protein, 441 aa, unidentified
MCGGSVTASLPNTGRRVVMKLTYKVCCGVDVHKTFLVATIIASSFALPQYQQKRFSTFYSGLLAFKQWLLDNDCKDVCMESTGKYWVPVWNVLEGSMHVVIANPKWVSAVKGNKDDKKDSKWIGDLFRMGLVPGSYIPPKDIRILRECTRYRSKLVAMRSSEKNRFQNAFTVCNLTLDAVVSDMFGKSSTDILNYLLDTDTVDPDHCVSLLRRSLKKKASDVVEAVNGFNMTAEQKERVRIVQGHFADIDKRISQIDQIIAKLTAEYEGTISLLCTIPGIDRRLAITIVSEIGTDMTEFGSSKRLCRWAGLTPGNNESAGKKKSVRISRAGVYLKPALVEAAHAAVKATQKCPYYRFKYERIMKRRGKKRAIIAIARMILTAIFAMISTGETFNPCDLQKFDMPEDLMKKRIISDAKDAVKLLVSLGLVTEGSISLEALVG

SEQ ID NO: 215845 - protein, 337 aa, unidentified
MRYIGVDLHKSTFYVCSLDLKDNRKYRQYRMEDLEEFIAGLQSEDLVAVESTGNARYFAEQLRSHVKEVKVVNPSQFKVIKNSIKKTDKHDAELLALFLSRGMLPEIRVPEALQAQLKSLAQTRDKLVKLRTTLKNKIHNILNGHGIVSKREDFTSEKGLSRALSYPVSELAKIEMQVIVEQIRHLNQGIAKLDDQLREKGKKLKGFKNLTSIKGIGEKSATILLSVIGNIEDFEDEKKLSAYFGMVPRVSSSNQTVHQGRITKHGSKLGRTTLVQCCLIAKRYSPYLAKFYNNIKQRKGSGKAIIATARKLLTIIFYTLKNNWIFEDFPNFVIQQG

SEQ ID NO: 215846 - protein, 370 aa, unidentified
MKNSTESRVPRKRAVSRRRRELTIGIDLGDRVSRYCVLDDEGNVLFLNDAATTKKGLAQAFASVAASRIALEVGTHSPWVKRLLESWNHEVIVANARRVKLITESTRKDDRLDARTLARLARADPQLLSPIRHRSETAQAHLVMIRARAALVDARTKLVNSARGLTKSFGERLPSCDTDRVSVGLLVDLPPSLQAALQPLMTVARSLTEQIHIYDQKIAQIARSEYPETARLRQVTGVGELIALSYVLTLDDPQRFRRSRDVGGFLGLRPKRRDSGNSRPQLRITKEGDGYLRKLLVQGAQYILGWRGPDTDLRRWGLTLAARGGKNAKKRAVVAVARKLAVLLHRLWVTGDRYQPLRPSQAAPNSSAAA

SEQ ID NO: 215847 - protein, 339 aa, unidentified
MKFALGLDMHKESIVYALITKEGKIHQEGNIKQSQKAVLELVEWIPKDQIIVGMESSTYIYPIYDALNDAGYKVKVAHPTKLTRITKSASKNDEKDALHIARQLLRDDFPESYMLSKEMRDKRELVRQHFRLTAEQTRVKNQIHSLIAKHNYRLKSKLGTKKSIEFLKEIPLPNYAKITLNLLLDQMLRIKASLRVIKNELHHEALRNEEMQKIMRLDGIFEFSAATFFFELGDWHRFKSVSELTSYVGLIPTMSSSAGKTYHGRMRFDGNHYIKYTFTRAAEQAIRKENKFQNYFNKLISRGKKRRTALCAVANKMIRTCYGVLHNEELANQALLEKG

SEQ ID NO: 215848 - protein, 342 aa, unidentified
MTFVGCDLHTRMQQVAVLDTQTGEVSECQLVHAGMTVEEFYAALPRPVTVGIESTGYAVWFHTLMQRLGHTLLVGDAAKMRAMVVRKTKTDRRDARHSLDLLRHDRFPAIWVPDPATRDLRALLTHRMRLVRIRTMVKNGLHAIALNYRLTQGSKLLRQAGLAQLHALALPPHTAQRRDQSLELLAGLTTQIRELDDAITTAALGHPDAPRLITHPGVGALTALTTIVVLGPVARFHDSKHVVSYVGLAPALHASAEKYHLGRITKQGSPLLRFVLGQAAAHAARMDPDLKRIYGALVHRRGRPKAKVAVARKLLVRLFIMLRDRIDYDEFCRRGRTAPAAA

SEQ ID NO: 215849 - protein, 319 aa, unidentified
MAMKIQPIHIGIDVSKSTLVIADEDDSISEIPNESRSIRGWLKTLPGPARIGVEATGIFHVELIERAHQAGHAVYVIDGYKLNRYRESVGGRAKTDASDARLLRRYLAKELDQLRPWSPPPKGYRALQNLLLRRAKLVQCRTRIDQSLRGLTELGPSRRALLRQIDHLDRMIQRRILKVLRSQNWFVEARTVQDIEGIGVMTTAALVMVFRRGRFRTSDAFIAFLGLDVRVRDSGTMKGRRKLTKKGPPELRRLLYMAAMTASRSATWAPIYQRYLDRGLATTEALIILARKLARVAFALLKNGTQYQPKSVQGACMGT

SEQ ID NO: 215850 - protein, 311 aa, unidentified
MNSEAYVGVDVSKVSLDVKVLPTNDTLQISNDDVGINKLIKRLTQIDPTLIVFESTGGLEMLAVGNLIENHLPVVVVNPRQVRDFAKATGRLAKTDAIDADTIARFARDIRPEVRPIKDEHTQLLSALNARRRQIVDMLVAEKNRLSRAPKPNRKSIQKHIQWLERSLTDINKDIDKTIKKSPIWRENDRILQSFKGVGPVVSATLLCDLPELGTLNRKKIANLVGVAPLNCDSGHFRGRRRIKGGRANVRRKLYMAAVASLRHNPLMKDFYDRLVEAGKPPKVALTACMRKILTILNAMMRERTYWNAIW

SEQ ID NO: 215851 - protein, 497 aa, unidentified
MAREGVGVAEIFRHAGGGYRERMAGRLDAGRLKVMGAIETCRTAALGGHMYRCDGCGREHPLYRYHEHAGTESSVAAKETRREGQHLLSERDRQQRSGRMPNSPDTTALTGATHSTIFVAVEISLKSWIVGVHCPDASGGSVSIHTLAAADTAGLLDLVGSVRERVARELGARPRVMLTYEAGYEGFWLARDIERRGAEIDIFMNDPASLRVNRRAKKKKTDRIDARRMVRALKAWDQGDSEAMSWVRVPDVDQEDAKRLLRERDTLVSERTRLNNRIKGLLQLHGIFDLAPRKPEFLERLATARTGYGAPLPPRARAEIERAVAMLRLVESHIEMIEAEKKALLKAGRKAQDASDCDGTAMIAALTRIHGIGLNDATLLAGEVFYRDFHNRRELGSWAGLTSVPWASGDVDHDLGISKAGPSHVRKHMIQMAWRWLKLQPESAITKWFHAYVAKDAGGGRGRRARKRAIVGVARKLLIALWRYATQGLVPEGAIVA

SEQ ID NO: 215852 - protein, 341 aa, unidentified
MDKVSTIGLDIAKSVFQVHGVDAAGAVLIRKRISRAKVLEYFGELPPCLVGIEACPSAHHWGRELQGLGHTVRLIPPSYVKAYLKRGKNDANDAAAICEAVTRPSMRFVPIKTKEQQTALMLHRARQLLVRQRTMLSNALRGHLAELGIVSAKGRNGTAELLRIIADGRVSPAVCGILKVLTRQYGAVGTEIASIDKSIMALHRGCEASQRLAEIPGIGPIGATALVAEIGDWKTFSSGRSFAAWIGLVPKQHTTGGKDRLGSITKQGNRYLRWLLVVGAMAVIRYARKHGTQKRPWLGRLMERRPTKVAAVALANKIARMAWAIMVHGERYKEPKLLPAA

SEQ ID NO: 215853 - protein, 424 aa, unidentified
MKPKPDVEFAAFAGIDWADAKHDICLQAAGNEEREWAIVPHRPAAIDAWASTLRQRFQGRPVAVCLELAKGPLVYALQKHDFLVLFPVHPATLAKYREAFTPSHAKADPTDAELALELLLRYRAKLKPLTAQSGPMRMLLRLVEQRRRLVGDQNRISSRLADALKQYFPDVLTWFPEKDTLLFCDFLTRWPTLKQVQRARSATLLSFFHEHHVRSQSRIDERLHAIKSATPLTDDVAVIRPNQLLVLALVEQLRVTLQAIESFDDEIATVSQTLPDYSLFRALPGAGATLAPRLLVAFGDQRERYQSAAEVQRYAGIAPVTECSGKKHWVHWRLQCPTFLRQTFVEWAGATIPRSFWTAAYYRQQRDKGCSHQAAVRALAFKWIRILYRCWKTGTPYDESTYLNALKRRGSPLLNSIAATAKNT

SEQ ID NO: 215854 - protein, 337 aa, unidentified
MDTSKHIFQLHGVNSAEKVVLRKKLRRKEMVAFFEALAPTVIGIEACGASHHWARILRSFGHQVKLIAAQLVKPYVKRGKNDTADAEALCEAMSRPTMRFVPVKTAEQQAALMLVGLRDRLIRNRTQLSNAIRGYAAEFGFTAARGMAHIDPLLDRIQADESVPVLARELFAAQAEEYAQLQAQIDEVDAKLMAWHKADECGRRLAKIPGIGPIGATLLLMKTPAPEMFRSGRQFAAWIGLTPKDHSTAGKVRLGVITRAGDETLRSVLVAGATAVIQQVRRGGRGSPWIVDLLKRKPPKLAAVALANKIARVAWKLMLTGESYAAKSARVAVTSAA

SEQ ID NO: 215855 - protein, 540 aa, unidentified
MFPERFSNLPAYAFPRLRSLLDAHQPGGEVVHMTIGEPKHEFPRWIVDIIAQNADGFGNYPVNEGMPALLEAITGWVARRYGVTLDPATRVMALNGTREGLYNAMMALCPETKRGGKPMVLVPNPFYQVYMVAALSVGADQTALDQMSVLRHQFRKCVFLTNTEEFEGERPMTKTLYVGLDVHKDTIAVAVADEGRGGEIRFFGTIEHKADSVLRLTKQLAEAGKTPTFCYEAGPCGYGLHRHLTKLGFECAVVAPAMIPRKAGDRVKTDRRDAEMLARLWRAGELTPIWTPGEEQEAMRDLIRTRKQAMDAVKVAKQQLLSFLLRHGLRYENGSYWTKRHRRWLAELQRFRFDHQQLAFEELKRAVDQAEARVVTLDQAVEEAILTWRFAPVVDALRSLRGVNTTIAATVVAEIGDITRFENPRQLMAWLGLVPSEHSSGSTTRRGRLTKSGNALARTMLVEAGWSYRHPPKEGQPYLKRSEHLPQEIKDIGWKAQTRLCKRFRHLSNAGKPQPRVLAAIARELAGFIWDIARKTPLPA

SEQ ID NO: 215856 - protein, 367 aa, unidentified
MKKVSTVAAKPSKNFSEQKLTIGLDLGDRSSWYCVLDESGQIELEERVRTNGKALREVFGGMPHSRIGLEIGTHSPWISRLLSELGHEVIVANARKVRLIGESRKKDDRLDAQRLARLARIDPELLSPVKHRSAQAQADLMMIRARAGLVRARTGLVNTARGLAKSYGERLRGCNVRNMNPEKAEGLSPELQSALEPLLAGMEVLSEQIREYNERIEKLAQESYPQVALLKPIKGVGTLIALTFLLTLEDPHRFRKSRDVGCYLGLQPGRRNSGQSEPQLHISKEGDPYLRTLLVQGAQHILGPFGVDCDLRRWGLKLAERGGRNGKKRAIVATARKLAVLLHHLWVSGEVYEPLHNSSPTTVAAAA

SEQ ID NO: 215857 - protein, 396 aa, unidentified
MKNVYASVKAVGVDVHYKFSTVTMRDAGGKVVRRERLEHGDRRALRGKLSRWAKEAPIVMEASFGWAWLADLMVELGLDPQLANCYKLEQMRKARGLAKTNKKDGDLLSLLPSEREQWWRVWMSPPEVRDRREWMRYRSSLVRIQTATKNRLSALLHRHGILHEFSDLFGVQGRQFLAELWRDGGTQQAPLPAGARRALGGLLELLAQVRGQLARVAQELRGQLERSEEARRLDGVPGIGLILAHTLLAEVGQIERFGNHRALASYSLLGPIARDSGEEDGDSPLGRHLGHRGNHTLQWAFLEAAHGAVRRGGKWRRWFDSVTEGGTRDRNRGYIKVARELVKVVYVVWSKRVDYTDNPPPRQGRAPQSPRQRMKKFLSSTRSGTGQPCRPMAVVR

SEQ ID NO: 215858 - protein, 350 aa, unidentified
MEELVMALNHRWCVGVDLHKDTLTACVFCGCCGEVSFQKIACRCRRQIAEYFAALPRPHAVAIESVGFYRWLWEMLEPIVDELVLADATQARALAGRRLKTDREDALNIAQLLAAGRLPTSYAPPIELQWLRDLTRHRNSFSRQHARILHRVKSIMNANNRPGPARMQSDGLIRYLKAQGEKLPARHVEMLWQCLDALALTERQIAQVERTIGQVMRRDFFREVYGILTSFPGVALVTAATVIAEIGDFRRFAGAKAIGRYAGLNPRVFASGGKQRMGHIAKTGSSDLRWILQQAAWTAIRYDEHVKRIFLRIAKRAGRKAAAVAIARKLLTWMHSAVVKGEPYRTRTAA

SEQ ID NO: 215859 - protein, 313 aa, unidentified
MHSPPYVGIDVAKARLAVAVRPSSEQWVSATDAASLEDLVGRLHALQPELIVLEATGGREGPTVAALAAAGLPVAVVNPRQVRNFARAIGQLAKTDALDAQVLAHFAQLVHPLPRPLPDVHAQAVAALLARRRQLIQMLTAERQRLDTALPAVQVHIQRHLTWLEGELADLDRTLSQQVQASPVWRERENLLRSVPGIGPPTALTLLAELPELGQLDRKAIAALVGVAPLSCESGAWRGRRIVWGGRARVRTALYMATLVASRHNPTIAAFYARLCSVGKPKKVALVACMHKLLTILNAMVRRGTLWSVHLAP

SEQ ID NO: 215860 - protein, 413 aa, unidentified
MAIDTVVQRSAGLDIAKASLVACVRIPGPDGGWRVIKRKFTTMTAELLALRDWLAEHNIARVGMESTSDYWRPVFYLLEQRFDCWLLNARHMRAVPGRKTDMTDAEWICDLVALGLVRPSFVPPPSIRRLRDLTRRRAVLLAERTREKQRMEKLLEDAGVMLSVVATDIFGKSGRAMLDALIAGERDPKVLAELALGRLRKKIPALAEALVGRFDDHHAFLARMICDHIDTISRMVAELTKRIDTEIEPYRSEVELLGTLPGVETRTAEVILAEIGTDMSRFPTAAHLASWAGACPGNNKTGGKSKPSHTRPGDRWLKAALGTAAMGAIRTRQSYANALFRRVAARRGGKRAQTAVAHCLLVAVWHVLATRTPYHDLGGDYFLNRDNPDHRRRRAIAQLQRLGYQVTLEPRAA

SEQ ID NO: 215861 - protein, 425 aa, unidentified
MKKIDYLSTLFVGIDIGSRTNVVSAIDFHQEYFIKMKSIPNAQGGAELLEDMIADVLNRHRDFHYVIIGLESTGFYGVHIANYLSSCNKLAPFSTHVYCLNPKEVANYKASFNSLDKNDGIDSFVIADFARVGRINIQPWRGSQYLALQRLTRHRLHITECIAREKTYLLNNIFLKFSEFAMLNNEEHPFSNKYGATAEALLTEFMTNEDLVNSSTEELIEFISRKSRNRISNPAETASLIQAAARNSYILDKCLYEPLTVSISSSFNCISAFKKELKAIDVAILRTVKGLNPTEYLILNSIPGIGKVYSAAILAEIGSIKCFRNNNSLAKYCGIVWKENQSGNYKADNTPMSKAGNRYLRYYIIEATNSVIRNCPEYKAFYDKKYAEVTTHQHKRALALTSRKFLRMLFGLLDKSQLYSLDKSR

SEQ ID NO: 215862 - protein, 412 aa, unidentified
MTAINQFAAHIGLDWADKKHDVCVQFNNGERVFHVIEHTPEALDTWLEALHKKVKGRIAVAIELKKGPVVFALQKYPFITVFPVHALSLARYRQTFWPSGAKDDPQDAELALELMLRYPKKIRAIEPDNADIRLLQQLVEQRRQLIEDKRRFVNRLINTLKQYYPQLLEWFSHRGSLLLCELIIRWPSLQQLKRARRDTVRNFLNAKGGRATALTGQRVASIDDAIPLTTDPSVIEANALMATALATQIKVVSEIIKTYDERIETLFNTLPDAGLFKSLPGMGPCMGSRMLAALGDNRDRFNSAEEIQNYAGIAPVTERSGQKSWVHWRWQCAKFVRQTFVEWAAKTVNSSYWAKLYYQSLREKGKSHQSAIRALSFKWIRIIYSCWKHRTCYDEAKYLLALKARNSPLLKP

SEQ ID NO: 215863 - protein, 318 aa, unidentified
MTSHALARAAGIDVGQRFLDIGLAPSGKTFRVPNVADGIAIIVERLTQEGIGRVVLEAIGPYAQRLVSALAIAGFEVGLINPRRIKAFREFEGRRAKTDRLDARLIARFALAMTDAIRPLPTAEQLALKALSTRRRQLTEMIAMEKTRLKQAAEPLISVSHRTAIASLTAECRHIEAELARRIGDDPQLACSFEILTSIPGIGERVATALITELPEIGRTDRKAIASLAGLAPHISQSGNAPPRAAIAGGRPCVRTALYMAALVASRHNPQMKLAYQSLRNQGKPAKLALVAIARKLLVTANALVKNNTPYKPQSLDS

SEQ ID NO: 215864 - protein, 430 aa, unidentified
MTKRSSTPADAVLVAIDMSKHRQEVLIERPEGGRRRRMTVMATKADYDRLADDLAAIGRPIVVGFEATGNYHRTLAHRLLAAGFELRLISSVALARTREALHNGWDKNDSKDAQVILHMLQIGATQRYVDPLAAGINDLQEMSKTHEAISKAKTQTWHRILTHYLPLYFPEIERFAGNSRSDWFLALLERFPTPASMTTLGQEAFTREAWSLVGRKVSKARLINDIYETACASVALPVDEESVAVAMFRMVIAQARSLIRQRDEIERTANAMLSENRDYQLLRMIPGIGPINALTILAEAGDLRRFNHHRQFLKFCGLDLATCQSGTFRGRTKLSKYGNARLRRTFWMATQVAIRQRDNSFRDKLGRYVAGHGNDPDRRRKAMTALTAKMARVAHAVIKTGTEYRPFVERTDTRWKDPSLWSREGAAATL

SEQ ID NO: 215865 - protein, 339 aa, unidentified
MNKVSTVGLDIAKKVFQVHGVDAAGVVKVRRSLRRSQVVTWFAKLAPCLIGLEACATSHYWGRELRKLGHEVRLIPPAYAKAYVRRNKNDAADAAAICEAVSRPGMRFVAIKTEAQQAIGGVHKVRALLLKQRIMLINHLRGLMAEFGLVVATGPQHVGELLAILADPEEGGVAEPLRGALLGMTEVLRGLERRIEAIDRQVVAWGRSNTTYRHLITIPGYGPILASAVAALVTDPTTFRSGRDFSASLGLVPRQEGTGGKVKLGPISKRGNGYLRRLLVNGAMSVLGSKRARQNPWIAKLLASKPRKLAAVAVANKLARIGWAIMMRQEDFRTQPAAA

SEQ ID NO: 215866 - protein, 364 aa, unidentified
MKRKVYVGIDVHKETIQIAYLTSNSKEILKEQQIKHNEVQIKKFIKKLKTEWNEIYCCYEAGVTGYPLYRYLKSLGVNCILVAPGKIPRQNTDKIKTDKRDAIKLARLMRSGELESIHVPSEEDEAVRDYLRSRDSLRLDLGRNRQRLMKFLLRKDIKYSTTKYWTVSHYKWLNNLHFNNEILQETFNDYYSRVRVQEENLKAMDKKIQEIAESEPYREKVGILRCFRGVDYLTAMFLLCEVNDFKRFKTAGSFMSFLGLVPGEYSSGSKRKQTGITKTGSPRLRRILTEAAWQHRFPGTGSKIITARRSGQPALVVALAEKASLRLHKKFRNLQLRGKTPQVMITAVSRELSGFLWAAMNLVA

SEQ ID NO: 215867 - protein, 417 aa, unidentified
MKIVYPICCGIDVHKTFLVATIITSNGITPHYSKRRFSTFNNSILQFKQWLIDNKCFDVCMESTGKYWVPVNNFLEDTIRITIANPKWVKAVKGNKDDTKDSKWIGDLFRLGLVPGSYIPQKPIRILREYTRYRSKLVSCKSSEKNRFQNAFTVCNVALDAVVSDMFGKSATYITDYLISSDTFDPEYCTSLLQKSLKKKASSVIESIEGYQITQAQKERIVMVRSHLNYINNSIDKLDQALNKMVNPYESAIGLLCTIPGVDRKSAITIISEIGTDMSQFSNSKRLCCWAGLTPSNNESAGNKKSVRITRAGVYLKPALVQVAHAAVKSDKFPYYKIKYERIYKRRGKKRGIIAIARMILTAIYYMFTTGEEFNPCDLYKIDMPLEMQDKQKEKAVKEAVRFLIAQGIIKDSDISI

SEQ ID NO: 215868 - protein, 340 aa, unidentified
MQYVGLDVHKEFCQASVLDESGEEVSSIKVLTRKEELESFLDGFEDASFVLESTGIWEFVYETIERHGFEMVLAHPLKVRAIAEAKVKTDKVDARTLAHLLRADLVPRSYIPSKDLRDLRQLVRQRAYLVQRATSFKNRIHAELLRRGIRRPKELVKPFTHKSVAWMRSLSIPTVNSSLDCLEAIQLQVEQLNEQLLQEFDRRREAQLIATIPGIGFYGALLIWAEIAGVHRFPDPEHLCSYAGLTPTVSQSASKSHYGGVSKEGSKYLRWILTESTFIHIMNCPDSRLSHFHARVARRRGKQKATVATARKLLHVIYWMLINGEEYRSQGLDLGAKPAA

SEQ ID NO: 215869 - protein, 404 aa, unidentified
MIFVGVDWAEDHHDIDIRDDLGGQLAAKRVVHGVEGIAALHELVASHGDDPTEVVVGIETDRGLLVASLVAAGYQVFAINPRAVDRYRDRHALSGAKSDARDAMVLAELVRTDRHHHRPVAGDSDDVEGLKILARNHQNLIWARTRHVLQLRSMLREYYPAMLAANDGHAGTRDALALLAAAPEPAKGQALSRTRIRSILARAGRQRNLDRTAQRVHGELHAPQLEATPAVSSACAASAVAMVAVIKAMNDQIEVLGSELEGRFGEHPDATIIESQPGLGIVLGARVLGEFGDDPNRYADAKARRNYAGTSPITRASGKSSVVVARFVRNHRLADACDRWAFASLSSSPGARRYYDELRAAGKTHGQALRALSNRLVGILHGCLDHRTNYDEATAWSRYHDIAA

SEQ ID NO: 215870 - protein, 476 aa, unidentified
MPDVQEIPDEEHERVLERVCAIDVAKAAGMVCTRLPREGGRPGSRVSRVWEVPATTRAVMDLAAQLVELQVQKVTVESTSDYWRIWFYLLEAAGLDVQLVNARDAKNVPGRPKTDKIDAVWLAKLTERGMLRPSFVPPTAIRQLRDYTRLRIDLTRERTRHFQRLEKLLEDALIKVTSVASKIDTMSVRDMLEALIAGERDPQVLARLARGRMKVKYPALVEALTGRFDDHHGELARILLDQIDALARQIDQLTTRIDALIAAMPEAAAPEPTDPQGGGTTVMVDPVTGEILASHQTRPASGRTDGLPGDRRALPAVERIAEVTGLNIYSAQAVLAEVGLDMTRFPTAGHLTSWAKVTPRTIQSGSRSRGGSTGKGNPYLKGALGQAAATVARTQTFLGERYRRLVKRRGKLKALVAVARSILVIIWHLLSDPTARFQDLGPSYHANRIDKNRQTRNHVRQLEALGFTVTLNTAAA

SEQ ID NO: 215871 - protein, 335 aa, unidentified
MLMSLFALFERRYHMDFEVKHLICAGLDVHKKTVVAAVCITDPVTLEATYKVKSFSTNNSQIAAMRDWLLSYNCLHVCMESTGKYWIPVFNILEPHMHVILTHPKYVKAIKGKKTDKRDAKWIANLFRFDIVKASFIPPADIRALRELSRYRLKLSYMRSAEKNRYQNSMTISRIRIDCVLTDPFGKTASSIMNYLLSDVPFDEKECAKLIHGGIKVSNEEIFDSIRGFEILSEQRFKMSHAKQHMELLSSYMDEIETELFRLSRPYDEVIKRISRIAGFTERSALFVISEIGADMGVFESDKHLCSWAGLTPANNESANKKKSTRCSKAGQYLD

SEQ ID NO: 215872 - protein, 389 aa, unidentified
MKIFVGIDIAKLNHFAAAISSDGEILIEPFKFTNDADGFQLLVSKLESFDKNSIIIGLESTAHYGDNLVRYLVAEFYQVCVLNPIKTCQMRKNNVRKTKTDKVDTFVIAKTLMMQDDLRFITFFDLDMMDLKALGRFRQKTIKQRTRLKIQLTTYVDQVFPEIQYFFKSGLHQNAVYALLKEAPSPKEIASMHMTHLANLLKVNSHGHFTKEQAKELRVLAQKSVGANDSAISIQITQTIQQIELLDSQLEKIEAEMTDIMKYNDSVIMTIPGIGYINGGMILGEIGDIHRFSNPNKLLAFAGLDPSVYQSGNFQAKTTRMSKRGSRVLRYALVNAAWNVVRNNATFKAYYDAKRAEGRSHYNALGHCAGKLVRVIWKMLTDEVEFNLE

SEQ ID NO: 215873 - protein, 336 aa, unidentified
MEKFLYFVGIDISKATLDFAVVIANKVLFHFHSSNDKDGIETFVKHLKAACPESNLHNSLYCMEHTGIYNNHLLNYLNSKKANVWVEHPVNIKESLGMIRGKNDKVDAKRIAFYAYKNRDEVRLWLPKREVIQKLDRLTATRNRLIKVRKILQSPLTDSQDFITKKDHDDARRACKKTMDSLKKDVQNIEKLIKEVIQSDIYLKELFEFIESVKGIGPTIAAEILISTNEFKDITDPKKFACHSGVVPFENQSGKYKGRSRTSNKANKQLKALLHNGAMSAIQHSPELREYYLRKTAEGKNQMLVINNVCNKLIHRVFACVREKRKYEDSFSLLVA

SEQ ID NO: 215874 - protein, 388 aa, unidentified
MRPADQYAEQDLTRVQSDPAILYASLELSQSSWLVTSLSQGSEKMSKYATSAGDGAALLALLTRLQNRAMRISDGSLRIVVIQEAGLDGFWVHRLLEANGVESHVVDPASIAVSRRRRRGKTDVIDGETLLRTLLAWKRGEPRVCEMVAPPTPDQEDRRRLSREREILLRERVQHVNRIKGLLVGQGISDYDPLHKDRRKRLAEMITGDGRPLPARLKAVLLREFDRIELLLQQIGDVEAERDASVEAEVDGRPSPIALLLQLKAIGPQIASVLYNEGLYRRFANRRDVAAYAGLAPTPWRSGSIDREQGISKAGNPRLRHIMIELAWLWVRHQPDSALTAWFRARVGHERGRVRRVTIVALARKLLIALWRCVTQGEIPEGAAMKAA

SEQ ID NO: 215875 - protein, 503 aa, unidentified
MGTPCSLTPAPTALLCLWLTSGGCHDTPKDYCHDLPPAVPTPLLPPSPVLAEALQVCHPHAAGIDIGEAEHWGAVPPGCDPQPVRCFGTFTADLDALADWLIDCGVTTVAMESTGVYWIPLFELLEARGLQVFLIDPRQAKRVPGRPKTDRLDCKWLQRLHTYGLLAGAFRPEAHVCVLRGYLRHRQMLLTYAAHHVQHMQKALEQMHLKLTQVVSDITGVTGMAILKAIIAGERDPQHLAKLRNPHCHHTEDDIAKALQGTWRAEHLFALRQAVELYAFYHQQITQCDQQIKAHLETFADKSAGRPLPPKARRSKKTNEPRFEARTPLYRMAGVDLTTIEGIEEGTALVILSEIGTDMHRWPSVKHFCSWLGLCPQHKISGGKVLSRRVRPGAHRVAVALRLAARTVQHARTALGAFYRRMRSRLGAPKAITATAHKLARLVYSLLKHGSAYVQQGLDAYESQYRERKVKAMARQAQALGYTLVALGTPEVPHFNALAAPTP

SEQ ID NO: 215876 - protein, 347 aa, unidentified
MTIVEDARVITGGVDTHADLHVAAALDSIGGLLGVQEFPATAAGYASLLSWLRGFGTLTVAGVEGTGSYGAGLARHLAAAGVRVVEVDRPDRQDRARQGKSDPLDAVSAARAALSGRASGAPRGRDGAVEAIRALMVAKRSARHERTQAINQARALIMTGPEELRARFVRRSPAQLIAAIAALRPRPGDVPGYATRVALRELGRRARFLDAQLDRLDELIGPLVTARAPGLLALHGVGPDTAAMLLIAAGDHPERLRSESSWAHLCGVAPIPASSGKTAGRYRLNRGGDRQANSALWRIVIVRMSSHPATRAYADRRSKEGLSKKEIIRCLKRYVAREVYRQLRDGA

SEQ ID NO: 215877 - protein, 311 aa, unidentified
MKSSIYVGIDIAKHSLQISCKELSLEQSLAYEAQELSPLIKQLKKRRSKVQVICEATGGLEALLVQSLGAAKIKCSVLNPRQVRDFARAQNLLAKTDKIDAALLADFGRRLQPAPSAATHRLIQQLAALVARRQELLDFCVAEQNRLGQSTQRWVRQQQLVLLGQLRAHLCQLDQRIKALVEATPWLKARFDRLTQTKGIGSVTALTLLATMPELGTLTSGKAAYLLGVAPLNCDSGTWRGKRRIYGGRRSARSALYMAALSVSRFNHVLSAFYQRLRANGKPPKLALVAVMRKLIIYLNACLKSVPIPAS

SEQ ID NO: 215878 - protein, 343 aa, unidentified
MKLQALGIDLGKTVFHLVGLDSSGRVVVRKRCSRTQLLAFTANLQVQLIGMEACSGAHFLGRALREQGHEVRLMPAQYVKPYVQTNKSDYLDAEAIAEAVQRPRMRFVPIKTEGQLDLQAVHRVRERWVMRRTAVVNQIRSLLLERGLTLPKGRSHLDEQLPRILEDAELNLSDSFRVLLAQLKLELEQLAARIEEMDRVIQKTARENEACQRLTEIPGVGPVTATALIAAVGNGSTFKKGRNLSAWMGIVPGEYSTGGKQKLLGISKRGNKYLRRLFVQGARSVLQQRHKQTPGLSSWLAQLLGRTHQKVVVVALANKLVRMAWAVLCKNERYRAPGLTVTT

SEQ ID NO: 215879 - protein, 356 aa, unidentified
MSSNIKYIGLDVHKEAISIAVLNDVGKWVMESIIETKAATLLQFLQGLQGELHVTLEEGGWAAWLYDVLKPHVHEIVVCNPRRNALLKEGSKSDQVDARKLAELLRAGMLRPVYHGEHGLRTLRELARSYQTISKDLRRVMNRLKALYRGWGIPCAGTQVYAPRYREQWLNKIRQAGVRRRAELFYQHLDGLQALRRQVRGEFLAESRKHKAVKVLRQIPCIGPIRAALLLALMQTPHRFRSKRQLWTYSGLGVETHDSAQHRYVNGRLQRSKKPPQVRGLNQNHNHEMKEIFKSTATNASRCAGPFHDFYADLLAKGMKPEMARLTLARKIAAITLTLWKKGARFDAEHLKAQAA

SEQ ID NO: 215880 - protein, 356 aa, unidentified
MKKMQDYIVRGKDVFIGLEDSKRTWKISVRSEKMEIHYTSMPAEYSVLHSYLKRSYPSCKVMIIYEAGFKGFGLHDRLVEDGYLCVVTPPNKVTQEKDNRVKTDKNDCKRLAKVLENGDYKSCHVPDRERREDRQISRTLSALQREITRIKNQIRRMFEFHDIESPFPAGRWSATEYRKLEEMHIDGSVGKMFELYKMMLRMFLEKKNELLKELKLLSKKAKYAETVKILESAPGIGPQTAIRLALEWGERFALRFKTGKEFGSFTGLTCSEYSTGETVRRGRITNQGNRFVRSWLIECAWVAYKRDPVLLSKFQTVYGHSGSKKKAIVAVARKLAVRLWRCVGLGQTYQVGLIEG

SEQ ID NO: 215881 - protein, 349 aa, unidentified
MIIIGADYHPGFQQIAFVDTETGDCGERRLEHSEGAEKFYRELATQGKKVRVGMEASGHARWFERLLGELNIELWVGDAAVIRAKRGRKAKTDRQDAQHMLNLLLKDDFPQIWVPSWENRDLRQLLWHRHRMVQARTRIMNQLQAVALNEGLRCKKKLWGEQGREQLEAFRLAPWASRRREDLLQLLDEINPTIAKLTLAIELEAEKCPQARLLMTHPGVGALTGLAFVLIIGKAERFQCGKQISAYLGLVPIEESSGERRRLGHITKQGNSLLRFLLVEAAQATTRTIPEWRSKYIHLMMRRGRKIAKVAMARKLAIRLFWMMRQGWNYQQVSKFGSHVGQPGHRHGV

SEQ ID NO: 215882 - protein, 405 aa, unidentified
MTAFVGVDWAEAHHDVCVKNESGEILVKRRIPDGIEGVRQFHELIETFVEEPSDAWVSIETDRGLFVGALVAAGYRVYAVNPFSASRYRDRHSSSGAKSDPGDAEVLADLVRTDSHHHRQVAGDTDLAEAVKILARAHQSMIWTKGRQTNTLRSTLREFYPAALVAFGDNLDAPAALEILTVAPTPTLGRQLSRSKIAAALRRAGRQRRIDESTGAIQDALRAEELEAPMLIAGAFGSSVAATAKVLIELNRQIAELEHEMDAHFEQHPDSKIVLSLPGLGTVLGARVLGEFGDDPERYDNAKSRKNYAGTSPITRASGTKRVVLARYARNRRIADATYLWAFAALRKSPGARALYDRHRKAGDSHHQALRTLANRLVGILHGCLVNQALYDEGVAWGEPKTEAA

SEQ ID NO: 215883 - protein, 343 aa, unidentified
MEQYAGIDVSLESASICVVDSAGRIVREAKVACEPEALIAWFSKLGVSMTRIGLEAGPLSQWLYARMREAGLSVELLETRHVRDAFKAMPVKTDRTDARGIAQLMRLGWFRSVHCKSLPAQELRAILTARKLVQSKRHDLEMSLRGILRGFGLKVGQATPRNFEARVRELVDGHPTLLVVADAMLLARAVLVEQLGKLQKRLVSLARQDMRARLLMSTPGVGVLVALTYAAAIDDPARFRSSKAVGAHFGLTPKKYQSGETDVTGRISKIGDASVRTALYEAANVILTRPVRGSSLKSWAMRVAKRAGMRKAKVALARKLAVVLHRMLANGSVFVAGKAAAKA

SEQ ID NO: 215884 - protein, 461 aa, unidentified
MKSKKPGGKRKEFARPKVDWKALEIVHPNAAGIDVGGSEHWVAVSPERDPEPVRSFGCFTADLRAMAEWLIEKGVRSVALQSTGVYWMPVFEVLERHGLEVYLVNAQHTKNVPGRKSDVQECQWLLKLHTFGLLNNSFQPTDEIRIARALWRQRGNLVADASSAIQRIQKVLIEMNVQLSNVLSDISGVSSMNIIQAILDGERDPWELAALAVPGVKATSEEIVKSLEGNWRRELLFVLRQQVELYRTYQQKIRDCDLELRRHLESLGSKVDLEAQPLGPKPKGKKSGRNTPQFDLRTELYRITGIDWAQVNGMDVVTAQTVIAECGADLSAFPSEKQFTSWLGLVPTNEQSGGKILKRRTRKVVNRAATAFRNAASTLVRSQSYLGAQYRRLRARLGAPKAITAMARKLACLFYRLIKHGQQYVDKGMEYYEARYREQQIQSLLKRAQKLGLQLVTTKAG

SEQ ID NO: 215885 - protein, 369 aa, unidentified
MNSILYVGMDVHTTNYTLCCYSIEKDEVFAVVQVEPDYRNILKYLDQVRKNYGDCHFLCGYEAGCLGYSLYHQLARSDVDCVILAPSTMATTKKKGIKNDKRDAGNIAKCLAYKTYSPVYVLSGDDNAVREYIRMRDDEKDTLKRIKQRLLSFCTRHGKSFTEGRSYWTQKHLAWLEKLDFGNAVLQEAFQEYLILYRQACEKIDMFDKRIEEFACREEYADKVKKLSCFIGIKTYSALALIVETGDFNRFLSAENYASYIGLVPGEESSGNSIQRIGITRAGNSHVRSLLVEAAQCYGRGSVGKKSKTLSSRQAGNEPKVIAYADRANERLKRKFYRILFRSKRNIAVVAVARELACFVWGMMTGNVA

SEQ ID NO: 215886 - protein, 312 aa, unidentified
MEKLYVGVDLHKTSCWVTVLDADGHLLESRRIGTTKPELLEFFGKVRKPAALAVEATLNWYYFLNVMEPLGLELHLVHALKTRAIASARIKHDRLDSRVLAELLRTGFLAEAWIAPRPVREERQLLRYRVHTVQWATRAKNSIHGVLNRNGIRSPFGSPFGVKGRSFLKEVELARTDRWEVDGQLERLDLLGTQLAALDREIRRKAKASPVARALEQVPGIGPFIASLIIAEVGDIRRFPSAKHLVSYTGLAPSLHASGEHRWGGPITKQGSSVLRWALVQGGWRRYRFLMSAFSEAERGYNRAGKRIMNCE

SEQ ID NO: 215887 - protein, 382 aa, unidentified
MRITRVAVFHELGRPGWPPGPAAGRRIVSSRALWAVPEQDRGRLFIEARMVEGTKGSHHKEGSTKMSRHTMICAGIDTGKCKLDVALDQGPDRLQVENVANGHAELLAWLRKRRVKRVGIEASGGYEQAVVSTLRRNGFVVVVFQPAQVRAYAKYRLQRAKNDKIDAALIAACTAEAKKIHPPPDPRLAPFAELLTVIEQLTEDIARDKTRREMSRDEESRRFWSEEIARLKRLVRQRLEQLVAAIRQHRDLAQRLDLIVSVDGVGLRTAVAILVRMPEIGRITRGQAAALVGVAPYDEDSGGHVGARHVEGGRERLRASLYTAALPAAFHWNPELIAIYRRLRAAGKPHKLALIACTRKLIIFVNTVVARGTPWVPQAAIT

SEQ ID NO: 215888 - protein, 403 aa, unidentified
MNSVGIDISKGRSTIAVMRPFGEVVISPFEVRHTGSELSKLARQLKSLDGETRVVMEATGNYHASVAKLLHNAGLYVSVINAKLVHGYGNNELRRVKTDRKDAVKLANYGLDRWLTLPRYIPEEDTRLLLKNCYRQYRQYSKVQTVLKNNLISLLDTVFPNANRLFSSPIRGDGSEKWVDFVAEFWHCRCASEKSERAFTSKYLRWCRKHGYNFREAKAHTIYAEASGHIGVMPKSETTKLLVKQAVSQLRATSTALAALKQEMQSLASVLPEYPVVMDRFDVGPTLGPQLIAEIGDVRRFYSKKALVAYAGLDAPPNDSGDVSGRHKSMSKIGASSLRRTLFLVMSVYLQTAPLDEPVCQFMDRKRAEGKPYCVYMMASANKFLRIYYATVKAYLESLEHTA

SEQ ID NO: 215889 - protein, 334 aa, unidentified
MEEAPSSSSRLTFSLGIDVGKSALELALRDGKDTVAGTTVSNNPEGHKNLADWLQDRGAEPENTCVCMEASGDFQEAVARFLHEEGYRVSVVNARRIKGYAASQLQRTKTDAADAALIARFGWREDLRAWEPPSASESRLQELTRARQALKKEKTRTQNRLDEAEDEAVRRAHRNLLDEIEQQIEDLEEEIEEHVEEDPELKGRCSLLDTIPGVGLQTAAVVISELGSPKRFDSARQAAAYAGLVPSHHQSGTSVRGTPRMSKIGNGRLRRAMYFPAMTALRFNSAVKAFGDRLKERGKEKMVVIGAAMRKLLHICYGVLKSGRPFDASLHPGT

SEQ ID NO: 215890 - protein, 372 aa, unidentified
MTGVRSPQSADVEVVLGVDTHLDFHVAVALDNLGRRLGELAVPTTTKGYKRLVCWAEDFGAVGCAGVEGTSSYGAGLARYLMAAGIAVAEVERPKRRHLRRNGKSDPIDAEAAARAVLAGETAGVPKSADGRVEMIRALRAARRSAVKARGQAANQLQALVVTAPDALRDRLRWLSTRRLVAAACRFRPGTQPETPEAATKLALRSVARRHEALSEEIAELDTQLDRLVAEAAPELLALPAVGTDHAATLLVVAGDNPERLRSEASFASLCGASPVEASSGKVVRHRLNRGGNRDANRALHMICMVRMGQDRRTREYVARRTAEGKSKREILRCLKRYVAREVYRVLVVAVEASPSTTAYPGASSGRLSVVS

SEQ ID NO: 215891 - protein, 356 aa, unidentified
MSQKLDTSPAVIGIDIGKNSFHIIGQNRRGAIVLRQKWSRGQVQARLANLPPCRIGMEACVGAHHLSRTLKALGHDPRLMPAKYVRPYSKGQKNDYRDAEAIAEAVQRPTMKFVATKTADQLDLQALHRVREWFVGQRTGIINQIRAFMLERGIAVRQGLRFLRTELPGILATRTDALSPRMLRILEDLSADWRRLDRRIADLSSEIEALARQDQGCERLMSVPGIGPIISSAMVAAIGTGDAFSKGRDFGAWLGLVPKQLSTGDRTILGSISKRGNRYLRSLFVQAAWVVLVKIGPKHWDRYGLQSWIEAAKKRLHHNVLAIALANKLARIAWAVLHKERAFECVKTNETASRPA

SEQ ID NO: 215892 - protein, 348 aa, unidentified
MNKLSMGIDVGDKKCFISCYSFDGDVVMEGKPIQTNDESTWRELLEELSSQYAITAAFEIGPHYDWLYDLLMEYCQEVEVINSQDFVLIHRSHKKTDKIDSIKIAEAILRGGLPSVYVPAKATRQDRRLVSFIHSHSQKQAKVKNQIRSLLKPLRIEAPCQDILAQTSRKWLAEEVLPGLDEYHQMTLRMLLEQADMLIEQRAQLDQRVSERLADYQSVEILDSIPGVGPLTALALASAIDDVSRFEEPGQLASYFGVCGSVYRSGNMSKRGRMTKRGNIHVRWLLGQALRSLHRKDPKARRRYDRLKRGKHTKVARGAQMRWLVEIVWHLLKKNETYKITVKPKTAA

SEQ ID NO: 215893 - protein, 354 aa, unidentified
MVPGVECQPLKKLEPNEDKLLKLMNRWRHEALQAGHAIERVVIAYEAGRDGFWLARWLRERGVEAYVMHSSSIAVSREHRRAKTDRLDTELLMRAFLGWLRGERRHCSMAAIPTIEEEDAKRPNREHEKLVGDRTRIVNRMKSTLSRFGIRGFKPTLRKADEKLGELRTAEGTLLPENTRAELRRDMTRLRIVREQLKEIEQQRLRKLEAAAPAKKGPHAMVGLIARVTGIGIETADMLVNEILSRHLRDSKAVARYAGLTGSPDESGKRRREKGLARAGNARVRRGMIQLAWRFLRFQKDSVLAQWFRARAADGRSGTRKTMIVALARKLLIALWRMATTGEMPEGVILRPAA

SEQ ID NO: 215894 - protein, 413 aa, unidentified
MKTCGLDVHKDMIFCAIYDGKDSVVEKFNTFTPDLDTMCDHIASHGVDTVAMESTGIYIKAICTVMRRRKMRPAVVNPFLIKQMPGRKSDVADSVWIAKLMYNGMISDSFIPDGTLARLRVYTRRYRRLVQRRDSTLTVVDQQLVGMGIRLSSCLSKITTKSFRRVARAVADGETRAEELERLVHGCLAKKRDGTLRKALTGCAEEQDLWQLRKLLEIVDTYESQIEDALKHMEELAEANYHEEMARIKTIPGISRISAMCIIAEIGADMSQFGSSQRIVGWAGLRPRNDESAGKYKSTAITKGGTHLKPILIQASWGAVHASGSLFHSFFLRVSARRGQKKAIVAVARKLLTIIYAILRDHSEYCPIGDKAKATEAYIHKMALLEMRRHKKLEKMAASLGIDLKSITDKITQ

SEQ ID NO: 215895 - protein, 349 aa, unidentified
MSFKILKNNCCGLDVHKTWIYACIGITDSFKRTEYKQARFSSFTKGLQELCLWLAKYNCIDVCMESTGKYWIPVFNVLEKNNIFVTLSHPKYTKPQKGNKTDRKDAKWICDLYMCGMVKPSFIPPADIRQLRDLVRYRFKLTCMITGEKNRAHNCLTVSNLKLDDVFSDIFGKSSRSITEQILQHPGEVFDVAPFVDSRCKTPIEEIQAAVDGAISHEQAVKLRQCLKHIDELEMHKAEIEREIFRLSQKYESVLDLIRTIPGFDKNPLTAIQVLSEIGADMSVFPTAKNLVSWAGCCPRNDQSSRKIKSTRISRAGSYFKPVLVQIANALIKSKKHLEFTNRYKRIVV

SEQ ID NO: 215896 - protein, 317 aa, unidentified
MALQLTFVGVDISKEWLDLWLAPLKRFERASNDAAGWATVIELLRSLGIEAGTVVAFEATGGYERGLRRALLEAGFDVRRLNALRVRLYAKSLGRNAKNDRIDARVIARYAEAADTTPEILDPARERLAELVSHRRRLVDERVAVGNQTTTLNSVRLQAQNRKRLALIERQIDETDTLILEAIGQVPSLGAKVELLKTLKGVKDITAIALVALLPELGRITRRAIAALVGLAPFDHDSGKFTGTRSIAGGRAAVRTALYMAARAAARSKSPLGDFYKRLIAAGKPPKVATVALMRKMLVTLNAMIRDNAAWKHAKAR

SEQ ID NO: 215897 - protein, 424 aa, unidentified
MNLTQNDRLKQVTSETLIVGVDVGSQTHFCRAFDWRGLELSRRVFKFSNTGMGFLTFLRWTEELMNKTEMKTVIVGCEPTGCYWLTFQKFLQDHDIQLVTVNPFAVNRSKELDDNSPEKSDLKDPKTIALLVKDGRYSTSYLPSGVYAEIREASVCRDQLMKQHVRLSNQIQGWLQKFFPEYFECYAAWDSTSGLMLLKEAPLPQDILRIGAGGINQIWRDAKVRGAGIKRAQTLVEAAQNSVGLEGGEAARLEIWILINDYILKAEQLRRLDEYLEEKVKEVPNVEKLLAIKGVGMSTVIGFIAEVGDIGRFTDPKQIQKLAGLEIVKKSSGKKKGQPRISKRGRRKLRRTMYESARALMNWNPAFQDVFLYYRNRQKNPLGGMQAKIAVACKAIRVFYVVLQTGCDFDEEKFRKDIVRPEAA

SEQ ID NO: 215898 - protein, 413 aa, unidentified
MLKIVYPICCGMDVHKSFVVACIASTNDHGVTTYKSRRFSTFTGDLHRCAAWLVENNCKDVCMESTGKYWIPIYNILEHTCNIVLAHPKYVKAIRGKKTDKRDAKWIADIFKHDLVAGSFIPPADIRQLRDLVRYRRKLTNFTTGEKNRAQNCLTVSNFKLDDVFSDVFGKAASAITTRILENPTEKITDVSGFRTKGMKATDEQVLAAVDGEMCAEQAEKLRIIRSHMDSLELCKANLESLILTTAEKYLPQLNLVMTVPGIQSFAAIGIISEIGVDMSVFPTSKHLCSWAGLTPQNNESAGKKKTTRISRAGAYIKPLLVQCALCAIRAKRFPEVRNRYLALKKRRGHKKAIVAIARMLLTAIYNILKKNEPYNAELYRCCNTPPEHRAVSVEEAIFILQRQGYLVTPSAT

SEQ ID NO: 215899 - protein, 467 aa, unidentified
MSKKKLSLNVVNPNAAGIDVGSKTHFVAIGQSPKDVKSFGVYAQDLQSIASWLKSNDIVSVAMESTGTYWQNLFVELINSGLEVILTNGKFTKNINRKKTDVLDCQWIQKMHSLGLLPSSFLPDNITEKLRTLCRHRSNIIAQRADSSHKMQKFLKYLNFRLDVVVRDVTGLTGLKIIDEICNDNLDPVSLAKHRHYNCRKSEEEIAKALVSNKRKDYLFGLKQEYKRYRFYTNMIKECDEEISLFLKGITKNNAGKTEKLPENKWYKRQNKNSIEGIDLNLVSYHLFDGVDLYAIPGVSHSTILTIISELGPDGFKKFPTAKHFASWLRLAPNNKISGGRTLSNHIPKGSNRLKIALRNAANAVGNLKDSDLGQFFTKIAFRKGRQAAISATARKIAVIMWNMVIKKIQYYPKTEYIFLDQKRKIIRAMRKKITKFGIDPGELGLFGQDRDRIAFEKRKLITSNLT

SEQ ID NO: 215900 - protein, 277 aa, unidentified
MLIIGCDYHPSFQQIAFVDTSSGELSERRLFHREEAEQFYGKLKEQSVPVRVGMEASGHARWFERMLRDLQFELWIGNAAEIRAKRVRRQKTDRQDAQLLLRLLMEDRFPRIWVADAENRDLRQLLWHRHRLVQMRTRVMNQLHVVALNEGLRRKKALWRQAGRQELESLALAPWANRRRQDLLDLLDQLTPKIQQLTQALEEEVEKRPVTRRLMTHPGVGPLTALAFELVIGTPERFHCGKQIASYVGLVPSEESSGNRRRLAISASKATHCFAIC

SEQ ID NO: 215901 - protein, 358 aa, unidentified
MYKTIVHHEGAGSLETAVGKVKLDGAVIKLGLDMHLKEYVTVAQYDQLLPKPARRFRPPEFVPWVEGLLRAGHEVHVVYEACGFGFNLYRQLERAGAHCYVIAPRKLDEQSTRVKTDRRDATTLCQRLSRYLEGNTRELAVIRVPTEEEEQARHVSRQRAQLVHHRQKLEAQGRSLLLSHTLPAPAHWWKKQTFSRLSKLLPSWIVERLEVYRPVLFALEEQIALLSRQLQAAAPGALPRGLGKLTTVVLTREVCVWERFKNRRAVSSYTGLCPGEHSSGSKRVPGSVTKRGNPRMRAALVELAWRMVRFQPQYPPVAKRLGVLCKGSRATGARRKKAIVAVARHLAVGSVAITDRPR

SEQ ID NO: 215902 - protein, 368 aa, unidentified
MNNVKFIGMDVHKNSITIAIADQGSRGPARSYGTINNDLDALDKFCRKMVSTASHLNFVYEAGPCGYNICRHLTNKGFDCMVAAPSMIPKKSGDRIKNDQRDAKMLARLHRAGELTAAYVPDCEDEAMRDLTRAREDAVSAGRKTKQQLKAFLLRHAIVYSGKSSWSKAYFNWLSDIGMAHPAQQVALQEYIDAVRETTARVDRLTDHIRQLVPDWRLGAVAVALQAARGVSLITSVTILSELGDLSRFENPPQLMAYLGLVPSENSSGNQIKRGGITKTGNGHVRKVLVEAAWAYRMKPRVSRILLKRQQHVAKEVCDIAWKAQLRLCTRFRRMAARGKPQPVVATAIARELSAFLWAIAKQVQSVA

SEQ ID NO: 215903 - protein, 382 aa, unidentified
MKNQNRQNTPTSHEQTDAKAEVIKLGIDIHKRQYVVVQQVDGEAPKSPQKFSPDAFLRQAAKIKARAKRVVSCYEAGCFGYVLHRQLLRMGIENEVVRPRNWDEYGSKVKTDGRDARELCSCLDRWLAGNKHALSIVRVPTEEQERTRSLSRQRDTLSKEQKRLQNVGVSNGRYYGFELPMSWWKPCRFRKLEAELPDWFLDIVRPIQEILVVIGSQLRAATAREECKANRELPVGLGALTASVLDEEFRDYNRFTNRGEVGSFTGLCPSEQSSGGSRRQGSINKHGNPRIRAKLIEAGWRLLQFQKDYEPVKKWKEKLERMPRSKASKKKMVVAIARRFAVDWWRINVGQLQPEEVGLRMDYPSAYATKALREGRAVKHHA

SEQ ID NO: 215904 - protein, 519 aa, unidentified
MHQTKYRGIITEAGLLTTPPWEPAFRLAKPLRKSVSPFGGDLCFGWLGGLRLYLYEPLGCVSAFWNWMPAGKDKTMHYQKVLRMLQSIPYLSVGLDVGADFTWMSIMLPNGTLTGKPFKILHSDPHSRDLGVAKIKEAQETYSLESRCFLESTGIYHIPLLCFLRDKGFDCSVINPIITKNSTNMNIRKLHNDKFDSKKAAKVGLDASLKTSIVPDDAVIDLRNLVRDYYYFKDLQSAVVLKLHAELKVSFPAYLNVFSKITTQTSLKLLEAYPLAADMLAAPKDELVESIRQTARFGEKYAVSKYEAICAAAKDAAVFGRALPSNALRIRLYIKTYREYQEHLGSILKELHKAVEKLEGTPVYDRILLLQSLRGVGFLSSVVLIAEMGSFDLFPSPKKLYAYFGLDPAVKQSGKFNADKVHMSKRGSSLARRILHMVALNNLKVDKGTKTPVNPVIHSYYADKCKNKKKNVAVGAVMHKICNIIFAMLRDNKPFEIITPEEHCERYLETHPDKAQNAA

SEQ ID NO: 215905 - protein, 345 aa, unidentified
MYFIGVDHHKQSSTMTVLDEHGQEVRTTKLLNIEADIEAFIRAAAPGGFQAVLESGRSSYVMVDFLRELGGDVKMANPFELKAIAHAQIKTDRRDSKLLARMLRTGMIPEVYQRELGNREAQRVMRQRAFWTRLQVEVKNKIRVLLAQQREAVRLAVDALHESLFGKKGLQYLSQVELRDKDARLMQELVAAFRELEAHKKMSDGMVEARYQELPAAQLIDTVPGFGKTLSVMVAVEIGDVRRFSRVEKLLSYAGVIPSTHGSGEKTYHGHLKQGNNWLRWALIEAVYPATQSDSGLYIYYHRLASRKGANIAKAAAARRLLTIIYRILVEERRYIPDLSKTSAA

SEQ ID NO: 215906 - protein, 345 aa, unidentified
MAEAYDGRQVVGMDLHRRRSVLVRMTMDGRKLETVRITNSPQALRAEIAKAGEHPLVVLEATYGWYWAADVLAAAGAEVSLPHPLGVKAFSYRRVKNDERDAADLADLLRMGRLPEAWIAPAETRALREVVRYRHKLVQQRTSCKDQVHAVLAKCGVAVRHSDIFGRWGSAWLDGLVLPQPYAAKVASLRALAGVLDGEIARLGQQAAGMLAGDPGYAAIRQLPGIGPVLGAVIVAEIGDVSRFRKPGQLCSWAGLTPRHHESDTRVIRGHVSKQGSRILRWALVEAIQHQPAGTRPRDVKDAIIARRGKEARDIAKTAAARQLLTLVFYGLRDGHIRRAISQAA

SEQ ID NO: 215907 - protein, 378 aa, unidentified
MATTRSVLRHELTAKSGDLYMSLDLGDKRWHISIGDGRCGLSHYSVGAGQTEELADCIAKARARLHSSRKAIVHSCYEAGRDGWWLHRWLTEVGVDSIVVDPASIEVNRRVRRAKTDRLDADKLVAMLVRHHSGERVWSVLREPSPEDEDARRTHRELQRLTHERVAHTNRIGSLLVLHNLRPNVVIGGRYWSVWWERHRAQVPSSLAAELEREVMRLQLVKQQVRAIEAIRSQELLEGKQPLVAQLTRLRAIGAKGAWVLVKEMFGWRTFANRRELAGSLGLVPTPYASGDSQLEQGISKAGNRRVRGLLVELAWGWLRLQPSSALAQWFDRRFASGGKRLRRIGIVALARRLAIALWRYLKNGEIPAGAQLKPAGA

SEQ ID NO: 215908 - protein, 313 aa, unidentified
MSQFSVFVGIDVSKDHLDVHVLPEGQAWRVANDATGCAELSERLSGLTGSVLVVMEATNVFWRLAATKLASAGLSAAVVNPRQVRDFAKATGQLAKTDAIDAQMLARFAEAIKPPVRALPSEQCQVAGELLARRAQLMGMLVAEKNRLSTARATKVRKDISATIAFLEKRLAALDEEIDQWLKSTPIDQSRVNLLKSFVGIGERTAKSLLISLPELGSLTSKQIGALAGLAPFARDSGHKRGQRHIGGGRSIVRAALYMPAIRCNAVIRALYERLIDAGKHHYVAITACMRKMLIILNAMLKSNQPWKDPQKV

SEQ ID NO: 215909 - protein, 329 aa, unidentified
MNYSGIDTSNKTLDVIARKKGKSLKCIQFPNDYTGHMAIIAYLRKHEVTRVGIEATGYYHLDLALELDDTKDIEVMIINPRASKNFAKAMMQHNKTDATDANVLAEFVERMDFVRWTSPVGAVLDIRACGRRLVSLSKDKTKAKNQLHAFSKTKSTPLFVMDDIKLSIEQIEAQVANLISHALRLIKQCEHLKERYLRLTSMKGVADKTAIKLLGELGVLAMDMSAKQWVAHAGLYPRSFESGTSVKKRTFIGKIGNRYIREALYMAALSASTHDRHIRGFYLHLIEDNGLTKLQALCAVMRKMLLAMHGMLKDNKSFDGSRFYALKNA

SEQ ID NO: 215910 - protein, 333 aa, unidentified
MNYCCMESESMSILQEGEVENSRKGCTQMTGRLRSLYKGLKAADFLFCGENTGMYSMEVVECFTQRKYLFWLENPLQIKLSSGIQRSKTDRLDARMIAEYACRHRDKAKGCTLPDKGLKKLRELHLTRRMLKECEVKLRNFSGSTSKASSEASQALRKVMKAIMESVKSLEKEIRETLMEEDEFKENTKLALSVPGISWVTASAIILDTRNFTRFDSARQYANHTGCVPHEHSSGTSINKKPRVSKASNRYVNSLLTQGALSLLTHNPRTKEYAQRKKAEGKPFGFIVNNIRNKTIHRLFAVIRNKTPFCWDYVKGSPTSCVNLLQKDVVTFA

SEQ ID NO: 215911 - protein, 319 aa, unidentified
MQERVNKMSKICVGIDVSKDQLDCHTTDDISHHFNNTETDINTLIDWLRGLNHDVDRIVLEATGRYHSLCACLLAKEGFPVVVVNPRQVRDFAKAMGVLAKTDKVDAKVLADFGEKLQPPIRSFKEKQELLLEAQLLRRRQIIEMITAESNRLKIAPESIKIGVQEHINYLRSELDDVDKTLDRLIAESEVCKQKLAVITSLKGLGRVTAINLLANLPELGQLNHKKISALVGVCPFSRESGNYRGKRMIWGGRAQVRQGIYMAALVASRHNPLIKTFYENLLERGKPKKVALVACMRKILVILNAMVRDNRYWEPESV

SEQ ID NO: 215912 - protein, 382 aa, unidentified
MTGTEPHAWGTGLMDDIIFVGLDVHKATVCIAIAEGGRGGEVRQLGVFENRPEILSKLASRLSKGGRRLNFCYEAGPCGYGLYRLLTGYGHECVVIAPSLIPMKAGDRVKTDRRDALTLARLHRAGELTAIWIPDAAHEAMRDLVRARATAVRVLAKARQHLQGFLLRHDRIYHGARAWTLAYRRWLTTVRFEHPAQQIVLQDYIHAVQEAETRRDRLTQQIDELLPNWSMAPVVAALQSMRGVALVVAVTVVAEVGDFRRFANPRQLMAYLGLVPSEHSSGSSVRRSGITKAGNPLARRVLIEGAWTYRMPARVSRKLHDRLEGLPAAVRDIAWKAQLRLCARYRRLAATGRPKVVVTTAIAREMVGFIWAIAHLAQPALV

SEQ ID NO: 215913 - protein, 432 aa, unidentified
MDQVIIGVDPHKLSVTIEARDSREILRAKGRFGTDARSYRQLLAYARQWPERVWAVEGANGIGRPLCQRLLASGERVLDVPAKLAARARVFDTGQGRKTDPADAHAIVMVALRDKRLRELTADPELTVLRLLCDRRDELSQARAQALNRLHRLFLELIPGGAPVKKSTAQYQALLAIVRPRDLAGRTRRRMAAEELADIGRLDAKLKTMKAELTAAVQATGSHLMDIHGVGPAGAARILADVGDVARFPNRHHFASWTGTAPIDASSGQHTHHRLPRAGNRRLNHVLYMAGLVQLRNDTPGRAYYRRRVAEGKTPMEAMRCLRRRLSDVACRQLAADAQSARQAGPGGHSGATLLSSAADLPPDIGTSDQPLPGPAPQTLPPPPATKATPAARTGALPRRRARGVNVQRPTGRTTLTPTSAGAPSKPPGPPS

SEQ ID NO: 215914 - protein, 370 aa, unidentified
MEEGIKFFVGLDVHKDTIAVAVAETGRAPARLVGSIAHDVNQLLKRLARYGEPAQVHVVYEAGPTGYGLQRALARRGYQAQVIAPSLIPKRAGSRVKTDRRDSLRLAELSPAGELRAVWIPDPADEAIRDLARAREDAVNARTQVRQQLKGFLLRHDVRYARRTSWSKTYYRWLATLNFGETGVQTAFTDYWQAVSAADERVGRLTTALVGSIAGWRFASIVAALQALRGIDQINAIGLVAEIGDIGRFAHPRQLMSYLGLVPTEASTGERVVRGSITKTGNAHARRLLTEAAWNYRFQPRIGMRAQRRAEDLPQAIRDVAWKAQLRLSGRFRRLHTRGVHLNKVCTAVARELAGFVWAVARARSELPQS

SEQ ID NO: 215915 - protein, 338 aa, unidentified
MNIVFLGIDLAKNVFQLCGLNQAGKPVYTKRTGRKELLQTLANIPACLIGIEASTGAFYWQREFEKLGHKVKVISLQYVKPFVRGQKNDGNDAQAIAVALMQPTMQFVPPKSPEQQDIQALHRARQRIVNHRTATVCQIRGLLLDRGIPIGSAVSRARRAIPLILEDAENGLSSRMRRTIAELYDLFNDLGRRIHFFDKEIETVFRQSEACQRIAKVKGIGPETATAVVAAIGKGTEFKNGRHFAAWLGLVPRQHSSGDRQVLMNMTKKGDKHLRTLFIHGTRAVVRVATNNNDGHMNQWVNQLKERCGFNKTTVAVANKNARIIWSMLRNETGYQVV

SEQ ID NO: 215916 - protein, 353 aa, unidentified
MNDVKYIGLDVHQATISAAVRDATGKLVMEAILETKTETILQFFRGLRGSLHVIFEEGTWSAWLHDLLQPHVARVVASDPRKNALLQDGNKNDRIDARKLSELLYLNKFNAVYHGEQGLRTLKELARSYLTITKDLTRVMARIKAIYRSWGIPCAGQQVYAPGHRREWVAKLSEAGVRRRAEIYYQQFDGLAPLRQQARRELLVESRKHAAVKLLRQIPAIGPIRAALLVALLQTPNRFRTKRQLWAYVGLALRTYTSGEYRFEGRQLKRSKKVLAIRGLNRNHDLKNIFKGAAIWAAGNPGPFQNFYEACLARGLKPHLARLTLARKIAAITLLVWKKGVCFDAKHLTQQAA

SEQ ID NO: 215917 - protein, 393 aa, unidentified
MYLNVGIDVAKNVHEACILTESGEQIGNFIRIKNSKSSIQKFRESIESASRELNLIPRIGMEATGIYWYSVYFELSRDYEIHLYNPSQIRGFAAVNIRGSKTDQIDAKTIARMLQFGESPKVCYGDKTRIELKEYCRFRFKLKSKLSDLKKRFVRNVHLIFPGYDQVFSSVFTKTSIAILKEAPRPLDMLEMGEEKLFELMKTASRNYYSPDKTRELLSKAKDSIPPEFIEGALLFELESLLKLIEYMEDQIKEIEIRILAIWETVKNKHFIQTIPGISNLMAAIIWAELGDIENFRHPDQIVAFAGYDPKVKMSGKKEVISGPNKRGSKLLRWVLGRAVVQAKMSNPVIGTYFNKKISEGKHYNTAMCASAKKLIRIIWAVERNKKPFQVSD

SEQ ID NO: 215918 - protein, 378 aa, unidentified
MNRIIKIGMDVHTTNYTLCIFEPSFEHDGTVHCITQVKPEVKNIIRVIETFKKKHENEELNIVCGYEAGCLGYSLYHELKEKGIECVILAPTTMKTEKGGRKLKNDYRDAKMIAECLAYGGYSAVHVPTELDNSVKEFIRMRDDIKENLKSIKQQIIAFLTRNGKQFEGKSFWTRKHIDWINTISFSEPLLQDTLKEYMIEYNHLCDRVETLDKQIEEISLKEEYVEKVQQLQCLIGIKTHTALSLIVETSDFNRFKKGNMYSAYLGLIPGDDSSAGHENKLGITKAGNSHLRKLLVEAAQGYTRGKVGFKSKDLKSRQEKCSSEVVAYADRANERLRRKYYRMTLRGKRYNVAKTAIARELACFVWGIMTDHIDLCN

SEQ ID NO: 215919 - protein, 338 aa, unidentified
METYAGIDLHSSNNYIGIMDQDHKRLFGRRLSNSLDEILMVLEPFKSDLQGVVVESTYNWYWLVDGLQEHGYKAHLANPSAIKQYEGIKHTDDKWDSFWLAHMKHLNILPEGYIYPKEQRPVRDLLRRRLFFVRHRTANILSLQSTITRNLGIKMSSNGIKKLDMDEACDLFDSSNLVFMAQNNISTIKHLGKIIKGIENEVKSQVKLRKEFVMLTTIPGIGLILGLTIMLEVGDIGRFFKVGNYSSYCRCVGSKRLSNGKKKGENNKKNGNKYLAWAYVEAAHFAKRHIPKAQRFYQQKMAKANGAVATKALANKLARASYFIMRDQVPFDEDMLFR

SEQ ID NO: 215920 - protein, 427 aa, unidentified
MSTLQIINPNAAGIDVGSEYHYVCVPEGKAEPRVRKFRCFTGDLEELSVWLKECGVATVAMESTGVYWIPLYDILSAHGFEVLLVNARYIKAVPGRKTDVKDSQWIQQLHSYGLLHGSFRPDDETCILRGYMRQRDNLVKGAAVHIQRMQKALVQMNIHLHKAISDITGITGLKIVQAIVDGERDPNKLAAMRNNRVHNNEETIAASLKGNYRKEHLFTLKQELDLYKYYCQLIDDCEQEINNYLNEHNDGDSGVNKPFNLKEELTKMAGVDLTKVPGLGTLSVETLISEVGVNPNKWPSEKHFASWLGLSPANKITGGKILSSRTRKVNSRAAGVFRMAAVAVGKTKNTALGSFYRKIKAHAGAPKAITATARKLACLFYSLLKHGESYVEKGNEYYERKYKERSIKNLTKRAQEFGFNLVKCVNA

SEQ ID NO: 215921 - protein, 386 aa, unidentified
MQKLNDLSRSLTALELDSTLIAVIEMSLSNWLVAGIVPGIERQPLKKLAVDESALLKLLHRWREEAEKAGRRIERTAVAFEAGRDGFWLARWLKAHSIEAHVIHAASVAVSREHRRAKTDRLDSELLKRAFLGWLRGERDHCKMVAIPSIKDEDAKRPNRERESLVGEQSRIVNRMKAALIRLGIRGFNPKLKRAAGRLDGLHTPEGEPIPPNTLAELRRDMERRRLVSNQIRQIEEARLERLEQAPSDGPHAMVRLLARVIGVGIETADMLVQEVLSRNMRDRRAVARYAGLTGSPDESGRKCREKGLARSGNARVRRGMIQLAWRLLMFQKNSALAQWFRARTENARGTRKTMIVALARKLLIALWRLVREGVVPDGVVLRPTQ

SEQ ID NO: 215922 - protein, 415 aa, unidentified
MDVVEERCAGIDSSKTDAKVCIRLPGSGKRARREVRTFSTMSDGLLELRDWLVDNQITRVGMEATASYWKPLFYLLEATEGVEPWLLNAQHIKTVPGRKTDVKDCEWICRLVEYGLVRPSFVPPRDIRQLRDLTRYRTETTRDRVRDVNRLAMFLEDAGIKLSSVVSDITGRSARAMLDALVAGERDPHVPAELALGSLQGKVPLLTRALTGAFSEHHAFMVASMLRAIDEADARIARLSEEINRQLLPLRAQTELLITIPGISLTLAQILIAEVGVDMGRFATAGHLASWAGMCPGNKESAGKRLSGRTRHGDTWLKTALFLAGATAARSKGTYLGAQYRRLVPHRGSKRATVAVGHSILVAAWHILRDMVPYQDLGPDHFTNRLGKERHTRRLIAQLAALGLDVTVTPREEAG

SEQ ID NO: 215923 - protein, 343 aa, unidentified
MESIYYIGLDVHKKSIAYCIKDVTGKIVCQGMVKAERRALRKWLVDLPGSWVGAMEATMFTGWIYDFLKPYAVELKVAHPAMLKAITAAKKKNDRADAEKLADLLRVNLLPECTMMSEELRELRRILRYRNLIVRTASKMKNKISGLLMEVGAVYDKRKLHGKRYFGQLLERVEDVPESVKDLLKLSRSSMELFEAVQKKLLKTLREDSLISKRVELLRSISGVGEVMALTWVLEIGDPKRFSNSRQAISYCGLCSAQHESAGKEHRGPISKKRNKYLQTMLIEAAHLAPYWNPQLAMLYEKELTRGNRNRATLAVARKLVIYMLAVDRRGEPFTTEKESLVA

SEQ ID NO: 215924 - protein, 365 aa, unidentified
MQKISTMRRNGKNIFKGQLTIGLDLGDRFSAYCVLDEAGEIILEQKLPTTPEAMKQTLGKMPRSRIAMETGTHSPWVSRLLAALGHEVIVAHAQNVRLIVKSRRKDDRLDARTLARLARIDPELLSPVRHRSAQAQLHLTEIRARAGLVSARTALVNAARGLVKSYGERLRKCGTQQFRRETMSGLSAGLREALEPLLQEVESLNERIQEYDQRIERMAKERYPETALLKQVKGVGDLIATTYVLTIEDPHRFRKSRDAGCFVGLQPGRRNSGESEPQMHISKEGDEYLRTLLVQGAHYILDPFGEDSDLRRWGQKLAERGGKNAKKRAVVAVARKLAVLLHRLWVSAEVYEPLHNSQKVMSAVA

SEQ ID NO: 215925 - protein, 355 aa, unidentified
MTFGIDPHKRTHTVAAVDGLGRQLGQMTVTKTTSEANLALLRWAERFGPDRQWAVEDCRRWSRRLEGDLLRAGERVRRVPPKLTAHARDVDRSYGKSDPIDAVAVARAALRHPDLPVAHLDGPTRRLRLLVDHREDLVNERTRGINRLREHLHELDAEWDPPKQALRRLCQLDAIITRLAAIEAAGVDSIEGVVARIAGEIAAQVRQLTVAETALEREISTLVAPLAENLLQVVGVGALTAAKILGEVADITRFRDANAFARHTGTAPVPASSGGTQRHRLARTGNRQLNAALHRIALTQTRCHPPARAYRQKRHANGNSPTEATRALKRQLSDVIYRALHADTHQPATPLPQAA

SEQ ID NO: 215926 - protein, 338 aa, unidentified
MIVIGVDVHKQSLTAVAVDEAGRMLDEQTVAVTDGALVAWASTLCGERLWALEDCRQLTRTLERELLSVGEELVRVPPKLMAPERRAGRARGKSDPIDALAVARAALREPSLSRPREDEQPFRDLKLLVDHRDDLVDERRRAQQRLRWHLHQLDPAFAVPAKSLDRPTHLDRVGRWLARRPPEVQVRVARDLVVRCRSLTRAIVELDRELQQCTAQLAPALLELPGCGAITAAKLLAEIGPIGRFETDAQLARHGGVAPLEASSGRVQRHRLDRGGNRQLNCALYRIAITQGRYYPEARAYLERKQAEGKSRREAIRCLKRQLARVVFNTLKASPALT

SEQ ID NO: 215927 - protein, 315 aa, unidentified
MYHFFIGIDISKDSFVVAKHGDKKSTNYPNNKKGFLHFCKDFKQQLPQSLVVLETTGGYEIELICYLQSKKILVHRANTRKVKSFIRSYGTLAKTDSIDSFGLALYGYERHSKLEIYQESPHKKLLKLVQRRNDLKIMLVQEKNRLKAPDQKAFKTSFNAIIKVIQQEMHKIEKIIAELCAKHHQIEEIVKILKTIKGIGDITAIQLIALLPELGTLNRKQIASLAGLAPHPNESGKKIGYRATKGGRSDVKPVLFLSAMTAARSKSALGDFYNKLVSSGKKKMVALTALMRKILVIANAKVRDYLVSLPNLQHG

SEQ ID NO: 215928 - protein, 372 aa, unidentified
MNYNTVYVGMDVHKESFTLCSCKYEDEKASHYQRTPASYKNVLRYLAFLRTIYGEDTRFVCGYEAGCLGYSLYHQLENFNVECVILAPTTMLEQRSKRRIKTDKRDAEIIARSLAQHNYSPVHIPTETDNQTKEFIRMRDDHKAELKKIKQQILSFCLRQGYQYDGSGNWTAKHVKWLRSLEPAGLYKEILDEYLLTYTILTDKLNRLDQRIEELASKEEYKESVSKLTCFLGIKTHTALSVIVEVGDFQRFVSARKFAGYLGLVPGQHSSGDDRNGLGITKAGNTHVRRLLVESAQSYTRGKIGYKSRVLRSRQAGNSPQVINYADRANERLRRRYYKMVLKDGKKYNIAKTAIARELACFIWGMMTDNIY

SEQ ID NO: 215929 - protein, 339 aa, unidentified
MKLYVGDDLHANNNFLAIVDLEGKRVDQKKLPNDLFVILDFLKPYQKDIVGIAVESTFNWYWLVDGLMDSDYKVHLANPSAIQQYSGLKHSDDKHDAFWLGQMLRLGILPEGYIYPKEDRPIRDLLRKRRHLVKLRTSLMVSLQNIISRNCGVSFRANEIKRLKEDRVSPLLESNQDLALAGQTSKEMIDQLTRQIQKIEGTVLQRVELKEAYRYLLALPGVGKILSLTIMLETGPIGRFAQVGNYASYCRKVPSRWTSNEKTKGKGNQKNGNKYLAWAFSEAAEFARRYDDQARSYYTRKMRKTNFMVAHSALAHKLARAAYYLMKDQVPFMPEKLFS

SEQ ID NO: 215930 - protein, 402 aa, unidentified
MNCVGIDISKGKSTIAVMRPFGEVVVSPFEVLHTDSELSKLARLLKSLDGETRVVMESTGNYHAPVAWLLHDAGLYVSVVNAMLVHDYGNNSLRRAKTDKKDAVKLANYGLDHWLTLPRYVPEEDTRLMLKTCYRQYQQYSKVRTMLKNNLISLLDTAFPDANRLFTSPPRADGSEKWVDFVAAFWHCECVCGLSEKAFTAKYQKWCKKHGYNFSEDKALDIYASACGHFGVMPKTDTTKLLVEQAISQLRATSAALAALKQEMQSLAASLPEYPVVMEMFGVGPALGPQLMAEIGNVRRFHSKKALVAFAGIDAPPYQSGQIDVRSRSISKRGSASLRRTLFLVMGVLLQCAPMDEPVYQFMNKKRSEGKPYRVYMMASANKFLRIYYASVKAYLDSLEHD

SEQ ID NO: 215931 - protein, 422 aa, unidentified
MKLTYPVCCGVDVHKTFLVATIIKTDGLVPKYYKKRFSTFSRDLLAFRQWLLDNDCKDVCMESTGKYWVPVWNILEDAIRVVIANPKWVSAVKGNKDDTKDSRWIGDLFRMGLVPGSFVPSRKIRVLREFTRYRYKLISMRSSERNRFQNAFTVCNSTLDAVLSDMFGKSATAIQNYLLDTDVVNPAYCASLLQRAAKKKSADVMAAVEGFKMSAEQKERVRIIQEHFSDINARVARLDAEINKLVSEYESQIALLCTIPGVDRNLAITIISEIGTDMSEFGSSKRLCRWAGLTPGSNESAGKKKSVRITRAGVYLKPALVQAAHAAVKSTKSVYFKSKYEHISKRRGKKRAIIAIARMILTAVFAMLKTGEVFHPCDLQKYDMPEQLRRRQVVSSAKNAVKLLVSLGVLQEDSVSLAALAG

SEQ ID NO: 215932 - protein, 308 aa, unidentified
MNNYIGIDISKKTFDVHYQEDGRNEHYQYTDENVSNCIERFKTIKPELIVMESTGGYEISLASRLQNVGLPTAVVNPRRIRDFARATGQLAKTDKLDAKIIAQYAAILKPSPQNAVDESIRKLKSLVVRRRQLVNMRTAESNRQEHALDKDVIQSIETIIRAIEDETAKIEELIRNHISQTPELKQKVDLIQSVPGIGETTASMLICELPELGQMNRRKIASLVGVAPINRDSGQFRGKRMTGGGRKEVRKKLFMPTLVAIQHNPVIHAYYQRLTGTGKSKMVAVVASMRKLLIIINTMVANNQPWTS

SEQ ID NO: 215933 - protein, 536 aa, unidentified
MEVLHERCAGLDVHKDTVVACARCLEGGTWRHTVKTFGTTTKALLALADWLAEQGCTHVAMEATGVYWKPVWHILEGSFELVLANAAHIRNVPGRKTDVNDATWIANLLAHGLIRASFVPPTAIQDLRTLMRTRKQLVRERARHVQRIQKALEDANIKLASVVSDVVGASGRAILREFIMGTTDPEALVAVTNSRLHATRDTLVEALLGYVRAPHRFLFKLHLGQIEGLEKALEAVDKQVNALLDRFRGRVARLMTMPGVDEVVARVLVSEIGIDMTRFPTAGHLVSWAGLCPRNDESAGKRRSTRVRMGALWLKTNLVQAAWCAARTKTGYLRAQFLRLKSRRGPKKAIVAVAASMLTAAFYMIRDDVDYRDPGSDYFDRIDKAKSTSRLVGRLRHLGYEVTLAEAVAGDTGVAREASGATPVTPDHAEGGSHSEAGGKSTAAKENTPADTLEHVEDIFAKRTPPAKPERDPRLPPPGTILRKAYKANVHEVTVLLAGFEYRGQRYTSLSKVAKHITGTSWNGYQFFRQELTTAQ

SEQ ID NO: 215934 - protein, 352 aa, unidentified
MTVYIGVDLHVRTQTVCWVDTADGEQHEVPLDHQRDDVRAFYAQFAAPAVVGVEASGYSLWFHRLLEELGHRLLVGDALAIRQCARRRQKNDRRDARLLLDLLLHEEFPAIHIPAPASREVLALLRYRHRLVRIRTMLRNGLQAVALSHRLRLGPKLFTVGGLQQFAALPLTGAFAVQRQHSLALLASLAEQVLAVEAQLQDRAQQDPRVLRLRTHPGVGLLTSLAVVHTLEPVSRFDRARRVAAYCGLDPKEHSSGDTQRWGHISKQGNRLLRFLLIEAAHTAIRGDDDLCRFFFHLQARKNASIAIVAVARKLVLRLYRMLRDETDYTQFRRRGRDARRAREDTSQAASG

SEQ ID NO: 215935 - protein, 408 aa, unidentified
MEAMLERCAGLDVHQASVTACALTGSLDAKPAQSVESFGTTTTELIRLRDWLVKHEVSHVAMESTGVYWMPVWQVLEGSFELVLANAQYIRNLPGRKTDVSDAVWLAQLLRSGLVRGSFIPPELFRQLRNYSRYRFKLVGQATAEKNRIQKMLETAGIKLATFLSDVFGVSGRALLQALIEGEVLTEDHVRSLVHTQVKRKVPQLVQALNGFFSLHHRDMIRMHLEHLRFLEQQIEELDARIQQLLQPYEADLELLKSLPGVDETAAAAILAETGPDMSPFPTDAHFASWAGVCPGNNESAGKKKSGKTPKGKKILKATLCQCAWGASSTKDSRTKAYFERIMRRRGKKKANMAVAHLLVRLIYVVLSTKKPYSELGFDYLLGRQSVEDMMVKKLRSLGYNVTKQLTE

SEQ ID NO: 215936 - protein, 371 aa, unidentified
MKKRSSSQKNRKRTVKTKRAQESVTIGMDLGDRTSRYCMLGSEGEILREGQVQTSKAGMLEAFGSLGRARIAIEVGTHSPWVSRLLGSFGHEIIVANPRQVKLITESSRKDDRLDAQTLARLARIDPQLLRPIQHRSETAQTALTVIRVRAALIGVRTSLVNTARGLAKAMGERLPKWDADQMGVLRAESLPPKLRQLLEPLLKEVESLTEKIKDSDREIEQIARKDYPETVLLQQVGGVGPLIALTFVLTIDDKNRFRRSRDVGCYVGLRPRRSDSGQRQPQLRITKEGDPYLRTMLVQGAHYILSRRGPDTDLKRWGLRLAERGGKRAKKKAVVAVARKLSILLHRLWVTGEVYEPLRNLRDLRKKSAA

SEQ ID NO: 215937 - protein, 385 aa, unidentified
MNIVRPNLSIEVANQITCFMAIELSKTSWVVGMLTPLSNKISLRSIPCGAVEKLMAIVDQTTNRVMQTTGGPVQVVSCYEAGYDGFWLHRFLATHRIINHVLDAASLLVNRKARRAKTDRLDAEKLVRVLMAYWRGEPKVCSIVRPPSVEDEDAKRLHRERQFLMKERVQHIGRIKGLLAAQGVYDFRPERKDWRNRLAEIRTGDGRPLPSRLKAEIDRQCQRLALVDTMLKEIDQQRDAAVESKSAPSETVVRIQRLTHLKGIGPQIATVLGTEIFYREFANRRSLGSYLGLTPSPFKSGGMDRDLGISKAGNPRGRTTMIELAWLWLRYQPGSKLARWFEQRTNGLKGRVRRIAIVAVARKLAIALWRYVETGLIPADAELKA

SEQ ID NO: 215938 - protein, 401 aa, unidentified
MNEFTVEAGGCEPCAWASVRMKALGTEPVSYAAYVGLDVHKDTIAVAVAYPGRGAAEFRGEIANTPRALAKHIRRLSAHGELLGFCYEAGPCGYGIYRQIVTSGHDCVVVAPSLIPKKPGVRVKTDRRDALKLAQLHRSGDLSAVWVPDEEQEAMRDLTRAREDMKGMELKARQQLSAFLLRHGCHYGGKTRWSQAHFNWLESLRFPRDWQQVVLQEYIDAVKAAQARVAAMTEQMVRALPQWQLAPVVESLIALRGVDIVAAMTLMAELGDISRFDSPRQLMAFLGLVPSEESSGRRKRKGAITLTGNAHARRMLIESAWSYRFPARQTMHLKRKARKAQEPAKAIAWKAQKRLCARYRELIRRGKDSKLVMTAVARELAGFIWAIVCDIMPQVNQRKTA

SEQ ID NO: 215939 - protein, 363 aa, unidentified
MRFYKNQHQFYIGIDLHARTMYICVINNIGETVFHKNMECSRDNLELVTNTFGKDIVVGVECIFTWYWVADFCAEKGIDFALGHAYYMKSIHGGKTKSDKIDSEKIANMLRGGMFPIAYAYPKDKRAVRDLLRRRLFFVRQRAELSVHLQNTNHQYNINDPLTSSRMRSEVYRNTIPQKFSDPATLKMVNADLAMFQAYHDIITKLEFQIEDSMEVQDPVSYSIINSVPGLGFILSLTILYEIDDIHRFSDVGKFISYCRLVKCSHESAGKKEKGGHNKIGNVHLKWAFSEGAVLFLRNNERGQRWHDKLVQRYGKAKAMSIIAQKLGRTVYYMLKRKEAFNPDKFYGDKKIENKDSGGEPLA

SEQ ID NO: 215940 - protein, 395 aa, unidentified
MNSSQAVGWDIHRKFSKVSVMEITAEGEIRVNERARLEHVDRDAMRQWLSRLPKGTPVAMEAAFGWPWIADLLEELKLDPHLGHPPALKVLAQHEAKSDRCDGDRLAKFQLQGILPESYLAPPEVRQIRERTRYRMALSALRSAVKNRIQALLHRFGILHAYSDLFGKQGRQFLEQLKLPPASRAVLEGSLELLDEIVRQIKVVEKWMEENLKEDETLGLLQTIPGIGLILAHVIRAEIGEISRFPSARHLRSYSGTAPVSDDSAERHGARHCSPACNHALRWAFIEAVTGVLLTKGQRGQRLRRLYARLTHGGHSNNNQAKVALAGELAERVFIVWKKRTPYQEEPAPRPGAVRPQPAQSSRPQENSNHANMRPDQSRHPIARRSTSRAGQALS

SEQ ID NO: 215941 - protein, 348 aa, unidentified
MTIVDAPRPVTGGVDTHLDLNVAAALDPVGGLLAVAEFPATSAGHRRLLGWLAGFGPVTRVGVEGTGSYGAGLARYLRAAGVEVVEVDRPNRQARRRAGKSDPLDAIEAARAALSGRASGLAKTRDGNVEAIRALVVARRSARSAKIMTLNQIRHLSFTAPEELRERLKDVSRQRLAARAAGLRPSRREGADPVTAATKTALRILGRRVLALDEEKARIDALLSGLVTQTAPDLLTLHGVGIDTAATLLVTAGDNPGRLRSEAAWAHLCGTAPIPASSGKVTRWRLNRGGDRQANRALWGIVITRLRNDLRTQAYMTRRLAEGRSKPEVIRILKRYVAREVYHHLPRS

SEQ ID NO: 215942 - protein, 388 aa, unidentified
MKQVTTIGLDLAKKVFQVHGVDAAGVVVLRRSLRRRQVLAFFAKLPSCLVGIEACATAHYWAREITKLEHQVRLIAPAYAKAYVRRNKNDPADAAAICEAVSRPSMRFVTIKTEAQQAAAGVHKVREMLVKQRTMLINTLRGLMAEFGVVVAERPRHVSELMAILADPTDRRIPTPLHEGLSALVKTLGGLERRIEIVDKQIVGWGRDNATCRHLITIPGYGPVLSSAMAAMVVAPAVFAGARHFSASLGLVPRQDGTGGKIKLGPISKRGNGYLRRLLVNGAMAVLCSKRAKEDPWLAQLLESKPRKVAACALANKMARIGWAVMMRQEDFSRRQHDQPRPTPSQPGTVLPAVKTAARACGGGLRPVLTAAAPGATGKPGRDGETAL

SEQ ID NO: 215943 - protein, 338 aa, unidentified
MTVVTVGIDLAKNVFAVHGVNAAGKAVLVKPLVRRAKLLELIATLPACLIGIEACTGAHYWAREFQKMGHTVRIMAPQLVSPYRMSGRHGKNDAADAAAICEAVTRPNMRFVPIKSVEQQGQLFVHRAHQGYVSERTALINRIRGLLSELGIVLPQAFKAFLSGRAQVLEDLPDYCNQVIGDLLNELYHIEEKIKNSEKLIQQLARDNSAAQLLMQFRGIGPITATAIVASIGNGHDFKNGRQFSAWLGLTPRQQSSGGKARLGRITKAGDSYLRTLLVLGARSVLLGAAKNDDPVSRWALQLKERRGYGRALVAIAAKNARMCWAMLHLRDEFRFPA

SEQ ID NO: 215944 - protein, 268 aa, unidentified
MLSSNVKYIGLDVHKEAVAIAVLNGAGKLVMESIVETKASTLLDFLQGLRGELHVTLEEGTWAAWLYDVLKPHVAELVVCNPRRNALLKEGSKSDKVDARKLAELLRSGMLRAVYHGEHGLGTLRELARGYLTIGKDQRRVMSRLKALYRSRGISCSGKQVYTPRHREQWLNKITQPGVRRRAELMYQQLDGLSVLRHTVRGELLAESRKHQAVKVLRQVPLIGPLRAALLLALMQTPLRFRSKRQLWTYSGLAVETHDSAQHRYVDG

SEQ ID NO: 215945 - protein, 312 aa, unidentified
MIQEGYGGIDVSKDRLDVMVLPERQFFSVENSTAGCGELVQRLRGWSVATVGLEPSGGYERGVIRALLAAGLSVRRINPNKLRQFARARGVLAKNDHLDARLIAEYVAIMPTRVVQCDPVTERLAEVVTMRRQLCDEHVAVENQTAHLEDAMLRRLNKRRLARLEADILLLDRRMAEIVASNASLARRYELLTSMRGVGPTLAFTLIALLPELGQMGRKQIAALVGLAPYDFDSGRLKGHRCIYGGRLPVRNVLYMAALSACRYNPALTAFHLRLADANKKPKVRIVAVMRKMIVILNAMLRDNVLWQPNST

SEQ ID NO: 215946 - protein, 465 aa, unidentified
MEIVNPHAGGIDCGAQEHYVAVPPQSVEPGEPVVRCFSAFTEGLDALVEWLKACGVTTVAIESTGVYWIALCQKLEAAGIEVFLVNARHVRHVPGRKTDVKDCQWLQRLHSFGLLSASFRPEDAICRLRSLQRHRLNLSRRLGAEIQHMQKALQQMNLHLHHVVSDITGVSGLRILDAILAGQRDASQLAKLRDHRVYKSTLAQMEAALVGDYRPEHLFVLGQSLQAYRFYQARTQDCDAEIERLLQQLAERFESSSVLAAELSQPEVLNDAAPSQNPRPVKRKVKRKPQANEPKINLADYLRRICGVDLTQVIGLNVLSVLLIVSEIGVDMSKWRSAKAFCAWLGLCPRNKISGRKVLDTRTCKVINRVATTLRLAAQAVGRTDTALGIFYRRKKAHLGPPKATTATARKLACLVYHLLKYKEQYREPDPATYQLKVQKTILAKIQKQAAALGYKLLPNALVPA

SEQ ID NO: 215947 - protein, 336 aa, unidentified
MKVARIGLDIAKSVFQVHGVDAHGRTIVRKTLSRGEVLRYFVQCPPCMIGIEACAGAHYWARELVRLGHDARLMAAQFVTPYRKSGKNDANDAEAICEAVGRPNMRYVPIKSEEAQAVLTVHRARTLLVSERTALSNQVRGLLGEFGLVFGQGMSTLKKMLIRIGGGDFSLPSVARETVADLHDRLRSLDTSIALYDRRIAQLARQSESAQRLMQIAGVGPLTATAMVASVGNARAFANARQFAAWLGLTPRQYSSGGKTKLGAITKRGDVHLRTLLIHGTRSVLLRARDNDGKNRWVLNVKARRGANVAAVALAAKHARIIWAMLARGTEYRLTA

SEQ ID NO: 215948 - protein, 338 aa, unidentified
MLHVGLDLHKRFSTIAVMDEDGSVRLEDKLYHDDRARLTEFFSEVAGKAVVTVEATRNWYWLYELLEEQGVTIKLANARKVRLIAEARLKNDKVDPKTLAQLERTGFLPEAYIPPRAIRDNREYLRYRLTLVRLRTGLKNKVHALLDKLGISQPFADLFGPAGRRFLGQIKLRPVYQEELSNYLALIDDLERRIVAVTKEIKRQLKPDPRAKLLMTIPAIGHLTAYLLLNEIGDIKRFPTPGKLCAYGGIVPIVRQSADHRWQGHITREGNRYIRWALTESACLAPSKDYSLGSFYRRVAFRRGPLKARVAVARKLLVAVWYVLTYGEPYKVTAFPTV

SEQ ID NO: 215949 - protein, 401 aa, unidentified
MPNLQPRGSAMRISVGIDIAKEIHWVTAIDADGVVRIDRKLLNTPTDIASLADQLADLGGVRIGLDVIGGIAGLAEAILAEAGFTLVHVPGLAVNRARQGTVGGENKSDPRDARTIADQVRTRSDLRVIEPTSELDLEIRLLVRRRRDLVDAQTQRLSRIHDLLVGIFPGLEACLDLRTKGPLHLLTRYVTPGELRAAGQKRLLRHLRAAGGVPNVDALAERALAAAVEQTIAVPAERMTARLIRELAVEALANRTRLIELDRELEALLERHPDATLIRSLPGMGVVLTAELIAEAGNLSRFRSADALASAAGMAPVLRQSGKTRFLRRPAGGNKSLKRIFYQSAFCSLSHDDSRTFYDRKRRQGKRHHQAVIALARRRVNVLWAVVQSRTPFQTGFKTAA

SEQ ID NO: 215950 - protein, 358 aa, unidentified
MTTVSNKQKWFNTIRLTKDDDLFVGIDAHKKSLHVALWLNDAPAIDFVMPPDSAKLIDMLNKLRVALRMVVYEAGPTGYSLARILQQANIPVSVVAPSKTPRQSAPDSKTDSLDARKLAEYTAKGLLRSIAIPSKYQEAQRQLTRLRQQLVEKQTRVKLQIKGFLLQHGINQPAGLSSWSRVAIEYLKAISLSMPLRYCLDTLLEELHFITEQIKMAEQKIKEAFSEKPICTTVELLTTHPGVGKTIATQFAAEIFNPKRFSDKTQLAKYVGLAPSVHQSGQTSRYGPILKTGRPQLRCSLIQGAWIWIQKDRDAYKTFCRLIHNTGHKNKAITAMARKLAVHLWKMARDNKPYTCAA

SEQ ID NO: 215951 - protein, 337 aa, unidentified
MKISRVALDLAKNLIQLHAVETTGRAVVRKPLRRAQLLPFFRNLPPCEVGMEACASAHHWARQLQAMGHRVQLLPPQYVKPFLLGQKNDANDAAAICTAMSHPEIPRVTVKTIGQQDMQALHRIRSMKMKQRTALINQTRGLLAEYGIVIAVSPAALRKAIPELLEDADNGLSFAFRQLLAELYEDLVAIDKRVAELTQRIERTVRTSDEGKRLLEIPGIGPLTASALVATVGDARQFKSGRQMAAFLGLVPKQHSSGGKTRLLGIHKRGDSYLRGLLVHGARSVLRAATDKPDDRSRWLMNLAARRHRNIATVAQANKNVRIAWAILTREQRYRPN

SEQ ID NO: 215952 - protein, 425 aa, unidentified
MSKKKKSSLAGLQALFARVCGLDVHKKLVVACVRILNAKDGTVQSTLRKFGTMTADLLELRGWLAEQKVTHVAMESTGVYWQPVFNLLEGHFEVWVVNAQHIKKVAGRKTDMKDAEWIAQLLQCGLLRPSFVPDRQQRELRDLTRQQTKLVQQRNAVDNRIQKVLETANIKLGSVASDVLGVSGRKMIEALIAGEKDVTVLADLAQRQLRGKIPELERALEGELTEHHCFLLRQLLGQYDFLEKEIARVSERLGAVAPPSFRAAVEQLDAMAGVGERGARALLAETGTDMSRFPSHKHFASWAGRCPGNHESAGKRRSGKTPAANRHLDAVLTEMAHAAVRTKNSYFKAQYHRLAGRRGKKRAIGAVKHSLLVTVYFMLRDNKPYKDLGVDYFDKLNPQQRIRYHVRRLQELGQEVELSPVADAA

SEQ ID NO: 215953 - protein, 320 aa, unidentified
MTTLSPSFVGVDIAAAHLDIALHPQGIHFRVPNDEAGLDACMERLRGHSITAVAMEATGGMERLAASRFQAAGHNVHVLNPRRISNWRQVVARQAKTDRIDALLIAEFAAIVPLQQTYVSTAQQRTLRDLAARREQIVINITNSKKQLARAIVSVIRQSIERQIAFCTQESAAIEREMDAIFRQDAALMRQRELLESIPGVGKLSAMLILAELPEVAFLPPKKLASLVGVAPHPLHSGTKTTKARITGGRARIRSKCYMMAHGSIVHNPWMRTYAHRLLARGKSRREVNIACINKLLHVAHAVLTRDTPWMPQPPLQKKS

SEQ ID NO: 215954 - protein, 344 aa, unidentified
MKIKLLGIDLAKNVFQLCALNQANKVLFNHTVRRVRFCSSIAKLEPTTIAMEACSSAHYWGRTFEAMGHKVLLVPAQHVTPFVRGGKSDARDALAICEAAQRPGLHPVPIKSIEQQDIQLLHRLRQRQVQHSTALANQVRSLGREYGVIFPAGIKSLISRLPEVLEDGSNELSPVARYALADQHRCLIEVRQAMKTFLLQIEQLAGQHPAYVNLLPLPGIGPMTASAYIAAIGNGNQFKCGRQVSAWLGLVPRQFGTGGQIQLMGISKSGDRYLRTLMIHGARAAITRGLKNNPELAQWVQPIIDRQGFNKAVVALANKMTRISWVIVTTGEAFDVKQAFKPVA

SEQ ID NO: 215955 - protein, 357 aa, unidentified
MEYGAIDLHKKESQIRIVTRTGEIIDRRIATRRDGFTHVFWGRPRMRILVEASTESEWVAQHLEDMGHEVIVADPNYAPMYGHRSRRIKTDRRDVAALTEACQHGTYRVAHRRSAKQHAVQCQLNVRAELTQARTRAISLARAITRAAGLRIRSGRTETFLARLAALELSASMKATLLPLRSLIEVLEDELVCADERFEAMVAADPVLTRLTTLPGIGPITASAFVAALDTVSRFERAAQVTSYLGLVPREYSSGEKQRRGRVVRSAHPYLQSLLVQAAWRVWRASNPRTEAFRTWAHAIARRRGKKVAIVALARRLARTVFAMWRDEADYQPQRIQTRGAQFLADATAKTDVSAPV

SEQ ID NO: 215956 - protein, 330 aa, unidentified
MDKMEACGVEVSARELVVALGEAQGRTRLRRFANSTVGHRALLRVLKRLGKVRVVLEATGMYGLDVALALSAEEGMEVMVANPRAVRHFAQAMMQRSKNDQLDAVVLREFAVRMPFRAWTRPTENKLELWAIARRLEALTAQRAAEKNRQHAAGLSRAVPAVVRKEIANSLRFLEGSIARLQKEAQRRIAADAQLQSRYELLCSIPGVGKVSALHTLGELVLLPEDRDVRQWVAYAGLDPRECSSGTSVRKRVRISKVGNRHLRRALYMPALVASRRQPQVREFYERLQRRGKNKSQALMAVARKLLHAIYGMFRTFKPFDGALLFAAAS

SEQ ID NO: 215957 - protein, 317 aa, unidentified
MARQLSFVGIDVSKQWLDLWFEAAKRFERVSNDAAGWAALLALLAPSGAAGGTIVAFEATGGYERGLRCALMEAGFEVHQLNPLRVRLYARSLGRNAKNDRIDARTIARYAQAAQTHPQTLDVAREHLAELVTQRRRLVEERVAIANQLHTIQSAVLRAQNLARLGLIERQIEATDGLILEAVGRVPSLVAKRDLLKTLKGVKEVTATTLLALLPELGSLSRRAIAALVGLAPFDHDSGKFKGTRSIAGGRAAVRSVLYMGARAAARSRSPLGDYYQRLITAGKLPKVATVALMRKMLVTLNAMLRDNEPWKHAKAC

SEQ ID NO: 215958 - protein, 347 aa, unidentified
MEFIGIDLHKRIFTVCVLDENEKVIDEMIDVETSEKGLDLFMSRHPPDDCLIVFENLTRAHFAYHYLYKNGYAVNVAHTGHGALGEIVNSNFKTDRIDAYKLALLCKDMWSGRRFIRRTHISSDENMRMKAVVRVCNVCSNIRDEMYLRIGEYMNLHNIPPHPRFKDIMGMKYRQYLLDMHDPALTMMVNTMSNAMAQIKEANDTIREFARKSEDAKLLMSIKGISALTAVTIVTDIDGIYRFETPESLVAFFGLAIPHKESAHKKTKIGVITKEGDPLIRKYLANAVVNHSVWCPSSDLARFYKKKSESMPHWKAVTAAMRKLTCIIWAMLTKREYYNPQAMNLRN

SEQ ID NO: 215959 - protein, 412 aa, unidentified
MDVLVERCAGLDVHRDSVMATVRVPAKRRRQREQHRRRFGATIAELEQLRDWLAGFGVSLVAMEATGVYWKPVFHVLEPRFECWLLNAQHLHNVPGRKSDVIDAAWICQLVEHGLVRPSFVPPPQIRELRDLTRLRTAQVEERTRTLQRLEKVLQDVGIKLTSVASSGYSVSARAMLEALLAGVSDPDQLAELARGRLRAKIPELREALRNRFRVDHHGILVASLLAHVDALEASLARLDARIEQQTAPLAELIELLCTIPGISTRTAQILIAECGIDMSVFPTAGHLASWAGICPGTNQSGGKRRSGRTRRGNRWLRSALTEAAKAAARSKNTYLAAHHAQLRGRRGEPKAVGATRHDILIAYYHIVRERVPFRELGVDWLARRYSPEHRARRLRRQLEALGYTVTIEAAA

SEQ ID NO: 215960 - protein, 344 aa, unidentified
MTQFVGLDVSQKDTAVSVVDEDGRQMWRGKVKTDPTAIAAVIASRAPDAKRIGFETGPLSTWLWHALKDLGLPLICLDARHAKAGLSVQVNKTDENDALGLAQLVRTGWYREVKVKSLDSHLVRGVLGARAQLVSTRIHLTTTIRGLLKNVGVFVAVGHRQTFASAAEEAIGTQTGLAAMVAPLIAAWRAITEQIRAYDGLLRHRAAHDETTRRLMTVPGVGPIVALAFASMVDEPERFAKSKSVGAYLGLTPRRYQSGEKDVTGSISRTGDTLVRSYLFEAANVLMTRVKRWTGLKAWGVKLARRIGMNRARAAVARKMGVMMHKMLVTGTDFRWGKEEAVAG

SEQ ID NO: 215961 - protein, 343 aa, unidentified
MKKATIISIDLAKNIFQILGVSGEGKTIFNRRLNRVKLIEFISQHPVCSIVMEACYSSHYWGRTFEEMGHAVKLIPAQHVTPFVRGNKNDKNDALAIYEASLRPHIRFVPIKSELQQEILSIHKIRERLIKQKTACMNQIRGLLVNFGLFMPQGHCAFELEMKSLIHEKPTRPYLKELVKDAYQEFLGLKERLKRMEKMLQELASTQKSHSILMSIPGVGPIIASAFSASIDQGQAFKNPKELAVWLGLTPRQYASGTHTVNKGITKRGNSYLRKQLIHGARAIMPRAEKKNDDFSRWVSELRLRKHACCAVVAVAHKIARLMWILLKKQEVYQPQYEKAITC

SEQ ID NO: 215962 - protein, 338 aa, unidentified
MEQARTVTGATQARIHKEGTTMTEATPIYVGIDVSQERLDIATTIQDKIWSVRYDDDGLKKVRTHLRRLQPERIILEATGKLERSLVAALAADGLPVVVVNPRQVRDFARAMGILAKNDRLDARVLARFGQSTKPELRPLADDARQALAETVTRRRQLVEMIGMERHRTARTTPEVRRQIERHIRWLEEQLEKVDDDLQQRLQQSPHWQESNDLLQSVPGIGPTTAAVLIAQLPELGTLTHKQIAALVGVAPFCRDSGTFHGRRTVWGGRAFVRTALYMATLVAVRHNATLRAFYQRLVVAGKAKKLALVAAMRKLLVILNAMLRDHTPWIETLPITT

SEQ ID NO: 215963 - protein, 342 aa, unidentified
MYYIGLDVHKKTISYCIKDAGGQVYREGTIGATRNELDVWIQTLPQPRMMALEATIFSGWIYDHLLPHAEQVKVAHPLMLRAIAAAKKKNDRIDAGKICDCLRCDFLPECHMASTEIRDRRRTLRYRHLLVRQMVQMKNRISGLLMETGVSHNKKRLHKVKYFEELMSSNKEVHENIRPLLRLSRETIVRCHKTESALVRSLERDPLLAERIERLKTVPGVGPITALTWTLEIGDATRFRSVKQAISYCGLCGAEKSSAETVLRTPLCKQRNKHIQRVLIEAAKLAPRQSHELALIRERELQKGNRNRATLAVARKMVAYLLAVDRRKQGFVPNEGRNTAAA

SEQ ID NO: 215964 - protein, 394 aa, unidentified
MIYAGVDIAKTDHVIGAVDERGAETCRPMPFKNTEAGLERAVAWLEGLAGSPSDVVVGMEATGHYWMACYSFLVARGYSVAVINPMQVKAVRKLKKLDKVKNDRIDAWLIAETLRIGQYDETRLATDEVASLRSLSRYLQSLRGMAAELKTQCVCLMDAHFPEYAGIFSDMFGAGSRAVLSKSPLPFELARRRADSLARDIAEASRRGGKSAGYAARIKAAARSSIGVRLGQEAASFQVKSLIRQIEFADSECAKVEARVRALLDEVEPLVLTIPGVSYATGAQIVSEIGDVSRFRNASALVSYAGLNSSVSQSGQFDSGGGPITKHGSPYLRRALWLAANRARQYDPGLRAFYDKKRAEGKPHRVAVTAVARKLCHIVFAVMRDQVPYDPGRE

SEQ ID NO: 215965 - protein, 356 aa, unidentified
MKYVGIDVHKKYCQAAVLDDEGELLDQIRFLNKKEDIKEFALKLTTFRDDVKAVVESTGNLWIQIHDILEKFGFEVFLSNPGKTRLIAEAKNKTDKIDAKILARLLRADMLFTCYVPGEEIRNRREFLRARQTFVKHRTQVKNRIHSILDKHGLRFPGTPYSKKSIVWLKEQDLGFMDNAVVKGQLALLETLDEQTQILEDKIAAMGMEDPQVKLLMTMPGIGYFTASMLVAEIGDINRFGNEKKLSSWAGLAPRIHQSGGTTRIGRVGQGNKRVSGLLVQCAHNARQHDPRFKRFYDRYSKRSSKGKALVAVAHEMIRIVYFMLRDNEPYRGQNVEMTTRKLKSMKYRASVGLRT

SEQ ID NO: 215966 - protein, 337 aa, unidentified
MKRYLGVDLHRTQFTVCTRRENGRTYLRQWPMRDLKIFAAQLRNEDELAVESTGNTRLFHDAVVEHVARVAVVNPSQFKIISQSVKKTDNNDAELLALYLAKGLLPEVRMKERKQREMSHLAQTRDLLVKQRSALKAKINNLLSAEGINLKRESLSSNKALERVLALPLSPLMLAEARVLVGQIRGLNQSIAELEELIEEEGPKLAGHANLMSIKGIGPVSAAVLLSVIGDIGDFSDAGKLAAYLGLVPRVQNSNETEHSGRITKQGNKLARTCLVQCALVAKRYSSFLQKFYQRIQRRRGGGKANIALARKFLGVIYHTLKNNWVFEDFPNFVLAS

SEQ ID NO: 215967 - protein, 465 aa, unidentified
MAKKTTSKTKTQPLVQLNSLVAGIDIGSTSHFIAIPSDLDEHNVREVGAFTRDLQEAASWLKSKGIQSVAMESTGVYWIPFYDILEAEGIKVLLVNAKHVKNVPGRKSDVMDCQWLQQLHSYGLLRGAFRPEDKYCALRSFMRQRAMLVEEEASFKLRMQKSLTQMNLHLHNVMSDITGDAGLKIMRDIVAGIHDPKLLAAHRTDRYKCTPEELEKSLEGNYRAEHIFSLKQALDLYDFYQIKIKECDDMIQKVLEALSLKVLPSSKCKKKEKKETTKKRRKNELHFEATDSLKRLTGVDLTEIDGLESHSVLKIIGEVGTDMSKWATVKHFTSWLGLAPGTKISGGKILSTRTRKCKNKAATIFRIAAYTLLRSQSAVGAFLRRKKAQLGAPEAITAAAHKIARIFYTMLKEKKSYKDMGADYYEQKFKDRTIKNMELRARSLGYILVKNGDVSNLENQGLTPC

SEQ ID NO: 215968 - protein, 342 aa, unidentified
MDHFAGLDVSVKETSICIVDDTGRIVREVKVPSEPEALLKVLGNQAYRFKRIGLEAGPLSQWLFSALAEAGLPVVCVETRHMQAVLKAQINKTDRNDARGIAQMIRAGLYRPVHVKTLRSQKLRMLLTHRKLLQSKAIAIENDLRGTLRNFGLKVGMVGQLKFEARIQELVENFPDLAALVEPLLIVRRALREQIVILHRRLLAIVRDDEVCRRLMTTPGVGPVVALTYRATVDVPARFRKSKSVGAVFGLTCCKYQSGEIDWSGRISRCGDEMMRVMLYEAAQSMLRSKRWSWLKAWAMQIARRRGMKKAIVALARRLAVIMHRIWVDGTEFRWTKETAAA

SEQ ID NO: 215969 - protein, 407 aa, unidentified
MATPEQVEIWIGLDVGKEFHHAVVLNDAGDSLFDRRVLNTEADLVKLVDSASGHGVAGLVIDQPGSIAQLALALARQREVPVAYIPGLVMRRAADLYPGDAKTDRRDAYVIADTARTRRNRVHWLGIDDDLLVQLRVLNGLDVDLAADSTRHANRLRDALTSISPALEQAVGTKLHHAGVRDMLAKYPTPTALRAAGNARIRAVVAKRSPRLGVSITTRVSAALDSQTVSVPAEETLGRVIAELAVELGRIRDRRDNLEAEIEQVFLAYPLGPVLISMPGIGTRTGARILAEIGDGTAFASGSKLAAYAGLAPVTRQSGTSIKGEHRSRRGNHRLKNAMFIAAFASLHDPDSRAFYDRKRSEGKRHNAATICLARRRCDVIHAMLRTRQHYLTSNQLAERADTKKAA

SEQ ID NO: 215970 - protein, 533 aa, unidentified
MLSDALHVCHPHAAGIDIGAAEHWVAVPPGRDPQPVRRFGTCPADLDALAAWRMDCRVPTVAMASPGVSWMPRFALLEARGVQGLLIEPRHATRAPGRPTPDRRDGQWRQRVHADGLLAGAFRPDAQVCVLRGSVRQRQRLLTDAAHHRQHRHKALPQRPRTLTQVVSDLTGVTGMAILTAIVAGARDPVTLATLRTPHGPHAADDIATALQGPWRAEPRLTLRHAVALYHFSHQPVALCAQQITAHLETCADTSAGQPVPPKARRHTQTNAPRCDARTPLSRMAGVDLTTIAGIEAGTALVILRQIGTDRHRWPRVQHCWSWLGLGPQHQLSGGKGLSRRVRPGAHRGTVALRLAARSVPHSQRALGAFFRRMPARRGTPTALTATAHTRARRVSSRLPHGSASVPQGVDAYEAPYRERTVSARTRQAKAVGSPLVLLESQGYHAQPRPPGGLQLLSCLIRLSDTVCCEGKDRRACSKLSNRGHTPPRDASKAGSTPKPPLPLLPNLTVTHIFPCGGAERIMQYSAVRSARW

SEQ ID NO: 215971 - protein, 310 aa, unidentified
MDIITIGIDVSKDRLDVAVRPSGEVFAVERNAVGLEQLVARLRDLSPRVIALEATGGFEVIAAATLAGARLPVAVVNPAQIRAFAKAIGQRAKTDPIDAAVIAHFAEATELEPRPLPDEATRLLGDLIGRRRQIVEMIGAERQREKRMAVAHLRKSIARLVKALEKELATLNTDIDDAVRGSPVWREKEDLLVSVPGVGPVISRTLIAELPELGQLGRKEIAALAGLAPFTRQSGQWRGKSFIGGGRTVVRTVLFMGAMVAKRHNPLLKAFFDRLRAAGKPKMVALIAVARKLLTILNAIIRDNRPWQTA

SEQ ID NO: 215972 - protein, 309 aa, unidentified
MEIVVGIDVSKERLDVAILPQEEVFAVGNDHAGIDELVERLKGIGVDAIALEATGGFEMLAVAGLSAAGLTVLVVNPAQVRAYAHAIGRRAKTDPIDAAVIAAFVLATKPEIRPLRDAETQALSELVARRRQIVQMVVAEENRLRMALAKQAQKSIKRLLTALRRELESLDADLDSHIRKSPVWRVREALLTSVPGVGATTARTLLAELPELGSLDRRQIASLAGLAPWTRQSGKWKGKSFIGGGRSKVRAVLFMAALVASRYNPDLKAFRDRLVAAGKPKIVATVATMRKLLTILNAIIRDGRPWQNA

SEQ ID NO: 215973 - protein, 332 aa, unidentified
MGNASTASHFAGIDVSKATLDAGLLGPGGATRAKRFANDARGHAALLAWADRHAPGAAVHFCMEATGPYSAAIATFLHGAGRVVSVANPARVRAHMRACGQANKTDPADARAIATFCRDRRPRPWVPPSPEVRQLQGLVRRRDDLRRMAAAEKARLDAPDLTPAARASIARALRFLSREADRVQAEAEAVVAATPGLAADCELLESVKGVGRQTATTVLAELPPVGQLPSAESAAAYCGLAPSEFTSGKSVRKRTRLSKAGNARLRAALYLPTLTAIRFNPVLKAFFERLVAAGKPRMQAVGACMRKLVMLCYGVLKNRAPFDPAWSSRKIG

SEQ ID NO: 215974 - protein, 407 aa, unidentified
MKHVIALDVSKGKSTIAIYDGYRQCEFEGELYHTRIDFEQLHLRIKEITALDGQAPEIVFEATGVYSKSVEKFLRDHGHTYCRMNPLEANLQMASMRRHKTDISDAHELAKTHIKLERETTYVQNDYYEQMRAITRYYDEIEEELILLRNRMHAILHVSFPELERLISPSSALFLNFVQLYPHPALLLAHSKTIIKNRLKSNTRKKLSLERAEKKAIVLLEAAKNSYPAIEPTDIRCNQVRDYARRIADLMEKKDQLVKQMVMMSEGRMEYTVLRSFPGIGDTTACRLIGELGDIRRFKNAKQLNAYVGIDIMRYQSGNTQYRDRINKRGNKKLRKILFFMICTMLMAKGKPNHLVDYYYKLKTQPQRKPHKVAIVACINKFLKVTFQLLTHGILYDYESALPAQKS

SEQ ID NO: 215975 - protein, 388 aa, unidentified
MIAVDPHKASNTAAVLDPVTKTVIESARFANSADGYGQLASFAARWAQRRWAVEGCRGAGRSLAQRLVADGETVLDVPAKLAARVRMYSRGHGRKTDKDDAVSVGLAALDGTGVLLVARDDALVSLRLLCDRREELTAQRTQAVCRLHRLLAELTLGGMRRELSANKAQALLARIRPAGDVAAVRLQIARDHLADIRALDARIKYLGIQIAALVTFASYNGTAPIDVSSGDQIRHRLSRAGNRRINHALHMMAVTQIRNRGSQGRAYYERKRLEGKTGKESLRCLKRRLSDLVYYQLIADRRGTIKKCGSPTTGRPTPPACTSPTSRHQPARPRPAPRPRPASTPSSRSTGAAASSPASRSSTPAPSCPPTSSTRPKSSAKAPPATHS

SEQ ID NO: 215976 - protein, 426 aa, unidentified
MKYNQNEKLKQMDLSTMVVGVDVGSELHYARAFDYRGFELSGIFKISNDAAGFEAFQKWTHELMKKHSKTHTIVGMEPTGHYWFNFGYALKEEGTKVVLVNPMHVKRSKEFDDNSPTKNDRKDPKTIAMLVKDGRYLEPYMPEGVYRELRIAMEIRERYVKQITIIDNKVQRWLSIYFPEFKTVFKDWTGKGAIIALKNFATPEKVKAKGIDSIAAMWKAEIKRAVGTKHAVKLVRAAEVSVGVKEGIKSAEYDLLSLIEEYEFAIMKLETTMTLIEELLFQIPNVAELLAIKGIGIVTVAGFIAEVGDIGRFDHPKQIQKLAGLNLKENSSGKQKGKTTLSKRGRKRLRRLLFQAVMILVAKNTEFRQLHMYYTNRIENPLKKKQSLMAISCKVIRVFYTILTKGLVYDGEKMIKDIKRPQQKAA

SEQ ID NO: 215977 - protein, 364 aa, unidentified
MLIIGCDYHPGFQQIACVDTDTGDVSEHRLAHREQAEAFYRELKQRNLSARVGMESSGHSRWFERLLHELGFELWIGDPAEIQTRRVRKQKTDRQDAQLLLRLMLENRFPRIWVPDAENRDLRQLLWHRHRMVQMRTRVMNQLHVVPLNEGLRRKKALWRPAGRKELESIALAPWASRRRQDLLDLLDQLTPKITELTRALEEEVEKRPVTRLLMTHPGVGPLTALAYELVIGTPERFHCGKQLASYVGLVPEEKSSGDRRRLGHISKQGNVLLRFLLVEAAQVTVRSQQEWRNKFFHLAMRRGRKIAKVAMARKLAVHLYWMWRQGSDYGQTQKLGSHAGEPGHLDGVQSNTDVMIGHPAPSK

SEQ ID NO: 215978 - protein, 418 aa, unidentified
MLFAGIDWGDKALDYHLRTPAGDVLAQGRVKPDPDGLADLFAALEASATPGQIGIAIETSHGAWMQALLDRGYEIYPVNPKAVDRFREAMSANGDKSDKIDRRVLAMFLATFHHRLRPLQPDDPEIVSLRIACQDRVRLVEERSAKLNELRSILKLHYPAVLTLFADLDTLIALNFLQKYPTQNRMRKLTERRLRSWLSRHHYTCPARLDKMVACLKQPALPIADHLQQAKASLIQYLAKSLITLKAEIAQREKAITQSFHQLPESDWAESLPGAGANLAPAILACIGRDTERFETAADARAFMGTAPVTKTSGKSRSVRFRRGCWKFARRTLQLFAKESRRQCAWADRFYQKQRESGHKHHQALRALAHKWLKIILAMQRNGACYVEAVFVQSQQRYLSKQRPAPTPHTTFIARTLT

SEQ ID NO: 215979 - protein, 430 aa, unidentified
MSYRIVGIDVHKKILAVVVSDVEIDSEFHFERRWFGSNPEQLRSLAAWLLEQEVEEVVMESTAQYWKPVWEALERYWKPIREKREGARRRSGTLHLAQALSNRGRRGRKRDFPDAERLVKRLVSRELTLSFVPDPEQRLWRTVTRKKYQLTRDKVRLQNQLEALLEEAHIKLSSLVSDLLGASARRMLQALAEGETNPAALATLADQHLRATPEQLCDALGACTDLKPVYRRLLKMALEQLQFLEQQMGQLDQEMANLLSQHQDAVQRLAEVPGLGVDSAHQIIAEVGPSAATFPSEECLSSWVGVCSGQEESAGVNYSHRSPKGNRNMRRLLNQTANAAVKAKGSIFEIVYRRSVPRLGHNRAIGAIAHRLCRLIWLILYRKVRYEERGPAVSQKSKQARTSRMIRQLRRLGYRIEPPNTQHASSAQVQ

SEQ ID NO: 215980 - protein, 348 aa, unidentified
MNNMHYVGLDIHKKTISYCVRQSDGTILQENTIAATRPALEIWMRHLPQPWTAGMEATMFTGWIYDYLGGSGATVKVAHSAMLKAIAAGKKKNDQVDARKIADLLRCDYFPECHMAPREIRDRRRVLRYRNLLVRQAVRMKNKVSGLLMEVGVPYNQQKVHGKKYFAKLLHEQRKEMPPSLPELLQLSRSTIESLTGMERQLMRALEQDDLLAARVERLATIPGVGRVLSLTWALEIGEISRFRSVKNAVSYCGLCGAEKNSGGKAERTSISKQRNKHLQSMLIEAAKLAPRWNAELALVYEREKQKGNSNQATLAVARKLVAYLMAVDRRKQGFRKTAAEVGEKQAA

SEQ ID NO: 215981 - protein, 378 aa, unidentified
MYRIIKIGMDVHSTNYTLCAMEPVIGAEDRIFANIKVTPDYKNVLMFIENLKLKLGLNDTYDIECGYEAGCLGYSLYNQLTAAGVRCVILAPTTMLTQQGQRIKTDARDAVMIAQCLSYGGYHPVYIPAEEDDSVKEYLRMRDDHKLALKKVKQQINAFCLRHGHRYEKTKWTIAHLKWLKQLELSALYRETLDEYMASYDEQTAKIERFDKRIEELASQERYQEKVKKLGCFLGIKTHTALSLIVETGDFERFAKGNVYAAYLGLAPGERSSSDSINRLGITKAGNQHLRLLLIEASGGICKGAVGHKSKDLRQRQNGNPADVIAYADKANTRLRSRYYKFIRHGKKRNVAVAAIARELACFIWGMMTDHIQMQKAA

SEQ ID NO: 215982 - protein, 377 aa, unidentified
MKRDKYMGLDVHQATTVVSVIDTEGKIVWETIVATETGAIRRLIESISGPIHVTLEETTQAEWLYDLLQGFVAEVVVCDPRRNKLLVEGSKGDKADARKLAELLRTGMVRSVWHARQTTRGLKELVRAYETFVVDTSRTMLRIKALYRSRGIATKGSGVYQKRERDHWLKQLTEVGMQQRAAWLYEQLDQVRELRKRAKAAVLSEGRRHKAVQLLRTIPQVGPIRAAQIVASAGTPHRFRTKRQFWSYSGLAVVTHTSAEYEMRDGRVVRRNKPVATRGLNTNCNRRLKSVFISAATSGGASWQPYLDHLQEKGMKADMARLTLARKIAALALAIWKKGESFDPKKLKLDEIAVSSRFAGANWSPQTDNDRNGADRG

SEQ ID NO: 215983 - protein, 356 aa, unidentified
MATYYIGADVHSNSIEMAIFNRKKIVQRYTTPAGISAVAQVLESLKGKKYMAIEEGPMSGWLYRNLHRQVDRFVVADPRRNKLISSDGDHDDKIDSAKLAMLLAGGYLREVYHSDDDKRVELKHWVSLYHDRVRDAVRNINKIRARCRMHGVAIPRKVLRQPEHRAAWLRKLKNTALSNQLSMLWIGYDATAKQARMAKQHLINLSKRYPIIILWRQLAGIGVIRAATIFAYLDTPWRFKKKNKLWKYCGIGLQRTASGTDKKGKPKPARLQLPWASNRILKNAILGAALTAINQKQNCFKADYERMVLNGVIPSNARHTVARKMLTVMWGMWKRSCQEGLDEVSLPKLNENCVYV

SEQ ID NO: 215984 - protein, 344 aa, unidentified
MTLVSPSVCVDSVLGIDVAKAKVDTWFERVTASEKPTHQRYDNSPAGHQRLLAWLATQAVGQLPVCLEATGTYSDALALCLHQAGYRVSLVNPLRIKRYGESELRRIKTDKSDAALIARFCLTQQPDPWTPLPPERRELQDLVRSLQDVKQLSQQQGSRHSSGPHTPIVTAATTRILTCLGQQQSLLEQQIRQHILAHKTLATDYALLLSIVSIGPKTAAVLLAELGDLRRFANVRDLVAYVGLCPRLCSSGSSLHGPTPLTKRGNAVVRKALYFPALNALRFNPCLRPFYHRLLAQGKPKMVAVAAVMRKLVHLAYGVLLSGQPFDPAHVSVRPAQSQETLHE

SEQ ID NO: 215985 - protein, 318 aa, unidentified
MIDQLPSSPFIGVDVAKDEVVVAEHGHSTSSTLQNKPATLRAWLKRLAPGTRIGLESTGGYHELLATLAHQAGFTVYLLNPKDVRHYAHALGKRAKTDHVDALLLARFIAHEHSDLHPWQPPTDEQRHLDTLLKRRATLVKAQGMMRQSLAHLSCLDAESKTALCALADLLKAIDRQIEQALAAHETTRAQAACVQSIPGIGLLSGAALLNLFKRLPTARADAIVAFTGLDPRPCDSGKKRGTRRLSKRGPAELRRLLFNAAMSAAKTATWRPFYEHERAKGLPTTAALVCLARRLLRTAFALFRTQTQFDPDRLSRA

SEQ ID NO: 215986 - protein, 338 aa, unidentified
MGTYAGIDLHSSNSYIGIMDQDYQRLFGRRLPNDLDKILMVLEPFKSDLKGVIVESTYNWYWLVDGLQKHGHRVHLANPSAIKQYEGIKHTDDKWDSFWLAHMKHLNILPEGYIYPKEQRAVRDLLRRRLFFVRHRTANILSLQSTITRNLGIKMSSNEIKKLGMDNVCGLFDSSNLVFMAQNNISTIKHLEKIIKGIEKEIKAQVKLRKEFVMLTTIPGIGLILGLTIMLEVGDIGRFFKVGNYSSYCRCVSSKRLSNGKKKGENNKKNGNKYLAWAYVEAAHFAKRYIPKAQRFYQQKMAKANGAVATKALANKLARASYFIMRDQVSFDEDMLFR

SEQ ID NO: 215987 - protein, 450 aa, unidentified
MMREPQEIEDEEHEQILERVAAIDVAKATGMVCTRVPHESRPGRRLTRVWDVGATTGAIIELGDRLAGLGIEKVTVESTSDYWRPFYYLLEAAGLSVQLVNAREARNVPGRPKSDKLDAVWLAKLTERGMLRPSFVPPQEIRQLRDYTRLRLDLTRDRSRHAQRIEKLLEDALIKLSTVATDIMGVSGRAMIGALIAGERDPQVLAGLARGRMRVKHAALVQALTGRFDEHHAELARILLGQYDALTIQVDALTTRIEALIAAIPAARGVDADGTTGPGAGTGPDAAVIPALERLDEIPGIARHAAQVILAEIGLSMTQFPTAGHLVSWAKLSPRTIQSGARSRSGKTGKGNPYLKGVLGEAAAAAAKTGTFLGERYRRLVKRCGKLKALVAIARSILVIVWHLLADPAARYHDLGSGYHTSRTDKGKRARNHIRQLEALGFTVTLTQAA

SEQ ID NO: 215988 - protein, 391 aa, unidentified
MVCVGIDVAKDKHDCCILDSDGMVRADCFTIPNNMDGFKQLLQTIRNCTKKSDKIKVGLEATGHYSYNILGFLLDNDLAVYVMNPLHTNLYRKSLSLRKTKTDRVDARTIATMLLSDVDLKSYTDIAYHNEELKSLTRYRFEKVRERAKLKQSVSRLVTILFPELEKLVPSLHGASVYALLSEYPGAKQISEVHLTKLTNLLVTASKGHYGKEKATLIRETARASIGSVMPAKSLELKHTIKLIQELASEINEIEDSIQKIIDELNPPILSIPGMGVNSAAVILAEIGDFSNFSSPDKILAYAGCSPSTYQSGKLTNCYAHMEKRGSRYLRYALYNATKYVCHWNPVFAEYLAKKRAEGKHYNVALSHSMKKLVRLIYALQKSGKTYLAAA

SEQ ID NO: 215989 - protein, 337 aa, unidentified
MMYSGIDLHSNNSVIAIIDDADRVVAQKRLPNDITKIVDFLARWQDELAGVVVESTYNWYWLVDGLQDAGFHLHLANTAAIKQYEGLKHSGDETDAQHLAHLLRLGILPTGTILPREQRAVRDLARKRMQLVHSCTTHVLAVENIMARQLGGRMTSNQIKRLTADAVDSLPLAADVGLAVKANVAVIATLQAQIEVLEKRLQERVKPRPQYGLLTSVPGIGQTLATVILLETGPIERFAEVGNFASYARCVDSVLISNRKKKGEGNVKNGNKYLAWAFVEAANFAIRFCPEAKRFYERKKAKTNNIVATKALAHKLARACYHILKEGRPFDVTRCFA

SEQ ID NO: 215990 - protein, 372 aa, unidentified
MESINKNNKQLFIGIDVHKKSWSVSIRTDLAFHKTYSAAAEPNQLLDYVTAHFKDYEVTVSYEAGCCGFWAARAFLNFGWHCKVVNPADVPRMDKQNYQKTDKIDSNNLSKQLQSDTLRGIYIPTEKEEQMRSLLRERNHIVKELRRVKTHIKSMLLYHGIVVPEEYDNPHWSIAFKEWLDKLGWTHECGNKSMHHKLRRLNFLHQEYLEIGNELRAYARKHHTKDYYLLKSVPGIGGYLAAAILAECGDIRRFANEKQFSSYIGMVPGIYNSGAKEANLGITPRCKSLLRSYIIESAWVAQRKDPEIQDYYRKHIGKNPKSIIVKIGHKMVRRILSVIKKGTPYQTNYNQEDLNSTLTHYHFVYFAYYKRY

SEQ ID NO: 215991 - protein, 269 aa, unidentified
MSENPEIFVGIDISKDTLDIGFQPSRHTGELPHDEQGISEATRRLREAEPRLVVLEATGGLETELAASLMAAGLAVVVVNPRQVRDYAKATGQLAKTDRIDALVLADFARAVRPEVRPMKDALTRELDDLVTRRRQLVEMRVQESLRLGRAAKVQQKSLKSHIAWLDKRIEEIDTDLRQRLRASPAWRTKDDLLRSIPGVGATTSATLLAKLPELGTLDRKGIAALAGLAPLANDSGRVWSTGQGSANASPVVEAPDLRRVIRQNDYVT

SEQ ID NO: 215992 - protein, 370 aa, unidentified
MIVIGTDTHKRTHTCGAVDALTAAARGELTAPARKGAFGKLLRWARALDPERVWAIEDCRHVSGAFERFLVARGERIVRVAPKHMAGARRSSRERGKSDSIDAFSVARAALKEGIEKLPGAHLDGAAMDIRLLVDHREDLVAARGQDQQRLRWHLHDLWPELEIPHGALDTAKWLGKASRRLARAEQTTRVRIARELVRQITASTKRIRELERELAALVESYAPQLLAERGCGPLTAAKLIGEIAGADRFRTDAKLARTGGSAPIPASSGNTHRHRLDRGGNRQLNCALHRLAVNKANWDPDTVAYLARKQAEGKSRKEALRCVKRHLTRRVWRLLRSPAPPPLVLPVAPRPKDPDAIGGDPPYLMPCTR

SEQ ID NO: 215993 - protein, 322 aa, unidentified
MAMLSFGGIDVSKDRLDVVVLPEEECSSVPNDAAGWAELVERLRGSSIAAIGIEPSGGYERGAMRALLAAGMPVRQVNPFKLRQFARASGVLAKNDPLDARMIASFVTIMPTRPVQRQTPAAERLAEMLAIRRQLSAEKVAAENASRLLEDAMLQRLSRRRLVRLAADIDLLDKRMVEIVATDDALVHRYRLLTSMPGVGAVLACTLIALLPELGRMSRKQVAALVGVAPYAFESGTLKGRRCIWGGRAHIRQVLYMAAMSASNWNPVLKAFHDRLTAAGKLPKVVIVAVMRKMITMLNAMVRDDVVWADRLSGRHVLPTAR

SEQ ID NO: 215994 - protein, 364 aa, unidentified
MDETIWLGLDVHAGSITICKLVGQSDKEQSWTIPNEAKDVRRTFTRLKQEGQIRACYEAGTCGYHLFRQLQCLKVDCRVIAPALIPRKAADRVKTDRRDAIKLARLYRAGELTTITVPTTSQETARDVVRARESIRRDLTAARQRLSKFLLRHGRRFSGTAWRGVHRAWLRAQDFTDADRVVFDHYHAQVLHLDDRLAALDGEILSLARSEPFKPIVDRLCCLKGIAELGAMVVVTELYDLRRFSSPRQLMSFLGLVSSEHSSGEKTHRGRLTRTGNGHVRRILIESAWAYRYRAGRSARLRRALEGQPAAVVAISEKAEHRLTKRYARLIERGKARPHACACVARELCGFVWAMALADGRVVV

SEQ ID NO: 215995 - protein, 370 aa, unidentified
MPQSRTLYVGMDVHKESIAVAYVAQEFGAAVVSLGTVGTRQCAIDKLIRQLQSKSKQLVFVYEAGPCGYWLYRSLTTKGHGCWVVAPSLLPKKTGDRVKTDRRDAIQLARLMRSGDLTPVYVPAVQDEAIRDLSRAREDTLHDLKTAKFRLKAFLLRHDIRYTGRATWGPAHLRWLSEVVCPTPAQQIVFQEYVRAVTEQTDRLQRLEQELHEQVTAWRLCPVVDALQALRGVQFTVAVTTVAELGDLTRFDNPRQLMNYLGLTPSEYSSGERRRQGGITKTGNSHARRALVEGAWAYRYPAKVSRHLQLRLEKLPKPIQDVSGKAQVRLCKRYRQLSTRGKNPNQVVVAIARELSAFMWAIAQQVPVTA

SEQ ID NO: 215996 - protein, 327 aa, unidentified
MLYLGIDVSKAKLDCCLLIDPQAPKRKNKSVANSRSGVAELLAWLARHGAPATQLHAVLEGTGVYHEQAALSLYENNVTVSIVNPAQVRSFAQGLAIRTKTDGVDSLVLARYGFLVRPTPWEPPPPEARMLQALLSRREAIAQDLQRERNRHEKACATDTPLIVSRSIDEAILFLEKQLRQLQQDIDDHIDRHPGLKDDLRLLQSIPAVGPQVGNNMLAVMSTRKFESAEQLAAYLGLVPVERQSGSSVLGRARLSKAGPARIRAILYMAAIVATRHNPHVKATYERLLARGKSKMSALGAAMRKLVHLCFGVLKTRQIYCLDHAKI

SEQ ID NO: 215997 - protein, 343 aa, unidentified
MQAVTTVGLDIAKSVFQVHGVDARGNVVVRRQLRRRQVLPFFKKLPSCLVGVEACATSHHWSRQLRALGHTVRLMPPAYVKPYLKRQKNDAADAEAICEGVTRPNMRFVETKTPEQQSCLMLHRTRHLFIRQQTAVINAIRAHLAEFGIVAPVGRNGVEELLDVVADPNDDRVPEVARECLAGLGAQLRMLKAQILEFDRCIVAWHRSNETSKRLDEIPGVGPALATALVASVADPRVFRSGRDFSAWVGLVPKQNSSGGKEKLGSITKRGDRYLRSLFTAGALAVIRYAKIHGTKHRPWLTALLGRRPTKVAAIALANKIARMAWAMMAKGERYKEPAALAA

SEQ ID NO: 215998 - protein, 315 aa, unidentified
MAMPVSVTKPIVGVDVAKNELVIYHAELDRLEEIPNNKAAIKQWLKALSGTVAVAIESTNIYHLEFADLAYEAGCVIYMVGGYELSHYRKGVNIRAKTDALDARLLARYLKNEGDDLHPWTPPSPLYRQLLSLFRRRAALVQARVGLVQSWANEPLLKSAFAAQVKAMQRLETLVEKTINDHLKEAGLLGQLKRCLKVEGIGFLTGARLLTAFQRGDFRNADAFIAFLGMDLRVSKSGQKDGRRSLTKRGDPEARRLLHNAAMSASRTPAWKGFYEEQRARGFSTTQALVILARKLARIVFALLKGQSEYQPKAG

SEQ ID NO: 215999 - protein, 354 aa, unidentified
MKRSTKYVALDMHQATTVASVREESGRVIARTVLPTEAAALLECVGGMRGAIHVAFEEGTQAQWLHELLTPRVDRVVVCDRRGDPRQGNKGDFVDADQLSEGLRRGGLRAVYHGDGHWATLKELTRTYQNLVEDSTRVMLRLKALFRARGIAAAGRGVYHPRNRARWLGALAPRGAHFRAEALYAELDVLRGLRPKGKTAMIAEARRDPAWARLRTIPFLGPVRVAQLLATMQTPWRFRSKRSWWAYVGLAVVTKTSAEFTLVAGRPVRRRRAPLTRGLNRNHNRVLKDVFKGAATAATGRPGPLQDWYHGLLAGGMREELARVTLTRKLAALTLRLWKKGERYDPTQLAIQAR

SEQ ID NO: 216000 - protein, 344 aa, unidentified
MKHYAGLDVSVKETSICIVDETGKVCRELKVTSHPEDLLRVLQDPAWNLVRVGLEAGPLSQWLFNGLAEAGIPALCIETRHAKAYLKAQINKTDRNDARGIAQMMRVNLFRPVHVKTLASQKRRALLTARKLLQEKAIAIENDIRGLLRNFGLKVGVASAVMFEQRIRELVEGMPELGELMEVLLDARRKLREQFSKLHRKLLSIVREDEVCRRLMSVPGVGAVSALAFRATIDVPSRFRNSKAVGAVLGLTPAQHQSGESNWTGRISLCGDAMMRTLLYEGAQSILTRSVKWSWLKAWAMKIAKNRGLKRAIVALARRLAVIMHRIWVDGTEFLWTKEEAVSA

SEQ ID NO: 216001 - protein, 384 aa, unidentified
MKSNTQNAKIEAITEKTLVLGIDVGSETHYARAFDYRGVEYSKKPFKFSNTEAGFVTFKAWVLDIKEKHGKDKVIPGMEPTGHYWFNLGKFLQDNEMKPVLVNPHHVKKSKELDDNHPTKNDRKDPKVIAGLVREGRYMIPYLPDGVYADLRTASNIRFQLQAELTRIQNRINRWFNIYFPEYKTVYGKPDAKSGILILKEAPLPEDILTLGIDGVNQIWRDAKLRAVGKARAKTLIEAAEHSVGSKEGAVSARMEIRMLLEDYESRNIRLQEVMGLIEGLVNQIPMAEKLLEIKGVGIKTVSGFLAEVGDIRRFNDPKELQKLAGLALVENSSGKHKGKTTISRRGRKRRENEEKHFQKSWQSVYITGSCSVYLSDDVGFCFR

SEQ ID NO: 216002 - protein, 330 aa, unidentified
MYFAGLDIHKVFTFGVIKDEGGEVLNKAKFENSEENFESFFKGFLPEETKVVMESTGVWEYIYEILNSKGYEVKLANPVRTKAIASARIKTDAVDAATLADLLRANLIAESYVPTKEVRRLRDVVRQRKSLVKGRTQIKNKIYSMLIRQGVKLPYKSLCPSAINWLNDNIDINDVFVSYFNILEQYNNEVKFIEKHLKSMAEKNEQAKLLTTIPGIGPITAMVLVAEIADIKRFPNGEKLCSYAGLVPSIKQSGNSLKHGRLVKQASKSLKNALVQASWRIVRTKEANTLKLHYLRLKDKKGKQKAICATARKMLCIIHAMLRKNQEFIA

SEQ ID NO: 216003 - protein, 411 aa, unidentified
MSYKIAGIDVHKKVLMVVVIDATTPEEKPERRRFATLPSDLQRLLIWLREQGVEEAVMESTAQYWRSVWLELEPHMRLHLAQAFSNRAPRGRKHDFKDAERLVRRLIANELILSFVPGGEQRTWRNMTRMKLQLTRDRVRLQNQMECLLEEMRIKLSIVVSNLLGASGIRMLRALAKGETDPKQLAQLGDERLQCTEEQLVDALTGRAQPLHREMLALQLERLQLIDTQIAKLNGMIAQAMKPHQEAVMRLAEVPGLGVDSAQQIIAEVGEQASTFPSAAELTSWVGTCPGKDESAEQNHSSRSAKGNKYLRRVLNQAAHAAVKRKGSYFQVVFRRLLPRLGYQSAIWAVAHRLCRVVWKILHEGVRFIEHGIEPDPKAKMRHARRLAQALRKLGYQITITPTNLASGMQM

SEQ ID NO: 216004 - protein, 332 aa, unidentified
MNLVSTLGIDLAKSTFSLHGVNSNGAVVLRRTLSRAKLSELVAQLPPCLIGMEACSGAHEWARRFAASGHVVRLMAAKFVTPYRKSGKNDGNDAEAICEAVARPNMRFVPVKSLEQQSDLTLHRVRQGFVEERTATLNRLRGLLAEFGHVLPLRAVEVQRRVPQLLGKLPARVASCARDLLEHAARLQAKALEYEHEIRVHVRSNELARRTQTRLGIGPITASALVATVGNGHDFKNGRQFAAWLGLVPRQYSTGGKTRLGHITKRGDPYLRTLLVMGARAVLQRAASLTDPLSQWALAVRERRGYHRACIAIAAKNARVAWALLAREPVAA

SEQ ID NO: 216005 - protein, 459 aa, unidentified
MARSQRKGNGLPAQLAAVNLHAAGIDIGSQEHWVAVPPDCDPQPVRRFGACTADLEALAMWLGECGVTTVAMESTGVYWIPLFELLEARGFGVVLADAREVQRAPGRPKTDVQDCQWLQRLHTYGLLAAAFRPPEQICVLRSYLRQRSMLVTYAGQHVQHMQKALTQMNLKLQHVVSEVTSVTGMAIIQAILTGERNPRVLARFRDRHCQHSEADIARALQGTWRPEHLFALQQAVELYEFYHRQIAACDRQIEGQLQTLADQSGGKPLPAAPRKSKRRRNEHHFDVRGPLFRATGVDLTAIEGINEHTALVLLSEIGTDMRRWPTEKQFAAWLGLCPLHKISGGKVLSRKVRPSANRAAVALRLAASCLHHSQSALGAFFRRLKARVGTPKAVVATAHKLARLVYRLLKHGEAYVAQGMAEYEQSYRDRVVRHLARKAKELGYQLLPTNTLTPQEAAG

SEQ ID NO: 216006 - protein, 408 aa, unidentified
MEPQAALKPILRCVAALDIHQSLLTVCVLYEDESGTTRVELREFGGFKRDRRAMAEWVASFKPEMVVMESTGIYWKSPYSALEKVGIAAAVVNARHVKNVPGRKTDIQDAQWLAIVARAGLLNHSFVPPENLRGLRLISRQIKKLTGMLSAEKNRVHKVLTDGGIRLGVVVSDLHGKSARAMIKGILAGETPEQVLRYADRRLKATEEELLDALDGELTDAHRLVVGEVMAHVEYLEGRIDGLLQELLKGLAPQTGLLDALQTIPGVDQMAAAMVLVEIGDDMSQFGSPDRLAAWAGLCPANNQTNKKQKGGKKRKGNPYVRRILCEVAHAASKTASALAAKFKGIALRRGYKRAIFALAHQILKIMFLLIQRGDYYRDATVDYEALSVKRNAPRWIKMLKKHGFIAA

SEQ ID NO: 216007 - protein, 355 aa, unidentified
MTIVAHSRPFVVGVDTHAKTHTYAVIDATGQSLGCEQFPTTAQGIARAIAWVGRRTTGQAEALWVIESVASYGARLAHAAAEAGYEVAEAPPMSPKIRHGVGKSDAMDAQAIATAALALDQARLRRPRADQGVRQALRVLVASRDQMTQEKTMNVNALNALLRVQDLGIDARRPLTAAQIGEASRWRGRDESLAQAVARDEAVRLARRVLTLEEALTANHARMAELITDSPAAALLEEKGIGAYTAAVVITAWSHPGRIRDEAAFASLAGVNPIPASSGNTIRHRLNRGGDRRLNKALHIITVTRMTHDPNTKAYVEKRLAQGRTRREIRRCLKRYIARYLYRTLNALHDTPATT

SEQ ID NO: 216008 - protein, 390 aa, unidentified
MDVLYQSCAGIDVHQATVVVCILHGPLTSTRPKREMAQFDTTTKGLKACHDFLSQFHVEAVGMESTGVYWRPVWHELCDDFELILAQPAHMKSIPGQKTDKKDAHWIAQLTRIGLLPRSFVPDETIQELRELTRQRKHYVESRNRETNRIHKILQSGGIMLTTYIEDIMGASGRNLLQLLIDETPLTPRMIHQSVYTSLKRKVPQLLEALDGYFSAHHRFMLGQSLEMYDFYQKQIDCLEERINGYLNLYERSVEILDSIPGIDLITASVIIAEIGVDMSQFPTAGHLASWAGLCPGNNESAGKKRSTKIRHGNSYLKRCLCQAVFAAKKQKGSPLAERYYQIQSRRGPQKATIALAHQLLKIVYILLKENLTYQEFVLQKKATRDEPVA

SEQ ID NO: 216009 - protein, 375 aa, unidentified
MSDHSEAFVGLDTSKLRNAVAIAEGVRGGEVRFLGEFENSAAAIAKLVKNLAAKYQRLTFCYEAGPTGYGLYRQIKTLGPECIVVAPSLIPKKPGDRVKTNRRDALNLAKLLRAGELTAVWVPDRGHEAMRDLTRARETAMMDLRSKRQQVSAFLLRQGLHYSERKKTWTKTHMNWLASQKLEHAEQRLVLEEMMLAVRQAQERLERLEQAIRVAVPDWSLAEVVTALMAMRGIDRISAATFLAEIGDLSRFQHPSELMGYLGLVPSEDSTGDKIKRGPITKAGNRRARRMLVECAWSYQHPPRVGQDKQEKVATAPRAVREIAWKAQCRLHGRYRALVRRGKLKTVAVTAVARELAGFIWAVSRAITTARVVAK

SEQ ID NO: 216010 - protein, 346 aa, unidentified
MTIVEDRPVITGGVDTHADTHVAAALDPIGGLLGVREFPATAAGYAALLGWLSGFGDVALAGVEGTGSYGAGLARYLAASGVRVVEVDRADRQDRHRQGKSDPLDAVSAARAAQSGRASGVPKGRDGAVEAIRALMVAKRSARHERTQAINQARALIVTGPDELRGRFAGHSPAALVDAIAALRPRPGDVPGYATRVALRELGRRAQFLDAQLGRLDELIGPLVTARAPGLLSLHGVGPDTAALLLVAAGDHPERLRSESSWAHLCGVAPIPASSGKTSRHRLNRGGNREANSALWRIVITRLKSHPATRAYLERRSKEGLSKKEIIRCLKRYVAREVYHQLRDGA

SEQ ID NO: 216011 - protein, 350 aa, unidentified
MPRTPQPRDAAVFGVDLGKNVFHVVGTDKTGAVVQRLKLRRDKVLAFFETAAPALIGMEACPGSQWLARKLQAMGHTVRIMPAQFVKPYLKTNKSDTLDAEAIAEAVTRPSMRFVPVKSVDQVDIQALHRIRDQMIGKRTALINQMRAFCLEFGIALRQGVNFFKADFPRVMADEDNDLSPSMRRLLSDLFEDLQRLELRIRTVTSEIEALVARDDVARRLMTIPGIGPLGASALLAAVGDGRQFRRARDLAAWLGLTPREYSTGGKQKLLGISKRGNTYVRRLLIHGARACLIHLDKSRHRLGDWLVGLQGRMHPNKVAVALANKMARMAWVIITKPGALYERQDPAFS

SEQ ID NO: 216012 - protein, 400 aa, unidentified
MLSIGIDVSKGKSTVCGMKPGGEIVYTPFEIQHTREGMSELVSLLHNSGEEVRVVLESTGSYHCPVVAALLENGIFVSVVNSLRMKRFCSQSIRKVKTDRIDAMQIALYGLAYWQELQPTRLPEDTYRELQLLARQYYQMTSLLIKAKVDFNAICDQVLPGMQELMSDHAGRHKLSDFVLRYRHTTHILEMGETRFRKDYCKWAEKKGYRNCERMAVLIFATAQNGIPVLPNAPSTQIVITEAIRVLHTVEASRDAILTQMQALAKTLPEYSLVREMPCIGDTLAPRLIAEIGDVRRFHSKRALIAYAGIDAPPYQSGKFCANNRHISKRGNRYLRKTGYEVMQSYVMHKPANDPIFTFIEKKRGEGKSGKLAMVAGLNKFLRVYYGKVTELYRSLPAIE

SEQ ID NO: 216013 - protein, 370 aa, unidentified
MLDTTTFIGLDVHARSIKAVSLDVMTGEVRAATFGYDAGAVAEWVRSVDPGARCVYESGVTGFDLQKRLSGLGVDCVVGAVSKMIKPSADRRRKNDRNDAEFLARMLSVGNVVEVWVPDDECEAARDLTRALEDARDDLSRSKQRLSKFLLRHGLAFDERTPTGRRKGNWTRAHWSWIESIRFAEGADNDVLAYYVDAVRRAAEEKARLEGLVEAEARKPRWRRRVDSLRCLKGVDTATAADLVFEAGEFSRFRNARSFAAWVGLTPSEHSSGESDRRGAITKAGNKHLRKALVEAAWHYLTCSGRPKDLARGQAPDRGARRHAAKGVRRLVERREALLARGVHGNKANVATARELACWVWAVGLMAEEA

SEQ ID NO: 216014 - protein, 415 aa, unidentified
MALKIVYKICCGIDVHKTFVVACIASTNSNGVTTYESHRFSTYTRGLKDLLQWLLKHNCKDVCMESTGKYWIPVYNVLENDCTIVLAHPKYVKAIRGKKTDKKDAKWIADLFKHDLVAGSFMPPADIRQLRDLMRYRFKLTCFMSSEKNRLQNCLTVSNIQLGNVVSDTFGKSAQAILDKLLENPADTSFDLEPLVYKNLKKKLPQLRDAIDGYITPEQAGKLKVIKAHYESLESRKAELEELILALAVPYQQELAILQTAPGIRSDFTAIGIISEIGTNMEAFPSAKHLCSWAGLTPTNNESAGKKKSVRVSKAGCYIKPLLVQCANAVVASKKHPEIRNRYLRIKKRRGHKKAIIAIARMLLTALYHMLKNGENYNAELYRKSDLPPVDREITIEQAIIIARNQGYKIKSATT

SEQ ID NO: 216015 - protein, 409 aa, unidentified
MIYIGIDWADKSHRVYITDDTATKLDSFSIENSRDGVEELFKKVRHFAKDTKQVLFALETPNGLLVNSILDAGYTVYAINPKSVDRYRDRYKVSGRKTDDFDAMVLANILRTDRHNHREILPDSPLTNELKILTRQYSQLVRIKTIFINQLKSCLKDYYPVAVELFSNLDSQTAIDFLLTFPTIEHAQKASLQQLQKFLSQHHYPGVNKKANQIYQKLNQPHFKVQPYIANAKAQFMLTLVQQLKLLLPQIESLETKIEQLVNQHPDKEIFASLPGAAVILTAKLISEFGDNRQRYKDASSVQSEAGTAPITESSGSWKIVRFRTSCRKTFRDTIQQFAFCSIKESQWAKQKYYHYISSGKKHHHAIRCLANAWLEVIFSMWKNHTTYSEQRHLLKNFKEQKYYQTLTA

SEQ ID NO: 216016 - protein, 323 aa, unidentified
MNKGINYFGIDISKDVFDVTDSNNVHTVFKNDLKGFKLFLKLLDSSSHCVMEATGYYYCQLAYFLQDKGIKVSVENPLSVKRFIQMRLSKIKTDKSDSKMLCEYAQSTKLKLWKGNSKNQIECLQIARLLSVYVKQTTVLKNKIHGENVLGSPSSLVVRSLKRSLKSIQKEIQLLEEKLTMLVKKEHQELLTCVESIPGIGRKTAIMLIVLTDGFNRFTNASELCSFAGITPVIRQSGSSIRGRARISKMGNPKLRNLLFMCSFTACKNNKACKSLYDRIVAKGKSKKLALIAVCNKLLKQAFAIAKSGLKYDQNYRSVLIEN

SEQ ID NO: 216017 - protein, 506 aa, unidentified
MVLPPNQGENFSRKAKDSYKAAKYENCKKSAQKSKKSSRRTKKSSESRGGTPLPAPSLPAELQQVNINAAGIDVGATVHFVCVPEGRDPQPVRSFGAFTADLEAIADWLTQCGVTTVAMEATGVFWIPLFELLERRGFEVKLVEPSRLKHVPGRKSDVLDCQWIQQLHTFGLLSASFRPNDQICVLRSYARQRQTLVCSAARCVLHMQKALTQMNIKLQHVISDITGVTGMAILEAILGGERDPAKLAALRHENCKNDEATIALALQGNWREDHLFALRQAVDAYRFFREKLGEIDERIESQLKTFEDKSQGKPLARRSRTRKRGTNEPSFDMRNYLYTMTGVDLTEVDGLNASTVLTVISEIGFDMSHWPTEKHFTSWLTLCPGVNKSGGSPRSRSGRTRPGSNRAAAALRLAACSLLQSNCALGAFARRLRARLGAPKAITATARKLAITIYDMLKYGEAYVDRGAEYYEQQYRATMVKNLKRRAKQLGYGLVQLSEQQAAHEG

SEQ ID NO: 216018 - protein, 313 aa, unidentified
MTKTTNTNPTDYIAIDVSKATLQIQDDQRTFAVDNDSEGHSKLRKHIKTRQNPLIVFEATGGYERGLCEFLRKEAIPLTMVNPARVRDFARSEGVRAKTDPIDTKMILAFAKSKALCAMETPSETCTKLAALLDRRGHLVEQLAREKNRLQNSEKLILRSIQRMIKILEKEISALDKAIDELVSSEPGLQSRSKLIQSIQGVGKITAWTLLAYLTEIEHLNRNRLVALAGTAPFNRDSGKFSGKRSIIGGRAKVRRCLYMATQSAANCNPIISAYVQRLRERGKPYKCAIVAAMRKLLLHIQSLIKNSKLSPC

SEQ ID NO: 216019 - protein, 408 aa, unidentified
MTVVGIDVSKGKSMVAAMKPGGELVTTPYEVKHSDIELSRFALDVLCMEPDTRVVMEATGRYHEPVAALLHSEGIFVSVLNPLLIKQSGAGSLRKVKSDPKDALKIAKYGLDNWSTLREYTPMEAIRQQLKLCARQCDLYSKNIVMLTNNLISLSDKTFPGVNELFSSPEKENGHLKWVDFYRTFWHCDCINRMSPDAFEERYKKWCKRKGYHFSADAADALYAASCGLYTTLPRDNNAKLLVTVATDQLIALRENQSKLETEMLNLCKQLPEYETVMAMYGVGKSTGPHLMAELGDIRRFPHRSSIVAFAGVDPGVVGSGKMQLSSVATSKRGSPQLRKALFQVVSAYVKRKPENEAVYQFYAKKRDEGKPYYVCTTAAANKFLRIYYARAKECLNAAESATQAEEG

SEQ ID NO: 216020 - protein, 405 aa, unidentified
MVDIMVSDFMKGRYNLMKIFVGIDIAKLNHFAAAISSDGEILIEPFKFTNDADGFQLLVSKLESFDKNSIIIGLESTAHYGDNLVRYLVAEFYQVCVLNPIKTCQMRKNNVRKTKTDKVDTFVIAKTLMMQDDLRFITFFDLDMMDLKALGRFRQKTIKQRTRLKIQLTTYVDQVFPEIQYFFKSGLHQNAVYALLKEAPSPKEIASMHMTHLANLLKVNSHGHFTKEQAKELRVLAQKSVGANDSAISIQITQTIQQIELLDSQLEKIEVEMTDIMKFNDSVIMTIPGIGYINGGMILGEIGDIHRFSNPNKLLAFAGLDPSVYQSGNFQAKTTRMSKRGSRVLRYALVNAAWNVVRNNATFKAYYDAKRAEGRSHYNALGHCAGKLVRVIWKMLTDEVEFNLE

SEQ ID NO: 216021 - protein, 319 aa, unidentified
MNKLSHNRIIGIDVSRDWLDIHCLPDGHRLRLPNTASGHGQLIEIACERDACICFEATGGQEWRLWAALDVAGIAARQLPPAQIKAFAASRGTRAKTDRIDAELIARFMAFRPDAGRDLPHEKLRLLRALTSKRGQLVETRKRLLAQIKAHGKLGTAERFAAMDGDLKGLLDHQIAELESQIEQLITSDVELAGTAAILRSVPGIGPVASSMLIAEMPELGQITGEQAAALTGLAPIARDSGAMRGKRAIGGGRRQLRHVLFQAALVASYHNSVLKVFADRLRDAGKPHKLIITAVARKLVTIANALCKSRQTWASRTA

SEQ ID NO: 216022 - protein, 445 aa, unidentified
MDVIFPHCAGLDVHKKTVMACRVTPDPTGQQADSLMELREFGTMTPDLLALSDWLAEAGITHVAMESTGEYWRPVYNLLEGNVTIFLVNAAHVKQVPGRKTDKADARWLAKLMRHGLLQASFIPPQEQRDLRDLTRYRTKLVQERSREVNRVQGVLERANIKLASVATDIMGVSGRAILAALLEGHAEAAVMAELAKGRMRTKIPLLEQALTGLMRDHHRRLLALQLAHIDFLDEQIASLSADITRDLMTLGPHEPLPPAAPVAEPDSQTSTSDTGTSPWPFAHAVRVLDTIPGVDQRGAELLVAEWGTDMGRFGTAARLAAWTGVAPGNDESAGKRRSGKTRQGNRALRTGLTQMAHAAARSKGTYLAALYQRLAARRGKKRAIVAVAHSMVVSAFHMLSRHEPYHELGANYFDRQRRHHLVDRLTRRLEHLGYRVSLEPVPTI

SEQ ID NO: 216023 - protein, 315 aa, unidentified
MSDVPCFVGIDVAKAQLDIALRPSGERWAVPNEASGVMTLVDRVQALHPTLIVLEATGGLERAVTSALATAGLPVVVVHPRQGRDFARATGQLAKTDALDARALAHFADVIRPTPRPLPDAQTQELRALLGRRQQLIGMRTAEQNRLAGTNARLTKDIAAHITWLNAAIATLDDDLETILRASPLWRENDDLLQSAKGIGPVCAHTLLLELPELGTLTRQQIAALVGVAPLNCDSGTLRGRRMIWGGRAHVRTVLYMGTLVATRFNPQIKVFYERLLAAGKVKKVALTACMHKLLTILNAMLKHRTPWQPQEVQS

SEQ ID NO: 216024 - protein, 360 aa, unidentified
MTESSDYESVQVFIGVDVGKDTHHAVAVNRSGNRLFDKVLPNDENKLGSLISDLKQHGQILLVVDQPATIGALPVAVARLEGVFVGYLPGLAMRRIADLHAGEAKTDARDAAIIAEAARTLPHVLRMLKLADEHIAELSMLCGFDDDLAVQATQASNRICGLLTQIHPALERVLGPRLDHPAVLDLLQRYPSPEKLASLGEKRLASQLCKLAPRLGKRLAADITQVLAEQTVVVPGINAAVVVLPRLALQLITLRKQRDEVVMEVELRVLTNPLYPVLTSMPGVGVRTAARLLTEVTCRAFASAAHLVAYAGLAPVTRRSGSSIRGEHPSRRVIKPLNGRCSCQPLLRSETRSGLTTHAK

SEQ ID NO: 216025 - protein, 360 aa, unidentified
MTQHTFIGLDVHARSVRAAVLDGATGELRSCAAPVTAAELVPWLRAQGESVSVAYEAGPTGFVLARACAEQQILCLVAATSRIPRAPAERVKTDQRDAVKLVRLLRLGELTAVRVPSLTEEGARDLVRARDDARADLMRARQRLSKLLLRRGLLWAGVKTWTCAHERWLAAQRFEERPLQVAYEEAQAAMLSVKARRDALDAAIAVEAQGERWKGVVGRLCCLRGVSTLTAFGLATEIGDWERFDGRSIGAYLGLTPSESSSGERRHRGAITKTGNSHARRLLVEAAWQQRRPLLRPSRELARRREGQSALVRARAEAAGKRLNQRWQSFDARGKRSTVSAVAVARELAGWCWSLATMEA

SEQ ID NO: 216026 - protein, 362 aa, unidentified
MNPFAFSNDLSGFQKLLDCLKDFSLDELLIGMESTAHYAENLTFFLFTRGFKLCIINPIQTASLRKSSIRKTKTDSIDTFLIIKALSLNHFRLFTQHDFDSMQLKSLCRFRQKLMKVRTKVKIQLVSYVDLLFSELQFFFKSGIHIKACYALLKEEPNPDKIASMHLTRLSNLLKKTSKGHFGKQHAIALKELAAQSVGIKNDTLSLQILQSINQIELFSSQLDEVEKLINQIMDNMDSVIKTIPGIGSLNGAMIIGEIGDVRRFEKPCQLLAYAGLDPCIYQSGKFTASRTRMSKRGSKILRYALINAAWQTTLVNQTFRDYYNLKISQGRGHYSALGHVAHKLVRVIHKMMTDNVEFNLD

SEQ ID NO: 216027 - protein, 341 aa, unidentified
MEEISVVGIDLAKHVFQVHAVDGAGQAVIRRPVRRHELLGFVAMLPACTVAMEACAGAHHWARQFQAMGHAVRLIPPSRVKPYVGRQKNDAADAAAICEAAQRPAMRFAAVKTVQQQALLLDHRTRDLLIRQRTMLVNALRGHLAEFGIVAAKGLAGAQALLAAVEADGGPPGVPSVAIPALRVLAAGIRGLGEQIAAIEARLKAARAAEPQVRRLMSIPGVGLIGATVIAATVPDATLFRSGRDFAAWLGLVPRQHSTGGKARLGAITKMGDRYIRRLLIGGALSVIYRCKRGPDFAATWLGRMLARKPVRLVAVALANKIARIAWALMARGESYRPAGA

SEQ ID NO: 216028 - protein, 444 aa, unidentified
MTRKSKNQRLQIIHPHCAGIDIGSREHWVAVDPDKAADPVRCFSSFTDSLNEMADWLKSLGVEIVAMEATGVYWIPLYELLDQRGFEVQLVNSRSTRQVTGRKSDVLDCQWIWQLMSHGLLKGAFRPADSVCRLRAIVRQLGTKVQDQSRCIAHMQKALTQMNIQLDNVVSDLMGKTGTAILRAMIAGERNPQKLASLRDNRLHADEKTVARSLQGNWREEHLFALTQALEHYDFLEQQIQHCNQLIEQHLVELPQLAENPPKPVKVLKSSSRTKKQQSALHQALYGVMGVDLTAIPTIGIETVLVLASEIGADLFRFPSESNFCSWLNVAPPTCISGGKKLHGRAPRVFNRAGQALRQAACNARNSNSFIGASHRARLSRMDKASAVKATAHQLARLIYAMLIKGQPYVEKGMEAFEARTQDRQLKALQRKAQKLGFKLVEAA

SEQ ID NO: 216029 - protein, 408 aa, unidentified
MKQNIIFGIDVSSKSSTVCVVIDRVKQGKTFKITNDSFGYQELLDHLNQYLITPLVVFEATGVYSLSLQAFLEDYHIKYLKLNPLKAKKLMDNNLRHNKTDKVDAYRLALIQFNAPQKLRQPQSREYHELQNASRYYEELTRALVVNKNQLHRNLQSTFPQLESLLSVPSGRVYWTIASLFPHAQYVLNRNETQVFQSLLAISSIGRQRAQYLTTRLYALARQAYPYDTEKSITIRAIQRNIANLLSLSTERNNVINYMEKLVLQLNARSLTIYESIPGIAKTTAVRLVAELGNLRRFDTSAQIDAFVGIDPGRYQSGEKDSHLGITKHGNHIARKILYRTITQMETTKATQPCHITDYYDKKKRSSNSQGYKKIAIASVHKLIRTMFALIKHDQLYDYNIATDNQRL

SEQ ID NO: 216030 - protein, 333 aa, unidentified
MTYSYALGIDLHKKQSTWKLVDKNHKVIFSKTVLCQPKDIEAALVKLPVSLNGLPVAIEPTCGYRWVDKLLTERGCDMHVANPYKFRVIANSKQKTDDADAKVLAEFLQLGYLPESWRTPDHIEKRRTLVRVRDSLVKARTRIKNQIEGLLTNECPITSRKTLPPDLKFQELNSLIKEHTSHIKNFDKEINRIVIDDPVCKLLLSVPGVGPISAFAIVAEVGDFSRFPDSSKLASFAGIVPSQRSSGETVRYGHIVKTGSKLLRTTLIEAAMRFRPPYDHNLNVFFERLKKDRGAMRARVALAHKLLTIIYSMVKNNKPFVPSYDTAKLGDLF

SEQ ID NO: 216031 - protein, 409 aa, unidentified
MRYYLGVDWADQTHAVWVVDESGAKITARAVAHTAEGLGEWGRELDEWRAQGIDLWAAIERPDGRVVDFLLDHGVVVYPVNPKALDRARDRFRQSSAKSDPFDARVLADFLRTDHGHLRALQPSSEAAQELKLLTEDCQRHIRQQTRLVNQLTATLKAYYPRALEVAELTSALAREFLPAYPSPAALTALTERQWQRWARAHGLSAARTGDLWAVLQQPQLPVPAHVVRAKARLMRALMEQLMPVVAAVAEYRKAIDDFFASMPAARWARTLPIGKHGITAPTLWARLGDAPGRWESFRHLQAHAGAVPVTKRSGKQQVVHFRFACDKALRHVVDQLAFLSLLSSAWARAYYDQQRARAHSHRQALRALGAKWLKIIFVMWQRQVPYDEQYHLATMTRQQLRHRQEQIA

SEQ ID NO: 216032 - protein, 398 aa, unidentified
MISVGIDVSKGKSMVCITNEHGEILNKPFEVKHLEKDLNELSEILLKFDDIRILVEATGIYHLPLVTYLRKKDLFVSVINPYEMKQYRYQGLRRVKTDKQDAIAISNFGIAHWAHLKNFEIASSTYEELKLLSRRYAHYMKLRVESLLELTHVLDYTMPGIKDLLSGWHESNGKDKLSDFVEEYWHYDTITKKSEKQFITSYLKWSKKKGYPLNHEKAHNIYSLAKEGIPTMPSSTPSTKMFIQEAVKVLREVDNTLMKILTRMKELSKTLPEYPVVRAMGGVGDVLAPKLIAEIGNTQRFNNGKSLIAYAGIDAPPYQSGNFVGTKRKISKRGSSSLRKIGYETMRSLKSHCVPADDSVYNFIIKKEQEGKAKKVAKIAGLNKFLRIYYARVMEIYR

SEQ ID NO: 216033 - protein, 327 aa, unidentified
MVTPALGIDVSKVRLDIELAAAGKPRAKCFGNSPEGWRQLMAWLKEQKIKRVHACLEATGRYSLGVALALCEAGHIVSIVNPAQIRDFARSKLGRNKTDGVDAGHIREYAEIFKPLPWIPPSPAMRRLGELQTIRAGIVSSLTEWKNRCESGLADDTVLALAKATIAHFAAQLAAVDKAIARTVADDSELSAKRDLLLSISGVGEVLAGLVLAELPGTNILRSSGQAVAYAGLNPRLHRSGSSIDRPTRISKIGNATLRAALYMPALSAMRHNPVVAALAARLRAQGRLKGKQIAVAAMRKLLVLCFGVLKSGKPFDPAVAMPTRGI

SEQ ID NO: 216034 - protein, 446 aa, unidentified
MDAVFTHCAGLDVHKKSVTVCRLVSDSTGQNPEGVAELRTFGTMTIELLALADWLLEAGVTHIAMESTGEYWKPVYNLLEGVVTIFLVNASHVKNVPGRKTDPADARWLAKLMRYGLLQASFIPPVAQRDLRDLTRYRTKLVQERAREVNRVQGVLERANIKLASVASDVLGVSGRAMLEALIAGQTDPAAMAALAKRRMRSKIPALEQALTGRVRDHHRHLLTLQLRHIDFLETQIEALNSAIASCMTTLSQEAVADTTPSSPTPADVPPPAEPLPPLTFTRAVALLDTIPGVNQRGAEMIVAEIGIDMARFGTAPRLAAWSGVAPGNDESAGKQRSGKTRKGNQVLRAGLTQLAHGAVRTKGTYLSALYRRLAARRGKRRAILAVAHSIMVSVFHMLTRNAPYHELGGNYFDERRRQYTVDRLTSRIEHLGYRVHLEPLPTAAA

SEQ ID NO: 216035 - protein, 349 aa, unidentified
MIVVGIDPHKQTHTAVAVDKATGAVLAELTVRARTPGFERLVDWARRLDDERLFAVEDGRHVSGGLERHLIARGERSVRVAPRMMGQARRADRVRGKSDPIDATAVARVALSHPDLPEATLAGAEREIGLLAAHRETMVNERTAIQSKLRWLLHDIDPDLAPGPRSLDRFCTLDRLQAALDRLEPAVDVKICLELISRCRQITRRANELARQIDGLVKAAAPALLQIPGCGSLTAAKIVAETAQVGRFPTEGHFARYAGTAPVPASSGATHRHRFNRRGNRQLNAALHRIAVTQLRIHEPAQLYVAKKRSEAKSKTEAIRALKRRLCRVVFKTMTSMQPPADGLTAVAA

SEQ ID NO: 216036 - protein, 343 aa, unidentified
MQTVTTIGLDIAKSVFQVHGVDAGGQMVIRRQLKRRYVLTFFQKLPPCLIGIEACASSHHWSRELQALGHTVRLMPPAYVKPYVKRHKNDATDAEAICEAVTRPNMRFVATKTSEQQSCLTLHRTRHLFIRQQTAVINVIRAHLAEFGIVAPVGRNGVEQLLGVVADVSDKRLPEVARVCVAALGAQLQTLKAQILEFDRRIMAWHRSNEASKRLDEIPGVGPALATALVASIADPKMFRSGRDFSAWIGLVPKQNSSGGKDRLGNISKRGDRYLRSLFTTGALAVIRYAKIHGTKHRPWLTALLARRPTKVAAIALANKIARMAWAIMAKGERYKEPAALAA

SEQ ID NO: 216037 - protein, 361 aa, unidentified
MPTVADVIDDVIGVDTHTDTHTLVCCSPAGAVRGELTVDNSTDGFAEALTWATMLASGPSLIFGIEGTRSYGQALSEFLSRAGLVVVEVERPARRSARTRRGKSDPIDAKAAAHQVLAMDPDALPTPRADGDREALRILLVTRRALADECKKANARLRALLLTGTDTDRALLRGPRLSKTTLTGLTRRRGSKGEDRATTTRRREITRLANQQLRLLEELRANNRDLATITDEIAPGLTSEHGVGPVSAAQLIVSYSHRGRVRSEAAFAALAGVSPVQASSGRRTRHRLNRGGDRQLNRALHDIARTRMRDCPNTRAYVTRRTSETPNFTTRDARRCLKRYLARHLYRRLETIMTPGPGPTT

SEQ ID NO: 216038 - protein, 436 aa, unidentified
MQEVEDEPLFAERVAGIDIGKKSVMVTIRVPGDTRKGRRQQETREFRATRAGLLELADWLRCWQVTKAGMEATGDYWKPVYFLLEREGFDCVLYHASQVKALPGRPKTDKLDSVWLAKITERGSLPGSFVPPEDIRRLRTCTRYRRHLTQARTAEKARCEKLLEDAHLKLSSMISDIHGVSGREMLTAIIAGQRNPKVLAQMARTRMRGKIGQLEEALDCSFFTEQHAFILQMMLANIDHLTAQIDELSKKINVLCEPYERQIAQLDGVPGFGIITAQDIIGEIGVDMSVFPTAGHLCSWARQAPQVSSSAGKRKGKNATGRGNPYIGGALGEAAANAGRTSTFLGTKYRRLVRHMPKKKAQGAISRTQLVITHALLSDPEAEYTDLGTDYYERRANIRREVRSHARAIERRGYKVILEPIEPGLDPDILPVTKAS

SEQ ID NO: 216039 - protein, 362 aa, unidentified
METDVKGTKKLFDGQSIYVGIDCHKKNWTVTILGEQYEHKTMSQNPDPDILASYLRRNFPGAKYNAVYEAGFNGFYSCRRLKELGVNCNVIHAADVPTSNKEKIQKIDPVDSRKLARSLRSKEFESINIPEPSLEADRTLARQRFRVMKDVSRTKARVRSLLFQFNISIPDRFTLGQTRSWSKIYINWLKELQIEYESLKHTLDNYIRIGELQRKELLTVNRQLRSLSQTDAYRGNYNLLISIPGIGFLTSMTFLAQIGDIRRFKLLDDLCDYIGLVPMMHGSGDKMYTGKLINRGRKELKIMIIEASWDAVRLDPALMARFNELTRRMNKNKAIIRIARKLISRMRYVLMNQEAYKLGLTE

SEQ ID NO: 216040 - protein, 390 aa, unidentified
MDVLYQSCAGIDVHQANIVVCILHGPLTSTRPKREMATFDTTTKGLRACHDFLSQFHVEAVGMESTGVYWRPVWHALCDDFELILAQPAHMKAIPGQKTDKKDAHWIAKLTRIGLLPRSFVPDEIIQELRELTRQRKHYVESRNRETNRIHKILQSGGIKLTTYIEDIMGLSGRNLLQLLVDRTPITPRIVHQSVYTSLKKKVPQLMEALDGYFSDHHRFMLKQSLEIYDFYQKQIELLEERINVYLSQYENHVEILDSIPGIDVITASVIISEVGVDMSQFPTAGHLASWAGLCPGNNESAGKKRSTKIRHGNSYLKKCLCQAAFAVKKQKGSPLAARFYQIQSRRGSQKATIALAHQLLKIAYILLKEQITYPEFLAQKKTTRDELVA

SEQ ID NO: 216041 - protein, 331 aa, unidentified
MKKAVLVGIDVSADELVVAVEREGQSLPVATFDNDATGHRKLIRWLTKSGRPVRVCLEATGVYGLELSLALSRAKQVEVMVANPRTIKDFARAFLQRSKTDDLDAKAILEFVKRMPFRAWQAPPVEILQLRAVSRRISALTKNMTMEKNRLHASDHCEELTKFTRDDIASHIEYLQESIRRLGAEAVAVIRQSPQLSREFDHLVSVKGIAEASATQILAELSVLPGDMTARQWVAHAGLDPRHHESGSSIHRPARVTKAGNKHLRSALYMPALVAIQHEPNVRAFYEKLLARGKKPLQAIVAVMRKLLHAIYGMLHHDRDFEGEKFFAMRA

SEQ ID NO: 216042 - protein, 366 aa, unidentified
MKKDSRESVAMATARGKASQAVIGIDLGDKQSQYCVLDRKGEVAEEGTLRTTPEGFRQWLQGRKPCRIVVEAGGHSPWVSRLLETGGYQVLVANPCRLPMIYASQKKNDRMDARKLAQLARVDASLLAPIRHRSAPAQADLSVIRARESLVEARTKLINAVRGLVKTSGARVKKCASRSFPKQAGGQVPEILRPAVGPLLETIDRLSEQIRHYDQLLEEMAETRYPETERMSQVPGVGTLTALTFRLTIDDAKRFRRSRDVGGYLGLRPRQQDSGEQTPQLRITKAGDRYLRSTLVNCAHYILGPFGADTDLRRWGLKLCARGGKNAKKRAIVAVARKLAVLLHHLWVCGEVYEPLRNQPVESVAA

SEQ ID NO: 216043 - protein, 409 aa, unidentified
MKVAGIDVHKKVLMVVVMDTSTPQEKPVRRRFITLPNELHRFLTWLREQRVEEAVMESTAQYWRSVWLELEPHMRLHLAQAFSNRAPRGRKHDFKDAERLVRRLIADELILSFVPSGEQRIWRSMTRMKLQLTRDRVRLQNQIECLLEEMRIKLSIVVSNLLGASGLRILHALANGETDPRKLAQLGGERLQCTEEQLVDALTGRVQPVHGEMLALQLERLQLIDQQMERLNHMIAAAMKAHQDAVIRLAEVPGFGVDSAQQIIAEVGAQASTFASAAELTSWVGTCPGKEESAEQNHSSRSAKGNKYMRRVLNQAAHAAVCKKGSYFQALFRRLLPRLGYKSAIWAVAHRLCRLVWKILHEGVRFIEQGAEVAPREKKKRAQMLARALRKLGYEVTITPINQLTPKLG

SEQ ID NO: 216044 - protein, 338 aa, unidentified
MNIVFLGIDLAKNVFQLCGLNLAGKPVYTKRTGRKELLQTLANIPACLIGVEASTGAFYWQREFEKLGHKVKVISPQYVKPFVRGQKNDGNDAQAIAVALMQPTMQFVPPKSPEQQDIQALHRARQRIVNRRTATVCQIRGLLLDRGIPIGSAVSRARRAIPLILEDAENGLSSRMRRTIAELYELFNDLGRRIHFFDKEIGTVFRQSEACQRIARVKGIGPKTATAIIAAIGKGTEFKNGRHFAAWLGLVPRQHSSGDRQVLMNMTKKGDKHLRTLFIHGARAVVRVATNNDDGHMNQWVNQLKGRRGFNKTTVAVANKNARIIRSMLRNETEYQVV

SEQ ID NO: 216045 - protein, 313 aa, unidentified
MIIAPRCVGIDVSKQYLDIFDDGLGVPERIANATQAITQIAARWRCDVLVVFEATGVYDLELREALSEAGIRFARINPARARDFARASGQLAKTDPIDACMLAAFARAMRPAAEQVANPARNALSRLAKRRDQLVLMRAQEKNRRSEADDRAMADRIGRHIEILDEEIAAIEGDIKTLIKAEPEISDDAQLMRSLPGVGPVACMQLIAKMPELGHVGAKQISALAGLAPFNVDSGTFRGKRKIAGGRKRVRDALYMAALNAVRRADPFKAFYARLRQAGKPAKLALIAVARKLLTVLNAMLRDRKPYLKAEPT

SEQ ID NO: 216046 - protein, 320 aa, unidentified
MGTEKVYVGIDVSKETLDVAVHATDRRWRFANSDKGITETVSCLEELCPTLVVLEATGGMECPLAAALAVSGVPLVVTNPRQVRDFARATGCLAKTDAIDARVLAHFAAAIRPESRRLPDSQEQELKAVLARRRQLIEMLTAERNRLQSARSKAVKVNIKAHIAWLEKEMTHIDHDLEQSIRQSPIWQEKDDLLKSVPGVGPVLSTTILADLPELGRLNRRQIAALVGVAPFNRDSGHMRGQRTVWGGRAVVRSALYMATLVATRHNPIIRDFYRHLLSQGKPKKLALTACMRKLLTILNAMVKHQTPWHYPISGILQTT

SEQ ID NO: 216047 - protein, 371 aa, unidentified
MKKHSSCTQSPKGRGKAGPGSITIGMDLGDKASRYCELDGGGETMKEGSVATTKKAMMQVFGSRKRCRMAIEVGTHSPWVSRLLKSLGHEVIVANARQVKLISQSSRKDDRLDAQTLARLARVDPQLLRPIQHRSEKAQRDLMRIRVRAALVDTRTGLVNTARGLAKAMGERLPVCDPDALHMERLEELPAGLRDALEPLVKMVEALTAKIKQCEAEIEQIARDQYPETALLRQVTGVGILIALTFVLTVEDPQRFLKSRDVGCYVGLRPKRSQSGESQPQLRITKEGDRYLRKMLVQGAHYILGWRGPDTDLRRWGLKLAERGGKNAKKRALIAVARKLAVLLHRLWATAEVYEPLRNSQAYEARRKAAA

SEQ ID NO: 216048 - protein, 375 aa, unidentified
MHHHSGAFVGIDTSKLRNAVAVAEEGRNGDVRYFGEIDTTEATTRKLVTKLAAKYRQLTFCYEAGPTGYGLYRLIKKLGHDCIVAAPSLIPKKPGDRVKTNRRDAVGLVKLLRAGELTAVWVPDERHEAMRDLSRACEAARKDLKGKRQQISSFMLRLGRHYPGKKTWGPAHMNWLMLQKLEHREQRIALEELLGAVRQESERIERLEQAIRDAVPEWSLAEVVTALQAMRGIDLVAAVTVLAEIGDLSRFQTPRELMGYLGLVPSERSTGDTVNRGGITKAGNGRARRILVEAAWSYRHPPRVSREKQMKVAAAPRAVREIAWKAQMRLCGRFRSLTRKGKRPNVVATAIARELSAFIWAINREVVGSHATANQ

SEQ ID NO: 216049 - protein, 343 aa, unidentified
MKITRVGVDLAKNVFQLHGVDRSDKCVWKRKLKRKNWLKVLLKETDPSCEIGIEACAGAHHWARILMSKGYQVKIIAPQFVKPYVKSNKNDANDAEAICEAMSRPNMRFVAVKTTEQQDMQAMHRVLDELKSHRTAKGNQIRGLVAEYGLVAPRQLYALRQAIPDWLEDAENGLSDIFRQLLEGLRKDLAQLDERIKEVNDAIEQIARTHPVAQRLQQLRGVGPLVSTAMIASVGTAEQFSRGRQMAASLGITPKQFSSGGKERLQGISKRGDAYLRRLLIHGARSVVTHAKNKDDRYSRWMTELAKRSHTNVAAVAVANKTARMAWAMMVNETDYDPALASS

SEQ ID NO: 216050 - protein, 449 aa, unidentified
MSNGSGVSRGDRNRNARLGRLRELVPVTNAIVGIDLADKKQMVVVTDHDSKVLARRTFRCRAWDLGLALDWAGSQAASKGFAGATVSCEPTGHRWRVLGQLAADRGMPFVCVQPMLTSWARRSEDLTFGKTDEKDAVLIARLTAQLRCYVPEPVDEIWGRLRHLGARREQLIVETTSQVQQIRALLECVWPASLDAARQPFRSVTWAAAMSVIVERDGGDLARTRRLGLARLEALTGRLIVARGRHKPCRRIVRQLFTALSDPAGVLAHRPGALERVALLLQDWDHAQRRQADTEARMLTVLDELELTELVTSITGLSAIGAAAILAETGDPHRFATARALVKHAGLAPREKLSGTFTGLTKLTGQGRPGLRLAAWRAVWGAQRSNPVYRARYQHLISREQNKLRPTQAQTVVAAAILRQLYAVITSGQAWDPVIATHGKRHPVLPAVA

SEQ ID NO: 216051 - protein, 402 aa, unidentified
MNAVGIDISKGKCMVAVMRPFGEVVLSPFEVRHSSSELSKLARLLKSLDGESRVVLESTGNYHAPVAKMLHDAGLYVSVVNAMLVHDYGNNSLRRAKTDKKDAVKLANYGLDHWLSLPRYIPEEDTRLLLKNCYRQYQQYAKVQTMLKNNLISLLDMIFPAVNRLFSSPARADGSEKWVDFIDVFWHVQCVAGLSVNAFSAKYLKWCRKHGYNFSEEKALEIHRTAREHVAVMPKSKTTKLLVKQAVAQLRTVSSAKAALQNEMDALAASLPEYPVVMDMFGVGPKLGSQLMAEIGDVRRFHSKKALVAYAGIDAPPYQSGQLNVHSRSISKRGSPALRRTLFLVMRVYLQCSPPDEPVYQYMAMKRAEGKPYLVYMMASANKFLRRYYATVKAYLNVLEQR

SEQ ID NO: 216052 - protein, 358 aa, unidentified
MKAIKQTLGVDVAQDELVCSFGILYQDLNWQIKARKTFGNHSSGFKACLKWAESMRDANSEVLFVMEATGVYHEKFAHWLVDQGQQLSIVLPNKISNYMRTLSIKTVTDSTCADAITQFGLERKLDLWAPPKPIFRTLRQLTRERDQIVAERVTVDNQIHAEKTEAFPNANSLKRLNVRRKLLCKQEQEIKNEIHQLVKSDQGLDQDCKRITSIPGVGELTAVIVLAETNGFELVRNKRQLSSYAGLDVKEKQSGTSVKGKARISKKGNRSLRKAMHLPALAAIRHCNIYKDTFARLVGRHGIKMKAAVAVQRKLLELIYILFKNKTIFDPDYEQKREDCKNHSSLHSLAGADLSNQI

SEQ ID NO: 216053 - protein, 348 aa, unidentified
MQGRGTRGLAYHQGGRGLKRFNRVGVDVSSKELVVAIEASGRREAPIVLANDAEGYRKLIKLTTKRGASARVVLESTGTYGLDLALALHRAKRIDVMVANPRAIAHFARASLQRSKTDRLDAETILEFATRMPFESWSPPAPQILELRALSRRIEALSKTVVQEKNRLHANDQSEELSEFVKQDIRELAGLLERRIERLRQQALLVIEQSEDLARAFAHITSIKGIADASGIAILAELAVLPADMTTRQWVAHAGLDPRQHQSGTSIHKPARISKTGNAHIRRALFMPALVAVQWEPNIKAFYEHLLASRKTKMQANVAVMRKLLHAIHGMLQHDQHFVGEKFFRMKT

SEQ ID NO: 216054 - protein, 360 aa, unidentified
MQTQKNEINFNGHNIYVGMDVHLKSWTVTIRTEHLYHKQFTQPPEAKVLYNYLARNFPGANYYSVYEAGFCGFWVHRQLEALGIHNIVVNAADVPTKQKEKLQKDDTVDSRKLSRSLSSGELDAIYVPSASTLEDRALLRMRSTIVKDMVRFKQRVKSFLYFMGIPFPECFSNSNSHWSKNFIRWLKEDVILSEESGRQSLSILIQEIEEQRKLLLLTNRHIKTLSATEKYISHVALLKTVPGIGLITAMILLTEIETIERFENTDHFAGFIGLIPGKHDSGEVKKNGEMTFRGQPKLKKCIIESAWVAARIDPALSLAYNKYVKRMEPNKAIIRIARKLLNRIYVVLKNKQKYVTCMVE

SEQ ID NO: 216055 - protein, 410 aa, unidentified
MRIIRKRCLGLDLHKKQITAHLRVHRGSSVEPERTDRRFGTIPAELLELRQWVIDEQITDVVMESTSVYWMHVYELLEDITTPAVVNAWHVKRVPGRKTDVSDAHWLSDLHAHGLIRLSFVPPKPIRELRSVARYRTKLVAMRTAAQNRTIKLIETAGIKLSSVVSDSFGKTGRAILDDLVKGPLSTERIAEVAKGGLRKKVEQLHAAVSAALTDRQRELLDMHLRIYDALDAQVAEAELKLRTLSTPLREKIELLDEIPGVNELAAITVLSETGTDMAVYRNAHHLTSLSGLAPGNSISADKRRRVPMPKGNRYLKRICVQIAWAASRCKESFHRARFCRLTYRIGRNKAIVATARQLLIVIYHVLLTGNRYKDLGANFYDSKNKQRTVRTYVQRLVKLGFAVKLEPAS

SEQ ID NO: 216056 - protein, 387 aa, unidentified
MQKPHDDSKACLTAFVQDSTLTVVIEMSLRSWLVAGMVPGVNREPRKKIAPNPELLLQLLYRWRDEAIKAGKEITRIAVAYETGRDGFWLARWLRARGIDAHVIHATSVAVSREHRRAKTDRIDTAMLQRGFLGWLRGERGHCSTAIVPTVAEEDGRCPHRERETLIKQRTSTANRMKSVLIQFGVRNFNPSLRKAPKKLDSVRTPEGIPLPSNAVAALQRHMERFRIINEQIKAIERTRLQRLQRDPAEKFNAMVFLLVRIIGLGVETAEQLVREILSRNLRDRKAVARYAGLTGSPDESGSMRREKGLSRSGNGRVRNILIQLSWRLLKFQPQSDLVLWFKNRTANAQGSRKPMIVAFARKLIIAIWRYVNTGVAPEGFQLRSAA

SEQ ID NO: 216057 - protein, 401 aa, unidentified
MHYLGIDISKASHQCVILDNNGEALGKSFAVLSSKDEFDKFITKIDKFSISKDDLLIGLEATGNLWENLYSFLTESKFKVILLNPFQTCKFHQAVLKKAKTDAIDAYVIAGLLRSGHAQGSHVPEDDIQSLRDLVRLKDGYLKSMKTYKRKAYSLLNLVFPELLQLIKDPFNVVSSDILMHYQTALDFKVLKPKHLLKIARSHKGNNYDEEWALKVILKAKDSIYSGRASKARSITLKSLVSQIRSFKEQIELLESEILSILKPDDSTPNTHADNLLTIPGVGPHTVSCVLAEVGDIQRFSSCKDFIGFVGLYPKIEQSGSSLNKAKLSTKGSRLLKHALYISSVACLKHNSYLRNLYHKKLSQGKAPKQALIVVAHKLASIMYSMLKNDSVYDINRLAVV

SEQ ID NO: 216058 - protein, 509 aa, unidentified
MVQQRLDRPPGVPKCPRATSTLNGPAPRRGGPWRKSHGKSAPASTLISAERQYRERSSSRQVERPHREDIALTTNCNQPASPAQQSTAALSQIVSTNNFVYFAGIDWGSEKHRVCLMDRSGAILGERWAEHSGSGLADMAQWLREKSRDAPHTLAAAIEIPRGAIVETLAEHGFHVFSLNPKQLDRFRDRHFPAGSKDDSRDAFVLADSLRTDLCCFHPVRLDSPAVIRLRELSRLEDELLSEFNRAANRLREQFHRFFPQLLQLSPAADDPWLWTLFETAPSPARAAKLTEAKIARLLQQHRIRRIDGSQVRAVLKCKPLTLAPGAAEAAAEHALLLLPRLRLLHQQRVDLARRIQTVLDELTAPSEQDPQEHRDAAILLSLPGLGRKVAATMLSEAAQAIAERDYHALRSFSGAAPITRQSGKKKVVSMRYGCNLRLRNALYYWAQKSIPNDARSRKHYTELRARGKSHGGALRVMADRWLKVLVAMLRSRTLFDSQLRPETSLSAA

SEQ ID NO: 216059 - protein, 432 aa, unidentified
MNDPRLHVGIDFSQARADVAWLSPDGQPLEAHRAFANSAPGYAQAKHALLEALRTGGFRGLDISGEATNYYWLPFFLHLAADPDLAAYDLNLFLLNPRWVRWFKKCFAPDDKTDAKDPFYIAERTRTRRPAAWSPQTAWLPLRFYTRLRFHLAQALTREKNFAQAYLFLQCSAYHRTRPFSDTFGATSRRVLTALPALNALAAQPVAELADLLDEWSGHHLPKPQDNARRLQQVVADSFLLEAALAEPVQRVLDLTLQHIADLEALIVQVEQWIVAEVQAHHPEVLKLATVLGLGLLLASGIAAEIGDLSRFFHGQKWDKRHRRFRAKNLRDVEDAVAKLAGLWWPRADSGDFVAEERHLAKSGNRYLRYYLIEGADGMRRHLPEYTAYYARKYREATQHQHKRALVLTARKSVGLFVGLLHRNEAYRPQEG

SEQ ID NO: 216060 - protein, 495 aa, unidentified
MRLRGKLIFIGSYPLVSQLIHSMKINDSAGWKPSSGYTRIRCQDVYSLNNVCTRHFGMEAYRKGKSNMSLFISVGIDIGADFSFMSVALPNQTIFGKPFKIVHANLNSLEKAVRTIKEAEELHSMKSRIIMESTGIYHYPLFCYLRDKGFNVAVINPIITKNSTNLNIRKVENDKFTSKNLALIGLKPDLKISVVPCDAVLDLRNLVREYYNLMDCRSAYVNKLKGVLRVAFPQYIGIFSKVTVQTSLVLLEKYPSPVAFLSAKKSSIIKIISKTARFGKTYACAKYLVIIEAAKSAGVFGHFVSSNSTQIRLCVNFIRQYDDEISNVLSLMRKFVDDHADEPFVKQIRLIETIPGAGFLSAVTVICEIGDFSVFKSPKQLFAYFGLDPAVKQSGNFTGTNVKMSKRGSSIARRAIFTIALVGVGISRNGNANNPVLRDYYLKKCQSKLKMVALGAVMHKVCNIIFAVLRDNSPFVFISPEQHIHNYESSQSSVA

SEQ ID NO: 216061 - protein, 816 aa, unidentified
MPLNKLANLAHQARVPTVVTNDALFHTHDRRILQDVVTCIRHNTTIDEAGFVRERHADRYLKPPQEMARLFVRYPEAVARTMDIVERCRFSLDDLAYQYPDEVSVPGQTPQQALETLTWEAATRTYPEGIPDEVCQSLNHELSLIGRMQYAPYFLTVNSIVRYARSQDILCQGRGSAANRAVCYVLGITAIDPARNSLLFERFVSEERGEPPDIDVDFEHARREQVIQWVYEHYGRDRAALTAVVIRYRAKGALRDVGKVMGLPEDLIRTLSGQIWGWGRKLDDEALNDTGIDLSDRRIRLTLELARCLIGVPRHLSQHPGGFVLTHDRLDELVPIEPASMEQRQIIEWDKDDIDVLKFMKVDILALGMLTCMKKGLDLLAEHKGQHFTLQTLPAEDPRTYAMIRKADTIGVFQIESRAQMSMLPRLKPRVFYDLVIEVAIVRPGPIQMGWTASMRHQCAMMGSEDHSEETARMKVTIIGLDIAKSVFQAHGTDANGKCLLKKKLGRSEVVSFFEKVERCQVVLEACSTSHHWARVIRETGHDVKLIPPEMVKPFVKRGKKNDAVDAAAICLAAMHPDTRFVPIKNEEQQSLLSLHSTRTLLVKQQTMLVNALRALAAEFGLIVPLGNSRLPELLAKIETSLSLPDTMKKTVSLLFEHSGKLDESIKCLEAQIQMHAQQDEDARRLLTIPGIGPVTASLVVASVTDIGSFETARHFAAWLGLVPRQHSSGGKTRLGRITKTGNREIRKMLVLGATSMLYRAQKWNSAAGVWLCKLLERRPGRLATVALANKMARIIWVLLSRKEIYRPTGRSVATV

SEQ ID NO: 216062 - protein, 376 aa, unidentified
MKNKATPTLHDNDQPNAALAGGNSGARQIFKLGLDVDLNNAVTAIQCGAGDIKRGQSFSRARLLGWVRTQVNAGHTVHTVYEACGFGYTLHHQLVGAGAHSLVTTPMRHTAQRRRKNDRMDARELCVRLARWLDGHRDELKPIRIPSSEEQQRRELGRQREFFKRELRRLENHGRALRIEFEHETLPSGWAGPRKWKRLSLQCSSFVREQLEPIVTQLRACRAQLVKLSAALEARVAEQMIPTGLGSLTLALLDGEVCNWHRFKHRKAIGSYTGCCPSEYSTGGVQRFGPIDRQGNKHVRVLLVEAVWRLLKWQPGWHARQKYLARLKHGASLKKKIAVALARQLAIDLWRWRTGRATAAELGWTLKNAMEETTPL

SEQ ID NO: 216063 - protein, 370 aa, unidentified
MLDTTTFIGLDVHARSIKAVSLDVMTGEVRAATFGYDAGAVAEWVRSVDPRARCVYESGVTGFDLQKRLSGLGVDCVVGAVSKMIKPSADRRRKNDRNDAEFLARMLSVGNVVEVWVPDDECEAARDLTRALEDARDDLSRSKQRLSKFLLRHGLAFDERTPTGRRKGNWTRAHWSWIESIRFAERADNDVLAYYVDAVRRAAEEKARLEGLVEGEARKPRWRKRVDSLRCLKGVDTASAADLVFEAGEFSRFGNARSFAAWVGLTPSEHSSGESDRRGAITKAGNKHLRKTLVEAAWHYLTCSGRPKGLAKGQAPDPGARRHAAKGVRRLVERREALLARGVHGNKANVATARELACWVWAVGLMAEEA

SEQ ID NO: 216064 - protein, 463 aa, unidentified
MEVINSRCGGLDVHKETVVGCVRLALDGKVTREVRTFETTTSGLLLLLAWLTEMGCTHVAMEATGVYWKPVWNILSDGDFELVLANATHIKNVPGRKTDVSDAAWIADLLAHGLIRSSFIPDQEIQELRELLRTRKQLGRQQARHIQRLQKTLEGANIKLDSVITDIVGKSGRAMIRALIAGETDPVKLAALADGRIKASQQELREALRGRVRDHHRFLLHLHLQHIEFADAAIHDIDQNVAALIIRMDQEVEAGRAFQGLILLLITIPGIDVLAARIILSEIGPDMSRFPTAGHLLSWAGLCPRNDESAGKRRSTRLRKGDRWLKTLLIQCAWAAKRKKGSYFNANSTVSLLDVDQRRQPARSLPRSSRRSTTCSRTAHNSRISVPITSIAARRKSRPNASSTSSQSLASMPSSRPSPKLLEIDAANVATKRIPEDQAGSPPEPSSWRDREFAARSVPSVSS

SEQ ID NO: 216065 - protein, 327 aa, unidentified
MVYLGIDVSKAKLHTCLRREGEDKQKTKVVTNSRDGVTALIDWLARQGTVPTQVHAVLEATGVYHETTAEALHAHGVTVSIVNPAQAKRFAQGLAVRTKTDAVDAGTLARFGALVRPAPWTPPPPEVRTWRALLARQQALSEDLRRERNRLEKAGATTTPPPVLDSLADSLAFLEQALAKLQQEIDHHLDGHPQLQADVALLTSIPAVGPKVAHQLLALLYARPFQSAEQLAAYLGLVPVERQSGTSVHARARLSKAGPARVRATLYMAAVVATRYNPHIKALYERLLARGKAKMAALGAAMRKLVHLCFGVFKTRQPYQADYAPQA

SEQ ID NO: 216066 - protein, 350 aa, unidentified
MKVNTIGVDLAKNVLQVHGVDEQGKVVLRKQLRRNQVMNFFAQRTPCLIGMEACGSAHDWARRLIKLGYTVKLMAPQFVKPYVKTNKNDAADAEAICEAVRRPNMRFVPVKTEEHQAVLSLHRARQGFVRQRTAQANQIRGLLAEYGVVIPQGIRHIGQCLPEILEDADNALPGLFRQLLRQLGEHLKTLTRLVEEMEEQMQQWHGGNEASQKLAAMPGIGAITATALVASVGDARNFSNGRQFAAWLGLVPRQHSSGGKTTLLGISKRGDRYLRTLLIHGGRSVIAAAERRKTSPVEESLTQQRSWLQGLVSRRNKNVAAVALANKNARVIWALLAHDRSYQAGYAVAA

SEQ ID NO: 216067 - protein, 364 aa, unidentified
MEEPTHIGLDVHKETIAVAVLRPGTVACDERMIPNTPEALRRLFSRYPDGAALRTCYEAGPTGYDTQRLISSLDVSCEVIAPALVPRRAGLRVKTDRLDARNLARLHRAGELTCVRVPTPAEEALRDLVRARESLKDDRRIARQRLRSFLLRYAVRYPNGSDRWSHRYEVWVRALRFEQPACQEAFDHLLGAYFVRDTQLAALSRRIEELAQEEPLAAGVARLRTLRGIDTLTALTIICEVCDFHRFGSAGSFMAFTGLVPSEHSSGASRRQGGIAKTGNRHVRRVLVESAWAYRHAPALRGTLRARQEGQAPEVVAYSWAAQCRLHQTYRRIAARKGSRTAVVAVARELAGFVWGAMTDQMAA

SEQ ID NO: 216068 - protein, 393 aa, unidentified
MEIRYFCGIDVSKNSFSVAVKNGQFIIKNKSFSMDREGFKRFEELIFSYKDSLITGMEATGIYHQNLFNFLKNRGYNSCVVDPYRVAKFFKFRSNKPTKTDKKDSKTISEFLEEEVKNNPCFMQEKQDERFNLRYLVREKERITHQIAKTKTEIKRIVSLVFPELEAKTSIFSKEILDILYEFSSADRIRKLTFKEFVNRAQVYIPNGKGRKVSIGKEEIYKLAKDSISFSYPAYEKLLQIKIKRLRNLMEERKEIEEIIKKEADKLFRREIEILTSIPGIAKESAIYLMAEVIDIKRFPNKAKLIGFCGLDPVIKQSGNYKGHFKISKRGNSHTRRIAFIMAGCVKRSCPYFREYYLKKRKEGKSYKEAVIATSTKLLRTIYSLLKEDRLFK

SEQ ID NO: 216069 - protein, 323 aa, unidentified
MNKFNQISNDQTFIGIDLAKDSVSVFVDSTESHFECLNNIKDLRKLAKKLKKLNPALIVLEATGGYETQCAVAFAEAELPYAIVYPKRVRQFAFGLGIIAKTDEVDAKLLAYYGRVADIKPQPLQSDELRELRALTSRRQQLIEMRLSEQNRLETSHPSMHKNIKKHLNWLVKQIEEIETDIKRRIKESEAFRQADELLRSVPGVGEVLSSTLITELPELGHLTNKEIASLVGVAPFPSESGKHKGKRFCRGGRNSVRRVLYMAALAASQFNPIIKTFYDSLLEKGKLKKVALIACARKLLVTLNAMIRDNSVWQPKVDTVLP

SEQ ID NO: 216070 - protein, 448 aa, unidentified
MKVMHERVAGIDVHKKMIKVAVRSPGAKPWTRKTEVLTFSTFYGVLQAMARELRRRGVTHVAMEASGVYSEPVYYALCEEDFTEVLVVNPAHVKAVKGHKTDAKDCARIAELLECGLLQGSYLPSAELKEVRDLTRYRMKTVQARTSEIQRLHKALESAGIKLGSVASDITGKGPSAMIDALIDGERRGAVMADLAQGRARTAGKLADLSMALEGRFTGHHAMLCRLHRDAIGAYDAAVSGLDRRIAEKTAPWQREIDLLKTIPGFGDVVAQAWIAEIGPAPHEWFSSPGKLASWVTLAPGNYVSAGKRRHGRTGDAGAYIKPMLVQAAWSAIKGRNWLQARYDRLVRRMGGARNPAARKKAILAIAHTLLKIAYAILKSGKPYQEPGADFYTRRESPAQRQTWLEAQLQQLYPGCAITVTITPPPGGPPDAPTPEAALTSCPASQLT

SEQ ID NO: 216071 - protein, 346 aa, unidentified
MEHYAGIDVSLELSSVCVVDAKGKIVKEAKVASEPDALVSFLQGLGFPVQRIGLEAGPLSQWLHAGLARAGFETVLLETRHVKAALSAMTVKTDRKDARGLAQLLRMGWFRPVHAKSIGSQEMRALLVARKQLLGKLIDVELSIRGILRGFGLKVGQVTRKEFEVRIWELVAGQATLERIAGAMLSARATLKAEYEKLHKAVLAIVREDAVCRKLMTVPGVGPLVAVTFKSAVDDPRRITKSKAVGALFGLTPKKYQSGEKDITGGITRAGDGMVRTALYEAANVLLSRTTRFSKLKRWGMDVAKRRGSKRAKVALARKIGVILHRMWVDGTTYRWREAKLIAARA

SEQ ID NO: 216072 - protein, 474 aa, unidentified
MAARRLLTRGPNPLEPPEAQPQTVPVGKRTALKVQEKVAPRRAGIRATCRSCSAAARARSEGGALVRYYLGVDWADQTHAVWVVDERGTKLTARAVPHTAEGLSEWGRELDEWRAQGIELWAAIERPEGRVVDFLLDHGVVVYPVNPKALDRARDRFRQSGAKDDPFDARVLADFLRTDHAHLHALQPSSEAAQELKLLTEDYHRQVRQQTRLVNQLTITLKAYYPRALEVAESTTALAREFLKAYPTPEAVTALTKRQWQRWARAHHLSETRTRALWEVLQQPQLPVPAHVVRPKARLMRTLVAELAAVVAAVGEYREAIEDFFASMPTAQWVRTLPIGDHGITAPTLWARLGDAPERWESFRHLQAQAGAVPLTKRSGKQRVVQFRFACDKALRYVVDHVAFLSLRSCEWARAYYDQQRARGHSHRQALRALGAKWLKIIFVMWQRQASYDDQYHLASMARQQLRQPQKKIA

SEQ ID NO: 216073 - protein, 406 aa, unidentified
MMTAVMIGVDPHKGSHTAVAIGADEVPAGLVRVRACAAQAERLLTWAKSWPERTWAVEGAAGLGHLLAQQLVAAGERVLDVQPKLAARVRLLAAGAVNKNDPNDARSVAIAALRSAACLPVRPDDHAAVLKIWAKRHRDLSRARTQVACRLHAVLCELVPGGLSTEICAAQAAAILDKAEPGGAVQQARLELAAEFTADLRRLDAQLRETRKKLAVAVRASGSTMTEVFGVGPVIAATVIGDVRDVSRFASRDRFAAYNGTAPIEVSSGNRKVHRLSLRGNRRLNHAIHMAAITQIRYKHSDGRAYYDKKIAEGKTPKEALRALKRQISDALYKHLKADAARAAAAGTQGPGGHAGNDSVASAAGSHPERQLFGQATPGPVTTLRRPADQQKRASSHARKKTARTT

SEQ ID NO: 216074 - protein, 410 aa, unidentified
MPHTIAGIDVHKRVLMVVVADMATPDAQRHGERRRLGTTTSELQSLAAWLQQRQVQEVVMESTAQYWKPVWLALEPDFELHLAQAQSNRAPGGRKSDYRDAERLLRRYVADELFLSFVPAPEQRLWRTLTRNKRQLVRDRVRLQNQIEALLEEGRIKLSSVISELLGDSGRRILQALAAGESDPQRLAALGDRRLHASRDTLADALDGTLAPAQRAVLQLALERLELLDRQIAQLDQLTAAQLRPYQDAITRLSGVPGLGLNAAQQIVAEVGPAAQDFPTSQQLCSWVGVSPGSQESAEQNRSGRCPKGNRYLRRILCQAAQAAVKKNGSFLQSLFRRLLTRLGYPKAIWAIAHRLCQIIWQILHQGAQFIAYGQLGTPQQQQRRARRLLTQLRQLGYSAQLIPTQPATT

SEQ ID NO: 216075 - protein, 410 aa, unidentified
MIGDDWAEDHHDIEIEDETGRRLAKARLPEGLEGITRFHALVAEHAPAAWAELPAEDVAGRVFVGIETDRGPWVSALRAAGYQVFAINPLSSARYRERHSTSGAKSDAGDAHVLAEIVRLDRDHHRQVAGDTDLVDAVKLVARAHQTAIWERTRQTLRLRSALLEYFPAAVEAFEDLAAADTLILLGRAPSPARAAKLTRSQVVSALRAARRHHAEVKADALLAVLRTPGLRQPPTTEAAYAAVVVGQVGVITALNAQIAQLQEVVAEHFGRHPAADIYLSQPGLGVVLAARTLGEFGDDKKRFVDARARKNYSGQSPITRASGKKTIVLARYATNRRLGDALHQQAFSALRASPGARAYYDALRARKIGHHAALRQLANRLVGILHGCLKTGTNYDENTAWQHHTAAVA

SEQ ID NO: 216076 - protein, 308 aa, unidentified
MKEKVRFIGLDVHAETIAVAIAEPDGEVRSLGTIPNRSESLRKLVRKLGPAEKLRACYEAGPTGYVVYWQLTELGVPCEVVAPTLVPVKAGDRVKTDRRDAEKLARCYRSGDLTAVWVPDEGSEALRDLVRAREAAKQDQMRARHRLSKFLLRSGQRPPTGVRPWTRPYLIWIAQLRFTQIAQESTRQDYLHEVEHMRERVARLEQAITEAVKLASPALQQVINDLQALRGIADISAVTIATELGQVSRFHSARQLMGYCGAVPSEDSSGKRTRRGGITKTGNAHLRRIVVEAAWSCRTALKSRNFGF

SEQ ID NO: 216077 - protein, 437 aa, unidentified
MRRKKNKANKTVSLQVLPVIHPNAAGIDVGAKEHVVAVPCDRDPQPVRTFQAFTPELHELARWLKRCRIETIALESTGIYWISLYEVLEQYGFEIRVVNARHVKHVPGRTKTDVLDCQWIQKLHSFGLLNGSFRPDQQIRKLRTYMRLRDNLVVSRTEAVHHMQKALFEMNVQLSNVLSDIVGETGLHIVEAIIAGERDPKQLAALCSSRIKAPRETVAKSLHGNWDQALLFALKVALDSYRFNQTKIQECDGSIEHHLAQFESRAQLANSPQNLAAQLHRVCGVDLTKIPGIKEQAAQIIISEVGLDMAKWNTEKQFSSFLGLSPDNSITGGKVLRRSTRKVYNRAADALRLCAQSLTRSKSALGAKYRRLKAKLGAPKAVVAMAHQLARLVYRMLRYGQSYVEKGIHQYELKFRLQRIKWLRREARSFNLQLVAV

SEQ ID NO: 216078 - protein, 328 aa, unidentified
MRKTTEAGIDVSKAVLDVAVRRDERGLETARFDNDAAGHKRLVRWLTKGGRLVRVVLESTGTYSFDVALALHRTRGVAVMVANPRAIKQFTGALMQRSKTDLTAAVALRDYAIRMPFVAWQPPAPHVLELRALARSIAALVVERTRERNRRQALPATVEASAVVCNDIEVNVRHLDRRIELLTAQAVTGIAAHPDLQAGFDRLISVPGIATHSAVQLLPELLVLPDTMTVRQWVAHAGLDPRACQSGTSVDKPARISKVGNAHIRRALLGRSTACLCLAFPFAWRRRFGCRRLFSLGRQACETPLRRHGTPRTTASPGRTSPVFRLGM

SEQ ID NO: 216079 - protein, 408 aa, unidentified
MNAVGIDVSKGKSMVAALRPMGEVALLPQEFLHTEVGLEQMAYAIIALGEDTRVIMEATGRYHEPVAAALHEYGIYVCVLNPLFIKQSGGGSIRKVKTDKADAMKIAKYGLDNWVDLREYTPMDTIRQQLKLCSRQYNLYMKTVVSLQNNLISLADKTFPGANELFSSPERADGHQKWVDFVMTFWHCDCICRVSEKAFTERYQKWCKRKGYHFSAEKAQDVYLGSCGHFTTLPKNDNTKLLITTAAQQLLAGKMTLAALRTEMTRLAKQLPEYDIVRAMYGVGETTAVQLMAEIGDVRRFPRRSSIVGFAGVDPAVDQSGKHSAKSVPTTKRGSPHLRKTLYQIVCTYLKKSPVDEPVYQFLDKKRSEGKPYFVYMTAAQNKFLRIYYARVKECLEAFDAQQDTSQR

SEQ ID NO: 216080 - protein, 372 aa, unidentified
MTSIIYVGMDVHTTNYTLCCYSMEDDRFFVEVQVEPDAKNILKYLARIEKQQSRDCRIVCGYEAGCLGYSLYHQLHAHGIDCVILAPTTMMTKPGKRIKTERRDARLISKCLAFHTYSPVYIPTEVDDAVKEYIRMRDDANSALTRVKQQIIAFCIRHGKIHDGKSYWTNKHLEWISSLDLGNKILSEVLQEYLIRYYQLREQVDMYDMRINELAQAEPYRQKVEKLGCFRGIAAHTVLPFCVEVGDFRRFATAQQFASYLGLVPGECSSGDKQQYTGITKAGNSHLRKLLVETAQVFGRSATKSGKSVALKERQAKCDSLTVAYADKANARLKKKYFKIAMRSKVNIAKTAVAREMACFIWGMMTDNISCA

SEQ ID NO: 216081 - protein, 386 aa, unidentified
MQKLNDLSRSLTALEPDGTLIAVIEMSLSSWLVAGIVPGVERQPLKKLAVDESALLKLLHRWREEAEKAGRRIERIAVAFEAGRDGFWLARWLKARGIEAYVVHASSVAVSREHRRAKTDRLDTELLKRSFLGWLRGERDHCKMVEIPTMKDEDAKRPNREHDSLIGERSRIVNRMKAALVRLGIRGFNPKLKRATTRLDGLRTPEGEPIPPNALAELRRDMERRRLVNNQIRQIEEERLKRIEQAPCDGPHVMVRLLARVMGVGIETADMLVHEVLSRNMRDRRAVARYAGLTGSPDESGRKRREKGLARSGNTRVRRGMIQLAWRFLLHQKNSALTKWFRSRTENARGTRKPMIVALARKLLIALWRLVREGIVPDGVVLRAAQ

SEQ ID NO: 216082 - protein, 347 aa, unidentified
MRGAIHMQITTIGLDIAKNVFQVHGIDAAEKVVVRKQLRRGQVMAFFEALAPCLIGMEACATSHHWARELTKLGHEVRLMPAKDVKAYVKRNKNDAADAEAICEAVRRPTMRFVRIKSAEQQGQLMLHRARDLLMRQRTQLINALRAHLAEFGITAAQGREGIKELLAIVAQEEGSRLPVDAHASLAVLAAQLQAVQTMIGSIEKRIVAQHRSNEASKRLETIPGIGVIGATTITAVVTDPKAFRSGRDFAAWIGIVPRQDSTGGKQKLGPISKQGDQYLRRILIVGAHSVLRRARQQPEKYPWLTQLLARRPFKVVAVALANKMARIAWALLARGGTYRAPQLVAA

SEQ ID NO: 216083 - protein, 419 aa, unidentified
MKPTKTKKIKIINKKTMIVALDIGKATHYAYLRAPNGKDVKPFPFSNFRKDFDKFWIKLCQFKREHELEDIVVGFESTGSYAEPVFHYLRKKPVRLVQINPMHSKRLKELTGNSPNKTDTKDPRVIADVISLGHALTLVVPEGPAAQLRRLTHARERALKRRTAAINQVQDLIFVIFPEFLAIMKDISTKTASYLIKAYPTPESIVALGVDFLATIIKEISRGKLGRQRAEELFNAAQRSVGVNEGKRSILLEIEYLISQISADKKFIANLEKKMEEYLEKIPYSYYLLSIKGIGIVTVAGLTGEVGDFKKFHTISEMMKLAGLDLFEVSSGKHRGKRRISKRGRSLMRKLLFFAAINVVKSNGIMHKRYQEMLERGMPKMKALVAISRKLLMLIFALARDNTVYVENYSNIHHFKLAA

SEQ ID NO: 216084 - protein, 495 aa, unidentified
MNNCAAGENFAGGRPAPARSQSQSPNLRKVSGRLLAEPEALAPTSNRKTPPEGHYISKMDGRAKRRKNHKEQKQTMNDSQQWQQHRAFGALDWASEKHSVVLVNQTGKVIEDFEIEHSALGWKKFREKLQPYGSIPFAIETSQGVAVEQLLEAGMLVYPLNPKSAQAYRERKAPSGVKDDRLDAWSFADALRMDGQNWKALRPEEPLIKELRLLCRDEVTLIEQRTAFVNQLRHALAEYYPAALEAFEDWTSVSAWMFLQRFATPEQLAQAGKRQWQKFLHSRRLWGSDQGPRRMEIFAHATEFTGTAPTVKAKSLLAQSLVQMLFAIEKQLAVYRQRIEALFARHPDHDLFGSLPGAGPKIAPRLLSEIGDDRQRFGGDPQNLQCLAGSAPVTKRSGKQRKYWPVHQRWACDKHLRHAIHLFSEQSLSRCAWAEIYYQHHRQKNQSHANALRRLSHRWLKVIYKMWIDRTPYNAELHHRNQLQHGSWIFQLQQS

SEQ ID NO: 216085 - protein, 416 aa, unidentified
MSQAEEIGAWVGIDWADKEHRVVLEEAASGRRVSMAVGQSAEELHEWLSGLQSRYTGRRVAMALEQSRGALFYALSRYEFIDLYPVNPKTLASYRDALRPSGAKDDPDDAALVLELLLRHGDRLRLWKADDARTRQLRLLVEYRRKLVDDRTALLNQLTQLLKESFPQALRWAGGLDTKQAFDFLLRWPTLAAVRQARTQQLRTFYRTHYHSAEHIEKQIDAIRTAVPLIDDQAIVAACSTMIIAIAGQLRVLRESIAQFDRSIDELFAHHQDASIFQSFPNAGAVLAPRLAVAFGTDRDRYSAAVEVAQWSGIAPVTRRSGGSMVVCTRWACAKFLKQTFHEYARVSIAASPWARAFYDQQRLRGATHHAAVRALAYRWIRIMFRCWKDRVPYHEVTYQQALRRRGSPLVGRLAA

SEQ ID NO: 216086 - protein, 399 aa, unidentified
MLAVGIDISKSKSVAAILNQDGSMHTSPFEFHHTQPELDAFIKYILNSNQSATILIENTGRYHYPVLKAFREAGLLVCMVNAYQIKKFGDMDLRKAKTDKKDAVRIARYALEKSYSLVPYTSMEQKYEDLRFLARQYNQRMLTLKTNKVFLLNLLDETMPGITNILPLTTRVPGTSLSVLFINRFKSYDRIKKMGKSRFLDAFEKIARKSRNRQTKTYGLAIYEAALRNITTRGENEYTLAAQDQCLELVCESQKAADSIILKMQTLAETLPEYAVLRSMAGVGDRLGPLILAEIGDIRRFHSGKALNAYAGNDAPPYQSGTFESHNRHISKRGNAALRKYCFEVMQALKLTRPQDDPVYLFLLKKEQEGKPYNVAKMAGVNKFLRIYYARAMETLKQQ

SEQ ID NO: 216087 - protein, 395 aa, unidentified
MRRPVSGRDAERSQVIDMLKAQIKRRPARKKVSTVGTQQTRNISQQKLTIGLDLGDRNSWYCVLDEAGQIQLEQRVRTSAKTLGEVFGAMPRCRITLEIGTHSPWISRLLSELGHEVIVANARKVRLIGESRKRDDRLDAQTLARLARIDPQLLCPVKHRSAQAQADLMMIRARAGLVRARTGLVNAARGLAKSYGERLRGCKVRNMNPEKAEGLSPELQRALEPLLSAIEELNERICEYNDRIGALAQQSYPQVALLKQIKGVGTLIAPTFLLTLEDPHRFGKSRDVGRYLGLQPGHRNSGQSEPQRPISKEGDPYLRTLLVQGAQHILGLFGVDCDLRRWGLKLAERGGRKGKKRAIVATARKLAVLLHHLWVSGEVYEPLHNSRQTTVAAAA

SEQ ID NO: 216088 - protein, 482 aa, unidentified
MKKNNIYQNQSQQLLSLFEQAADNAKVMCVPIDYAKKDHVVMFCNGYGDILRKPFSVKNSPQGVAYLTDQVIRSCRQRAISQKHVFFGGEQVGSFADNFVSTLRSQGWLVAGVNAHEAKTQRENLQASTDRLDLMGIAKSLLNRRADCSPPQSGIYLNLRTVVRHRRKLVGITTEVRNRIHTVVDRLFPGFLNESKSGITPFSKSSLWLMKERFSAGQIRRRKRSTLIEALRRLGTKKPEDTADMLQQYTSQVLKPPQDQLHMLQLSLAQHVKHFCCLQESIGQLETEIALNLAQTQGAFLTSVRGIGIVLAAGVSAEIGNPFEQKPLNNLVSYCGIIPRVKQTGGPQGKTKTGKVAKRCNRMLKDYIVKSASHLGLHGPADLKSDYKRRDAAGQHADFGMARRYLRMAMCLMRTSQVYLPSQLRQPQAQIQQRADYYLMNWPCLRDKWQKSGALETAFKADQPLGQWRKIVQQFYGIKLTL

SEQ ID NO: 216089 - protein, 341 aa, unidentified
MEISILGIDLGKNSCSIVGLDLAGKVSIRRRMRRETVIAFSSKLPACIVAMEACCGAHHMGRTLAAQGHIVRLMSPEYVRPYVKAQKNDNRDAEAIAEAATRPTMRFVELKSEEQLDMQTLHRVRDQLVGDRTSLMNQIRSLLLEGGHIVPQGRAKLAARLAQLLDDQAPVLSPRIHALVLDMRNRWMALDQRIAEFDKEFAAHAHSDAHARRLLTIPGIGTLNATALVAAIGDACSFARGRDLAAWLGLVPRQATTGGKPRLLGITKRGNKYLRKMLIQGARAAMPTLRKTDTRMGAWLRGLLARAHSNVAVVALAAKMARIVWALLRHECTYEGATMPA

SEQ ID NO: 216090 - protein, 341 aa, unidentified
MGLDLGDRFTEGCVLDEQGDVIERFRVRTRTGDLSKVLGAYGPSRVVLEVGTNSPWISRLVTSCGHGTIVANPRRVRLIAENDSKNDSVDAELLARLARINPGLLKPIVHRGEQAQRDRILIQARDGFVRARTQLVNQVRGFAKSLGTRLSSCSTVTFTKKVRASEDEDLFPGLSTMLEMIDSLWEQIRGVDREIEKLSKERYPETQLLRQVPGVGPLTALCFFLTIEDPGRFAKSRSVEAYLGLRPRQRDSGDSHSQLRITKAGDRLLRRLLVTSAHYVLGPFGPDTDLRRAGLRLAERGGKAAKKRAVEAIARRLAVLLHRLWVTGEDYVSLLEERVAA

SEQ ID NO: 216091 - protein, 410 aa, unidentified
MKIAGIDVHKKVLMAVVVDAGTPEEKPARRRFATMPSELHRFLTWLREQGVEEAVMESTAQYWRSVWLELEPHMRLHLAQAFSNRAPRGRKHDFKDAERLVRRLIADELILSFVPSGEQRIWRSLTRMKLQLTRDRVRLQNQMECLLEEMRIKLSIVVSNLLGASGLRILHALANGESDPKKLAQLGGERLQCTEEQLVDALTGRAQPVHGAMLALQLERLQLIDQQMAQLNSMIATAMKPQQDAVIRLAEVPGLGVDSAQQIIAEVGAQASTFASAVELTSWVGTCPGKEESAEQNHSSRSAKGNKYLRRVLNQAAHAAVAKKGSHFQLVFRRLLPRLGYQSAIWAVAHRLCRLVWKILHEGVRFIEQGSEVNPREKKKRAQMLMRALHRLGYEVTITPTSQLAPKPIV

SEQ ID NO: 216092 - protein, 331 aa, unidentified
MKKYELHLGIDVSKATLDICVMDNNAIVLDQLQIKNSIKEIKKFVKNILSKELITLFCFENTGVYSMLLAVTLNEMEQDYWEVPAIEIKRSKGISRGKTDKADAKDISLYSIRSKDKLKLSSVTAIHIQQLRLLFSEREKVIKAIKLFESTTENEDFLPNSIFKEVKQINKRTQQKLAKTLIEINSKMNMLIQEHKELKKQKELLKSIPGIGDVTALYMMLITQGFKAFDNWRQFACYSGIAPFEYSSGSSIKGRTKVNHMADKKMKSLLHMASLSAMKVDPEMKRYYERKKEEGKSSMLVLNNIRCKLAGRAFAVINRGTPFVNMQKFAA

SEQ ID NO: 216093 - protein, 371 aa, unidentified
MEHTRFVGLDIHKERISIAVAESGRSCAVEYLGEISNDPVAIGRLCDRLERPSKTLAFCYEAGPCGYGVHRHLISLGHRCDVVAPSLIPTRPGDRVKTNRRDATMLARLHRAGELTPVWVPDADHEAMRDLIRLRSVVRQIVSRARQHLQGFLLRHGRKHGRGTAWRMAYRRWLSTLAFEHPAQQIAFQDYVDAVMDAERRLQRVEEQISGLLPEWNLRPVVDALQAMRGIALITAVVLVAEVGDFTRFANPRQLMAYFRLIPGEQSSGETIRRGGITKTGNAHARRALVEGAWAYRMKARIGRHKVDRIEALPKVVRDIAWRAQLRLCTRYRRLSARGKTANVVNVAIAREMVGFIWSIACTVQSAPKTA

SEQ ID NO: 216094 - protein, 452 aa, unidentified
MAKRSKKRCEQLPILHPHAAGIDVGASELFVAVSADRDPQPVRSFPTFTRDLNALADWLQQCGIRSVAMESTSVYWIPVYQILESRGIEVCLVNAQHVKNVPGRKTDVSDCQWLQYLHSVGLLRASFRPPGFICAIRSLWRHRGSLIQMAAEHVLHMQKALDQMNLQIHRVLSDITGISGLRILDAILSGERDPVTLARLCHGGVKNSEDTIAKSLEGDYRPEHLFALRQSLAAFHYYQQLVVEVDQEIQRQLGSLETAITAQPTVPKRTKASPYKRGRYEPKAFDLRHELYRIFGVDLTNVPGISAITAQTILSEIGTDVSRFRNASAFASWLGLCPENKISGGKVLYTKSRRVRSRLATALRMAANSLHHAKDYLGEFFRRITRKLGKPQAITATAHKLARIVYHLLSTKEAYDETVFHRCDEEVLRRAQFRLSRQAAQLGVQVIPLQNG

SEQ ID NO: 216095 - protein, 374 aa, unidentified
MRCRWMDRCATPPARRRGRLTLGAMVEAPDAVGERGPLRLLSKPARLRGHVSPHRKEGIEGMIRTAVHVGIDVAKDFVDVAIGDDGECFRVTTDTAGLDALACRVSGFGPGVVVGLEASGGYERPIIRRLHEAGIAVRLVDPARVRQFARAMGIKAKNDRLDAAVIAAFVATVDGALNVAEPARERLCEHVRYRRQLMEALTVIDNQARLTDDAGLEALAAERRELLRRQVDEIEHRIVRLIDADPAMSKTFALLRSVPGVGPVLAWTLIAEMPELGSLDRWKVAALAGVAPFDRDSGGHNGKRMIHGGRANVRKVLYMAAVAAARCNPPIQAFHQRLRDQGKPPKVAITACMRKLLITLNAIARDQVEWKPAI

SEQ ID NO: 216096 - protein, 374 aa, unidentified
MSNYSEAFVAIDTSKLRNAIAIAEPGREGEVRFAGEIENSEVATAKLVKKLSGKYPRLTFCYEAGPTGYGLHRQIEGLGHKCIVVAPSLIPRKPGDRVKTNRRDALGLVKLLRAGELTAVWVPDPGHEAMRDLSRARGAAVEDLRGKRQQVSALLLRQGLHYAGKKTWTKAHMNWLASQKLEHPERRIAFEEMLLAVRQAQQRIERLEQAIRAAVPDWSLAEAVTALMALRGIDLVSATTFLAEIGDLSRFQTPRELMAYLGLVPSESSTGDTVKRGPITKAGNRRARRILIECSWSYQHPPRVGKNKQEKVAAAPKAVREIAWKAQVRLSARYRALTRRGKLKTVAVTAIARELAGFIWAVSRETATGHAVAS

SEQ ID NO: 216097 - protein, 428 aa, unidentified
MKKHSNSGKKSEATTKRAKSRGPVQRDTKEVLAELVGKLTEKLDPKKAAGASAGDGHPRGELRPNLDRLTVGVDLGDQWSNYCILGLEGETLAEGQLRTTQEDIAEFFQALNAARVVFEVGTHSPWVQEVICGCGHEVLVANPRLMEGSKRRKRKNDRIDANKLARLGRVDPKSLHPIQHRSREVRQDLVVLRARDALVAARTELINATRGLVKSMGQRLPKSSSPSFAQKAEEAVPVEIREALLPLVRMAAALSDCIQGYDQKIETLGREKYGHTALLRQVKGVGPITSLAYVLTLENPGRFAKSRDVGPYLGLVPKQEDSGESQPQLGISKTGDTMLRKLLVGSAHYILGPFGPDTDLRRYGLRLCERGGKNAKKRAAVAVARKLAVLLHRLPNGQGEPNRKHTIESERTSWSDCGRSKTKGADMS

SEQ ID NO: 216098 - protein, 324 aa, unidentified
MAKPTMICAGIDTGKHKLDVAIDGSLEQLQVDNAPEGYKVLSDWLRQHRVKRIGIEASGGYEQAVVAELRRKRFVVVVFQPAQVRAYATFKGQRAKNDKIDAALIAACTAAVRKIHAAPDPRLLPFAEQLTMIDQVGEDIARLKNRLESCRNTGIQQIWKEDLARLEKRKRSELKALVAAIREHRDLAERLDLICSVSGAGLPTAVAILVRMPEIGKITREQAAALAGLAPYDDDSGQRVGGRHIQGGRERLRRALYAAALPASMRWNPQLKDLYKRLIAAGKEHKRALVACARKLLIFVNTVVARGIAWQKQPPQRNELTATA

SEQ ID NO: 216099 - protein, 359 aa, unidentified
MLYLGIDQHRKQLTVCVRNEQGDVIIRRQVSTEWKRVRAFLADIQRTAGERGFVVIIEICGFNDWLVKLLGEYGCKNIVLVQPEKRSKRKTDRRDANALSETLWVNRERLLAGKRVQGLRCVEWPSEEEASDRQITALRRNLGQSRTRTINRIKHLLRKHNVEQECPTKGLDTIRGKKWLAQLTLNKIDRLEMDQLLAQWKLCDEQIEVVEKEIQQRQAQSPAAAIVATIPGAGAYASLALSSRVGSIERFARPGSLSNYWGITPGSRNSGEVKDRLGSITKQGSAMARFILGQLVMHVLRRDTWMKAWYGRIKRRRGAKIARVAVMRRLATILWHMLKYQQPYVIGGPPRKKLPREGE

SEQ ID NO: 216100 - protein, 438 aa, unidentified
MEEAGDEPLFCERAAGIDIGKQVVSVTIRVPSETRRGGRQQETREFGTTRRQLLEMADWLRCWQVQRAGMEATSDYWKPVYFLLEREGLDCLLYQASQVKALPGRPKTDRLDSAWLARITEQGSLAGSFVPPEDIRRLRTHTRYRRRLIQARTAEKARCEKLLEDAHLKLSSVISDIHGVSGRDMLRAIIAGERDPETLAQKARTRMRRKIAQLREAVDCSFFTPDHAFVLQMMLDNIDHYTAQIGVLDERIAVLCEPYERQVAQLDGIPGFGVRTAQDLIGEIGVDMAAFPTAGHLCSWARLAPRVRESAGRRKGKNATGRGNPYIGGTLGEAAAGAGRTQTFLGAKYRRLCTRMPKKKAQGAIMRDHLVITHALLSDPGAEYRDLGTGYYEQRERTRRRASSHVRSLERLGYKVTIEPLTPDADPETGELITRTAS

SEQ ID NO: 216101 - protein, 355 aa, unidentified
MNDAKYIGMDVHTATISAAVRDSSGNLVMEATLETKAETILGFVHGLRGSLHVSFEEGTCAAWLHDLLKPRVTEVLVCDSRKNALLRVGNKNDREDARKLSELLFLNKLHPVYHGETGIRTLKELARSYLTLTRDLTRVMNRLKAIYRGWGIACAGQQVYAPRYRAEWLAKITEASVRRRAEIYYQQFDALAALRQEVRRELLAESRKHPAMRLLRQIPSIGPIRAALLIALMQTPHRFRTKRQLWAYCGLALRTYDSGEYRFVGGQLKRSKKAVTIRGLNKNHNHDLKNIFKGAATRAAAAAGPFQNFYEARIANGMKPPMARLTLARKIAAITLLVWKKGVRFDAEQLKQQAA

SEQ ID NO: 216102 - protein, 408 aa, unidentified
MESQIIFGIDVSSKSSTVCVVNDRIKQGESFRISNDSFGYQKLYEQLNQYLITPLVVFEATGVYSLSLQAFLEDYHIKYLKLNPLKAKKLMDNNLRHNKTDKVDAYRLALIQFNAPQKLRDPQPREYHELQNASRYYEELTRSIVTTKNQLHRNLQSTFPQIEEILSHPSGRIYWALVSLFPHAGYVLEKNETQVTQMLNSISGIGQQRARYLTTRLYAFAREAYPYDSKDSIIVRAIQRNISNLFSLQQERDYVINYMEKLAKAVNARALSIYLSIPGVARITAVRLVAELGDLRRFSTSAQIDAFVGIDPGRYQSGEKDSSLGITKHGNHIARKILYRVIIQMETVKATQPCHITDYYDKKKRSSNRQGYKKIAIASVHKLIRTMFALIKHDQLYDYNIATENKRL

SEQ ID NO: 216103 - protein, 345 aa, unidentified
MNKTKVQQWQTKGKGLSLNEFDHYLALDWSIRVMALGHMRRRSPAPEKFERPADLKELKQYLATLKGLKVLAIEETTTSQWLYVELIDHVDRIILCDPFHNHLLSQGPKTDKIDAGKLCHLLRAGLLKEVFHSLSGIYELRRLVSAYEDLVKAGVCVLNQKACLAQGHFDSGPHAPFILEHIDKSIELYRNNKKDYERKFEQIAKRNKLVRNLLDVSGIGVIGAVKIVAYVVDAHRFPRASHYLSYCGLIKHEKLSGGRSYGRRKPRFNHTLKAVYKLAAMSIISGNDNPLHQYYDWLLAHGVAEHNARQALARYLARLTYGMLKTGTRYQPYRWRHEADSQQAA

SEQ ID NO: 216104 - protein, 341 aa, unidentified
MNDTIYDHYIAIDWADKNMAIARMTKKSNKISVIDVPSDLEELKFYLKQLKGSKVLTIEETTTSQWLYTELKSHVDKLIVCDPHRNKLLNDGPKNDKIDASKLVQLLKAELLKEVYHSNDEFIELRRLVSGYDDLVKSGVRLKNQRSSLLRACGQKKSKQEIEKLGSRNEDYVLASLNRQISAYEEEKAGYEKEFKHLAQKHPAIRHQKSIPGIGPINAIKIVAQVVSPYRFVEPGHYWSYTGLIKHEKISGQKSYGKRTPRYCRRLKEVYKTSVKAAIGGNNPINDYYQHLLKEKGLPEYKARHKACRRLATLSLGVFKSGQQYQPYKRDTATKTKQSGL

SEQ ID NO: 216105 - protein, 476 aa, unidentified
MPKGRISRALAGTPFTYEKIAQKRSHKKEKINASMPVLRPDAAGIDIGHREHGCAVPADRGQQPVRAFGTFTQDLAEMARWLKECGIKTVAMESTGVYWIPAFQILERHGFEVCLVNARHVKNVSGRKTDIQDCPWLQRLHSFGLLNASFRPPDHICVLRSYLRYRDDLVGLRSMQSQHMQKALQQMNVQLHQVLSDVTGLSGTRIIEAILQGERDPIKLAGLADKRVRASKAALQKALAGDYRPEHLFMLQTAFDLYQIYHQKIHLCDEQALAQMAQLPTQKSQPLPERKACRKPIHDMVAGKDLRAELHRWGGVDLTTIEGFGVQTAQVILGEIGPDVSRWPSEKQFASWLGLCPDHRISGGQVLSRHTRRVVNKVSNALRQAAVTLQKSQTALGAFYRRMRGKLGAAAGVTATAHKLARLVYRLLKHGELYVQQGLEEYERKYRERAVRHLKKAAASMGLEVVEKQPLASGVS

SEQ ID NO: 216106 - protein, 387 aa, unidentified
MNRSNHRVVGLDVHPDSFAGAILEGSDPWQARVKSTSTRVALRLLEKWALRHTRESDCLVLESSANAFAVAERLGRLKRKVLILDSHRAGKVGQSYCATDRVDAIKIARIYLSALSPIVWQPDQKTRERREVFSAYQAVVKEGTRLKQQIKSMLNEHCVRLEKGFRLSHPTAIERLLQRRKWTEAQKMLLEQLHAGLVGARSRRQQLRRYMAREILAEKELLRLTRLCGINLITLYGLIAAIGDINRFANSRKLVAYLGLNPSVCQSGEWEGATALKRHGRGAIRALLIQSAKKLLQVNNPLQKWGLAIALRRGRNKAAVAVARKLCVAVWHVMQGHVIGAIERLDTLHAKLHKLATDLGVPAIKALGYETKEAFVQKKLYLLQSYP

SEQ ID NO: 216107 - protein, 398 aa, unidentified
MPELWAGIDAGKSHHHCVVLDADGKRRLSRRVANDETALLELIANVAELAGDDATTWAIDLNSGGAALLLALLVNHDQRLLYIPGRTVYHAAASYRGDGKTDAKDAAIIADQARMRRDLQPLRPGDDISVDLRILTARRTDLICDRTRTINRLRTQLLEYFPALERAFDYSASKAALTLLTGYQTPEALRRIGHSRLETWLRNRKVRNAAAVAATAIEAAAAQHTTLPGQRLAADMVIRLAKAVIALNEEIAEIDTLIESRFRQHRHAEIILSLPGFGPLLGAEFLASTGGDMTPFGTANRLAGVAGLAPAPHDSGRISGNLRRPRRYDRRLLRAFYLSALASIRWCAASKAYYDRKRAEGKRHTQAVIALARRRLNVLWAMLRDNTQYHAEPAPLTA

SEQ ID NO: 216108 - protein, 413 aa, unidentified
MQHPKMKYTYVGIDSHKDTHTAVFLDCFFDKLGEIEFNNLPSEFGAFLSEAEKLRQDGTELLFGLEDTSCYGRSLMMFLKNNDQPVKHVNPLLVARERRNRNMLEKTDSVDAECAARVLLSKLGTLPDAAPEDEYWVLRTLVIRRDFIVRNNVALKNHLHDLLTQHYPNYRRFFHHIDCDSSLAFFYEYPSPSALERTTFEGLTALLWEHSRGQFGEKKAKQIWDSREDTAVPFQEVRDDAVRSTIRQLRFNLAELEQAEKSLATFLPTFETTLTTMNGISVIIASQLLSCIGDIKKFSTPAKLARYAGVAPVTYASGKNALQFANQRGNRELNSIFFKLALRLSFPSGKSGTVVNPFFYEYYNKKLSDGKTKRQALKCVQRRLVNIVWTMLTHGEEYVNPPTYEVEKKAVGA

SEQ ID NO: 216109 - protein, 417 aa, unidentified
MICAAIERCAGIDVGKTFLAVCLMTGPLEGEPRVERRRFGTVTAELEKLRDWLQQEGITHVVMESTGSYWKPVFNVLETAVKVYLANPQEVKNRKGHKTDDNDGWWLAHLLRHAMIHPSFIPPRAIRQLRDLTRRRKRMIGNATAEKNRVQKVLEDANVKLGNVLSDVFGVSGQLMLEALLEGKAKPEEIAEFAQRRARQKIPQIIESLNDHRMSAHHRRMIRYSLEHMRFLEEQIGKLDEDIVAEIREAGLVEQWQLVQTVPGMQEASAANVVAETGGDMKQFPSSKHLSSWAGVCPGNNRSADKNKGSHTTGGNPWLRSTLTECAWAAAAKKNCFLKDQFWRIATKSGGKKAPAVIATAHTILSLIYQVLATGKPYTERNEPILDEPRRQRLIRHHVRRLGKLGVPVRSCSRSRR

SEQ ID NO: 216110 - protein, 396 aa, unidentified
MPQMWAGVDIGKEHHHCVVIDRDGERLLSRRVLNDETALLELIQDVLALDEDVLWAVDLNHGGAALLIGLLISHDQPLVYLTGLAVHRASGTYRGEGKTDAKDAFVIADQARMRKDLGLLRPGDEIAVDVRTLTTRRTDVVADRTRQINRLRAQLLEICPALERSLELTNKGPAVLLTGYQTPAAIRRAGAKRIETWLRNRKVYGAAALAKAVVEAAEAQHTALPGEKLAATMVVRLAKGVIALDQEIAELDALIEARFREHPHAEVILSLPGMGKLLGAEFLAATGGDMDAFGSADRLAGYAGLAPAPRDSGRVSGNLRRPRRFHRGLLRAFYLSSLSSLKSCPASKAFYQRKRAEGKGHKQALLALSRRRVNVLWAMIRDGACYQAVPPVTAAA

SEQ ID NO: 216111 - protein, 397 aa, unidentified
MYIVGIDIAKRKHEAAVIDGEGTVIIKPFSFTNNCSGYNRLLAMLTKAKLPLDEVSFAMEATGHYWLALFTRLQKEGFRVQVINPVQTNSIRSFYIRQAKTDPRDALLIAEVIRFGHFSESTLHPENIYELRELCRGRHAIVSMQADVKRKVVALLDQVFPEYETAFTNLFGDTSMAILQTCPTPKELSEMPFEELCHLIEVSSHKRFRMAKAQELQALARNSFGFAMAGDVFSTMIRLYAKHLDFLKQQVQEMDRKIAEIMDTLDTPITTITGIGPTLGAYILSEIGDISRFSSAAKLAAYAGIDPTMRQSGEYNGVRNRMSKRGSPYLRHAIWLAASSAVLHDPALKLYFQKKRDEGKPYMASVGHACRKMVSIIYAVMRDNKAYTPCIPNEISA

SEQ ID NO: 216112 - protein, 338 aa, unidentified
MKLYCGIDLHSNNSVVVILDEVDTVIYQKKLNNDLALILEQLSIYKDKITAIAIESTFNWYWLVDGLMEAGYTVKLVNTAAVEVYSGLKHSDDEDDAGWLAHLLRLKILPTGYIYPKEERAVRDLLRKRSQLVRQSTTNILSLQNILARNTAQSLSSYKIKMLDDEHAEKLLDDPNTTLALKCNLNVIRCLQSTIAEIETTVLQQARIRAEFQQLLTVAGIGKILGLTIMLESGDMSRFTKVGNFSSYCRCVKSERLSNGKKKGEGNRKSGNKYLAWAFIEAANFAIRYNDKIKAFYQKKKAKTNGIIATKAVANKLARACYHVLKDQVPFDVNKSFG

SEQ ID NO: 216113 - protein, 489 aa, unidentified
MSEAPQKSQKGKNRRQKAIVSCKPSKWGEMTRHQRREMMRKLQSEDLSLEVVHPDAAGIDIGNDIHYVSVPPSRDPQPVRCFGCTTAELKAMADWLKRCRIRTVAMQSTGVYWIAVSDILEQAGLEVYLVNARSTKNLPGRKTDVQESQWLMKLHTYGLLRNSFRPSREVRTLRTYWRQRQDLVQAAGEHIQRMQKVLTQMNIQLANVISDISGVTGQAIIKAILNGERDPRELAAYRDRRVQATEEEIGRSLEGNWQDDLLFVLRQEEASYEFCQKQMAECDRQLEQCLHQREDRSQGTALPAEKRKSRLRKKTGRNAPGFDVRRLLFRMTGVDLPQIDGIEVMTAMTVFSEVGWDMSKWKTENHFVSWLKLCPNNMISGGKIIGKDRMPTNNRATTALRMSARSLRLSDSYLGAQFRRLRSRLGAPVATKAMAAKLARLVYHMLRDGMKYVDKGAQVYELQHRQHQINFLKRKAAMLGFQVTEVPAA

SEQ ID NO: 216114 - protein, 412 aa, unidentified
MDIVHDRAVGMDISKRDAKVCLRVPGQRAGTFSSTVTTWGATTQQILALRDFLEQEHVTTVVMEATSDYWKPFFYLMEETLPVMLVNAKSARNIPGRKTDVSDAAWLAQLAAHGLLRASFIPPEPVRELRDLTRARAIATRDRSREIQRLEKFLEGSGIKLSSVVSDLTGVSSRAMLEALVRGERDPQVLAGLAKGTLKSKVPELVDALTGRFREHHAFMVRLHLDQIDAQTRILDELTERIEAAMAPFRTIREFLATIPGVSLRTAEVIVAETGADMSVFETPGRLASWAGVCPGNNQSAGRVKSAHILPGNKYLKAALGTAALSACKGKTTYLGAKYRRITARRGSKRALVALEHSIIMAVWHMLADGECYSDPGADYFTRLDPIKARNGAIKKLNSLGFDVTITPVTAA

SEQ ID NO: 216115 - protein, 349 aa, unidentified
MLADELDYVVGVDTHRDEHVFAVVAAPAGAVIAGAAAAANGRGYRHLLRAAQQHAPGRRAWAIEGTGSYGAGLARFLAERGELVLEVSRTPRAERRLRGKNDTLDAVGAARAALASDRLALPRTGERREALRLLLVARRSAVDVRREALTQLRAVIVTAPDELRQELRGLPTGKLLERCRRLRQTRTAGVDQLATRLVLRSLARRIEAATTEADALEHEILTHVRALAPTLLDEPGIGPIVAAQLIIAWSHHGRVHSEAAFARLAGVAPIPASSGQTTRQRLSRGGDRQLNRALHTVILHRRLHDPATKEYIARRVSEGKTTREAVRLLKRYLARHLYRLLQTQEPLMT

SEQ ID NO: 216116 - protein, 407 aa, unidentified
MDVVIERACGMDVHKDNITACIMTPEGKEIQTFSTKTVFLLQLVDWIKQHSCTHVAMESTSVYWKPIVNLLEAEDIEFLVVNAQHMKAVPGRKTDVKDAEWIAKLLRHGLLKASYIPERNQRELRELVRYRRSIIEERARQHNRIQKVLEGANIKLGSVVSDVLGVSARDMLNAIAEGEEDPEKLANFARRTMKKKRDELELALRGYINSHQRLMLKTILKHIDFLTEQIEMLDQEVAERVSTHQEDIERLDSIPGIATRMAEQILSEIGTNVKKQFPSAAHMCSWAGVVPGQNESAGKRKSAKTKKGNKYLRSALTEAAHSVRGSKNYLGALYRRTASRKGKKRACIVVAHAMLRIAYYLLTRKEMYVDLGEDYFDKQRQQSIVRHSLRRLESLGYTVTLQEPEAS

SEQ ID NO: 216117 - protein, 360 aa, unidentified
MFCERTSVGLDVHARSVVAAAIDGRSGEVFRARLTPSHAEVIEWVGKLPGPCAVVYEAGPTGFGLARALSAAGLRCQVAASSKLLRPAGDRVKTDARDALNLARLLRLDEVVPVRIPSAAEEAARDLVRIREAARADLMRARHRLSKLLLRHGIVYYDGKAWTERHDRWLHHQRFDAAPTQSAFEDVYEAVVLATARRARLDEKITALAADSEFSPLTRRLACLRGISTLTGFALAVEIGDWDRFTGASIGAYLGLVPSEYSSGTSRTQGAITKTGNSHVRRLLVEAAWHHRSTYRPGPVLRHRWDQAPAAARARAHAGNQRLHARWVGLNLRRKPAVIANVAVARELAGWCWSLAVLPD

SEQ ID NO: 216118 - protein, 373 aa, unidentified
MTDYDAYIGLDVHKDSISVAIADAGRSGEVRLFGAIANEPDAICKLVKKLSSKHGRVEFVYEAGPCGYNVFRQIEALGFVCRVVAPSHTPVRPGNRQKNDTRDAVMLARLLRAGELTFVWVPDVVHEAMRDLVRARSVASHDARKARTLIQLFLLKHDLRYSAKSWTSRHRTWLRNRHFQHHAQQIAFQSYLNRLEQAEARKKELEDQIAVISQTWSLARTVMNLQAFKGIGLVIAATLVAEVGIFSRFDSPRKLMAYLGLVPGEHSSGGSVRPRGITKTGNSALRALLFEAAWSYRVQAKIGNWMHKRRPDVPQAINDIAWKAQVRLSARYRKLVGSGKKSNVAITAVARELVGFLWDVARKTESETMSSAA

SEQ ID NO: 216119 - protein, 357 aa, unidentified
MESQEVKYVGVDCGKKSIEVVRINSENSLERRQFSTTESGINNLLQWLTLNDIVGLEAGSQSFRIAKSILNKGVQVIVLNPGNLATIYQSLKKTDKEDSLKIARLIQRFPIEELTTVPIPNDEEEDNRRLCTEQENWTRQLTQSKNRLHSLFTQAGLTHITKKHLRTKANREISVALLPSRYQKEAERILKVLDLVEQNLKLIEKEIQEALKKNKAYVQTIMSMPGIGMITSLAIMSYMGDCKRFSSAKQAAYYAGLVPRVDISGDTVRYGRIINRGCHSIRRVIVQAAWSLVRCQHGGKVKEFYQRLYLKKGAKKSIIATSRKMIEVLYVMIRTGKLFDSMPENILNRKLTQYGLM

SEQ ID NO: 216120 - protein, 321 aa, unidentified
MNARYDPEMYVGIDVSKHRLDIAIGQEGDIWEAPNTISGIKKTISRLHSYNPLMVVVESTGGLEKPLIRALQDAELPVCQVHPGRVRKFASGVGRLAKTDRIDARILAHFGFAAFPKPKPKQKPACEALSALIRRRNQIIEMLTAERNRCFSCPAALRQSIEEHIEWLISKRNELTQQIESMLSSEPDFQEKNAVLRSAKGVGPILSATLQAELPELGQYSHKQISALVGVAPFSKDSGQSSGKRFIQGGRTIVRSTLYLATLSAIRHNPVIHAYYDHLLDRGKLPMVAIVACMHKLIVILNAMVRDMQPWNYPDKFVVAS

SEQ ID NO: 216121 - protein, 268 aa, unidentified
MEHELHYIGIDTAKEKLDVDVLRPDGRHRTKKFANTTKGHDELVSWLKGHKIDHAHICIEATGTYMEPVAECLYDAGYIVSVINPALGKAFAQSEGLRNKTDTVDARMLAEFCRQKRPAAWEAPHPLERALRALVVRHQALTDMHTQELNRTETAREVQRPSIDAHLLWLEAELKRLEKQIKDLTDDDPDMKHRRKLLESIPGIGEKTSAVLLAYIGLKDRFAHARQFAAFAGLTPRRYESGSSVRGASRMSKAGHVSLRRALYMPQW

SEQ ID NO: 216122 - protein, 342 aa, unidentified
MYYIGLDVHKKTISYCVKDASGQVHREGTIGASRNELDGWVRTLPQPRMMAIEATIFTGWIYDHLLPHAEQVKVAHPLMLRAIAASKKKNDRIDAGKIADCLRCDFLPECHMASTEIRDRRRTLRYRHLLVRQMVQMKNRVSGLLLETGVSHNKQRLHKVGYFGELISKNEEVPECILPLLRLSRETIVRCQKTEYALVSSLERDPLLAERLKRLRTVPGVGPITALTWALEIGDVSRFRSLKQAISYCGLCGDEKSSADKVLRTPLSKQRNKHIQSVLIEAAKLAPRQSHDLALIHEREKQKGHANRATLAVARKMVAYMLAVDRRELDFVPSEGRNTAAA

SEQ ID NO: 216123 - protein, 319 aa, unidentified
MLVGIDVAKAELVVATRPGGERWTVGNDERGVRTLVERLRRDGAELIVLEATGGYELLCVAALAAASLPVVVVNPRQVRDFAKATGQLAKTDRIDANILALFADRVRPAVRALPDTEAQELEALLARRRQLLEMLQAERNRLGQVFGRGKAPVKKSLKAHIAFLERELRMADTDLGDQVRQSPAWRERDDLLRSVPGVGPVLSLTLLAHLPELGRLSRRAVAKLVGVAPLSRDSGTLRGRRCVQGGRASVRGVLYMGARVATKRNAVIRAFYARLLAAGKPKKLALVACMRRLLMILNTMMRTGERWSAEHVDRRLIDA

SEQ ID NO: 216124 - protein, 343 aa, unidentified
MKLSYVGVDLAKNVFQLHGVDRSGKAVWRRRLRRHQWLGALMEAADPSCVIGMEACTGAHHWARQLQARGYTVRLIPPQFVKPYVKSNKNDANDAEAICEAMTRPHMRFVAVKSVQQQDIQATHRIRAELKDQRNAKTNQIRGLVAEYGLVAPQTPLALRRAIPDWLEDAENGLTDYFRALLHGLWGDLLALDDRIKELDKQIEQLANGNEVTRRLQQLRGVGPMVATALVATVGTGEQYRKGRQMAAALGLTPRQNSSGDKHRLFGISKRGDAYLRTLLIHGARAVVSQAKHRDDRLSRWVTDIAKRSHPNVAAVALANKTARMAWAMLQHGTDYDPALAVS

SEQ ID NO: 216125 - protein, 381 aa, unidentified
MKRVRFVGLDVHAETIAVAVAEVSGEVRSLGVIPNRAEPIRRLIKKLGPVEQLRACYEAGPTGYVLYWQLTEMGVRCEVIAPTLVPSRAGDKVKTDRRDAEKLARCYRAGDLTPVWVPDAAHEALRDLVRARLAAKRDQVRHRHRLQKFLLRHGRRRPEKVRVWTETYLKWVRDTVHFEQSAQEATLSDYLNEVERASERILRLERAIDQAIVGMPARMRAVVDALQSLRGIAKVSAVTVVAELGEISRFERPKQLMGYAGIVSREHSSGNRERRGSITKSGNAHLRRIVVEAAWAYRHRPAKGPELRRRQENQSEEVKAIAWKAQHRLHARYRNLAARGKNKQKVVTAVARELLGFIWAIGVEVEQRAGATGAKGRLAAA

SEQ ID NO: 216126 - protein, 406 aa, unidentified
MKKYSEAFVGVDTAKKKHAVAIADAGRDGEIRYLGEIDSSPATVARVIGKLADRYETLHVCYEAGPTGYGLFRDIRALGHDCIVVAPSLIPKKPGERVKTNRRDAVTLARLLRAGELTSVWVPDAVHEAVRDLVRARQAAAEDFRKKRQQLLSFLLRHGRIFMGHNHWTQAHRRWLAGQKFERPAQQIVFQDAIDAIDDATTRAQRLEEQLALIVPSWSMAPVVAAYQAMRGVSFVVAVTFVAEIGDLRRFEKARQLMAFIGLVPSEHSTGDTVRRGGLTLSGNRRARRVLIEAAWSYRYPARVSVALQKRLDGVPKSAREIAWKAQIRLCARYRRLIALGKKKPVAVAAIAREMAAFLWAIARQVEPTAAESGTVAPAPPATTIARRRVALKDASRRSAVACSHP

SEQ ID NO: 216127 - protein, 313 aa, unidentified
MGTYAGVDVAKATLDVAVHEGATWQYTNTERGITALVEQLQRRAVTLVVLEATGPYHHSVTAALLAATIPVAVVNPRQVRDFGRSLGLLAKTDRLDAQLLARFAAVVQPPVRALPDEATQQLAALVARRRQLVEMKVAEQNRLGVARAARIKKSLQRLVKVLEAELAALETDLDDQVRQSPAWLEAEALLRSVPGIGPQTARTLLAELPELGRCTGRELASLVGVAPHARDSGTARGKRHCWGGRASVRRVLYMAAVAAMRCNPVCRALYARLTTAGKPAKVALVAIMRRLLLILNAILKTRQRWQAPVPATA

SEQ ID NO: 216128 - protein, 359 aa, unidentified
MNKINMFFVGLDLGDKFSYITIIDQEGELIEESRLPTTRASFQRKFSTLQPCRVAMEVGTHSRWASHLLRELGHDVLVANARKLKAIYHNPRKGDRADAETLARLARLDPELLSPIHHRSPEAQADLAVLRSRDAIVRSRTLLINHARSIVKSSGARLPSCSADSFAHKVTPDIPETLHPALLPLLETIASLTQQIREYDRQIELLCQNQYPETKLLRKISGVGPLTALGYILTLENPDRFRASREVGPALGLVPRRDQSGDQDPQLRITKTGDAYLRRLLVGSAQYILGPFGPDCDLRRWGLKLAERGGKNAKKRAVVGVAWKLAILLHHLWKTGEVYDPFYLARKYDQVSDTMPAAA

SEQ ID NO: 216129 - protein, 341 aa, unidentified
MEQKLSVRGIDLAKQVFHLVGMDAHGTMLVRKRLYRAQMMAFIAQLPPTLIGMEACGGAHYWARRFREHGHEVRLMAPQFVTPYRKAHKNDMRDAEAIAEAMTRPTRRFVPVKSVAQQALQALHRVRERLMKARTALINETRGLLHEYGIIVPQGAATFRQHVLEKLTTEDAKLTPHSLALFRQLLEELAALEARVATYDAQLAQVAQTHPVCQRLLTIPGLGELTATAWVAAVSDATQFKNGRQFAAWLGLVPRQHSTGGKSRLLGISKHGESYLRKLLVHGARSCLRWVGRKRDRRSQWAQSLMERRGWNKAAVALANKNARVAWALMGTEQVYRVAEA

SEQ ID NO: 216130 - protein, 399 aa, unidentified
MSERKSLELRVSVDVGCRRHSVAVGLSDGQVLEEFEIRHRREGFQEFFSRIEKHQKAQGCKVAVAMEGYNGYARPLDSLVRQRGYRLYNINNLKLARFKEIFPGAAKKDRIDARKGLELFQLRDHLPLAKDVLQEVTGSPKENEILKRLTRRRRRLVNERVRVVNNLQADLQAVCPGLLEITTEASNQWFLNFVISGDTILQLARLGKSTLLKIPAVGRKYASLIQQWQKRAHFSEEAQWVSEMIQEDARRCLELDERIKTLETKIKEVAKSSKIANTLLSIPGFGAVCTSELAGEIGTVERFSKEGSLALYLGMSMLDNSSGKYQGTKQPKHVNTRAKAAMMTAVDRHRKYVPESQKYYEKKRTEGKTHNQAIRALGRHLCRIIYQMLKEQREYRVRC

SEQ ID NO: 216131 - protein, 350 aa, unidentified
MIIGCDWHPRYQIVAWVEEETGEVMKRRLEHESGEARRFYQGLPPGAVVGIEATFPGHWFERLLDECGHELWVGDAAKIRASETRKQKYDGRDAEHLLDLLLAGRFPRIWVPSIQERDLRQLLVHRMKMVRRRTAVRNQLHYLAMSQGVCRKRKLWSARGREELESLKLLPWASRRRQELLGWLDRLDRSVEELDRAVEEAGRGRAEVALLRTHPGVGPVTGLAFVLTVGPVSRFRNSRKLVSYLGLNPRENSSGGRQRLGAISKQGNSMLRWLLVEAAQTAARLDPELHRTYQRLKFRRPSGVAKVAVARRLAVRLYWMLRAQADYAQRVRMSGSPSSAVVPSHSESTV

SEQ ID NO: 216132 - protein, 331 aa, unidentified
MNKQNFCYFIGIDISKRFFDVAIIDGDRTTSYVFENTKKGTNAFIRLLKNQKFELQNTLICMEHTGVYGKVIITKLVQKQALFCVEMPIQITKSIGVQRGKNDRVDAKRIAFYASKNYQELELYKPMPEILEKMKILLKIRKKLVNTRADINKYPNELELFSPEIGKLARKNLKRINKNLEDEIKRIEAEIKKLILSDDKLNKTVGLVTSVTGIGQITALHLTVFTNFFTRYDNPKQLACYSGVVPFEYSSGSSIHRKSRIHPMANRTLKKHLHMSALAAINHDPDIRAYFLRKVEEGRNKMLIVNNVRNKLVHRVCAVVKRQQPYVKNIA

SEQ ID NO: 216133 - protein, 399 aa, unidentified
MNGSKQETKRPEGAGGRVIGLDMHPDSFTAAALEGKTAMDAQVLWVHDNQPQQRLEKWLEKHVDPLDLIVIEASGNTFHTVDRIKACGRNAVVLEPLRASQVRKAYCTTDKISAVKLARVYFSGLAVEVWTPDEKTRERREVLHAHRRCVQDTTRGRNRIRSWMNQFGIRRRKGLRLTQPSGREWVLKQRGWTPTQQLLIDQMFNDLWQDEARRKKLRQIMAEEVANDPEILKLNRLFGLHVIAAYALAAIIGDIHRFRTPRKLAAYLGFSPNTNRSGLGKHDGGSVPWGCGEVRRILIQSAKTILRFDNDTPLHKWGLALAYRKGRNLAAFAVARKLVTAIWYLLKGYFTPLTEETPVLRRKLFELAKEIGVKRVRELGYKHSGDFRDRKMQVLFETT

SEQ ID NO: 216134 - protein, 358 aa, unidentified
MAEQRSYTGEHIYVGVDVHKATYRVTCVCQRQMVKTATVPAEPARFAESVSRWFPGAILSSAYEAGFSGFVLHRALTTAGITNRVVNPASVAVAAHDRVKTDRRDAKRLAIDLADGRLRGIAVPTAAEERARLLPRTRAQIVEHRATMTRQIKAKLHQFGLMPPASRRLMSRRYVREITTWPLPPELCASLTLLADQWRFATRQLLELRRLLRAQAQAQEELEKVYRSAPGIGEVVARTLATELGDMTRFTNERGLFSYTGLTPSEYSSGASIRRGHISRQGASRLRHVLVETAWRALPRDPALQEIFDRIAATRGKQRAIVAIARRLIGRIRACFRHGTLYAVGTAGEASVHRWLAT

SEQ ID NO: 216135 - protein, 344 aa, unidentified
MGEVITIGLDIAKNVFQVHCVDSGGAVVIRKRVSRLKVLEFFAGLPSCLVGIEACPSAHHWGRELQSLGHTVKLLPPSYVKAYLKRSKNDANDAAAICEAVTRPSMRFVPLKTRDQQAALMLHRTRQLLVRQRTMLSNALRGHLAELGIVSGKGRNGTVELLGVIADAEDHRVPPAARAILEVLARQYRAIAVEIGLIDKSILAWHRTCEASRRLAEIPGIGPIVATALVAEVGDWQSFSSGRSLAAWIGLVPKQHTTGGKERLGHITKQGNRYLRWLLVVGAMAVIRYAKQHGAKNRPWLARLMQRRPAKVAAVALANKIARIAWAIMVRGERYREPKLLMAA

SEQ ID NO: 216136 - protein, 317 aa, unidentified
MRTEQAYTGSGDVLVLAVSLELAAAKWKVALHDGRRDKPAVHTVAEPQAAARLQEVLDLIEAHKEKWSLPADVRIAVSYEAGQEAFWICRALQARHIECYVVDPASIPVERHQRRAKTDRLDVIKLVINLRAWLRGERDRMHVVHAPSPQDEASRQLMRERGQLQKEVLQHLDRMRKLLATLGCWDAVNHRAFAGRLQRDEVCCHDGAPLPRQLRERLLRECERLALVEQQLAALEKTRQTEVPALARQRCDALERLHGIGEVGASRLALELFWREFNNRREVGACVGLVPQPYDSGDSQADQGISKQGNRRVRALL

SEQ ID NO: 216137 - protein, 397 aa, unidentified
MWTLGIDIAKRRHVATMLDEKGKKVFGNFSFTNTNEGLNLLLNRIKQIDISADNLLIGMEATGHYWMILYHCLVDAGFQLRLINPLVTAARRNVGIRGTKTDSADAELIANILREADPKFSAVPDDETRQLRNLMRLRYECSQTFVAEKHRLNCLLDLVFPEYTDHFSNIFGAASRELLSQFSTAKEIGKIDIRKLTSILKKASKGHMGRDHAQRLKTSAKNSFALTITNSSFALEIRFLVQRMNLLMEQMEALEKQAKKYLKQEQKLLQSIPGIGHVWAPTILAEILPVFHPEEKNGARKLVATAGLDVRLNDSGDKKGKGKMSKRGSRYLRTAAMQAAEIAALIAKDAMFNSVYEKQKNKGKKHIVAISHVANKMLHVIFSVLKNRKPYELRIVH

SEQ ID NO: 216138 - protein, 415 aa, unidentified
MEGSPRYLIGIDWASVKHDICVLDPAGAIQAQFVISHTAEGLADLLRQLRRFGDRQRLPIAIERPSGLLVDTLVEAGFPVVPIHPNALKATRPRYSAALGKSDPGDAYILADLLRTDGHRFRPLRVPSDPTKALRAAVRTRDDLVATRVQLANQLRSLLESFWAGAAVIFADIDSPIALAFLDSYPTPSSAARLGEKRLERFLKRSAYCGRRSAAQLLDRLRSAPSGHAEELESETKGQLVRSLAAILKLVVVQIRDLDGLITAHLAQHPDGTILQSFPRTGTINAAQILAELGDDRLRFASEDQLAGEGGVAPVTHTSGKHRGVACRFACNKRLRQALTTWADNSRHAHPWAASVYRNARARGCDHPHAVRILARAWIRILWRCWQTRTPYDIHKHGRALPFLHAPSPPASVAA

SEQ ID NO: 216139 - protein, 344 aa, unidentified
MDKSITVIGLDLAKSVFQVHGINAEGEVVVRRKLSRSRVLAYFNKLDPCLVGMEACATAHYWGRELSALGHEVKLMAPQFVKPYLKSQKNDMRDAEAICEAVTRPTMRFVPIKTPDQQALLALHGVRDHWVRLSTRLINTLRGYLAEFGIVASRGRMGVEAILEVLADDEDGRIPDLARECLMPLANELRHVKRQILETDRKIMRAHRSSDMCQRLETIPGVGPVIATRVVAEVPDPKIFKSGRAFSAWVGLVPKQHSSGGRERLGKITKKGNPELRRLLVAGAMSMIIRAKQLGFTKHPWLSRLLERKPMMVVAIAMANKMGRMIWALMVKGEKFNPAKLMPA

SEQ ID NO: 216140 - protein, 343 aa, unidentified
MEQYVGLDVSQEQTSVCVVDGGGKVIWEGKCTSTPEAIAATLRTRAPEAVRIGLESGPLSAWHWHELRKLDLPVVCLDARHAKAALALQLNKSDRNDARGLAQIVRTGWYREVVVKSVDSHLIRSLLTTRAQLVRMRVDLANQIRGVLKPFGLIAGKGGGRLFAERVRALVAGGPLQEVAGALLAAWQAIGEQIAVLGRRLVTVARQNKAARRLMTAPGIGVLVALAYVSVVDAPERFAKSSSVGAYIGLTPRRYQSGEADYTGHISRCGDKLLRTYLYEAAGIILHRVPRWSALKAWGTRLARRIGTRKATVAVARKLSVILHRMLRDSSEFRWSAKEVHAA

SEQ ID NO: 216141 - protein, 336 aa, unidentified
MLYAGLDVHKRFSQAVVCRESGNVLKEGRVPTTKEDISKFFSEFKEELKIAIEAGINSEYIFDFLEEQGYNMTLSHPLKTRMIAESKVKTDKIDANILSYLLRTNLLPTSYMPPKNIREIRQLVRQRIFLGRFNAKLKNRIHAELIRRGIRYERKRIIFTSNGKNWLRSLNIPPMESYLIILETIEDQIKKHNKKINQEGRKYEEVKLLTSIPGIGIYSALVIFSEIGDIRRFNTEEKLFSYSGLIPSVNQSGNHRYYGRITKQGSKNIRWILTEVVRVHLNWTRANNVETKLLKYYLRLRKKGKPENKTVIATARKLLQIIYWMLKNKTEYCVKG

SEQ ID NO: 216142 - protein, 353 aa, unidentified
MYYSGIDLHKDMSVITTINENGVILSQSKVPNHEAPIITYFNQVSPLGAEHKAVVESTANWYWLSDLLIGQGIDLTLAHAKYLKAISYAKVKTDKVDSHTLATLLRLDMVPEAHQISQNLRPIRDLMRARLSLVVKKTSCRNSMHRLLAKYNLALPRYPKPSDFTSLRSKLLPEPRLQLSILEEQLQLIISQIKTLEQNIQPKLIPNPDIQRLLYIPGIGKILAFTIYLEVDGIERFTTVNRFFSYCRLVPGANNSNRTIKHKTSKDGNKYLKMAFMEASVRAVQYFKEIKSFHQSKARKKHKNIAKALVAQELARITHHVLKTQTDFNHMFRGVPLSRHKTTKWPRLASPDA

SEQ ID NO: 216143 - protein, 325 aa, unidentified
MQGKEASEQETRKCSAGIDVSKSWLDAHIRPAKESLRVANTAEGIRRLKRWLLRHKVTLVVVEATGKWHRDVYRSLSASQIAVAVVDPYRVRMFAKAHGIFAKTDRLDAEVLAMFAEMMAPSCRAPMPQALEALQELVTARDSAVAEHISLKNQLSTAEGSFLRRQLTKRIAQLAAHIKAIEKECMTQIKADEGLVRRFDILTSIPGVGGVVATTLIACLCELGSLTNKQIGALAGLAPVADDSGERQGARVIWGGRAAVRRMLYLAALSAAQHSSDMKAFYSRLLANGKAHKAALIAVARKIVLLANTLIAQNRAWLPITPKNA

SEQ ID NO: 216144 - protein, 457 aa, unidentified
MTVNASPTRTTAGPGVVRVSVGIDAAITAKHHVSVRETNADGSVSMHRFVVPPTLTGLSQLSRRLARYPGVVAVAEPTSMTWLPLALSLSSGGGRLALVGTRHSARLRGAISGKNKSDVIDADVLARADEVFDLPRLVLPSPAELALRRAVTRRASAVIDANRCWRRLVSLARWAFPDVWTAFAGSLATAKAVLGRWPHLDQLACARRASLTAVVAEHTRSVADVPDRVEQIRSAARDWAQFWAGRLDLDALAWEVSEHLTDLAAGNDRVDRAAEQATMYWERLYGDDALLVSLPGMGPVTAPAVRAFLGDGSRFDTAKAVANYVGITPSNWSSGTVNQPSRAITKEGPAALRLAFYLAGNAARRTDPQLAALYHRLMTRAGHCHSQATIAVARKLAERTWTVLTRGTPYRLQDPDGAPITSRAAKVLIAQQFTVPNEVRERARAHTAATHRSKLTR

SEQ ID NO: 216145 - protein, 320 aa, unidentified
MMTQNDLVVVGIDVAKDKVDACIRRFKLRQTFPNNPQGRRKLIVWLRKYQVGKAVMEASGGYEREWRNVLHNAGIEVRIVDPRRVRNFALSAGRLAKNDPIDAEMIGWFAETFSQAPGQIPDAAREELAGLAKARKALMDVKIRLQAQNEHAAPEPARKAHARILKSLAAEIDKLEIAISAKVKATPEFAERAEIIQSVPGLAQTTSAILIAGMPELGQVSDEVAAALVGLAPYDDDSGKRRGERHIKGGRRWVRNALYMPCLGAATQNNPVLRVFYQRLIAKGKEPKVAIVACMRKLIIILNTMLARRQKWNPGAHAIA

SEQ ID NO: 216146 - protein, 319 aa, unidentified
MSQSVNLAYIGIDVSKEHLDVYVLEHDKHFQFTQTEQGLSGLVKTVKSFNPALVTMESTGGLENMAASLMASENIPVAIVNPRQIRDFAKASGILAKTDEIDARVIALFAKAIKPNLSPVPDETLNHLKDMVARRRQLVYMLGQEKNRLFAAKGLTAMSINKHIAWLERELDRLDKDINDFIGSSPLYKEKVEISMSMPGCGPILSSSLIAFLPELGKLNNKKIAVMAGLAPLNRDSGKMRGRRFIRGGRKNIRSVLYMAALSGIRFNPVIRAFYQSLIARGKPKKVAITACMRKILVTLNAMARTRSEWSLREQLVKA

SEQ ID NO: 216147 - protein, 463 aa, unidentified
MPILGIDLAVTAQHRAILADERGHFISPLLKFRTCEADLDRVYAIARKAMAPDEPLVVVLEATDIVWYPPTAYFLRRGATVHVVNPRMAADLARFYKRHAKSDRLSAKVLARLPVVSPDSLYPYVLPGADHLALQRGCKELERLTTAASAIKNRLQSVDHLGWPDLKRRVFPDPFSPAARWFRNHVYDPRQVLEAGTSGLRQAWQAADGLYDGDEDWIEPLVTLAKEMLTLYGTQGDYLDYAALAAAVQREQRRLADLEAEAHFVRLKVTRPLYRRLHPSRNLETLYGVGQDGAAVYTAFIHHPGRFPNNRAYRGWHGLVPRSSQSGERESKGLSISQAGPDPVKKYGFLGAETARQWDPQIAAIYHDQMVNKGKHHTQAVCACATHLLDRVRIILLEDRPYELRDVDGTPVTHQQARAIIAERYAVPDEVRQRNNHRARRERAKRRAERKEERESRSRGVRG

SEQ ID NO: 216148 - protein, 397 aa, unidentified
MYIVGIDIAKRKHEAAVIDGEGSVIIKPFSFTNNCSGYNRLLAMLTKAKLPLDEFSFAMEATGHYWLALFTRLQKEGFRVQVINPVQTNSIRNFYIRQAKTDPRDALLIAEVIRFGHFSESTLHPENIYELRELCRGRHAIVSMQADVKRKVVALLDQVFPEYETAFTNLFGDTSMAILQTCPTPKELSEMPLEELCHLIEVSSHKRFRMAKAQELQALARNSFGFAMAGDVFSTMIRLYAKHLDFLKQQVREMDRKIAEIMETLDTPITTITGIGPTLGAYILSEIGDISRFSSAAKLAAYAGIDPTMRQSGEYNGVRNRMSKRGSPYLRHAIWMAASSAVLHDPALKLYFQKKRDEGKPYMASVGHACRKMVSIIYAVMRDNKAYTPYIPNEISA

SEQ ID NO: 216149 - protein, 358 aa, unidentified
MKILGCDLHAKQQTIAMVDTETGEFTEKTLNHEGNEVREFYAALEGRVVVGIEATGAMQWFLELLEELGIVCRVGHPAKIRAAETRKQKHDRRDARLMLDLLMREDGFPEIWMPSSEQRDLRTLLRDRHQWGKIRTRVQNTLQAMALNHALRRGRGLWTATGQKALQALSLAGYTSQRRDELLRLYVQLQQRIQELDGQVEKQVQQRPQALRLLTHPGVGPVTALATEVFLGDPNRFANGKNVASYIGMIPCEHTSGKRQRLGKLTKEGNSLLRYLWTEATIHAVRKDPELKRFYRRKLIQKGMGKARIAAAHKLGIRLWIMLRDQIDYKEFCRRGQQRQCGEAHAGMPNYNSGPALQ

SEQ ID NO: 216150 - protein, 391 aa, unidentified
MVCVGIDVAKDKHDCCILDSDGTIRADCITIPNNMDGFKQLLQTIRDCTKKSDKIKVGLEATGHYSYNILGFLLDNDLAVYVMNPLHTNLYRKSLSLRKTKTDRVDARTIATMLLSDVDLKSYTDIAYHNEELKSLTRYRFDKVQECAKLKQSVSRLATILFPELEGLVSSIHGTSIYALLGEYPGAKQISEVHLTKLTNLLTTASKGRYGKEKAIQIREAARASIGSVMPAKSLELKHTIKLIQELASEINEIEDSIQKIIDELNPPILSIPGMGVNSAAVILAEIGDFSNFSSPDKILAYAGCSPSTYQSGKLTNCYAHMEKRGSRYLRHALYNATKYVCYWNPVFAEYLAKKRAEGKHYNVALSHAMKKLVRLIYALQKSGKAYLAAA

SEQ ID NO: 216151 - protein, 352 aa, unidentified
MATTAQSAIAVIGVDIGKNSFHVVGLDGRGAIVLRQKWSRGQVEARFANMSPCLIGMEACVGAHHLSRKLKALGHDARLMPARYVRPYSKGQKNDFRDAEAIAEAVQRPTMKFVATKTADQLDLQALHRVRERLVSQRTGFINQIRAFLLERGIAVRQGQRFLRLELPRILATPPDVLSPRMVRVIEGLASDWHRLDERIEGLSSEIEELARRDAGCERLMSVPGIGPIISSAMVAAIGTGDSFSKGRDFAAWLGLVPRQISTGDRTILGKISKRGNRYLRVLFVQAAWVVLVKVKPNRWQGHGLKAWIEAAKRRMHHNVLAIALANKLARIAWSVLAHGRAFEANKLQATA

SEQ ID NO: 216152 - protein, 410 aa, unidentified
MEVLHLRCCGLDVHKETVVACVRLVIHGKPVKEVRTFSTTTAGLIELSEWLTETKCTHVAMEATGVYWKPVWHILADDGFQLVLANAAHIKNVPGRKSDVKDSDWISDLLAHGLIRPSFVPDGPTQEMRTFLRTRKQFVHEKGSHILRIQKTLEDANIKLDSVITDIIGVSGRKMIEALIAGERDPAKLASFADRRLKASQQTLRQVLRGRVTAQHRFLLRLHLDQIDALDAAIARIDREVEASIAPFRTAVEQVRTVPGIKSLAAQTILSEIGIDMSRFPSSGHLISWACICPRSDESAGKRRSTRIRKGSPWLKTTLVQCAWAATRKKGSYLQAQYYRLRARRGPKKAIVAVAASILTAIYHMLKDGTMYQDLGPNHFDARAKERQKNRLIKRLADLGYAVELAPLPN

SEQ ID NO: 216153 - protein, 345 aa, unidentified
MKILALDLGNYKSVACIYETSSLSHRFTKVVTTPKAIHDLLVEEEPDRVVIEICPLAGWVSDLVRALGIELQVASTTHDAWRWKNVKRKNDRQDGLKLAQLSALGQLTLVHVPEQGVRQWRALINYRQRLVSRRTKIQNHIRALLWRQAVAMGSGHRGWTRAGIAQLEGLARPLNEVEREELWRGELGLELDGLKALAEPLRQVEAKLDELGVADKRVQLLRTIPGVGPRGAEALAALIDKAQRFKRGKELGAYLGLVPKQIQSGESNRLGRITRQGNRLLRSLLVEISWSGLRYNSWMRSVYEQVRRGSKARKKIAIIAVARRLLIRCWAMLRDGTTWRPASST

SEQ ID NO: 216154 - protein, 370 aa, unidentified
MAIRPNAAVFRIGGTAAFGLGRSGIVHGFFIWPEWLIELRVRFHKEGSTKMFETSTKAARHQCAGIDVGKAHLDVALAGVARVARFGNTAEGHAGLIGFLRQHGVSRVGLEATGGYEAAPAAALRAQGVSVHVFQPVQVRAYAAFKLQHAKTDRIDARLIACCTAELDALKPPPDPRLAGLCALLTLIEQMGEDIIRAKTRAEHAADPQIRAYHATDIKRLRAAVRDAYRRLSAEVEAHADLKARLALIESIDGIGVRTALALLIRMPELGALSREQAAALAGLAPVARESGAFKGERHVHGGRRRARTALFACAQAAIKWNAALGAFYTTLVKAGKHHRAAITACARKLIVFANTVLKRQTPWLSQLTT

SEQ ID NO: 216155 - protein, 362 aa, unidentified
MRIIGCDLHARQQTLAMLDTTTGEVVEVTLKHEGDNVREFYSSLPRPVRVGIEATGSMQWFLNLMEELGIECLVGHPAQIRAAAPRKQKNDRRDAELILKMLVEGRFPAIWLPSKELQDLRALLRHRHQWVRMRTRIQNALQSIALANGLRRGPSLWSQVGQHTIASLPLAPHTAYRRSELQAMYEKFEAEIEKLNQRVEEQACKRPGARLLMSHPGVGPITALATEVFLGDPARFADSKALASYVGMIPREYSSGGRQRLGGLSKQGNPLLRFLWGEAGAHAARKDPELQRFYRRKLVQKGLGKASVAVARKLGIRLWIMLRDQIEYNEFCRRGQKQQKSSDACVGMPETRYGAKSHRPID

SEQ ID NO: 216156 - protein, 373 aa, unidentified
MNHHSGAYVGIDTSKLRNAVAVAEEGRGGEVRYLGEIDTTEAATRKLVTKLAAKYRQLTFCYEAGPTGYGLYRLIRKLGHDCIVAAPSLIPKKPGDRVKTNRRDAVGLAKVLRAGELTAVWVPDERHEAMRDLSRAREAARKDLKGKRQQVSSFMLRLGRHFPGKKTWGPAHMNWLMLQKLEHREQRIVLEELLGAVRQESERVERLEQAIRDAVPEWSLAEVVTALQAMRGIDLVAAVTVLAEIGDLSRFQNPRQLMGYLGLVPSESSTGDTVNRGGITKAGNGRARRILVESAWSYRYPPRVSREKQNKVAAAPRAVREIAWKAQMRLCGRFRSLTRKGKRPNIIATAIARELAAFIWAINREVMAHATAS

SEQ ID NO: 216157 - protein, 349 aa, unidentified
MVTLGVDAHKRTHTIVAVDENGAEVGQRTVAATSAGHLEGLRWASQWPERRWAIEDCRHLSRRLTTELLVAGEAVLRVPTKLMAAARRGARTRGKSDPIDALAAARAALREPDLPVAQLDGPARDLRLLVDHREDLVAERTRIENRLRWHLHELQPGEEPPTRSLNRHATLRALEATLAGQPGVVARLARELVVRCRDLTVAINALEREICERVSGMAPRVLALLGCGALSAAKIVGEVGRISRFRSRNAFAMHNGTAPIPVWSGNHERFRLNRGGNRQINCALHRIAITQMQRPGPAQDDLTRRRAAGDTKTEAIRALRRRISDEIYRRLRADEAAANTQLRDFLAAA

SEQ ID NO: 216158 - protein, 405 aa, unidentified
MRFIGLDVHLDFCEVAICEAGRVRSGGRVPTSPQGLELLANSLAPDDSVALEATGNALAIARSLEPHVARVVVATRTELRAITEAKVKTDDRDARTLARLLAAGLLRGCWLPDEPTRALRRRLARRAQLVRQRTRAKNEVHAVLMRTLKGRPPMSDLFGRGGRVWLGELELPADERETVDGCLRQIDFLDAEIAILERGIAEHALGSDAIKRLMTVPGVSLMTAATFIAAVGDVRRFRDPGKLVSYLGLDPKVRQSGSGPARHGRISKQGASEVRHMLAEAAHVAVNTAGPMRAFYERVRVRRGRQIAIVAVARKLAVLFWHLLTSEQDYAFQRPSLTRKKLRAVELRAGATPTPGRRDLATKNTYSQREHRERERELSEHAEIAYRRLVTDWKATAPNKDAAVT

SEQ ID NO: 216159 - protein, 392 aa, unidentified
MCKVIMIGCDLHDATMVLKVADGPGASVRKGFATANRTGLIGWLKEFAAARGAERIVFAYEASGQGFGLYDDLTDAGIECHVLAPTHLPHNVHSRKNKTDEKDAEMILDEVRAYVLAGRALPSVWVPDHQIRDDREVVRLRLAVAEQRTRIKNQIRNLAKRWQLAFPDWFTATGDWSKKSLQWLRDVAAGETGTVREGARVALGSLVEQYQSLSEQIKSLDKAIGQLSRIPRYARIFRKLKTLSGVGTLTAMVFLTEMGDLGRFANRRQLAAYLGLAPSAFESGTRDDRKGHITKQGPARVRHVLCQAAWAALRLSPEWRAKYDRIKRGSKSRGKIAIVAIMRQLGVAMWQTARSPELDALLDEMDELKASVPAPRKRGRPSRSAVTPAGSG

SEQ ID NO: 216160 - protein, 346 aa, unidentified
MEYIAMDVHKKYTWARVENEKGDKLYECKLSHSHGTIENFVKRWTGGSAVAVETVGNWYWVVDEIEAGGGKPQLVNARLAKLMMGSVNKSDKLDAKGMNRLQRTGTLPTVWIPPSSVRDARELPRTRMVLSRQRTQLKNRVHATLGKYGYTVEGASDAFGKKGRQIVAELMAKLPPHTDQALRRVLDQLDHVCENLKWIEEKMIEVFVPCPETTWLKTLPGVGDILAVVIWTEIGTIERFSRAEQLASYCGLVARENSSGGKIRFGAVRRDVNVYLKWAFVEAANSSVLNRERCGYDHISRLYERIKTRRGHGKAKVAVARHLSEASFWMLKKGAPYREPMSSTQR

SEQ ID NO: 216161 - protein, 384 aa, unidentified
MLLVGDDWAEDHHDVEIMDPAGRTLAKARLPEGIAGLARLHALIAGQRGDDAEQVEVRIGIETDRGPWVAALTAAGYTVYPVNPLQAARYRDRHSVSGAKSDAADAHTLADMVRTDAHQLRPIAGDSPDADAVKVVARAHKTLIWERTRQTQRLRHALREYFPAALDAFDDLDAADTLELLAKAPDPTAAVRLTRAQISAALRRARRRHVDTKTTAIRAALRTPQLGRPAVVVAAYAATTRAAVAVLATLNAQITALEAQVGAHFRRHPDAEIILSQPGMGPVLGARVLGEFGDAPGRYADAKARKNSAGTSPITRASGRRKTVHARHVHNDRLVDALMLQPSPRCRPHPGRVPTTTASVPAASTTIPRCANSPTGSSASCTVA

SEQ ID NO: 216162 - protein, 316 aa, unidentified
MTSENLYVGIDVSKRTLEVAVRPTDEQWTVCNNDADIASLVVRLRELQPVLVVLEATGGYEVPATLALLVAGLPLAVINPRHARDFAKATGTLAKTDKIDARVLAHFAQAVRPTPRPVPDEEQRNLADLLARRRQVIEMLTAEKNRLKLAPKPLREYISAHVDWLQRHLNELDEELGKRIRQSPVWREQDEILQSTPGVGRVLSFTLLAELPELGTLNRKQIAALVGVAPLNRDSGKIRGKRSVWGGRAQVRSALYMATLSATRYNPVIRDFYQRLCKAGKLRKVALTACMHKLLIILNAMLKNRTAWRHNYANSI

SEQ ID NO: 216163 - protein, 395 aa, unidentified
MIFVGIDIAKNTHWASAMNSDGEILLEPFSFQNNNEGFQKFISKLSNFDKQKMLIGLESTAHYGENIISYLFNLDYKIGIINPIQTSNLRKSNIRKTKNDKVDTFIIIKSLTLNNYNLVTTRDINNIKLKGLSRSRHNLIVMRSRSKIQLASFIDQLFPELNKFFKGNLHLNVSYQLLKDYSSPKDISSLHLTKLYNILHDNSHGRYNKEDAIRLRELAKNSVGIDNPTLSLQIKQAILQIELYSEQIEEVEKLSKQILDEMKSKLLTIPGMSYNQATAIHGFIGDIRRFNKSCQLLAYAGLDPSIYQSGNFEARSTRMSKRGNSLLRYHLVYAAHNLVLHNITFKKYYDLKRSQGKTHYCALGHCAHKLVRIIFKMLKSNVCLLYTSPSPRDCS

SEQ ID NO: 216164 - protein, 463 aa, unidentified
MQHKREMQKKRTPRSLLKTINSNVAGIDCGSAEHYVAVPPDRDPTAVRSFKTFTHDLYRLADWLSSSGVTSVAMESTGVYWIPIYEILEARGFEVVLVNARHVKNVPGRKSDVSDCEWLRELHSVGLLRGSFRPVAAIASLRSYLRHRETLVQSAATLIQRMQKALVQMNLQLHLVVSDITGVTGLKILRDIVAGRTNPRLLAKHRDHRCHASEAEIAAALTGNYLPEHLFALRQNLELFDAIQLQIEACDSAIEAQLFLMATRSTPKAPLPPPRNLRKPTRNEPRFEIRPLLHQIAGGVDLSQIDAIRPYTALRLISEIGTDMNRWPTEKHFTSWLTLAPQNKVSGGRLLSSRTQPSANRAAAVLRMAAMSLGRTQTALGAYFRRLAYRVGKAKAVTATARKLAILVYRTLKDGLVYKDPGAAAYNAQDRERLVRRLTQRAADLGFSLLDTKSGEVLQSSVS

SEQ ID NO: 216165 - protein, 358 aa, unidentified
MQKYNISFKGQRIFIGIDVHKKNWDVAITPEIGIIKRHSQKASAKELFDFLKKHYPDGDYLAVYESGFSGFSTYYALKEVGVNCIVIHAADVPTTQYEEVMKTDRLDSIKLVKSLKAGLLKGIYIREKENIDDRSVIRIRKTIQKELSRYRIRVRHMLHSNGVPLPDRFEKPGSLWSRAFIKWLKEDVKLLSTSRNSLDLLIRQVETIRITLLEATNMMRNMSQTERYKRKFDLLTTIPGIGVTVAMCILTEVYDVRRFHNEREFAAYLGLIPTCHSSGDKVVHGEMTFRGNKQMGPMIIEAAWTTIYRDPGLGSLYLRYKERMKPQEAIVRIARKLSNVIFAILKNETEYIPYQTGK

SEQ ID NO: 216166 - protein, 338 aa, unidentified
MKTYAGIDLHSSNNYIGVIDAKDNRLYSKRHHNLMPDILKVLGKFKATLQGVVVESTYNWYWLVDGLMDHGYRVHLANPSAIKTYEGLKHTDDTWDSFWLAHLLRLGILPQGYIYPKEQRPIRDLLRRRQLYVRHKTSHILSLQSMITRNRGLNFDGSQIQRFRDDFVKKMFDCAYLVFTAQNQLATIRFLDRQIKEIEAVVRPQIQLKPEFEKLVTIPGIGDILGLTIMSEVGDIKRFAKVGHYSSYCRCVSSKKISNGKKKGENNKKNGNRYLGWAYVEAANFCKRHCPGARRFYQRKLAKTNKIVAIKALSNKLAKASYYIIRDQVPFDANKLFG

SEQ ID NO: 216167 - protein, 355 aa, unidentified
MSSEKYIGLDVHQATISVAVMDSQGKVVMESILETKASRLLEFFAGLRGSLFVTFEEGTWAAWLYDLLKPHVTEVLVCNPRKIPLLKQGNKSDKIDARKLAERLRLHDLKPVHHGETGIRMLRELARSYLTIVKDLSRVMNRLKALYRSWAIPCAGRDVYYTRHRSQWLEKIPEAGTRRRAEQLYQQLDMLQHLRQQARRELLAESRQHAITAKLRQIPSLGPIRSALAVALIQTPHRFRSKRQLWTYSGLGLETRDSGEYHFVQGQVRRRKKQATIRGLNKDYNHDLKGLFKGAATRASVKPGPFQEFYQRSLAKGIKPTMVRLTLARKIAAITLTLWKKGEDFDIAKLKSQAA

SEQ ID NO: 216168 - protein, 411 aa, unidentified
MDVLYERCAGIDVHKKMVVVCLITLDATGTPTKETRTYGTMTADLLEMMDWLVDAGCTHVAMESTGVFWKPLYNLMEGTLEVLVVNAAHMKNVPGRKTDVKDAEWIADLLRLGLLRPSFIPDRPQRELRELTRYRTSLLQERSAEVNRLQKTLEGANIKLSSVATDIMGKSGRDMLAALVAGRTDAAALAQLARGKMREKLPQLEKALHGQFAAHQRFLVAQQLAHIDGLDDIIDRVSAEIAERVRPFEQEIEQVDTVTGIGRRTAEVLVAEVGTNLTRFPTHRHLTSWAGLCPGNNESAGKRHGGKTRKGSPWLRAALIEAAKAAGRSKKTYLGAQYRRIAARRGAKRAAVAVAHSILVIVYHILTRHEPYRDLGVTYFDERDRQAVERRLVKRLQSLGYEASLHPLTAA

SEQ ID NO: 216169 - protein, 354 aa, unidentified
MSQKFESAIAVIGIDIGKNSFHVVGHDERGAIVLRQKWSPGQIEARFANMPPCLVGMEACVGAHHLSRKLNSLGHNARLMPAKYVRPYSKGQKNDFRDAEAIAEAVQRPTMKFVATKTADQLDLQALHRVRERLVSQRTGIINQIRAFLLERGIAVRQGLRFLRAELPHILTTPPDVLSPRMVRVIEDLAGDWRRLDERVEGMSNEIEAIARQDAGCERLMSVPGIGPIISSAMVAAIGAGDVFTKGRDFAAWLGLVPKQISTGDRTILGKISRRGNRYLRVLFVQAAWVVLIKPQIWERHGLKPWIEAAKKRLHHNVLAIALANKLARIAWSVLAHGRAFEAQKTDQAANQSA

SEQ ID NO: 216170 - protein, 346 aa, unidentified
MEHYVGLDVSLKLTSICIVDRTGKVEREGVVASDPEAIATFIKLHAPHVVRIGLETGATSTWLWTELNKMGLPVICIDARHAKAALKMQINKSDRNDAVGIARIMQCGWYKEVCVKDLDSHATKALLVSRALLVKIKRDIENQIRGLLKNLGLVIGRAKMNMFAVRAAQLAEDRSELLAAVDPLLKAREAVEQQILDLDRKVLRLARNNAQVRRFMTAPGIGPVTALCFLATIDDPARFKRSRSVGAYAGLTTRRYASGEIDWTGRISKCGDKMLRSYLYEAANVLLTRVAKWSALKAWGVKLAKRSGLRKAKVAVARKLAVILHRMWIEGTEFKWSSKEAADQPA

SEQ ID NO: 216171 - protein, 361 aa, unidentified
MKSTTIIAFDQHAATTVAAVLLAGHRTPALQTLASDSPTILKFVERLRRDGPISCCYEAGPCGFELQRALSARRIACDVIAPALIPRRAGDRIKTDRRDAGQLAVLYRAGALTAIHIPTEQEEAARDLLRCREDIRADLLRARHRLSKFLLRHGRRFTATKKTWSKRHDAWLRAQTWPVPALEQTHRAYLRAVDEVLARLRDVEADLRALLDLEPLRPRVQRLRCFRGIDDLTALTIAAELGDPRRFATAPSTMAFVGLVPSEHSSGTKRAQGGITKTGNAHLRRVLVESAWHYRHHPFVSATLRARQRGAPAEVVARAWTAQHRLHRRYQRLAARGKPKQHIVTAVARELTGFVWAALTQ

SEQ ID NO: 216172 - protein, 320 aa, unidentified
MTAVGIDVGKAALDVAIFGELKVHRFSNTIAGIRRLIRLLQDREDVRIVVEATGGYEEAVLAACAEAGLWIARVNPRQARHFARAIGQLAKTDNLDARMLAEMVQAFHARLRAHVPLAPWQTELRGWLRRRHQITEAIRRTRQQLAMTLPAIRPLVKKTLPAIRPLVKKTLIALQREQTLVDAAMKQLLQAHATPAMRSSKGLGPMFQASVLALLPELGQLRRQQIAKLVGVAPLNRDSGQSQGKRRIYGGRAEVRVALYMATLSAVRWEPVMKAHYQQLRARGKVAKVALVACMRKLLTIVNARRRDELRGAELAIQNT

SEQ ID NO: 216173 - protein, 336 aa, unidentified
MGIDIAKNKHDVTALNVPGKTVLKPLTFSNNKAGFELLDLSLRQLNQDCLIALENTGHYAFNLLNFLHEQGYKVYTYTPLLIKEFAKSLSLRKTKTNKKDAHGIALKLLSDPNREQFQHDNRQVELKILARHIHRLKKKQSDWKVQYTRCLDIIFPELDKIVEKHSEYTYQLLTCYPNPQKRLEAGFDKLIEIKRLTASKIQDILSVAPRSIGTTSPAREFEIIKHYKRLIDKAETCVNDLMAEFNSVITTVTGIGNRLEAVILAEIRNIHAFDNPAQLQAFAGLDSSIYQSGQIDLAGRMIKRGSPHLRWALIQAAKACPRFSPAFKAYLKTKLE

SEQ ID NO: 216174 - protein, 411 aa, unidentified
MDVFVERCAGLDIGKADLKACVRSPGARRNARRSEVRTFRTTTAGLLQLRDWLAAEAVTLVGMESTGDYWKPVYYVLEDALECWLLNAAHMKRVPGRKTDVSDAQWIAQLIENGLVRPSFVPPEPIRRLRDLTRYRTALTQERTREIQRLHTVLEDAGIKLSCVATDIMGRSGRSMLAALVAGERDEQVLADMALAKLRDKMPALQEALVGHFGDHHARLVSMMLGHIDTLQGDIDTLTEVIDEQIRPFHRTRQLLCTIPGVSERIAEVIIAETGAEMARFPTPGHLTSWAGMCPGNNESAGRHMSGRTRKGNRWLRAALGQAAIGAARTKASYLSARYRRVAARRGKQRAQVAVGATILQAAWHIMAADVAYADLGADYYLTRVPNPQRKIDRLTHELQALGYKVTLTAA

SEQ ID NO: 216175 - protein, 354 aa, unidentified
MKRTTKYVALDVHQAMTVASVREEGGRIIARSILPTEESAILEFFRGMRGSIQVTFEEGTQAQWLYDLLVPVVDRVLVCDRRGEKRHGRKDDQADADELSELLRRGGLRAVYHGSPHRSTLRELTRTYQNVVEDSTRVMLRLKALFRARGIKAPGKRVYHPRDREEWLAKLRDGGARFRAQTLYAQLDVLRELRPKAKAAMVAEARRDPAWAVLGSIPFFGPVRIALILAIMRTPWRFRTKRNLWAYCGLAVVTHSSSDFELVNGQVVRKRRAPMTRGLNRNYNRELKDVFKGAATAATGRPGPLLDYYEGMVARGMREELARVTLTRKLTALTLRLWKKGEHYDPAQLTKQAR

SEQ ID NO: 216176 - protein, 310 aa, unidentified
MIIAPGFVGIDVSKHHLDIFDAAVGIAARRTNTAAAVAELAHDWARRDAFVLFEATGCYDLDLRHALTAAGVRFARVNPARARDFARAAGFLAKTDAVDAEMLAAMAQCLQLPPAKAGLAAREQLAALNRRRDQLVANRQQERTRQRECPDPFSRQSIAAHLVWLDAAIKAIQAQIAAAIAAEPELEHDRRLLSSAPGVGPVTAATLLALMPELGRRSPKQLAALAGLAPFNNDSGTRRGQRSIRGGRKRVRDALYVAAFIAARHAPRFKAFFKTLIDAGKPRKLALIAVARKLLTVLNAILRDRQPFHA

SEQ ID NO: 216177 - protein, 360 aa, unidentified
MEVGQTMADHGVVGGVDTHKDLHVAAVVDELDRVLESRCFATTRHGYQQMLTWMRSFGQLRRIGVEATGTYGAGLLRYMQNAGVEVLEVTTPDTHDRRKRGKNDDLDAQNAAHAAFAGRRTVTPKSRDGMVESLRVLKACRKTAVAARRVALQMIHNTIVCAPDELRETLRRMTRMQLIRTLAGWRPDLTDYRSVVSAYRITLKSLGRRYLELHDEIADLDTMIVAIVDELAPALVARNSIGHGSAAQLLVTAGDNAERLQSEASFAALCGASPVPASSGKTTRHRLNRGGDRAANSALHIIAIGRLRTDPRTKAYIAKRVAEGHSKLEAIRCLKRYIAREVFSLISQRKREINQGRNAA

SEQ ID NO: 216178 - protein, 432 aa, unidentified
MEKIRNNVSGIDIGAKKVFTAVEGQPVISHFTFTEDFLKLRDYLIRHKVESVAMEATGVYWVILYEILEEAGIDVWLVDGRQTKQVPGRKTDVKDCQWIQELHSYGLLNRCLVVEADIKELRSYLRLREDHIRSSSMHINHMQKALTQMNIRLKEVLSQLHGKSGIAIIEAILNGERNRDVLVNLCHVSILKGKKDLVYKSLEGRYTESGLFALKQAYDAYKFYQHQIQQCDARISTVLNRIGKSGQGQNNDQKRKPIRHHKPQVDHLGSNLLNIFEGKDATLISGITDYSWVQLLSEIGNDLGKWPSEKHFTSWLGLSPGQNDSGGKKRRVKKKGRPVAGQIFRTIAQGLINSKNIAIGAFGRRLRARKGASIAIKAMARKLAILYWRIMQKGLDFVEKGIKKYEEQLAAQKLKTVMRLANELNLDISHYH

SEQ ID NO: 216179 - protein, 461 aa, unidentified
MRETLGTGGPEYAAYVALDWADREHAWVLEEAGGGKRESGKLKQTPESIEAWAAGLATRFGGRPIAVGLEQSRGALIYALQAYGHLELYPIHPSTSANYRKAIFPGGRKNDPVDADLLLDLLTRHRDRLRRMRPDHEETRKLQLLTEKRRQLVDEQTSETNRVTDLLKSYFPQALRWLDDLSSPLAVAFLQRWPTLQQVQAEEADCVRKFFYEHGSRSKERIELRLKEIQEARPLIEDRAIIEPAILMVQALLEVIAALRRGIKTLQDACAAVFASHPDAEIFASFPGAGPVLAPRLLAAFGSQRDRWENVVEFQSYTGIPPITEGSGKSLDIHFRWRCAKFLRQSFHEFAEQSIQQSEWAGAFFHHQRDVNHLDHQAAVRSLAYKWIRIMYCCWKKRTPYQESFHQERLLKRPRSSENPTPVAAVQKKSGAPTNGRPGSNRVHFQFKKVAGFCKLSAATS

SEQ ID NO: 216180 - protein, 345 aa, unidentified
MLHCGADVHSKSTHLVILDSRGKELLSAKVATDKKSLQDAVKPYVKRKLKVVQETGALQAFIRAVFEEVGAEVVTVHAAAMKVITSSKKKTDKRDAFHLAWQSSKDNLPEPVYVPSGYELGLRALVGAQQRARKGRTQVINGVRGQLKSLGITLPPGCLARESGWVSLAGMDLPETLRLIVDLGYKIWLAHTEVLDRIERELEDRTREDPLVALMQTVPYVGPACAVAVRAYLGKLDRFHGRKAVASYAGFCPSQRESGERRGLGRLTKAGPPRLRTVFVQAAHLLIASGFKRYPQWRAWFGRFIYRKMHPHKAVVALAKRLYLLAYQVGRTGMPWRSQCAGNQA

SEQ ID NO: 216181 - protein, 312 aa, unidentified
MSTPLYVGLDVAKAHLDLAVLPTGARARFAHDETGLTALAIYLCPLAPALVVLEATGGYEADVAAALALAGLPVAVVNPRQVRDFAKALGHLAKTDRLDATVLAQFADRLRPEPRPLPDAAHRALTAVVTRRRQLVEMLVAEQNRLPAAHGRIRDDLQRHIHFLQQRLKDVNDELQTTLRASPIWRAKEHLLRSVPGIGPTTAAVLIAELPELGRLSRRQLAALVGVAPFNCDSGTHRGRRTTWGGRAPVRAALYMATLVATRHNPPIRLFYRRLLAAGKPRLIALVAAMRTLLTILNAIIKADRPWRLETA

SEQ ID NO: 216182 - protein, 345 aa, unidentified
MIIGCDFHPSWQQIACLDTETGELGEQKLVHAAGDAKSFYQQLAAPALIGMEATGNSQWFIELVQDLGHEIWIGDAAQIRASYVRKQKTDKRDAAHILKLVVEGRFPRLWTPDREQRDLRQLVLHRHKLVEIRSRVKNELQHLALNKGMQRQAKLWSQAGQKLLRELPLKPWAACRREDLLRLLAMLHEQIGKLDQAVQQAADQHPQAQLLMTQPGVGPNTALAYVLTIGDVSRFPRGKQVASYLGLIPREESSGGRQKLGAITKQGNRLLRSLLVEAAQIAVRFDPGFRKQYLHRCHQKPKGVAKVAAARKLAVRLYWMLRTQKPYPEIVRIESRPRVPLVGAS

SEQ ID NO: 216183 - protein, 339 aa, unidentified
MSEHNLISVDLAKNVFQLCAMTDRMKIVFNRQLKRNDLARFMATQKPVDVVMEACYSSHYWGRCFAAMGHQVRLLPAQHVAPFVRGNKSDHNDAVAIAEAAHRPNILPVPIKTLEQSDIQSLHRMRERYVTHRTGLINQTRGLLSEYGIVAPQGHRAFTRLLREVSQPEYEDLSVCLKEQLSSIADEYHYQSKRIDEITRTLSDIAHHHPLCRILLSIPGIGPINATAIYSAIGNGSQFKNGREFAVWLGLTPKQASSGDKMSSGGITKRGNRYLRKQLVHGARAVLSRSKNKSDRLSRWTQQLVARRGVPKASVALAARIARLSWVLLQKQEPYQPKD

SEQ ID NO: 216184 - protein, 352 aa, unidentified
MKENTTLTAGIDISDRTSRICILDEQGNVLEESKIRSTREAVTQYFASRESMLIALEVGTHSPWMSHLLGELGHEVVVANPRKLRLIYENEAKRDEVDAEMIARVARMDRKLLCPVVHRGEEAQAAMALIRSRDALVRARTMLVNHTRGTVKSTGERLRTCSAASFHRLEGELPLQLISALQPLMVVIAELGKRIREIESEIERVSRESFPETALMRDVHGVGAVTALAFTLTIEDPTRFPQTRALGAYLGLVPRRDQSGERDPQLSVTKAGNNYLRRLLVSAAHRILGPFGPDSDLRRFGLKKAAGGGKRAKKRAVIAVSRKLAVLLLTMWKNGEVYEPLRQAGKCDASAA

SEQ ID NO: 216185 - protein, 378 aa, unidentified
MDVIYPRCAGLDVHAETIVACALWEEDGHIQKDIQTFSTFSKGLGDLLEWLEEHGVTHVAMESTGVYWKPVFAFLEGYVDLTLANPQRIKNVPGRKTDVSDAEWIAKLLRHGLVEKSFVPPADIRELRDFTRLRKKWVGQLTSEKNRIQKVLESSNVKLGSVLSDLFGVSGKDILARLLEKGYVDKDELDQCLRGRLKKKKQAVYDSLLGTLTEHELRLLRLLWKHVEELEQLIEEVDQHIDRLLEPYREEVNLLMTMPGVKKQTAAVIIAEMGTDMSVFETPERAASWTGLSPGNHESAGKRKSTRTTKGNPHLRSALCEAAWSAARSKTHPLSRKFWSLAARCGKKKALIAIARRMLVIIFCMISRKEPFRQPQLI

SEQ ID NO: 216186 - protein, 332 aa, unidentified
MKKVQFFVGIDVSKATLDVFIHGLNLYFVVENSLQGFVCLLEKVMTGTKCKKEDMFFCFENTGKYSRMLSVFLQSENILFTMESALQIKKSMGITRGKNDRIDAKRIAHYAYEKREGLVPTILPGAKIDQIRSLISLREKLLKHRTAYKNGISDLHDCYEDGESELIKEVQLRLIKNLNEEIEKVEQKIESIIESDESISRNYKLILSIRGVGRILGFYLIGYTANFTSFANARAFACFAGIAPFSYSSGTVKGTPRVHPFANKMLKALLNLAAMSAIKYKGEYLQYFNKRVNELGKNKMSTLNIIRNKIVYRVFAVVQRQTPYVDLLKFAA

SEQ ID NO: 216187 - protein, 347 aa, unidentified
MRIVPHSCAVYGVDLGKTTFHIAGADQHGRPTLRIKLRRDALLQFFATASPARVGMEACPGSHWLARKLIAFGHDVKLIPAQFVKPYLKSNKNDTLDAEAIAEAVTRPTMRFVPVKRHEQLDMQALHRVRAQFVHQRTALVSQFRCFLLEYGIAIHTGIGMFRRDATRILADDSNDLTPTMRQLLTDMWSDFLRVDERVSALSGQIEASAKHDDVVQRLTTIPGIGPLGASALCAAIGNGKQFRSGRDLAAWIGLVPRQHTTGGKPTLLGISKRGNTYLRRLLVLGAQSCLMHLDRSRDRLGRWLDTLESRMHHNKVVIALANKLARVAWVVLTRPGALYEKMDPRF

SEQ ID NO: 216188 - protein, 341 aa, unidentified
MSTVTLIGIDLGKHSFHLHGQDSAGRMVFRKKCSRQQVFTLLGNSPCSTVVMEACAGAHWMARRIQALGHQPKLISPQFVRPFVQGNKNDFADAQAICEAASRPSMRFVCVRNEAQQTVSALHRVRESLVRERTGVINQVHAFLLEFGISLPRGQAILRRLPAMLAEHELPPRLAALLERLQAHFKYLDEQIGEIERDLCQQLREDERSQRLLEIPGIGPITASVLMTELGDAQQFGSARQFAASVGLVPRQYSTGGTPKLLGISKRGDKNLRRLLVQGARAIMQRVERRTDRLGVWVRELLARRHSNVVACALANKLARIAWAILANGTNYRSEQAVSAT

SEQ ID NO: 216189 - protein, 349 aa, unidentified
MNSVAQFFIGVDLHKTVIQICVVDRVGEIVEEHRHLAHDLVEGLKVIGSLVQYRDTGRIAVEAIGVNRWFVNNLLERGFDVVVCDPVKLNLKMLGSKTDRKDAQEIARRLLLGDIDRNATTYYPSDDEYGKRKVIRTRHALMQTRQGVVNQIRSLLNAYKITGFGESLLTAKSIRKLLFIDWPVEELEVVIRALVRAMTCLSQSIEELSSQVKWIGQESLVQAVQANLPSVGPVTASVLVYELGDVTRFKRTRAVASYAGLVPRVTQSADTAHHGRLTKRGNRELRHVLGEWAVRLMAHDEQVKQWAEPRLRRRHKNKVRMELARRLLIGTYKLLRTGEVFSMERCLGI

SEQ ID NO: 216190 - protein, 431 aa, unidentified
MLKINPLSTLYVGIDVSSKSNYVCALDFFKNKYINSSFANNQPGAEELALKILECLKEHPDITTVVAALESTSVYSIHIANYLSSCEELMRFKPYVFVLNPKCTANYRKSYIGLGKSDPIDAFVIADYARAGNIESEPWRGSQFLALKRLTRHRLHLVECMTREKTYLVSNLYLKFSELQMLEGDDQPFCDIYGATSSSVLMEYLSPEEILDSSEEDLIAFLAEKSRNRIKDISKTADLLKKAARDSYRLDKALYEPLNVSIASSFNCIETFKREIKVIDNAIEKEIKGLNPNAFIILQSIDGIGPVFAGGIIAEIGDITAFHSSDALAKYAGLTWKSNQSGDFDGEDTPMIKAGNRYLRYYLGEAANSMRKHNVEYGTYYRKKYNEVPKHQHKRALALTSRKFVRLVYGLLARNQLYSGVSLDTSIKDSN

SEQ ID NO: 216191 - protein, 311 aa, unidentified
MTLHPNALGVDIAMQFLDVFCPRSARHWRIANTPGTIDQLIARHADAFFVFEATSGCDDELRLRLTQAGVPFARVNPRRAREFARAAGFLAKTDRVDARVLAEMGRRLEIEPTVEASPARRELSELVGRRDQLVEEIVREKNRLRQVRCRCVQRDIKDHIRTLERRRDKLEAAIAAHVEAHRELAETAAHLRQIPGVGPTVAATILAELPELGGRDRRAIAALAGLAPLANDSGRHNGKRRIWGGRRKVRRVLFIAAMHASRRCPHWIGMRRRMAEAGKATKTILVAIARKLLIAMNAMLRDGTPYAPAAA

SEQ ID NO: 216192 - protein, 355 aa, unidentified
MDSKKYIGMDVHKESISIAVMNGAGKIVMECVIETKASMILQFIDGLRGDLQVTFEEGTWAAWLYDLLKPHVTRLVVCDPRKNASMKEGNKSDKIDARRLAELLRMNHLSPVYHGEHGLRSLKELVRSYLTITKDLGRVMTRVKAIYRSWAIPCTGKQVYAPRHRDEWLGKIKEPGVRRRAEFYYQQLDALRTLRRQVRRDLLAESKKQPAWKRLCQIPSIGPIRAAVLLGIVQTPHRFRTKRQLWTYSGFGIETRSSADHRSVEGQLKRAKKQVSIRGLNQNCNHDLKNLFKGAAILASNKPGPFQEFYTALLTKGMRPEMARLTLARKIATIALIVWKRGASFDAQHLKPQTA

SEQ ID NO: 216193 - protein, 341 aa, unidentified
MGEVTIIGLDIAKSVFQAHGADAAGSVMFRKKLGRSRLLAFFAGQPHCVVAMEACAGAHHWGRELEVLGHTVKLIPPAYVKPFVKRQKNDEADAEAICEAAQRPTMRFVPVKSREQQASGVVFRARDLLVRQRTQIMNGLRGHLAEFGYVAPKGVMYVERLVAEIEDPDSQLPPAARVSLQVMVRMLAALETEIASLDAEIVRRAKEDPVARRLMTIPGIGPVTASAMVALAPGAEAFRCGRDFSAWLGLTPVQRSSGGKQKLGQITKAGERTLRRLLVIGASAVIKQALIRGAPPGSWLAQMLARKPRMLVAVALANKTARIIWALLAKGGVYRAPALAA

SEQ ID NO: 216194 - protein, 319 aa, unidentified
MNQSAYVGIDVSKRQLDVAIRPTGKVFGVTNDRRGISQLVKRLTKLQPVCIAIEATGGLERELAYALAAKNLPIAVVNPRQVSNFAKSLGRRAKTDAIDAAVLAHFGEVMKPEIRSLPDAAAQELTAFVTRHRQLVEMMTAESNRSEMASNPVRKLINSLLRSLKDQLLLVDREIRKAISASDLWRHKAELLRSVPGVGEVTTATLLAGLPELGELDRRQIAALVGVAPFNRESGIWKGKRMIAGGRALIRSALYMSTVVAVRRNPMLKNFYERLRAKGKPAKQALTACMRKLLVVLNAMLRHQTPWSGPSHLLSSPAS

SEQ ID NO: 216195 - protein, 328 aa, unidentified
MYSIGLDIAKSSIAVHIPKNNLDLEIENNTQALKALFSKLKKLYKKEFDKLVWVFESTGSYSSLIYRFCAQKGIRVFMPNPKQARGFAKAIAQRNKSDKIDARVLAHSIVIAKETEIKVPHIDALVEAFKEMIGYYRLLIKQESQMKNHKESLLAKGNNSTLVKSVDKQMKALKKEQQALLEKMRDMVRKDNVLSQKLDAIASIPGIGELTALILLHLFIRYLHANQRQIVSLAGLDPVMRESGSSIRGRVKISKAGDRIYRGALFMPAMVAVRHNAKLKAYYERLKANGKHTTVAQVAVMRKLLVLAHSLYKSGEMYREDVTNKAHI

SEQ ID NO: 216196 - protein, 333 aa, unidentified
MQFTHILGIDISKDTIDLALSQNKANTNIVNSKFSNNLKGYKALLKWFKNQEVKTDQLLICLENTGIYHRPLTAFLFSEQAFVWVENALEIKWSIGLQRGKNDQIDAQRICLYAFRNQDKAQAYSPKDNSLQNLADLLATRERLVEVRKMLLVPIKELKQVGLEAESKNVEKSCKKTLSGIDKDIEAIEKELENIIAQHKEIDDNYRSVCSVPNVGKITALHLLVATNNFKRFDDAKQLASYCGIAPFEYRSGTSVRGKTKVNHMANKKLKKALHLCAISSLRHTSEMSLYYKRKAEEGKNKMSVINAIRNKLLQRIFACVREKRMYIVKQAA

SEQ ID NO: 216197 - protein, 429 aa, unidentified
MTRISAGVDVSKNRSTVCIMDQDGKFIMRPFLVWHSTEELDFLADTLKRLNGEVRVIMESTSVYQYPIALQLKERGLFISIVNAYEMKQFANIDFRGGKTDKKDSRTIASYGISYWDKLVEWQIPKDTYFNLDLLNRTYMNAKKHRQIILQELQHYIDCAMPGMDKELHSLNLSTKKDFMLDFVEKFWHRDEIVNMTEAEFTEVFTAWAKKKGYRPVEGKAAKIYAIAKSCIPYYPANPTVKTILQCIVDKLSGVNRTLVTIVTQMIEEAKKLPEYQIVREMPGVGDPLAARFFGSAGDIRRFKNSKALVAYAGIDSPPDESGDFSSTHRHITKKGSKVFRDTGYEIMMALRAQKRTWEKVRKNPEVYDYMLKKEAEGKPRKVAKIAALNKFLRIVYARIKELYDNMALAERAKAKTKSKTKAKTKATA

SEQ ID NO: 216198 - protein, 317 aa, unidentified
MKKVRFIGLDVHADTIAVAVAEPGGEVRSLGGIPNRAESIRKLMKKLGPPASLRVCYEAGPTGYVIYWQLTVLGVPCEVVAPTLVPTKAGDRVKTDRRDAEKLARSYRAGDLTAVWVPDGAHEALRDLVRAREAAKKDQLRARHRLGKFLLRHGRRPSTAMTAWTLRHLTWIRQVQFEHPAQEATRLDYLHEVDHAVGRIERLERAIDEAVKTAPPDMRAVIDALQALRGIALVSAVTIVAEVGELSRFARAPQLMGYSGMGAREDSSGPRTRRGGITKTGNAHLRRIAIEAAWAYRHRPAVGGALRKLWVPEILAT

SEQ ID NO: 216199 - protein, 402 aa, unidentified
MNAVGIDVSKGKSMVAIMRPFGEIVSTPFEIKHTSSDINSLVKLIKSIEGESRIVMEHTGRYYEVLAHQLSEANLFVSAINPKLIKDFDNDSLRKVKSDRVDAIKIARYALDKWQNLKQYSVMNELRNQLKTMNRQFGFYMKHKTAMKNNLIGILDQTYPGVNTYFDSPARSDGSQKWVDFASTYWHVDCVRKMSINAFIDHYENWCKRKKYNFSQSKAEEIYGKAKELVPVLPKDDITKLIIKQAVDQLNSASITVESLRTLMNETASKLPEYPVVMAMKGVGTSLGPQLMAEIGDVSRFTHKGAITAFAGVDPGVNESGSYEQKSVPTSKRGSSDLRKTLFQVMDVLIKTHPQDDPVYQFLDKKRAQKKPYYVYMTAGANKFLRIYYGRVKEYLASLPES

SEQ ID NO: 216200 - protein, 338 aa, unidentified
MKVIKQNVGIDVSKKDLAVCLTFLYENLKVAVKGTKKFANNKTGFNEMLKWVERKKDSSLALHFSMEPTGVYHENLAYFLHDMNQFVHIILSNRAKKYAESLDKNSKTDKLDSKALGRMGVERELNLWNPGSPSYRKLKVLTRERSAVLKLRVMIKNQLEAITESAFPNKKSVNRLKRLINELNSQISMIEKDVERTVEKDMELKAKLLKIMTIPGIGFLTALIVIAETDGFALIKSIKQLVSYAGIDVRIRESGKWSGKSKISKSGNIHIRKALYWPAYTSIKYSSTYQTIYERIFERKEISLVAAVAIQRKLLGLIYTLWKNDSVFIDNYEKLKAA

SEQ ID NO: 216201 - protein, 322 aa, unidentified
MSAPILGIDIAKQRVAVALLVEGKVRNRSFKNAPDGFESLALWLRKWGIDQVHACMEATGNYGEALAIYLHGAGHTVSIVNPARIKGFAQSELIRTKTDKVDAGIIARFCLAMKPVSWTPPSPEIRSLRALVRWVDSLTGMLTQEKNRLGSAHESVIPLIKGHINYLDKEIEEVREQIADLIDRDPDLSQKKDLLTSIPGIGTATIPVILAELDNLERFKHVRELVAFIGLAPKERLSGSSIKGKPRLCKTGNARLRKALYMPALVSIQCNPLMIVFYNRLKEKGKNGKVIVCAIMRKLVHLIFGILKSGKKYDPNYKPAFA

SEQ ID NO: 216202 - protein, 535 aa, unidentified
MRRRRREAGARGRIDLRKRTSPIAEQVARVGAGRFGILAVDSAKERFAVLLSDFAGNVLTEMEVVENTAPALQALVERVKALCQSHRLKDLVAGIERTGRLHVPIQQTLRPFWTVELVDPYAVKQLRQAADPGNKTEGTDLPAITRAIRVGLGTREADLPPLWLDWRQVNRAREDDVALRVTLRQHIQERIEALMPGFAHLFGDIWSAPVALALAEHYGSAAKLLEAGTQNILDWLRGNGHPARTDTVARVLAWARTASAPDPGAEVRHRLLIRDFATERFFGGGILAKERDLAAYLVQTPVVLLLAIPGINVVASSGYGAELGPIEHYINPQKITGRAGLYPSRYQSDEVDYPDGPLVGHRNQRLRDAILEVAYCLMTCNGYFKAWADLRRKKGWPHKKTLVALGHTFTRISYRMLAGREVFDHPAARGQDAILTKLYHFAHTHGLTPEAAKDLLLRAAAWLPPELRPEEAKALRQELPRRTPRLGTRNGPQHINTILPYVIEHLASGTPLPEERRQRANPEARVGLLARRSGR

SEQ ID NO: 216203 - protein, 315 aa, unidentified
MSQMVVIAGIDVSKDKLDIHVLPSNQTFVVGRDRRGLTSLVRRLRKAGVEQVALEASGDYERIVIEALEASGFVVHLLNPARVRAFAEAIGILAKTDPIDARLIALYCQHFPDKGLTRRPEQARKLGEFLNMRAMLLKVAGEIRNSLEHVREPGLKALADTLSADIAVKLKDVDGRIAKVIADDGATIRKARIIRSFTGAGPVLTSSLLARVPELGSVTRHAAARLSGIAPTDRQSGRSQRRSSIEGGRDQLRPVLHMAALAAMRSNSIIKAFAQKLSAAGKPKQLVIAACARKMVVILNAMLRDNTEWKYAKAA

SEQ ID NO: 216204 - protein, 312 aa, unidentified
MTKIICGVDISKHHLDAGIWPGGVYRRFGNDAEGIAQLAAFCAEHAVALVAMEATGSYERMAFGLLWEQGLACAIANPRSVRRYAEAMGFLEKTDRIDALLIARFALSKDLKPTPPASKNQCRLKALVVRLRQITSDLTVNKQRRSHIEDETIRAGVDEIILLLTRQSRQLEGEIASLIDDDPLWAALSQAFRSIKGVADRTVARIMAELPEIGTFDNKAIAKIVGLAPLAKDSGKKAGRRLIRGGRSSVRSIIVLIASVAGRYDKSLAEFNRRLTAAGKPKMVIRVALARKLLVRLNAKARDTRAQFANAT

SEQ ID NO: 216205 - protein, 340 aa, unidentified
MEWIGIDLHKTESQICILVEDGGVFERRIKTSSDRFRAVLGCRLPARVLLEASTESEWVARLIEGMGHEVVVADPNFAAMYATRSRKVKTDRRDARTLAEACRLGAYRAAHRTSEKQTHARATLAVRDVLVRTRSRLISVARALLRREGLRLPSGEAESFVSRLETLSISPALLAEIGPIVTLLPAITDEINELDRDIAATARMDPVTARLQTAPAVGPIIATAFAATIDDPHRFRGAHQVQAYLGLVPSEMSSGEKQKRGHITKAGNPRVRWLLVQAAWSIMRSTRRDSTALREWAMAVASRRGKRVAVVALARRLAGVLFAMMRDETAYDPPRLRAVA

SEQ ID NO: 216206 - protein, 316 aa, unidentified
MNKKTQVEINVGIDTSQSQLDVYVRPTGDYFSVENTPEGAKQAARKVRKYRPTRVLIEATGRLELSFVCAAHNAGLPVVVCNAGQVRQFARSAGRLAKTDKLDAQDIAHFGEALQPVLTVIKPDKLRDISDLITVRRQCLDMSTMQKNRLLRMPKKVQPPIQRILKSIQKEIERIDQKLDTLVDAIPQWREQRDLLMSAKGVGKVVAYTLMSELPELGKLNRKEIAALVGVAPMNRDSGSYRGKRRVSGGRSKVRTVLYISMWSAIQYDPKIKATYERLLAAGKPKKVALVACMRKQLTILNTMMKNGTHWDEKLA

SEQ ID NO: 216207 - protein, 323 aa, unidentified
MNKDIKYFGIDISHLVFDVTDSDGNYYQFKNKVSGFKKFIKLLNCNSHCVMEATGYYHYQLAYYLFENNKKVSVENPLAVKRFIQMGLSKIKTDKSDSKLICAYAEQVELKLWKGSSEESQEVLQITRALSVYTKQRTMLKNKLHGESVLGEPSKVVVRSLKRSLRQLDKEIKTLEDKLLLLVKESHQDLFTRIKTIPGIGRKTAIMLIVLTGGFERFSSAGELCSYAGLTPMIRQSGSSVKGRPRISKMGNQKLRNLLFMCSFTACKYNKACRDLYERIVAKGKSKKLALIAVCNKLLKQAFAIAKSGLIFDNEYKSTLAKN

SEQ ID NO: 216208 - protein, 379 aa, unidentified
MASMGDSVRSNTTIYAAIELSKKSWVVAIAHPDRDRPSMHRIAGGNLADLIGRLRKAAGERRIVVCYEAGYDGFWLARSLLKIGIDCRVLDPASIQVNRRARRVKTDRIDSLALLRSLIAVDRGERHVCAVVRVPTVEEEDARRSHRERQRLVRERTGHINRIKGLLFAQGIRGIEPKRRRTRIDFGKLTTAEGRPLGERLRRELEREYQRLELVQNQLRIVEKERDTADAQDPAVERKRELLCALQGVGSTSAAILAREVFARPFASRRHLASYLGLTPSAYDSGSMTRCQGISKAGNSWARRVLVEVAWLWRKYQPASDLSEWYVRKTAGQSPRIRRIMLIALARKLAISLWRYVETGLVPDGAVMAKTPLHQGAAT

SEQ ID NO: 216209 - protein, 417 aa, unidentified
MDTLFSNVAGLDVHLKTVQCAVRCQPSSGKLLKQVRCFGTMTRDLRALADYLTALGVTHVALEATGVLWKPVWNLLEGRFTLLLVNPRHLKKVPGRKTDVSDAEWIAQLLQHGLLRGSFVPPRAVRDLRDLTRHRAQLVAEHTRMANRIHKVLEDANIKLGAVASDVLGKSGRAILRALLRGEQDLEKMAELARGVLRQKIPQLKLALEGHCTAHHRYLLGRLLSHISYLESQIEAFSQRIGAGLDELLPAEDRQRLDGIPGLNRRAIENVLAEIGVDMSVFPDEHHLASWCGICPGNEESAGRRLRSRTRKGNRWLRRSLAEAAWAASHKKDSYLSAQYRRLAPRRGKKRALLALGHSLLVVIYHVLKNHKEYKDLGSDYFDRLEPERTRRYLVKRLQRLGYDVTLSPTSPAKNAA

SEQ ID NO: 216210 - protein, 310 aa, unidentified
MQTICGVDVSKAWLDCWIEPAGYRRLANTPEGVAQVLAWCREYGAELVVMEASGGVEQAAFLTLWKQGQPCAIANPRAVRSFADAMGFFEKTDRIDARIIAGYAVAKRLVATPPPSEDQRRLTALAARLRQISADLSIQKQRLYSTKDPTALASLKETIAFFNRQTKALAAEIAALITLDPHWAALDKTIRSIKGLADRTVAVLLADLPELGTISNKAITKLVGFAPIANDSGKRNGRRHVRGGRASVRSILFLVADIARKYDHDLATFRDRLLAQGKEKMVVRIAIARKLLVKLNAKARDARSQLTQSA

SEQ ID NO: 216211 - protein, 389 aa, unidentified
MVYVGIDVAKDKHDCFIVNSDGEVLYDVFTIQNDMDGFEDLLFKIKTASKDLSKVKVGLEATGHYSCNILGFLHNKGLTTIVINPLYTSLSRKSVSLRKTKTDKVDARTIASMIMSDVSLKPYSDTVYHNEDLKSLSRYRFDKVSDRSKLKQSVSRLVNILFPELEKLVSTLHAKAVYALLSEFPGAHQVASANLKHLTALLSTASKGHFGREKANEIREAARRSISSYLPAKSLELRHTIKLIHELNAEIAEIETEIKKIMDSIDSPTLSVPGISYALGSVIVSEVGDFSRFDNPDKLLAFAGCSPSTYQSGQLYSTHAKMEKRGSKYLRWALLNAAKYVCKWEPTFAVYLRKKLAEGKHYNVAVSHAAKKLVRLLYHLETTGEKYIP

SEQ ID NO: 216212 - protein, 339 aa, unidentified
MEFKRVAIDTSKHVFTLHGVDERDHPVLRREVKRTQVEPFFSKLRPTEVVLEACGGSHHWGRMLAAMGHRVRLIPPQYVKPFVKRGKNDRNDAEAISEAAARPSMRSVPVKSAEAQAEAMALSVRELLVKQRTQLINALRGHACEFGVISAKGTANAGKLVERVEADTTLPAAAREMFVVLGREIARLDEALRDIDRKLAVQHKANSLSQLLVEVPGIGPLGALTLALTVDATQFKSGRHFAAWIGLTPKDKSTGGKQRLGGISREGNERLRQLLVLGATSVIKVAKPGSKHATPWLSGLLGRRPRMVAAVALANKMARIVWAMMTSGEAYRPAPVAAG

SEQ ID NO: 216213 - protein, 345 aa, unidentified
MEHYVGLDVSLKLTAICIVDQKGKIIREGMVASNPEAIAAFVRSNAPHVVRIGLETGATSTWLWTELNEMGLPIICIDARHAKAALRMQIIKSDRKDAFGIARIMQCGWYKEVNVKGPDCHAIKALLVSRALLVKIKRDLENQIRGLLKNLGLVIGRSKMNSFTARVAELIEDRQELAAVINPLLKAREAIEQEIAGFDRRVMRLARDDAQVRRFMTTPGVGAITALCFRATIDDPARFKRSRSVGAYVGLTTRRYASGETDWTGRISKCGDRMLRSYLYEAANVLLTRVAKWSALKAWGIRLAKRSGLRKAKVAVARKLAVILHRMWVDGAEFRWSSKEANQHA

SEQ ID NO: 216214 - protein, 343 aa, unidentified
MQSITTIGLDIAKSVFQVHGVDSAGLVVIRRQLKRRYVLAFFEKLPPCLVGIEACASSHHWSRELQALGHTVRLMPPAYVKPYVKRQKNDAADAEAICEAVTRANMRFVPTKTPEQQSGLMLHRTRHLFIRQQTSVINAIRAHLAEFGIVAPVGRKGIEELLGVIADPSDNRVPDVVRGCLAALGSQLLGLKKQILDFDRMIMAWHRSNQTSKRLNCIPGVGPLLATALVASVPDPKAFRSGRNFSAWIGLVPRQHSSGGRDRLGSISKQGDRYLRSLFVAGALAVIRYAKIHGTKYRPWVAALLARRPTKVAAIALANKLARMAWAMMGTGERYNYPAGLRV

SEQ ID NO: 216215 - protein, 380 aa, unidentified
MSMQQVPSHRRVVVGVDTHKHVHVAVAIDELGAVLDRRSFAADSGGYGQLIDWGESFGGKLTFGIEGTGSYGAGLAGAVRRRGIGTLEVMRTDRRDRRLRGKSDTIDAENAARAVLAGLATAIPKSADGTVEMIRQIKVAKDVAVKARTSAMISLKQVIVNAPDDLRQELQPLSKMALIHRCAALRPGQVTTIIASTKHTLRSIARRWEVLDAEISGHEKLLAELTAQIAPDLAKAFAVGPDTAAEMLIVAGDNPERIRSEAAFARLCGVAPIPASSGMTTRHRLNRGGHRQANAALYRVVIVRMQHHEPTKAYVARRITGRKDEVRDHPVSETSSRPRTLGRDAPHPRSPTTPPNRGLTDIGASTPSPRASSASTRPSA

SEQ ID NO: 216216 - protein, 381 aa, unidentified
MTRLHELIAEQLDEEAVDAETGMLAAGRVLVGIETDRGPWVTALLGAGYQVFAINPMSVARYRERHSTSGAKSDPGDAHVLAEIVRLDRDHHRPVAGDSAEVEGLKMIARMHQTLIWDRTRHAQRLRSALREYFPAALDALAAAKLELTDPDALELLERAPDPDRAARLSRSKIAGILKRARRRDVEARAEQIQTTLRAAALRQPAVLEAAYATIVSTQVRLLVGIIAQLPQLEEALGAGFTRHPDAEIYTSQPGLGVVLGARVLAESGDDPHRYRDAKARRNYAGTSPITRASGRRTVVLARYARNRRLGDAVHQWAFCALTTSPGARTYYDTLRARGTGHHAALRQLGNRLVGILHGCLKTRTRYDETTAWAHHQTAAA

SEQ ID NO: 216217 - protein, 417 aa, unidentified
MSWTGELVRLFAGDDWAEDHHDVELMDAAGRVLAKRRLPEGVAGMARLHELIGQLGEDAADAEVVIGIETDRGPWVAALVAAGYTIYGVNPLQASRYRERHGVSGAKSDGADAHMLADMVRTDSHQLRAVAGDSAEAEGLKVLARAHKTLIWERTRQVQRLRHQLLGYYPAALEAFDDLDAPDTLELLGKAPDPARGARLTRAQVSAALKRARRRGIPDKATAILAALRSRQLGQPAAVTAAYAATVRSLIAVITVLNEQVKTLQGQVEEHFGQHPDAEIYRSQPGMGAILGARVLAEFGDDPHRYADGKARRNYAATSPITRASGKKKVVAARFIHNDRLVDSLNAQAFASLSASPGARAFYDQQRAKGIEHNDALRRLANRLVGILHGCLKTRTLYDEVTAWGHRENLPQSSVAA

SEQ ID NO: 216218 - protein, 313 aa, unidentified
MVKRSVGIDVSKAHLDVAVAGEAGSTRYTNDEDGIAKLVAWLRDGDVERVVLEATGGYQRRVLTALLAAEVPAVAVNPRQARDFAKALGKLEKTDEVDARMLALFAERVRPEVRPLVDETTREFQELLARRRQLNEMLVAEKNRFHQATKKVRRSIKSHIDWLKAQLRNTDKDIETGLRNCPAWDVQVQLLESLPGVGRITSMTLLAELPELGTLNRKKIAKLVGVAPLNQDSGKSSGRRSIWGGRATVRAPLYMATLVATRHNPVIRAFYARLLAKGKMKKVALVAAMRKLLIILNAKMRDHLRALPQASSA

SEQ ID NO: 216219 - protein, 345 aa, unidentified
MGYFAGLDVSLEETAICIVDDAGGIVREARAGSEPEALVAFFGACGMKMERVGLEACSLTAWLHGGLSEAGIPAICIETRQAKAAMGAMPNKTDRNDARGIAQIMRTGWYRAVHVKSPSCRSWRALLTARRMVLNKRRDVENGIRALLREVGLKVGTPSRKDFPARVRELAADDPVLASLAESLLSVVEVMTREVERLTKRVLDEVRIEPTCRRLMTVPGVGPLTALAFRATIDQPGRFRKSRDVGAHLGLTPRRYQSGETDMQGRISRCGDELARTALYEAAHSLLIRSTKWSALRAWGMNVAKRRGMARARVAVARKLAVILHRMWADGSEFRWGKQATAAVA

SEQ ID NO: 216220 - protein, 366 aa, unidentified
MREQQNNRQERTIIGLDLGDRWHRVCVLGESGQVVEEGSVANNRVALSELSSRYPGALVVMEAGCHSPWVSRHLKQAGCEVIVSNPRKTRAIYQHERKSDRRDALMLARIARMEPALLYPVRHGSEEAQQDLLRIKLRDSLVRARVGLINSLRFTLKSLGYTIANPSTERFHKVIQSALPESVVQMIAPSMQAIEELSLRIKLLDWEIRTLAHTKYPETSWLEQIPGVGPITALYFVLKIGDPARFERVRDVGAFIGLCPRRDQSGENDPQLRISKRGDAYLRRLLVSSAQYILGPFAPPSALRQYGLALAAGATARAKKRAVVAVARKLAVLLLTLWKNNSPYQAFPQQREKMRIHDLERLRCIA

SEQ ID NO: 216221 - protein, 400 aa, unidentified
MTAVWAGIDSGKRAHHCVVIDATGRVLLSRRVVNDESALLELIAAVLAVAGGDPAVWATDLNAGGAALLIALLAERGQQLLYIPGRIVHHAAATYRGDGKTDAKDARIIADQARMRTDLQPVRGADQISTDLRLLTARRTDLVYDRVRTINRLRATLLEFFPALEAAFDYSKKAPLILLSGYQTPEAIRRIGATRLAAWLKKRGCRGSTSVAAKALTAANAQHTVLRTETMGAQLVAQLAQQIAVIDAAIAQLDEQICKRFDQHPNAPILLSMPGFGAVLAATFIANTGGDLRAFETVDRLASVAGLAPAPRDSGRISGNHHRPRRFNRRLLRTCYLAALSSLKNSPASRAFYDRKRAEGKNHKQALIALARRRITTLWAMLRDRTTYQEPPRPALAPAA

SEQ ID NO: 216222 - protein, 312 aa, unidentified
MNKTICGVDVSKEWLDADVEPSGAASRFRNDAAGIADLVSWCQSHDAELVVMEASGGCERLAFLLLWELNLPCALVNARGVRRFAEAMGFLEKTDRIDAAMIARYAQVKQVQPMPPPSAAQQRLKALVARLCQVTGDLTVQKQRKSALLDAEIIDSLDEIIALLKRQSRRLEGEIASLIDDDPLWACLDKAFRSLKGVASRAVARLMAELPEIGILSNKAIAKLAGLAPIANDSGKRNGRRPVRGGRAGPRSLLFLIARIVAKYDPHMAAFHQRLQAAGKEKMVIRIALARKLLVILNAKARDARKEFANAT

SEQ ID NO: 216223 - protein, 407 aa, unidentified
MSNTTRFSVGIDISKGKSTVAVIDPFGNIVKSPFEIRHTSSDLKKLAGLIKSLDGETRIVMEYTGIYYQPVARFLSESGLFVSVVHAKILHDFANNSIRRIKTDKADAVKIANYGLLHWDSLKCYSKEDDTRLLLKSANRQYYYFLKQYVAANNNLIAVIDQTCPGLNDLFTSPRREDGHIKWVDVAIRFWHCEYITGFSLNKFTELYNDWCKKNKYIGSNSKAEELYLMAKECIPTLPKNESTKYIVKQAAEHLLTISEALGALQKEMLYLAEQLPEYPIVMSFTGVGKVLGPQLMAEIGDVRRFHKKSCLIAFAGVDAPPFQSGNFDSKNRHISKKGSGGLRKTLFQVVTVLLQNTLVYDPVYQFIDRKRQEGKPYYVYMVAGCNKFLRIYYARVKEYLAAQEAA

SEQ ID NO: 216224 - protein, 341 aa, unidentified
MVHVGLDLSRTRLDVHVMDESGAPLAVTTAAPDRGGLAVLAGRIGGFGGPVYAAIESMNGARFVHDQLELAGWQVEIADAQKVKGLAPLACKTDKIDSWVLAELSRRDLVPAIWLPTPTVRAERERARWRLHLVRHRTALKNRIHATLLAFGHPCPVSDLFGTGGRELLGRLALPEPWAGDTAAALALIDELDAEVAECERALRQMGADHRYVPLLMTTPGIGWVLGYTIAAEIGDITRFASPTKLAGYTGLCPRVYQSGGKDHRGPLAKNGPKYLRWALIEAAVHAARHPIYADRYRRTKTRLGRQRGPKVAQVDLARRLAEAIWHMLTTNKPFAPAGAA

SEQ ID NO: 216225 - protein, 424 aa, unidentified
MKVTYQTCCGVDVHKSFLVATIVKTTGGIEPSYQKKRFSTFNSSILEFKQWLLDNDCHDVCMESTGKYWVPVFNLLEDDINVVIANPKWVKAVKGNKDDTKDSKWIGELFRLGLVRGSYVPCKKIRILREYTRYRYKLISCRSSEKNRYQNALTVCNVALDSVVSDIFGKSSTSIIDYLLEQSGTSINHEEIASKLLRSLKSKEDAVIESVEGYQMTDAPKYRVRLVRAHMDYITAEINDVDKMMENMISSNPDFENAVQFLCTIPGVKRDSAITIISEIGTDMSQFGGSKRLCCWAGLTPGSNESAGKKKSVRITRAGVYLKPALVQCAHAAVKSDKSPYYKKKYESLVKRRGKKRAIIAIARMILTAIYQMLSTGEQWNPSDLYKIDMPVALVEKQKAKAIKQAKKLLQREGILPPDEPLAS

SEQ ID NO: 216226 - protein, 315 aa, unidentified
MPNMIAQSVGVDISKDTLDVHLHPAGASRRFANDAKGFSALIACLKGFAIARVVFEPTGAYHHAFERRLAEAGLPLAKVNPRQARRFAEAIGRHAKTDAVDAAMLARFAMLIEPPARPIVSATLDEMKELHVARRALVKDRVAALNRDKTRRSALLKRQAAERLRQIERQIAAIDAALRAQLAADPALKARFDILVSIPGVGETTALTILVEMPELGAIEHKCAASLAGLAPIARDSGRRSSKRFIRGGRAHLRQALYMPTLVAVRFNTVMRAKYNAFLAAGKPPKVALTAIMRKLIILANALLRDGRTWTAKLA

SEQ ID NO: 216227 - protein, 347 aa, unidentified
MEYFVGLDVSLETVNVCIVNAAGDILLEKKIAAEPAAIVHLLKSFGSPFKRIGLEAGPTSSWLYGELRAAGYGAICLECRHVKAGLSAMRNKTDRNDARGIAQLVRLGWFRQVHVKSEEAQRTRMLLVNRQQLLTKALDIENSVRGSLKVFGLRVGVVARRGFEARVLELVADDPILLVVTEPMLRVRQALLEEFERLDRLCQQLARRDPVCRRLMTVPGVGVVVALTYRTGVDAPERFSKSRDVGAHFGLTPKRYSSGQTDYDGRISRCGDEMVRTALYQAANVMLHHGRWSSLRSWAMRIAKRGSVKGAKVALARRLAVVMHRMWTDGTDFRWSDTSRMTAPTAA

SEQ ID NO: 216228 - protein, 415 aa, unidentified
MPTFEPLTHFAGFDWAKDHHDAVLLDRTGNTVAAFTFAHTAEGWAQWRERIKACPALGVAIETNQGAAVEQLLQSQVTVYPMQPKAAERYRDRHVPSGSKTDQTDAWCFADALRVDGQHWRALAPEDPLTEELRLLCRDEVELITQRTALVNQLQAALYEYYPAALEAFDDWTAPFAWELVLAFPTPEALVQAGKRQWEKFLHTHKLWRPDTAPKRLEIFGRADRFCGSEAVTRAKSRLAVSTAQVLRALQQQLEEYRRAIEKLFAEHPDHDLFGSLPGAGAKLAPRLWSEIGRDRQEYPDAQALQCVAGTAPVSFESGKVRRAKIRWHCNRHLRHAVHLWADCSRKFCAWAGTYYQAQRAKGKSHACALRCLGQRWLKILWKLWQSRQLYDETVHALNQQKHGSWVLQLKPKTP

SEQ ID NO: 216229 - protein, 357 aa, unidentified
MHKVQDFILKGKKVYVGLEDSKKSWKLCVRSGKMVVNESSMPARYETLLGYFRNKFPECKIQVMYEAGFSGFSLHDNLEGDGIDCIVTPPHTVTTEKVQKQKNDRIDCRRLAKNLENNDYGSCFIPDKQLREDRQISRLYGQIQSNLVRVKNRIRRTLEFHGIDKYFPSGAWKESQYKILEEKLSELGLSGSLLFCFQLLFSELKQLRQHKAQIIKALRGLAKSDRYKDQVKVIESVPGIGFLTAIRLALEWGDVRRFKRKEQFSSFLGLIPGEFSSGEQERKGHITKQGSRSVRRWLVESAWICIRKDPVMLGKYNSVVHNTGSGKKAIVAVARKLALRIRSLLIMNQPYLVGVVE

SEQ ID NO: 216230 - protein, 452 aa, unidentified
MEEPQEVQDEEYERVWERVAAVDVAKASGVVCTRVPDEDRPGRRRTRVWTVTATVNAVTELADHLRCHQIEVVTLESTSDYWRIWWVVLEAAGLKVQLVNARSVKNVPGRAKTDKKDAVWLAKLTERGMLRPSFVPPPEIRRLREFTRLRADLVHERTRYWARLEKLLERALIKISAVASSLDTDSTRAMIEALIAGQRNPKILADLAIGRMRAKRAQLAEALDGRFEPHHGELARILLDQIDALTAQIDQLTARVTELIAAIPAAQGIDADGTTGPGAGTGSGAPVLPAVARLDEITGCGIIAAQVAIAEIGLDMTVFGTPGRLVSWAKRCPQTRQSGTKTTTGKAGKGNPYLNGILGEIAASAGRTDTFLGERYRRLARRRGKRKAIVAVARSVLVIIFHLLADPEARFHDLGPGYYDTHIDRQRKIRNHVRQLQALGLTVALTPGEDAA

SEQ ID NO: 216231 - protein, 403 aa, unidentified
MIFVGDDWAEQHHDVYLMDGAGKRLASRRLPEGLAGIRQLHELMATHAEEPDQVVIGIETDRGLWVGALTGAGYRVFAGNPLAVARYRDRHHVSGAKSDASDAKLLADLVRTDRHNHRLIAGDSPQAEAIKVLARAHQSLIWTRNRHTNALRNALREYYPAALEAFEDLAHGDALGVLHRAPTPTLGAHLDLAAIQSALKRGGRKRNIAARAREIRATLRTEQLSAPAPVADAFGATTRATVGILTELNRQIGELETSLAAHFETHPDADIYRSLPGLGVVLGARVLGEFGDDPNRYTDTKSRKNYAGTSPLTIASGKKRAVLARHIRNRRLYDAIDHWAFTALTKSPGARALYDQHRAAGDLHHQALRALGNRLVGILHGCLRHRTLYNEHTAWAHRMPAAA

SEQ ID NO: 216232 - protein, 346 aa, unidentified
MRTLYCGIDAGSSNCHVAMMNEAGKFEVDVDIPTSELQLTAFLESLQKNGEKLKVHLEAAELAQWIRGLIMERTNIEDVVVSDPKRMAWIAKDPHKNDSVDARKLAELLRLGMTHPVYYTDDKKMSSFKRQVQHQKSLSDEVTRIKNKIKASLRRTGIIIKSSGAYSKRRRPEILRSIEEQSYRESVEDLYELLDETENLCRKAEKRLAKMAENWPIIEYFMEVPGVGIILASRFVAYVQTPWRFATKEKLWSYGKLGLTDRSSDGKQLSGPRLDHNGNGVLKDLSRKVFESATKKNCNNAFKRSYDRYLKTTKNEMHARLTVQRKVLTVLWTMWRKNERYDDRRG

SEQ ID NO: 216233 - protein, 295 aa, unidentified
MIKYHKHIGIDIGKYNFVVGIEGIKDTKEYENTSSGIFEFINDNKDILANSLTVVETTGGYELELLYSLCERGYVVHRADARKVKNFIRSYGNSAKTDKLDAKALGLYGKERADKLEVFKPESKQNIQLFRLVQRRNDLKQMLVAEKNRLQQANTDKFVKNSCINMIDVLSNQITEITNQVEVIISSDQLLKAKHEILKEINGIGNIVAFELLILLPELGKLTRRQIVSLAGLAPKANDSGKYQGYRKVGHGRAGVKPILFLAAMSARNSKTSGLRLFYERLITMVKRKWSLLPL

SEQ ID NO: 216234 - protein, 424 aa, unidentified
MPKRVQASGQALVQARYHITGGCDTDKNVIVAAVFQAEVGHLEAREFKQHREDALCCAEWFSSQHVEFVIIESTANYHLLYYDVLRSQGINIAVINPLVVKSLLRVEGKSDKGDAMTLARLAASFDLKTSNMPDNQQRELRLLYKRIDAWKMQRTQITNRANSILTGCGFTVFRLVPINSSTDFKIIQAVLEKRQPAEIAALHRTRAKRAEIEKSAEVKLPDYVLAYLQEVLSDVRQLNQRIVAGQAGLLTQIETLDLQEQVDLMCTVPAVTKYLAMRIIAEMGANYHQRYYSAEAFAKGIGVVPSNEVSGGKLLKRKASHGNKRVKFHLLSAAKVFAIHGKGQLHDWYRAYRGRVTYMKAISALARRIAEALWWVMVLNKPYQYWKGESPREGCEVVRLGNHLVDADTGKVLETLELANPVCE

SEQ ID NO: 216235 - protein, 360 aa, unidentified
MFFERTSVGLDVHARSVVACAIDGQTGEITQARLCPDTGSVLAWLRALPGPCRVVYEAGPTGFGLARALTEAGIECVVAAPSKLHRPAGDRVKTDARDAMLLARLLRLDEITPVRVPTLEQETARDLVRAREDARGDLMRARHRLSKLLLRHGIVYPGGHAWTGAHDAWLRRQGLGLATAPLRLTFEADYEAVLTVTARRHRLDAAIAQMAGDSEFTPVVRRLTCLRGVDTLTGFGLAVEIGDWDRFTGATIGSYLGLVPTEASSGASRVQGSITKTGNGHARRLLVEAAWHHRKAYRAGSELRARWQAAPAVVVARADVGNRRLHARWRRFDARAKRPVVANVAVARELAGWCWALATM

SEQ ID NO: 216236 - protein, 345 aa, unidentified
MTIVKTRAITGGVDTHADVHVAAALDPIGGLLGVQEFPATAAGYAGLLGWLGGFGTVALVGIEGTGSYGAGLARHVTTAGVRVVEVDRSDRQDRRRQGKSDPLDAVSAARAAQSGRARGAPKGRDGAVEAIRALMVAKRSARSERVQTINQARALVLTGPDDLRARFARHTAASLVSGLASLRPRPGDVVGYATRIALRELGRRAEFLDGQLGRLDELIAPLVAARAPALLALHGVGPDTAALLLVAAGDHPERLRSEAAWAHLCAVAPIPASSGKVTRYRLNPGGDRQANHALWRIVLTRMSAHPPTLTYVERRTKEGLSKKEIIRCLKRYVAREVYRHLRAAG

SEQ ID NO: 216237 - protein, 360 aa, unidentified
MDKYIGFDIDDKKTVACVVQAGQKDIYQTIPTEVAAMRAWLQSQRKSREQLHLTFEVSGQAGWLYDELLDSVDTLTISNPSKMTWIYRTAKKTDRVDARKQAVLLQMGEIPTVHMPGKVIRQWRLEIQHRRKLISLRTQVKNRIRMSLKSHGYRQPASKGSWWKKVNVKWMGELSETVEDSWALGLSDLLGHLELYESQIKDRTQKLDERLAQHGGGELLQTIPGVGPRTAEAVLAYTDQVERFRRGKEYCAYFGMTPKLDESGSTRRLGHISKQGPSVVRWLIVESAWRAISKSRALSLFFQRVQHGQAKRNKTAIVATARKMLSVMRAMMLTGETFNENLVLRQEHYPGRKALADFYN

SEQ ID NO: 216238 - protein, 356 aa, unidentified
MQLQDALLIPKIFIGLDIHKKSWSVSIQTDLFFHKTYSMPSNSGDLYDYVEKHFPSHEVNLVYEAGCCGFSTARYFLNLGWTVLVVNPSDVKKGDKERYQKTDAIDSKLLSNQLKSGILKGIHIPTEKEEQFMTLARHRTQVTKKLRQTKSHIKSMLLYHGVKVPDAFDNSNWSIDFLDWLDQIKFSTISGDLALKGKLRMYRFIKSEYLEIANQMRSYCRKEYKKDYYLLKSIPGIGGYLSAVILAECGDLRRFNTEGQFASFVGLVPGIYNSGGSEKCLGITPRSRSQLRSYLVEAAWIAIRKDVEMQHYYRKHQGKNVKSIIVKVAHKMSRRILSVVKTETPYQVNKNLVLEK

SEQ ID NO: 216239 - protein, 367 aa, unidentified
MKQSSKIFVGMDVHKESIDITLAEQDGEVGRFGTVGGDRVSLLKAVRKLTSRGRALVFVYEAGPCGFWIYRELTALGHACLVVSPSLIPRRCGDHVKTDRRDSENLARLARADELTGIHVPDMRDEAIRDLVRARDDAVITQRRARQQLKALLLRNEIRYLNKSSWTAAHLRWLGELKLAQPAQQIAFQEYVDAITVATRRIERLVQAIGNEAATWRFAPVVAALQAMRGIQFLHAVTLISELGDLKRFGSARQLMAYLGLVPRENSTGEQRHQGAITRAGNAYARRALVEAAWAYRHPARVSRLIATRQSALPKAACDIAWKAQLRLSTKYRRLSARRVNPNKIVVALARELSGFVWAIGQSVKLQ

SEQ ID NO: 216240 - protein, 369 aa, unidentified
MPSVAADRGVIHLGLDVHKNTITAGVLEPGSDTPVIDTISSDEDSVRRLVGRFDAPGRVRACYEAGPTGYELARLLGSLGVRCAVIAPSLIPTAPGDRVKTDKRDARRLVRLYRAGELVAIRVPTVAEEAVRDLCRARADMVIDQTRARHRLGKFLLRHGRVWRGGDNWTGKHQAWIAQQRFDDPALTATFGHYRATLTAREAAVTAIDAELAGWFTRAPFTDSVARLAAYRGITHLGGLTLASEVCDWRRFASAGAFMGFCGLVPSEYSSGERIRRGHITHAGNLHLRTQLVESAWAYKSRPAIGVQIARRHHNLPPEVIARAWKAQLRLCARFRRLDARKTSRNIVVTAIARELAGFVWAEMTSPPS

SEQ ID NO: 216241 - protein, 427 aa, unidentified
MARQRKGETHMTNTNRRWFVGVDWASSKHDVTLTDDGGKIIGRRIFAHSGDGLRQMADWLVCESGALAGDIHVAIETPHGAVVEVLLERGFNVYSINPKQLDRFRDRFTVAGAKDDRRDADVLASSLRTDAQAFRALMPADPAIVELREWSRMAEAHGQDLRRYMNRLRDQLQRYFPAFLALGGEDDAAWKLALLELAPAPAMAHSLPRAKVARLIEAHHVRCHDADAVLAILRAPAPTVSQATIAAASAHVRTLLKSIRLAVEQSKEANAMLDRLTKALAEPEESAPGQTVQRDAAILRSSPGIGRIILATLLTEAPQAVHERDYHALRCNGGIAPVTRQSGKRRYVVRRLACNRRLRNALYHWARNAIQKDARIRARYEALRARGQSWARTLRAIADHLLYIACAMLRSGTLYDKNHGSEAIKSA

SEQ ID NO: 216242 - protein, 406 aa, unidentified
MKHVVAFDVSMGKSTMVIYNRYRQCEFEGELEHTYSAFKALNERLQSLTVQDGQAPEIVFEATGVYSKALERFFRVEGYDYCRINPLEANLQMASMRRQKTDKSDAHELAKSHFRVEREKTYQEDDYYLQIRALTRYYDELDHEIAHLFNRMHAILQLSFPELERLFSTRSALFLNVVQCYAHPDEVLACSKTVIRNRLKANTRKNLSWIRAEEKGMALLEAAKNSYPAISKDDVRCEQVRDYAKRMAHLKGKKEALVKKMVELSRERTEYQVLISFPGIGEATAVRLIGEIGEIRRFKSHKQLNAYVGIDIRRYQSGNTFYKDKINKRGNHKLRKILYYMIQTMISLRKKTMNHIVEYYDKLKTQPQRKPHKVASIACVNKFLKVAFHLITHDITYDYETASACL

SEQ ID NO: 216243 - protein, 424 aa, unidentified
MKVTYQTCCGVDVHKSFLVATIVKTTGGIEPSYQKKRFSTFNSSILEFKQWLLDNDCHDVCMESTGKYWVPVFNLLEDEINVVIANPKWVKAVKGNKDDTKDSKWIGDLFRLGLVKGSYIPCKKVRILREYTRYRYKLVSCRSSEKNRYQNALTVCNVALDSVVSDIFGKSSTSIIDYLLEQSGTSINHEEIASKLLRSLKSKEDAVIESVEGYQMTDAPKYRVRLVRAHMDYITAEINDVDKMIENMISSNPDFENAVQFLCTIPGVKRDSAITIISEIGTDMSQFGGSKRLCCWAGLTPGSNESAGKKKSVRITRAGVYLKPALVQCAHAAVKSDKSPYYKKKYESLVKRRGKKRAIIAIARMILTAIYQMLSTGEQWNPSDLYKIDMPVALVEKQKAKAIKQAKKLLQREGLLPPDEPLAS

SEQ ID NO: 216244 - protein, 377 aa, unidentified
MFEQAHYKVGCDAHKRYSVFAVCDGKGKVLDRVRVNHERGAIQGFLSQFPSGTPVALETVGNWYWIVDEIEVAGCVPLLAHAGKAKAMMGHTHKTDKLDAEGLATLLHNGTLPTVWIPPGDLRDERELPRTRMALSKVRTMLKNRMHSTLAKYALSLDTESDIFSRKWRPQLLDLLRRLPGETQRCMQQELELLDQVQEQIHRLEARILERVQLTPTIQLIQSLPGPAEILSIVIDREVGSIDRFPSPKKFCGYAGTVPKVKGSGGKYHYGRMIKQANNYLKWAFIEAANVVVRQRQHPNWRNKHVVQLYERICRRKGHAVAVGAMARYLAEATYWVLTKGEPYREPVPRRPVRLSHPPRPGRGRPAPNMGPERSAS

SEQ ID NO: 216245 - protein, 403 aa, unidentified
MRKEGSVKVKVVKDDALIVAIDVGMEMNRGYCTTPDGRSMKVFKFENTRAGFDTLWSMIVTSKERFLCNEVIVGYESTGPYGEPMVHYLMKKPVKVVQVNPMHTKRVKEINDNSPLKTDEKDPRVIADIIRWGRALSIVIPEGDSAYLRRLNNARERHVRERTALVNQLQQLVFLVFPEFRQVIKDIKCKTPRYLLKKYPTPEAISVLDKQVLGEEMRKQSMGKLRERHADMLINLAKNTVGIREGASGLSLDIRHILFQLAMTESLIVEIEGEMEITLGRIPYSAKLLSIKGLGVVSVAGIIGEIGDFRKFKTRSEIMKLAGLDLYEISSGKMKGQRRISKRGRSLLRKILFYAAIQTIRKHGILHEYYTRLTERGMKRMMALVAVSRKLLGIIYDELVKSR

SEQ ID NO: 216246 - protein, 343 aa, unidentified
MDYFAGLDVSVKDTSVCIVDDTGKIVREVKVASEPEALLQVLRGPSYRFKRIGLEAGPLSQWLFSALGEANLPVICVETRHMRAVLKAQINKTDRNDARGMAQMMRVGLYRPVHVKTVRSQKLRMLLTHRKLLQSKAIAIENDLRGTLRNFGLKVGIAGRTRFEARVEELVEDVPDLAVLVEPLLVVRRVIHEQIAVLHRRLLTLVRDDEVCRRLMTIPGVGPVVALTYRATVDVPARFRKSKSVGAVFGLTCSRNQSGERDLPGVISRCGDEMMRAMLYEAAQSLLVHSKRWCWLKAWAMQIAKRRGMKRAIVALARRLAVIMHRIWVNGTEFRWTREATAV

SEQ ID NO: 216247 - protein, 338 aa, unidentified
MEPTTIAIDLATRVFQVHFVDPETGAIHSKVLKRAQLVPFFANRTRSRVVMEACGSAHHWARQLAKLGHDVRLIAAQFVRPFVKSNKNDAADAAAIWEASQRPGMRFVAVKTEDQQAMLALHRMRQQLVRFRVMQVNQLRGLLYEFGVVLPQGRRASIEAAKGAIASLADQLPSMLTDSLQDQLSRLLALDEQIQRIEQHITDWRRGDEACRRISEIPGVGLLTATAAVAVIGNAQAFRSCREFAAYLGLVPRQNSSGGRVKLGGISKRGDVYLRTLLIHGARAVISSSKHLPERLRNMLIRRPTNVVAVALANKLARTIWALLAYGRPYQIPAPMRA

SEQ ID NO: 216248 - protein, 421 aa, unidentified
MMCIGIDWADDKHDICIRDVKDRRILAEFEIPHDASGVEQFEEVVCALGVSASECLVAVETPHGLFVGYLLQMGYQVYAIPPLAVERYRDRHRIAGSKSDPIDASVLSDILCVDRSRFRPIAADSPLAQEIKLVSRQRQRLVAERTRIKNQLTSCLKAYFPTALRLFSGLDRAITWAFLRAYPNANVAARASQDELEQFFRQQRYTWTRRVPQIHALLQEPFIPVVAWQQRAFQRQMLVLLDLLANLTLQIKAYEKEQSRLLDQHPDAFIFRSLPNAGDVTAARLLGEIGDCRSKFRNASAMQALAGSCPVTVQSNKRRRVKFRAACSKPFRDALQQFARLSIQNPKGSAWAKGYMTAQLSRGHSVSRALRALGNRWLAIIYRIWQDKVSYDEKVHLRSRAQRGYQVYMPHDSIQEPVRVS

SEQ ID NO: 216249 - protein, 421 aa, unidentified
MAHLAQEEFAAFVGLDWADAKHDVCLQATGTARREFLSFEHRPEAIDAWVQTLRTRFHGHPVAVCLELNKGPIVSALRNYDFLVLFPVNPLTVARYREAFTPSRAKDDPTDAELQVELLLKHRDRLKPLQPQSPAMRALAQLVEHRRRLVGDKVRYTNRLTSALKNYFPQVLQWFPEKDTAIFCDFLSRWPTLKAAQLARRSTLEGFFRVHHVRSVDVIDTRLQAIKSAMALTTDDGVITPNVFLVQALIAQLRVTLQAIADFDKAIAQRAQDHPDFPLFDALPGAGAVFAPRLLVAFGEQRERFTSADELQKYAGIAPVTERSGKKSWVHWRLQCPTFLRQTFVEWAAESTRHSFWAQIYYQQQRDKGKAHQAAVRALAFKWIRILFRCWQDHTPYEESVYLQALKRRRAPLLHNLAKGA

SEQ ID NO: 216250 - protein, 408 aa, unidentified
MEVLYARCAGLDVHKETVVACVRCVSEPKHSEVRTFSTMTSGLLDLNQWLEERGCTHVAMEATGVYWKPVWHVLEGSFELVLANAQHIRNVPGRKTDVSDAMWIADLLAHGLIRSSFVPPAPIQELRDLTRTRKQLVREMSQHTLRIQKVLEDANIKLDSVLSSIVGKSGRAMLKALVDGETDPERLADLARGQARKKRAALVEALRGRVTTHHRSMLKLHMQLIDAIESALREVDDHVGKALEPIQACVQLLTTIPGVSDIVANVIVAEIGTDMARFPTPGHLISWAGLCPRNDESAGKRRSTRTRKSGTWLKTNLVTAAWSAVRVKATYLRAQFLRIKARRGAKKAVMAVAASMLQAAYFMLRDGVPYRDLGSDHFDRRDKSKAIGRLMRRLSDLGCEVEIKAVAA

SEQ ID NO: 216251 - protein, 315 aa, unidentified
MKKVSTEAAKQNKNFSEQKLTIGLDLGDRSSWYCVLEEAGSIVLEQKLSTTPKAMKEAFGAMPHCRMALETGMHSPWVSRLLSGLGHEVIVAHARSVRLIGESRKKDDRMDAQRLARLARIDPQLLCPVKHRSAKAQADLTVVRARAGLVRARTALVNTARGLAKSYGERLRGCNVRNMNPEKAESLSPELQAALEPLLAAIESLSERIAEYNDRIEELAQRSYPQVAVMKQIKGVGTLIALTFLLTLEDPRRFRKSRDVGCYLGLQPGRRNSGQSQPQMHISKEGDPYCARSWCRERNTFWVHSEWTVICGAGV

SEQ ID NO: 216252 - protein, 458 aa, unidentified
MLEGLKQSVYDANMLLPKYGLVTFTWGNVSGIDRKAGLVVIKPSGVEYADMKPKDMVVIDMAITGKDSITRYFTESFSTINSDLIRFRTWLSSHNCNDVCMESTGKYWIPVFNILEDAHVRVLLTHPKYVRAIKGKKTDKKDSKWIADLFKFDMVRSSFIPPKDIRALRELGRYRYKLVCMRSSERNRYQNCMTVSNIGLASVLSDPFGKTAADIMRHVLTSSVFDENLCRKLIQKPAKKKTELILDSMRGYNIESDQRFKMNEASEHMSYLDNVILRTEAELYVRIQPHFLIVEHLSNQPPGISQLSAALIISEIGADMSVFEYAKHLNSWAGLAPANNESAGKKKSVRISKAGVFIKPLLVQCALAAVKDKKETYFAVKYHKIKKRRGHKKAIIAIARMMLTCIYHLIQTGETFNPSDYEELHSPVPQKQLLSDETAVAYLAAQGYDVSSLVKIAV

SEQ ID NO: 216253 - protein, 335 aa, unidentified
MHYLYYVGLDVSKETFDASLVAFEDANEMAHRKFANSRKGICSCLHWVEKRHGIRLDDVIFCAEDMGSYISEMAVCASDRTLNFNFSLISPLVIKYSMGIARGKTDRVDARRIAEYAITHYRKIALYLPAEKELCQLRTWLILRAHLAKQRVAKLVLLEKLDYKEKFADVSIQRSMLQEEIVYAETHMKTIEREMKELIAADSNICRNYKLLTSIKGVGPITAIVMLCSTLNFTKITDHRKFACYCGLAPFEHSSGTSVRGGCHTSSMANRDIKVQLNRSALIAIRCDPQLKAYYERKVAEGKHKFSVLNAVRAKIAARCFAVVRRGTPYVALQI

SEQ ID NO: 216254 - protein, 370 aa, unidentified
MGKYSEVFVGIDTSKNRHAVAIADGGRGGEVRYFGEIDSAPPAVKRLLTKLAGQYEKVRVCYEAGPTGYGLYRQVLALGHECTVVAPSLIPKKPGDRIKTNRRDAVTLARLFRAGELTSVWVPDSVHEAVRDLVRARESAAADVRKKRQQLLSFLLRHGRIYSGRNHWTQAHTRWLADQAFEQPAQQIVFQDAVDAIEDCVARLARLEEQLHTIVPNWSMAPVITAYQAMRGVSFIGAVTFVSEIGDVRRFDNPRQLAAFLGLVPSENSTGDSIRRGGLTLTGNRRARRTLVEGAWTYRYQARVSAALQKRLEGLPKDVRDIAWKAQVRLCGRFRRLTAIGKKAPVITAAIAREMAAFLWAIGQHVTPAS

SEQ ID NO: 216255 - protein, 446 aa, unidentified
MSTLNSAEEKPFYAARIGLDWADQKHFWTMLTAEGKRTRGELKHTPEAIEIWAVELARSFGGRPIALALEQKRGALVAILSKYAHVHLFPLHPTNLSHYRSSVCASGAKSDPSDADLILDYLVKHPEWLRGLRPDTVETRSLQFLVEERRKLVNQHTSQLQILIYWLKQIFPQMLGWFDDMSTPLVGDLLLRWPQLPALKKASQNTLRKFFVQHNCRSEERIQQRLDEIGQAVPATTDTALLNTADLCIRLAVQVLAAQRAGIAEFDRQIEAIYEAHPDRFIMASLPGAGPALEPRLIAALGTNRERFESASGMACCFGIAPVTESSGKSCWVHWRWACSKFVRQTLHERANCSIRSCGWAREHYDKQRGKGKGHHASVRSVAFKWIRILFRCWRDRVPYCEERYLKALRMHGGAVAAVVGQPMPLPPAVQWESCGGFSKIVELSS

SEQ ID NO: 216256 - protein, 384 aa, unidentified
MQASHVSTPIKSNVSTIFVAIELSQRSWLVTMHCPDKDKISHHKLEGGDHAGLRMLIDRMRERAARTLGAVPAVVSCYEAGYDGFWLHRLLMAAGITNHVFDPASIAVDQRARRVKTDRIDGEKMLRTLMAYLRGEPRVVRIVRVPTPEQEDARRASRERGRLTKEQTAHTSRIKALLRLLGMAVGNPRRHDWLTWLVKQRDWQGQAVPPQIMAEIKREHARLMLVREQLDALVQAPADLTPAAAQMAQRSELLLRLKSLGPAFATTLTNEVFYKDFRNRREVASYFGLTPSPWQSGGIDRDQGISKAGNPRARCAAIEMAWLWLRHQPDSKLTQEYRRRTLNASKRIKRVAIVALARKLIVALWRYLTTGLVPEGAMLKTAEV

SEQ ID NO: 216257 - protein, 341 aa, unidentified
MEHTVIAVDIAKKVFQLHWVEMDTGCIERLQLKRAKLLEWFANRAAALVVMEACGGAHDWGRALMGLGHEVTLISPRKVRPFVQRNKTDAADAQAIWTACQQPGMRFVPVKTEAQQIVLSLHRLRAQLMKTRIMQTNEMRGLLYEFGIVLPEGHAALLKALPAAMCDAKTRLPAMLVDSLDEQLRRVRQLQADIGLIERRLSQQMRDIPACKAVAEIPGIGLLTATAAVASMGTPSAFKDAREFAVWIGLVPRQTGTGGRVRQLGISKRGDAYLRTLLMHGARAVVIRSKDSSTWPWVAALLQRRPYSVAVAAVANKLARTIWAVLARGQAWRPEAWQAAR

SEQ ID NO: 216258 - protein, 335 aa, unidentified
MDRQYVGIDFHRRRSVIVRKSGAGDKLGSVRVANDPLAIASAVAEAGPNPEVVIEATYGWYWIVDWLQVQGATVHLANPSGLNWGARRVKNDERDASDLVDMLRLGRLPEAWIAPPATRELRELVRYRAKLVALRSGLKAQVHAVLAKEGVLPSVRDMFGGSGNAQLNALELGDAYTTRVESLRDLIERYDREVGMLERTIYQRVRDDRGYRAIQRIHGIGPTMAAILVAEIGDVSRFRSAEALCSWAGLTPKHRESDTKVHRGAVTKQGSRLVRWAVIEGTVRYHGGGKLAADWHRIAERRGKHKATVAVARKVLTLVYYGLRDGEIRCLAKAS

SEQ ID NO: 216259 - protein, 456 aa, unidentified
MAGSQQKKRKLSAQVVEDEDYQLRYERCAGIDVAKASGVVCTRLPAQRDGGRRVAVTETVAATVPAIAALAGRLAAAGVELVSMESTSDYWRVWFYVLEAHGLAVQLVNSAQARQLTGRPKTDDLDAKWLARLTEMGLLRPSVVPPADIRQLRDYTRARVHLVQDRTRQYQRLEKLLEGALVKVTAVTRLTTASAKDMVRAMIAGERDPRTLAALARTRLKARHEDLVAALTGMRFTDHHAHLARTLLNLIAYLDEDIAILEDKIAACLDAIPAAQGVDADGTAGGVGPDPLVLPAVWRLAEIPGLTTELACQVIGETGLDMSRFPTAAHLVSWAGLAPVANQSGPRTRKGKKGQGDSYLRGFCTQAATGAALTDTFLGERHRRIARKRGPGRAKVAVARSILIIIWHLLKDPETRFTDLGPEHYASRTDKDKKTRNLIRQLNALGLDVTITPQAS

SEQ ID NO: 216260 - protein, 346 aa, unidentified
MKKDSKKGEVKVLGIDLAKQSFQLHGVDESGRAVLREKLDRKKMSALVAQLPPCLIGLEACGGAHYWARVFKQFGHKVRIMAPQFVKPFVKSNKSDAADAEAICEAVQRPNMRFVAEKSIEQQDIQSIHRMRSQMVARRTAQSNQIRGLLMEYGIVVPKGIGHVRKQLPWILEDAENGLSDLFRELLNELYEELVHLDGRVATLKKKLQRISEQSEDCQRLLTIPGIGLLSATAMVAAIGDIKAFKNGRELAAWLGLVPRQHSTGGTTTLLGISKRGDTYLRTLLIHGGRTVVRVADKYQDRRNRWINEIDQRRGKNISAVAVANKNARVVWALLTHKTTYRAAAA

SEQ ID NO: 216261 - protein, 345 aa, unidentified
MTIVAHSRSFVIGVDPHAKTHTYAVIQTASGQLLGCQQFPTTPQGIARAIAWVGRMTGGDAETLWAIEGVATYGAKLARAAAESGYEVAEAPRMNAKARHGIGKSDPLDAHAIATAVLPLEEDRLRRPRADDGTRQALRVLVTARDQLAQEKTMNVNALTALLRTNDLGIDARKPLTAAQIGQASRWQHRTEPLALATARSEAVRLARRILELEDALTVNHARLSELITAIGACTAAVVITAWSHPGRVRNDAAFAALAGVNPIPASSGNTTRHRLNRGGDRRLNKALHYIAITRMSRHPGTKAYLEKRLAEGRSRREIRRCIKRYLARHLYRTLNTLYAAPETS

SEQ ID NO: 216262 - protein, 315 aa, unidentified
MTNPKKSRTIVNVGVDVGKWFLDVHLYEKDLYFQVENTSEGVKRLLGRLGRYQVQRLVMEATGRYQLLLAEQAFKKGLPVCIVKPLAVRRYAQALGKLAKTDKIDAQVIAEFGARAEPIVTLAKSKNLILIKDLLSRRRQLVNMKTKELNRVKIMGKALEVSCKRIIRALEVEIARMEKQLDRLIENESEWAEKKALLKTAPGIGDTMVYTLLADLPELGMMTSKQAAALVGVAPMNRDSGKMKGKRRIQGGRYSVRTTLYMATLSATLCNPVIKEFYHRLTAQGKHNKVALTACMRKFIVMLNAMIRDNCEWQY

SEQ ID NO: 216263 - protein, 337 aa, unidentified
MKITTIGLDLAKSVFHVVCFDEKHQEVSKRMLRRNQVREYFAQREPCLVAMEACAGAHYWGRELEKLGHTVKLIPPQFVKPYVKGNKNDYNDARAIAEAATRPGMRFVGIQTVEQQDLQALHRLRAQQVKQRTALCNQLRALVAEYGIVMNKGVAALRRGIPGLLEDADNGLSEAFRALLSRGYEQLLELEGHIDHYTRQVEAHSRQHEQTRRLQTLPGFGPIVASVFASVVGDGSAFKRGRDVSACLGLVPRQHSSGGKEVLLGISKRGDKYLRSLLIHGARSVVLHAKHKEDALSRWVNRVRERRGTNKAAVALANKLARMGWALLRHETVYRPT

SEQ ID NO: 216264 - protein, 358 aa, unidentified
MKIIGCDLHARQQTIAMLDTDTGELEGKTLEHQGETVREFYSALSGPILVGIEATGSMQWFLELLEELGIECRVGHPAKIRRAETRKQKHDRRDARLLLTLLAENRFPTIWMPSTEQRDLRTLLRHRDQWVRLRSRVQHTLQSMALNHGLRRGHSLWSQAGQHALRALPLAPHASERRKALMTLYPGLQESIDQLDRQVSQQVQQHPQARRLLTHPGVGPITALATEVFLGDPLRFSDGKALASYIGMIPSEHSSGGRQRLGAMSKQGNTLLRYLWCEAAMHAVERDPELKRFYRRKLVQKGLGKARVAAARKLGIRLWIMMRDQIDYEEFCRRGKARQESGSVRAGMPDRNSGPAQQ

SEQ ID NO: 216265 - protein, 406 aa, unidentified
MKVVHPICAGIDIHKKSFTVAIATTKKDGTYSTKVKTFSTMQKGITQGRLWIIENKCYTVALESTGKYWIPVYDRFEDFFDLTLANPRFTKTFPGNKTDRRDAKWLSELHRIGLVAKSFIPPRDIRELRELTRYRVKLIKMRSSEKNRAHNSLIISNIMLSSVATDIFGKSGMNIIEALIAGTELDEQALSTLVCGKLRSKIPDLLEALDGTLSQLQKDKIRIILDNFISLSEKIAKLELLILEKVKPHQQIIDLLCSLPGIKSTAAIGIIAEIGVDMSAFYSDKHLCSWAGVSPQNYQSAGKRKNVPAKSGNGYLTSMLVQCANAAVKEANSWLTNRFESIQARRGRRKAIIATCRSMLTAIYHILSTKEPYREPQKTSYISASKEKKLIAQLQSLGYKVEKLAS

SEQ ID NO: 216266 - protein, 343 aa, unidentified
MQTIKTIGLDIAKSVFQVHGIDATGSVTVRRQLKRRYVLAFFEKLAPCLIGIEACASAHHWSRQLQALGHTVRLMPPAYVKPYVKRHKNDATDAEAICEAVTRANMRFVPTKTAEQQSGLVLHRTRHLLIRQQTSVINAIRAHLAEFGIVAPVGRHGMEELLHIVADINDKRLPEVARACVAALGGQLRMLKAQILHFDRMIIAWHRGNETSKRLDALPGVGPALATALVASVADPRAFRSGRDFSAWIGLVPKQNSSGGKQKLGGISKQGDRYLRGLFTAGALAVIRYAKIHGTGHRPWLTALLVRRPTKVAALALANKIARMAWAMMARGERYREPVALAA

SEQ ID NO: 216267 - protein, 341 aa, unidentified
MESQVVMVGVDTHKDGHSAAAVDGRGAVVAAIDVAADRHGYARLLRWARCRSSERQWVVEGTGSCGAGLASFLAENGEVVFEGDRPQRRKRDAAGKSDQLDAIKVAREALARPYHAIPRQRGKREAIRVLLTSRQSAINAYRAGLNQLYALVVTAPTPLHERLILFRGERLVVACSRLRAGGDFESRVTAITMRQVARRLQNLEAEADTYERQLEHLVAEVAPALLVEPGVGPITGAQMLVSWSHAGRIRDENAFAAMAGVAPIQASSGRVVRHRLNRFGDRQLNRALHTIALCRSISHPETRAYIARRTAEGKSTREIRRCLKRYLARRFFRLLQGLDRP

SEQ ID NO: 216268 - protein, 353 aa, unidentified
MIHVGIDLHSRNMTLVAINDNGKLVAQEKLNNTSANLGQFFEPFIEPVHAVVECTSYWYWVADWCNANEIPLTLAHAKMLKAISYAKVKTDSVDARTLAELLRVGLIPEAHQCHRDQRDLRELTRGRLRMIQRRSALQSSLWQLAAKYNVIVQDVGWRYLDKLCEFLKQHLPEVARIEAQLLLDQIRLSQDHIIALEQAIEQQTGFYEAVERLKVLPGFGLVCAWTVIAEIGDITRFPTPKQFTSYCRLVPGSKDSGGKYRHRSKNKDGNRYLRVAFNQAAIIAYRDYPVVKEFYKKVTRRSGKHVARTVVGKELAKIVWHMLAKNQEYKGFKGRMTKITTPTYWPQPISPYA

SEQ ID NO: 216269 - protein, 340 aa, unidentified
MTEITRVAIDTSKSVFTLHAVDGRDRPVLRRNLRRQDLVSFFAKLPPVDVAMEACGGSHYWGRTLQAMGHRVRLIPAQYVKPFVKRSKNDRNDAQAISEAAARPGMQEVAVKSADAQARAMLLTVRELLVRQRTQLVNALRGHATEMGLVAPVGDKGLAALRSEIEADATLPEAAAEALRLLGREADRLEARLAEIDKNLLAQHKADPNSRRLSAIPGVGPMSALSFSLMVDATQFKSGRHFAAWLGLVPREISTGGKQRLGGISRAGNERLRQLLVLGATAVIRFAKPGRPSASAWLLALLERKPRKLAAVALANKMARIIWAMLTRGEDYRSAKPVVA

SEQ ID NO: 216270 - protein, 316 aa, unidentified
MSCASYWIGIDVSKGCLDVALRPQGEVFQVANSEEGITHLIQRLQAGPPALMVMEATGGMEVLAAAMLSASGLAVAVVNPRQVRDFAKATGQLAKSDKIDALVLAHFAEAIRPQVRAMADEQTRELNGLVTRRQQLVEMLTAERNRLGSMKGKAHQDVQVHIEWLGKRLQELDGDLEQRIRKTPVWQERMNLLRSVPGIGNAISRVLLVGLPELGQLSARAISALVGLAPLNRDSGKMRGKRSIWGGRARVRAALYMAALVASRYNPVIKAFYERLVSKGKAKKVALTACMHKLVVILNAMVKTGTAWQAPLGAEA

SEQ ID NO: 216271 - protein, 423 aa, unidentified
MDVLYERVAGLDVHKDTVVACVRIMADGKPKRECRTFATTTEQLMELRAWLAECRCTQVAMEATGVYWMPVFRILDEGGFELILANAAHIKNVPGRKTDMNDAMWLADLLACGLIKASFVPHEDMQEFRGLTRTRKQLVREQTRHVQRIEKTLAEANIKLSSVLSDIMGASGRRMIEAMIAGVRQPKQLAELAGKQIKATPKELYDALHGRLTDHHRFLLELHLKQWDSLDETIRKIDLEIDQRIGRADAQSGAGQPPFRALIELLTTIPGVSTVAAPAILSEIGPDMSRFRTAGHLLAWAGLCPGKNESAGKRKPSRLRKGAPWLKTMLVQCAWAAKRKKDSYYRAQFFRLQSRRGPQKAICAVAASILTAIYHIIKDGTEHHDLGGAYFDRRPVELKASHLVARLKKLGFTVQLQPIPEAA

SEQ ID NO: 216272 - protein, 353 aa, unidentified
MAHTPPPRVTIGVDTHKDLHVAAARDELGRRLGTTMAPATRAGYATLLDWAAGLGEVTAWGVEGTGSYGAGLARFLCVRGQRVLEVNRPDRAARRRRGKSDPVDADAAARAVQAGEATGTPKAQDGVVEMARALRVARQTAVKARTQAINAIKGLLVTAPTGLRQQLAGLSTTRLVRQAAALNSDTLTTPTAAAMLALRGLAQRYQHLDAEITLLTGTLDQLTANHAPALRELLGVGPDSAAALLIAAGDNPSRLRSEAAFAALCGTSPVEASSGKTRRHRLNRGGDRQANAALHRIVVVRLRWHQPTRDYVARRTAEGKTSKEIIRCLKRYVAREVFAVLHQIGQQNLTTAA

SEQ ID NO: 216273 - protein, 395 aa, unidentified
MYNLFVGIDVSKDSFSVAALDEKAKTVFSMNPFMNAEGFADFLKILSSHRNDLSTVVVALESTGPYHLNLYSFLLSKGIMSIIVNPLIIANFNKLSLRKTKTDRKDAFTIARYLYLSRDSISNLTSSQIITDLRDLARERESILKMVASIKNDIRRILQTTFPELEHRVDVLCATMLRFLKDFPSARLINQAPSLAVAEGFSQGDGRRRISVPYTQIIELAKNSVATTSPSKELILPGKIDTLFHLKKRTDEITKMLIKLCKSIRQEEFGILTSIRGIAAKTAAPFLAELGDHRKFESYKKMLAFSGLDPTTHQSGKLEGMSMISRRGNRHLRKVIYNMTFCVIRYAGPFRDYFFKRKREGLPFRKAIMATAHKLVRAIFAMLKSGTYYRSAEVV

SEQ ID NO: 216274 - protein, 347 aa, unidentified
MLALHPDLDVVIGVDTHKDTHTAAAVGATGAVLEHLTVPADPAGYRQLIAFGQRHDARLWAIEGTGSFGAGLTTALHACCERVVEVDRPQRPARRGGVKSDDIDAVRAARQVLAGVGLSEPRCRGDREAIRVLLATRGQAVTFRTRAVSALHALVTSAPDGIRERLRTLPLGQLLQTCAGLRDSSRRSVEESATVLALRSTARRALACEQEAAELEAQLDRLIRRLAPALLDQLGIGPVVAGQVITSWSHHGRIRSEAAFAKLGGVAPIEASSGTVTRHRLNRSGDRQLNRALHTIVLVRMRQDSATKDYVQRRLAQGKTIRDIKRCLKRYIARQLFRQLEALSSTT

SEQ ID NO: 216275 - protein, 289 aa, unidentified
MNDITILGIDLAKNTFQLIGVDKHHNVVMKRRCQREKLVEVVTHLPSCTILMESCGTSNYWGRLFQEMGHTPKLISPQHVTPYVGNHKNDYKDTEAIIEVGTRPRTKFVQIKSLEQQDIQSIHRVRERLVSNRICLSNQIRGLLLEYGVVIPKGFASLKSNIVALLSGGSDLVTEEIKAILVDVYEEFKVLSERINKYDKKIEAISNQQASCKLLKTIPGIGPITSTALYASMGNGSQFKNGREMAAQIGLVPKQHSSGDRQLLLGITKKGNRDLKQLLIHGARAVVAN

SEQ ID NO: 216276 - protein, 429 aa, unidentified
MQNESTPGARGPVFCGVDTHADSHWLCVLDWRGRKVLSRRFPADAAGYEALAGAIAAAGEPGCIAMEGTSSYGAGLTRHLASLGVPVREALSPARMQRRRPGQGKCDESDAERAARAAMSGSRLGTPKSQDGWVDGVRCMLAARSGAVKARTSAINTARSLLTTAPEGLRSRFRGMAGPRLMEELPSVRSEGALGAALGALADLWAAARDAALDMERAIEASLEENCPALLAMYGCGPVSAAKLAVAAGDNPGRLRSEASFAAICGACPIPASSGKTVRHRLNRGGDRQANSALHEIARQRVMRDPETAEYAERARARGKSDREVMRCLKRYVAREAYRALMRPHEIRRPEDASELVAARRAAKVSQVRAASILGTSEKYISMLERGQRELKPIRRAYEAWVEAGLPLDWDRQAFEAERKMDSKKHLAK

SEQ ID NO: 216277 - protein, 337 aa, unidentified
MNYCGMDLHSNNCVIIVSDDNDRIVYQKRLPNELAQLAAALEPYRNELAGVVVESTYNWYWLVDGLMDSGYRVHLAHPAAIRKYDGLKHSGDFADAAYLAQLLRLGVLPEGYVYPREERGARDLARKRMQLVRYRTAQILSIEGILMRQTGSRINGEAVKRLTASQIDEFALAPDVALALEANRAVSQALGQQIEALEKRLKECVSLRAEYHLLRTVPGIGDTLATTIMLETGSISRFTQVGNFSSYCRCVDSLRESNGRKKGEGNTRNGNKYLAWAFVEAANFAMRHCPQARSFYDRKKSRTNRVLAIKALAHKLARACYHMLRDQKPFDVHLCFG

SEQ ID NO: 216278 - protein, 359 aa, unidentified
MDVRDPAKRHVVGGVDTHKDLHVAAVVDERDRVLGSRSFTTTRQGYRQMLAWMGSFGEVQRIGIESTGSYGAGLLRFVQTVGIEVLEVTTPDRHDRRRRGKNDDLDAQNAAHAAFAGQRTVTPRSRDGMVESLRVLSACRKTAVAARRVALQLIQNTIVCAPDGLREVLRSMTRMQLIRTLAAWRPDLTAYRDVEAAYRITFKSLARRYLELHDEIADLDIMIGAIVDELAPDLVARNSIGHVGAAQLLLAAGDNPDRLRSEASFAALCGTSPVPASSGKTIRHRLNRGGDRHANSALHIIAIGRLRTDPKTKIYVAKRVAEGHSKLEAIRALKRYIAREVFTLIMRRHKTINQTQIAA

SEQ ID NO: 216279 - protein, 339 aa, unidentified
MSKVFKNFVGVDISKTWFDAALIRSADPSKIIHQQFSQTPDGYRKMLAWLHDHDVSLHDDTLFCMEYTGIYNTGLVTYLVEGQAQLWVEMPLRIKRAGGLERGSDDRSAACKIAWYALRYHHGAKLWKPADSSIEKIKHLITQRERIITSIKHLTVPAEELKQCGCLQDAKMMEKLQQPVIKALQKTKQGIEALITKTIKLDEALYNIVQLMQSVNGIGTVTATALLVYTKGFTAFSNAKELACYCGVVPFNKTSGSSVKYKPSVSPFANMKLKKLLHLCAMSAIQNDKEMKAYFERKTGEGKNKMSVINAVRNKLIHRVFAVVRDERMFEDNYVRQCA

SEQ ID NO: 216280 - protein, 416 aa, unidentified
MKIVRPICCGMDVHKNIIVATIGITNKKTRITEYIQETFSTLNPDLLNLKQWLINHKCFDACMESTGKYWIPIFNILEDEINIYLAHPKYVKAIKGKKTDKKDSKWICDLFKHDLIKFSFIPPKEIRALREISRYRYKLVGMRSSERNRYQNCMTVSNIGIGSVFSDPFGKSAQAIMKEVLESDIIEDEKILKCIHGSCKNKDKILDSIKHCNIETDQRFKMNESMTHMEELQVHIDNCEIEMMKRAAPMFDQFMHITQLPGISTLSAILIISEIGVDMKQFESDKQLTCWAGLAPANNESANKKKSVRISKAGQYLKPLLVQCALGAIKDKEGYFGIKYSRIKKRRGHKKAIIAIARMMLVSIYHMILTGETFNPSDYESFRNPKPPIKQQDLTEESAIEFLKKSGFDVSKLTKP

SEQ ID NO: 216281 - protein, 322 aa, unidentified
MDGSTQNSNVSFVGIDVSKSKFDAMILPEGIHLTCPYDSEGIDQLLAQLPKHDCVVVLESTGGYERRLAAELVEAEHQTAIVNPRQVRDFARGIGVLAKNDRIDAHVLAIYAQHVKLRLLGKRSEKQQELTALVVRRRQLVTLQNAESNRLEQTTVKLAAKSIRHVLDLLRKELKKLDAEIARLIEADDDWRNKSELLQSVPGVGPGTSASLVAELPELGKLNRQQIASLVGLAPFSRDSGQSRGRRSIWGGRGSVRCALYMAAFNAKRCNPIIRAFADRLKQAGKRTKVILTACMRKLLVILNTMVRNKTTWKTTVVPQNT

SEQ ID NO: 216282 - protein, 277 aa, unidentified
MRYLGVAVAKNTLEVADASGKQRRSFPNTRAGIQALLHWLVQDSCPGEWHLVLEPTSTYHHPLVVALAAQRAPYTLINPAHTAAFARVQGKRAKTDRVDARLLAALGESQQPEPTQPPQGDQEGLRATRRHLEWLDQELQRIHNRLEAARFSPWTPQAVLQSLERTIQQLEEEARQVREALERQQQAHPDWTVQMKPLTSIPGVGKKTALLLLSALPPVTSCSSARSWAAFCGLNPEPSTTTLGISERASRRFGPHSMALRRIAEQLPLGQSTAKVT

SEQ ID NO: 216283 - protein, 374 aa, unidentified
MHKDTIVVSLAKAGLRGTLQEVREYGRVLNTPAALKAMATKLAAGGNELRFCYEAGPCGYGVQRQLSGMGHQCAVVAPSLVPRKPGERIKTDRRDANNLARLHRAGELTPVWVPDQAHEAIRDLVRARVAAVRSLRQARQQLFGFLLRNGHHYHRTPWTAPHRRWLASLKFEQAVHYTVLEDDIAAVEAAKERRDRLEAQIIAVLPEWSLAPVVEALQALRGIALVAAATLVAELGDMTRFDNPRQLMAYIGLVPSEHSSGRSRRQGEITKAGNATARRMLIEAAWSYRFPARISQQQLLQQAHLAKPIRDIAWKAQERLCRRRRKLIRAGKPKNVVAAAIARELAGFVWAIATETNSVGGRKGSGSPAGVFAS

SEQ ID NO: 216284 - protein, 344 aa, unidentified
MDHFGGLDVSVKETSICIVDDTGRIVKEVKVASEPEALLKVLWNPAYRFKRIGLEAGPLSQWLFSALAEAGLPVVCVETRHMRAVLKAQINKTDRNDARGIAQMMRVGLYRPVHVKTLRSQKLRMLLTHRKLLQSKAIAIENDLRGTLRNFGLKVGMVGKVRFEARIQELVENQTDLAVLVKPLLIVRRVLREQIVILHRRLLAIVRDDEVCRRLMTIPGVGPVVSLTYRATVDVPARFRKSKSVGAVFGLTCSRYQSGEVDWSGEISRCGDEMMRSMLYEAAQSMLRSKKWSWLKAWAMQIAKRRGMKKAIVALARRLAVIMHRIWVDGTEFRWSREQAAAAA

SEQ ID NO: 216285 - protein, 440 aa, unidentified
MRIMYERCCGLDIHKASIAACALISEKGKPQEETRRFGTMTADLRELAGWLQQKGIRHVAMESTGVYWKPVWNILEPAGFELLLANAQEVKVVPGRKTDQKDSQWIADLHKHGLLRNSFVPPRAIRDLRDLTRTRAILTQEHTSICNRIQKVLEDANIKLGSVASDVFGVSGRAILRALMKEEHDAEALADLSKGLLRKKIPQLRRALEGQVRAHHRSLLTGQWSRMEFLEREIVDLETQIAERMKPTPEETALTLPNTAEDAPAPLSPREEAIQLWMEIPGVGWTAACSMVAELGVNMDQFPSAAHVASWAALCPGNNESAGKRLSGKTRKGNVWLRRTMCEVAWAASHTKDTYFAAQFHRIASRRGNKRALMAVAHSILVTAYHMLKHKRHYQELGADFFDAINRDKVRDRLVQRLAKLGFDVTLKSKDSIASDSQKN

SEQ ID NO: 216286 - protein, 399 aa, unidentified
MVNPVSLQLRVGVDVGSRCHSVAIGLSDGSLLEEFEIPHRAEGFREFFARVEASARRHAAPVAVAMEGYNGHVRPLDSLVRARGWQLFNVNNLKLARFKEIFPAAAKSDRIDSRKTLELFQLRDHLPMAGEVLQEVMATPEENNVLKRLSRRRRRLVNERGRVANALQADLQAVCPGLLEITRDVGNLWFLNFLTCRKGLLKLERVRRAGLLKVPGIGTHFADAIQAWQNRAYFAADASLVGDMIQQDAARILELKQQIKALEEQMAQIAESSSIAGQLASIPGYGSVCSAELAGEIGTVERFRNEASLALYLGMATLDNSSGKSRGAKPPRHVNTRAKAAMMFAVDHHRKLVPQSQRYYERKRAEGKKHNQAIRALGRHLCRVIFKMLTQDRPYRIDP

SEQ ID NO: 216287 - protein, 408 aa, unidentified
MLGWVADGQEVGFTIRNLTLRIKMSKLNLTDTSAAAEYATVYVAFELSKAKWKVGVKLPGSQRVSRFTIDGGDLTALSAWLAKWRARAEAIGKPVRIISCYEAGYDGHWLHRWLTSQGVINYVIDPASIQVNRRARRAKTDNIDLEQLMRTLLAYLRGEPGVCSMVRVPSPEDEDRRRTSRERDSLLKERSSHSNRITGLLHAQGIRDAMPFKRGFIASLDTVRTGDGRALPARLKAEIVREHERLCLVHKQIIALEAKSKAEVRAAVRGSVEEKIKDLIDLKGLGVVSAQKLMHEVFYRSFDNRRQVGSYFGLTNSAYDSGDSHRDQGISKAGNRRGRTLAVELAWLWLRFQPGSELSRWFNERVGSIKGRIRRITIVALARKLMIALWRYVTTGVVPTGAVLRQSV

SEQ ID NO: 216288 - protein, 451 aa, unidentified
MEEEVISMEIVNPHAAGVDVGSRSHWVAVGQREEDIREFGVFNQQLFEMADWLKEKKVKTIAMESTGTYWQNLYAILISKGFHVILCNGKFTKNIKGKKTDVKDCQWIQKLHSLGLLSGSFLPEGQTEQLRTYCRHRSNLLHSAASTSKKMQKYLRLLNLRLDVVVNDVCGLTGLLIIRAICDGESNPEKLASLRHGNCRKSESEIAMALQSNGRADYLFALQQELDTYDHLQKKIGECDVMIEKKLNEIISEDDNKQQHHIDPKIYKKINKNTPKGIDLNLKSYQMFEGIDLLAIEGMSYSTVLALMSEVGIEGIRKFPTAKHFTSWLRLAPNNKVSGGKVLSSKLPKGSNRLKIALRNAANAIGNLKESTPLRDFFHRISFRKGRVSAISATARKLAVIIWNMVVKGIPYNNPSGYLFLDQKRKLGIVKRIQKQIDKFALTTEDLSLIK

SEQ ID NO: 216289 - protein, 337 aa, unidentified
MPQLAQFQQHSAEYRAIGIDVSKASLSVHGLLAEGGVSLTLPNTSTAVTELMQGLAKAGFAGRIVLESTGYYHWLAVVCGAEAGLDVRLVNPLLSSKHARAAIRKTKTDPVDARQLACMAITEPHLPAPWQHDRSWVALRHQAGLLCTLEKVLQRLQATLRDHRAALATLGVTDAPIVTDLAEQIKTLRRRCKRAEDALATGLKAYAHAPLHARLQTVPGVSAYVAGLQALFFRTDVRGPKAWSAFIGLDLSIKQSGTWRGRSRLSKRGNAYLRKRMFQAAWGAMQCNAEFKAYYQRLRAQGRSYVEALIMIARKQLRIAYVLWTQDRTYDPAMLKT

SEQ ID NO: 216290 - protein, 480 aa, unidentified
MAKRAVQHADLKAVPMLLNESLYVGIDIGKAKHVAGFLSKTLLERHERFEACPALVFENSREGFRLLIERIRSLAPLEHIFVLMERTGHYHRTLEQYLQELDITVYVMHVQSRSTGMLKTDKRDALTLANQLYNQLELGVQVPNKLQLIRRVVPPTQAAAELRGLIRHRYELIHESTRRKNKLTAICDELFPELVRVVKDPNGQVALALRERFPTPAALATVSLTTLQQIRGGARSISSAKLLELQRQAAQSIGIKEVARLRGLVLEQTQLIKELQMLQEHIQQLDKEIGGIVEHAREGQILLSFPGIGPIMAATSIAAIGSIHNFPSAAALKSYFGWAPVVAQSGSTLDHTRLTHGGARTMKHMLFLAVFQAIRLKDNEWARLYERLVKTKCPFDERTQSYLGKTRVIGRVAGQMTEAIYALLKRDAELLSKVPPSQDPPPPLLYDPEVHRQHRLGHYRPLKSTPPPNTITLLHPFPAE

SEQ ID NO: 216291 - protein, 356 aa, unidentified
MQTQVTKKIDFKDKNLFIGLDVHKKSWSVTILVEGMEHRTFTQPPDPKTLYNYLQKMFPGGTYYSAYEAGFCGYGVHRELNSFGIKNIVINAADIPSSQKDQLGKRDPIDSRKIARGLEKGLLRPIHIFKRDEEELRSLNRTRFYLMRDLRRSKNRIKSFLFYYGILIPQEYDNNQWTLKYVGWLKQIQMKTMSGQEALINLISSYEYHRAQILTLSRQIRVRIKEYDNELYSLLKTISGVGPLTASALITELGDINRFPHKDHLCSFVGLIPRVKQSGESSYSGGITFRCNEYLRTLLIESSWQAIRMDPALMQYYHEHLINNKGQKVIIKVARKLLNRVRYVMKNRQPYVTGVA

SEQ ID NO: 216292 - protein, 347 aa, unidentified
MRFYTTQHQFYCGIDLHARTMYLCILDQHGEILVHRNMKTSPEAFLHVIAPYRQGIVVAVECMFTWYWLADLCADAGIPFILGNALSMKAIHGGKAKNDKIDAHKIAALLRGGMLPQAYVYPAQMRATRDLLRRRMPLAHKRAELLAHVQHTNSQYTLPAIGKKIAYKANREGVAERFADPAVQKSIEVDLALITYYDELLRDVELPIVKTAKHHDANTLYLLQTVPGIGKILSLVLLYDIHQIDRFPRVQDVVSYCRLVTCARESAGKRYGTSGTKIGNAHLTWAFSEAAVLCLRDHPAAQKSLARLEKKHDKGKALTILAQKLARAVYDMLTRQVAFDRETFFQR

SEQ ID NO: 216293 - protein, 344 aa, unidentified
MEHYVGLDVSLKETAVCVIDGEGNRIWQGKCTSTPQDMEALIRKRAPHAVRIALETGPLGVWHWHALRAVDLPVVCIHARHAKAALMMQLNKTDPNDAFGLAQIVRCGWYREVEVKSIDSHRIRLLLSARSRFVSMRTTLYNQIRGLVKTFGIVLAPGKGGTFVREVEAKMPCDPIVETVIGSLLSAWKTITAQLIKLDHDIKVLARESAVHQNLMTVPGVGMVTAAAYVATIDSPQRLSKAKDVGAYLGLTPRRYQSGQVDRNGRISKCGDGMLRALLFEAAHALLTRTKHRSALQTWGLALAAKTGPAKAKVAVARKLAVIMHRMWLDNTPFRGSADLALAA

SEQ ID NO: 216294 - protein, 340 aa, unidentified
MRMFAGLDVGFKRTAVCVVDEAGRIVWRGMVDTHPEALSRALQHWGEKLAKIGLESGSMTPWLARELAKVGFPMVCMDARAAADAVRSRRVKSDKADAHALAEMLRTGWYRTVYVKSEDSHRLKAMLGARDQLVRAKRALGNQVRGVLRPFGIRLPSRQGTKKFAEAAHQAVRRDNMLHASVTALLEALAAIEGQIARLDEQLKELARRSPVCWRLMSVPGVGPIVALAFMAAIEDINRFRRMRSVGAYLGLTTRRYQSGETDVVLGISRQGDAMARHYLYEAANVLLTTVRRPSALKSWGLKLMKRRGPKRARVAVARRLAILLGRIWKDKTHFDAVPA

SEQ ID NO: 216295 - protein, 403 aa, unidentified
MREGLFAGVDWASEEHAVCVVDEQGRIIEGRRYTHDERGIGALCSRLLKLAVELVSIERPDGLLIERLLDAGLRVIAVHPNQVAAMRPRFSVAGGKSDNFDAFVLAELARTDSHRFRILVPDSDRTKALRASTRAREDLVATRVALANELRAQLQCFWPGATKIFADLDSPIALAFLGRYPSPADARGLGEQRLAGFLTRHGYSGRRSPAELLARLRNAAEGRAGELESQARRQIVLGLLAGLEPVVAQIAELTRQIRAALEDHPDGNTFRSLFIDPRSVVCAATMLAEIGDSRERYPTYRALAADGGQAPVAVESGKSKRARFRWACDHRLRDAIATMADSSRHHNPWAADIYTRARTRGASHQHAIRILGRAWCQVIWRLWQDHATYDPSQHTARAHLTAA

SEQ ID NO: 216296 - protein, 315 aa, unidentified
MTDIITQNVGVDISKATLDVQLHPAGKARQFANDAKGIRALLAWLGGYSIARVVFEPTGPYHHGFERRLGEAGLPLAKINPLQARRFAQATGAHAKTDAIDAAMLARMGALLTPPARPITSQTIDEMKELHIARLALIKDRTAAKNREHACRSPLLKRHATQRLAQIDRQIAAIDAALSALLHNEPDLLARFGILLSIPGIGTITAITMLIEMPELGQLDNKQVASLAGLAPVARDSGQYRGRRHIRGGRAILRQALYMPALVATRYNADMKAKYQAMTAAGKPAKVAITAVMRKLIILANALLRANRPWTQNLA

SEQ ID NO: 216297 - protein, 375 aa, unidentified
MACAGSFDPRMAFGQSVAQPEPRTPCAPNSNRCQSVGYHRQLVYVRMSPNTITTMQTIPVTVYAGVDVAKATLQLHLQGRQAEFSNQAAGLVQLCQQLKTIPHIHVVCEATGGYERLLVQAMHQAQIPVSVTNPAQVRAAAQAQGQRAKTDRIDAALLTDYGQRYQPKPTSPTTASQDQLVALTQWLMQLVQAQALAKTQAEHHQAAFVCGRHTKLMAHYQSQIVAVEKQIRALLAQDAQLQQRVDCLDEIKGVGARTAWLVLAHMPELGQINRQQVAALAGLAPWTRESGTMKGMRCIGGGRPEVRLALYMAALSAARCNSVLKPFYQRLRAKEKPAKVALTAVMRRLLVYMNHQLKALQATQTDTKLQNSKIP

SEQ ID NO: 216298 - protein, 343 aa, unidentified
MKLHVLGIDLGKTVFHLVGLDSTGRAVIRKRCSRKQLLAFTANLEVQLIGMEACSGAHFLGRALREQGHEVRFMPAQYVKPYVQTNKSDYLDAEAIAEAVQRPRMRFVPIKTEEQLDLQALHRVRERWVMRRTAVVNQIRSLLLERGLTLPKGRGHLDEQLPRILEDAELNLSGSFRVLLAQLQLELKQLATRIEEMDRVIQKIAKENEACQRLTEIPGVGPVTATALISAVGNGSTFQKGRNLAAWMGIVPGEYSTGGKQKLLGISKRGNKYLRRLFVQGARSVLQQRHKQAARLSSWLAQLLGRTHQNVVVVALANKLVRMAWAVLCKNERYRTPVLAVSV

SEQ ID NO: 216299 - protein, 493 aa, unidentified
MKKRKHFNNLSPQPSKCYKSNQQAKRTYWGVDVANGFIILNNGNPCVFYLFVDAPTKKPALPSNKLRACKKKTKVVQIKDLSEIIKPNDVVILEQTGNYGIRYAQIFSQLGATVMLADSKMFAFFRRGRNIHKNDKVDAYLLRQMFFDVEFRDYIYKFIPQKHYLRQLIKSTQKLEKERTRLINRTKNFLAVTLPYENYHHLAPQQFIKKIPEIRQKVSQIPHPYTETILISLDILENYERLLKIQEKEIESIVKNHPDYEILSTIKGFGTKTIATLIAYYWDIKRFKSVTQFKGYLLKGTIREQSGTTIDKRKNIKSRPEVKKMLYILWKNTARRKDNPLKHIVRLSYDINKKKAWLKFADKLLEIIFYMLKYRLTFEEAIKYTLNNKAKELQNLLNQLTKPINLGDKEEIQNFLKKLAKLNHLIKNWVAYQNTASEGGATELCHPPQDYLLYLLSLKPLEVLKALQVTLSTIESSLTEVLMPSLKTLLKEG

SEQ ID NO: 216300 - protein, 351 aa, unidentified
MPSLAEFADVVIGVDTHVDTHSAAVVDARTGAVLEELTVATTPAGYQELVDLANAHSPARVWAIEGTGSHGAGLTRYLRRGPEVIVELDRPERATRRHGAKSDPLDAVRAAREAMARPVLGTPREGDGDRQALSVLLAARRSAVDGARVAQQQLFSLIIAAPEVLRDKFRGATSAQRLRVAARLRVAAAWDTHTTTTASVLKTLARRAQALTAEANTLEKEIRRIVKAWRADLLDQFGVGPIVAATVLCAWSHPGRVRSEAAFAMLAGVAPIPANSGQVTTRYRLNRYGDRQLNRALHTIVLNRQRHQEPTKAYTAKRTAEGKNPREIRRCLKRYIVRDLYRLLENPPLPR

SEQ ID NO: 216301 - protein, 409 aa, unidentified
MKLFVGLDVSSFDIKVCFLNGEGDELKAFTVTNDLPGATQLRDEILNVVQDQSIDELRIGLESTSVYSFHPSMFLHHDESLRALGGQVLVMNPNQIANFKKSYSDMNKTNEIDAFVIADYLRFGRLPMSVVKEEQYVALQQLTRARYNIVRQMTKEKQRFLQYLSYKCNTFTEEVESSVFGKAMTDLFLESYSLDELSQMPLEDLVDYLRFKGRNRFPDPTHVAKSIQKAVRSSYRLDKVVEDSIDTILGTSITLIRTFEKQIQELDKSIKRIMKGIPQTLQSVPGIGPVFTAGIIAEIGQIERFNDETKIAKYAGLYWRKRQSGRFTADDTSLTRKGNEYLRYYLVEAANKVRSHIPEYGEYYAKKFKEVPKHQHKRALVLTARKFVRLVDALLRKNQIYTPRRSVHT

SEQ ID NO: 216302 - protein, 382 aa, unidentified
MNRIIKIGMDVHSTNYTLCAMEPVLDGEDRIFANIQVTPDYKNVLQFIDNLKNKLGPDDSYSIECGYEAGCLGYSLYNQLTSAGVKCIILAPTTMLTQQGKRVKTDKRDAVMISQCLSYGGYHAVHVPTDKDDSVKEYLRMRDDHKLALKKIKQQINAFCLRHGYFFPDTKWTIKHLSWLRKLEITGLLRETLDEYLASYDEQTAKIERFDQRIEELASDPDYKDNVKKLGCLLGIKTHTALSLIVETGDFSRFRKGSTYAAFLGLAPGESSSGEHINRTGISKAGNSHLRRLLIEGAKGICKGKVGHKSKELRSRQAGNSAEVIVYADRGNTRMRSKYYRMLRYGKKKNVAVAAIARELACFVWGIMTNNMEPRTSGKKAA

SEQ ID NO: 216303 - protein, 347 aa, unidentified
MNFYTQQHKHYCGIDLHARAMYVCILDQHGTKLVHKNLPTTPEAFLRVIAPYRDDLVVGVECIFTWYWLADLCAKEGIAFVLGHALYMKAIHGGKAKNDKIDAHKIAVLLRGGMLPRAYVYPVEMRATRDLLRRRCHLVRKRAELLAHIHNTNSQYNLPEIGKKLAYKANREGVEEHFPDPSVRKTIEVDVSLIDHYDQLLGEVELYITRTAKAHDVQTFARLQSVPGIGQILALVLLYEIQDIARFPRVQDFVSYCRLVKCAKESNGKRLGTSGKKIGNVHLRWAFAEAAVLFLRHNQPGKAYFTKLEHKHGKAKALTVLAHKLARAVYYMLAREQAFDLRRFVSA

SEQ ID NO: 216304 - protein, 325 aa, unidentified
MDVIGIDISKLKFDVVLIIGVRSKHAVFSNTEAGFQQLLIWLGKQCPDPACPLHACMEATSNWGLDLADFLHGQGVQVSIVNPLRIKAFGQSELARNKNDKLDAGVIARFYRAQNPPLWMPPAPHLRELRELVRRCNTLKDARVQETNRQKSGFASAAVAHSIETHLAWLDQQIEEVSGAVLQLIQGDPTLRKNLSLLRSITGFGDVSAAILLAELPNIADFTPKALAAFVGLSPQEHSSGSSVRRPGRMSKVGAERLRGTLFMCAFSAKRFNPRLADFVKRMTDAGKAPKVILVAVARKLLVYAHAVIRTQKPFQPFPDAPSSI

SEQ ID NO: 216305 - protein, 415 aa, unidentified
MTAQRNKVCGVDIHKKFLIATILTRDGTKLQKRFETDIDNLLNFRDWVIEENCDCVAIESTGVYWYPVHAVLENKVELILANAHQIKHTPGRKTDALDSEWIAEVALNNQIDPSRILPKEDRELRRLTRTRESLVKIRSQMKNQVHQGLESCSIKLSSVLADSFGKSGRYILDGLIKGNNIDEVIAGIPSKRVRNNGDQIRAAIKTGLDQIQVFLIQSHLDTIDCLTQKLDEIDLEIKQRISGRKEDLKIAMSVPGIGFTAATTILAEIGNYRDFSNPDKLAAWCGIVPSVYQSADKLINGSITKQGSKHIRWILVQVAQAATKKKGSMLRKFFLRVKARKGHNVAVVALARKILCILYHLLMNQEMYQEGGVEKSRTPRLDWSSSTTNKMSLKTMIEIIAKAGYEVKKIERDGG

SEQ ID NO: 216306 - protein, 348 aa, unidentified
MKKNTIIGIDLGDKFHIAVVFDNEGNELATNRVTNTKVSINKFFQSYPDATVAMEAGTHSPWISRMLMEMGLTVYIGNPRKLKLIWDSTDKSDARDARILGMVCRIEPRLLHPLKHRSSQAQADLGSIKSRDILVKSRTQLINHVRGLVKANGDRLPKCSSESFAKKCEPLIPSELRGSLEPVFKIIFDLTEQIKELDRKIEQVSKERYPETQYLSQIPGVGPITSLCFVLTIEDPASFAKSRQVGPFLGLTPRQDQSGDTDKQLPITKAGNSYLRQLLVGSAQYIMGPFGPESNLRQHGLSIAARGGKNAKKRAVVAVARKLAVLLHRLWVTGDTYQPFYSMGKKAA

SEQ ID NO: 216307 - protein, 350 aa, unidentified
MLIIGCDYHPSFQQIACVDTETGELEERRLVHPQEAEQFYGELKQRKVAVRVGMEASGHARWFERLLAQLDCELWIGDAAEIRTKRVRKQKTDRQDAELLLRLLLEDRFPRIWVPDAANRDLRQLLWHRHRLVQMRTRVMNQLHVVALNEGVRRKKALWRPAGRQELESFVLAPWASRRRQDLLDLLDQLTPKIQQLTQALEAEVQKRPVTRRLMTHPGVGPLTALAYELVIGSPERFHCGKQIASYVGLVPEENSSGDRRRLGHISKQGNVLLRFLLVEAAQVTVRSHPQWRSKFFHLAMRRGRKIAKVAMARKLAVHLYWMWRQGWDYGQLQKLGSHAGEPGHPDGVQ

SEQ ID NO: 216308 - protein, 371 aa, unidentified
MEHTRFVGLDIHKERISIAVAESGRSGGVEYLGEISNDPVAIGKLCDRLGRSGKKLAFCYEAGPCGYGVHRQLTGIGHRCDVVAPSLIPTKPGDRVKTNRRDATMLARLHRAGELTPVWVPDADHEAMRDLIRLRGVVRQIVTRARQHLQGFLLRHGRKHGRGTAWRMAYRRWLSTLAFKHPAQQIAFQDYVDAVMDAERRLKRVEEQISGLLPEWNLRPVVDALQAMRGIALINAVVLVAEVGDFTRFTNPRQLMAYFGLVPGEQSSGETIRRGGITKTGNAHARRALVEGAWAYRMKARIGRHKVDRIEALPKIIRDIGWKAQVRLCTRYRRLRARGKTANVVNVAIAREMVGFIWSIACTIQSAPKTA

SEQ ID NO: 216309 - protein, 463 aa, unidentified
MAKKNPATRQSKGKVRQNILERINLHAAGIDIGANFHFVAVGEECAEENVRKFDAFTSDLHRMADWLSEHHIQTVVMESTGVYWIPAFQILEQRGLEVKLVNAAHVKNLPGRKSDVSDCQWLQQLHSFGLLNGSFRPKDEVCVLRSFLRLRDTLVKDSSSHILRMQKALTQMNIQVHRVITDITGYSGMAIIRAILDGERNALKLAQMKHPLVKAPTEVIVEALQGDYRTEHLFELQTALDLYDVYQRKILECEAQVEQHLQQWEPKVDFEQALAQTGALQTRSASVRLELHRQAQLVSVCGVDLTRVPGLSTLAVRTIIGETGLDMNCWKSEKHFCSWLKLCPDNRISGGKVLSSRARRTRNRATAMFRLAAQSAMRSQTAIGAFIRRIKARLGAPIAINAGAHKLAQLFYRMLKFGETYVERGQTYYETKYKERLLRNLNRRAKEFGLQLAPLELSTGFVS

SEQ ID NO: 216310 - protein, 353 aa, unidentified
MHIIGCDFHPSWQNIAWLDTETGEVVERKLVHATEDAHRFYRELPAPALVGVEATGNSQWFVEMVRGYGHEIAVGDAAQIRASYVRKQKTDKRDAAHILKLLVEERFPKIWVPSSEERDQRQLLIHRAKLVEVRSRVKNGLQHLALNQGLQKKRRLWSKAGQQQLHELELQPWAGRRRSDLFELLKKLDLQIAELDQAVQAAAEHDTHAKLLMTQPGVGPITALAFVLTIGDVARFQRSKQVASYLGLIPREHSSGGRQKLGAISKQGNRFTRSLLVEAAQSAVRYDPHFRKEYQHRCHSMPRGVAKVAAARKLAVRLYWMWRAGVPYPAIVHAGSSPRVPLDVAPQGDRPQD

SEQ ID NO: 216311 - protein, 412 aa, unidentified
MRSVGLDVHRDFCEVAIIDPAGGRARGRVPSTREDLQLFAQSLAPDDRVALEVTGNAWEIARILEAHVARVVVVSPSDTGIRQARAKTDRLDALALAKLLAAGSLDAVWMPDEPVRAMRRRLARRAQLVSARSRVKNEVHAVLVRCLKGRPPASDLFGRKGQAWLRELQLPAVERETVDAGLRQIAFLDSEIAEVERRIALHAMQWPQIGRLMTVPGVNLVVAATFLAAVGDIRRFPNTNKLVGYLGLDPRVRQSGDQPAKHGRISKQGSAHGRHALVEAAWSAVRQPGPLRAFYQRVRARRGHQIAIVASARKLACLFWCMLTRGEDYAYAQPSLTKKKLRRLELTAGAPKAQGTTAIWSTNDAMRHAERALAEQAELAYRRNIADWQATRPSTAGAGATQGHASREPSKG

SEQ ID NO: 216312 - protein, 424 aa, unidentified
MKFKMQDKQNQLIQRITDQHLVVGVDIAQQVHVARAVNFRGIVLGNPLSFGNHEEGFHQLLLWVKKLLESHHLTTVIVGMEPTGHYWLNLAKWLSEHHIEVVLVNPHLVKKNKENRDNTQSKSEIKDALVIADMVKNGYYAFTRPNSETFEKLRVLMSNRDVVVKRLVTTLNQLHRWVEIVFPELRQVFKDITCKAAIATLRSYPTPKELRSLQPEEIVTQWKLWMKRHAGLKKARLLIHHAQSSVGTQRALEAHKLHLKQLLEEYDLATTQLKAIEQEAIKVLETIPFAKKILAIKGISAITLAGILGEAGDLSGFAHGNTLLRHAGLHLAEASSGKWKGQIVLSKRGRSRLRRFLFMATMNLVINNPEFKAIHSNNVKVKKLKKMKSIMKLCGKLARVLVGMARSGLEYTPEKVVTTIPVAA

SEQ ID NO: 216313 - protein, 423 aa, unidentified
MKSLRRQNFTAYVGLDWADSKHDICLLEAGSEQREFACVAHQVECIDEWAKSLQQRFGGPIAVALELAKGPIVYALQKYDFLVLFPINPLTLAKYREAFRPSRAKDDPSDAELALDLLVRHPERFAPLQPQSVGMRTLISLTERRRELINDKTRVTNRLTNTLKQYYPQALEWFDQHDTVMFCDFLSRWPTPLQAKRAHQASIKAFHHAHNAHRPKLIAERLAAIKAAVPLTQDPGVVVPCRLHAMVLVEQLRLALQAIEQFDRHIAELAPTLPDYRLFEGLPGAGPHLAPRLLVAFGEDRERFQRAEELQKYSGIAPVTERSGKKNWVHWRWQCPTFLRQTFVEWAGQTINKSFWAGAYYNQQRAKGSTYQAAVRALAFKWIRILYRCWKSRIPYDESKYLKALKKRRSSLLNNLVPDPLNA

SEQ ID NO: 216314 - protein, 403 aa, unidentified
MNSVGIDISKGRSMIAVMRPFGEVVISPFEVRHTDSELSELAGQLKSLDGETRVVMEATGNYHTPVAKLLHDAGLYVSVVNAKLVHGYGNNDLRRVKTDRKDAVKLANYGLDRWLTLPRYVPEEDTRLLLKNCYRQYRQYSKVQTVLKNNLISLLDTVFPNVNRLFSSPIRGDGSEKWVDFVAEFWHCRCVSEKSEKAFTSKYQRWCRKHGYNFNVEKAHTIHAEASGHIGIMPKSETTKLLVEQAVAQIRATSAALTALKRGMLALAAQLPEYPVVMGMFGVGPTLGPQLIAEIGDVRRFYSKKALVAYAGLDAPPDDSGNVTGKHKPMSKIGASSLRRTLFLVMSVYLQNAPLDEPVYQFMDRKRAEGKPYRVYMMASANKFLRIYYATVKAYLESLEHTA

SEQ ID NO: 216315 - protein, 351 aa, unidentified
MDNIIRIGVDTSKSVFQLHGVDKNEHPALKKKLRRKDVLAFFAGLSPTKVGMEACGASHFWARELGKLGHEVVLIPPQYVKPYVDRGKNDAADAEAICEAMSRPKVQRRFVPAKEIESQAGQMLMGLRDQLVRRRTQLSNTIRGYAAEFGFVAAKGLANIEPLLLRLADDENLPSLAKELFVVLGRELTGIDGQIKMLTARLMAFHHGNEVSRRLTEIPSVGPIGACLLTLKAPAPSAFRSGRDFAAFIGLTPKDHSTAGKIRMGGITRAGDEALRKTLVVGATALIQQVMRGQSKPSPWLAALLKRKPPKLAAVALANKTARIAWKLMVSGERYDQTRGMVPRESVSVTA

SEQ ID NO: 216316 - protein, 363 aa, unidentified
MVYGGGCGSALDAERASPSVMMNGSRSVRARAVVDDAGKVILQQQVPTEPADIIAFLTSLGVTYSRIGIEAGPLSQWLVNALMAADLPVICVETRHMKALLTAQQINKTDRNDARGIAPMMRVGLFKPVHVKTLVAQEQRMLLTSRKLLQRKLLDVECDLRGTLRNFGLKVGVVSGSRYEARVRELVVGFPRLAAITEPLLNVRRVMRQQFAVLHKMLLDTVRGDPVCRRLMTAPGVGAVVALTYRATVDQPQRFVHSRAVGAHVGLTPKRYQSGETDCDGRVSKCGDALLRTVLYEAAHSLLIQSRKWSWLKAWGMRVAQRRGIRRAIVAVARRLAVVLHRMWVDGSEFRRSKDSAAVPAVG

SEQ ID NO: 216317 - protein, 360 aa, unidentified
MRIIGCDLHARQQTLAMLDTTTGEVVKTTLGHEGNNVREFYSQLPRPVQVGIEATGTMQWFVNLMEELGIECLVGHPAEIRAAEPRKQKHDRRDADLLLSLLVEGRFPAIWLPTKELVDLRALLRHRHQWVCLRVKIQNALQAIALANGLRRGSSLWTQAGQHAIAALPLSPHAAYRRDELQAMYVKFETEIEKLSQRVEQQVRERSGARLLMTHPGVGPITALATEVFLGDASRFAGSKELASYAGMIPGEHSSGKRQRLGGLTKQGNPLLRFLWSEAAIHAVRRDPELKHFYRRKLIQKGLGKARAAVARKLGIRMWIMLRDQIEYNEFCRRGQMQQKSGGACAGMPGPRYGAKSPAD

SEQ ID NO: 216318 - protein, 344 aa, unidentified
MSEVSIIGLDIAKHVFHAHGADRKGRAIFSKRISRGKLLDFFAAQPSCTVALEACGGAHHWARQLARLGHEVRLIPPAYVKPFVKRQKNDAIDAEAICEAAQRPSMRFVAVKSEQQQAAGLVFRTRDLLVRQRTQLINAIRGHLTEYGWVAPKGPSHVTMLADLIEEEEMARSLPEAAHAMFRLMLDLFASLNGKIADLDKEIARRAREDEVSRRLMTVPGIGPISATAIAALAPPVETFAKGRDFAAWLGLTPLQRSTGGKQKLGATSKMGERTLRRLLIIGSSAVVQQVSKRGAPKGSWLEQMLARKPRMLVTVALANKMARIVWALLVKQENYRAPVAAKA

SEQ ID NO: 216319 - protein, 371 aa, unidentified
MSEITPNTADRRIVRVGVDLAKRVIQVHAVDTAGKLVTNRSLPRDKFVQWCAQLPAGCMVAMEACSGAHHWARKLVVLGLDARIIAGQHVSPYRLQGKTGKNDANDAAAICEAASRPRMHFVPIKTASQQGMLCVHRLREGFKQDRTACVNRIRGLLAEFGIVVAQSTRALRAVLSEVLEDGSNELSGLARLAIERAQDQWRELDEHMDWCDKRIAAHVHDDTQAHAAVELLGVGPVTASATVATVGDFKQFKNGSQFGAWLGLTPKQNSSGGKNNLGAITKRGDVYLRTLLIQAARSMVLTAHKRDDPISQWVFKLRERSGWQKAAVALANKNARILWAVMTKGVVFDARHVSVKPGGAIAAPPIAGALA

SEQ ID NO: 216320 - protein, 406 aa, unidentified
MRAIGLDVHRDFCEVAICEEGKVRLAGRVESSPEALGALAASLGPDDRVALEVTGGAWAIVAILDPQVAKVIVVSPGDTGIAQARAKTDRLDARTLARLLWAGELEPVWAPDELTRLLRRRLARREQLVRARSRAKNEIHAVLMRCLVGKPPVSDLFGKNGRRWLKGLELPVEEAETVEACMRHIEFLDAEIAEVERVIARYALSCSDARRLMSVPGVNVICAATFLAAVGDIGRFRTSRQLVGYLGLDPKVRQSGSSPAKGGPISKRGSGTVRWALVEAAWSVVHQPGPMRAYYQRLRARRGHQIAVVAVARKLAVLFWCLLTREEQYAHQQPSLTAKKLRLLEIRSGAPTMKGQRTGTFATREKMREAEQALALAAEASYVRMVRDWQAAAPKKVGATVTPGRA

SEQ ID NO: 216321 - protein, 357 aa, unidentified
MKKDNAKKSPRRKEANRQSDRVTIGMDLGDKTSRYCVLDDEGEVMAERSVATTKKGMLQAFGAMERCRIALEVGTHSPWINRLQTKLGHEVIVANARQVKLISASSRKDDRLDAQMLARLARVDPKLLSPIRHRSEEAQADLNLIRVRAALVDGRTALVNAARGFSKASGERLPKCDTDQMDVERMAELPVELREVLKPLIEQVESMTETFVLTVEDKDRFAKSRDVGFDPDEDLRDNLSGDKITCLSVPVVMGLRPKRSESGQSQPQLRITKEGDVYLRKLLVQGAHYILGYRGPDTDLRRWGLKLAERGGKNAKKRAIVAVARKPGVLMHHLWATGEVYEPLRNAQETASRKKAA

SEQ ID NO: 216322 - protein, 342 aa, unidentified
MNHYAGIDVSLECSSVCVVDASGKILREARVASEPEALIAWFGSQGLSFERIGLEAGPLSQWLFAAMKAAGLAVELLETRHVRDAFKAMPVKSDRNDARGIAQLMRLGWFRPVHCKSMEAQEVRAMLTARKLVQSKLRDVENSLRGILRGFGLKVGKATEREFARRIEELVSGHPRLEVITQALLAVRAVLQKEFAAFEKQARKMAQTDPRTRLLMSTPAVGPIVALTYASAVDDPGRFSSSKQAGAHFGLTPKKHQSGETDYTGRISKIGDSSVRTALYEAAHIMLTKPLKGCSQLKSWAMRIARRAGMSKAKVALARRLAVILHRMLADATPFNAAAAAT

SEQ ID NO: 216323 - protein, 343 aa, unidentified
MELYIGLDVSLKLTSICVVNQSGAIVQEGVVDSDPEAIAAFVRSKAPGTVRIGLETGPTTTWLWTELRRLGLPVICIDARHAKAVLKMQINKSDRNDAAGIARIMQTGWFKEVRVKDLDSHAVKALLVSRALLVKIKRDLENQVRGLLKNLGLVIGRATFNVFVTRAEELIKGRSEVVAAVGPLLKARKAIEQQLDDLDHKVLMLARHDAQVRRFMTAPGVGPITALCFKATIDDPARFRRSRSVGAYVGLTTRRHASGELDWSGRISKCGDAMLRMYLFEAAGVLLTRVPKWSALKAWGTRLTKRNGLRKAKVAVARKLAVILHRMWIDGTEFNWSKQEVAA

SEQ ID NO: 216324 - protein, 340 aa, unidentified
MSEITTIGLDLAKHVFQIHGIDAQGTTVLRKRLRRGQVLAFFSRIPRCVVGLEACATAHYWARKLGALGHEVRLMPAQYVKAYIKRNKHDAADAEAICEAVQRPTMRFVSVKTAEQQATALLHRGREQLVRQRTMLVNALRAHLAEFGIVAAQGLRNVGELIAIVRDDGDTRLPDMARQVLQVLANQIEQIETAVAALERQLLAWHKTNPVSQRLASIPGIGPIIATAIAATVADPKVFRSGREFAAWLGLVPRQNSTGGKIRLGGITKRGNRYLRRLLINGASANLLRSKATKADPWVIGLRRRRPPLVVAVALANKTARIAWAVMLREKEYQPRAMAA

SEQ ID NO: 216325 - protein, 350 aa, unidentified
MVVVGADVHKHTHTFVAVDEVGRKLGEKTVKALTSGHAEAVMWARERFGAQVVWAIEDCRHLSARLERDLLTAGQQVVRVPPKLMAQARASARTRGKSDPIDALAVARGFLREPDLPVASHDKVSRELKLLVDRREVLVAQRTAMINRLRWRVHELDPERAPGPASLDRGKHRHLLGAWLATVPGLVAELARDELADITRLTEAINALAKRIGSRVRTVTPALLAMPGCAELTAAKLVGETAGVTRFKSEAAFARHAGVAPVPVWSGNTAGRVRMTRSGNRQLNAALHRIAITQIRLEGLGQTYYRHRLAAGDSNPEALRCLKRRLARIVFGHLHTDHQHRTQPCQTAAA

SEQ ID NO: 216326 - protein, 346 aa, unidentified
MDHVGIDVHKRDSQICILTDDGEIIERRIRTDRERFAAEFGGRPRARILIEAMAESEWVARCLESLGHEVVVADPNFAAMYATRSRRVKTDRRDAATLADACRLGAYRHSHRTSERQRQVRAELVIRESVIRSRTKFIALTGALLRREGLRIRSGNADQFLDRLQAVAMDEPLRERIQPLQSVLTLLLHELKAADRRIAAIVREDPVVQRLCTVPGVGPITATAFVATIDTIERFAGAHQLESYLGLVPCERSSGEKQRKGRITKAGNSRLRYLLVEAAWSVLLSRRANTEELRNWAQRIALRRGMKTAIVALARRLAGILYAMWRDGTTFEPRRREVSTAEPVRA

SEQ ID NO: 216327 - protein, 310 aa, unidentified
MTEIWVGIDISKAELQVAVRPTGEQWSTANTEAALAELAVRLRVLAPTGIVCEATGGLEGPVAGTLGLAGLPVMVINPRQARDFAKATGQLAKTDRIDAAGLALFGERVRPSPRPLRDADTRRLDALVVRRRQVVSMLTAERNRLAGADPAVRKRITAHLHWLEGELASVDQDLDGAVRQSPLWHAKDHLLRSVPGVGRILALSLLTQLPELGALNRKQIAALVGVAPLARDSGTLRGRRIIWGGRAPVRTVLYMATLVATRRNPAIAAFYQRLLAAGKPKKVALVACMRKLLTILNAMLATNTPWRTTA

SEQ ID NO: 216328 - protein, 455 aa, unidentified
MYLPDWKWIPIRKELLLMSNKVIFNLDELFISVGIDVGADFSWMSIALPNQQFVGKPYKILHNSIDSLTTAVSKIKEAEELYSLESRIFLESTGIYHYPLFCYLRDKGFNCSVINPIITKNSTNINIRKVHNDRFDSKKAALVGLKPDLKVSLMPSDLALNCRNLSREYYDLMDNRSAYVNKLQGELRMAFPQYLGIFSKVTINTSLTLLETYTSPSAFLEADKQEIIDIIKSTARFGLTYAQNKYNAIIQAATDANQFGYIIDSNIKRIRLYISFIRKYDEAINSILESLHELVDANEDTDFVKQIHLIETFKGAGFLSAVSIMGEIGDFSAFSKPKQLFAYFGLDPAVKQSGKFEGTKVQMSKRGSAIARRVIHTLTLQSISISRNGEAKNPVLREYYIKKCDSKPKLVAMGAVSHKVCNMIFAILRDNKPFKIIAPQEHIKQYNSAKCDIAA

SEQ ID NO: 216329 - protein, 339 aa, unidentified
MFYCGIDLASRTSALCIVDANDCVLREAQIPTDEVAFRGVLQHYPDCLCVVEAAPLAESIKRMVESLGHRCVIVDTRAAQGLFAARKKTDRNDARTLAKMARTGWYNEVCAKTTDQRLLRTRLTARVALVHTQVRLQNAVLGLLKAQGLRLRAANNRQFASVIRNKVTALAEGSALLPIIEPLLLIWEQVDQEVSALDKQLHALAKSQQLTRLLMTVPGVGALTALAFVATIGDPERFRRPEQIGDYVGLAPGVYQSGDVDRRGRITKAGDAMLRSLLVNAATVVLYQYRKHWSLKAWALRLKERKGAGKARVALARKLAILLWKILKTQTPFILPAAA

SEQ ID NO: 216330 - protein, 429 aa, unidentified
MKIIYPRVCGIDVHKQFIVAVICISESVEPIYLKKRFSTFHNDLIRFRNWLIQNDCQNVCMESTGKYYIPVYNVLESHISNIVVANPKWVRAVKGEKDDDKDAKWIADLFKFDIVRSSFIPQKDFRILRELTRYKYKLVNMRSSEKNRFQNALTSGNCKLDMVFTDVFGKSASNIIDLILSDNPYTDEDILSKVHKKCKASPDMILDSVNGTDLTPVQKSRIELVNDHIKQLSSNIQRLDKLIDLMIEPYEDYISFLCQIPGVSRNSAIIVLYEIGVYMNQFTSTRRLTSWDGLTPSSNKSAGKKKSVRISRAGVYLKPCLVEVAHAAVKDKNHPYYANKFNKISKRRGKKRAFIAIARKILVAAYHMLLTGEIWNPADLAEVETPVEQRIKYVKNNLKSDIKQLLDIGLTVEELTLMIQQNANIIATQ

SEQ ID NO: 216331 - protein, 404 aa, unidentified
MYNAVGIDVSKGKSTVTVLQPGGTVIRKPFDVSHTSQNLNELADYLSSLDGTTKIVMECTGRYHEPMVKALSEAGLFVSIVNPHLIKNFGNNSLRKVKSDPADARKIARYTLDNWTELRQYSGMDNTRTQLKTLNSQFSFFMKQKVAAKANLIALLDNTYPGVNKLFDSPTREDGSEKWVDYAYSFWHADCVRKIGLKAFTERYKSFCKKHHYIFQQDKPEKLFNASKELVAVFPKEKTYKLLIQQSIQQSNLASEHVERLRREMNELASTLPEYSTVMGIYGVGKTYGPQLIAEIGDVSRFTHREALTAFAGVDPGVDESGQHKSKSNRASKVGSARLRKTLFQIMTTLLQNAPEADPVYRFLDKKRSQGKPYYVYMTAGANKFLRIYYGKVKECLWNLEQTE

SEQ ID NO: 216332 - protein, 341 aa, unidentified
MTANSLMQRRSAIKPDTLIVGIDVAKFNHVARTLVPGGAIGRPLEFANSREGFAALSAEIEARKPTPASAVIVGLESSGVYWINLARWLSEQGYQVVQVSGLYVYRAKELTDNSRGTSDGKDALLIADLVAQGKYLSFVRPSGVLADLRQLVGLRQRLVVAGQSIGAREGTAGSEYALNDTLRELDSLDTRVKQVEAEINRLLAQVDETPILTSLVGPMTAAIILGETGGLKQYSCAAAVLKLAGLNLYQISSGQYCGDRHISQMGRPLLRQALYLAVLGHTHPGMPLYPYYAELVRRGKPKPVALVALCCRLVRLLYALVRDGRCYSPRPPANNQQTQAA

SEQ ID NO: 216333 - protein, 473 aa, unidentified
MSKSKRPASTGGAGPTIAKSKRGSPKKATEHAVFQPNAGGIDIGAREIYVAVPSDRDQHPVRKCGTFTSDLDQMAEWLVSCGITTVAMESTGVYWIPVYEAVERHGIEACLVNPRNMKNVPGKRTDFHECQWIQHLHSLGLLHAAFRPESDVRAVRALMRHRNDLVEMASQHIQHMQKALTQMNVQFQHVISDLTGLTGLAILDAILDGERDPAVLAKLRDPRIKADQETIRKSLEGNWRAEHLLVLKQRLSLYRRYRDQINDCDQEIERLVAAFTPQVDPSVKPLPEDRKKRQRQRKKKSGSPDFDMRTEAYKLFGVDLTQIPGLMTLVFQLFSEVGRDMSRWPTAAHFVSWLGLCPDNDISGGKVLWRGARRTKNRAGTLFRMAASSLYREQAPIGDYLRRMKAKLGPAAGTTATAHKIAIIFYTMVKNQVEYDASLWAKRNGLREKRLEARLHKQAAQRGYKLVPLEAAA

SEQ ID NO: 216334 - protein, 415 aa, unidentified
MALKIVYKICCGIDVHKTFVVACIASTNAKGVTTYESHRFSTYTKGLRDLLQWLLARNCKDVCMESTGKYWIPIYNILENDCTIVLAHPKYVKAIRGKKTDKKDAKWIADLFKHDLVAGSFMPPADIRQLRDLMRYRFKLTCFRSSEKNRLQNCLTVSNIQLGNVVSDTFGKSAQAILDKLLENPADTSFDLEPLVFKSLKKKLPELRDAIDGFITPEQAGKLKVIKGHFEDLESRKAELEELILALAAPYQHELAILQTAPGISSVFTAIGIISEIGTNMEAFPSAKHLCSWAGLTPTNNESAGKKKSVRVSKAGCYIKPLLVQCANAVVTSKKHPEIRNRYLRLKKRRGHKKAIIAIARMLLTALYHMLKNGENYNAELYRKSNLPPVDREITVEQAIIIARNQGYKIKSATA

SEQ ID NO: 216335 - protein, 370 aa, unidentified
MQQPTTLFVGLDVHKDSIAVAHAEAQCTDPPHFVGAIGTRHRDIDKLVRRLQSKAPQLVFAYEAGPCGYVLQRYLTGKGFDSQVVAPSLIPKRPGDQVKTDRRDAVELARLLRSGDLTPVYVPSIEDEAVRDLCRARDAARVTLKAARLRLKSFLLRLGLHYVGRADWNQAHKRYLARVVCPTPAQQIVFQESLRAVDEQVERLGRLEHELLDLAPQWRLWPVVEALQALRGVHWIVALTVVAELGDLTRFDNPRQLAAFVGLIPSEHSSGDKRRQGGITKAGNPRARRVLVEGAWAYRYPAKISAHIQQRIENLPGVVQDIGWKAQVRLCRRFRRLKARGKHANVVVTAIARELLAFMWAIAKEVPINA

SEQ ID NO: 216336 - protein, 445 aa, unidentified
MATSKAKVAATKLDVVHPDAAGVDVGGSGHHVAIRSDATGQTVREFGYFTRDLHEMADWLLGSGVKIVALESTGVYWIPVYEVLERCGLEVLLVHASHVKNVSGRKSDVLDCQWLQRLLSFGLLRGAFRPQDQMCELRELNRLRTRLLREQGRSVQHMQKALTVMNVQLTNAISDVAGVTGQKIVRAIVDGERDPKELASYRDARIKASEEEIAASLQGNWRSEHLLALKVALATFDFCGQQITQCEVEIERAMQALQRFTQEPEKGKKRSKAKNAPKFDVRERLFKMCGVDLTRINGIDVSTAMTIISEVGTDMSRFPSDKHFASWLGLCPGTNISGGKRLGAASKRSANRATQALKQAAAALRTSQSALGAYFRTLCGRMDKAKAVTAAAHKLARLIYAMLTKGQEYTDRGQLYYEERYRERAVRQLPRRANKLGMLVVPAGA

SEQ ID NO: 216337 - protein, 419 aa, unidentified
MSQSNIDKQLAQDPSGTLHAGVDLALEKNVVVVVNEKGERLDHFSFPQDRGGYDYFLRRLEGLRQKHQAAKVVVAMEPTNYFWKLLARELEEKQLSYRLVNAYTVKKHREGDQLDRSKDDRRDAVQIAELSRNGKTTHTQLQKGAYEDLRQYATLYHQLMQSIRREKTILWGLVGQVFPEMVRAFKDLDGETYQALLMTSAAAVTIRQMSMDAFLAQVRAAYSGKRLCVSKLKRVYQLAASSISVTEGIQAIQLAIQVHLTQLQVFETQLEQVTGAMTARLFSLPDALYLLSCPCLKPTSAALFLAEVGDPQRYQKAAQWVKLAGIQPTLKASGKKQRSRTPMSHQGRPRLRTLLYFSCLRMIQFDTHFAQLYANLQSRQDNPLTKMQALGVLMNKLLHIWWALIHNQTFYNPSFGQSV

SEQ ID NO: 216338 - protein, 364 aa, unidentified
MKKLVLREVGKQVQRPRAPEAGEVVIIGVDLSRSKWVYACRWGGQEQRRFGSAGELKHLQAVVREYQQRGCEVHVVYEACGFGYHIAWWLEAHHAPVIVGAPSCVEKAPGAQVKTDGLDAGSLALKYERGMLKGIYIPTREQHEYRQLSRTYEQALKDRRRQQVRIRMLLQEHGYTPPAAGSGWGALERWLSAQPWPQPIGHCVTELRELRASASRSARRLANELRAVGRLPQYVGLSTALAAQSGVGRFTAIRFLLEVGDIHRFATADSLPNYLGVAPKEYSSGDLVHRGRIRKCGPGSLRAWLVQCAWAAIRAGKDVALVECFRRLEPRVGRKNAIVAVARKLALRLRARWLAFDEEVTQAA

SEQ ID NO: 216339 - protein, 411 aa, unidentified
MRRVIGIDFHRTFGEVVIWEDGRLRHAGRIDMTRTALEGFGKTLLASDEVVVEATGNSMAVSRVLAPFVARVIIANPLQVKAIAQAHVKTDKIDAGTLASLQAAGYLPQIWTPDAETERKRRLVARRYQVVRHRTRLKNEVHSILHAHLIPKCPHADLFNGRGRAWLAAQPLPDDERAAIDRHVRELDRLAEDLALLDREIAQDAIDDSAVNRLMTITGVNLALGAGIMAAIGDISRFNSPQKLVSYFGLNPRVRQSGLGAAHHGRISKIGRSHARAMLVEAAWAAAKAPGPLHAFFVRIRARRGHQIAAVAVARKLTVLCWHLLTKGEDYLWGRPALVAIKTRAIQLQAGHPQQKGSRRGPAYAYNIKALRDREMLIAAQAEQSYERLVTQWKPRRPKTGARAPQLGKTK

SEQ ID NO: 216340 - protein, 412 aa, unidentified
MQALIERCCGLDVHQETVVACLMIGAPGVRPSKEVRTFRTVTRDLEALRDWLAAEGVTHVGMESTGVYWRPVYAVLEGHFDLIVGNARHIRNVPGRKTDVKDAEWIADLVRHGLIAKSFVPPRPLRELRDLLRYRRKLVESQTAERNRLLKLLETANIKLASVMSDVFGVSGRAMLKALIEGRASVEAMADLAKGQLRRKRADLVLALEGRMEEHHQFLLATQLRRLEAIEHDIAALDLRIVERLEPYQAPHALLMQIPGVDWLVAAVIIAEIGVDMSVFLSVYHLSAWAGVCPGNHESAGRQRSGRARKGNIHLRTILVGAAVSAGRTKGSYLRDKFHRLKARRGPLRAALAIAHKILVAAYHMLAKGVGYRELGEAYLDQIGQTRTVANLKRRIERLGYHVTLQPIAEVV

SEQ ID NO: 216341 - protein, 337 aa, unidentified
MKLYCGIDLHSSNSVIAVLDERDIPVFERRLDNILEYILEALNPFKDELVGCVVESTYNWYWLVDGLMEAGYCVHLAHTGALPQYAGLKYTNDNSDARHLAQLLRLGILPTGYIYPKQERALRDLLRRRLLLVRQKTLHHLSLQSLIARHSGQRLNANAIKKLETKQLSEYLESPILLGGEITHQARCWLDGAIARIERELQKHIQPRKDYQLLQTMPGVGPSLGTTIALETGTIERFPSPGNYASYARCVKSEKISNGKYKGQGNRKNGNKYLAWAFMEAAHYSAIWNPRIKQYYQRKQAKAHLLVAKKAVANKLARACYHMLKRQEPFDVKRAFG

SEQ ID NO: 216342 - protein, 427 aa, unidentified
MPYKIAGIDVHKRMLAVAVSDVEIDGEYEFEWRHFGSNPAQLRLLADWLIEQQVEEVVMESTAQYWKPVWGVLERYWKPFCQKREGAGPMSGTLHLAQAQSNRAPQGRKNDFADAERLVKRLVAHELVLSFVPDPEQRLWRTVTRAKYQLTRNRVQLQNRLEALLEEAHIKLSSLVSDLLGVSARRMLYALADGETDPAVLAMRADGRLRATPEQLCDALGACRELNPTYRRLLKMALEDLYLIEKQIGQLDQEMADLLYPYQDQVQRLAEVPGLGVNSAQQIIAEVGVTAATFPSEGDLSSWVGACPGDNESAGISRGHRSPKGNRHMRRILNQAANAAVKYKGSIFQILYRRYVPRLGHNQTIGVIAHRLCRLVWKILNRGVRYEERGPAVSQRSRHQRASRMIRELRSLGYPVNSPKPQQAAPA

SEQ ID NO: 216343 - protein, 428 aa, unidentified
MKYNQNYKISQISENTLVIGVDIAKKKHYARAFDYRGIELDKVIKFKANGGGFESFINWTQRIAKRHGKKRTVVGIEPTGHYWYTFGRAVIDSGLMLVQVNPYHVKRSKELDDNTPSKSDYKDPKTIAFLVKDGRYQIPYMPDGKYAELRKANNLREEWVQKKIKVKNRVIRWLDIHFPEFLNAFSSWEGKTALMTLEKMALPEKIAAKTAEEILYIWRQEVKRGVGIKKAEKLLKEAQNSIGIREGSQMAEYEIKLLINEYTEIKEVLEDMERVLEEIVLTIPGANRFLEIKGVGIKTVAGFFAEIGDIRRFTSAKQIIKLAGLNLRQNSSGQHKGKTTISKRGRGRLRALLFRAILPIAATNEVFNKLHHDNISRKENPMKKKQSLIALCCRLIRIVYSIITNDQKFDPDKLIRESRRDDVLQGAA

SEQ ID NO: 216344 - protein, 417 aa, unidentified
MHKKVIWVAVRLPGPGPGDRKVIVKSFKTFWRSLLKMTAWLAELGVTDTAMESTGVYWWPVYHALATAGVIEVCVCNAAHMRNVPGRKTDIKDCQWIAELHEHGLLRPSFIPGQQVAALRARTRYRKKLIEHRTAENQRLAKILEDAGIKIDLVASELLGVSGREMTGALIAGERDPRVLAGLARGRLRAKLDDLEMACDGRFTAGHAQMCRLHLDAYDHLTAQIATLDQLVAAAAGPFGAVIARLVTIPGIGQRVAEVIVAETGGGMARFASSAKLAAWAGLAPGDNESAGKRKKAPARKGNPHLRAAMTEAAWAVSRTASRPGARFRRLARRFGKLSATKAAVAVAHTLLCIAWAVMKHDSDYAEAGADYYDQRDQRNHEHLVKHHQEALSRLGYQVTLIPPSDGSPPPAQEPAA

SEQ ID NO: 216345 - protein, 347 aa, unidentified
MDQIIRIGMDTSKHVFQLHGVNGAEEPVLRKKLRRQDMITFFEKLPPTVIGIEACGGSHHWARLLQSLGHQVRMLPPQFVKPYLKRGKNDAADAEALCEAMSRPTMRFVPVKTAEQQAALMLVGLRDRLIRQRTQLANAIRGYAAEFGLIAATGICRIEPLLERIRDDGTLPPLARELFVIHAKEYAQLQARLEEVEDKLMAWHRADECSRRLAKIPGVGPIVASMLVMKTPTPEAFRSARHFAAWLGLTPKDHSTAGKVRLGVITRAGDEALRSVLVVGATAVIRQLRRGQSAPASPWLVALLKRKPPKLAAVALANKIARIAWKLMVSGERYAAQGVAGDAGRAA

SEQ ID NO: 216346 - protein, 352 aa, unidentified
MGEHSTICVGIDIGDQYCQIAVLDEDGDVSETSRIRTTPAAFKRYFEGKSPMRVAMEVGTHSPWLGQLVDELGHEALVANACKLRLIHRNDQKSDEVDAELLARLCRFDPQLLYPICHRGKNAQSAFAVLRTRDALVRSRTALINHARGIVKPTGCRLPKCSSRYFGKLQDELPETLRPVLEPILHTVSQLTDQIQAYGQQIERIGQDQYPQTLLLRQVPGVGPITSLAFVLTIGDPWRFAHNRDVGAYLGMTPRRSQTGQSDPELPITKAGSRYMRRMLVQCSHYILGPFGPDSDLRRSGERIASRGGKNAKKRARVAVARRLAVMLLSMLKTGEAYDPLYGSHDDEISAA

SEQ ID NO: 216347 - protein, 337 aa, unidentified
MDYYAGLDVSMTETHICVVERDGAVILEAKASSTPEAIATVLETAPACAKIVLETGRMAPMLFHGLAALGLPVICIESRQAYQALKSLATHKTDRNDARGLAHLARTGFFKPVHVKSLPAHAVRALIIARKKLVGQRVTLENQIRGLAVVFGVRLPRGLSPRFTEQVIQASQGIAGLSSAMQSLLAARKAVLEAVVAIDHDMRRLARSSQACQRLMTIPGVGQLTALAFVATIDAPERFRRSRDVGAYLGLVPRRFQSGEIDYVGSISKCGDRRVRTLLYEAANVMLTRYRGALALKEWALGIARRSTMRKARVALARRLAIIMHAMLRHGTTFQAA

SEQ ID NO: 216348 - protein, 314 aa, unidentified
MRTPVFVGIDVSHAQLDVAVRPGTRFSASNDEPGIVTVVEELRALAPTLIVLEATGSLEVPLTSALAAARLPVVVVNPRHVRDFAKAAGQLAKTDALDAQILAQFAQVMRPAPRPLPDEQTQALAALLTRRRQLVEMLTAEKNRLSLAPRPVRNSVRAHITWLERELTHTDMDLAETIQQSPVWRAKEDLLRSVPGVGPVLTTTLLANLPELGTLTGKQIAALVGVAPLNRDSGTLRGKRTVWGGRAQVRTTLYMAAIVAARFNPVIRTFYQRLRTAGKAKKVALTACMRKLLTILNAMLKHRTPWHPEVAQHA

SEQ ID NO: 216349 - protein, 353 aa, unidentified
MNNDKYVAMDVHKASVVIGVRDAAGKMIGRSVVETKAQTIKDCVRGLSGTIHLTLEEGTQSAWLYDLLKPLVAECIVCDPRRNKLLESGNKSDDIDVAKLSELLYLGRLRAVYHGDHGTRVLKELVHNYEALVKDNTRVKNRLKAIFRGRGITYEGGEIYELKRQQEWLGKLPERGVRERATQLYEQLERLEGWVVAARQQMLRESRKQKAKKILQQIPTLGEISVAELIATMDTPFRFRSKRQFWTYCGLAVVRHTSADYRFEQGELRRRAKPGPTRGLNRNYNRRLKKIFKSAALTGSVKGPFKQYYERLLARGLNPELAQVTLARKIAAITLTLWKKGESFDPQKMVKPS

SEQ ID NO: 216350 - protein, 343 aa, unidentified
MKITIIYRFIIGVDIAKETLELYLLDLKTGQGYARQVRNSPEGFARLGRWLTSHEAGKSETVLCSEHCGRYGEHLLGWTTANGWPHAVLKTTALEKVGGEHHRKSDPWDAQGLAEYGRRFADRLRLAEAPKPAVKQLKRLCAERRKMVDRRASLRQKRTEADYHDADMSRLLAMWNEQIALLSEHINEIEAQIATLISEDPALRRRHQTMRTAPGIGPVVGGRWMSLFAGQQTLDPGKICSRFGWAPHPHSSGSSVSKPNRSSGFGNGEMRRIMHQAALSVAQNYEHYANYYKRKKAEGKHHLVVINNIINKLIHLYCAMWNNRSEYDPNYIQKMKKQWKKSA

SEQ ID NO: 216351 - protein, 339 aa, unidentified
MTEITRVGLDLAKNVFEVHAVNAQEQVVVRRSLRRSQVLTWFAKHPPCLIGIEACGTANHWARELTTLGHTVRLIPPAYAKQYVRRNKNDAADAAAICEAVSRPSMRFVPIKTIEQQADSVTHKARQILIKQRTMAMNSLRSLMAEFGIVVPQGSQHIGKLLAILTDPEDTTVAAVARTALNTMSELLSTLEMQIGILDKDIRARARTDVTARRLDTIPGFGPILSSAIAAIVTDPRHFDSGRDFAASLGLVPRQDGTGGKVKLGPISKRGNGYLRRLLVNGATAVLNGKNARNDPWRAKMLDGKPRKLAAVALANKMARIAWAVMTRQEDFRPRAVPA

SEQ ID NO: 216352 - protein, 372 aa, unidentified
MGDYSVAYVGFDTAKLRHAVAIAEEGRTGELRFLGEIANTEAATIKLVKKLASKYRSLSFCYEAGPTGYELYRLIKRLGHDCIVAAPSLIPRKAGDRVKTNRRDALGLARLLRAGDLTAVWVPDPRHEAMRDLTRSREAAVEDLISKRQQVLSLLLRIGRHYPGKRNWTRMHMNWLVSQKLEHGEQRIAFEEMLLAIRQAQERVARLEQAIRNALPEWSLSDLVTALMAMRGLDLVSASAFLAEMGDLSRFASARELMAFLGLVPSEQSTGDKIKRGGITKAGNRRARRILIESSWSYRHPPRVGKDKLARTAAVPREVREIAWKAQHRLTGRYRTLIRNGKKPTVAVTAIARELSGFIWAINRAVRPAMTG

SEQ ID NO: 216353 - protein, 347 aa, unidentified
MAEVTIIGVDLAKRVFQAHGAAADSSVIFRRKLPRDRFLSFLADQPPCIVAMEACATSHDWGREIERLGHSVRLIPPVYVKPFVKRQKNDAADAEAIAEAASRPTMRFVTIKTEAQQARAMLFRTRDMLVRQRTQTINALRGHLAEHGVVAPQGAVQVKRLADAINEDTSRLPMMVRDLGQLYLEQIESLTAKIVDLDKRLRTAASQAETTRRLQTMPGVGPITAVAMETFAPPMEEFRRGRDFAAWLGLVPRQHSTGGKARLGKTSKMGQRDIRRLLIIGAMAVVKAAVRRGVASDTQGENAWLSRMLAKKPRMLVAIALANKMARGLWAMMTKEQNYQDPAVTAT

SEQ ID NO: 216354 - protein, 348 aa, unidentified
MSQIIRVGMDTSKHVFQLHGVNAAEEVVLRKKLRRNEMIAFFEKLPPALIAIEACGASHHWARVLSAFGHEVKLIAPQLAKPYVKRGKNDAADAEAPCEAASRPTMRFVPAKTAEQQAALMLVGVRDRLVRNQTQLANSIRGFAAEFGLTATAGMDQLAPLLDRLVADENLPTLARELFASQAKEYAQLRAKIEEIDGKLVAWQKAEPRCGRLVKVPGVGPIGSALLTMKTPAPEMFKSGRQFAAWIGLTPKDHSTGGKVRLGVITRAGDEALRSVLVAGATAVVNQVRRGNSKNAFAPWVASLLLRKPPKLVAVALANKMARVAWKLMGTGQGYIDKPAPAVLVSAA

SEQ ID NO: 216355 - protein, 388 aa, unidentified
MARESVPNTHPIALDYDSTLVLAIELSNTSWVLAAQVPGLPRVKAKQSIEPTAEALLAAIDGYRDRARAAGRTVERVVATYEASWSGFWLARWLLRRGVETYVVQPSSVPIDRRARRAKSDGIDAELLLRTLLAWLRGEPRVCSMVPIPDEADEDERRRVREREDLVAERVSLVNRIGAVLATLGVRDYNPLRRDRRRCLEALRTALGDPLPPHARARILRMLDRLELVCAQISELERERDVVLEEEAPDKAEEMIQQLAGLRGIGAQSATMLVREAFVREFANGKALGSYAGLSPTPFSSGGTEREQGIDKAGNRRLRTVMIELAWLWQRYQPGSAQVIWFRERVGGTGKRIRKVMVVAMARRLLIALWRYATQGVVPGGAMLKPVP

SEQ ID NO: 216356 - protein, 355 aa, unidentified
MNSEKYIGLDVHQATISVAVLDSAGKLVMESILETKAATILEFFAGLRGTLSVTFEEGTWAAWLYDLLKPRVAKLVVCNPRKNALLKEGNKSDRIDAHKLAELLYLNKLSSVYHGETGVRMLRELARSYLTIVKDLTRVMCRLKAVYRSWAIPCAGRDVYYTRHRAEWLGKIKEAGVRRRAERLYQQLDMLQYLRQQARRELLAESRKHPITVKLRQIPSLGPIRSALAVALIQTPHRFRTKRQLWAYSGLALETRTSAEYCYVKGGLRRSKKQISIRGLNKDHNHDLKGLFKGAATRASVLPGPFQDFYQRSLAKGIKPTMARLTLARKIAAITLTLWKKGENFDADKLKSQAA

SEQ ID NO: 216357 - protein, 420 aa, unidentified
MTSTNAILADAVLVAIDIAKACNEVLIEAPSHKRRRRLSVLNSRAEHDRLIEMLQAYGRPVVCAFEATGNYHRPIAWRLAEAGFEVQLVSSLALARTREALHNSWDKNDPKDAQVILHMLRIRATQVYHDPLRVGINDVQELSKTHEAIARAKTEIQHRILTHYLPLYFPEIERFRGNSRSDWFFAFLDAFPTPANITALTKEEFVKAAWDVVGRKVSKTQILMDIYQTARTSIGLPLPLDAPAIRMFRMVIAEARSLIRQRNAIEAQADELLRHSQDYQLLRQIPGIGPINALTVIAEAGDLRRFHHHRQFLKFCGLDLSTQRSGQYRGQTRLSKFGNARLRRTLWIAGQVAIRQRENGFRHKFERYIARDRDNPDLRRKAMTAITAKMARVVHAVVKSGSDYRPFVEGRVPGGRTSVS

SEQ ID NO: 216358 - protein, 404 aa, unidentified
MYNAVGIDVSKGKSTVTVLQPGGTVIRKPFDVSHTSQNLNELAAYLDSLDGDTRIVMECTGRYHEPILKALSEAGLFVSVVNPHLIKNFGSNSLRKVKSDPADARKIARYTLDNWAELRQYSGMDNTRTQLKTLNSQFSFFMKQKVAVKANLIALLDNTYPGVNKLFDSPVREDGSEKWVDYAYSFWHVDCVRGIGLKAFTERYQAFCKRHHYIFQADKPEKLFNASKELAAVFPKEKTYKLLIQQSIQQLNLASGHVERLRREMNELASTLPEYSTVMGIYGVGRTYGPQLIAEIGDVSRFTHREALTAFAGVDPGVDESGQHKSKSNRASKVGSARLRKTLFQIMTTLLQNAPEDDPVYRFLDKKRSQGKPYYVYMTAGANKFLRIYYGKVKECLRNLEQES

SEQ ID NO: 216359 - protein, 387 aa, unidentified
MDVLYQSCAGIDVHQANIVVCILHGPLTSTRPKREMATFDTTTKGLRACHDFLSQFHVEAVGMESTGVYWRPVWHALCDDFELILAQPAHMKAIPGQKTDKKDAHWIAKLTRIGLLPRSFVPDETIQELRELTRQRKHYVESRNRETNRIHKILQSGGIKLTTYIEDIMGLSGRNLLQLLVDGTPITPRIVHQSVYTSLKKKVPQLLEALDDYFSDHHRFMLKQSLEIYDFYQKQIELLEERMNVYLSQYEKHVEILDSIPGIDVITASVIISEVGVDMSQFPTFGHLASWAGLCPGNNESAGKKRSTKIRHGNSYLKKCLCQAAFAVKRQKGSPLAERYYQIQSRRGSQKATIALAHQLLKIAYILLKEQMTYPEFLAQKRLLGTS

SEQ ID NO: 216360 - protein, 391 aa, unidentified
MIFVGIDVAKDKHDCFILNSEGTVLADVFTIANNRIGFETLLSRIQSCSQGESKIKVGLEATGHYSYNLLGFLLDSGLTTYVINPLHTNLYRKSLSLRRTKTDRIDARTIAMMLMSDVDLKSYSNTAYHNEELKSLTRYRFDKVKERAKLKSSVARLVNILFPELEKLVSSLHIAVVYALLSNYPGASYIANANTEELAETLCTASKGRYTKSKTAKIQVAAGVSIGSKMPAKSMELKHTIALIRELDKEISEVESAIDKITSQMDSPIFTIPGIGRHMGAMILAEVGDFSNFASADKLLAYAGLSPSTYQSGQLQNCYAHMEKRGSRYLRYALFNAAKYVCLWCPTFSAYLEKKRSEGKHYNVAISHAAKKLVRLIFAMQRSGKAFLADY

SEQ ID NO: 216361 - protein, 341 aa, unidentified
MKNFIGIDISAKTFVVASLCSSSQKHQIQSFANTSAGIARFIAQLPQEAHCILEATGNYSLLLCYQLAEQGCTFSVINASVAFHFRKLMGQFWKDDASDAKMLALYGEKLQPQPYALPTPKLIQLKQQRALLRQLKKQLQASKNFLHSLSVHPKKDLQTENITKDNIQYLSEQVEKIKKLIGQILAEEFEHLAALVQSVKGIGPQMTQGLIEATHGFTAFASPQQFSKFIGISPTYHQSGTSVRFRSQINRSGDPHLRAMLYVCAWSAIRYNSACKTLYERLLEKGKPSKVALVAVMNKLIRQVFAVVQKDQPYDDGFEEALKQKKLADPPKKIANPPKQI

SEQ ID NO: 216362 - protein, 333 aa, unidentified
MEYLGIDVHKVESQICILTENGEIVERRIRTERERFGAVLGARPRAKILIEASTESEWVARCLEELGHEVIVADPNFAAMYATRSRKVKTDLRDARTLAEARKLGAYRPAHRTSDRQRHVRAQLSVREALVQTRARYISLIGALLRREGLRVASGNAVSFTKRVARVAMPGQLKSEIAPLLAVFESINRQLVWVDTRLEHLAKSDEMVERLCTAPSVGPVTAAAFSSTVDDAHRFKSAHQVEANLGLTPSEWSSGEKQCKGHITKAGNNRMRRLLVQVAVSVLRLRSPRTEALRKWATGIAARRGRCLARPRAGLLRFIRQGREPPVARTRLI

SEQ ID NO: 216363 - protein, 361 aa, unidentified
MNKSSNRSERGPKYASLGLDVSDRKSCWVALSREGKVVEQGRVATRSPEMEKWAMGMAPTTIALEAGPHSPWISRLLERCGHEVIVGNPAKLPSISRSRSKSDWRDAEQLARLARFDRSMLHEIKHRSERLQQDLQVIRSRDAVVRARSRLISHVRGTVKAHGQVIGRCSTAAFTRRAQDVVSGPLLEIIDPILEAIDKLSATIDSYERKIEQLAAGPYAETRWLTQIKGVGALTALAYVLVLGEATRFRRSRMVGPYLGLVPARDQSGESDPQKGISKEGDRLMRRLLVQSAHYILGPFGIDSDLRRHGEAIAARGGKNATKRAAVAVARKLAVLLHHLWISHDEYVPLFNHKTNDAIAA

SEQ ID NO: 216364 - protein, 339 aa, unidentified
MELYAAFDLHASNSFLGVIDEQGRRVFKKKVYNDRELVLDVLRPRKEDIVGIVVESTYNWYWMVDALMEEGYRVHLANPSEIQKYEGLKHADDEHDAFWLAEMLRLGILPEGYIYPKAERPVRDLLRKRGHLVKIRTSLILSLQNIITRNCGIRLNVNDVKRLRENRVTPLLEENDDLALAGMVSKETIDFLTHKIRRIERTIQGKVQLKEPYRYLLTLPGVGTVLALTIMLETGPISRFAKVGNYVSYARKVSTKWTSNGKKKGKPNKKNGNRYLAWAFSEAAELGRRYNSQARAYYNRKMQKTNFMVAHSALSHKLARAAYYIMKDQVPFKPEKLFR

SEQ ID NO: 216365 - protein, 366 aa, unidentified
MDSVALSGGPIHLGLDTSKNAILVGILRPDEVSPDTEKIFNDEASIRRLVNRFGDRSGLRVCYEAGPTGFGLYRLLRSMGVACDVVAPSLIPRSSGDRVKTDRRDCRRLARLHRAGELVAIRVPTEAEEAVRDLCRARAAVVGDRTRIRHRCSKFLLRHDRVWRETAWTVKHEQWLTGQRFEDAALRATYAHYRAMLTAREAELAAVEADLAHWYSHGPFTDAVARLAAYRGVAHVGALTIASEVGDWRRFPAARTFMGFTGLVPSEYSSGEAVRRGHITKAGNTHLRTQLIESAWAYQHHPNLGVTLRRRQEHVDVATVARSWSAQQRLCARFRRLSTRKTSRSVVAVAIARELAGFLWAEMTAA

SEQ ID NO: 216366 - protein, 421 aa, unidentified
MRGIRGKRITMVKQGTLIATVDIGMTTNTGYSTTIEGRDIKPFKFENTREGFDKFWHMIVASKARFGCNEVMVGYESTGPYAEPLAQYLMDKPVTIVQVNPLHTKRIKEVNDNSPRKTDDKDPRVIGDVLRLGHALSVVVPEGDAAYLRRLNNARERHVGERTALLNQLQQLVFLIFPEFKTVFSDVTVKTARHILKRYTTPETIGGLDKHELGEEMRKRSMGRFRVKEAEALINLARDAVSITEGVAGIVLDIQHILVQLEAVNGFIKEIETEMGKTLDRIPYSSRILSMKGLGIVTVGGLIGEVGDFSKFRTQSEIMKLAGLDLFEISSGKRKGQRRISKRGRSLLRKILYNAAVGTIRKNGIMAGYYERLIARGMVRTSALIVVAKKLLRIIHAMLRDDRDYIPNYESPERVVIKKVA

SEQ ID NO: 216367 - protein, 412 aa, unidentified
MTVVHEICCGIDVHAKMLVACVVGADGEPQLRTFSTMTADLLRLRDWLQAAHCTQVAMESTGVYWKPVFNMLADAVRVMLVNPEHARALRGRKTDVKDAQWLADLLRHGLLRPSFIPPPEIRELRELTRYRETLVREQSAVANRIQKLIESGNIKLSQVASDALGTSGRQMLWALARGETDPVTLAALAQGRLREKSLELQRALDGRLTVNQRFVLGELLTRWEELERADERVTREIDQYLRARPKLARCRELLDTIAGIGPRVAEVVVAEIGVQMGDVFESDAHLASWAGLCPGNTASGGKRLSGRTRKGNTYVRAALVQAAWGATRKKNCYLSSQYQRLVKRLGRKKALVAVAHSLLVIIYHVLQSDQSYTELGGDYFDRQHVEQQRAYDIRRLPMLGLEVNVEALPAAA

SEQ ID NO: 216368 - protein, 341 aa, unidentified
MDHYAGIDVSLEYSSVCVVDGSGKIVREAKVASEPEALIAWFASLGFGFERVGLEAGPLSQWLFAAMREAGLAVELLETRHVRKAFEAMPVKSDRNDARGIAQLMRLGWFRPVHCKSMGAQETRATLTARKLVQSKLRDVENSLRGILRGFGLKVGKTTELGFAGRIRELVAGHPHLETIADALLAVHVVLRNEFKAFEKRVRKMARSDTRTRLLMSTPAVGPIVSLTYASAIDDPGRFKSSKQVGAHFGLTPRKYQSGETDYTGRISKIGDSSVRTALYEAAHIMLTKPIKGCSALKSWAMRIARRAGMSKAKVALARKLAVIMHRMLVDGKPFKAVAAA

SEQ ID NO: 216369 - protein, 360 aa, unidentified
MQSQNSELSFKGQSIFVGIDVHLKSWTVTILTESLFHKTFTQPASHLVLHNYLTKHFPQSTYYSVYEAGFCGFMPHYRLRELGIKNIVINPADVPTTQKEHLQKDDPTDSRKLARSLRSQELTSIYIPQLSSLGDRTLVRLRASLVSDMVRYKQCIKSLLYFYGISFPEEFKKPHTHWSSRFMKWLRESVELAHETDRQSIQILVQQAEQQRKLLLEVTKKIKALSSSQKYEKNIKLLRTVPGIGLITAITLLTEIEDIGRFPNTDHFAGYIGLVPTRHSSGENARVGEMTFRGQKRLRKHLIESSWVAARLDPALLKCFNQYTMRMEKNKAIVKIARKLLNRIYFVLKNQMEYVPSVVK

SEQ ID NO: 216370 - protein, 316 aa, unidentified
MKQQAEVTYVGIDVSKASLDIGVIPGGESWSVSNQENDIAALVKKLQRLKPEVIVLEPTAGLETAVAGAIAAVGLPVAVVNPRQVRDFARASGILAKTDRIDAQVLARFGQAVAPEVRPLKDKETQALTALMTRRRQLGNMLVTEKNRLSGAPAPVHKDIKAHINWLQKRLKDLDDDLDAMLRDSPLWREKDALLQSVPGVGRVLSLALLSQLPELGHLNRRQIAALVGVAPFNCDSGTYRGRRRVWGGRGQVRTILYMATLASTRHNPVIQDFYRRLCASGKPPKVALTACMRKLLVTLNAILKTRMAWNYQSAN

SEQ ID NO: 216371 - protein, 355 aa, unidentified
MNDAKYIGLDVHQATISAAVRDSRGNLVMEAILETKAETILQFIRGLRGSLYVTFEEGTWAAWLHDLLQPQVARVLASDPRKNALLKAGNKSDRIDARKLSELLYLNKLSPVYHGEQGIRTLKELARSYITITRDLTRVMSRLKAIYRSWGIPCAGQQVYAPRYRAEWLAKILEAGVRRRAELYYQQFDALAALRQGTRRELLAEARKHPAMRLLRQIPAIGPIRAALLIALIQTPNRFRTKRQLWAYCGLALRTYTSGEYRFVAGQLKRSKKVLAVRGLNINHNHDLKNIFKGAATRAAATAGSLQDCYQACVARGVKPHLARLTLARKIAAITLLVWKKGVRFDAEHLKQQAA

SEQ ID NO: 216372 - protein, 318 aa, unidentified
MEPVVGIDVAKAKLAVVLGMATGKRLHKSIANTAAGHQELLRWLTRHAPGALAVGLEATGGYQEAVALALHDAGHRVSVLNPAAVEAFGRSQLRRAKTDPTDADLIADFMRAHAPAPWQPAPPETRQLQALVRRLDALLEMQVQERNRLELAAAIVRPSIQKSVKQLTAQIVTIRRQIRTHIDQFPTLRAQRELIVSIPGLGEATAAIVLGELQNFARFTSARQLAAFTGLVPAIRRSGTSVRGRGPLSKLGSARLRRALYLPALAALRCNPPLQAFAARLRAAGKLKMVIIAAVMRKLIHQVYGVLHSQRPFDPHHA

SEQ ID NO: 216373 - protein, 417 aa, unidentified
MFKIFRKNCCGLDVHKTWIYACIGITDTNGLTEYKQARFSSFSKGLRELSDWLAKHSCTEVCMESSGKYWIPVFNILEKTCFVTLAHPKYTKPQKGNKTDRKDAKWICDLFMCDMIKPSFIPSPEIRQLRDLMRYRFKLTNMLIGEKNRAQNCLTVSNLKLDDVFSDVFGKSSRAITNYMLDHPGECFDVAPFVDKRCKTPIDEIQAAVDGAISHEQAIKLRQCLSHIDELEAHKREIEQEILLITEPFSAVLDFLYTLPGLDSNPMTAIAILSEIGPDMSVFPSSKNLVSWAGCCPRNDQSAGKVKSTRISRAGCYLKPLLVQIANALLKSKKHPEFKERYHRIKTRRGHKKAIIAICKMLLTAIWNILSKLEPYNPEGFLEHRPVNESKILTKAQALDLFRKRGYTIIDDSVVNS

SEQ ID NO: 216374 - protein, 372 aa, unidentified
MQERSKIHVGLDVHKDSISVAVAEPGRTPGRLIGKVPHDVHKLLKVLAKVGTAEQLHIVYEAGPTGFGLQRALQAKGYSCEIIAPSQIPRRPGDRIKTDSRDSVQLAECSRAGQLSAVWIPDPDDEAIRDLSRAREDAVNSRTQARHQLKGFLLRHDVRYTGKTSWCGAYYRWLGTLNFGAGAAQTAFTEYWQAVTAADDRVDRLTKALQASITGWRFEPVVGALQALRGVAAITAIGLVAEIGDLGRFAHPRKLMGYLGLVPSEHSSGERTSRGSITKTGNAHARRLLTEAAWNYRFKARICKQAQIRQQDLSEPIRRMAWTAQLRLTQRFAALNARGLQANKACIAVARELAGFVWAIGMQAQREKAEAT

SEQ ID NO: 216375 - protein, 351 aa, unidentified
MSEIKTIGLDLAKHVFQVHGINAAGECVLRKRLRRGQVISFFAELPRCLVGLEACATAHYWARELQAAGHEVRLMPAQYVKAYVKRNKTDAADAEAICEAVRRPTMRFVPIKTAEQQAAVLLHRGRERLVRQRTTLVNALRAHLAEFGVVAPAGLRNVSQLIAIVRDASDRRLPDLARPVLRVLATQVELAQAAVAKVEKELTAWHRSNPLSQRLATIPGIGPIIATAIAAMVVEPSGFASAREFAAWLGLVPRQHSTGGKARLGGISKRGNRYLRRLLINGASANLLRSKATNADPWVIGLRRAAAEPRRGRRSGEQDGSHRLGGDAPAGRLPIFGRSGIRRYGPSLREK

SEQ ID NO: 216376 - protein, 351 aa, unidentified
MELEHTACSKLFIGIDIHKRSWKIHCATDLSGGKTFSMSPDPRQLLDYVSRHYDGYQVTTAYEAGCCGYHAHRSFESYGWKSLVVNPADIYRTGKARHTKTDRIDAQLIARELKDGRLDSIHVPDLQREQLRSLFRRRNDLVKDYRRIKSLIKSQLLYFGVIVPEQYDNSHWSHSYRNWLDSLEFEYSPARATLDSRMRMFRFIDQEVRDVSTQLRRFCKVFYKKDYLLLRSIPGIGGIVACGILCELGDLRRFRNLKHLSGYVGLAPGIYQSGDSLRTTGMTPRAHRLIRSYFVEASWQAIRTDPVMQSYYRKHQGKNVKSIIVKVARKLLSRTLAVIKTETPYVIGVVQ

SEQ ID NO: 216377 - protein, 346 aa, unidentified
MSTVTCFVGLDYHQDSVQVCVLDGDGRRLLNRSCPNDWLRIAQAVEPLGRVERAAVEACCGAADLSEELRTRAGWPLDLAHPGYVERMKRSPDKSDFTDGHLLADLTRVGYVPKVYLPSSYERDLRQLANHRQALVDQRRAAKLRVGAVLREHRAKPPGGAKSSRWTRAWVAWAASAAELSGHARWVVGELLGEITHLDRKVLAADARLSEATEGDPLVKRLMTEPGVGEVTAWVLRAYVGRFDRFATGKQLSRYCGLSPCNASSGARQADAGLVRGCNKLLRATLIQAAHRLARTEPRWRELSRSMRARGKPASVVAAAVANRWARGLWHRMNEQEQEPLGAAAE

SEQ ID NO: 216378 - protein, 354 aa, unidentified
MKKFFIGVDVSKDTVDVSFFDDDRMKSPEYLAQYSNSPKGFREMVKDLRMCCHGVSSGQWLFCCETTGRYDHPLCHWLVDHGMVVWRESALQIKWSSGIQRGKNDRVDSLRIAEYAWRHQDKMQKFVKPSESLSNLKAAFTHRRRLVEKRTATRCQLKSMSSEKGLSASLARMIVRDLSREIERLSASIATMDESIQKIIRSDSELDRNYRHIISVKGVGPITAVALIVCSGNFKAITSAKKMECYCGVASFRSQSGTSINRKASVSNLSNRQIKSLLSMAARSASRSNPVFAEYFNRTLSRGKPVALVYNNLRNKIITVVYKLIERDCDFDVDYMRMHSTGQRANEPAIRETV

SEQ ID NO: 216379 - protein, 412 aa, unidentified
MEVMYERCAGLDVHKKVITACLIVPGPDGKPKKETRTFGTMTRDILMLSDWLSRAGCTHVAMESTGVYWKPAYNILEANFEVVLANAAHIKNVPGRKTDISDAEWIADLLRHGLIRGSFIPPEPIRELRDLTRYRTSLTRQKASEVNRLQKILEDANIKLASVATDVTGVSARAILHELLRGEMDAESMAQLARGRMRKKIPELEGALEGFLKPHHRFIISQILAHIDYLDEVIAELDREIEERMRPFEGDARRLDGVPGLNVKAIQGIIAEIGVDMTVFPSDRHIASWAGLCPGNNESAGKRKSGKTTKGNPWLKSLLVQAAHAAGRSKGNYLSSLYHRLAARKGKKRAAVAVAHATLTIVYHILRDKTVYRDLGADYFDRLDREAVARRLTKRLEALGYKVDLHDLECAA

SEQ ID NO: 216380 - protein, 391 aa, unidentified
MIYVGIDVAKDKHDCFVMGIGGEVLHDVFVVSNNMSGFNNLFQKIQAVSESFDNVKVGLEATGHYSYNLLGFLIDKGLTPFVINPLHSTLFRKSLSLRKTKTDKVDARTIATMLASDLDFKPYTDTAYHNEELKSLVRYRFDKVKERAKLKTSITRLVNILFPELEKLVASLHMVSVYALLKEFPGAHQIANAHLTRLKNLLYDASNGRYGDDTAVLFRDEARNSIGSKMPAKSLELQHTIKLIGEFDVAIDEVESRIKAIVDKIGSPILTIPGISYRMGAMILAEIGDISRFDSSDKILAYAGLSPSTYQSGQLTSCYSRMEKRGSRYLRYALFNAAKLVCQWDPTFTTYLAKKRAEGKHYNVAVSHAAKKLVRLIFALERSRQPFISAT

SEQ ID NO: 216381 - protein, 318 aa, unidentified
MAEENVNIGIDVSKAWLDVAVEPAEEYWRVENSLPGITELIRRITVMKPKCIVVEATGGYEARLVKCLCETNLPVARVNPGRVRRFAQGLNWLAKTDKIDARLLARFGDKASPRLTKLPAEHETRLAALVKRRKQVLEILVSEHNRLETADPDVCPYIEGSMSMLQKQLEELDQAIQSLIDNVPDLKGKQDLMLSVPGVGKVTASTLASQLPELGTCNRKEIATLVGVAPFNHDSGKKRGKRVIKGGRPAIRSILYMATLSAIRYNPVISKFYNRLISYGKESKVAIVACMHKLLSILNAMIRDNKSWQPDLASLCPS

SEQ ID NO: 216382 - protein, 355 aa, unidentified
MNQEKYIGMDVHAATISAAVMNAEGKVLMECVLETKAATILEFMQGLRGTLALTFEEGTLATWLHDLLKPHVSRLVVCDPRKNALLRDGNQNDRGDARNLAELLRTNHLHAVYHEKHGTRALKELGRSYLTLTKDSTRVMNRIKSVYRSWAIPCAGTSVYSRHHRAEWLAKLVEPGVRIRAEHLYEQLDSLQPVRQAARRELLRESRKHAAVKLLRQIPAIGPIRSALLVAILQTPHRFRTKRQLWAYSGFAVQTYDSGEYRFVRGKLQRNRERITVRGLNHNHNPDLKNLLKGAAITAIERPGPLQDFYAALVDKGIRPSMARLTLARKIAAITLTIWKKGVSFDPKQLQRQAA

SEQ ID NO: 216383 - protein, 346 aa, unidentified
MKDIMIGVDLAKNVFQLHGATQTGEVRFKKKLSRVRFYQFMEDHAPAVVVMEACGSAHFWVREMMKLGHEVKLIAPQYVRPFVKRQKNDAADAEAIVVAAQRPEMRFVEPKSEEQQARTVLFRCRERLVRQRTELMNALRAVLYEQGHVFPNGILHLKRIKAVLDDLDNGLAPIVLEECLCLVEQIQEQTVRIDGKTNKIKALAEKTDIPRRLQTMPGVGPLTALAIEAFVPSMENFKSGRDFAAWLGIVPRQHSSGGKARLGKVSKAGQADIRRLLIIGAMTRLNWLGRQNVQPGSWLARMMERKPRMLVAVALANKMARAIWAMLTKKQDYREPVQVAAAYQSC

SEQ ID NO: 216384 - protein, 338 aa, unidentified
MQTGQTAQTYTLFVGVDIAAPTAAVATQRPGAKASQSFLIDQTPEGYTSLLHTLQRTGHAPCQILVVMEATGSYWISLATRLVHEGFGVSVINPAQAHHFAKALLKRAKTDVIDAQTLAQLAMVLQPEPWTPPPQIYYALQQRLAQRDDLLNLRQQVRNQLHALVQHPEVIAEVRARMDQLLATFEAQLTEVEREIATALTQDAAWAAAAARLQSIKGVGWVTAAWTLVTTLNLTSCDTVDSLTAYAGLAPMPRQSGSSVWHRPAIGHTGNGRLRTAFYMATLSAAQHNPVIKAFYTRLREIGKPEKVARCAAARKLLHIAWAVVKKDQQFDPYYARG

SEQ ID NO: 216385 - protein, 464 aa, unidentified
MAVREKEGAGAGTPEPAEIAEELAEVVEYAAAIDVAKGSGMVCTRVPGSRAGRRRQRVWQVPATFAAVTGLMDQLRCEGIQRLVLESTSDYWRIWYYLAEAAGLQVWLVNSRDLRNVPGRGKSDKTGCVWQCKLNERGMLRRSFVPGEKVRDLRMLTRTRARLAQDQARHRNRVEKILEDALVKVSSVISDLFGASGRAFLAALIAGERRPAELAKLGDPRLKASRKQLEEALTGRFRDIHATEISVHLRMIDAITAEIALLDDQIAKQLALIPGTAPSCTACGLIGGGHVPGCTREGEELLSLVQRLDEITGIGEAAAAAVIAELGTDPPAFATPGHAAAWARLTPRTLQSGAVSKPGRAGKGDRFLRGTLGQAAMSVSRTDTRLGAQYRHLARKRGKQKAIVAIARVICETAWILICDPGARYTELGPGYYRPRDPARATRDKIREIERLNPGKKVVLADAA

SEQ ID NO: 216386 - protein, 440 aa, unidentified
MDSDSEGVDAPVFTGIAKTVDQISKQKEGEKLDKLYVGIDVGSRDNAVYIMLPDGSKHSAFTVKNNRGGAQTISDRTVAALMGTGLPAVVIGMEATSVYGDSLLYFLHEDGALGRFERSLHVLNPKQVKKFKEALPDLPKNDGVDAFVIADNLRHGRITRAVYLDDYRYKALQTLTRARYHAVHSLVCEKQRFVQHLFLKCSGLAQEKVFSDNFGAAALAMFKDFEYPEDLSEMDIGELAAFIAEKGKNRSPRPEELAKAVQAAVRGSYRIPQTICDSVNQVLSISISTMHAMQAQIKALDKEIEQQFANIPNTLASIPGVGKVYSAGILAEVGDINRFDSQSGLAKYAGLVWNEHKSGTFTGQHTRLIKSGNRFLKYYLCEAAFSLVRCDTEYRRYYDLKYKEVNKFQHKRALALTARKFVRLVFRLLKDNRLFIPAAG

SEQ ID NO: 216387 - protein, 276 aa, unidentified
MKLYGGIDLHSNNAVTTLIDTQDKTQLRKKLPCDLEKILSALAPYKEEIEGIAVESTFNWYWLVDGLMEAGYRVQLVNTAAVKQYEGLKHSDDDTDAFFLAHLLRLGILPTGYIYPKETRPLRDLLRKRSQLVQQRTSQILSIQNLYIRNSGVSINGNAVKRLTLEQLEQRFSDPDLVLAMDSNRLVMLALDEQIKRLEKRVVEQARLEPRYQYLLTVNGIGKILALTIMLETGDIGRFEHVGNFASYCRCVDSQRLSNGKQKGTGNTKNGNRYLA

SEQ ID NO: 216388 - protein, 406 aa, unidentified
MNYLGIDVSKSTSRYVFLDNDGEKFTKAFTLQNSQQHFQDLVSRLKKLDLNINNLLIGIEATGIWWENLYTFLTENKFKVIILNPHQTNKYREALRKKAKTDDIDAYVIAGLLRSNDFAANFIPEESIQILREITKLRYQLIKDHKSYQRQAMSLLGLIFPEYGQTAIKNPFAIASLAIFKKYPTAKHLAEAKPKHIEKIVRSIKGNNFSIKEIQNLLDTAKNSIFSGRAKDARGLNLNILLAQIESLNKSISDLDQRTNDILSPTNDEDFYSFPGGNLLTIPGVGPKTLAALLSAIGPDGKSFASGKQLIGLIGFFPKIYESGETRRDNKISKRGPKYLRSALYIAAVACIKHNKEFKSLYSKKISQGKTGKQALIYVAKKLAHLCLSMLKSGEFYNPSRVFMPI

SEQ ID NO: 216389 - protein, 274 aa, unidentified
MAEAAIIGVDLAKRVFQAHGATADGSVAFRKKLPRAQFLSFLGDHPRCIVAMEACATSHHWGREIARLGHAVRLIPPIYAKPFVKRQKNYAADAEAIAEAASRPTMRFVAIKTEAQQARAMLFRTRDLPVRQRTQTINALRGHLAEHGVVAPQGLVQLKRLSDAVNDETCRLPVTVRDLGLIYLEHIELLTARVADLDKRLRAAASQAATTRRLQSMPGAGPITAVAVETFAPPMEDFQRSRDFAAWLGLVPRQHSSGGKTRLGKASKMGQRDI

SEQ ID NO: 216390 - protein, 505 aa, unidentified
MKYIATGPRLAKFMAKGGLGNMQSKTAKQAERPKRLTRRRRKELARRIWSDQPGLDVVHRDAAGIDIGSREHYVAVGPDRDAEAVRVFGCFTTDLRRMAEWLQQCGIKSVVMQSTGVYWIPVYDVLEQYGLEVWLVNAQDTKNLPGRKSDVQESQWLLKLHTYGLLRRSFRPAPEIRGLRTCWRERGEYVQQAGSCIQRMQKALTEMNIQLATVLSDLSGETGMNIVRSIVAGERDGKRLAEFRDPRVKASKQTIAKSLEGTWLPEQLAVLQRQLGDWDHIQRQIAACDVDLQAMLQQIPAAKVQHQQSLAPAAAPVGKRKRKRKKNGKSSKNEPKFNLAAELQRVTGVDLSRIDGIKAMTIMTVISEAGLDMSKWATEDHFVSWIGLSPRNDVSGGKVLKRKTRKVKSRLATALRTSATTLRQSDSYLGAQFRRLRSRLGPPKAITAMAAKQARLVYRMLKYGQEYVDKGAVIYEQKYREQQIRFLEKRAAQNGFALVPLHQNV

SEQ ID NO: 216391 - protein, 452 aa, unidentified
MAKRSKKRCEQLPILHPHAAGIDVSASELFVAVSADRDPQPVRSFPTFTRDLNALADWPQQCGIRSVAMESTSVYWIPVYQILESRGLEVCLVNAQHVKNVPGRKTDVSDCQWLQYLHSVGLLRASFRPPGFICAIRSLWRHRSSLIQMAAEHVLHMQKALDQMNLQIHRVLSDITGISGLRILDAILAGEQDPVTLARLCHGGVKSSEDTIAKSLEGDYRPEHLFALRQSLAAFHYYQQLVVEADQEIQHQLGSLETAITAEPTVPKRTKASAYQRRRYEPKMFDLRGELYRIFGVDLTNVPGISAITAQTILCEIGTDVSRFRNASAFASWLGLCPENKISGGKVLYTKSRRVRSRVATALRMAANSLHHAKDYLGEFFRRITRKLGKPQAITATAHKLARIVYHLLSTKEAYNETVFHRCDEEVLRRAQFRLRRQAAQLGFQVIPLQNG

SEQ ID NO: 216392 - protein, 330 aa, unidentified
MNSICSSTDRVTVAVPVLGLDVAKKIVQAELRNSSNKVRFGFANNAKGFAQLARILKEHDVPKVWAGLEASGPYSQALALWLYAQGHRVSLLNPRRVKHYARSAGNRNKTDLLDAAVIADFVCAHQPVAWQPPTLEVAQLQALVRRREELSLMLQAEKNRLEGIAPNVRSSLEHVIATLSTEKARLEKLITQHVLSHQQLSRDHQLLCTIKGIGSLTAAILLAEMARPGQVERARQAAAHAGLVPRREESGTSVRRNRGLGKEGNRYLRKALYMPALVAIKYNAPLRHFASRLRAAGKPKMSIVCAIMRKLIHIAFGVLKHQKPFNPSLA

SEQ ID NO: 216393 - protein, 387 aa, unidentified
MAKQNDLSRCLVTLEQDATVIAVIEMGQSSWLVAGIVPGLERNPLKKLSPDQDALLQLLHRWQKEAVQAGRTIKRIVVAYEAGRDGFWLARWLRAREIEAYVIHPSSVPVSREHRRAKTDRLDTELLKRAFLGWLRGEPKHCSMAAIPTLVDEDAKRPGRERQSLVGERTRIINRLKANLARLGIRSFRPNLAQASNRLEALRTPEGSAVPANTLAEMQRDMNHLRFIKQQIKEIETSRAKRLAAAPNEQRHAMVRLLARVVGVGIDTADMLVQEVFSRNMRDRKALARYAGLTGAPDESGKKRRERGLAKAGNARVRRGMIELAWGHLVHQKDSALTAWYRKRTSDTRGGTRKTMIVALARKLLIALWRLVTTGETPGGLLLRPAA

SEQ ID NO: 216394 - protein, 335 aa, unidentified
MNKIYVGIDISKEKCNLCYRRDLEIVREEECSNDVKALKKAFKVALKVLGASVDEVLVCAEYTGRYIYPLTVACQELDIFLWLDDPTRIKNSMGLTRGKNDVIDAARIAEYAFRYSDKAVRYCIPDAALVSMKNLLADREFLLIDRKRYQSQLTDQKKYMAPGDFKHKSGRWKKVIKSIDEQIAAIDTEIETLIAADPVLTRQKELLVSIDGIGERIAINMIAITVGFTRFQNARQFCSFAGLTPYKYDSGTSVRSKAKISKRANQTMKALLHLAAVSAATHMKEGEYKDYYERKTKEGKHVMCVLNVIRAKLVHRMFSVIKRDTEYTKEYKPAC

SEQ ID NO: 216395 - protein, 305 aa, unidentified
MSQQLNTTIAVIGIDIGKNSFHIVGLDKPGAIALRQKWSRGQVEAHLANMPPCLIGMEACVGAHHLSRKLKALGHDARLMPAKYVRPYSKGQKNDFRDAEAIAEAVQRPTMKFVATKTTDQLDLQALHRVRERLVSQRTGIINQIRAFLLERGIAARQGQRFLRAGLPTILTTPPDVLSPRMVRIIEGLASDWRRLDERIEGLSSEIKAIACQDSSCERLMSVPGIGPIISSAMVAAIGTGDTFSKGRDYAAWLGLVPKQMSTGDRTILGKISKRGNRYLRVLFVQAAWVVLIKPKSWQRHGLKP

SEQ ID NO: 216396 - protein, 482 aa, unidentified
MKKRNIFQNQCQEILTIFEMAENRSKVMCVPIDYAKKDHLAMFCDGNGRIIRKPFSVKNSQEGKNYLIDQVTKSCRHHGIGRQHTFFGGEDCGSYADNFIAALRSENWIVAGVNAFDAKRHRENLQASTDQLDLLGICKVLLSCRGNCSPAQSGIYWNLRMLVRQRRKFVAMTTGVKNRIHSIVDRIFPGFLNEKKSGILPFSRCSLLLMEDRFSVHQIRRRRRSTLTKLLSRHAVHHPDRCAKKLQNYAGQVLRPPIKAISTLQLSLKQQTKLYGCLKDNIYQLEKEIAENLAQTQGSFLTSIRGIGIVLAAGVSAEIGDPHKQKSINNLVSYAGIIPKVKQTGGIQGKTHTRKVGKRCNRILKDYVVQSASHIGLHGPEDLMFDYKRRDSQGQHADFGMSRRYLRMAMCLMRTYQTYLPKRLQTTKTQKQERARYYLMTWPKFNEKWRKAGALDIAFDKNMPLGQWRNMIQGIYGIDLKL

SEQ ID NO: 216397 - protein, 364 aa, unidentified
MQTYEQKSKEARNYRLQSTVFIGIDVHLKQWNVCIIYDGRTYKPFQQPPTAAALSTYLKRNFPNMTYLSAYESGFCGFGPHFDLLSEGINNIVFNAADIASKGKELRRKSDSVDAKKIARELAKGELQPVYTPSWEKICTRSLSRLRSLTVNSIARLKIQIRHFLHYYHIEIPECFQSKHWTRAFIAWIREVCTYERIGEAALEAKILLGRLCQQMEELKSINRKIIEVMHTPEYEESYNLLLSVPGIGACTASLLLLEVGDLSDFSSIEKFCSYIGLVPDYKRSDDDEYGTCITHRKHSELRKKFIECAWRAVAVDETMQRCFAKWRRKMPHNKAIIRVACKLAKCVKSILKNRKKYEARHLE

SEQ ID NO: 216398 - protein, 331 aa, unidentified
MKTLHRRCAGLDVHSDSVVACARLTVRTKATHEVRRFSTTTRDLLELADWLAAQGITHIAMEATGVYWKPIWHVLEGRFELVLANAAHIRNVPGRKSDVNDAVWISDLLAHGLIRASFVPPTQIQEVRDLTRTRTQLGREVGQHIQRIQKTLENANIKLTSVISNIMGTSGRRILKAIIRGETNPANLAELGSTGLKCPRTDLTAALDGRVTAHHRFLIAHHLRLIEELEKHIAAFDARIEELLAPLGNAVAQLITIPGVSRVSAQVILAELGADMTAFPTSGHLLSWAGLTPRLDESAGKRRSTRVRKGAPWLKPVLVQCAWGSARTKGT

SEQ ID NO: 216399 - protein, 392 aa, unidentified
MNRIVYIGMDVHTSNYTLCSLDPGYGVEKDNYFAEVQFTNNFVTNVVNYVSNLKKKLKDCEFVCGYEAGCLGYSTYKDLTKVGIKCVLMAPSTMAVQKGGKKVKNDRRDARVIAQCLAYQTYKEVYVLSEHDEAVRGYLLMRDSHNKALKRIKQQIIAFCTGHGLFSPTKSNWTVAHLKWLKDLKFNDPVEQEILNEYLSSLTFLSDKIKAMDVRIEELASEKQYCENVKKLRCIKGIETNVALTLLAEIGDFNRFSKPTDFAAYLGLIPGEQSSGDKVRGTGITKAGNSTLRRKLTESAKGYWRGRIGIKSATFKKLEKELPKEVTEYALKANTRLQRKFFNMTHVKGKNMNVAASACAREMACFVWGLITNHYEKAPAVPKTDEELLDLN

SEQ ID NO: 216400 - protein, 325 aa, unidentified
MTHPDKNINKKFVGVDIAKDKYDVRYSDDSTRIFPNNKTGHKSFIKSLAKSDKLLIAMEPTGGYEQSLISALQNAGHDAVLTNGFRVKNYAKAMGYFAKNDKIDSLVIRDFAQEMYPKGKLQILMKKSANFRKLEQWLNRRAQVVKILISEKQRHEKCTEKVLKTHMEKSIAFHEKEQKLIDEKIEELSQKEELINRAAKFKEVMGIGNACANALVIYLPELGHYPNKVISAMVGTAPFCKESGKYKGKSKIKGGRNKLRSILYMGVLSATSHNTIIKKFYDRLIKRGKHHNVAMIACMRKLLCILNAMERNNTHWDDDYCSAKN

SEQ ID NO: 216401 - protein, 377 aa, unidentified
MNDLIRIGIDTSKSVFVLHGVNAAEQPILRKRLRRRQVVDYLGKLPPMRIGIEACGAAHYWGRELTALGHKVCLLAPQHVKPYVRRNKNDEADAEAICEAMSRPRTRFVPIKTAEQQAALMLAGVRYQLVRRRTQLSNSIRGYAAEFGLVAARGLDKIEPLLARIAADETLPALARELFAEQAEDYAELTRKLRRIDAKLLAWHRQNALSRRLAEIPAIGPIGASLLAMKVPDPAAFKTGRDFAAWLGLTPKDHSTAGKTRLGTITRAGDESLRRVLVVGATALIQQVRKGRGHPSPWLIALLKRKPPKLAAVALANKTARIAWKLMVSGGHYDRNRAAASRAERCAPLVGGFAARPALEAHTMPRRKVAPAAMPKA

SEQ ID NO: 216402 - protein, 405 aa, unidentified
MGEGSFAGVDWASQEHAVCVMDADGRIAEGGRYRHDERGLRALCNRLVELGVLLVAVERPDGLLIERLLDAGLPVIAVHPNQLAASRPRFSAAGHKSDSFDAFVLGELARTDSHRFRVLVPDSDATKALRALTRAREDLVETRVALANALRAQLECFWPGAVAIFADIDSPIALAFLKRYPSPADARGLGEQRLERFLARNHYCGRRPARELLRRLRNAADGRAGQLETEARRQLVLGLVAVLEPIVVQIAQLTSEIRGALHDHLDGEIFSSLFRHPKTAICPATFIAEMGDCRPRYPTKAALASDGGQAPVAKESGKSKRAHFRWACDHRLRDAFSTLADSSRHHNPWAADIYDRARARGASHPHAIRILGRAWAGVIWRMWHDHTTYDPALHGNYQQLVTARG

SEQ ID NO: 216403 - protein, 416 aa, unidentified
MKIYPITRPIERYIALDIHKEYVLAGGMSAQQEWLLPPRRIEMSKFEEWAQKNLCESDGVVIETTTNVWEIYDIVQPLVGHVVVAHAGAVRQIAEARVKTDKEDVKRLIRLLIADILPEVWVPPVYVRELRGLISYRQRLVKTGAVFRNRLQSLLHSHNLVLPEEGLVSQAWWVRQEKISPLEKLQIGQEIALLEQIEKHKAEVDQELGKQSLGETWGKQALHLMQLPGIGVVIAMTLLSAIGDAHRFENAGKLVGYSGLGAGVHDSGQEHIEKRITKSGRKELRWAMVEAAWRAVRSSPYWKEQYEKFVKRMRRPNQAIVVVARKLLVAVWHVLTKAETDVRASEEDLAYKMLVLSWDVDENVRQGLTYKQFAKYALMKLGVETDITRFVRKNVPRRLAPREEVLARLAELGIVV

SEQ ID NO: 216404 - protein, 339 aa, unidentified
MEVVTIGLDIAKSVFQAHGVDAAGEVVVRRRLTRSKLLDFFDKQPRCLVGIEACASAHYWARELTGLGHTVRLIPPSYVKAYLKRQKNDAADAEAICEAVTRPSMRFVPVKSVEQQDIMVLHRTRSLLMRQRVQLSNAIRAHMSEFGVVAPIGRLGLDQLIAIAADGEDARVPDAARASLLMLVDLLRMVNQHVLENDRRIIAAARSSDVGRRLMEVPGVGPVLASALVAGVPDPASFKSGRNLAAWIGLVPRQNSSGGKERLGSITKEGDRYLRKLLVVGAVAVLRYAQRHGARRPWLVALMARRKPKVAAVALANKTARMIWAIMTSGSRYREPIAA

SEQ ID NO: 216405 - protein, 343 aa, unidentified
MQTITTIGLDIAKSVFQVHGVDVTGQVVMRRQLKRRYVLAFFQKLSPCLVGIEACASSHYWSRELQALGHSERLMPPAYVKPYVKRQKNDMADAEAICEAVTRANMRFVPTKTPEQQSGLMLHRTRHLCIRQQTSVINAIRAHLAEFGVIAPVGRKGVEELLRVVADPNDKRVPEVVRVCVAALGSQLLSLKKQILDFDRMILAWHRSSQTSKRLNCIPGVGPLLATALVASVADPKTFRSGRNFSAWIGLVPKQHSSGGRERLGSISKQGDRYLRSLFVAGALAVIRYAKLHGTDHRPWLTALLARRPTKVAAIALANKLARMAWALLARGERYNYPVALRP

SEQ ID NO: 216406 - protein, 362 aa, unidentified
MQPEYLRLSCGLDIGSKNFHACFRALKASGELVILRQKHFPNSLTGITQFVGWLNKIRSKKNVASVNFFQIIMESTGVYHELLLEELHRQGLPVCLEIANRVSAYLKTIGHVSKNDKQDALGISQLGVERLLKRWQPCSPQFLAIRSILRHCNNLTDSLVQYKNRLHAADVSTSVDEETTESIRRMIALLEEEIALAEKRAVALYHQDEVLVNKLSRIEESLHGVRILTLLKVVAETNGFAQITSRDQLASFAGYDIIENQSGDMERRARISKRGNVRLRAAMYMPAVTIIRDKVGPLYDLYARIRLRNPKIYKIGNVAVQRKLLLLIYTLYKTGAAYDPLYESKRRRADAASFQQLELQLA

SEQ ID NO: 216407 - protein, 453 aa, unidentified
MAGKQKSGNQAVEWPLVCPDAAGLDIGAGEIWACVPADRADPAVRCFATFTPDLHALADWLIACRVSTVAMESTGVYWVPVFEILEARGLKVYLVNARHIRNVPGRKSDVQDCQWIQRLHSYGFLRASFRPESDMAVLRAYLRHRGMLIEHRAAHIQHMQKALQLMNLQLPRVLSDITGVTGMQIIRAIVSGERTPAVLAAYRHGRCHHGEADIAKALTGNYRAEHVFALKQSLALYDAYSEQLRACDAEIESQYAAIRPRFDPDDPEHPLGPDPKPNTHSKNAADFDARRHLFRLIGIDLTAVDGLDETSAQILLSEIGMDMSNWRTEKHFCSWLGLAPHNDITGGRVVRSRTLPVHNRAAQILRMAAQSAGRGKSALGSFYRRLRARQGPEQATTATAHKIARIVYHMLKHRQPYNSVSAAEYDKLQHQRELRSLERRAAKLGFTLTAALA

SEQ ID NO: 216408 - protein, 346 aa, unidentified
MRILALDLGKYKTVACDYEAESGRHRFATVLTTPKALHDLIVDREPQRVVIEICSIAGWVGDLVRSLGIELQVANTSDERWQWRKVKQKNDRRDALKAAQLSAVNQLCPVHVPELTMRQWRALIAYRSKLVQRRTKVKNHIRDLLLREGQLLPRGRTAWTQAGMATLAAMTQPFADVDSDQLWRGELGIELAQLQELQHQISAVETKLDELAAADGRVALLRTIPGVGPRLAEAIVTMFDDVTRFATAGQVGAYIGMVPKQFDSGETARSGRITRHGNRLVRSLLVEIAWASLRHNPWARQTFQRISGGKKSRRKIAIVAVGRKLLVRCWGMLRHQTPWHWQSGVA

SEQ ID NO: 216409 - protein, 365 aa, unidentified
MMETETTKILGLGVDISKKRAEICLKNPAVADSFAVSNDDQGISTLLRKLKPYVEAGLVVKGAIESTGNLWMRVYEALEQSGIDIALANPLKTKAIAEARIKSDGIDASILADLARADLVAKCYVPDKRTREVRSLVRYRVDLAQRSTELKNKVHNILDKYSLRYDGLLFTDRGLEWLNEQVRNRLSVIDGQLVNSYLKEIATMEELIASVERQMAKLAIKDKKVELLLGFTGIDYYGALLLLYEIGDITRFSNPRKLVSWAGLAPSLHQSGIVSYTGRITKQGNRRVRWYLVEAAQRAARYDPKLKPFYERIAQRKGHQKAIVAVARKILVSVYWVLTRNEPYDGYRDDVKTRKLKRLERLSAC

SEQ ID NO: 216410 - protein, 417 aa, unidentified
MSEYAALIGIDWADSKHDICLIDPATGRREAAVLSHSPHSLDEWARALRARFGGQQIAVSLEQSRGPLIYALLKYDFLVLYPVNPSTLARYREAFSPSRHKDDPTDAAYLAELLAHHREHLRAWHPDSEQTRTLRYLVEHRRRLVDDRTRISNRVTALLKCYFPQVLHWFPDIRTILVCDFLLRWPELSALKRVRPETLSKFFREHHSVRRETLEKRVEAIKQAVPLVTDRAVIASSTLMVKALAAQMKTTLSAIHEFDTEIAALCAVNEEFALMQSLPGAGQNYAARLVVALGTDRARWRSASELAQLSGIAPVIERSGKSCRVRWRYFCPKFLRQSFHEYAGESVRHSFWARAYYDRQRAKGKGHHAAVRALAFKWVRIIYRCWQTRTAYDEVKYMESLRKKGSSLLDYAANNPA

SEQ ID NO: 216411 - protein, 360 aa, unidentified
MGVDLGDKWSNFCVLGLDGEKLTEGELRTGQEDFAEFFQSLAASRVVMEVGTHSAWARDVVARSGHEVLVANPRQMEGPKRRKRKNDRIDADKLARVGRMDPQSLFPIEHRSVEVRQDLVAVRARDALVAVRKDLINTTRGLVKSMGARLPKCSTQSFAKKAEGALPAAVREVLLPLVRLAETLSSYIQEYDERIEKLATGKYAHTELLRQVKGVGPLTSLAYVLTLEDPQRFVKSRDVGPYLGLVPKQEDWGDRQPQLRITKMGDMMLRRLLVGSAHYILGPFGPDTDLRRYGLRLCERGGKNAKKRAVVAVARKLAVLLHRLWVSGEVYEPLHQALPKVTQEQAARPAPAEATEEEAA

SEQ ID NO: 216412 - protein, 356 aa, unidentified
MTFVGLDLHKRYITACAVDAAGAVLGEVRRMPTTVECLSDFLAALPVPVTIAMEATLYWAWLTDRLERAGYTVRVANAYQVKLIWQARSKTDPIDAHKLAELARANLLPTVWLPDVATRERRRLLRGRAFFVRERTKVKNRIHGHLTAENQLCPKTDLYGKAGRAWLATVDLSPALRNQVERLLHLHDYLTQEIKRLDGQVKHAAREDPIAKQLETIPGVGTFAALFLHADIGPVSRFRSSHELAAYAGLVPTTRSSGGKTTHGTVGNCSNHWLKWILCEVVITLKRSPGPVGLHYRHLLRAKGKPKATTAAARKFCCYLYWMLKEGWTYDEWLKQHQEVFRRSEVRPSQRLGAVA

SEQ ID NO: 216413 - protein, 361 aa, unidentified
MNRTTGMNAGQIIGTMNGQQVIGLDIAKHVFQMHTVNMGTGEIVNVQIKRTNVLEHFANLAPCLVAIEACGGAHHWARELSKLGHTVRLLHAKIVRPFVSGNKTDATDARAIWLAVQQPGVKFVGTKTAAQQATLTLHRQRELLMKMRIMQTNALRSLLYEFGATFAKGKKALFKEIEATLEGLADTLPQMVRDSLHEQVARIKAMEVDMHAIEVRLQVQLKQDPQMQRIAQIPGVGLLTATAAIATMGEASAFKSGREFCAWLGLVPKQTGSGGKVKLLGISKRGDTYLRTLLIHGARSVIAHAKEPVPWLQGIKARRPSNVVFVAQAAKMARTIWAITAKAQDYDKGFKSIRPQVLAAV

SEQ ID NO: 216414 - protein, 358 aa, unidentified
MKYVGIDVHKKMCQVAILDEDGNLLDENRFPNTPEGIEEFSGKLTTFHDEVKAVVESTGNLWIQIHDRLEEHGFDVALSNPSKTRLIAEAKVKTDKVDARTLASLLRADMIPTCYVPGEELRSKRELLRHRLNLVKNRTEVKNRVHGLLDKHGLRMPGTTPFSKENISWLRGLSLGFMDDAILRSDLAVLDAVDAQVTLIEEKIATIAAEDRRVRLLMTMTGVGYFTAMLVMAEVGDVGRFRGDKEFASWMGLVPSVHQSGERTRMGGVSGPGNKRLRWALVESAQAAVRFDPRFGGMYERVSRRRGKGCAVVAVAHEMSRIMYFMLSRGEPYRGENRELTERKLKSMSKKAFNGLRN

SEQ ID NO: 216415 - protein, 408 aa, unidentified
MNTLYVGIDVSSKSNVVYLMLPNGDKHSNFSVANSHKGSTQLVKRILSALTSHSLDTVIIGLEATSVYGDNLVYFLREDATLAPFNRKIHVLNPKQVKKFHDAYNDLPKNDYVDSFVIADCLRFGRINKEVYMGDYRYKALQNLTRARFFAVQNLVKEKQRFMNVLFKKYSMMTQEKVFSDTFSTTALAVYDEFESAEALANMDLHELTDFIIEKGKNRFPDPDAVAKAIQKAARSSYRLPKTVNDSVNQVLSISITSMKALESQIKEFDKAIKAQMELLPNVLISIPGIGPVYSAGIMAEIGDINRFNSQAALAKYAGLAWKQHQSGGFESEVTRLIPSGNRFLKYYLCEAAFSLVRCDKEYSDFYHLKYKEVNRYQHKRALALTARKFVRLVFRLLKDNRLYCPAK

SEQ ID NO: 216416 - protein, 427 aa, unidentified
MNYNRNRKIMQVKTSTLVIGVDIAKKKHVARAQDYRGIEYGKALAFQNSKEGFDNFSKWMFKLKDQYEKEDIIVGMEPTGHYWLNLAQLLRCKEIKLVLVNPSHTKRSKELDDNSPTKNDKKDAKVIAQLVKDGRYSEPNIPVGVYADVRVAMTHMERLNKDLQRVVGKIHQFIDKYFPEYLTVFKGWDGKASLVTLKTFPLPSEVVKMTPEEIVSIWKKKVKRAVGIKRAKKLIRAAENSVGLTEGAEIAKFELNYFLDQYENITNQSEELTNKIEELLKKVPDSESMLSIKGVGIKTVAGFISEVGDINNYEHPRQIQKLAGLNLMENSSGKHKGRTCITKRGRAKLRALLYRVMLPLVAKNEEFKALHEYYTTRSENPLKKKQSLVALSCKLIRVLFALWKKQVKYDSEKLFRDIKRSNLQEAA

SEQ ID NO: 216417 - protein, 363 aa, unidentified
MEKDTTYVGMDVHKRSIALAMRDPSGGVSEQTIPHETRAILRWVRKIKRETTGPVRCAYEAGPTGYGLQRQLQGDGLECAVIAPSLIPRKPGERIKTDRRDARKLAELFEGGLLTEVHSPTPEAEAVRDLCRAREDAKEDQTRARHRLGKFLLRRGLIWGRNNWTQAHQQWLRGLRLEHPAEQATFDTYCTAVDQVGERLRAIELDLESEPYATPVSWLRCFHGIETTTAMTLVTELHDFRRFRKPRELMAYLGLVPSEHSSGDRTNRGGITKSGNGHARRVLVESAWHYRHAPRGSAALRKRREGQPARVIAIADRAHHRLSRRFRRMDERGKPRNKVVVAIARELVGFLWATLAVEEVVHG

SEQ ID NO: 216418 - protein, 439 aa, unidentified
MTLKIEHTAETVNSASKTGSSQKLLCCFDVSKASLSLYAQYQPEKQPGGRPCQIEDQLPNQTGAIERILDRLEGLAEEAGLDGLLVLAEPTGGYERKLLQTARRLSHETGLISPEHVAKLKTVESNDTGKTDHKDPRVMHLVARLGKTQTDRHLPERYRRLRRLTRYYDEDEETLTAARQRIQAVISDLFPDYDKSATFTFDTTGQALMEAYAFNPYHIRRAGLGRFKSTIKRRVNARFSTLEHLFERAEESVRYHKTEAEAQLLTSRLKALWADYKRLRARRTALRAQIEQVGRELVTDRELPDLSHLKGITLFNLTRLASQTGPLTDFGSGRALLRYAGLNLQERQSGTYRGQTRLSKKGRPLLRKILGQTIFPVLRKAMLYGPYYHRKLQEGMIAAKAKVAVMRKFLRMLHSLARSEEAFDPERFRMCESQYTLAQ

SEQ ID NO: 216419 - protein, 357 aa, unidentified
MLGMGDSAPRKGADAMTFVGCDLHTRMQQVAVLDTGTGEVSERRLDHDGTAVEEFYAALPRPVTVGIESTGYAVWFHTLMQRLGHTLLVGDAAKIRAMVVRKTKTDRRDALHVLDLLRHDRFPAIWVPDPATRDLRALLTHRMRLVRIRTMVKNGLQAIALNCRLACGSKLLRQAGLAQLQALALPPHTARRRDQSLELLTGLTTQIRELDDAITTAALAHPDAPRLITHPGVGALTALTTIVVLGPVSRFHDSKQVVSYVGLAPALHASGEKYHLGRITKQGSPLLRFVLGQAATHAARMDPDLKRTYGVLVHRRGRPKAKVAIARKLLVRLFIMLRDHIDYDEFRRRGRTAPASA

SEQ ID NO: 216420 - protein, 418 aa, unidentified
MKVVYPICCGVDVHKTFLVATIITSQGITPHYSKRRFSTFNNSILQFKQWLLDNNCFDVCMESTGKYWTPVSNLLEDVINITIANPKWVRAVKGNKDDVKDSKWIGDLFRLGLVPGSYIPDKPIRILREYTRYRSKLVSCKSSEKNRFQNAFTVCNVALDAVVSDMFGKSATSITDYLISSDSFDPKYCTSLLQKSLKKKADTIIESIEGYQMTKEQKERIVMVRSHLDFIHQSIEDLDEKLAKMVAPYENAITLLRTIPGVDRASAITIISEIGTDMSQFASSKRLCCWAGLTPGNNESAGKKKSVRITRAGVYLKPALVQVAHAAVKSSSSPYYRIKYERIFKRRGKKRAIIAIARMILTAIYHMFVTGEEFNPSDLYKIDMPQEMLEKQKEKAIKQAVKLLISHGLIKATDISAG

SEQ ID NO: 216421 - protein, 426 aa, unidentified
MNCTQNYKIDQVTEQTLVVGIDIAKRTHYACFVDDRGRVLRKSFPIFQSKEGFQQLYKAIQEAMQAFGKSEVIVAVEPTGHYWLNLAYFLEEHGIPLVMVNPAHVCRSKELDDNLPTKHDAKDALVIARLAKDGRFLVPRLLHEIEADLRVGSTLKEKLRKEQTAVKNAIVRWTDRYFPEFWTVFRDLGKTALSVLEWTPLPADMAGRTVEELLEVYRQSEGMKCPQKAKIQALINTAKDSIGVTEGTAMARFEIAALVRRYRQLEAEIAALDAELKALVQTTMEYQWLKTVDGLGDATIIDLLAEIGSFAHYRDPRQLVKLAGLTLKENSSGQRKGQKHISKRGRKRLRSVLFRAMIPLIRHNEAFRELHEYYTTRSVNPLTGKQSIVALCRKLLNVLFAICTKKQAFDAERMKQDVLSQVQRAA

SEQ ID NO: 216422 - protein, 412 aa, unidentified
MEVLYACCCGIDVHAKMLVACLLKPGKKEVRTFSTMTEDLLRLLDWLTQEGCTHVAIESTGVYWRPVFNILEGGMEVMLTNARDAKGYKARKTDVIDAEWLADLLRHGLLKPSFIPPLPIRELRELTRYRESLVREQTALANRIQKLIESANIKLGQVASDALGVSGKLRLRALAAGETDAEKMSHLARRALKRKQPQLQQALEGRVTPAQRWILGQLLDQYDQVEAALQSVAERIRQEVDSSADPFVPEAIKLLDTIPGVGETVAQIIVAEIGVDMDRFPTDHHLASWAGMCPGNNESAGKRKSGKTTKGSRYLRAALVQAAWAASHQQGTYLAAQYKRLVKRMGKKKALVAVGHSMLVMVYHVLQNRTRYQELGGDYFDRRNVDKQRKRLIRQLESLGVKVTVEEIQQAA

SEQ ID NO: 216423 - protein, 293 aa, unidentified
MEQYAGIDVSLELSSVCVVDAQGKIVKEAKVASEPEALIGFFETLGIAVDRIGLEAGPLSQWLRAGLKRAGFEAVLLETRHVKAALSAMTVKTDRKDARGIAQLIRMGWFRPVHAKSIGAQEIRALLVARKQLLGRLIDVELSIRGILRGFGLKVGPVTRKNFEARIRELVTGQATLERITMAMLSARAALKAEYAKLHKAVLTIVRDDAVCRRLMTVPSVGPLVAITYKSAIDDPHRIAKSKAAGALFGLTPKKYQSGEKDVTGGITLAGDEMVRTALYEAGVSEALCKGSL

SEQ ID NO: 216424 - protein, 320 aa, unidentified
MKKVIGIDVSAKKLNIHIMGTQASNLEIPNSIKAIKDFIKVQGLKPDNCIIGAESTGGYHLICQRIFVRKGFEFRLLNPILTNKKIRLSIRKKKTDKSDSRIIAGLIAEGEGRIVTLKQLDTTKRTLLRTRRTVVDHRTAIKILIKELKRTEEKEKIQKTVTVLETLITDMDNCVRELEESALKKTEITEVEKLIRSIPGFATQLSTVVASEVGDFTRFPSATKFKAYVGVDPKVTQSGGVLKTGRITKRGNVHLRSAFYLAAQVARQHDPELKEFYEKKKSEGKATRVAIVAVARKLCERVFAVVRRGTPYEIQRLAFA

SEQ ID NO: 216425 - protein, 391 aa, unidentified
MNKAWAGIDAGKEVHWAHVLDASGAQLLSRKVENDERDLSLLIDEVLALAEEVVWAVDQPGGTAALLLALLWERGQRILYLPGLAVDRARDAYRGESKTDARDAHVIADQARMRADLGELTPSEAELAELQLLLARRRDLITDQTRSITRLRETLLSLFPALERALDLNNRGALTLVAHYQSPAAIRRMGRKRLATFLRKRGVKGAEGLAKKAIAAANSQSVVLPGEEVAAAIVAELAREVLSLKERIEILDKELARRFFARPEARILASLPGMGPVLGAEFLVAVGDLSAFESPDQLAAYAGLVPAAHDSGKRTGNDRRMRGGNKVLKRVFYYSAFSSLRSSSESRAFYDRKRAEGKRHTQALIALARRRVNVVWAMLRDGTTFKARSAA

SEQ ID NO: 216426 - protein, 320 aa, unidentified
MDAVLGIDIAKAKFDVALLLPEGKLRRKSCPNTPAGFAELAQWLARQGVALVHASLEATGTYGDALAHYLYDAGHVVSVLNPAVTHAFAVSQLTRAKTDQIDAELIARYTATQQPLPWRPAPREVRELQALVRRLDALQGMRTQETNRLEAGPLVASVHASIETVIATLAAEIKAVQQQIRAHLNQHPGLRDQRDLLTSIPGIGEATAAVLIAELFDKPYCSARQAAAFAGVVPRVCESGTLKARGRLVKIGPSRLRKALYFPALAALRFNPTLRALQTRMRAAGKPKMVIIGAAMRKLIHLAFGVLKSGRAYDSTYAHS

SEQ ID NO: 216427 - protein, 458 aa, unidentified
MSRNKSTDRVRRTIAVVHPNAAAIDVGATMHMAAVNADRTPEPVRSFGTFTTDLHRLVDWFAECGVDTVVMESTSVYWIPIFEILDARGFAVFLVNARDAKHVPGRKTDVSDAQWLQRLHSFGLLRASFRPKGQIAELRAYLRQRERLLEYGASHIQHMQKALTEMNVQLHHVVTDITGATGLRIIRAILVGERNPAVLARMRDRRCHATVETIEKALAGNYRAEHLFALEQALALYDTYQQKASACDARIEAVLKELSAHRGRKAGPLPSPRQNRSRQQNSLLFDVRTALFALLGKDLTQINGLGPYLALKLIAECGDDLSAWPSAKHFTSWLCLAPSNKISGGRVLSSRTRRSGSRAAALLRLAAVTVGRTDTALGAFYRRLSARIGKAKAVTATARKIAVLFYNAVRHGMDYVDPGASSYEIRYRARVIDNLHRRAKAFGFMLQPMAPTPGMAVS

SEQ ID NO: 216428 - protein, 384 aa, unidentified
MRAVCGLDVHKDSVFLCILNEDGELIERVFGVLTFQLQQMRDLLLTHHVDEVSMESTSIYWIPIWRILAPHFHLRLVNPYFIKQLPGHKSDVADAQWIAECTMKNLVSSSFVPPENIQQLRQYDRRIFDLDEEIVRKLSKLDAVMQRCNIRLSNYVSNVDCKSYKDVVRKISEGVTDPEVLIEEIHGRIIKHHGRETILASLTGVISQAETDVLRQLREELDMAEKHKQECLEKMLEICQEKYPDELRRLQTIPGVKERTATSLIAEIGTDMSKFETANHLAAWSGLRPRNDESNKKFKSRRITHGNVYLRKNVIQCAWAASRTKDCFFSRFSYHQTQVRKKNKMKVIVAVARKLLVATWHVINDKTDYVDFQKQDRQASVTNG

SEQ ID NO: 216429 - protein, 352 aa, unidentified
MNEITTVGVDLAKDLIVACAADAAGRTQFYKRFGFHGFAAWAANLPPCTIAMEACSSAHYWARTLSALGHKVKLLAPDLVKPFRKSQAAKNDRNDAQAILITALQPDMRFVAVKSLEQQSILAVHRMREGWKSERTALINRVRGLLAEFGIWLGRSPQTLARRLPQLMQEEQLPARVRALLAQAHGQLLQLEALMQQCELDIQAHARHSEAAQRLSALNGIGPITASAIVATIGNAADFRNGRQMAAWSGLVPKQSSSGGKDRLGKITKRGDTYLRGLLTQGARSTLNAALARPPDKRSHLEHWIVALRQRVGYHKSLVAIANKHARICWALLVREERYDPHTASRHVRPAA

SEQ ID NO: 216430 - protein, 402 aa, unidentified
MVYFVSSYLLTVPKSVYSFNNDSEGFQSAKEWEVQIAVEHNKSQIVLGLEPTGHYWFCLAAWMISNGISVVQVNPYAVKQTKEVEDNSQMKDDRKDPKLIANLVKDGNFGMPYLPEKLYAELRRLSMFRDQLNEDRIRTVNRMHREMKIYFPEYKDALGKVDGAFSLELLRQAPFPDDLISLGEDGIRKIWHDAKLRGRGYSRAGEILQYAKVSVGIKDGAIAGKAAVKWFVQKILELDAELAVIENQINQKCQEIPHAGNILEIPGIGENILSGILAEMGDISRFDDVKEIQKLSGLGLVACSSGKHKGETRISHRGRKRLRYWLFQAAKSAVAHAEEFKELHIYYTTRADNPLKKMQSLIVIACKLLRIIYTILKKGMVYDPKKMLMDIRRVEKKEAIVA

SEQ ID NO: 216431 - protein, 320 aa, unidentified
MDSHAEPIRHVGIDVGKDRVEVHIRPDGIAFGCATDAEGLANLVARLKPLKPKVVALEATGGYEAIVAATLSNAGLAVAIVNPRQTRQFAGALGQLAKTDTIDASVIAHFAEMAKLEGKPPADTQRVELRALLARRHQLIDMATAEKQRAARAENTLARRSCEKMLRQLNAEIARVERAIGKLIDASPMFQGKAALLKSIPGVGDIVARTFIAELPELGTVDRHQIAALVGVAPINRDSGKWRGRRSIKGGRPQVRATLFMPCLAVVKHNKPLRAFYNRLVEAGKDKKLALIAVMRKLVVIANAMLKAGKPWAEGYVTQP

SEQ ID NO: 216432 - protein, 328 aa, unidentified
MTKHITICAGIDTGKRKLDVAIEGRCEQLQVENTPEGHKVLVAWLRKYGVKRVGIEASGGYEQPVVAELRRARFVVVVFQPAQVRAYAKFHLQRAKNDKIDAALIASCTAAVRKIHAAPDPRLLPFAERLTMIDQISEDIARLKNRIESCRNAMIKKLWQQDIARLEKREKAELKVLVASIRKHRDLARRLELINSIDGIGLPTAVAILVRLPEIGRVTREQAVALAGLAPYDDDSGEQVGVRHIEGGRKRLRRAVYTASLAASFRWNPQLIQLYQRLRAAGKEHKQALVACARKMLIFANTVVARGTPWDDEPPARNTSIAAPLSVS

SEQ ID NO: 216433 - protein, 349 aa, unidentified
MSVKVNSAITVIGIDIGKNSFHVVGHDKRGAIMFGQKWSRGQVEARLANLPPCLIGMEACVGAHHLSRKLQMLGHDARLMPAKYVRPYSKGQKNDFRDAEAIAEAVQRPTMKFVATKTAEQLDLQALHRVRERLVSQRTGIINQIRAFLLERGVAVRQGLRFLRIELPRILATPSEVLSPRMVRVIEDLARDWRRLDERIEGLSSEIETLARRDAGCERLMSVPGIGPIISSAMVAAIGTGDAFTKGRDFAAWLGLVPKQISTGDRTILGKISKRGNRYLRVLFVQAAWVVLIKPKTWDRHGLKPWLEAAKKRLHHNVLAIALANKLARIAWSVLARGRAFEASRIQVA

SEQ ID NO: 216434 - protein, 391 aa, unidentified
MTRMRQAARRGQPDPCVARGGSEQTILGVDTHKDSHVAAVITVLGALVGTRSFPATAAGYRQLLAWARSFGVLRRAGVEGTGCYGAALTRYLRSESVSVVEVNRPDRATRRRRGKSDPVDAEAAARAVLAGQAGPTPKTADGPAEILRVFKLARDSAVKARTQAINQLRAVLVCADPTLRESLSGLGRATLIRRCAQLPDPDAGQDTTAAVIHTLRSLARRVGQLSAEARDLQDRMTRVITAHTPKLLDQLGVGPDNAAALLIAAGDNCDRLTSDASFAALCGVSPVEASSGKTLRRRLNRGGNRQANAALFRITLTRLRHDPRTRAYLDRRTAEGKPDAKPSAASSATSPARSTPCSNHRTHPQPTQQQQLDEHRGVCAIAGGRCGAAAT

SEQ ID NO: 216435 - protein, 412 aa, unidentified
MQVVYARCAGLDVHKKAVSACISVCEADGKKHQQVRVFGTFTRDLLALADWLKEVGVTHVAMEATGVYWRPVWAVLEGQFEQMLVNPQHIKAVPGRKTDAKDCEWIADLLQHGLLKGSFVPPTPIQDLRDLTRYRAELRQSQNRVANRIQKFLEQANLKLSSVATDTLGVSGRKMLEAIIAGEDNPEHLAQLARGRLKNKRAELEQALAGRVRDHHRFMLAEYLDEWEALGERIRRMEAEIDKQIRPFEAAVALWRTIPGVERVTACSLVAEVGVDMRQFATAQHLASWGALCPGNHESAGKRKSGRTRDGNRWLRRSLCQAAWAVTRKKDCYLSAQFKRLAARRGVKRAVMAVAHTILVIGYHMLKSGQGYHELGGNYLEQINKNQLQRYFVKRLQRLGLKVTVEAVPEAA

SEQ ID NO: 216436 - protein, 364 aa, unidentified
MSESTTVTIGLDVHAASVRLAAVRGDELLEERTLPYEHEAVERAVLRWPAVRCCYEAGPTGFGLYRHLRERGIDCEVVAPGLVPQRPGDRIKTDPRDARKLAQLHAAGLLSAIQVPTPQLEAARDLIRAREDARIERMRARHRLGKLLRRNDRRLPTKTWGVGRRRWLGQQRFAEPPRQAAFDDYLHALDLVDARIQALEREIDALAAEPAFAPLVGPLRCLRGIDTLTALGIAAEVGDFSRFASAEEFMSFVGLVPSERSSGEKRRQGSITKTGNAHVRRLLVEAAWSAGRRPQVGERLARRHHGQDPLVRARAWRCQQRLYRRWRRMAARGKPRQKIVVACARELAGFVWAIATDQPLRAEG

SEQ ID NO: 216437 - protein, 334 aa, unidentified
MSLELLAIDLGKRSFHLYGIDTDGVILSQKVSRAKLAEVVANLAPTVIAMEACASAHHWGRCWLAAGRKVRLINPRFVKPFVKGSKNDAVDAEAIFEAAMRPTMRFVPVKSTDQQDLQSLHRARDRLICQRTALINHTRGLLAEYGIVLRQGRWHFATQASAAIADADLSDLARVIFGELLDQLDDLDRRVKRLDATMVALCRTNAICRRLAKLPGVGPVVATAIVAAVNDGRQFRSGREMAAWIGLVPRQYTTGGKPRLGGIGRRANHYLRRQLIHGARAVVSRLPKHDDPRSTWLKALLARRGFNRTIVALANQTARIAWALLSRKEEYAIA

SEQ ID NO: 216438 - protein, 395 aa, unidentified
MYNLFVGIDVSKDSFSVAGLNDKAKLLFSLSPLMNAQGFSELLKILTSHCDDLSSAIVALESTGPYHLNLFSFLVSQGITTIVVNPLIIANFAKLSLRKTKTDKKDAITIARFVFLNRDSISQLPSSQQTTDLRDLARERESILKMIASMKNDVRRILQSTFPELEHLVDILGDTMLYFLKVFPSARLISQATPEAVAQGFNQGDWRRRISVHYTNIIALAKTSVGATSPSKEMILPGKIETLLYLKKRVDEITKMLVRLCKSLKKEDFALLTSIRGVNVKTAAPFLAELGDYQNFQSYKKMLAFAGLDPTTHQSGKYEGMSMISRRGNRHLRKVIYNMTFCVVRYAGPLRDYFFRRKAEGLPFRKALLATSHKLVRTIFAMLNSRTFYKFAEVT

SEQ ID NO: 216439 - protein, 430 aa, unidentified
MKFNTQNAKIEAITEKTLVLGIDVGSEMHYARAFDYRGIEYTKKPFKFSNTEAGFMSLQAWILDLKEKHEKDKVVPGMEPTGHYWFNLGKFLQDNEMKPVLVNPHHVKKSKELDDNNPTKNDCKDPKVIAGLVREGRYMIPYLPDGVYADLRTASNIRFQLQAELTRIQNRISRWFNIYFPEYKTVYGKPDAKSGILILKTAPLPEDILTLGIDGVNQIWRDAKLRAVGKARAKTLIEAAEHSVGSKEGTVSARMEIRILLEDYESRNIRLQEVMALIEELVAQIPMAEKLLEIKGVGIRTVSGFLAEVGDISRFNSPKELQKLAGLALVENSSGKHKGETTISRRGRKRLRYLLFEVAMSLVAKNPEFRELHVYYTTRRLNSLKKMQSLMAVAAKLLRIFYAMLTKGVDYDPKKMVSDIKRPAAYLQAE

SEQ ID NO: 216440 - protein, 338 aa, unidentified
MKITTVGLDLAKSVFTLQGVDERGIIVLRKTVRRARLLELFAQLAPCVVGMEACSGAQHWARELRKLGHEPRIMAAEFVEPYRCGGKNDANDAAAICEAVSRPKMRFVAIKSVEQQAVLAVHRLRQGLVEERTALANRLRGLLTEYGVVVGVGLDRLRRALPEIMEDGANGIPGIARDVFADAGQQLRELDARIAAYDRRIAALARASEPVQRLMKIEGVGPVTATALVASVGNASVFNNGRQFAAWLGLTPRQHSTGGKQRLGAMTKHGDVYLRTLLIHGARAVLSVTPKRSDAKSRWAESLRRRRPDNVAAVALAAKHARIIWALLAREQDYRPAA

SEQ ID NO: 216441 - protein, 343 aa, unidentified
MQTTTTIGLDIAKSVFQVHGVDAAGQVVIRRQLKRRYVLSFFQKLPQCLVGIEACASSHHWSRELQALGHTVRLMPPAYVKPYVKRQKNDATDAEAICEAVTRANMRFVPTKTPEQQSGLVLHRTRHLFIRQQTSVINAIRAHLAEFGIVAPVGRRGVEELLTVVADPNDKRVPEIARACLSAFGAQLRSIKEQVLEFDRLITAWHRSNEMSMRLDEAPGVGPVLATAVVATVADPKVFRSGRNFSAWIGLVPKQHSSGGKDRLGSISKQGDRYLRGLFVAGALAVIRYAKIHGTKHRPWLTALLARRPTKIAAIALANKIARVVWAMMAKGERYKEPIALAA

SEQ ID NO: 216442 - protein, 341 aa, unidentified
MPTMIVGLDLAKHVFQVHAVDPAGKVTIRKKLRRSEVLEFFKGLPPSLVGMEACGTAHYWGRELTALGHDVRLMPAGYVKPYVKRGKNDAVDAEAICEAVTRPTMRFVEIKSAEQQSGLMLHRTRELLVRQRTALINSLRGQLAEFGLIAPKGVWSIPDLHALAQGATPAVLPDAVRSCVELIMGQIDDLQSRVQTIEKAIRVAHRASEVSLRLQTIPGIGVITASAITATIGDIKAFKSGRHLAAWIGLVPRQSGSGGKVYMGKISKKGDAYLRKLLVLGATAVIRYCRNKPELAGWINPLLQRRPARVVTIAVANKMARIAWAVMSRGESFRQAASAIA

SEQ ID NO: 216443 - protein, 458 aa, unidentified
MGKFYLGCDVSKGYADFVIIDQAKRVVESNFQLDDTIAGHQLLEQILKAFFEKKPDAMLFAAVESTGGYENNWLHAFQRIGTRFAIQATRLNPVGVHHDKQAAMKRNSTDKISALAIAEYQINHAEAIRYNEADSYQSMRKLYSSYRMLLKVRTQLLNQLESWVYSGNTELVQYRKDNTPKWLLHLLSQYPTAPLLAQAQAEQVAKIPYLGADRAQKLVAEAQTSVASVTDLPAQIMIKTLADQILQLDEAIKATQQQAQSFVQLREIALISSIDSIGPISAIGLFIEMGGCVGVFKNAKKLSPYWGLHPVLKESGDGSYKPRMSKAGRKWPRAILFMAVLNGIRAKNFIYAIYLRELQKGKAKRSAIGICMNKLARIIYGVLKNDTVFDAEIDNHHRLRSAPKKLRSNVLDSRRFQKQDDQAPISRKQSQKRKGREQSQSEPVAISEIKSSPLHGHA

SEQ ID NO: 216444 - protein, 478 aa, unidentified
MNGKDRKAKNQANINNSVNVLSQEELGRRITAIEADLKASTWKDLEVCRKFDKNAKLTFISNDMLILGCDIGSETHYVRAIDTRGRELSKDAFQFTNSAEGFQSAKVWAVRLAAEHNKKQIVLGLEPTGHYWFCLAAWMITNGISVVQVNPYAVKQTKELEDNSQLKDDRKDPKLIANLVKDGNYGMPYLPEDVYAELRRLSMLRDQLTEDRIRNVNRLHREMKICFPEYMDAFGKLDGPFALMVLKRAPFPEDILALGADGLREIWHEAKLRGRGYSRAEEIVRLAAESVGLKSGTAGSKEAVRCFVEQILYLTVKLDEIEESLHQRCREIPCAENLLEIEGIGENILSGILAEMGDIRRFDDVKEIQKLSGLGLVACSSGKHKGETKISHRGRKRLRYWLFQAARSAVSHAEEFKALHMYYTTRPENPLKKMQSLIVIACKILRVIFTILRTGRKYDPAKMLRDIRYPKNAATQAA

SEQ ID NO: 216445 - protein, 412 aa, unidentified
MQVVYARCAGLDVHQKTVSAYASVCEPNGKKRRQIRVFGSFTGDLLVLAGWLREQGVTHVAMEATGVYWRPVWAVLEGQFEQLLANPQHMKAVPGRKTDAKDCEWIADLLQHGLLKGSFVPPTPIQDLRDLTRYRVELRQSQSRVANRIQKLLEQANLKLGSVASNALGVSGRQMLEAIVAGQDTPEQLAQLARGKLNNKIPQLVQALQGRVRDHPRFLLAEFIEEWDWFEQRIVRLEAEIDKQINPFEQALALWQTMPGVERVTACSLVAQIGVNMNQFPTAQQLASWAAICPGNHESAGKRKSGKTRDGNKWVRRTLCQAAWAVSRKKNCYLSSQFKRIATRRGPKRALMAVAHTMLVIGYPMLKTGQGYRELGGNYLEQINKDQLQRHFVKRLEKLGFKVTVEPSLEAA

SEQ ID NO: 216446 - protein, 400 aa, unidentified
MKLKELSGGIDIGSEFHHVVVIGESGKVLYDKQVLHRFSEFHSAVRELKETERRTGGKIAFGLEGKNGYGAPFDRILGENGFSLYNIDNLKLKQFRNTFGAEWKTDRRDARMLAKLMSLKTQLNGERDKVFIPIEKTSLTNEKLKILSRHQQTLIDEKKRICNRLRKKLLEICPGILDIFGEVEAKSLLRILIRYPNFSRYKKLTEGKLLRMKRIGKVIAGKIINQLQGLEYVRELALVYATIIQSQAKRILELKEEIELLDKELDKLGEGSKEVQRLRSIPGVATKLSSRLAGEIGDIRRFKDSNKLSIYFGVGCINNDSGKRKMAKAVFKANKICKSTMIELAGCTIRSISESKRYYNKKRSEGKKHNHALRCLARQMTKVIFKLLIEDRDYYVKDES

SEQ ID NO: 216447 - protein, 387 aa, unidentified
MPQPNDLSRSLVAVDQNSTIIAVIEMSQSSWLVGGVVPGIERQPRKKLEPSPERLLAVLHRWRDEAVRAGRTITRIALAFEAGRDGFWLARWLERRGVEAHVIHPSSVPVSREHRRAKTDRLDTELLKRGFLGWLRGERGHCSMARVPTIAEEDAKRPNRERESLVGERTRIVNRIKSTLARLGIRNFKPTLRKAAERLASVHTPEGMPLPPNALAELQRDMARLGFVVSQIREIEDARQKRLEQQPETGAHAMVRLLARIVGVGVETADMLVHEVLSRPMRDRRAVARYAGLTGAPDESGGQRREQGLARAGNARVRRGMIQLAWRFLLFQKESALAHWYRARTADSRIGTRKTMIVALARKLIIALWRFVTTGEPIEGVVLRPAS

SEQ ID NO: 216448 - protein, 338 aa, unidentified
MGREYVGIDFHRRRSVVVRIGPRGKRLSVVRIDNSPAALAEAVSAAGDHPQVVLEATYGWYWAVDVLQELGATVHLADPNALNWGERRVKNDVVDATDLADMLRLGRLPEAWIAPPALRELRELVRYRAKLVQLRSGLKAQVHAVMAKEGVLPTLVDMFGPGGQVQLDEMGLGRNYTIRVESLRDLIEVYDREIGMLERDIHGHLCHHRGYQAVQAIHGVGRTIAAILVAEIGDVSRFPTPRHLCSWAGLTPGRRESDVKGHDQGITKKGSKLLRWALIESISGYHGGPYLTPAFHRLADRRGKNKARVAIARRVLTLAYYGLRDGEIRCLIQPSEAA

SEQ ID NO: 216449 - protein, 419 aa, unidentified
MKSEVHTKSREIMQDTLIVGVDIGSQEHAAYITTISGKKLGSLNFANNRRGFEEFWAAITKAKWNSCCRDILLGFESTGTYGEPLQHYLLEKPVNLVQVNPMHTKKTKDICDNTPLKSDEKDSQVITDIIKLGKWISVVVPKGDKAILRRLSHTRERLVRDRTAHYNRLRQQYGLIFPEFSSIIKDIKCKTAQYLLSKYPTPDDYGFLSAEELSKEVRKISFGRFGMKQALALLEAANSSIFIKQGFYGILFEIKQILKQLEYTNSFIAEVEAEIKVTLARVPDSKEIMKIPGLKAITVAAVIGEIGDFSAFRTTKEVQKFAGLNLYEISSGLHKGQVHITKVGRSLLRKTLYFAALNTVRKGGIMHDYYKRLIDKGKPKTKAIIAMSRKLLRIIFAIVRDNSMFIENYHETKIMKKAA

SEQ ID NO: 216450 - protein, 333 aa, unidentified
MGDITTIGLDLAKSVFQVHAVDEAGTVMMRKRLRRSQVLAFFAGIPPCLVGLEACATAHHWARELISLGHEARLMPPNYVKAYVKRNKHDVADAEAICEAVRRPSMRFVPVKTAEQQSALMMHRARDLLIRQRTMLVNALRGHLAEFGLIEAQGLHKVARLIAIVMDETDGRVPDIARQVLKMIVNQIEDTQTRIVGLETQVLAWHKSNPVSQRLATIPGIGPIIATAIAATVADPNIFRSGREFAAWLGLVPRQNSTGGKARLGGISKRGDSYLRRLLVNSSKQAKTDLWLTSLLSRKPRLVVAVALANKTARVAWAVMSKQDIYRHAAVAA

SEQ ID NO: 216451 - protein, 341 aa, unidentified
MDYFAAMDVSLEQSSVCVVDGTGKIIREAKVASEPEALVAWFAESGLKFTRIGLEAGPLSRWLHAGLTAAGFAAILIETRHLRAALGAMKVKTDRNDARGMAQLIRMGWFRPVHVKTVPAQEIRALLTGRKLLQIKLRDIELGIRGLLRGFGLKVGKVSEGKYDARIRELATGHPMLEPVAAAMLQARASLRAEYAKLHRMLLRIVRADAVCRRFMTAPGIGAVVAVSYRTAVDDPTRFHKSRDLGPYFGLTPSKYQSGEVDRTGRTTKVGDVMVRTALFEAAHVILTRVTRFSTLKAWALRIAKQRGFKRAKVALARKLAVVLHRMWVDGTDFRWRKAAA

SEQ ID NO: 216452 - protein, 368 aa, unidentified
MYNAVGIDVSKGKSTVTIIRPNGVVIRKPFDVIHSVKELRNLTGYIASLDGETRAVCECTGRYHEPVLKAFSEANIFISAVNPKLIKGMGENTLRKIKTDPADSRKIAKYALDNWAELRQYSSMDDTREQLKALNSQYSFILKQRTAAKANLISLLDNTYPGVNKLFDSPVRDDGSEKWVDYAYSFWHADCVRKIGLKAFTERYNAFCKKHHYCVRKNKAQELFEASKELVTVFPKDSTYKLLIQQQINQVNLLSSQLAAIRKEMNALASTLPEYTTVMGMYGIGETYGPQLIAEIGDITRFHHREALTAYAGVDPGANQSGSRDQKSNKASKIGSSKLRKTLFQIMTTLLQNRPENEPVYQFHYCKT

SEQ ID NO: 216453 - protein, 361 aa, unidentified
MAGTVTWVGMDVHARSTHAAAINLLSGEIERARFGPGVEAPVAWLSELAGPVHACYEAGPTGFGLYRAAVAAGVRIDVVAPGKTPRAASDRVKTDRKDAELLARLLVAGQLSPIKVPPAGVEAARELTRLHDQGRRELMSIRHRISKMLLRHGRVYPKPTTWKQDHRRWLAGQQFDEPTSELVYLNLLAQVDALTSRKLELAGQIALLAADERWWPTVARLRCFRAVDTLTALSIHLELGADWARFEKAPRVGAWLGLTPSLNQSGESKAQGSITKTGSTLARRLLVEAAWHYGPRPYVGPALQARQQGQPEHVLAVANKAQHRLHRVYQQMKARGKPHGVVTVAVARELACFLWAAATAD

SEQ ID NO: 216454 - protein, 307 aa, unidentified
MGPTATPYVGADVAQDTIAFCGPTAATIKNEPGALRAYLDSLPPHAHLVCEATGRHHHALHQACATSRRSLTVLNPAHARAYARSLGKLEKTDALDAVILRRFGCERRPAATPAPSLAQQTLRDLLMVRAAVVENIADHRRRDRLLLPVAQRQLRVLIRTLQARQRALDGQLATWLETAPADWQDRVQTLCLVVGVGVLSAIQLLAYLPELGSCNRGQIAKLAGLAPLPWDSGTGHGVRCIQQGRAPARRVLYQCAVVAARWNDTLRPHYQQLRTRGLPAKPAYVAVARKLLIYLNALLRTTNAPGA

SEQ ID NO: 216455 - protein, 361 aa, unidentified
MNVIHYIGLDVHKKTISYCIKTADGRIVREGKLQATRATLRSWAEDLREPWSGAMEATLFSAWIYDTLKLYAEKLVMGHPARMKAITAGKKKSDTIDARTIADLLRCDLLPTCYVLPPEMRDLRRLLRYRNMVVQQSVRMQNKMSGLLMESGTSFVKDKLHGKRYFAELMGSLEEVPESVKDLLRMSRSAMEMFESTQKQIVKRLLCEPVLQQRVERLKSIRGVGPITALSWALEVDDPRRFSSIGDAVSYCGLTAAFRSSAGKEQRGPISKQRNAWLQTVLIEAAKLAPRWNPQLAALHARQLELGHPNRATLQVARKLVAYLLAVDKSGQPFQVLTPPPTVENSTKTKKRKRASMAKAA

SEQ ID NO: 216456 - protein, 393 aa, unidentified
MICVGIDVAKDKHDCFILSSEGEVLADVFTIQNNAEGFNTLLQMIRRCVRPEDKIKVGLEATGHYSYNILGFLLNEGLDTYVINPLHTNLYRKSLSLRKTKTDRVDARTIAAMLMSDVDLKSYTDTAYHNEELKSLTRYRFDKVRERAKLKQSVSRLVTILFPELEKLVSTLHTASVYALLSEFPGVKQVSEAHLTHLKAVLYDASKGRYGRDMATTLRDAARCSVGSVMPAKSLELRHTIRLIHELDAEIEDIEAAIQSMMDEIQSPITTIPGMGVRMGAMILAEIGDFSRFDSPDKILAYAGMSPSTYQSGQLSLSGAYSHMEKRGSRYLRYALYNATKYVCLWNPTFAAYLAKKRAEGKHYNVALSHAAKKLVRLIYALEKSKRPYSTAA

SEQ ID NO: 216457 - protein, 364 aa, unidentified
MMIIGCDFHPSGQQVFGIESESGEVVMERWIAHGGEDVDQFYAALPAGAVVGVETSGNMLWFERKLAQYGHRLRIGDAAQIQAHEVRKQKHDRRSAELIARLLREGTFPDLRWVPSLAERDLRQLLLHRDKLVRMRTQVKNQLQHIALNQGQQKKRQLWSKGGRELLEKLPLEPWTARRRDELLRWLDQLDQQCASLDEAVKHVAEANPEARRLMTHPGIGPVISLGFALTIGPIARFQRSRELVSYLGLNPSEQSSGERRRLGGISKQGSVFLRRLLIQGAQTAVRGDAELARQYRRLAAKQHRAVAKVMVARKLAVRLFWMQKTQQTYPELVRTRGSSSHPGVTKTVPLSERPASPQGPAVS

SEQ ID NO: 216458 - protein, 417 aa, unidentified
MEYAPSTLTAVPVNRLACGIDWARDDHAVAIVDGGGRQVHRSIVEHSSAGLRALVTVLARAGVAEVAIERPDGPVVDALLGAGITVVVISPNQLKNLRGRYGSAGNKDDRFDAFVLADTLRTDRARLRPLAPDSESTVALRALCRARKDLVAHRVRVANQLREHLNRVFPGAVGLFTKLDSPISLRFLSRFDCQDRADWLTPRRLQAWLASAGYCGRTDPAVVFGRLGAAPRGLPSTAGAAQIPITQALVATLDNLVKQIAMLSEQIGQQLNAHTDAHIFTNLPHVGTVRAARLLAEIGDCRGRFPTPEALACLAGVAPSTRQSGRMRSVGFRWACDKQLRDAVCDFADGSRRGNPWAADLYSRARARGHDHPHAVRILARAWVYVIWTCWQNNTAYNPAQHRALQTVLHQDQPPGA

SEQ ID NO: 216459 - protein, 344 aa, unidentified
MGQYVGLDVSLKETKVHVLDEQGQRVWRGRCASTPEAIEAVIRKHAPQAVRIGLETGPLTTWLWQALTDVGLPMTCLDARKAKAALNMRTNKTDANDAEGLAHLVRSGWYCEVRVKGREAMLVRSLLGARTQLLGIVTELSNQIRGVMKTFGLIVPKGGGRIFEANVRRLLEGEAAVAGVIVPLLEAWRAVRERTAVLDRQLLAAARASATCRRLMTAPGIGAIVAAAFVAAVEKPENFRNSRAVGVWIGLTPRRYQSGEVDYDGHISRRGDARLRALLYEAAVSILTRVQSESTLRRWALAPKTQVGFKRAAVALARKLAVILHAMWKTGTDFDPRAAVPAAA

SEQ ID NO: 216460 - protein, 372 aa, unidentified
MKNKVIDFSGQNIYVGLDVHKKSWSATVLTDELEHRTFTIVPDAKMLTKYLEKNFPGANYYSAYEAGFCGFTHHRELNENGVKNIVVNASDVPSTNKDYTTKTDNVDSRKIARALRAKTLKSIHVFDRDHEEFRGLARQRQIFQRDLRRYKQRIKSFLMYYGIDIPEELVQSDWSKSFESWLGKIRLSTNYGNSALENLVIGYRFHKDQVRQVSIELRASARKFHKKEYYLLRTIPGVGPLTSIALITEIGDIKRFKTINQFCSYVGLMPMSFSSGETERIGGMTFRNNTWLRSMLVEASWQAVRKDPAMLLYYKQHVNRGNGKRAIIKVARKLLARIRFVLMNQQAYELGMQCEPTEIIQKKKIKQKMNKK

SEQ ID NO: 216461 - protein, 362 aa, unidentified
MQKVTTWVGLDVHAERIVIAALEGQNREPEVRDIPNEPKAIRRTLQRLGAVAYDLRCCYEAGPCGYAVHRQLSAMGIACDVVAPSLIPVRVGDRVKTDRRDALKLARLHRAGELTPIAVPSAEQEAVRDLVRARDDIRKDLTAARHRLGKFLIRHGHLYTDGKKWTMRFWAWMRKLTFAHAGEQLTYEHYVAEVNHLVERRAALDRDLERVAASEPYASSVKKLSCLRGFSTLSSIALIAEIGDFRRFEGPRQLMAYIGLVPREYSSGGKERRGRITKTGNSHVRRLLVEASWSYRHRPALGERVRAALEGQPASVAAVARKAQERLHRRFTRLVSRGKPSQVAVTAVARELCAFTWSLMTA

SEQ ID NO: 216462 - protein, 368 aa, unidentified
MGVRLTGEPANRGGREPVTPWAENRVGAGAAVAFFMNPNSCRGQDPVRKAGSQKMRERSTVGIDVSKLRLDVGVVPGGEVLQFSNDVAGRASLIEWLKAKGVKAIGLEASGGYERDLIKALRQAGLPVRMVNPYRLRQYAKALGVLAKNDRIDARLIAQFVAELPTREPRHDPLTEQMAELVVARRQLSDDKVRLSNQLEHVRDPALRRMTTQRLRRIAADIVLLDKRLAEIVASNTELRTRDRLIQSICGAGPIYSYTLIALVPELADPTLDRRQLAALIGVAPYDDDSGRRNGKRAIWGGRAAVREVAYMAALSACIHNPVLRAHRQRLQANGTAPKQAIIAVARRMLGIVLALLRTGKEWDPKYA

SEQ ID NO: 216463 - protein, 340 aa, unidentified
MKLYGAIDLHSTNNVTVVIDEQDRVVYQKRLPNDLALILNELSVYQAELQGIVVESTYNWYWLVDGLMEQGYKVHLANTAAIQQYNGLKYTDDNSDARWLAHLLRLGVLPEGYIYPRADRPVRDLLRKRSQMVRQRTTNLLSIQNLLTRNTGSSLSANRVKGLDVQQVDELLPDGDLALAVKANLSVMSSADEQIEILERTVTQRVKLRPQFRFLKTVPGIGEILALTIMLETGDIRRFASVGNFASYCRCVGSQKISNSKKKGKGNTKNGNKYLAWAFVEAAHFAVRFNSKIKSFDQRKKAKTKGVVAIKAVAHKLCRACYYIMRDRVAFDVTKAFGQK

SEQ ID NO: 216464 - protein, 423 aa, unidentified
MAYRIAGIDVHKRKLAVVVADVEVEDEYQFERRWYGSNPEQLRVLSEWLLEQQIEEVVMESTAQYWKPVWGALERYWKPRCQSGEGAGRMSGTLHLAQALSNRGRRGRKKDFRDAERLVKRLVSQELVLSFVPDSEQRMWRTLTRTRYQRTRDKVRLQNQLEALLEEAHIKLSSLVSDLLGASARRMLKALADGETDPAAVAALADQRLRATPAQLHDALGACTELNPVYRRLVKMTLEGLQFVEQQIGQLDQEMASLLRQHQDAVERLAVVPGLGVDSAQQIIAEVGAKAATFPSAEKLSSWVGACPGEEESAGVNRSRHSPKGNRQMRRVLNQAANAAVKHKGSIFEIAYRRLVPRLGHNKTIGVIAHRLCHLIWIILHKGVRYEERGPAVSEKSRQRRTARMVRTLRILGYRVEPLTNPT

SEQ ID NO: 216465 - protein, 388 aa, unidentified
MQIAADRPQASTAIRTDLGAIFVSLELSRSTWLITSLSPGGGEKMSKHSVRGCDVAGLLERFAHLREKARARTGQRFPIIVIHEAGLDGFWIHRMLNAEGIESHVVDPASIATSRRRRRAKTDRIDGEALVRALLAYKRGEPRVCSMVKAPTPEEEDRRRLCRERKVLTAERVLHVNRIKGLLFSQGITGYEPLRRDRRERLEQLQTGDGHTLPDHLKGQVRRELDRLELLLDQIKAVEAERDALLAAERAAARTPAAMLLDIKGIGPEFAAILWSEGLFRHFDNRRQVAAYAGLAPTPWQSGSVDREQGVSKAGNPRLRTTLIQLTWLWLRNQPHSALTLWFHERVRRNGGRLRKTTIVAVARKLLVALWKYVTAGVVIEGAVMKPT

SEQ ID NO: 216466 - protein, 333 aa, unidentified
MHYIGLDVHKQSIVFCIKTGDGEVVDQGTLEATRSALEEWAATLPQPWQGAMEATQFSGWIHDTLSPYADDLAVAHPADLEAITKAKKKSDTIDADKVSDLLRIDMLPRVWMPPRQWRELRRLLRYRNRLIEQAVWHKNRIATALMELGEPYVKSKLHTKSYFYPFLDKLETGEEDAFLLCASRDRLEESERLARTIEKKLLRHPLLERRVALLQTIPGVGVMTALTWAIEIGDLNRFHTLDQMVSYCGLCARLDESAGKAKRGPLSKRRNRHLQRVLIEAAKLAPRFNEELAALHAKECARGHRNRATVQVARALVARLRAVDARGTPYEKR

SEQ ID NO: 216467 - protein, 350 aa, unidentified
MLIIGCDYHPSFQQIALVNTETGELQERRLGHREEAEQFYRALATVGAKVRVGMEASGHAGWFERLLAELNIELWMGDAAKIAAKRVRKQKTDRRDAQHILTLMVKDDFPKIWVPSWENRDVRQLLWHRHRMVQTRTRIMNQLQAAALNEGLRYKKKLWRESGRQQLESLPLAPWASRRRRDLLEVLDRINPTIAELTRAIEQQAEKCPDAQRLMTHPGAGALTAIAFVLIIGKADRFGCGKQIASYLGLVPEEGSSGERRRVGHISKQGNSLLRFLLVEAAQVTVRSDNRWRNRFFHLAQRRGRKIAKVAMARRLAIRLYWMWRRGWDYVQLESFGSHVGQPGHRHGVQ

SEQ ID NO: 216468 - protein, 361 aa, unidentified
MSTSSLLPATTIVIGIDTHKDIHVAVALDNLGQRLAELHVQTTVAGYVRLEQWATSLGTVEVFGIEGTGSYGAGVARYLRQRHHRLVEVNRPDRATRHRLGKSDPIDAEMAARLVLAGVASGTPKTGDGPVEMLRLLKLAKDSAVKTRTQSMNQIKAVIVTATAELRDTLAGLRNTQLIDRCAAFRPGPLTSGTAVAKYTLRLLAKRHLDLGLEIAAVELEIERLVSVAAPALLNVFGLKADGAARLLVTAGDNPGRLRSEAAFAALCGSNPVPASSGKTQRHRLNRGGDRQANATLHRIVVVRLRWHPATQGYMRRRLAEGKSKPEIMRCLKRYVAREVFAILRPPAAIQQVADEVVRGA

SEQ ID NO: 216469 - protein, 342 aa, unidentified
MNYYAGIDVSLEASSICVVDASGKIIKEAKVLSEPEALIAWFKALPFTLARIGLEAGPLSQWLYAGLKDAGFAAELLETRHVRDAFKAMPVKTDRNDARGIAQLMRLGWFRPVHCKSAPAQETRALLTARKLVQAKLYDVQMSLRGILRGFGLKVGRTTPVGFAVRIRELTEHHPALAAIAKALLAVHEVLLRELNGFEKQVRKQARCDSRVRLVMTAPGVGAIVGLTYVAAIDDPERFSSSKTVGAHFGMTPKKYQSGETDLTGRISKSGDKGVRTVLYEAAHIILTMPVKGGALKSWAAKLSKRVGMQKAKVALARKLAVILHRMLADGSVFDVTKAAAA

SEQ ID NO: 216470 - protein, 355 aa, unidentified
MTMLAEVIDAVIGIDTHRDRHEVEIADPAGKPITTMQVGNDSGGFARLLAAIAQVAPGPRVAVCIEGTRSYGIGLARALAAAGLLVIECEPPRRKQRRGKGKSDPIDAHLAVLAALRLDTARLPVPRADGDREALRILLVARQEMTVAATAQASRLRALLLAGDDPDRRAARTTLSKTALAALAGRELPAGAGRELAIRQAEIRRLALAVGQARHQLKDNRAQLLAIAEDIAPGLTSRYGVGPVTAAQAIVSFSHPGRCRNEAAFAALGGTSPIPASSGQTIRHRLNRGGDRALNRAIHAIALVRMRSCPRTRAYVAGRTAEGKTTREISRCLKRYIARELYRHLTRSMNPPVGP

SEQ ID NO: 216471 - protein, 311 aa, unidentified
MAFLHHLPRRCLGFDIAKQTIAVSDGRTVQVIDNRRAAIRRFLRTCHADFAVCEPTGGHETILLEECLRLELPAHRADTRKLKAFIRSRGRLGKSDAIDARELAAYGLERWASLPLWQAPDPCQERLKALVRRRDDLVATKVAEQNRAKAPGARELAASFKAVLTVIERQIKLVDQAILALMRSGPLKQKCDVMTAMPGIARTTAAALIAAMPELGAMHRKQAAALAGLAPHPNESGKKIGYRRMRGGRPAVRTILFMPAMQAACGRGEFAAFYKRLLNAGKKPILALAAVMRKIVVTLNARLRDAQIQQS

SEQ ID NO: 216472 - protein, 469 aa, unidentified
MKQHNQRLKSKQQKTPGGNKPWSSFPILNVNAAGIDIGSEEHWVAVPADRDGQPVRKFGCFTADLYALADWLKKCQVQTVAMESTGVYWIPLFQVLENRGFEVKLVNARHVKNVPGRKTDVQDCQWLQRLHTYGLLSGSFRPPDQICVLRSYWRHRDNLIRYASAHVQHMQKALTEMNIQLAKVLSDITGASGMRIIRSILAGERDPLKLAQMKDRRVQSPLEQIVKALEGDYRPEHLFALRQAVELYDFYHRQIQACDVQIAECFQQFDSKVDLQTHPLPPSKRRPKKPRRNEPHIDFRAHWYQVTGVDFTQIDGLDVLTLHSILSEVGLNPEVFPTSKHFSSWLGLCPDNRVTGGKVQSTRTRKVVNRAADAFRLAAQTMARSSSALGGYYRRMKARLGAPKAITATAHKLARIFYHLWKTGKPYQDPGADYYEKQYKERFIRNITLKAKQLGYQISLQPILTGEVS

SEQ ID NO: 216473 - protein, 461 aa, unidentified
MRETLGTGEPEYAAYVALDWADREHAWVLEEAGGGKRESGKLKQTPESIEAWAAGLATRFGGRPIAVGLEQSRGALIYALQAYGHLELYPIHPSTSANYRKAIFPGGRKNDPVDADLLLDLLTRHRDRLRRMRPDHEETRKLQLLTEKRRQLVDEQTSETNRVTDLLKSYFPQALRWLDDLSSPLAVAFLQRWPTLQQVQAEEADCVRKFFYEHGSRSKERIELRLKEIQEARPLIEDRAIIEPAVLMVQALLEVIAALRRGIKTLQDACAAVFASHPDAEIFASFPGAGPVLAPRLLAAFGSQRDRWENVDDFQSYTGIPPITEGSGKSLDIHFRWRCAKFLRQSFHEFAEQSIQQSEWAGAFFHHQRHVNHLDHQAAVRSLAYKWIRIMYCCWKKRTPYQESFHQERLLKRPRSSENPTTTAAVQKKSGAPTNGRPGSNRVHFQFKKVAGFCKLSAATS

SEQ ID NO: 216474 - protein, 337 aa, unidentified
MEYFGGLDVSMTQTHVCVMNRDGAVVHEVKVPSMPADIAAALTQAPPCERIVFETGRMAPMLYHGLSQLGLPIVCIESRQAYQALKSLATHKTDRNDARGLAHLARTGFFKPVHVKSLPAHALRSLIIARKKLVGQRVTLENQIRGLAVVFGVRLPRALTAAFVRQALRASEGITGLSAAMRGLIAARTAVLGAVAAIDADIRQLVRASAACRQLMTIPGVGQLTALAFAAAIDDPGRFRRSRDIGPYLGLVPRRYQSGEVDYSGSISKCGDRRVRTLLYEAANVMLTRYKGPLKLKDWAFAIAKRSTMRKARIALARRLAIIMHAMLRHGTEFKPA

SEQ ID NO: 216475 - protein, 410 aa, unidentified
MEVLYPRCAGLDVHKATVVAAVRLAAGGRVAREVRTFATTTAGLLELAAWLAENGCTHVAMEATGVYWRPVWHILAEQGFALVLANAAQVKNVPGRKTDVGDAAWLAELLAHGLIRASFVPDAPTQELRSLLRTRKQLVRERTSHVLRLQKTLEDANVKLDGVLTDLLGKSGRAMLEAMAAGETDPGRLAALAHPRLSATPERLREALRGRVTAHHRFLLRLHLDQVDALDAAVTRVDREVEGRLAPFRAAVELLTSIPGVGALAARVIVAEIGLDMGRFPSAGHLVSWAGLCPRNDESAGKRRSVRLRKGAPWLKTALVQCAWAASRKKASYLQAQYQRLRARRGPRKAVCAVAASILTAAYHMLKDGTAYRDLGPDHFDRRSREVQARRLVRRLADLGYAVELAPLAA

SEQ ID NO: 216476 - protein, 410 aa, unidentified
MEVLYQRCCGLDVHKETVVACLRIVSGGEVVREVRTFETTTASLMALSAWLAENGCTHVAMEATGVYWKPVWHILDDGDFQLILANAAHVKNVPGRKTDVNDATWLADLLAHGLIRASFVPDTQTQELRTLLRTRKQLVREKSSHILRVQKTLEDANIKLDSVITDVMGMSGRAMIEALIAGESNPAKLARLANYRLRAPQEKLREALRGRVTKHHRFLLRLHLNQIDALDAAIATVDQQVQAGIAPFRCAVELVTSIPGVSDIGAQVIVSEIGTDMSRFPSESHLISWAGMCPRNDESASTRRSNRVRKGAPWLKTTLVQCAWAAVRKKDSYLKAQFLRIKARRGPKKAIMAVAASILTATYHMLKDGTLYQDLGSNHFQTRSKGQQTKRLVQRLADLGYDVALTPLAS

SEQ ID NO: 216477 - protein, 414 aa, unidentified
MTYNTISKKGKYVNSDVMVVGVDIGKEFHVAVMRRRDGSFSKAFKFTSDVVGFSSFKEWLDQWYTQDGFSRFLIGMEPTGHYWMTLAYWLRKQAIELVQVNPLHTHKAKDLYDNTPSKTDKKDARVIADLVSQGKFLNCIIPQGRYADLRYLVLLRQRLVRERTRQVNTMHRVLDVLFPEFTKVFKNLQTKTSLYLLRYYCTPALLLAGSRSRLVRRLRKISRGKLRMEKVAQLYEWARSSVGVSEGIEGLQVILFKSLLRYGQLIQEIRALEARLEELVYGLSETVYLRSVKGIGLVTVATILGETGGLNHYRSAEEVIKLAGLNLYELSSGKHRGKRRITRRGRSVLRAGLYRAAVGVVRRGGPLHDFYQRLRDCGKYGTVALVAVACKLMRLLFALVRDRRCYTSDYVPIG

SEQ ID NO: 216478 - protein, 343 aa, unidentified
MDHFVGLDVSVKDTSVCIVDDTGKIAREVKVASEPDALLAVLKNPAYHFKRIGLEAGPLSQWLFSALAEASLPVICVETRHMRAVLKAQINKTDRNDARGIAQMIRVGLYRPVHVKTLRSQKLRILLTHRKLLQSKAIAVDNDLRGTLRNFGLKVGIVGQAKFEARIKELVEDLPDLAVLVEPLLVVRRVLREQIGVLHRRVLTVVRDDEVCRRLMTVPGVGPVVALTYRATVDVPARFRHSKSVGAVFGLTPSRDQSGEHDHPGAISRRGDEMMRTTLYEAAQSMLMRSSRWCWLKAWAMKIARHRGIKRATVALARRLAVIMHRIWVDGTAFRWTRQAVAA

SEQ ID NO: 216479 - protein, 339 aa, unidentified
MKLTPVGIDIAKNVFQVHHIDEETGEIVNKPIKRARFLEYFVNRAPCLIGMEACGGAHHWARQLTKMGHQVKLMPGEYVKAFNIRNKKDAADARAIWLAVQQPSKPVAIKTETQQAILALHRTREQLVKFRTMQINALRGLLTEYGEVMGKGRAALDRAMPDVLARVADRLPAALIDTLREQWNGLTGLDGQIATIERRMQEWKKENKQVKAISEIPGVGLLTATAAIATIGDAKAFRSGREFAACIGLVPKQTGSGGKVNLHGISKRGDTYLRTLLIHGARSVITNAKKPDPWIEQMKRRRPLNVVVVALANKMARTIWAVLAHDRPYQRGYVSTKPA

SEQ ID NO: 216480 - protein, 332 aa, unidentified
MMNPQGIIIDEFTFTNNYNGITSLASRLTMDDRVVMESTGSVWTNLHNHLDDAHIPVVLANPLKTKAIASARIKSDEIDARILAHLLRTNLIPESYVPPKEIREVRALIRHRTSIVKIRTMVKNKVHAIVDRNGLEHDELFSDLFGKAGMQWLRTIQLPSLDRLMLDNHLEHLESLKKQIHAVDQEILAKASRDEDVRLLLSMTGVDIFTALLIRSEIGNISRFPEYKKLISWAGLAPSLHQSGGIEYHGSITKQGSKMLRWVMVEAARVAVNHDEKMRAFYARVKYRRGDQKAIVATASKMLKIIWFMLARREPYLSRNQRRYEEKLNTIE

SEQ ID NO: 216481 - protein, 343 aa, unidentified
MNIITVGLDLAKSVFHVVCFNEHFKEVKKRMLRRNQVLQYFTQLPPCLVGMEACASSHYWGRELRALGHEVKLIPPQYVKPYLRGNKNDYNDARAIAEASTRPSMPFVALKTVAEQDMQAIHRMRSQCIRDRTALSNSTRGLLGEYGIILPRGLATLRKSIHGLLENADNGLSDRFRNLLARRYEQLVELDEHIDFYTNELEILSQQDDSCQRLQTIPGFGPIVSSAFRSAIGDGHAYGHGRDVSASLGLVPRQHSSGGKNVLLGISKRGDRYLRSLLVHGARAVVVQAARKNDPLSKWINRIREERGWNKAVVAMANKLARIGWAILRYNTIYQPAKEQSVH

SEQ ID NO: 216482 - protein, 341 aa, unidentified
MSIITVGIDLAKNIFAVHGVDENGKAALIKPKVSRDQLLPLIAQLPPCLIGIEACSGAHHWARQFREYGHTVKLMAPKFVTPYRMGGKRGKNDAADAAAICEAVTRAHMRFVPIKEEHQQIILCLHRTRQGFVEERTATYNRLRGLIAEFGIVLPQKVACLRKNIGAHLEDIPGYAHQCIGDLLSHADQLDARIAEYDRAIAHAAREDARSKRLMERPGIGPVTASALLASIGGGHDFKNGRQVAAWIGLTPGQHSSGGKAKLGRITKAGDGYLRSLLVMGARSILAGLGDQQDGFSRWARSLVERRGYWRAVVAIAAKNARLAWAVLKYGEDFRLNKSAA

SEQ ID NO: 216483 - protein, 355 aa, unidentified
MKLYKKNTEFVQDKQVFCGIDVHDKQWTLAFFCDGEIVETIQTQPYYKALLNRLANYQSARKISFVYEAGFSGFVLYRQLSKDGYSCIVTPPSRIVKTDQKVKTDKRDATKLAMLLSAHLLKAVTVPPVDVEADRSIVRRHDQLVKSQTRSKNHINSFLKLHDLKPPADIKARWTKKHLAWLAHISFDQPAHESTFKQLLNNYCTIRNEIKETLLFLRKLSRDPRYQENYQIVTSVKGVGLITGMTFLLELFDMSRFSNVNKFSSFMGLTPSQFSSGDHVRLGHITREGNDHLRRVLVESSWTVIRYDPILREKYLRLRARGVNGKKAIVAVARTLAVRLRRCLLDKTPYLVGID

SEQ ID NO: 216484 - protein, 350 aa, unidentified
MVKVGVDVHKHTHCAVGVDELGRELAQVTVRATEAGHLQLVRWAERKFPGQVVEFAVEDCRHVSTRLERALLGAGARVVRVPPKLMAGVRASARTRGKSDPIDALAIARAALREPNLPVATHDTVSREIKLLVDHREDLVNARTEAQNRLRWHLHELDPELDPRARGLACLRTLDELAAWLQARPAGVAVRIAAELVADIRALTLRERALQRELAQRVAQVAPRLLALPGCGALTAAKLVGETANVTRFRSEACFAMHSGVAPIPASSGKTNRHRLARGGNRQLNAALHRIAVTQTRLAGPGQIYYQRRRANGDTKMEALRALKRRLARVVYGLLGPSTAATGTCLPAAA

SEQ ID NO: 216485 - protein, 307 aa, unidentified
MFVGIDVSKDRLDIHVRPVGGAFVVSRDGKGLEELIGRLRALAPELVVVEATGGFETIVAAAVGGAGLPLAVVNPAQIRHFAQAIGRRAKTDPVDAAVIAHFAQAVKPPPRPLPDEAQSLLGELVARRRQIIEMLVAERQRERLVSNRRVRKSLARHIATLEKELREIDRDIDTLVRGSPVWREKEDLLASVPGIGHTIARTMLAELPELGTLDRRRIASLAGLAPYTRQSGRWKGKSAIGGGRAPVRAALFMAALVASRKNPVLKLHYQRLLRAGKPKMVALIALARKMLTILNAILRDQKQWQSA

SEQ ID NO: 216486 - protein, 412 aa, unidentified
MKYYTSKAEFNCGIDLHARQMYVCVMDRQGKKLVHTNVLNNDFEYFLKLIEPNKHDLTVCCECMFGWYWLSDACHKAGLPFVLAHALYVKAIHGGKNKNDRIDSEKLTHLLRSNLIPPAYVYPADKRPLRALLRQRVFFVWRRSELLARIYSHQLAHNRTPARQTRRVRDTWEEALLAAEDHPLRQITLKNDLAMIKHFDHQIFQLEEELQRQTKKVAGRDYELLQTVPGIGESLGQTILYEIGDIQRFPTVKDFLSYCRPVKGTVASAGKIKGLRGAKLGNPYLRWAFGEAAVIAKRDHYLVGPLSQRLEQQMGGNKFKSNTVVAIKLARAVYFMLKNKTVFDPERLVTSMQKCFSPGRRQPAGLTGCAKKARPLPAADHASCASSTPVCVGPASNPAASIGTCGQALPPI

SEQ ID NO: 216487 - protein, 335 aa, unidentified
MKEITTIGIDLAKSVFTVHGMDAAGHTVLRKTVRREKLMELVAELPPCLIGMEACGGAHDWARRFQAHGHRVGIMMARFVAPYRKSSKNDGNDAEAICEAVARPNMRFVPVKSAEQQAILSLHRVRQGFIEQRTATINRIRGLLAEFGVVLPQRAEQVRRAAVVVAEELPVLAREAITDLRAHLSYLDERISRYEGQLVELARQREAAVRIQRLPGVGPLTASAITASISDGHEFANGRQFAAWLGLVPRQYSTGGKPRLGRITKRGDAYLRTLLMLGARAVLQSAAQKSDRLARWAMALRARRGYHRAIIAVAAKNARIIWALLANNREFAPPA

SEQ ID NO: 216488 - protein, 393 aa, unidentified
MQRDTKEVLAELVGKLKEKLDPTKVAATSAGEKHQRGELRPNLDRLTAGVDLGDQWSHYCILGLEGETLAEGQLRTTQEDLATFFQGLNGARVVVEVGTHSAWVQEVISGCGHEVLVANPRLMDGSKRRKRKNDRIDANKLARLGRVDPESLYPIQHRSQEVRQDLVMLRARDALVAARTEIINTTRGLVKSMGTRLPKCSSRSFAQKGEEAVAVEMREALLPLVRLAATLSADIKEYDKKIEELGREKYGHTALLRQVKGVGPITALAYVLTLENPQRFAKSRDVGPYLGLVPKQEDSGESQPQLGISKAGDRMVRKLLVGSAQYILGPFGPDTDLRRYGLRLCERGGKNAKKRAAVAVARKLAVLLHRLWVSGEVYEPLHSAMSAPIAAAA

SEQ ID NO: 216489 - protein, 353 aa, unidentified
MKYFTGLDVSKEHTSICIVNDQGKVIAQMVAKTTVEDIHRQLTRQKLDYQLIAMETGGFSNFLMKGLKNKGWPVTCICARRMGKVINTMKKTDKNDAREIAQAVRVGYFTEVHMKSDGSVETNNLLTTRHLLVKSRVSICNSIRGQLRQYGLKLSQGSKDGFEEKVSEVVEALPKEVQIAVGCSLKVYKAICDEITVLDEKLQEIAKGDEDIAILTSIDGVGPITALAFKTAIDTPERFKYIKDVGAYIGLTATLYESGETSIKGRVSKTGPSYLRSLLVEAAVSMLTSVRKKSKLKSWGHKVCTRRGDKIGRVALARKMSVVMLSMLKTKTKFDRDHGSSIPAKTKVATQVA

SEQ ID NO: 216490 - protein, 484 aa, unidentified
MSQPKKHSQKPAERTSTAGKGKRGRKRKGMCLEDRPILEPNAAGIDIGAREIFVAVPPDRDRHPVRVFTTFTEDLEKMAQWLVSCGITTAAMESTGVYWIPPCDVLEQHGVKPCVVDARGMKNVPGRRTDWHECQWLQFLHSVGLLRAAFRPDGEVCAVRSLMRHRSDLVQMTSQHVQHMPKALTQMNVQIHHVISDITGVTGLAVVDAILNGQHDPLELAKLRDPHIQASEETIRKSLVGNWRPEHLFTLKQSRQMCGHYQEQIVACDAEIEKLLVRFQPRVDPKEKPMPPDRKKKQRGRKKKNANPQTGFDVRTESYKLFGVDLTQIPGLMLMVLTLFSELGRDMSRWKTAGDFVSWLALCPDNDISGGQVLWRGRRRVHNRAGDLFRMAAYSLHHDKSPLGDYLRRMKSKLGPAGATVATAHKIAIIFYTMVKKQVEYDDRLWAQRDAEREKRFAAKLKRQAQQLGYKLVPIEEKTCRVTG

SEQ ID NO: 216491 - protein, 343 aa, unidentified
MDHFAGLDVSVKETSICIVDDTGRIVREVKVASEPEALLQVLTNPAYHFKRIGLEAGPLSQWLFSALAEMGLPVICVETRHMRAVLKAQINKTDRNDARGIAQMMRAGLYRPVHVKTLRSQKLRMLLTHRKLLQSKAIAIENDLRATLRNFGLKVGVVGATKFESRIRELVENLPDLVVLVEPLLIVRRVLHEQLDILHRRLLAVVRNDDVCRRLMTIPGVGPVVALTYRVTVDVPARFKNSKAVGVAFGLTPARYQSGESDRTGGISRCGDEMMRMMLYEAAQTMLVVSTKWSWLKAWAMKIVKNRGMKKAIVALARRLAVIMHRIWIDGTEFRWTKEVAAA

SEQ ID NO: 216492 - protein, 345 aa, unidentified
MHIASIGIDLGKTTFHLVALGERNKILVRKKFSRAQLLAYTANLPAALIGLEACAGAHFVGSALQEQGHQVRLIPAQFVKPYRKSNKNDFLDAEAIAEAVTKQNMRFAQLKTQEQLDWQAMHRVRDRLVRRRTALINEIRGFLLERGITFAAQPIQLRKNLPAVIEDAEQNLSPRLRWLLDRMWQEWKQTETEIEAITDEIERISNEDTRCRQLRQIPGFGPLVATATVAAIGNGSAFRRGRDFAAWVGVVPRQYSTGGKQKLYGISKRGNIYLRRMLIHGARAVLFRVKYDTGGFGQWVHRLAQRAPSNKVVVAIANKLARIAWAVLSSGKDYRHQPLQQLAAA

SEQ ID NO: 216493 - protein, 333 aa, unidentified
MSPHQQGRVRRRKLNREQTYVGVDVSKESLDVAIIDSDKKWRFSNNPAGIKKTLEMIEETGPALVVFEATGGLELSLWYALSEAGMDAAPVNPRQIREFARAKGRLAKTDTIDAKIIAQYGQAFHPKPQPFPDTQELKEMITRRSQLVDMITAEKTRLKAARRERIRQDIKANIEWLKSRLDGVDKDLDKTIKANPQWREKFELLESTPGVGPTTAASLVANLPELGTLNRHQAAALAGLAPFNRDSGLMRGKRSVWGGWGRVRKALYMATLVATRFNPVIRAFYSRLCSEGKAKKLALTACMRKLLTILNAMLKQNTPWRYAYSPSLIGPCH

SEQ ID NO: 216494 - protein, 416 aa, unidentified
MNAVGIDVSSRKSTVAVLRPLGEVVCLPFDVTHDIAGLASLVEKLKALDGETRVVMEHTGRYYEAVAKALHEAGFFVCAVNPLLIKEYGANSLRRVKTDKADAVKIARYALDNWADLRDFTPMDAIRYDLKTLNRQFQLASKQRTASANNLIALLEQSFPGIRKCFDSPVRSDGTQKWVDFAHSFWHVDCVRKQPFAAFCERYRKWCKLHAYFFKLRNAEKVYALAKSAVVLTPKSKVVKVLVQEAANQLISISRSVEVYRAEMDRLAAMLPEYPVVMAMYGVGKSYGPQLMAEIGDVRRFERKQALVAFAGIDPMPNQSGDKNVRSNKSSKRGSPYLRKTLFNVIRTYLQCAPQDEPVFQFLNRKRAEGKPFYVYMLAAANKFLRRYYAKLRDYFASLDTLQPVAPIPTILKATL

SEQ ID NO: 216495 - protein, 343 aa, unidentified
MSIVILGIDLGKNVCSLVGVDAVGAVIVRRSMRRQTLIDYVAKLPACVVAMEACCGAHHMGRLFAAHGHEIRLMSPEYVRPYVKAQKNDDRDAEGIAEAASRPTMRFVGLKTQEQLDIQTLHRVRSRLVAERTNLINQLRAILLERGTIFPVGRRKLELGIDGMLADGNTTLSPRLRQLVSELRGEWRELDARIETLNGEFVELARNDAAARRLTSIPGIGVLNATALIAAVGDASSFTKARDLGAWLGLVPRQHTTGGRPRLLGISKRGNTYLRTLLIHGARAALPSLSQSDTPLGRWLKAMIERGVHRNAVVVALANKLARIAWAALRKGATFERGYPVAA

SEQ ID NO: 216496 - protein, 335 aa, unidentified
MSSLVCGLDVHKDNVYATVMNYGGEIVDKRKLTNDEVVNYLSQYPIDKVAMESSTSIVPIYRALQGKGYTILVSHPKKTRLIAESRIKTDRVDSWAVTELARLDALPLSYMPPDDIAALREKVRRRAFLVRMRSKLKVKIKAQLVINGFTPPSEYGLFTSKGLEWLRSLQLDAVDSYLPVISTLDIQVGKLSRELRGMASGDEDVKLLMTIPGIGYYSALLVKSEIGSIDRFPDGEKLCSYAGLVPSVSISGKYRRHGSITKEGSRWLRWIMVESIHTHLKYDTSITRAYHAIAERKGAQIAKVAAARRLLMCCYSVLRNREPYHDPAGSYQASS

SEQ ID NO: 216497 - protein, 345 aa, unidentified
MQVTTIGLDIAKNVFQVHGIDVAEKVVVRKQLRRRQVLEFFKALPPCLVGMEACATAHYWARELTKLGHQVRLMPAKDVKAYVKRNKNDAADAEAICEAVRRPTMRFVQVKSAEQQGRLMLHRTRDLLMRQRTQLINALRAHMAELGIVAAQGYAGLKELLKVIAGERDARLPVDAHASLVVLAAGLHAVQTMIGSIDKRIIVEHRSNEASKRLRSIPGIGLLGASAIVATVQDPKAFRSGRDFAAWIGLVPREDSTGGKQKLGPISKQGDRYLRRILVVGAHAVLKLARQKPEKYPWLTQLLARRPFKVAAVALANKMARVAWALLAKGGTYYRARALVAPAAA

SEQ ID NO: 216498 - protein, 347 aa, unidentified
MKHYVGLDVSQKEVSLCVVDEDGAVIAEGKVATDPALVLSWIEDRVGAVERIVHESGPLSIWLTRALARLGAPVVCIDARAAHKALSARMNKSDRADAEALAQLARTGWYREVHIKSEASDRLRLLLGARERMIRIRQDIEGQARGILKTYGIRLGPVAQSRERAGFREQLQAAASGDPLIEAVAASLIAVHDTACAEAAVIEEELQAIARDSALARRLMSVPGVGPMVALNFIATIDDVKRFAKATDVGAYLGLTPRRYQSGEIDYSGRISKRGDRTTRTLLYEAASVLINRVQRFSPLKAWAVRLAARKGFKKAAVATARKIAVIMLRLWRDGTTFAWTREEMPA

SEQ ID NO: 216499 - protein, 421 aa, unidentified
MPTILCVGGDIHQDELHLRATDKTDGHEVGQRLTVKNNRPGAAQAIAHLVQLLTQHGYTHLEFGLEATGLFWLPFYVYLQQSTALTPFQPTWVCFNPKLVAKFKEGVTLSEIKDDDHDALAVAERLRFGHLPVSYVPSSEWLALRMLTRYRYRLSRQIAQEKLRALTRVFLKASEWHRGQPFSDVWGATSATLLTEFTTAEIAAMSLSQLTDLIQEYGRKHFDDPQATARQVQRTLQNSFPVTPDLDAALTVVLQVAWTHIRDLEKLMRRLDRKIAQRMERITNPLLSVQGLGPVITAGILAEIADIHRFPDEPQLAKFVGLVWRKHASGQFVAEETRLVKAGNVYLRYYLIEGANLMRQHNLEYQAYYRRKFAEVPKHQHKRALVLTARKLVRLVFALLTKNQPYVRPQAVQSQEATPVQ

SEQ ID NO: 216500 - protein, 357 aa, unidentified
MYSIGVDFHKAYSHMTVMDAQGQVVRAGKVPNTAEAVHAFVAPYRGDAQAVLEATRNWTVMYDMLERELRAVYLAHPLKVRAIAEARIKTDRIDSKILAHLLRCDLLPTAYVRPREQRVSQQILRQRMFMVRVRTMVKNRIHVLIDRQLDVREVAAQFSDLFGGAGLAWLRAVGLTDIERRLLNAELALFEAVQERIAESDSLVRSLVAGDPRVRWMRTIPGFGRFFAVLVVHEIGTIRRFSTPEKLSAYAGLVPSVHASGGKVFHGRLTKQGNKWLRWAVVEAVRPAVTTDPDLRRYYERLRQRKGPNPAKVATARRLLLLAHRVLSQERPYRKPESVTERPRPRTALMNPLPAAG

SEQ ID NO: 216501 - protein, 343 aa, unidentified
MTDHQTRVTGGVDTHRDEHVAAALDERGGQLGVKPFPATSTGYQDLLAWLNSFGVIERVGVEGTGCYGAGLSRHLQAAGVEIVEVDRPNRQLRRRAGKSDPVDAVAAARAAQSGQATAVAKSADGDVEKLRALRLARASARHSRVRVINQLRALMVTAPDELRAEFTGLTAITLPQRCARFRVPDPTTNLGALKYAMRSLARQAVTLRAEIKDLDRVITTLVNQTAPELLGRHGVGPDSAAVLLIAAGDNPDRLRSEAAFARMCGAAPLEASSGPTVRHRLSRAGNRQANAALHSIVLTRMVSHPETRTYVARRRAEGKTSLEIMRCLKRFVAREIYHQLAPT

SEQ ID NO: 216502 - protein, 342 aa, unidentified
MDKIEACGIEVSAQELVVAMSGKKGEAVLRRFANTPVGHRQLLQALTRGGKRVRACMEATGVYGLDAALFLSAQAGIELMVANPRAVRHFAQARMQRSKNDRLDAVMLREFAMRMEFIAWTRPEQSTLALWAIARRLQALTRLCTAEKNRQHAAGVSQAMPACVRASVARTLRLLQREIQKLRQTARQCIAGDARLQRRYQLLRTVPGIGEISAIQILAELALLPTDRDVRQWVAYAGLDPREYSSGSSVKKYTRISKVGNRHLRCALYMPALVASRCEPHLRGFYEHLVAVGKKKRQALTAVARKMLHAIFGMFRSDRPYDGNRVFPLPASGLALQAPKIA

SEQ ID NO: 216503 - protein, 339 aa, unidentified
MTIVMGLDQHRGQITGEWIDTDTGEIQRARVTPADRAGVRRFVERFRGRELEVALEATTGWRFVVEELRRVGAVAHLAEPAETAGLKGPKKRAKGDRADARHLRELLMVGRLPESWIPPDHILDLRARVRLRHTLSEQRCEWQQRIQAVLYHHGCPQRRDLMVGDGREWLAAQPLSATAREQITVALAMIDALEAQIVPLGKELRAYARRQVGCKALMAHYGIGELTAVTILAELGDCTRFFSSRQVVRYAGLDITVYQSDQHRAPGHISRQGPPALRWALYEAAQVARSRERSPDREYYLATKERIGGNRACLSVARKLLKRSYHTLRELGEEALAPA

SEQ ID NO: 216504 - protein, 375 aa, unidentified
MNNNNTLYVGLDVHRESITVAYAINSEPVELMGKIGTSPTDIQNLCKRLRSKSSQVSIVYEAGPCGYGLYRRLVKSGFDCMVCAPSLIPKKPGERVKTDRRDAIRLVRSLRAGDLSAVYVPGIEDEAFRDLARAWASARDDLRHARQRLKSFLLVHGVHYVGRADWGPAHRRWLSKYSFESPWRQLAFDEHRRTIEDRQAQCERLESALKEAVTEWRLYPVVEALQAMRGIQFITAVGLISELGDLTRFEHPRQLMSWFGITPSEYSSGGSRHQGSITKAGNSYARKLLVEAAWSYRHPARISPAIQKRQENLPRPVIDRAWDAQLRLCKRYRKLQAKGKNVNITIVAVARELAGFIWDMGRIAMSVAQQPQCHK

SEQ ID NO: 216505 - protein, 319 aa, unidentified
MHCIGVDVSKQELVTFDGRRERIFPNAHGLVEFRRFLKRATDAFVVFEPTSTYSRRLEALCRTQRISCCQLNPRVVPHLRLVGKGRSKTDSSDAELLYRYGIERGYSEATQLENDALAESIQARFACYRVTQKARVACQNVLEALSQDTATSNRLLTELRAEIAELKRKEKQHLDAAQQLVKEDEQAAQRLAALLSIPGVGPITALTLLALFRKYSDANRSQIVALAGFDPIQIQSGTSVHGKSRISKRGNREVRKRLFEATLSAARYNPSIRSIYRRLKESGKPDKVARIAAARKLLVIAHAIYKSGESFRDLSAKEA

SEQ ID NO: 216506 - protein, 430 aa, unidentified
MVENEYQIYVGIDWATEAHQACVLDSRGRILAERSFAHTGDAIAAFAQWLHEVAGDEPGQVAIAIEIPRGAVVETLVERGFHVYAINPKQLDRFRDRHSVAGAKDDRRDAFVLGDSVRTDRACFRRVRLDDPLVIQLRELSRVHDDLGREANQLTNRLREQLHRYYSQALALCPAADEPWLWALLELAPSPSVARHLRPQRVERLLRQHRIRRLSAHEVVAALRACALQVAPGVVEAASEHIALLLPRLRLVHTQRQGCGVRLEALLDKLGAAEDDDGQQGEHRDVEILRSLPGVGRVVAATVLAEASAALAERDYQALRAYAGIAPVTKQSGKRRMVLMRYACNGRLRNALYHWARVAAMRDPSSKTYYAGLRQRGHSYARALRSVADRLLRVLIAMLKHGSLFDSARTSPSVGAAAAEEVASRLLFPL

SEQ ID NO: 216507 - protein, 410 aa, unidentified
MEKVYKCCGIDVHKKLIVACFKCGRKQEIREFGATTRELLEMADWLKDGGCMMVAMESTASYWKPLYNILESCGLDAMVVNARHMKAVPGRKTDVKDAEWIADLLQHGLLQASYIPDKDQRELRELVRYRKSLVGERNRELNRLQKMLEGANIKISGTITDINGKSARNILEHILSGKEIDSAEYDVLYEKKIIAHNLKATKEQIIDDLNGVMSALQRKMMRVLLNHLDELNRHIRELDDDIDCFMKPEEKQAVDAIQDIPGIGETSAQAVISVIGTNMDRFPTDRHIASWAGLCPGNNESANKRRSGKTRKGNALLRDTLVVCAHSAVKNKSSYFCAQFARVSAHRGKKRAYVAVAHSMLIAIYHIIKDGVVFKDLGADYYNQFNRERKINAYLKKLKALGWEAPVVAA

SEQ ID NO: 216508 - protein, 339 aa, unidentified
MKLYCGIDLHSNNSVVVILDEADKVVYQKKLNNDLALILEQLSIYKDQMTAIAIESTFNWYWLVDGLMEAGYTVKLVNTAAVQTYSGLKHTDDDDARWLAHLLRLKILPTGYIYPKEERAVRDLLRKRSQLVRQSTTNILSLQNILARNTAQSLSSYKIKMLDDEHAEKLLDDPNTTLALKCNLNVIRCLQSTIAEIETTVLQQARIRAEFKQLLTVSGIGEILGLTIMLESGDMSRFPKVGNFSSYCRCVKSERLSNGKKKGEGNRKSGNKYLAWAFIEAANFAIRYNDKVKAFYQKKKAKTNGIIATKAVANKLARACYHVLKDQVPFEVNKSFSRW

SEQ ID NO: 216509 - protein, 428 aa, unidentified
MDEVNRNRLEEFRQLRKEIRHSEEYLIVGMDIAKDRHYAFFGTATGKTLLKRIVFSNDHEGFRRLLDHAEALRVQHGLKKVVYGMEPTANYHKPLGEYLINLGRTVVLVSGVTVARNRESLDGRWDKHDGKDSGNVADLISQGKCLYYEHPSAELRGLRGLLSLKRRLKKQEHGYRIRIRNQLIAQYFPEMDRDYERLGAEGLSIVRWCLPASQMTQLDVEPFIERVISRRITMEKRRRLEEVWEKAAGSIGCEEVPGVDHEAKIMVEGLKQIRAMIKETEDKIEELCKEFPEYQYILTIPGFGPDVSAKVLGAVGDPDRFENGKQVLKMGGLDLSADRSGKDSDKAIPEISKRGKSDLRYALYQAALIASLKNRDVMIYYTNKIRGREREKGIHIKMRVKLAAKLLVIAWTLMKKKEAFDPAYLNAE

SEQ ID NO: 216510 - protein, 342 aa, unidentified
MKIIGCDFHPSFQQIAMVDTETGEQTERKLTPEEAKQFYGQLQGEVVVGVEASGNMLWFERLLTGMGHRLRLGDAAQIQAREVRKQKTDRRAAELILQLLLEDRFPEIWVPSLAERDARQLLIHRDKLVGMRRQVKNQLQHLCMNQGLQLKQKLWTQIGRKRLEELPLQGWTAKRRADGLRWLDQLDSDVTELDAAVAKLAQQNAVAQLLQTHPGVGPITSLAFVLTLGKIERFRGSRQVVSYLGLNPSEHSSGMRRRLGAISKQGNPMLRSLLVEAGQSASRFDTELKRAYQRLKQKKHSAVAKVMVARKLAVRLYWMWRTQQPYTATRMQGSPSHLVAGS

SEQ ID NO: 216511 - protein, 408 aa, unidentified
MDAFCGIDWAEDHHDIALVDRDGKLLARARISDDAAGLARLLELLAEHGDSAEEPIPVAIETPRGLLVACLRAAGRQVYPVNPMAVARYRDRHSVAGRKSDKGDALVLANILRTDLHAHRPLPADSELAQAVAVLARAQQDSVWDRTTAHNRLRSHLREYYPGFPAAFAAAKGGIMRPEARTILAAAPTPAGAAKLTLAQLRALLKKAGRSRGIDAEAQRLREAFRAEQMRQPPLAGDAMGRQSLALLRQLDAACTSADDLEQAAIESFNQHPDAGIITSFPGIGPLTGARVIAETGDDRSRFQDARGLKAYAGAAPVTRASGKTRSVTRRHVKNNRLAQAGYIWAFSALTASPGARSHYDRRRDHGDRHAAALRNLFSRLLGCLHHCLATGQHYDETTAFPAQAAAA

SEQ ID NO: 216512 - protein, 414 aa, unidentified
MTKSYPTPEAAILVAVDIAKDHNEVLIELRHNHRRRFRVANTLEEYERLVAYLRQFDTPALFGFEATGNYHRPLAYFLHARGFELRLIPTMALARTREAMHNSWDKNDPKDAQVILHMLKTGLSQTWHDPLVSGTNDAQELSKTHHQVTLARTRVWHRLRNHYFPLYFPEIEHFIRSDHSDWLIQLLLRFPTPGSITSLATEDFASQAWSLVGRKVHKAALLAEIYAAAQRSIALPVPPDGAAVAMLRLVLEEYLMLGRMRESVAQQAEIILASNADRRRLMTVPGVGPLTALTILAEAGDLRRFAHYRQFLKFCGMSLSTQQSGRFRGISRLSKYGNARLRTAFWMAAKTAVRMRENSLRRKFDRYVRANPLDADLRRKGYSAVAAKLARIVYGLIKNGTDYRPFFEEAIPGG

SEQ ID NO: 216513 - protein, 341 aa, unidentified
MESQVLMVGVDTHKDGHSAAAVDGLGGVVAAIDVGADRHGYARLLRWARCRSSQRQWVVEGTGSYGAGLASFLAENGEVVFEGDRPQRRKHDAAGKSDQLDAIKVAREALARPHHAIPRQRGKREAIRVLLTSRQSAINAYRQGLNQLYALVVTAPTPLHERLIQFKGERLVVACGRLRAGGDLETRVTTISMRQIARRLHNLQAEADAYERQLDELVAEVAPRLLAEPGVGPITGAQMLVSWSHAGRIRDENAFAAMAGVAPIQASSGRIVRHRLNRFGDRQLNRALHTVALCRSISHPETRAYIARRTAEGKSTREIRRCLKRYLARRFFRLLQRLDRP

SEQ ID NO: 216514 - protein, 351 aa, unidentified
MIIIGCDFHTRFQKIAMVDTETGEIAKRRLEHGNDEARAFYATLPGPARVGMEATMNAQWFERLLQEYHHELWVGDAAQIRAAAVRKQKTDDRDALHILDLLVRDKFPRIWIPSPENRDLRQMLRHRDKLVRIRTSVQNQLHALAMSQGLCRKAKLWTKAGRKELEGLPLDPWASRRRRELLQLFDQLDPQIEELDKVVIQEAEKRPAAVHLMTQRGVGPVTALAFVLTIGAVERFPTSKHLVSYLGLNPGEDSSGGRQRLGAISKQGNSIMRHLLSEAAQTAVKFDPELRRDYLRLKFRRGISGVAKVAIARKLAVRLYWKLREVAQPNTAARMQGSPTSLMVEATPSRN

SEQ ID NO: 216515 - protein, 309 aa, unidentified
MDIIVGIDVSKDRLDVHVMPSGDSFFVCNDHAGIDGLLSRLAGLGADVVALEATGGFENLAVAGLSGAGLAVIVVNPAQVRAYANALGRRAKTDPIDAAVIAAFVAATKPEIRPLRNAETQALSELVARRRQIVQMIAAEENRERMVLARQARKSIQRLLAALKRELKSLDADLDDHIRKSPAWRVRETLLTSVPGVGPTTARTLLAEMPELGQLDRRQIASLAGLAPWTRQSGKWKGKSFIGGGRGKVRAALFMAALVASRYNPVLKAFRDRLVSSGKPKIVAVVATMRKLLTILNAIIRDEKPWQNA

SEQ ID NO: 216516 - protein, 316 aa, unidentified
MNENAVYIGIDLSQDNLDMAAYPTNQIWQYKYNVHGISKIVSKLKDINPVLIVMEATGGMEKPLREALNEANLAVAVVNPRRIRDHGRSMGVLAKTDKLDAKVIAHFAAKIEPTPQPMPSKELQALDGIITRRSQLTNMLTAERNRLKQSGEPGIKQDIKELIEYIQAKIEKLDREMKEIIKQNPSFAEKARLYKSMKGVGDILSANLISKLPELGVLNQREIAALVGLAPINKDSGKMRGKRMIQGGRASLRKALYMPALVAIRNNPVIKNFYLRLIAKGKLKKVALAACMHKMITILNSMAKTNTVWKYADVSP

SEQ ID NO: 216517 - protein, 376 aa, unidentified
MLYVGIDVAKNKHDVTALNVPGKTVLKPLTFSNNKAGFELLDLSFRQLNQDCLIALEDTGHYAFNLLNFLHEQGYKVYTYTPLLIKEFAKSLSLRKTKTDKKDAHGIALKLLSDPNREQFQHDNRQVELKILARHIHRLKKKQSDWKVQYTRCLDIIFPELDKIVGKHSEYTYQLLTCYPNPQKRLEAGFDKLIEIKRLTASKIQDILSVAPRSIGTTSPAREFEIIEIIKHYKRLIDKAKKCVNDLMAEFNSVITTVTGIENRLGAVILAEIRNIHAFDNPAQLQAFAGLDSSIYQSGQIDLAGRMIKRGSPHLRWALIQAAKACARFSPAFKAYLKTKLEQGKHYNVAIIHLAKKLIRTLFYILKKSCHLTNKK

SEQ ID NO: 216518 - protein, 326 aa, unidentified
MARMQGKTTPDVSQLFAGIVSKAHLDLQLSCERRSRRFTNDPAGCAAIDAYLRLRRPADTPCLVALEPTGRYHFLVWRALHEAGHGVAPINPLHVRRFAESDGELAKTDALDAAVLARMAAQRLPGAKPPPSEEQLRLKALTTSIADRTDRRATLKGQRAEARDPLVARFDEAEIAQLSDAIDALKAERARLIGQHPQRARVSEILCSIPGIGETSAHRIIADMPEIGTLNEKQAAALLGAAPRANQSGKRDKRRHIKGGRRRLRAALHMPAIVASNANPDLKAFKQRLKANGKNNAVILTAILRKLIILANALVAQNRMWTQKCP

SEQ ID NO: 216519 - protein, 410 aa, unidentified
MNPLYVGIDVSSKSNVAYLMKPDGSKHSNFSIPNTRDGSRHLVKRILSAITSESLTDVVIGLEATSVYGDNLVCFLREDGSLAPYNKKIHVLNPKQVNKFKLSYNDLPKNDYVDSFVIADCLRFGRINKEVYLDDYRYAALKNLTRARFFAVQNLTREKQRFLNQLFKKYSTMAQEKVFSDTFSTTALAVYESFESAEALANMDLHQLTEFIIEKGKKRFPDPDSVAKAIQKAARSSYRLPKTVNDSVNQVLSISISSMRAMESQIKAFDKAIAEQMTLIPNTLTSVNGIGPVYSAGIIAEIGDINRFPNQASLAKYAGLVWSQHQSGDFEAQNTRLIHSGNRYLKYYLCEAALSLVRCDTEYRSFYHRKYNEVNQYQHKRALALTARKLVRLVFRLLKDNCLYRAPESK

SEQ ID NO: 216520 - protein, 454 aa, unidentified
MRHGKKKQKPGQVQEDMPVINSNAAGIDVGSAEIWVSIPPDRDEEPIRRYATFTADLYALADWLKQRGIESVAMESTGVYWIPVFEILERKGLHVVLVNAKYAKNVAGRKSDWLDCQWLRLLHTFGLLPSSFRPAAAIATLRCYLRHRQMLIEYASAHIQHMQKALTQMNLQLANVVADITGDTGMRIIRAILGGERDPQRLAQMRDYRTKNDEATIAKALQGNYEPQHVFALKQAVELWDFYQQQRTTCDQEIAQYLHSLDSAVDVDSHPIPPPRAPKKRRNSPGFNCRLETYRILGVDLTQIDGISESSALTILSEIGTDWSRWKTEKHFASWLTLCPNNKISGGRILQRRTRKSSNRVHDLLCVCAQTLFNSRSALGAFARRMRSRLGPQKAIVATAHRLALWIYRLLRFGNTYVDIGQDAYEQQYQQRKLKTLTRQAKHFGFQLVALAES

SEQ ID NO: 216521 - protein, 530 aa, unidentified
MVTKFKKRKFAGSKKRFIGRPAGQIQERVQAVGPEHFGIVAVDCAKRRSKWMLCNFYGKVIVEPTVVEHTAGALRVMTQLFAEACRQEELTDTIVAIEMTGIYHKPVQRAFRKAGFDTRIVHPFASNHYRRPLHPNEKTDDHDLEAIFHAAIKGYGLATLPVGEAYQSLQAVSRHRHNLVKQRSRLMVQMRRLLHQTMPGFADLFEDDKLFHKSIALPIALEFSSADAIRQAGVGGIEGHLTKTKVRFQTRTIERIVAWAGAAAEPSELASLHTRQWQQLNEVRRLFDEQVAAAEREIAAFLVKTPYVLLLSVTGINVVSAGRLAGEAGPIEHYASARAINGRAGLYPSRYQSDEVDHADGALVRQCNRQLRGAAMLVAENLIKCHPHYRGLSALWAQQKVDPRDRRCRIANRAMRMVYQLIGGRQVWRGRGVEREYLLAKLQEFHRVHHTPVDRSIRDLNEAFVWLPKSAYADEAKPLSELSRRKHRGPQRLGDLLIPLLIRLGIGREELGVADEETVESTTSEARSSG

SEQ ID NO: 216522 - protein, 416 aa, unidentified
MKIYPITRPIQRYIALDIHKEYVLAGGMSAKQEWLLPPRRIEISKFGEWAQKNLCESDAVVIETTTNVWDIYDIVQPLVGHAVVAHAGAVRQIAEARVKTDKEDVKRLIRLLIADILPEVWVPPQPVRELRGLISYRQRLVKTGVVFRNRLQSLLHSHNLVLPEEGLVSQEWWEQQEKISLLEKLQIGQEIALLEQIEKHKAEVDQELGKQSLGETWGKQALHLMQLPGIGVVIAMTLLSAIGDAHRFASADKLVGYSGLGAGVHDSGQEHIEKRITKSGRKELRWAMVEAAWRAVRSSPYWKEQYEKFLKRMRRPNQAIVVVARKLLVAVWHVLTKAETDVRASEEDLAYKMLVLSWDLDENVRQGLSYKQFAKYALMKLGVETDITRFVRKNVPRRLAPREEVLARLAELGIAA

SEQ ID NO: 216523 - protein, 367 aa, unidentified
MKKISTVAAKASRKISQQKLTVGLDLGDRNSWYCVVDEAGHIQVEQRVGTSAKALQEVFSAMPRSRIALETGTHSPWISRLLRELGHEVIVANARKVRLIGESRKKDDRLDAQTLARLARIDPELLCPVKHRSAQAQADLMMIRARAGLVRMRTGLVNTARGLAKSYGERLRGCNVRNMNPEKAEGLSPELQAALEPLLAAIESVSERIAEYNERIEKLAQESYPQVAVLKQVKGVGTLIALTFLLTLEDPRRFGKSRDVGGYLGLQPGRRNSGQSEPQLHISKEGDPYLRTLLVQGAQHILGPFGVDCDLRRWGLKLAERGGRNGKKRAIVATARKLAVLLHHLWVSGEVYEPLYNSCPVAVAAAA

SEQ ID NO: 216524 - protein, 410 aa, unidentified
MASRKEDRFGPHELYLGIDVGKSFHWAVGVDAEGTVTIDRPLRNRQDEIDALLGEAGEGALVVVDQKNNIGSLVVRRCRAAGVDVGYLPGKAMKQARDMFPGTAKTDRIDAEIIARTALGMRRVVLPIAESDDLGASVSLLSSQLAYATRRATMARNRLHAVLLESDPALEAAVDLSSAWQLSAMSELGGAAGVAAAGKRRYRSLCGRLGAREAARDALWEAAVASARDGWHPDAEDALVRSLAAEILAADAERASLEADIASRLSGDETYRCLLTVPGVGAKTATALVTMVDVSLFGGDDRLASYCGLAPSNSQSGTSIDSASAARSGNKQLKNLLIFSCNSLVGTKNRFGRYYEECRSRGMRHNKALKAVARKRLGVIFAVMRDRVPYEEPAVSHVVENFHPEPLTKL

SEQ ID NO: 216525 - protein, 385 aa, unidentified
MIHVGMDVHIRNSVLNAKDADGQVLARGRSSNTMFDLGEFFAPLMRRAKEKGESIRVVMESTSNSRAIQRLLTRFGKEAGIDLTADVLHARKLRVIAESVNKCDRVDADILTELSRSNFKLPTCYMPDDDEFALREHLRARADLVRIRTMVKNRVHAILHRRGILTPAGDLFGPRGGTFLDQLDLDQAGRITLDRFRALIDQLDESIKQSTTCLRTVMREPRWSKPAALLQTMPGIGLITALTILAELGDLSRFRSRAAVANYAGLVPRHRDSNDKRWSGHITRRGSAHLRGVLIEAAWMAAPRVPAYQALFDRVAMKKNKKTAIVAVARRMLEDAWMLLIKDEAFRYVPAFLGDAQEDGHRTPASPEHRERRSRVPQAASSVAG

SEQ ID NO: 216526 - protein, 399 aa, unidentified
MDVHRDTVVACCRIGDRDGSVEVTKRSFSTTSKGVAELAGFLADAAVTTVAMEATGVYWKPVYYVLEGLFDELWLCNAAHVKNVPGHKSDLADAEWLADVAAHGMVRASFVPPPPIRELTRYRKTQIDARTREVQRLEKVLQDAGLKLTSVASRAWSKSSRAMIEALIAGERDPAVLAQMAKGRLRAKIDALEEALAGRFGAHHAIVCRQIIDHIDFLDQAIASLTAEIAARLVPFESAVAVITSLPGISRLTAEVLIAETGADMSRFPTPGQFCAWAGLAPASNESAGKRRPAGTKHGSTWLRRAMIEAARAAANTKGSYFNAQYSRIAKRRGPNKAAVAVAHSMLEVIWHLLTSGELYQDLGADYYQRRHDPVAEAKRLTRRIEALGYQVTITPHAA

SEQ ID NO: 216527 - protein, 374 aa, unidentified
MCKKSIVIWIDVSKLKLNCYCAETDEWEEIENSEEAIDKYIDKVGKIEGKKNLIILYESTGVYSSKLLKVCNTKKVKHHQIHPTQFSQVCSWMWKKNKNDILDAKSIANIWYLMLENMWNLTLPSTNVVKTLMSYLSNIDSLKKIQRRYRNLKDKVKNDVFDESDIIEFYNKNIDDIDKKIEEYLEKVKKKLQENWYGDKLRNLQTIPWIWEQVWIYLILFFIDLADKWIGKEEKRKVTSYSGLNPVEEQSWSSLKRSKISKRWRSVVRDILYMPSMNWYKFTSEKSSKREKYLNTTMWKFFIRMKDKFESPNNKRWNSVIVAMMKKTLITAWWIFRNDTQYNKTNNYIVKNQVDFFTMRTFLNKSVYCFLSHS

SEQ ID NO: 216528 - protein, 350 aa, unidentified
MKVNTIGVDLAKNVLQVHGVDEQGKVVLRKQLRRNQVMNFFAQRTPCLVGMEACGSAHDWARRLIKLGYTVKLMAPQFVKPYVKTNKNDAADAEAICEAVRRPNMRFVPVKTEEHQAVLSLHRARQGFVRQRTAQANQIRGLLAEYGVVIPQGIRHIGQCLPEILEDADNALPGLFRQLLRQLGEHLKTLTRLVEEMEEQMQQWHGGNEASQKLAAMPGIGAITATAMVASVGDARNFSNGRQFAAWLGLVPRQHSSGGKTTSLGISKRGDRYLRTLLIHGGRSVIAAAERRKTSPVEESLTQQRSWLQGLVSRRNKNVAAVALANKNARVIWALLAHDRSYQAGYAVAA

SEQ ID NO: 216529 - protein, 424 aa, unidentified
MTDTVMWLAGIDWASETHQVCLLDIDGKLVGERAFPHGGAGLAALCDWLLEKTGATADNIAIAIEVPHGPIVETLLERGFVVYAINPKQVDRFRDRFSMAGAKDDRFDAHVLGDALRTDRHRLRRLQPTDPTVVELREWSRMGDELKHEQTRLANRIRDQLWRYYPQALKLSANIAANWFLDLWELAPTPARAVEVSESAVAEVLKTHRVRRLDAAEALAILRETPITVAPGTTEAATGHIRMLAARLKLVNDQIREADRQLDVLCDRLNEVKNGVSPEPNDKSDVEILKSCPGVGRIIVSTLISEAFDLFHRRDYDALRPLCGVAPVTKRSGKCKVVLMRHACHNRLRNAVYHWARVAIQHGEVSRERYAALRQRGKTHGRAIRSVADRLLGVACSMLKNRTLFDSHRHTKRLGAAVTQPVTT

SEQ ID NO: 216530 - protein, 416 aa, unidentified
MNAVGIDVSSRKSTVAVLRPLGEVVCLPFDVTHDIAGLASLAEKLKALDGETRVVMEHTGRYYEAVAKALHEAGLFVCAVNPLLIKEYGANSLRRVKTDKADAVKIARYALDNWADLRDFTPMDAIRYDFKTLNRQFQLASKQRTASANNLIALLEQSFPGIRKCFDSPVRSDGTQKWVDFAHSFWHVDCVRKQPFAAFCERYRKWCKRHAYLFKLSNAEEVYALAKRAVVLTPKSKVVKVLVQEAVNQLSSISRSVEVYRAEMDRLAAMLPEYPVVMAMYGVGKSYGPQLMAEIGDVRRFERKQALVAFAGIDPMPNQSGDKNVRSNKSSKRGSPYLRKTLFNVIRTYLQCAPQDEPVFQFLNLKRAEGKPFYVYMLAAANKFLRRYYAKLRDYFASLDTLQSVAPIPTILKATL

SEQ ID NO: 216531 - protein, 406 aa, unidentified
MVDITVSDFMKGRYNLMIYVGIDIAKLNHFASAISSDGTELMKPFKFTNDGDGFQMLDSRLSALSYEDDSIIIGLESTAHYGDNLVRYLVACNYNVCVLNPIKTSVMRKDNIRKTKTDKVDTFIIAKTLMMQDSYRFVSFYDLDLMDLKQLGRFRQKTIKQRTRLKIQLTSYVDQVFPELQYFFKSGLHQKAVYALLKEAPTPQDIASMHMTHLSHLLAAASHGHFKKEQAKELRVLAHKSVGANDSAISIQITHSIAQIELLDSQLNSVEAEMTEIMKFNDSVIMTIPGIGYINGGMILGEIGDIHRFPSPSKLLAFAGLDPSVYQSGNYSARRTRMSKRGSRVLRYALINAAHNVVKNNATFKAYYDKKMAEGRSHYNALGHCAGKLVRIIWKMLTDGVEFNLD

SEQ ID NO: 216532 - protein, 316 aa, unidentified
MNVVGFDVGKDSIVGARIDASMQVKQRFEITNTMDAIAAALLSLRGQYKHLLIASESTGEYHYALAHCCLDLDIPFRLLNPITTKQFVKATVRKKKTDPSDAWVTAKLAAQGEGVLVTAGLFNDTKPILRTSTKLAQLNDIVNRIDRRISELLPTERKLHEQLVTCAYQLGIAVTVFRQRAIEISPKDLTKLLTSIPGIGVTIAPTLIAEIGDITRFKNPKSLVAYAGLDPRVRQSGYSLQRNTRLTKRGSPYLRRSLYIAASIAQRCEPQYKATFDKKRAEGKRYKEATIVNARKILNCVYAVWTCNTPYKRPNT

SEQ ID NO: 216533 - protein, 315 aa, unidentified
MTAIICGIDVSSIALDIHLRVAAHPPQRFANTAEGIAALAELCRRHGVELAVMEASGGHERLAHGLLWAQGVPAAIVNPRMVRDFAKAMGMLEKSDRIDAVMIAWFAETRRIVAQPPANEDQARLTAWVRRLRQLIAARTAQQQALRLVTDAQVLAEGSETVAYLTSQIRAFEARIAQVIAADPLWARLDVAFRGIKGVAARTVSQIAAELPEIGTISAKAIGKLAGLAPLADDSGKRNGARHIRGGRGGVRSILFVVAEIVRRHNPDFAAFHQRLIAAGKPKKVARIAVAHKLLTRLNAMARDTRQHFNTPANA

SEQ ID NO: 216534 - protein, 339 aa, unidentified
MKFKRIAIDTSKHVFTLHGVDEHEKPLLRRELKRNQMVPYFSKLASTEVVLEACGGSHHWGRVLRELGHNVRLIPPQYVKRFVKRSKNDRNDAEAINEAAARPLMRSVAIKTIDQQAQGIVLKHREMLVNQRTQTINALRGHAAEFGVVAAKGTAKVTALLELLTAENGIPAVAVGMFAQMGAHIESLDERIAALDMELAELHKKDSLCRALSEVPGVGLLVATTAALTVDPANFVSGRHFAAWLGLTPREKSTGGKQRMGSISKAGNERLRQLLVVGPMSVVRYAKPGSKSASPWLLKLLERKPRMLAAVALANKMARIIWAMMAHGEVYRRQPMATA

SEQ ID NO: 216535 - protein, 413 aa, unidentified
MEDPFLFFVGIDWATENHRVCVVDRDGKIIAERQVAHSGPGLQQFLTWLQQQIPVPPERVAVAIEMPAGAIIETLVEHNYRAFSLNPKQLDRFRDRHTVAGAKDDSRDAFVLADSLRTDQHCFHPIYLDDPQIIRIRTLSRLEDSLVQDWSRLTSQLREQLHRYFPQLLQLSPAADDVWIWDVLEAAPLPSLVGQLKRQQVQKILSRRRIRRLSAEEVLQQLRTPPLPVAPGTAEAASEACLLLITRLRLLLQQKKEVERRIEEQLSRFCAEEERVEHRDVQLLLSIPGIGRVITATMLAEASQPLAQRDYHALRAYCGAAPVTHQSGKRKRQVIMRYSCNQRLRNAFYHWARISVQQDGRSRAHYHRLRSKGHSHGRALRGVLDRLLVMLISMLRHQTEFDPALRQSIPVAV

SEQ ID NO: 216536 - protein, 338 aa, unidentified
MELYTGIDLHSNNNYLGIIDEEGNRVYKRKLPNDLSQVLKAMEPFKQDIKGVVVESTFNWYWLVDGLMDNGYKTHLANPAAIKQYEGVKYIDDQWDSFWLANLLRLGILPEGYIYPKQDRPIRDLLRKRLHLVRHRTSHILSVENLISRNLGIKMGSNTVKQLDSDYLTHLFKDEHLLLAVNTSVEVMRFLTMRIKDIERVVKAKIKLRKEYEPLLLMPGIGDILGLTIMLEVGDIGRFERVGNYSSYCRCVKSTRISNAKKKGKGNQKNGNKYLSWAYVEAANFAIRFCAKARRYYQRKAAKTNNVVAIRALSNKLARASYYVMRDQVSYDPKMLFG

SEQ ID NO: 216537 - protein, 361 aa, unidentified
MSNSTTWIGMDVHKESIVVAAVNGAGTVAARWETPNTSKGKDRLATRLSEFGTIRCAYEAGSCGYDLRRFLETKGIPCDVIAPSLIPKKSGDRVKTDKKDAEKIARMHRMGELTTICVPTPAQEALRDLLRAREDANEDLVRRRHRLQKFLLRQGRRHEGKNWTRDHWRWIRAQKFTDHNSETVLSEYIAAIDQEIERIGRLDTQIEQESKHPEIAPSVARLKALRGVGTLTAMTILAELIDLSRFASPRELMAFVGLVPGEYSSGGRQWRGSITKAGNAHVRRVLVEAAWHYRHSPRGTGEAIRKRREGQPAAVIETARKAELRLYKKFTRMVMRGKRSTVAATAVARELVGFVWAIGRI

SEQ ID NO: 216538 - protein, 431 aa, unidentified
MSKFFYRPIVGIDVSADFSVVAILAPDGEVYRKPFKIKHNRNGFDYLVDQIKKAEEEFNMKTAIFMESTGVYHLTLFHFLRDTFETCILNPLITNCNKNGDIRKVKNDKKDALTIAKIGKFQNVKYTSAFDIEIYTLKALCRDYYKFTDSKSTFKKKLSTDLKIIFPSYSSVFSNITCKTSIAILKEYSSPKAILNADKNELIDLIRSHSRKGLTYSEKIYKKLIDAAEEAIYIGLKSPSLFVKIMNTISVIETLENQLNNLLNEIHSLMKSNRISEQFKKNVQLIYSIPGIGELTAITIMSEIGNIKGFVKAKHLVAYFGIDPSVNQSGKFNSNKNTMSKRGTRIGRRALYAVALASIRTSRSGEPINKVLLTYYKENLNGKSKKVALVAIMHKLVNYIFSVLRNQKEYEIRDPKIHIKMYLNNGSTTAA

SEQ ID NO: 216539 - protein, 349 aa, unidentified
MQSKSQIRSIGIDLGKSTFHLIALGTRSQVVIRKKFSRTQLLEYTANLPSSLIGMEAGVGSHFLGRALREQGHEVRLIPAQFVRPFVKSNKNDYRDAEAIAEAVERENMRFVPIKTEDQLDLQALHRVRDRLVARRTSVINQIRAFLLERGISFRKGPASLRRQMPEILENADAKLSTAMRRLLDFLWQEWKGLQMQIESLNTELEQIASSDPSCVRLQQIPGVGPLVSTAVVSAIGNGAAFKKGREFAAWLGLVPRQWSTGGKAKLLGISKRGNPYLRKMFIHGARAAVLRVKREGSSLGKWMSGLETRTARNVVIVATANKLARISWAVLAKGNDYQPLHKAAVFPN

SEQ ID NO: 216540 - protein, 346 aa, unidentified
MMIIGCDFHPSWQQVSWLDTETGESGERKLVHADGDAERFYRQVPAPALIGMEATGNCHWFVDLLAEVGHELWVGDAAQIRASYVRQQKTDKRDAAHIRKLLAEGRFPRIWMPSSEVRDVRQLLLHRYKLVIIRTRVKNELQHLCLNQGVQRKRKLWSQAGQKLLCELPLRPWAARRRDDLLRLMAMLDQQIDPLDAAVKAEAQRDKMALLLQTQPGVGAITSLAYVLTMGDVGRFPRGKQVASYLGLIPREHSSGGRQKLGAITKQGNRMMRMLLVEAAQIAVRYDPGFRKQYLHRCHQKPKAVAKVAAARKLAVRLYWMLRTQTGYPEIVRIESSPRVPLVGAS

SEQ ID NO: 216541 - protein, 364 aa, unidentified
MNKCHSNTELSSHEGTRCQFNGGTGVIKLGIDVHQDFYVVVEQVEGSNPKPPQRFQKQAFLHWAAKLRSQSAEVYAVYEACGFGFTLQRNLSALSIHCYVVCPQKLDEQNKRVKTDGLDAKALCLKLDRFVQGNRAALAIVRVPSEAEEQKRAIHRQREQLVKARKQLEAQGRSLMVNHGLEPVQSWWKPRAFAALPVPQWMKELLANSQPILVALQQKISTLTLQLQAAAAPTNPRGLGQMTSVIIDREIGDWNRFNNRRQIASYTGLCPGEYSSGQTRLQSCVTKHGNPRLRAALVELSWRLVRFQPNYKPIVKWRQILTTGALATGAARKKAIVAVARQLAVDLWRIKTGRLRAEELGLIN

SEQ ID NO: 216542 - protein, 335 aa, unidentified
MSLYCGIDLHSTNHLVVVIDETDRRLFEKRLPNDVSITVEALAPYRDELAGIAIESTFNWYWLVDGLEDAGFAPCLANPAAIKQYEGLKYTDDPYDAYFLAHLMRLGILPTGHIYPREQRGVRDLLRRRLSMVHMATGLLLAVQSQIWRSNGVNISNRQIRLASFELPLPKGPVREGAAAQWRLFQRTQDEIHRLEKLALKLYQGEENYQLLQTVKGIGVILGLTIGLETGSISRFGKAGNYASYCRCVRSERISNGKKKGENNRKAGNRYLSWAFSEAAHFAVRFEPKVQQFYERKRQKRNRIVAIRAVAHKLSRAVFHMLKHHEPFDVNRAFG

SEQ ID NO: 216543 - protein, 352 aa, unidentified
MMVLGADTHKRSHTIAAVAAVTGELHDDRTIQVSDEAFVALLEWAHALDEDRVWALEDCRHVSGAFERFLIASGERVVRVATKLMSDARRAGRERGKSDRIDALAVARAALREGVENLPSAQLAGIELDLRLLIDHRERLIRSRVALNNDLQWHLHDLWPELKLPAAALFSKKWSTKIARRLARAEQTARVRIARDELRRLRDLTAATAVLEAEIAELVAQVAPQLLHKPGFGPLTAAKLLGEVAGIERFATEAKLARAAGVAPIPVSSGKTNRHRLDRGGNRQLNTTIHRIALTRSRCHPETQNYIARKRAEGKTGLEAMRCLKRHLTRRIWHLLQSPTPGQKIPLPTSSS

SEQ ID NO: 216544 - protein, 341 aa, unidentified
MNITTIGIDLAKSVFQVHGTDERGKAVLSKVLRRAHMMRFFTQLPPCLIGMEACGGAHFWARKLTELGHTVKLMAPQFVKAYVKTNKNDARDAEAICEAVGRANMRFVAIKTPEQQALLALHRARQGFVKARTAQGNQIRGLLTEFGCAIPKGRRQVHSQVADILEDAENGLLGMSRELFAQLLEHLRYLDAQVKALEAQIKAWHKEDAASQRLEQIPGIGPLTASALVASIGDARHFKNGRQLSAWLGLVPRQHSSGGKPTLLGISKRGDVYLRTLLIHGARSSLRHVKPGDWGAALAERRNSNIAAVALANKNARIIWALLAHGRCFQANYHGAARQAA

SEQ ID NO: 216545 - protein, 387 aa, unidentified
MARKRTLSTLDTSIAYEAVGLDLAKEDTAIAAFGPDHEGPYLIDRMPYDKLYELLADMAPTLVAMEPCSGAHQIAEQIQELGHEVMMISGRHVQAWVKDHCNGQKTDLNDAFAILNLAYDRWLTPIRGKTREECRLLALQASYRQLKGQRTKTMVHVKATLHAWGFPIRAGSFNQKVLHELIDTNREAFGDEVVETLHLMINRVRDLDHDIATVLKLLTEATKRDPRASLLRSIPGFGILTMSRWCAVIGDIARFDSPKQTMAFVGLVPNNRITGHHTETSSGREARGQGRMLKRGDKMLRSLCILGAASLCLMVRNDRLPDCPFVASIKERLASPRPWFKVLVYVAAKLVRIATALLKYGETFSYEKAGILKAVLKQWELEQAKAA

SEQ ID NO: 216546 - protein, 354 aa, unidentified
MKHQAIQYLALDVHQSTVVATLRDAEGDIVLRATVATNARAILALIRSAGARVHVAFEEGTQAQWLHDLITPHVERVVVCNTRGGEGHGNKSDRIDADRLSEQLRLGSLRSVFHGAKSVLTLKELVRNYSTLVEDSTRVMLRIKAMFRGRGILTPGVSVYRASHREEWLTQLEGGARGRATSLLAQLDVLLELRPKAKTAMIAEARRQPGWKVLRSIPFLGPIRVALILAIVGTPFRFRTKRNLWPYVGLAVVTRSSSDQEFHDGKLRRRQKTALTRGLNRNHNPLLKSVFKGAANAATGRPGPLRDFYEASRARGVRDELAKVTLARKIVSLTLRLWKKGELWDPKKLTMQAT

SEQ ID NO: 216547 - protein, 342 aa, unidentified
MRVMIGIDPHKATHTAVAIDDNEMMLDELRVRACNSQVKRLTKWAVPFEDRVWAIESARGLGYLLAQQLVAAGETVIDVPAALSTRTRLLGSGRAQKNDPNDARSVAITAMRVDGLQLVSADEHAQVLKLLAKRHRDLGQLKSKAACRLHALLMELLPGGMAKEMTVNRANGLLDQVVDSGQITQHRVEVAREFVADVAHYEAQMKASMRRLRAAVAASGTSLTDIRGVGVVTAAIIIGHTGNVSRFASAGHFASYNATAPIEASSGEHRRHRLNPRGNRQLNYAIHIAAITQLRYPCAGREYYDRRCAEGKNSKEAIRALKRHISNSVYRALVADARRVTD

SEQ ID NO: 216548 - protein, 267 aa, unidentified
MKKFIRTAVDLGKNYFQFHGLAGEGGAPVSRKLKRSKVLEFYAQIEPCRVGMEACGSAHHWARELIAMGHEVVLIPPAYIKPYVKRGKNDAVDAAAICEAMARPDMRFVPVKSADDQAVLMLHKSRELLIKQRTMSVNALRGHLAEFGLVVAKGIGRVDELLALAQADARLPQIAKATVTELAQHLEGLDQSIDAIDDDIARAHRKNPKSCLIDQVPGIGTLIASVVAASAPDPGVFKSGRDFAAWLGLTPRQHSSGGKEKLGASTK

SEQ ID NO: 216549 - protein, 430 aa, unidentified
MKSNTQNAKIEAITEKTLVLGIDVGSETHYARAFDYRGIEYSKKPFKFSNTEVGFATFKEWILDLKERHEKDKVVPGMEPTGHYWFNLGKFLQDNEMKPVLVNPHHVKKSKELDDNNPTKNDRKDPKVIAGLVREGRYMIPYLPDGVYADLRTASNIRFQLQAELTRIQNRISRWFNIYFPEYKTVYGKPDAKSGMLILKAAPLPEDILTLGIDGVNQIWRDAKLRAVGKARAKTLIKAAEHSIGSKEGTMSARMEIRMLLEDYESQNMRLQEVMVLIEELVKEIPMAEKLLEIKGVGIRTVSGFLAEVGDISRFNNPKELQKLAGLALVENSSGKHKGETTISRRGRKRLRYLLFEVAMSLVAKNPEFRELHNYYTTRRLNPLKKMQSLMAIAAKLIRVFYAMLTKGVDYDPKKMVSDIKRPAVYLQAA

SEQ ID NO: 216550 - protein, 436 aa, unidentified
MTLINFVAANQKYYAFNLLSVFIMVFWSVQYLLQHLLVQTQVSHQLLQPLILILQLPQTPQFRHARPGKFFLPVNGMDYFLPLRLTVRNVLTRRITMNIVFLGIDLAKNVFQLCGLNQAGKPVYTKRTGRKELLQTLANIPACLIGIEASTGAFYWQREFEKLGHKVKVISPQYVRPFVRGQKNDGNDAQAIAVALMQPTMQFVPPKSPEQQDIQALHRARQRIVNHRTATVCQIRGLLLDRGIPIGSAVSRARRAIPLILEDAENGLSSRMRRTIAELYDLFNDLGRRIHFLDKEIETVFRQSEACPRIAKVKGIGPKTATAVVAAIGKGTEFKNGRHFAAWLGLVPRQHSSGDRQVLMNMTKKGDKHLRTLFIHGARAVVRVATNNNDGHMNQWVNQLKERRGFNKTTVAVANKNARIIWSMLRNDTGYQVVCN

SEQ ID NO: 216551 - protein, 351 aa, unidentified
MLIIGVDYHPSDQYIAFVDPETGECGEQRLNHQNGEAEQFYRDLKQRGVSVRVGMEATGYSRWFERLLADLGIEVWIGDAAKIKTKRVRKQKTDRQDAQLLLKLLLENNFPRVWVPSPENRDLRQLLWHRHRLVQMRTRIMNQLQALAMNEGNRRKKKLWSALGRAQLEKLPLATWASRRRQDLLELLDRMNPSIEALTAAVEQEAKKRPEVLRLMTHPGVGSITALAFVLIIGTPERFQCGKQIGSYVGLIPSEDSSAGRQRLGHISKQGNALLRYLLGEAAQAAVRCDSDWRRRYVHLAMRREKNIAKVAMARRIAVRLYWMWRNGWEYAQSVNFGSNAGQLATGHGLN

SEQ ID NO: 216552 - protein, 330 aa, unidentified
MDKIEACGIEVSARELVVALGDPQGGTRLRRFANRAVGHRALLRVLQSLGKVRVVLEATGMYGLDVALALSAEEGIELMVANPRAVRHFAQAMMQRSKNDQLDAVVLREFAARMPFRAWVRPPENQLELWAIARRLEALTAQRAAEKNRQHAAGLSHAVPIVVRREIANSLRFLQRSIARLQKEAQRRIAADAQLQRCYELLCTIPGVGRVSALHTLGELVLLPKDRDVRQWVAYAGLDPRECSSGTSLRKRVRISKVGNRHLRRALYMPALVASRRQPQVRAFYERLQRRGKNKSQALTAVARKLLHAIYGMFRTLRPFDGTLLFAPAS

SEQ ID NO: 216553 - protein, 444 aa, unidentified
MGDKIRTINPQAAGIDIGADKIFVCAKDDEYKIFGCFTQEFIRAAAYIKENNASDVAMESTGVYWVALKDVLEAEGIKVDLVRAGDAKQLPGRDKTDGADCQWIRTLHQRGLLRPCMIPEATIRELRTYMRLRQDHIDMAAQHIQHIQKAFTLMNLRLQQVISQMMGVSGRRIIEAILAGERNAEKLTLLCDKQILKKKKQEVILSLQGNYKEEYLFMVSQAYKGWQFYNNLIEECDVKINAWLQQSTKNKEPLQEMTKEKIIRHHKPKIENFHEKMLLLNDGKDVSQLPGLTDYTVIQIIAEVGKDMSKWKTAKHFVSWLGLAPRKHYSGKLKRHQRGSANTKAGQIFKESAQPILKSSKIAMGSFGRRIRAIKGPAVAIKAVARKLAIMFYNSMTKGIQFVEQGIENYEKQIKQTEFDKLNRWAARMGFTLLSNPSVVVVNQ

SEQ ID NO: 216554 - protein, 392 aa, unidentified
MCNAAVEPPRSGVGLNELILIKAPLNHTRNRYDSGTQFFQRRPQMRFYTKQHKFSCGIDLHARTMYLCILDQEGKIVLHRDIKTNPDTFLKTIAPYREDIVVAVECIFTWYWIADLCAEKGIPFVLGHALYMKAIHGGKAKNDKVDAYKIATLLRGGMMPMAYVYPSAMRSTRDLLRRRTHLARKRAELIAHIQNTNHQYNFADMGRISRKCDRNKAGVADRFTDPSVQKSIELDVALIDQYDKLLNRLEHELSLIAKVHDADSYFRLRSIPGIGRILGLTILYEIHDISRFPRVQDFVSYCRLVKCAKESAGKLIGSSGKKIGNVHLKWAFSEAAVLFLRRNPEAMKYRARLERKHGKAKSLTILAHKLARAVYHILTKKEVFHPQTFFAK

SEQ ID NO: 216555 - protein, 389 aa, unidentified
MDQAVVLGMDPHKRTVTVEAMTGSETVLGGGRYATTREGYRAMLAWARRFADRVWAIEGCAGIGHHVAARLAADGETVIDVPPKLSARMRVYATGQGRKTDATDAHSVALVGVRISGLRPFVDDAGLGVLRVLVDRRRSLGEDHVRMTSQLHALLLELIPGGAKKDLSARQAKKLLATVRPRDAAGKTRRRVAAELIADLERVYQRQKAADKELSALLAETGTSLTRLPGIGPQGAARLLVEVGDITRFPTKAHFASWTGTAPIDASSGDQVRHRLSRGGNRQINRVLHIMAIVQLRNPSDGRDYYDRKKADGKTSMEAIRCVKRRLSDIVYRTMLDDALRHKRTGPVGHSGTSLSSSAADSNPVIDASDQSLPGPVPIEPTPPLKTAS

SEQ ID NO: 216556 - protein, 355 aa, unidentified
MSHQPNSAIAVVGIDIGKNSFHVVGQDKRGEIALRQKWSRGQVEARLANQSPCLIGMEACVGAHHLSRKLQALGHDARLMPAKYVRPYSKGQKNDFRDAEAIAEAVQRPTMRFVATKTTDQLDLQALHRVRERLVGQRTAIINQIRAFLLERGIAVRQGLRFLRAELPSILAKRTDVLSPRMLQIIEGLADDWRRLDERIEGLSNEIAALACQDKGCERLMTVPGIGPIISSAMVAAIGTGDAFAKGRDFGAWLGLVPKQISTGDRTILGSISKRGNRYLRALFVQAAWVVLVKVGPKHWERYGLKSWIEAAKKRLHHNVLAIALANKLARIAWAVLHKGRAFECVKTDATPRPA

SEQ ID NO: 216557 - protein, 404 aa, unidentified
MWYTGIDWADEHHDALTIDEKGHQMGSIRVDHSPHGFAKLDTFLGQIIGSESKEHMACMIETTHGLLIMHLLEAGWPVYPVNPRTVDRRRSASGAKTDLIDAYLLAKTGRADFADLHRLIPDSDKVAELKHLTRDQDSLIRTQTRLVNQLTACLKAYYPVALDLFSQLQQKSTLGFLQTYPTVEAARAASLTEIQQQLKQTRHPQPAQAAASIVEMLHHPQLQADAVLTRTKSRLMLALVSQLLPLLEQIATYDKEIHTLFLTHEDHAIFESLPRAGQHLAPRRFSEIGDDRTRYQDASSLQALAGTSPVLYQSGMYSKAHRRLGCIKPLRNALHQFAWQTTQSEAWAKDYYQRKRMEGKSHTVAIRALANVWVRIIFAMWTRRECYQTATFELAQQQHARRAA

SEQ ID NO: 216558 - protein, 358 aa, unidentified
MFKDNIHFVGLDLGDRSSQLTVIDSEGELVEETRLPTSKVSFERKFAHLPRARVAMEVGTHSRWASQLIEGLGHEVLVANARKLRAIYDNPRKGDRADAETLARLARLDPQLLSPIHHRSPEAQADLSVIRSRDSLVRSRTLLINHVRGTVKANGGRLPGCSAASFHNRVKESVPESLRPALLPILETIASLTGQIRGFDRQIEELCSQRYPETRLLKQVAGVGSLTALTFVLTLEDPKRFHKSREVGPALGLVPRRDQSGDQDPQLRITKTGNVYLRQLLVGCAHYILGPFGPDCDLRRWGLKLAERGGKNARKRAVVAVARKLAILLHRLWKTGEVYDPYYRSEERELLSQAAEAA

SEQ ID NO: 216559 - protein, 339 aa, unidentified
MKKRYLGVDLHRNCFTVCTRTEEGTVEVREWQIRTLKEFAETVGGNDEIAVEATGNVRLFVAALKERGCRVVVVNPHQFQVISRSVKKTDEQDAKVLAEFLSKDMLPEVRMKDDVHARVASLAQTRDRLVKLRTVLKNKTNNLLAARGILLRKESLSSEKGLAEVLSAPVSELERMELEILVQEIRHLNESIKKIEKLLHDQGSKLPGWDNITSIKGIGETGGSVLLSTIGNVANFADEGKLAAYFGIVPRVSNSNETQHSGRITKQGCKLGRTALVQCALIASRYSPYLNSYYRRIAAMRGTGKAIIALARKFLGIIYKTLKNNWIFKDFPNFILASE

SEQ ID NO: 216560 - protein, 408 aa, unidentified
MEVVHERCCGLDVHKKIVVACLLTPGGTTRRTTEVRTFGTMTRDLLHLADWLTAAGCTHVAMESTGSYWKPVYNILEATCTVLVVNAQHMKAVPGRKTDVKDAEWIADLLQHGLLRPSFIPDRAGRDLRELTRYRMSLVRERTAEVNRIQKVLEGANVKLASVASNIVGVSGRAMLTAMIAGVAEPAVLADFARGRLREKRDLLEGALEGRMNQHQRFLLNVQLHHLDDLDATIAQVSEEIELRQRPFTEAAARLMTIPGVGPRTAQTILAEVGPDMSRFPSAGHLSSWAGLCPGHHESAGKRTSGRTRKGSPWLRGALVEAAQSAGRSKTHLGEHYHRIAARRGKKRAAVATAHTILVAVYYILGREQVFEDLGVNYFDERRSQRTTRRLVRRLESLGYTVSIESAA

SEQ ID NO: 216561 - protein, 386 aa, unidentified
MKTRNPPIPTRDAENAAVIFVSIELSKKAWLTAIHTPLADKVGLHKLEAGDSASLLALIHRITKKVERTMGGPVTALSCYEAGYDGFWLHRVLAEAGIINHVIDPASLQVNRRARRAKTDRIDAMGMLRALMAFHRGEDQVFSVVQVPSIEKEDARRVHRERQRLIKERIQHVNRIKGLLATQGSYDYEPLRRHRLERFEALTTAMGRPIPYHLRDEIIRHLRRLELVLEMIGAVEAQRDSVVEASPAANESGRKIQQLVRLRAIGPQFATVLVGEVFHKHFTNRRQVASYAGSSPSAFNSGSLIREQGISKAGNPRARTTMIEMAWLWLRYQPHSALSCWFHERVGTGTGRVRRITIVALARKLLIALWRFLETGLVLDGAELKA

SEQ ID NO: 216562 - protein, 359 aa, unidentified
MREQRNKISFRGQKIYVGIDVHLKSWSVTVLSETSVLKKFSQRPSPEALHGFLTRSYPGAEYRSVYEAGFCGFWIHERLTALGIDNIVVNPADVPTKSSEKLRKSDAVDSGKLARGLRANELKGIYTPDSVSLEMRSLIRLKNSITKDTTRQKNRIKSQLRYLGIGIPQEFLEPFSNWSKRFFAWLKEVETLTPSGRQALDIQIRHLEELRRQKLEMTRALRALAKTDRFREPLRLIMSVPGFGQVTGMVFLSEICDISRFRNAEQLAAYIGMIPMCHSSGEKDGTGDITVRKHVVMRCNLIEAAWVAVRQDPAMNLFFTEQCKRMPKNKAIVKVARKLVNRLYFVLKHHTEYVNSVVS

SEQ ID NO: 216563 - protein, 401 aa, unidentified
MNAVGIDVSKGKSMVCVMRPFGEVVLEPFEVLHTAQSLNDLAGKLKALDGETRVVMEATGNYHKPVAFVLHDAGLFVSVVNPVLIHDYDNNSLRRVKTDRKDAVKIANYTLDKWTRLRQYLPEDDTRLALKNCYRQYQQAVAVRTMLKNNLISSLDLTFPDANKLFSSPAKSNGCEKWVDFIGDFWHSECVSSLSSDAFAKKYLKWCQKHRYNFTRSKSDTIYACAVNAASLPKSPTSKLLIQQQVAQLKAVSQSVAAFQQEMLRLSQQLPEFDTVMKMYGVGPSLGPQLMAEIGDVRRFSSKKSLIAFAGIEPQPNDSGKIVGNDSGISKVGSAVLRRTLFLIMTVILKTQPQDEPVFQFMNKKRSEGKPYKVYMMASANKFLRIYYARVKAVMDSKHSK

SEQ ID NO: 216564 - protein, 409 aa, unidentified
MEKLIERCGGLDVHKATVAACVRIPGPKGKREQHVRIFGTMAAELLALRDWLLAYGITHVAMESTGVYWKPVFYVLEEAFTCLVVNAAHIKQVPGRKTDVQDCAWIAQLLEHGLLRGSFVPPAPIRELRDLTRYRKVLVQERTRAANRLHKVLQDAGIKLASVATDILGVSGRAMLGALVEGTSDPNALAELARGSLRKKLPALREALVGRFRPHHAFLVAQLLAHVDYLEEAMATLSARIEQLMTPFAEEQARLETIHGIKRRTSEVVIAEIGVDMSVFPSARHLTSWAGICPGNNESAGKHKSGKTRKGNRWLRAALTEATLSGVQANDSAFGARYRRILRHRGHKKAVVAVAHAMLRTIYHVLANCRTYQNPGADYFDRRHAQRVTRRAIHTLERLGYRVTLEPAA

SEQ ID NO: 216565 - protein, 343 aa, unidentified
MKITAIGLDLAKSVFQVHGVDDRGHAIVRKQLRRDQVVPYFAKVPPCLVGMEACGGAHHWARRLREFGHTVRLISPQFVKPYVKSNKNDAADAEAICEAVARPNMRFVPIKTVEQQSVLSVHRVRQGFVKVRTAQANQIRGLLAEFGLILPQGISNVARRVPGLVDEAAELPVPMRQLVNRLLEHMKILDQQAKELEAQIKAWHQGSELSRNLEAIPGIGPLTASALVASIADAKSFKNGRQVAAWLGLVPKQDSTGGKPKLLGMSKRGDTYLRTLLIHGARSAIVSAQRWHKPNAWLERLLSRRHPNVAAVALANKNARTAWALLAHEREFRPDYVPQPPIA

SEQ ID NO: 216566 - protein, 410 aa, unidentified
MRIIALDVHRSFAQVAVLENGKLRDAGKIGLECGCLLRFARKLKPDDEIVIEATGNTSAIVRLLSPFVGRVVIANPILVRAIAWAKVKTDKIDAAVLAKLHASGFLPEVWMPDEETETRRRVVAERTQLVSQMTRLKNRIHSVLHANLIPPYKGVLFSQRGRAWLEAQPLAEDQRRVVLRHAGELDRLGAELGDVDKSLAQEALDEPRVKRLMTITGVNSTVAMSVLAAIGDIHRFSSPEKLVSYFGLNPRVRQSGDRPAYHGRITKQGRAHARSMLVEAAWIISGAPGPLRAFFIRIKDKRGKHVAAVATARKLAVIVWHMLTKDEDFTWSRPALLQWKLRNLELKAGHPSRRGGKQKGSAADYSNKSVRDSERETIGNAEEEYRRFVATWKQQSRKRRSGATNEARRS

SEQ ID NO: 216567 - protein, 361 aa, unidentified
MNATTAAIDLAKNVFQVALADANARVLEQHRLTRAQFERFFDNRKVARIVLAACGSAHHWARVFTARGIEVMLLPAHYVSAYVRRSKTDAADALALLEAARCADIVAVKVKSVEQQSLQAVHRTRSLWMGTRTSRINALRGFCRELGLHVPVGARTGLEAMARAVADDQSPIPALLRPIMQQLLEEIRVLEVRIAQLERQLAQLARECSACRLLMSIPGVGLLSATAILAATSGNVAHFKSARHFASWFGLTPKESSSGGTRRLGRISKMGDKYLRMLLTHGARSVMRAATVAKLRGQELLGVRHWALQLQGRSNHNKAACALANKMARICYAVLRDQTPFGQPATRLGKKMQRQSFELAH

SEQ ID NO: 216568 - protein, 390 aa, unidentified
MDIEDIEVFIGIDVGKTDHWATALNQEGRKVFDRALPNDEDRLRALYEKLASHGSLLVVVDQPATIGALAVAVAQDMGITVGYLPGLSMRRIADLTPGSAKTDAKDAAVIAGAARTMPHTLRAISTSDEETAALSMLTGFDLDLARQVNQTANRIRGLYTQIHPALERVLGPWLEHDAILEVIAAWPTPADLKRAGKARIDARLKKHGCRRHATWAGQIVSALELQSVTVAGTDAAAVVLPHLARQLIALHAQRADVAAQVETLVQAHPLYQVLTSMPGIGVRTAAVFLAETLGKTFDTGAQLASYAGLAPVTRRSGSSIRGEHVSHGGNKRLKRAMFLSAFASLRSDPVSRAYYQRKRDQGKPPWARPSSPWLPSCAPTSSSWTSRCPA

SEQ ID NO: 216569 - protein, 337 aa, unidentified
MYYTGIDLHKKTSFITTIDTRGKIVTRANLQNVEEDILAYFGNLGDETKIVIESMASWYWLYDLLTGEGLEVVISNPVKTKAIASARIKNDKLDSHMLAQLLRADLLATVHVSSLQTRQLKELLRHRHKLVRDCVRMKNRIHNIIAKNNLSVPVSDLFGKKGLVFLSQVQLPSYQRHQVDTYLGLYQQLKEHTVALTEQIKQAATRDSMAQLLMTIPGVGPITAMFIAAEIEDIGRFKSYRHLASYAGLVPRLDASADKQRTGRITKQGSPYLRTALVEAAQATTRTKSRLNVFFRKRIVRSGYQKAIVATAHKIIQYAYYILRDQTPYRDSIDALA

SEQ ID NO: 216570 - protein, 423 aa, unidentified
MAYRIAGIDVHKKKLAVVVADVEVEEEYEFEGRWYGSVPQPLQLLCEWLIEQQVDEVVMESTAQYWKPVWGALERWWKPICEKREGAGRMSGSLHLAQALSNRGRRGRKRDFRDAERLVKRLVSQELNLSFVPDTEQRLWRTLTHTRYQRTREKVRLQNQLEALLEEAHIKLSSLVSDLLGASARRMLKALAEGETDPAALATLGDRRLRATPAELHDALGACTELNPVYRRLVKMTLEELHLIEEQIGQIDEDVASLLREHQDAVQRLAEVPGLGVNSAQMIIAEVGAKAAAFASAKHLSSWVGASPGEEESAGVNRSKRSPKGNRQMRRVLNQAANAAAKHKGSIFEIVYRRLVLRLGHYKTIGAIAHRLCQLVWIILHKGVRYEERGPAVREKSKRARTVRMIRTLRTLGYRVEPLENPA

SEQ ID NO: 216571 - protein, 409 aa, unidentified
MQVVHEVCCGLDVHKKSVTACVLWAVNRRRQTREFGRFTRELLELADWLRECGVTHVALESTGVYGKPVWNLLEGPFEVLLVNAQHIKAVPGRKTDQKDSEWIADLLQHGLLRASFVPPTPTRELWDLTRYRASLAQEINRIANRVQQVLEDGNIKLASVATDTLGASGRAMLEAIVNGEQDNQRLAELAQGKLRNKIPELERALEGRVTPHHRFLLRELLDHLYLVESKMRRIEPEVEERLRPFQSEVVRRCTIPGVDRVTAWGLLAEIGLDMKQFPDVRHLGSGAGLGPGSHESAGKRKSGKIRKGNLWLRRCLCQAAWAVSTKKNNYLSALYRRLAARRGVKRATIAVAHNLLAIAYYILRDQTCYQDLGPDYFDRRNPEGLRRRLTRRLEGLGFKVTLEPLANVA

SEQ ID NO: 216572 - protein, 368 aa, unidentified
MSTKLKYVGLDVHKDTTVVAIADGGRDGEVRVYGSISSDLHAVEKMMAKLRSDGSTLRVVYEAGPTGYVLYRRLLQLKIECIVVAPSRTPHPKGTRQKTDRRDAIMLARLHRAGELEGIHVPDTADESIRDLTRARADAVHDLTRAKQRLKSFLLRQGYRYTGKANWSAAHQRYLRELVLPLPALKAVLEEYLLAIDQSVQRVSRLEELITTHVPAWSRYPMVEALMCMRGFQLTAAAVLVAELGDLRRFEHPRNLMAFLGLIPREHTTGQSRKLGEITKNGNTHARWILVEAAQHALLPPKVSTQLSLRQQGQPTAYRELAWKAQVRLHKRAWLLLQRGIIKPKVMIALARELSGFIWCLLRQVPQT

SEQ ID NO: 216573 - protein, 355 aa, unidentified
MGTVSYLPRDYDVFIGIDVDKNSFSFTVQDHNMMNRSKKIPSSPEQLYNYIGNNFSNQRVLCAYEAGPTGYNLHDYLSQKDQLCLVLSPFSIPKASNERVKTNRLDSERIVRYLKSGELRPIRVPSEPYRQLRQLIGMRENYSCQSTTAKQRIKSLLLFEHLNEHIDDTRQNWSGMYIDRLKQIPCSGTIRCKLDLLLADLAYCHTQQLRVLKELKALCDKHPDIDRYRGYLQSIPGIGSVIALTILARIGDPEHLANVREIGAFIGVVPKERSTGDTIQRGSVTRLGNNTFRRLIIEASWIAIKYDTELAQFYHRIKARHHPRIASRKAIVAVARKLTQRIYKVLKEQRTYEIR

SEQ ID NO: 216574 - protein, 346 aa, unidentified
MEYIALDVHKNYTWARVENGKGDRLYESRLAHVHGSIKNFVNRWTGGSPVAVETVGNWYWVVDEIEAGGGTPQLVNARLAKLMMGNVNKSDKLDCKGMNRLQRTGTLPTVWIPPSSVRDVRELPRTRMVLSRQRTQLKNRVHATLGKYGYTVQGASDAFGKKGRKIVEELLLKLPPHTQQALRLILNELDHVRDNLKEIEGQMLEVFSPCPQTHWLTSLPGVGNILAVVIWSEIGTIERFNRAEQLASYSGLVSRESSTGGKIRLGPVRRDVNVYLKWAFVEAANSSLLNAERCGYGHISRLYQRIKPRRGHGKAKVAVARHLSEASFWMLKKGEPYREPVSSTQR

SEQ ID NO: 216575 - protein, 334 aa, unidentified
MKYQHVVGMDIAKDSVQASCFDGTTFFDFSFPNQEKSFLKKIQKSIPKSDPSHILFVMEATGTYHLKLATALDKEGYSVAVVNPFIIKKYAEMLLKRAKTDRNDARLIAQFGFYQEVTLFTPKESLAEEITQVLKGLDQLKKERTNLKNYQEALTHHNEINSVVRDIYQKQLKEVEKAIKTLEAEAKRLVCQYAPKEYQLLLSIKGIGKCSATALLGFLQKMDRFSRGKEVASFLGLAPQISQSGKDKGKAWLSKKGNGYLRRLLYLAALSASRSNVQCRELYQRLLAKGKPKKVALIAVANKLLRQAFAVLKSGCPYDPHYLKLKSNLEVVLT

SEQ ID NO: 216576 - protein, 325 aa, unidentified
METKKLCCGIDVSHTKLDVCYQNNLGELFHLQVGNNNSGFQKIIEHTGVDYHFVMEATGVYYIRLAFYLHQQSCKLSVVNALSIKRYIQMHLERNKTDKKDAGWICRYAIEQNPPYWEMPDSAYFESKQLYNTIREYTEQIKRINNQLHSLRLLPVPSKDTIKSLEKIILCMEKEIKQLEQKLQLLLVEWQPEQLKSVSSIKGIGKRAAAMLIVFTQGFKHTQSHRQLISFAGLAPTQYSSGSSIQGKPRIYKRGGKNLRDVLYMCSMNAMKTNAACKTLYERLRANGKTGKQALIAVCNKLLKQVFAVVKNNTLYQPNYCSAKP

SEQ ID NO: 216577 - protein, 397 aa, unidentified
MYIVGIDIAKRKHEAAVIDGEGAVIIKPFSFTNNCSGYNRLLAMLAKAKLPLDEVSFAMEATGHYWLALFTRLQKEGFRVQVINPVQTNSIRSFYIRQAKTDPRDALLIAEVIRFGHFSESTLHPENIYELRELCRGRHAIVSMQADVKRKVVALLDQVFPEYETAFTNMFSDTSMAILQTCPTPKELSEMPLEELCHLIEVSSRKRFRMAKAQELQALARGSFGFAMAGDVFSTMIRLYAKHLDFLKQQVREMDRKIAEIMDTLDTPITTITGIGPTLGAYILSEIGDISRFSSAAKLAAYAGIDPTMRQSGEYNGVRNRMSKRGSPYLRHAIWLAASSAVLHDPALKFYFQKKRDEGKPYMASVGHACRKMVSIIYAVMRDNKAYTPHIPNEISA

SEQ ID NO: 216578 - protein, 322 aa, unidentified
MTEAIAPLDVFVGIDVSKSTLDLHADPINRSLSVPNTAAGIAAIIDTLKPWRVRLIVIEATGRYQRRLAADLLEAELPVAVVNPRQARDFARSLGQLAKTDRIDAQMLAAFARLPNHRLAEKTPENRLILEERSQRRRQVVQMLVAENNRLEGLRDKLTIRLIKQTIRLLDQQREDLDREIARLIESDDDWNNTHQIVTGVPGVGAVTAHHLISDLPELGKLNRQQIAALAGLAPFNCDSGKSRGQRSIRGGRKEVRCNLYMAAFNAMRCNPWMQRFAQRLRAAGKPYKIVITACMRKLLTLLNLLVKTNQHWNPKIVALNS

SEQ ID NO: 216579 - protein, 409 aa, unidentified
MLADELDYVVGVDTHRDEHVLAVVAAATGAVLARRAVGANAGGYSAALRFAEEAADGARSWAVEGAGHYGAGLARYLASHGETVLEISRTPRAERRLRGKDDQLDAVRAARAALAGETLALPRSGGRREALRLLLLARRSAVDVRREALVQLRSVIVTAPERLREELRGLPVGRLLERCGRLRRSGSAGADELATRLVLRSLARRIEAATAEAAELEREILAHVRALAPQLLDEPGVGPIVVAQLIVAWSHRGRVRSEAAFARLAGVAPLPASSGQTTRHRLSRGGDRQLNRALHTIVLHRRQHDPKTRDYIARRTAEGKEPPRRHPVAQALPRPPPLPATATPGAASGLTGHRSFIPEHSPIRAPSLSRVGLLVFGFWETKAIAPEFALPAKNLIVDAVRRGHGCRAE

SEQ ID NO: 216580 - protein, 361 aa, unidentified
MKKLSITPIGTPVGVDVHKRRCKVVEFHQGEIKVRKPMANTREEWLEMLTELPPDAEIGLEVSTAGYFAMSVLEEAGWRERAHWVHTAGIDSNRRQKNDRLDAERLARKLAAHHLDPLPEAWFPPPAIRELRLRARQRCWLALLRTKAKNHVQSLLAMHGLQAPGSDPFGAAGQRWLEEQKLPRPLTESIPQIQRLLKLLEEEIKISEKHLQAVDGQFPELALLRTIPGIGPILSAIIWSELGSMERFDSAKALANNTGLVASFYDSGETQVSGPITRQGSRWLRWALVTAANVVIQYPNPFSRRYHRLRRKKKPNVAKAAIAHSLARCVYGVLKHGCPYREDRWGRKVGALEQETRGSHR

SEQ ID NO: 216581 - protein, 345 aa, unidentified
MEYYAGIDVSLDTVSVCIVDGTGKIVREAKVATEPDALVSWFLGIGLVAERIGMEAGPLSQWLHEGMREKGLAVELLETRHVRSAFKTMPVKTDRKDARGIAQLMRLGWFRPVHCKSFPAQEVRALLTTRKLVLNKRIDVEMGLRGILRGFGLKIGPTTPRTFETRVRELVDGHPTLLVVAEALLAARVALVTQLKGVEKRLISLARDDRRARLLMSAPGVGVIVALTYVSAIDDPTRFRSSKAVGPHFGLTPKRYQSGETDVSGRISKMGDAGVRAALYEAANVILTRPVKGSTLKSWAARLAARSGMRKAKVALARKLAVVLHRMLLDGTSFVADKAAARAAR

SEQ ID NO: 216582 - protein, 457 aa, unidentified
MGKGSGMTRGDVRRNARRERLRGLLPRDGAVIGIDLGDVKQALAVTDHDVRVLARTTVRVPASGLGAAVDWAVAQAAAKGHAGVTVACEPTGARWMQVQRLCAERGLPLVCIQPLVSHIAREQQDYTPHKRDESDSVLIARLAAELHCYVPEELEEAWAHLRHLGRRRAQLIGAATASVLRVRDFLSVAWPVVPAACAEPFGSVTWLAGLQLVAGRCGGQPEKLAAAGLGEFTAAVRAGVGGWGGKRISGRVCRAVFAALADAEGAVTWCRRGLFRRIADELGDLARTRAQLRAVEADMVAVLAELGLSRLGDIPGLSAVGAAAILAETGDPRRYETSSSLVKHAGLSPAENASGAFEGQARISRRGRPGLRLAAWRAVWPLLVHNPVLAAKYAALAGTAAQAGVRSRRGAAAAARAKARVACAASLLRWIWCLVVHGTSWDPAAASGTASCPAQAA

SEQ ID NO: 216583 - protein, 346 aa, unidentified
MLHVGLDLSRKRIDVCLISDQGELIDRVGAIPDRGGLYGLARRVAVYGEPVRAVVESMNGARFVHDELTAHGWEVLVADAQKVKGLAPLACKTDKIDSRVLAELSFRDLVPAIWLPTVELRREREISRWRLHLVKHRSTLKNRVHSTLITFGHQRHMSDLFGVSGRRLLQELDIPEPWRSHVDASLVLIDDLEARITQIAKQLRRSGADHRYIPILMSAPGFGWITSFTVACEIGDISRFASPVKLTGYTGLCPRVKQSGQMDQRGPLSKHGPKYLRWGLMEAAIAASSHPLYRERYQRTKRRLGRQRGPKVAQIDLARQLTEAIWYMLTRNQPFAPAGAIYRLAA

SEQ ID NO: 216584 - protein, 364 aa, unidentified
MDTHKKQHQVAWVHPETGEIQEFTVANSVREIERMVKRLRKQAAGEIHVCYEAGLCGFVLKRRLEKLGCVAKVIAPSLVWRKPGDRVKTDRRDAKKLLAQFVAGQLTEVFAPDPVQEADRELTRCRESAQTDLKRARQRLNSLLVRHGYIYPEGNLWTNKHAQWLKALVFDQPKLRTVFEEYFSEIEHCLGRVQSLDKQVESLAQSERYRSAVGVLRCMRGIDTLTAMTLLTEVFEFGRFDSPRALMAYLGVTPSEDSSGESRRPGAITKTGNRRVRRILTEAAWHYRHPYAVSKTLKLRRKDQPAWAVDLADRAAKRLYRRYRHLIERGKSAPVAIIAVVRELAGFVWAMLRQLQQQTQSPSP

SEQ ID NO: 216585 - protein, 321 aa, unidentified
MKYTPVGVDIAKHLIQVHFIDEHTGEVIDKQLRCQDFLVFFSNREPCLIGMEACGGSQHWARELTKLGHKVRLLQARFVKAFVMGNKNDVMDARAIWMAVQQPGKEIVVKTEEQQSVLILHRTRRQLVKFRIAQINALHGTLLEFGETIHKGRAAMEREFPEALERMKERLPPYLITVLENRYNRLNELDSLIEYITSVARQNATCKRLLDIPALGHLLRRQRWLLWGKHQRLNPGREFAAYVGLEPRQTGSGGKIRLLGISKRGDTYLRTLFIHGARAAALLTKEPGPWITELKKRPSGQCGNRRHGKQAGTNNMGDSRP

SEQ ID NO: 216586 - protein, 352 aa, unidentified
MQNVTTIGIDLAKEVLAVCAMDVTGAVVYSKVMKRDAFISWAEQLPPSTVVMEACGSAHHWGRWFAARGHTAKLIAAEFVQPFRKSSAAKNDRNDAEAIAIASRQPTMRYVAIKSVEQQSILAWHRMREGWKEERTVLLNRLRGLLGEFGHWPSRSADKLIRALPVLSEDHTLPEGMRSILMEAQQQLHAIHERLARCDQHIVQHVKSQPQATRIQAMTGIGTLTASAATATVVDAKHYRNGRQFAAWLGLVPRQMSSGGKTKLGRISRRGDAYLRSLLVQGARSTLQSALRQAPDKADRLQRWIVTLYGRVGYHKTLVAIANKHARAIWAMLARDEAYDPQAWQRGNLQNA

SEQ ID NO: 216587 - protein, 315 aa, unidentified
MQTIIAQCVGVDISKDTLDVHLHPANLKRRMVNDPIGLAELVTWLADYQITSVVFEPTGAYHHAFERHLAGAGLPLVKVNPRQARRFAQAIGRNAKTDAVDAAMLARLGATLDLPVRPAISQTLDEMKELYVARRALVKDRVAAKNRGQIRRSALLKQQAEERLKHIDSQILAIDAALRCLRDADAALKARFDILVSIPGIGENSALAILVEMPELGAIENKAAASLAGLAPLARDSGHRRGKRFIGGGRAELRHALYMPALVATRFNADMKAKYQALIAAGKPPKVAITAIMRKLLILANALIRKGDKWAETIA

SEQ ID NO: 216588 - protein, 418 aa, unidentified
MQTELSRFTAIIGIDWADKKHDICIQVTETGRREVLQIPHRAEKIDDWARSLYRRCGGPMAVALELSKGPIVAALQKYDFFVLYPINPSSLAWYRRTFTPSGAKDDPTDAEFALDLLLRHPDRFQALEPQSVEMRALMTLVEQRRRLMNDRVRLTNRLRNALKQYYPQALEWFDHIDTKLFCDFIKRWPSVPQARRARKATLEKFFRTHNMNRKALLERRLTAIKSAVPLTTDEGVVVPYRLLALTLVEQLEVMLVCLDRFDEEITKLAPQHPDFGLFNCLPGAGPSYAPRLLVAFGEQRERFGNAAELQKYSGIAPVTERSGQSTWIHWRWQCPTFLRQTFVEWAAQTINKSYWAGLYYYQQRAKGCSYQAAVRALAFKWIRILYRCWITRTPYDEAKYLKTLQERGSPLLKTAQTA

SEQ ID NO: 216589 - protein, 420 aa, unidentified
MTSQNSIPADAVLVAIDIAKVRNEVLIEAPGHKRRRRLSVLNTRAEHDHLIEILQSYDRPVVCAFEATGNYHRPIAWRLVEAGFETRLVSSLALARTREALHNGWDKNDPKDAQVILHMLRIHSTQVYHDPLRAGINDVQELSKTHEAIANAKTEIQHRILTHYLPLYFPEIERFRGNSRSDWFFAFLDAFPTPSSITILTKEKFVEAAWDVVGRKVSKSQILMDIYETARTSIGLPLPLDAPAIRMFRMVVAEARSLIRQRNEIEAQADDLLRNSRDYQILRQISGIGPINALTIIAEAGDLRRFHHHRQFLKFCGLDLSTQQSGQYRGQTRLSKFGNARLRRTLWIAGQVAIRQRENGFRHKFERYIARDRDNPDLRRKAMTAITAKMARVVHAVIKSGSDYRPFVEGRVPGGRTSVS

SEQ ID NO: 216590 - protein, 339 aa, unidentified
MQVRTIRLDLAKSVFQVHGVSLTGDKVFTKKIKRAKLLEFFEGLPPCVVGMEACGSAHHWGRELRSLGHDVRLMPATYVKPYVKRGKTDAVDAETICEAVGRPTMRFVEIETEDQQALWTAHHTRELIVRQSNQVSNMIRGMLREFGYVLPTGAEAVVRFSKSHLEGDQPKIPKLANGVLGTPCYQLLGLSARIEGFSKLSESYDRRDANARQLMQVPGIGLITASAIVATVGDAKQFKTGRDLAAWLALTPLNKSSGGKERLGRITKKGDHYLRKLLIVGMTSRALMAKLHPEKVDIWTARMLTGKPVRLATVAIANKTARVIWAMLTRQANYWQPVT

SEQ ID NO: 216591 - protein, 345 aa, unidentified
MKHYVGLDVSVKETSVCILDETGKVCREMKVPSDPQDIVQVLKDPAWQIERIGLEAGPLSQWLFDGLAEAGLPVVCIETRHTKAFLKAQVNKSDRNDARGIAQMMRVNLFRPVHVKTVASQKWRALLTARKLLQEKALAIENDIRGLLRNFGLKVGAVGVIKFEERIRELVVGMPDLAEIIASLLDARQKLRDEVRKLHRKLLSIGREDKVCRRLMTIPGVGPIVSLAFTATIDDPARFKSSKAVGAALGLTPILNQSGESSRVGRISQCGDGMMRALLYEAAQVMLTRTIKWSWLKAWAMNVAKRRGLQRAIVALAHRLAVIMHRIWSDGTEFRWTRENTAAAA

SEQ ID NO: 216592 - protein, 414 aa, unidentified
MDIVHTHCAGLDVHKKTVVAAVSVPNPSGGWHQETHTFATMTGDLLALSDWLTRYSVTHVAMESTGEYWKPVFNILETNFEVVLVNAQHIKAVPGRKTDVNDAEWLADLLKHGLVKASFVPPEGQRDLRELTRYRTTFVRERATLVNRVHKVLESANIKLTSVATDVTGASGRAILAEVIQGTSSPATMADLAKGRLRAKRDQLIKALEGRVKVHHRFVLTELLCQIDNLDEAIDRFDQHIQEYCRPFEEAVQHLDTIPGVARATAEVIVAEIGTDMQRFPSAAHLAAWAGVAPASHESAGKRRSGRTRKGNRPLGVALNQAAHGASHTKNTYLAAQYHRLAARRGKKKAIMAVAHSILVIAYHLILRQEDYRELGGDYFDKRRPEATANRLVKRLEALGYTVNIQSQTAPIAA

SEQ ID NO: 216593 - protein, 454 aa, unidentified
MRKKRSPRHQKQNKRVLDQINHQAAGVDMGSDAVWICVGEHLSDEPVRSFGTTTAQLRASAEWMRSAGVDTVALEATGVYWVPAYEIYEEYGLRPILINSRAIRSFNGMKKSDFIDCQWIQLLHTFGVLQASVRAEAKMIELRGYMRQRRTLTEQCSEHIQRMQKALMLMNIRLDQAVSDITGVTGMSIVREILKGERDPTKLAALRNAGCAKSESEIAQALTGHWREEQLFVLEQTVRMWDFCQSLMRECDQKIQAVVEVLPVKTEAAASTRSKPRKNQVSFDGRTLLHRRLGVDLTRIKGLEVLTILTVISECGMDLSRFPTDKHYVSWLGLAPGTKKSGHRVLSSRSRKTTNRAATALRLAAQSLLKSDSELGAFGRSLRGRLGPEKAITAVAAKLARRIYLSLQTGRVYEDRGAAYHEQQHRDRNIATLHKRAHRAGFQLVPLSSAQGVS

SEQ ID NO: 216594 - protein, 352 aa, unidentified
MSKQVTTATPKLFIGLDIHKKSWKFHFTTDIVIGSGHSFPPKTELIKNYVDKNYKDYEVSIAYEVGCCGFKPARDFISFGWDTFVVNPADIPRPSKSKYMKTDKIDAKNIARQLRAGNLKKITIPDLERESLRSLTRQRTALVRNFRRVKCRIKSLLLYLQIEVPQDMECPKWPIKFLKWLDDLDLQYSSSNATLKSMLDQYRFTDQQLKQISNNMRSYCKTNSKKDYMLLRSVPGIAGLTAAYILAEVGDIRRFTSFKKFASYVGFIPSMQQSGEGIYTGGSTPRANRHVRNMIVEASWSAIRTDPVLQNYYRSHAGKNSKAAIFKVGRKLLSKIMAVIKTEIPYSVGVVK

SEQ ID NO: 216595 - protein, 387 aa, unidentified
MPRPNDLSRSLVALDQNSTIIAVVELSHSSWLVGGIVPGIERQPRKKLEPSPERLLALLHRWRDEAVRAGCKITRIALAFEAGRDGFWLARWLEARGVEAHVIHASSLAVSREHRRAKTDRLDTELLKRGFLGWLRGERGHCSMARVPTIAEEDAKRPNRERDCLVGERTRIVNRIKSTLARLGIHTFKPTLRKAADRLATVHTPEGVPLPPNTLAELQRDMARLGCVVSQIKEIEDVRQKRLEQQHETGPHAMVRLLARIVGVGVETADMLVHEVLSRPMRDRRAVARYAGLTGSPDESGAQRREQGLARAGNARVRRGMIQLAWRFLMFQKESALALWYRARTADSRKGTRKTMIVALARKLIIALWRFVTTGEPLEGVVLRPAT

SEQ ID NO: 216596 - protein, 395 aa, unidentified
MQVMHPVCCGIDVHQKSIVCCILDGPLTSNEPKKYQTTFGTTTKELKAALDWLLEHQVTHVFFESTGQYWIPLFNIFSDSNLELVLANPQHIKNVPGRKTDVKDAEWIAQLGRCGLINQSYIPSQEVLQLRYLTRYHLSVKQRLTQIKNHIHIILQRANIKLTSYLTDIFCKTGQALLTLFIDGEVINEDNVESCIHGRIKASTRQLIEAMDGKLSTVDRFLIKECMEEYKLQKKISEELNIKIKAYILEHFPEEYQLLLTIPGISDNCCATILAEIGPNVDSFKTDKNLASWAGMCPGSNESAGVKKSSHTTQGNKYLKQALVMSVLSVQRAKEETFSLFYQRISSRGSKMKAIIACGHKMLRIIYKILQSHKPYDSQKALGLRQQTNALSLTI

SEQ ID NO: 216597 - protein, 361 aa, unidentified
MSTIAEDDVRVVAGVDTHKEFHVVVVLDELGRKLDMATFAATPRGYRELTGWVTDFGEVLAIGVEGTGSWGAGLCRHLRERGLNVIEVNQPDRHKRRRKGKSDRLDAEVAARAVLAGDATALPKSGDGPVEALRQIRVARAGAMKARTAAANQLHSVCDTAPDQIRSQLRGLSTRRKIAIASRYRPGDPLTPSGAAKRALVTIARRWAALDAEIAELDRAIKTILDAIAAPLLARHGVGYETAGALLCTAGDNPDRLATEASFASLCGTAPVPISTGNSNRRRLNRAGDRRGNSALWTIVMARLRSGHAPTVEYLQRRVAEGHSKRDAIRCLKRFVARELYGDIQAITAAQTTKSPLEIAA

SEQ ID NO: 216598 - protein, 338 aa, unidentified
MKLYGGIDLHSNNTVVALLDDEDHMVYHKRLANEVAGVLEALAPYREAIVGLVVESTYNWYWLVDALMEAGYRVHLANTAATVQYSGLKYSDDDSDARWLAKLLRLGLLPEGYIYPKAERAVRDLLRRRLRLVQQHTANLVAVQNLLARNRGRALSANAVRRLTPEAVERLLPDANLALAVQSTLLAMRGQEAAIELLERQASAQVHLRPAYRHLLTVSGIGQVLGLTIVLETGPLERFAQVGRYASYCRCVGSERLSNGKRKGRGNAKNGNKYLAWAFVEAANFAVRWNPAIKRYYQRKRAKTNGIVAIKTVAHKLARACYFILRDGSDFEVSRAFA

SEQ ID NO: 216599 - protein, 358 aa, unidentified
MKAQVKKIDFTDQNIYAGFDAHLKSWKVTIMADNVVYKTFTQPPKPEVLFNYLQENFPGGTYHTAYEAGFCGYWIHDKLVSFGINSMVVNPADIPTTNKERVQKEDKRDSRKIARSLSSGNLTPIYIPSLKTQRDRSLLRTRAMLVRDLARYKNRIKSFLYFYGINIDSSFINPQSHWSNRFMSWLESIDMGEESGKEALNVLISECKNLRASILNITKQVRRLSQTETYQERVVLLRSIPGIGLLTAMIILTELETISRFRNIDKMCGYIGLVPSTKSSGEKEKTGDITPRGHNVLRTAIIESSWTAIRNDPSLMRSYLSYKQRMDENKAIVKIAKKLLSRIRFVLTNNKPYICSIV

SEQ ID NO: 216600 - protein, 355 aa, unidentified
MNSEKYIGMDVHKESISIAVMNGAGKIVMECVIETKASVILQFIHGLSGDLQVTFEEGTWAAWLYDLLKPHVTKLVVCDPRKNASMKEGNKSDKIDARRLAELLRLNHLSPVYHGEHGLRSLKELVRSYLTITKDLGRVMSRVKAIYRSGGIPCTGKQVYAPRHRAEWLGKISELGVRRRAEFYYQQLDALRALRKQVRRDLLAECKKHQAWKQLCQIPSIGPIRAAVLLGILQTPHRFRTKRQLWTYSGLGIETRSSADHRSVDGQLERAKKQISVRGLNQNCNHDLKNLFKGAAIVASSKPGPFQEFYTALLTKGIRPEMARLTLARKIATIALMVWKRGASFDAQHLKPQTA

SEQ ID NO: 216601 - protein, 323 aa, unidentified
MMLEKKDSLLVGIDVSKATLDVARSDVHEVCTFANDEAGIAQLVKMLKPMSPTMIVVEATGGLEQAVIDALLDAACAVARVNPRQVRHLAKALGIEAKTDPIDARVLVEFARHATLRLVEKRSKTSVELEALITCRRQLIKTRTEQTNRLGTTRTKPARRAIEAVVKILNQQIDKLNAQIRKMIDCDDDLSRNDRILRSAPGVGPILSATLLCELTELGTIDRRQVGSLVGVAPFNRDSGRWRGKRSIRGGRTSVRNTLYMATLAAIRSNPVIRRFADRLKAAGKCNKVVITAAMRKLLTILNAMLRDQLEWSQLKLVQKLDI

SEQ ID NO: 216602 - protein, 424 aa, unidentified
MKRTQNEKILQIQNHTLVVGIDVGKDSHYARAFDNRGIELAKLLRFSNTAQGYEALDEWMRMIMEQKAKTEAIVGFEPTGHYWFTLGDHLQGKGHRLGIVNPFHVKCTRELDDNSPTKNDRKDPKTIAMLVKDGRFRDVYIPADLYSELREAVSERERLQGQLIALSNQIHRWLDIRFPEFITVFKDWGGKTAQATLKNFPTPARVMAAGAAGVLQVWQKHLQRSSLKKAERLVRAAEKSIGRTAGSEAAEAALANLLAQYDMIAGQRQRIEQLMQELLLRVPNAGKLLEIRGIGMVTAAVIISEIGDIRRFQDPRQILKMAGLSLKENSSGKHRGKTTINKRGRRRLREGLFQVMIPMLAINAEFRAMHQKNLTRLVNPLNKMQSVIALCGKLVRVIYAILTKGCLYDAEKMTNDMKRSMKAA

SEQ ID NO: 216603 - protein, 429 aa, unidentified
MNYNTQNAKIASITEKTLIIGIDVGSETHYARAFSWRNYEYSKKPFAFSNDEAGFAAFKEWMDDIAEKHGMEVIIPGMEPTGHYWLNLGAYLQEQGMKPVHVNPHHVKKSKELDDNNPSKNDRKDPKTIAGLVNEGRFSYPYIPTGIYAEIRNLSNLRIQTQEEITRIKNRMARWFSIYFPEIKDVYRNPDAVSGLMVIKQAPLPCDIRELGVEGVNKIWRDARLKGAGIKRATTLVTAAEHSIGNTEAPRSARKEIRNLLEDYEGYKKRMDELMEEIEKTLSEIPYIDKLMKINGIRIKTVSCFIAEVGDIGRFDNPKQVQKLAGYAIVADSSGKHNGESRISHRGRKRLRYALYEAAISVIGKNKEFKEIHSYYRTREKNPLKKMQSVIAVACKLIRIFYTILTKGVDYDGQKMLNDIVRPEIQPAA

SEQ ID NO: 216604 - protein, 402 aa, unidentified
MISVGVDVSKGKSTVCILKPYGEIVCSPFEVKHVEKELEDLAGLLNKLDGEIRVVMEATGVYHLPILTFLQEKGYFVSVINPYSMKKYAKDNSLRGAKTDRLDSIMIANYGIDRWFKLQKYEGDENTYAELKLLGRRYRYYMELHVKSLQELTHILDYVMPGIKAMFNSWDEASNKDKLSDFVERYWHYDLITSMSREEFTEDYLAWAKEKKYHQSSAKAEAVYAMASDGIPTLSSDTPSTKMLVQEAIAVLRAVDSSLFRIISRMQELAKTLPEYSTVRSMGGVGDVLAPKLIAEIGDVRRLHNAKALIAWAGIDPPPYESGQFVGSQRRITKRGSSTLRKVGYEVMRVLKSHREPEDNVVYNYILKKEAEGKSKKAAKIAGLNKFLRIYYARVMAVYQQQ

SEQ ID NO: 216605 - protein, 458 aa, unidentified
MSKNSKKKKRATAGQTAKKMERFELLNPHSAGIDIGSMLMVVSYTDREGMINLREFDSFTSSLYELAELLQKEGIEKVVMEATGPYWESLYNILEKHGMEMFLVNPSHYRNVSAQKTDINDAQWLHQLLAHGLIRNSHIAPELYRELRQYLHEREIYQNYKSDSLNRMQKTLTLMNIKFQHLISDVEGVAGMKLLRAISSGICDGQTLLARIDVTKLKASPEDLLSSLQGEYKQHYIHILSITLKSYDFFKEQMQVYESHIEHTLKELLACKGEAPTVIQQKTKKVRKNQYSFNLKDYLLGILGVDLTEVEGLDEIGLLTILAVTGTNMKKWPTAEHFVSWLNLSPRPKISGGKIIGYERRNNNNPATQAFRLAAHCLWQSKGPMGQQYRRLASTKGSKKAIKAIARKLAVIFYHMVLNKQAFDATRIQPDIEQQKARKIARLQKDAAKLGMIVQKAA

SEQ ID NO: 216606 - protein, 446 aa, unidentified
MAKSKRDFKLAHPNAAGIDVGSGSHFVAVPPDRDDDPVREFRSFTEDLYRIANWLSSCGVDTVAMESTGVYWIPLYELLESSGFTVYLVNARHVKNVCGRKSDVLDCQWLQQLMSYGLLSGAFRPENEICALRAVSRHREMLLKYQSQHVQHMQKALAQMNIQLANVISDVVGDTGQRIVRSIIAGERDPQKLASMRDGRIKASEEEIAKSLHGNWRQEHLFALKQAVALFDAYAEQLRQCDHQLEQMLRELKRYEDTPAEKRKRSRNKNAPQFDLRSYLVGMCGVDLTRIDGIEVTTALKVISEVGPDLSRFPSVKHFTSWLGLCPGTKISGGKKLSGKSRSGANRAAQALRLAAQALRPSKSALGAYYRRLCGRLDKAKAITAAAHKLARLIYAMLTRGTEYVDKGQEYYEQRYRQRIVYNLNKRAAAMGFILTPVPKEVSEMR

SEQ ID NO: 216607 - protein, 320 aa, unidentified
MQTPSVVLNIGADVAKDAIVVACAEGTFPVREIANQRAAVLAFFKDLPAGTRIGVESTGSYHELFTGAAHQLGFLVFLLNPKDTRHYAKAVGVRGKTDRVDAELIARMIAHEHTKLHAWIPPTPQQREIDRLLKRRATLVSLREAVAMSLRELGGFAAELTALRTRFNQLIARIDLRVKDLVEASPERKQNFTRLCTITGVGPVVGTALVNTLERVPVKSADAFVAFTGLDPRPDDSGQHRGKRRLSKRGPAELRRLLYLAALSAAKTKTWRPLYEHYRANGLSSTATIVILARRIARTAWSIYTYKTEFDSARLTKPLT

SEQ ID NO: 216608 - protein, 338 aa, unidentified
MKLYGAIDLHSNNNMTVVTDEQDRVVYEKRLANDLELIVQQLAGYRDGLQGIVVESTYNWYWLVDGLMEEGHKVHLANTSAIQQYEGLKYTDDDYDARWLAHLLRLGVLPQGHIYPRQHRPVRDLLRKRGQMVRQRTMNLLSIQNLFSRNTGSSMSANGVKRLNSQQVESLFPETDLALAIQANLAMLGCADEQIERLEKTVIERVKLKPEFKLLKTVPGIGDILALTIMLETGDITRFPSVGDYASYCRCVGSKKISNGKKKGSGNTKNGNKYLGWAYVEAANFAIRFNAKIKSFHQRKKSKTKNVVALKAVAHKLCRACYYIIRDQVAFDISKAFA

SEQ ID NO: 216609 - protein, 288 aa, unidentified
MNGSSLPYNRRSALAEGSTLFIGLDVHKESIAVAYGSGKREAEVMFLGTSGTRQCDIDKLVRKRQAKGKTLHFVYEAGPCGYWLYRYLTKKNLKCWVVAPSSIPKKAGDRVKTDRRDAVQLARLLRSGDLTPVYVPAVEDEAIRDLVRAREDALKDLKAAKARLKAFLLRQDIRYEGRANWGPAHLRWLAEVVCPTPAQQIVFQEYVRAVSEHTERLQRVDTELQTQVQTWRWVPVVEAIQALRGVQFTVAVTLIAELGDLSRFENPRQLMSYLGLTPSEHTSGERRR

SEQ ID NO: 216610 - protein, 338 aa, unidentified
MAIVTLGIDLAKNVFALHGVNEAGKPVLLKPHVPRAKLLETIAALPPCTIGLEACGGAHHWARQFQRYGHTVRLIAPQFVAPYRLSGKRGKNDAADAAAICEAVQRPNMRFVPIKSVDQQGRLMVHRARQGFVDQRTATINRIRGLLAEVGIVLPLKAATVRTQATALLDELSGWVNRVIGDLLGELHRLDERIASYDRHIAQMAREDLRAQQLMRLCGIGETTATALVAMIGNGHEFKSGRQLSAWLGLVPGQYSSGGKARLGRITKAGDGYLRSLLILGARAVLNAAKSKTDSISRWAGALAERRGYWKAVVAIAAKNARMAWAILRQGDAFVLPT

SEQ ID NO: 216611 - protein, 339 aa, unidentified
MRQLYCGFDLHSNNVYCGIQDGADQRVFRRRMPNDINVILQELKPFKKELVGVVVESTYNWYWLVDGLMEAGHTVHLANPNAIKQYNGLKNVDDQTDAFHLAHLLRLGILPQGYIYPKAERPVRDLLRRRMLLVQQRTAHVLSLESLMMRHLGCRLKSREIENLDEHGLDSHLLEPTLRLAADTAISMIQHLSGRIKLIEKEVTALCKLKPEYAKLTTIIGVGPILATTIMLEPGPIQRFASDSNYSSYCRCARAVKTSNDKKKGENNGKNGNKYLSWAFVEAANHCRRVCEPARKFCQRKTDKRNGVVAVKSLACKLSKAAYFIMRDQEVFKLDKCFG

SEQ ID NO: 216612 - protein, 345 aa, unidentified
MKLSRVGVDLAKNVYQLHGVDRHGKTVWKRRLRRGQWLQVLTDTVEPGCEIGMEACTGAHHWARELESRGYTVKLIAPQFVKPFVKSNKNDANDAEAICEAMSRPHMRFVSVKTVEQQDIQATHRVREELKAHRNAKANQIRGLVAEYGLVAPKTLLALRRAIPEWLEDAENGLTDNFRSLLHGLWNDLLTLDDRLKELDKEIEKLARSFEVTKRLQQLRGVGPLVATALVATVGDGSQYSKGRQMASALGLTPRQNSSGDKYRLFGISKRGDVYLRTQMIHGARAVVSQAKHRDDPLSRWVTDIAKRRHPNVAAVALANKTARMAWAMLQNETNYDASLAVGQA

SEQ ID NO: 216613 - protein, 405 aa, unidentified
MFVGIDWASERHAVCVLDDAGRKATAFVIAHTADGFDQLVARLRRYGDPAGLPVAIERPDGRLVDRLLEAGHPVVPVQPNAIKAWRDAEVLSGAKHDPSDAALIAEYLRLRSHRLRVLTPFSAETRALRAVVRTREDLVDQRVAATNQLDACLEAFWPGAKHVFADLASPIALDFLTRYPAPESAASLGEQRMAAFLTKHGYCGRRRPEELLARLRAAPAGLTGTVEVEARRDAVLAMVKVLRALLAAIKDLDRSVLAHLGEHPDAEIFTSLPRSGRINAAQVLAEWGDCRPAYADAEAVACLAGATPVTKQSGKHTAVQFRWACNKRLRRAICTFADNSRHSSPWAATVYANALARGHDHPHAVRILARAWIRVIWRCWIDQVPYDPAKHGAARNLTEMATSAA

SEQ ID NO: 216614 - protein, 345 aa, unidentified
MYNMLTGVDLAKKEIQVCVAKSNKIVRNMPMTPTAFSNWLATQKPMTVVFEACATSNYWYQCAREYGHDARLISAKLVSNIRQNQKTDKNDAEAVLQASQLSNVNFISGKSKEQQELQSLVRMHQLSVKHKVAYGNQLCSLLLEFNIKLSPTDAGLNSAIQSILEDAENGFSAIFREALHTAWHQYLKSIELVKHYEKSVARASRASEACKNLMKIEGVGPTNAVNLYIALGCCELGVFKKARDAAACIGLTPIQHSSGGKVRLGSIGKNIRNSSLRANLVAGAMSAVNQAVKRDSRTKKDEWIKGLVERRGKRCAAVALANKTVRTAFSLLRNGTDYKAELLSA

SEQ ID NO: 216615 - protein, 414 aa, unidentified
MQEATQHDAVDVFVGVDVDVGVDVGKGQHHAVALDRNGKRLYNKALPNDEVKLRALIAELKTHRRLLFVVDQPSTIGALPVAVARAEGVLVAYLPGLAMRRIADLHAGEAKTDARDAAIIAEAARSMPHTLRSLRLADEQLAELTMLRGFDDDLAAQVTQTSNRIRGLLTQIHPALERVLGPRLDHPAVLDLLERYPSPSALAAANEKTLANRLTKLAPRLGKNWAAEIVQALNEQAVIVPGTQAAAIVMPRLAQQLAALRKQRDEIAAEVERLVLAHPFWPVLTSMPGVGVRTAARRLTEAAPKAFATAAHLAAYAGLAPVTRRSGSSIRGEHPSRRGNKVLKRALFLSAFAALRDPVSRAYYSRKIQQGKRHNQALIALARRRCDVLFAMLRDGTIYPPKSAPNRLLKLDTV

SEQ ID NO: 216616 - protein, 345 aa, unidentified
MKITTVGIDLAKNVFQVHAVNERGAVVLRKQLRRDQVTAFFANLPPCVIGMEACGSAHHWARTLKSLGHDARLMSPQFVKPYVKSNKNDVADAEAICEAVARPNMRFVPVKSVEQQAVLSLHRVRQGFVKARTAQANQIRSLLGEFGLIMPAGICHVAKRVPRLLEDASNALPGSFRQLITRLTERLKELDTLVDEFEAQIKAWHRSSELSMKLEKIPGIGPLGASALVASIADANSFANGRQLSAWLGLVPRQHSSGGKPTLLGISKRGDVYLRTLLIHGARSAILAAQRKAVNTNVWLAGLLERRHPNIAAVALANKNVRTVWALLAHGREFKPNYAAQLLAA

SEQ ID NO: 216617 - protein, 414 aa, unidentified
MDRVMIGVDPHKLSVTFEARDSREVLRAKGQFGTDARSYRQLLAYARQWPERIWAVEGANGIGRPLAQRLLASGERVLDVPAKLAARARVFDTGQGRKTDPADAHAIVMVALRDKRLRELGTDPGLTVLRLLCDRRDELSRSRAQALNRLHRLFLELIPGGAPVKKSTAQYQALLARVRPRDLAGKTRRRMAAEELADLGRLDAKLKAMKAELKAAVLASGSHLMDIHGIGPAAAARILADVGDIARFPNRAHFASWTGTAPIDASSGQHTHHRLSRAGNRRLNHVLYMAGIVQLRNDTPGRAYYRRRVAEGKTSMEAMRCLRRRLSDVVYRQLAADTQPQQAGPGGHSGATLLSSAADLPPGIGTSDQPLPGPAPATLPPSLTAPHSPAAQPGASPRRRWSVSTSFVRWGAPR

SEQ ID NO: 216618 - protein, 332 aa, unidentified
MYYIGMDLHKQDLVMAVEDERGPVGRVRRLACRDTEAIRAAVERWRPFRAVVEASASYRWLYDLLAPVGEVVLAHPLRLRAITAARAKTDKLDAALLAQLLRANLIPTAYVPPARYQQLRDLTRSRARLSHGATLAKNQIHALLSRANVHPPLKTLFGKRGRKWLAELDLGISGNLTCDELLRRLEHYGREIATLDAYLEGMAGQFPEAEALEVLHGIGRYSALLVVAEIGEPERFRNARQVGAYAGLTARVHQSGGHEHRGRISKQGSRWLRWILVQAAMKLVRRDQRLANFYQRIRKRAGRNVARVAVARKLAGICWVRLRRWQREQAAA

SEQ ID NO: 216619 - protein, 347 aa, unidentified
MRFDNRQHRYYCGIDLHVKTMYVCILDTTGPVLVHRNVKSTPEAFLESVAPYREDLVVAAECMFTWYWLADVCAAEGITFVLGHALAMKAIHGGKAKNDKIDSHKIVGLLRGGLLPQAYVYPAAMRATRDLRRRRLHLVRKRGQLLAHIQNTRAQYNLPAFGRRLAYPANREGVREHFPDRSVRKSIEVDLTLIEQYDTLITDLELTIVREAKRHDGDAFHRLRSVPGIGKVLALTILYEIHDIRRFDRVQEFASYARLVKCKKQSGGKILGTSGAKMGNVHLKWAFSEAAVLFLRHTKDGKKLLAAIEKKHGKGKALSILAHKIGRAVFYMLSRGTVFSTEKFLAA

SEQ ID NO: 216620 - protein, 357 aa, unidentified
MEDVEVVIGGDAHKRTHTFVAADELGREIASKTVAATTAGHMAALAWAARWPARRWALEDCRHLTRTLESDLLRAGEQVARVPTHLMAGARRSARTPGKSDPIDALAVARAAWRERDLPVAQLDGPSRELRLLVDHREDMVRERTRLQSRIRWHLHEIAPELEIRPRGLRTGRIVDSVERHLQGLDGTIVEISRELLDRIRTLNERVKQLEQQIMILVARLAPALLSIPGCGALSAAKIVGETADVTRFRSKSAYARWNGTAPQPAWSGNTTRFRLSRGGNRQVNSALHRIAITQARTATLGRDYYQRRIETGNTKTEALRLLRRRLSDVIYRTLPADATPAPHPGNQEHDPDDLKT

SEQ ID NO: 216621 - protein, 343 aa, unidentified
MYYIGLDVHKKTISYCVKDAAGCVHSEGKIGSTRYELDAWVRTLPQPRMMAMEATIFTGWIYDHLLGHADQVKVAHPLMLRAIAAAKKKNDRVDASKIADCLRCDFLPECHMASTAIRDRRRLLRYRRLVIRQAVQMKSRISGLLMETGVSYNKLRLHRMGYFEQLLKTNDEIPDSIRPLLRMSREHIDRAIQLDRTLLKSLEQDPMLVDRLERLRTIPGVGPITALTWALEVGDTSRFRTIKQAVSYCGLCGDEKSSADKVMRTPISKKRNKHIQQVLVEAARLAPRYSQELALLYERERQRGHGGRATLAVARKMVAHMLAVERRGTSFVPAGEFSQAAAV

SEQ ID NO: 216622 - protein, 376 aa, unidentified
MNNSQATKRQVNTEGAKLYMSFELADKDWKLFFTDGRKERSRGISAGNLGRLEEEIKKAKDRFGLKGETRVISCYEAGRDGFWLHRYLREKGIKNWVVDPSSIEVDRRKRRAKTDRIDGKKLLRLLLRYSWGEKKAWSVVRVPRVEEEDGRHLHRELETLKKERAMHSNRVRSFLKLHGVSDVQPLRGDFEEYVEGVRLWDGSGLPLEVKERLKREHRRLVVVQGQIRELERKRKEILKGGKERHIEQMMRLRGIGIESSWKWEKEFFGWRKFHNRREVGALAGLTPTPYDSGQSRREQGINKAGNRRVRSMAIEIAWFWIRYQPGSKLTRWFNERYAHGGKRMRRIGIVAVARRLLIDLWRFLEHGVIPEGAIVE

SEQ ID NO: 216623 - protein, 417 aa, unidentified
MPVNEVAASAAGVRLAGKPHYPCMLSKDASISENTHAVSVAAERSEAATETAADDRSKPLSSGLAENVGEPDRRRFSGSSPNSRQSGRNTRSPSSYLQGRDTSKMEFASVIGIDVSKDKLDVADWPASFAECIANDETGHSQLLTKLPKPGSCLVVLEATGRYEKRVVLELLNAGHVVSVVNPRQVRDFAKALGILAKTDRIDARVIARFGEQVRPRTTEKTHEKQDELDQLVTRRRQLIALRTGEENRIGTATSKIVRRSLQKNIKHLSREIATIVQEIARLVKSDDEWKGKSEILKSVVGVGEVTATTLIAELPELGKLNRQKISALVGIAPFNRDSGQFRGRRMIYGGRRSVRSVLYMAVLSARQHNPVIRAFAERLKAKGKLPKVVLVACMRKLLVMLNTMIKTNTHWENKIA

SEQ ID NO: 216624 - protein, 420 aa, unidentified
MNQNQSFAAFIGLDKSDKKINVTLQQCASARIERSVIKGGAEALHAWVAVLCARFPGQRVAICVEQPAAGLIHALMGYAFVVLYPINPVTLARYREAFTPSRAKDDPTDGDFLCQLVSLHREQLQAWQPDDVCTRKLRHLTQARRSSVNMRTRLSNQLKALLKTYFPQALELCGEDLTAPMACALLQKWPSLQQFKNARKETLRRFYYAHNARRGQVIEKRLALIEKSVPLSNDPALIESSIITVQALILGLRAVHTAIARFDREIARTFNEHPDAPLFAALPGSGTCYSARLLAAFGSRRELFQSAEALLNFSGIAPVLKRSGQSTTIQRRFARPLFLHQSFMEYANESIRHSVWARAFYQMQKARDKSHWVIIRALAYKWIRILYRCWQERIAYDELRYLKSLQRSRSPLLQYIAQPA

SEQ ID NO: 216625 - protein, 460 aa, unidentified
MSPKRSKSRNGGKMPMVYSNAAAIDVGATMHMAAVRADRAPEPVRSFGTFTADLHRLVDWFTECGVETVVMESTSVYWIPIFELLDARGFTVVLVNARDAKHVPGRKTDVSDAQWLQRLHSFGLLRASFRPKGQIAELRAYVRQRERLLEYAASHIQHMQKALTEMNLQLHHVVADITGATGLRIIRAILAGERDPERLACLRHYSCHSSAETIAKALTGSYRAEHLFALEQALALYDAYHEKASACDARIEAVLKELSIHRGHGHGPAPQASRRRNRTDQANALAFDVREALFALLGKDITTIDGLGPYLSLKLIAECGDDLSSWPSAKHFTSWLGLAPSNKVSGGKMLSSRTRRSGGRAAALLRLAAVTVGRTDTALGAFYRRLSARIGKAKAVTATARKIAVLFYNAVRYGMDYVDPGASSYETRYRTRVVNNLHRRAKAFGFVLQPLEPKVGAAVS

SEQ ID NO: 216626 - protein, 345 aa, unidentified
MKIVGCDLHTRYQQIAMLDQETGELIERRLEHESGEARAFYAALSSPVRVGIEATGHTRWFEGMLAELGQELWIGDAAQIRASVVRKQKTDARDAAHLLELLLSERFPRIWRPTMAERDLRQLVWHRQKLVWMRNAVGNQLHALAMGEGVCRKKKLFTKKGRAELESLGLGVWASYRRQELLTMLDRFDGSLGELDRAVAEQAEQNAAAVLLMTHPGVGPVTSLAFVLTLGPVERFERSKQVVSYLGLNPREHSSGGRQRLGAISKQGNPMMRSLLVEAGHTAARLDSELGQDYQRLKLRRGSGVAKVAIARKLAVRMYWMLRGQASYAQLVRMQGSPWATLVTE

SEQ ID NO: 216627 - protein, 403 aa, unidentified
MMTAVIIGVDPHKGSHTAVALGADEVPLGQVRVRASAAQAERLLTWAKSWPERTWAVEGAGGLGHLLAQELAAAGEQVLDVQPKLAARVRLLASGAVNKNDPNDARSVAIAALRSPSCLPVRPDDHAAVLKSWARRHRDLSRTRNQVACRLHAALCELVPGGVSKEICAAHAAAILEEAEPCGAVARARAELAAELVADLRHVDALLLETKKKLATAVRASGTSLTEIFGVGPVIAATVTGDVRDVSRFRGRDRSAACNGTAPIEVSSGNRIIYRLSMRGNRRLNHAIHMAAITQIRYRHSDGRAYYDKKIAAGKTGKEALRALKRQISDAIYKHLKADAAHAAARSTQGPGGQPGNDSVASAAGSHPERQLFGQATPGPAPTLRSRPKKTTSRARKKAARIT

SEQ ID NO: 216628 - protein, 337 aa, unidentified
MKYCGIDLHSNNSVIVVIDDEDRVVAQKRLPNELARIVEFVTPWRDELAGVVVESTYNWYWLVDGLRAAGFEVRLANTAAIKQYDGLKHSGDEADARHLAHLLRLGILPTGTILPRDERAVRDLARKRMQLVRGRTTHILAIENIMARQFGGRMTSNQIKRLSADDIDRMPIAADVGLAMNANLAVIGALDAQIEVLERRLRERVKPRPEYAFLTSVPGIGQALSTTILLETGPIDRFASVGNYASYARCVDSVHTSNRKKKGEGNVKNGNKYLAWAFVEAANFARRYCPEAKRFHERKKAKTNNIVATKALAHKLARACYHILREGRPFDVTRCFA

SEQ ID NO: 216629 - protein, 340 aa, unidentified
MRKYIRIGVDIAKNSFQVHALESEDCSATKRKLSRSGIVKFLAEVEPCAIGMEACGSAHYWARRFRAMGHEVKLTPPIYVKAYVKRGKNDAADAAAICEAMSRPNMRFVAVKSEDQQATLMAHKTRELLIKQRTMSVNALRGHLAEFGVIAAKGISHVEELVERAAAADLPAMVQATLGVLLAQLRSLDAAIDELERAIVADHRRDPVSRLAASVPGVGALAASAILASAPDPQAFKSGRDFAAWLGVTPKQNSTGGKEKLGSITKQGNRYIRRLLVLGAISVLRAAPKRKGALCDWLAALRARKPPKVVAVALANKLARIVWAIITTGEAFRTSIYAKA

SEQ ID NO: 216630 - protein, 342 aa, unidentified
MTYYAGLDVSLEETAICVIDATGTIVKEVRAESAPGALHDALKRIGLPLERVGMEACSLTAWLHDGLTAAGWPAVCIETRLANAAMKTMPSKTDRNDARALAQIMRTGWFRQVHVKSPQSRRWRSLLVARRTVLNHMRSIENVVRAITREDGIKLGTPSRKDFAARVREMAGAGPELMAMLEPLLAVLASMIEQLARLTRQVLDIVKGESTCRQLMTSPGIGPITALTYRATIDRPERFARSRDVGAHLGLTPTRYQSGETDIVGKISRCGDELARTALYEAAHTLLVRSKKWSALRVWGMAVAKRRGMARAKVAVARKLAVILHSMWINGTDFRFGREAGA

SEQ ID NO: 216631 - protein, 366 aa, unidentified
MAQHTRPKKPKKRPIIGGVDTHADTHHAAVTLTNGGRIADAEFPTTHTGYQQLVAWMSEFGRLRSVGIEGTGSYGAGLSRHLCGLGVPVVEVNRPDRRQRRLKGKSDPLDAYAAADTVRAGWDTAATRALPKAGTGIVEAIRVLHTVRASAVKARTATINELRAVLVTAPAGLRDQLRELNPTALISACVRLRPGRQLADPEHASRYALRALARRYQTLTTDITAIEDQLHPLVRQACPGLLDIHGVGYETAAQLLITIGDNPDRIHTEAAFAALCGVAPIPASSGKTTRHRLSRGGDRQANRALYLIVCSRLASNAATRAYRDRRRTQGLSNPEIIRCLKRYLARAIYKALTSTNTQPEDLVTAA

SEQ ID NO: 216632 - protein, 354 aa, unidentified
MTRITTIGLDLAKKVFQVHGVDAKGKVIVARQLRRKQVLAFFAKLPPCLVGMEACGSAYYWAREIEKLGHTVRLMPPKYVKAYVKRGKTDAGDAAAICEAVSRPSMTFVPIKSIGQQGLSMLHSVRSKLISQRTQLVNAVRGHLSELGIVAERGLLGLAELAAVVRDKTDERLPVAARAALLVMVNQIEMVGAEIAKLDTAMRKENKANDLGRRLETIPSVGPVIASAFRARVTKPELFKNGRHLAAWIGIVPENDSTGGKPKQKGLSKKGDRYLRALLVSGAMAVVRQAKMRPERYPWVANLLTRMSAKQAAIALANKNARIAWVVMVRGGVYEAGHRAPVYRGAALPVPAVA

SEQ ID NO: 216633 - protein, 344 aa, unidentified
MNQHTVIGLDLAKSSNAVVALSAQGRELWRKTLTRSKLLPFLAQQQPCLIALEACSGAHHVARQLQQQGHQVVLYPPAHVKAYLRGQKNDYNDALALAEAAQHGRIRPVAVKTVEQQDALLIVQQRRQLKEEQTRLGNRIRALLAERGVVLPQGVAALRRGIPRILEDAENGLSITARQLLERVYQRYLVLLDELAWYDTQLQCHAREDATCRRLCEMPGMGPIVASVLQGWMGDGRQFARGRDASAALGLVPKQYSTGGRDVLLGISKRGDRYVRSQVVNGAQAVLRCAEGKEDTLSRWVMRLKARAGHNKTVIALANKLVRIAWVIVARGERYRPQPIGCHG

SEQ ID NO: 216634 - protein, 343 aa, unidentified
MQFYAGIDLHTRNSVVCVIDQKERKLVTETAPNDLPSILSLLEKVPRRPTVAIEATLNWYWLVDGLQEAGYKVKLAHTMGLYMITGAKVKTDRRDAFTLAKLLRLDAIPEAYIYPKDTRPIRDLLRRRTRMVRLRAEAYVAIKRKFQQYGLPCSDKAIQGVHEEELLQSFTHPGIRAGLEMELERIRLYSRELETVEKYILSTVKNKPIFEHLRTIPGVGKILALTIYYEVGDIARFASAKQFCSYARVVPGLAQSGDVIRRGRGSKQGNPHLKWAFNQAAAISVRHYGYVRSFRQKHLARRRSKARRMISLSIVGHKLAIAAYHVLRDEVPFNKELMFGKAS

SEQ ID NO: 216635 - protein, 482 aa, unidentified
MHPRVTNICAITRDVHRFTFELAGALEITNEYSGLAVAPAHLYCFRRSQAGMSHTLNLAQWSIVMEKQDDLPFAAYVGIDWADKKHDFCIEIPAEGTQEFDVIPHRINLIDQWVRTLHARVKGPIAVAIELTRGPLISALQMYDFIVIYPVNPGSLAKYRQAFTPSRAKDDPTDAALAVDMLRRHPERCKPLRPQSADMRALITLVEQRRQLVGERVRLTNRLRAALKQYYPNALEWFDHVDTMVFCDFIAKWPTLVQAKRARVATLNRFFHEHNVRFPSVVQSRITAIKEAVPLTKDDAIIVPYRMKAQAVVEQLKLLLGSIKAFDVEIDSVATRHADYGLFRALPGAGPSLAPRLLVAFGEDRDRFGSAGEVQMYSGVAPVTERSGKKEWIHWRLQCSRFLRQTFVEWAAQTINKSYWAGEFYRQQREKGCTYQAAVRALAFKWIRIVYRCWQTGIPYDEAKYLKALERRGSPLMVKKTA

SEQ ID NO: 216636 - protein, 363 aa, unidentified
MEYIAFDAHKHYTLASVVRPNGNLVREERIEHDRGSLREFLERCERGSPVAVETIGNWYWIVDEIEAAGCVPKLVHARKAKLMMGEINKTDRLDARGLNRLQRNGTLPTVWIPPGELRDQRDLPRTRMVLVRQRTQLKNRIHATLAKYALHDLEVSDFFGVRGRALLRQRFDLLPPHTAYASQQLLEQVEELDRRVREFEQRIQAVFKPTPAIQLLLTLPGVGLTLAAVIALEVGDVARFARAEKLAAYAGATPRVHASGGKTRFGPSRPDVNRYLKWAFVEAANAICIGRGRAPHCHVSRLYERIARRKGHAKAIGAVARHLAEATFWILRKHEPYREPKASAVSPTGDKRGWPLSSRKLDR

SEQ ID NO: 216637 - protein, 371 aa, unidentified
MTSIRYVGMDIHKENYTLCCYSYEKDALLYKQTVAPDYKMILKYLEQLRNRCTEEIEFVCGYEAGCLGYTLYRQLTDRGVKCVILAPTTMGITNTGHIKTDKRDAGNIARCLAFRTYSEVFVPTLQDEEAKEYIRMRDDQKKALKIIKQQTLAFVLRHGYRFEEGKSYWTQKHVAWLKSLDLGGILQESLDEYLVTYAYLADKIERMDKRIEELAGDERYQNNVKKLSCFIGVKTHTALSALVEIGDFNRFAKAEQLAAYLGLVPSEDSSGGKQKRGSITKAGNSHVRRLLVEAAQSYTRGVVGHKSVDLKRRQAGNEPQIIAYADKANERLRRKFYRMVLKNGAKRNVAATAIARELACFMWGVMTDHVA

SEQ ID NO: 216638 - protein, 341 aa, unidentified
MQAVTTIGLDIAKSVFQVHDATGNVVIRRQLKRRYVLAFFQKLAPCVVGIEACATSHHWSRELKALGHTVRLMPPAYVKPYVKRQKNDAADAEAICEAVTRTNMRFVETKTPEQQSCLMLHRTRHLFIRQQTAVINAIRAHLAEFGIAARVGRHGVKDLLHVVADSSDRRLPEVARACLAALGVQLRMLKAQVLAFDRRIMAWHRSHETSKRLDEIPGVGPALATALVASVADPKAFRSARHFSAWVGLVPKQHSSRGKDRLGRISKQGDRYLRSLFTAGVLAVIRYAKIHGTKHRPWLTALLARRPTKVAAIALANKIARMAWAIMAKGERYKEPAALAA

SEQ ID NO: 216639 - protein, 362 aa, unidentified
MAKGMTLVGLDVHARQTHAAVLDPTTGEIGVSRLRMPPVEVASFLEGLGPAVRVVYEAGPTGFGLARAARERGLDVRVAAPGSIPKGPGDRVKTDRRDAMRMVRLLAAGELSFAFVPSVQDECFRDLVRAIEDVRGDLMRARHRLGKFLLRRSERFPGPGSAWTARHMGWLRSREFDDASSEATFADYLAAVELLTGRRGTLIGALERLVPESGHAQVIARLRCFRGIDTLSAAGLSAEVGDFGRFPKPSLLSGFLGIVPSERTSDERRRQGSITKAGPTHARRLLVEAAHHYRHRPAIGETLARRQQGQDPRVIAIAWRAQQRLNQRWQHLRSKRGKPTGVVAIACARELAAFLWEAATLD

SEQ ID NO: 216640 - protein, 408 aa, unidentified
METIHPICCGLDVHQASVSACLRRLNAQGGVSVESREFGTTVKELVALADWLVAEGCPIAAMESTGVYWKPVWNILSPLLDVWVVNAREVKQRRGKKSDRADAKWIAELVAHDLVQPSFVPPPRIGVLRDLVRMRTVLVQGRTQVKNRVLAVLEDTNVKLASVVSDPFGASGRKMMEALVNGERDCKVLSEMAMGVLRRKIPQLEVALQGGFTEHHAFLIRLGLESLDQGNRQIAELEAQIERLMDPLREEASRLTSIPGVGHNAARVVLSEIGMDMSRFGSAQRLASWAGLCPGNHESAGKRHSGKTRKGNRYLRRVMAECAWAASKTDSFLGRTFRRFQIRIGGKKAAVAVGHKMLVIIFHLLNEGRLYDDGRYDYINQREQIRQRNRALTTLQRLGYQVVLTATP

SEQ ID NO: 216641 - protein, 352 aa, unidentified
MVVAVQYRRPSLNKNVMVQIYGIDLGMSSFDVSFLSESGSVRHLSGVKNTVHGISKFLLSLPSSAVLCAEHTGVYGDLLLRLCTLNRTCLCFVPGYQIKHSLGLQRGKSDPLDACRIREYAERFYDLLRPCFYPGEEMSELQELYRTRSLLVDSRKRLDTLNIGDNCKSSVSLAADHARRAVLAELNTQISGLDHEIEALIQNSSEFSRNYQILTSIVGVGPVTSCELIIKTENFRKLDTAKKCAAYAGIAPYPKESGKMKCGHKISPMGDKQLKTLLFLCARSAKEHNKEIRLYFLKKHKVEKKHFFVAMNNIANKLLRLIYSLIHKQQTYDRDYIQRDPRCVVISDTNKC

SEQ ID NO: 216642 - protein, 356 aa, unidentified
MVIVAIESHLGALYMQISTIGLDIAKNVFQVHGIDAAEKVVVRKRLRRRQVLEFFKALPRCLIGMEACATAHYWARELTKLGHEVRLMPAKDVKAYVKRNKNDAADAEAICEAVRRPTMRFVRIKSAEQQGQLMQHRTRDVLIRQRTQIINALRAHLAELGLVAAQGNAGVNELRAIVTDEQDTRLPIDARASVIVLAAQLEALESVIGAIEKRIKMQHRSSEASQRVEAIPGIGVIGATAIVATVADPTIFRSGRDFAAWIGLVPRQDSTGGKQKLGPISKQGDRYLRRILVVGAIAVLRRAQENPGKYPWLTQLLARRPFKVVAVALANKMARMAWALLAHGGTYRAPELAEAA

SEQ ID NO: 216643 - protein, 406 aa, unidentified
MDVVYSRVCGLDVHKKNVVACVLTPETKEIRTFSTMTEDLLALVDWIKQHGCTHVAMESTGSYWKPVYNLLEMEDIKTLVVNARHIKHVPGRKTDVKDAEWIAGLLRHGLLQGSYIPSRDQRELRELVRYRRSLIEERAREVNRIHKVLEGANIKLSSVASDVLGKSGRAMIEAMVAGETDAVMLSELAQRRLKSKKPELIKALNGLMGPHQRLMLAAQLRHIDDLDALIKQLDEEIKRRMLPFEEDLERLDTIPGVARRTAEQILAEIGTDMNRFPSAAHLCSWAGLAPGNHESAGKRKSGRTTKGNQKLRSALVEAAQAAARTKNTYLSSQYRRIAARRGANRAAVAVAHSILTIVYHLLKRKQTYVELGANYYEERQRDRVVKQAVRKLEALGLKVTVEEAIA

SEQ ID NO: 216644 - protein, 340 aa, unidentified
MGNVTTIGLDLAKHVFQVHGVDAEGATVLRKQLRRAQVLAFFSRLPPCLVGLEACATAHYWARELRALGHEVRLMPAQYVKAYVKRNKHDAADAEAICEAVVRPTMRFVPVKTADQQAAVLLHRGRERLVRQRTGLVNALRGHLAEFGVIAPQGLRNVGKLIAIVRDEGDARLPDLARQVLQVLAAQIEQLEAAVSAIEKQLTAWHKSNPISQRLASVPGIGPIIATAIAATVVEPSGFRSGREFAAWLGLVPRQNSTGGKHRLGGISKRGNQYLRRLLINGASANLLRSKATNADPWVIGLRQRRPSLVVAVALANKTARIAWAVMHRHENYQRVAAAA

SEQ ID NO: 216645 - protein, 338 aa, unidentified
MVYGAIDLHMRYSQIRIIDADGKVLGEQRIMTSRERLVTAFANRGALRILLETGTESEWVAQALEAAGHEVIVADPNYAPMYGEMTRRIKTDRRDVAALAEANRRGWYRRAHRTSAPQRETKQILRARRLLVQQRSGLISLVRSLLRQSGYRLGTGSCETVPTRVTRLGVTGELAETLAPLCRQIAALTVEIHAVDARVQTRTASDAIVTRLRRVPGVGVIVATTFRAFIDRHERFAHAGQVSAAIGLVPREDSSAERRHRGHITKAGPSELRSLLIQAAWVCWRHPGSAALRAWVDRLAARRGRRIAVVALARRLSRILFAVWRDDTEFDAQKLAMA

SEQ ID NO: 216646 - protein, 384 aa, unidentified
MQTITLHIGLDVHKDSITIAIAEPGPKGEIRLFGTITNDLGRLEHALGRIRKAHPGANLELAYEAGPCGFVIARRLQQLKVPCLVAAPSLIPKQPGSPFKTDKRDARTIARLLRAGELTGVYIPEATDEAIRDLCRSRTDAVDDLRRCRFRLKAFLLRHGYRYQGKASWSQAHMRYLRELVLPHPAMKVILEEYLQGIDAAHQRVQRLEASMLALLETWRLKPAVQALMAFRGFQLVAAMITVSELGDIHRFAHPRQLMTYLGLVSIEDSSGPRQRLGRISRCGNGHQRWLLTECAEHYLTPPKVSKELSRRQEGQPQQVKALSWKAQTRLHLRFTRLLARRLARNKAKVAIARELCGFIWALLRTLPCYTLPAPTPPAKASAK

SEQ ID NO: 216647 - protein, 370 aa, unidentified
MRFYQGQHAFYAGIDLHARTMHVCILDQAGNTVFDKGVACRPEAFLRAIQPYRDHLVVGAECMFAWYWVADLCVEEDIAFVLGHALYMKAIHGGKAKNDRIDAGKIARLLRGGTFPLAYAYPKGMRETRDLLRRRTYLVRKRAELLTHLQILNAQYNLAPYPKKLAFAANRTEMKVAERFADPSVQKSAAINLALIDRLDELIGDLELYLVRTAKVDDVQTFYRLRSIPGVGKVLALILLYETHDSGRFKTAGQFLSYARLVRCAHESGGKKLGTGGKKIGNAHLRWAFAEAACLFLRSSERAKKWKQQQAAQRGEGKALAILAARLGRAVYHMLRKGEAFDEERFWSGASRTGTGSSSLSRKEACDAGN

SEQ ID NO: 216648 - protein, 469 aa, unidentified
MRIIGLDLAITSAHKAVVMDEHGTFVTPVFAVATWPDELAALLTRAREGAPPDAPVAVVMEPTGLAWLPVAVYLMRHQVTVYLVNSQQVADLRRYYHKHAKSDRIDARVLAKLPLVSPEKLHPLVLPPAALLKCQRACKQLDWVITQITALHNQLTGLDRTVWLGGWRDHVFADPFAPAARWCREQYYDPTAVLRAGPKTIRQAWRTTGLDPADDGAWAEALVRLAGHVVAVYGSPSVYVDFAALQAEVRLIQKWLAQFEADRDQLRRSVVRPLYRRLHPSRHLETLKGIGQDSAAVFVSFIGDPTRFANGRVFRGWSGLVPRSSQSADSESKGLRISQAGPDLPKKFAFLDADVARRYDPQLAQIYYDQMVHKGQHHTQAVCAVATHLLDRILVVLQQDRPYQLRDVDGTPVSDARARQIIAERYTVPEEVRQRNNRRARRARVERQAERQYARRQKVKGKSARSVRG

SEQ ID NO: 216649 - protein, 351 aa, unidentified
MLIIGCDYHPSVQQIAFVDLETGETGERRLLHKDGEAERFYRELKLRGVSVRVGIEATGHARWFERLLAELGFELWIGNPSEIKAARVRKQKNDRLDAELLLKLLVEDRFPRIWVPSPENRDVRQLLWHRHRLVQIRTRVMNQLQAVAMNEGVRRKKALWSKSGRAQLESFVLSPWASRRRQDLLDVLDRLNPTIDELSTAVEQEAKKRPEVLRLMTHPGVGPLTALAFVLIIGSTKRFACGKQIASYLGLIPCEDSSANRQRLGHISKQGNTLLRFLLVEAAQAAVRCDEVWRRKYLHLAMRRDPRIAKVAMARKLAVSLFWMWRKEWNYEQVATFGSHAGESEHVHGVK

SEQ ID NO: 216650 - protein, 363 aa, unidentified
MTSMSPVPEVVQRRHRVVIGVDTHKYVHVAVALDEFGGMIDAQRFAADRAGYTQLIDWAAGLGRKLTFAIEGTGSYGAGLTAAVRRSDIGVIEVLRTDRRDRRLRGKNDTIDAENAARAVLGGHATAVPKTNDGVVEMLRQIKVAKDVAVKARTAAMISLKAVVVNAPPELRETLQPLSKMALIDRCAGLRPGPVTTVAAATKHTLRSIARRWQQLNQEIKTHEALLTELTGQLVPQLVAAFGVGPDTAAELLIVAGDNIDRVRSEAAWARLCGVAPIPASSGLTTRHRLNRGGHRQANAALYRAVIVRMQHHEPTRTYVARRTLEGKTKSEIIRCLKRLLARETWALLRPLRAVPRTASAAA

SEQ ID NO: 216651 - protein, 315 aa, unidentified
MNIIEPPNQPVHIGIDVAKATLQIDLLGKSRKLPNTTAGHQTLLGLLPENAFIIMESTGSYHIAPLECFQAAGIPVAIVNPVRVKQFGKARGTLAKTDPVDAALLTDFGRAFLPRPTPPRDPERVLLCELVNLRETLSAQITVWNNLVEHQQSAVARKLSEAQARAATKAMADVEVRIAKLIKESKTMAPVADVLRKNKGVGAVTAAVLLAEMPELGRLNRREAAALAGVAPCANDSGKHEGKRYIRGGRPRIKRALYLASLSAVRHHTTLSPAYKALRAVGKPAKVALIAIARKLLVILNAKLKEYYTMHELTA

SEQ ID NO: 216652 - protein, 317 aa, unidentified
MSKVRFVGLDVHAATIAVAVAEPGGEVRSLGIIANRLESIRKLIGKLGPVKDLKVCYEAGPTGYVLYWQLTQLGVACEVIAPRWCPPRPATASRPTAATPEKLARCYRAGDLTAVWVPDAAHEALRDVVRAREAAKKDQLRARHRLAKFLLRHGQRAPEGMKAWTKKHLEWIKTHVRFDQSALEAAFADYVQEVDHCSDRILRLEKAIAEAVEQAPPSMRAVIEALQALRGVAQTTAATIVSELGSLSRFESPRQLMGYSGFGLPRALQRHSHSARGDHQDRKRSSAKSGGRGFLGLPTPAQCDGLSATATEKPCLG

SEQ ID NO: 216653 - protein, 321 aa, unidentified
MSKVQPVCRWTGRAIGLDLHRDFCEIAICEEGQSYGAGRVAMTAEGIEALADSLLPSDRVVMEVSSGAWEVARRLEGRCQRVVVVSPDDTGIAQARAKTDKLDARTLASLLWRGELEAVWTPDDRVRVLRRRLHRREQLVRARTRAKNEVHGVLMRTLQGKPPCSDMFGVKGRRWLEQLQQKLAVEEAETLESALRQIDFLDREIEQVERTVAQQMLDSPEAKRLLTVPGVNVIAAATFLAAVGDITRFRDSRKLIAYLGLDPRVRQSGDHPARPGRISKRGSAQARWALVEAAWSVVQQPGPLRAFYERIKGRGSVGGTV

SEQ ID NO: 216654 - protein, 360 aa, unidentified
MEVGQTVADHGVVGGVDTHKDLHVAAVVDELDRVLESRCFATTRHGYQQMLTWMRSFGQLRRIGVEATGTYGAGLLRYMQNAGVEVLEVTTPDTHDRRKRGKNDDLDAQNAAHAAFAGRRTVTPKSRDGMVESLRVLKACRKTAVAARRVALQMIHNTIVCAPDDLRETLRKMTRMQLIRTLAAWRPDLTDYRSVVSAYRITLKSLGRRYLELHDEIADLDTMIVAIVDELAPALVARNSIGHGSAAQLLVTAGDNAERLQSEASFAALCGASPVPASSGKTTRHRLNRGGDRAANSALHIIAIGRLRTDARTKAYIAKRVAEGHSKLEAIRCLKRYIAREVFSLISQRKREINQGRNAA

SEQ ID NO: 216655 - protein, 399 aa, unidentified
MGQQLWAGVDAGKSDHYCVVIDAEGQRLLAQRVANDETALLELISTVSTVVDGAEITWAIDLNGGGAAVLIALLVGAGQRLLYIPGRTVYHASGGYRGDGKTDAKDAAIIADQARMRRDLQPLRPGDEIAVELRILTSRRADLVADRTRAINRLRAQLLEYFPALERAFDYSTSKAALILLTGYQTPAGLRRARAAQLAAWLRKRKARNADAVASKALAAANAQHTIVPGQHLAATVVARLAKEVMALDIEIDDTETMIEERFRRHRHAEIILSMPGFGVVLGAEFLAATGGDICGFDSVDRLAGVSGLAPVPRDSGRISGNLKRPRRYHRRLLRACYLSAQIAIRTDAASRTYYDRKRSEGKTHTQAVLALARRRLNVVWAMLRDGTAYQPAPTAAAA

SEQ ID NO: 216656 - protein, 457 aa, unidentified
MTRRKKKQGKPCGDETLPQIRENAAGIDVGATEHWVSVPSDRDPEAVRCFGAFTVDLHALADWLKACRIDTVAMESTGVYWIPLFEILEERGFKVSLVNAKHLKNVAGRKADWTDCQWIRIVYSRGLVSASFRPPDQIAALRSYLRHRKTLVEYAACHVQHMQKALTQMNLHLHHVISDITGVTGTKIVEAILAGDRDPMRMAQLRDKRIKSSPEVIAKALEGNYRPEHVFALGQAFHLYKTYREQIEACDQQVQLHLQRLETKVDPLQTPLPESRRKRNARKRRNEIRFDCRTEAYRIAGVDLTTIDGIDESTALLILSEIGPNMSPWDTEKHFASWLNVSPNHQISGGKILDRKTRKQKNRLRDALRICAQSLLHSQSALGAYCRRICARIGHPKGIIATARKLCCLIYRLLKFGTAYVDKGQQHYEQRFKERAVKNIARRAKEFGYQLVAITEG

SEQ ID NO: 216657 - protein, 411 aa, unidentified
MDTIVERPGALDVHKAQVTACVRTPADGGKREAHFAEFPTTVAGLLTLHDWLSAHGVTQVTMEATGVYWKPVWAILEDDFELLLVNARHVKQVPGRKTDMSDAAWLCQLAEAGLLRASFVPPKPIRALRNLTRYRKTQIQERAREANRLHKALEDTGIKLDCVATDILGKSGRAMLDALVNGTTDPEILAELAKGRLRVKIPALREALEGRFDKVHALWIGSILAHIDFLDGQIASLTEMIAEQIAPFEKAVELLCTITGVQRRTAECIIAEIGVDMSIFPSAKELASWAGQCPGNHQSAGKRRSGKTRNGSKWLDWALEEAALAATRSKDTYLAAQYARLRPRRGHKKALGAVKHSIIVAIWHMLSTGELYNDLGGDYFARRDPEKTTKRLINQLERLGHTVTLHDAIAA

SEQ ID NO: 216658 - protein, 423 aa, unidentified
MKYALVRVLPEVPPGGVCAGIDWASADHAVCVVDLAGQVADRFAAAHDRAGIAGLIARLRGRGAAEVAIERGDGVLVDALLAAGLTVVVIGSRQVKNLRSRYGSSGAKDDRFDAFVLADTLRTDRARLRPLVPDSPATLALRAAVRARRDLVAHRVSACNQLRAHLAVAFPGAIGLFSELDSPVSLAFLAAFPGQQAAARLDEQALAAWLATVPRRGNTAPAGVLAARLAAAPRGAAGADAAQAAVTTQLAAATAGLAGRVRALEAEIAAQLSAHPDQHIFTSLPRAGTLRAARLLAETGDCRARYPDPWSLAGLAGVAPVTRRSGTYISHEFRWNVNRQLRDAICDFADGSRHASPWAATVYAAARDRGKDHPHAVRITARAWVLIIWRCWQDGTSYDPAKHRALQDVLTRQAAAGTPQPHR

SEQ ID NO: 216659 - protein, 353 aa, unidentified
MKTYYVGMDVHRASIVIVVLNGAGKVVMQSVIETGAERVRGYLKQLRGQVYVTFEEGTQANWLYEVVRPLVTEVVVCDPRHNKLMQSGNKSDRVDAQKLAELLRLGSLKAVYHGENGVGALKELVRSYDCLVSDTTRVMNRLKAIYRGRAIGCAGHEIYRQDRRQQWLEKLRERGAKQRASCLYQQLAALKPLRHEAKRLMVKEARRQPAYPWLLSVPQFGSVSVAQLLAIVSTPHRFRSKRQFWTYIGLAVVTRTTADHEVVNGVLRRSQRPVSTRGLNRNHNHLLKRVFKNAANGACHGGPFKAAYELRVTQGMVPSLARLTIARQLAAITLAVWKRGEQFNPERMKQQAA

SEQ ID NO: 216660 - protein, 351 aa, unidentified
MDSTKYIGLDVHKETISIAVLNSSGKLVMETIIETKASTLLQFVQGLRGSLHVTFEEGTWAAWLYDLLRPHVTKVVVCDPRKNALLKTGNKSDRIDARKLAELLYLNKLKPVYHGEHGVRALQELSRSYLTISGDLARVMTRLKAMYRSWAIPCAGKQVYAPRYRSEWLGKISEAGVRRRAEFYCQQLDALRALRQQVRRELLAESGKHKASKLLCQIPSIGPIRAALLIAILQTPHRFRTKRQLWAYGGLRIETHSSADHRYVEGQLRPSKRPVSLRGLNRNHNHELKNIFKGAAIIAATKAGPFQEFYAALVAKGIRPEMARLTLARKIAAITLLVWKKGATAAPLGWL

SEQ ID NO: 216661 - protein, 393 aa, unidentified
MQTPIYVGIDVSKDKFDYAAIDTQNTTIKKGSLQMNRDGFQELEKLIQSYPNAVVGFESTGTYHINIMSFLLSITNHVHLLNPALVKKFAEADSLRKTKTDAVDALVIARFLIHRQHNISATTEIDSAYLTQLARLRESITRDVAKTKTHLKQMLNIAFPELLKSANVFTDTLLHILIQFPSAKAIRKATKKGIRKTFYNLTKSRGKNPNLNPDQLYELAKKSIGTADESLEMAIQFDIKHLEFLQKHLDEVTSKLIDNVNKRFANELEILKSIKGIGDTTASHFLSEVKNIHRFSSAKQLIAYSGTDPSVKQSGNMIKKGKISKRGVSSLRRVGYLITCSVIRHDCVFRDYYLRKRAEGMVYRKAVIATWNKLLRVIFAILTKQVKFDHNHG

SEQ ID NO: 216662 - protein, 397 aa, unidentified
MIAVGIDISKAKSTVAVIDSDGTVLASPFTMAHTQPEMEAFVTYLKGLGEPTTILMEYTGHYHYPVLKKLQDEGFPVCIVNPYQMKKYGDVEIHKAKTDKKDALRIAAYALEKSYKLVPYSSMEQKYEDLKFLSRQYSQRITYVAKLKVQLIALLDQTMPGITRILPLNSRNPEKCALLLFIKRFKSFDEIQRIGKARFLASYDVLAKKTSERSASSKGLSIYELAVDSITTRGEDPYIWLSQNQCVDLLSTTQNAADEIISQMRNIAETIPEYKVLRAMHGVGDRLGPIILAEIGDVHRFHSGKALNSYAGNDAPPYQSGQFESRNRHISKRGSSALRKACYEVMQALKLIKPQDDPVYLFMLKKEQEGKPFNVAKMAGVNKFLRIYYARAMELYK

SEQ ID NO: 216663 - protein, 482 aa, unidentified
MKPRPQEKNKRATNHPTQHHWHEMNRKQRRETMRKIQSEDLTLEVLHPDAAGIDIGNESHYVAVPPSRDTQPVRRCGCTTAELKAMADWLKQCGIRTVAMQSTGVYWVAAYDIFEQAGLEVYLVNARDTKNLPGRKSDVQESQWLMKLHTYGLLRNSFRPSQEIRTMRTYWRQRNDLVQSAGRHILRMQKALTQMNVQLANVLSDISGVTGQAIIKAILAGERDPHKLAQLRDRRVKASQEQIARYLEGNWQEDLLFVLKQEQEAYEFCQQQIAECDHQLAQYLQQREDRSQGAPLPEEKRKGRLKKKRANKPQFDLREGLFRMTGTDLTRIDSIDVMTAMTVLSEAGWDMSKWKTEDHFVSWLRLCPDNRISGNKVIGKGRLPTNNPITIALKMAASTLRLSKTYLGAQFRRFRTRLGAPIAIKAMAAKLARLVYRMLRYGMKYVDQGADFYELQHRQLQVKQLKWKAAKLGFQIVQATAA

SEQ ID NO: 216664 - protein, 344 aa, unidentified
MSKHSIRAGDVAGLLVRLAQLKEKARGRTGRDFPIIAIQEAGLDGFWIHRVLQSEGIESHVVDAASILTSRRRRRAKTDGIDGETLVRTLLAYKRGEPRVCAMVKVPTPEEEDRRRICRERKTLVGERVEHVNRIKGLLFAQGVSNYEPLKRNRRARLEELKTGDGRPLPAHLKAQIGRELDRLELVLPQLKAVEAERDALLKPVSEGCPTPAAMLAQLKGMGPEFTAILWSEGLFRSFSNRRQLAAYAGLAPTPWQSGSVAHEQGVSKAGNPRLRTTMIQLAWLWLRHQPTSALSVWFRERVQSKGGKIRKTTIVALARKLLVALWKYSTSGVVIEGAAMKTI

SEQ ID NO: 216665 - protein, 330 aa, unidentified
MNSICLSTDQLTAALPVLGLDVAKKSVQAELRTNGKRVRFGFENNAKGFAQLARMLKEQGAPKVWAGLEATGPYSHALALWLHGQSHRVSLLNPRRVKQYARSAGNRNKTDLLDAAIIADFVCAHLPAAWQPPTLEVAQLQALVRRREELSLMLQAEKNRLEGVASHVRCSLERIIDTLSAEKTRLEKLITQQIRSHQQLSRDHQLLCTIKGIGSLTAAILLAEMARPGQVERARQAAAHAGLAPRREQSGTSVRRNRGLGKEGNRYLRKALYMPALVAIKYNAPLRHFASRLRTAGKPKMSIVCAVMRKLIHIAFGVLKHQKPFNPSLA

SEQ ID NO: 216666 - protein, 432 aa, unidentified
MKTYILRPFDPVERQTPRAKSRPALGPRLGLPVQPTLFIGLDVHSDSIAVGLAPSGSAEVRAYGVIGGSHDDVLKLLKKLGAAHPGWLLKICYEAGPHGYPLCRCLRAHGYDCMIVAPSKVPRKPGDRVKTDRRDALQLARLYRAGELCAIYVPDPQDEAIRDLVRGRFLVCRQQHRARQQLKMFLLRHNIRYTGKTSWNPAHLRYLAQVKMPFPVQQIVFQEMLDVITEASARLERLEQEIARAVPVWRWYPVVQALMSLRGMALLHAATTIAELGDLNRFTHPSRLMSYLGLVPSEDTTGTDRRQGGITKMGNGPARRALIEAAWNYRTAPRISPHLRKRQEGLPKAVLEISWNAQRRLHHRFVHLTRVGRKKSQVAVTAVARELSGFVWAIARLVQPLPPKRTTDPALTPTSLAAVSSRHSSPRGIRRR

SEQ ID NO: 216667 - protein, 344 aa, unidentified
MVTTIGIDPHKATHTAVAIDGSENVLDEITVRADKDQTNKLIKWAASVNGDGRLWAVEAATGLGHLLSQQLVAHGETVVDVPPVLASRIRVLSSGKSQKNDPNDARSVAIAALRRDGLGEVKREDEAAILRMLAKRHLELTALRTQAVCRLHALLAVLRPGGMGHRMSAKRASRMLQGIRGLDAVGEQRRLMAKAHLADIRRLDRDLDTNKKQIRTAVVATDTTVTDIYGVGPVVAAFLIGYSPPIDRFASPDRYAAYNGTAPIEVSSGGKVRHRLSRRGNRTLNHAIHMAAITQISHDTPGRVYYDRKMAEGKTNKEALRALKRRISHVVYRHLKADAEQHDA

SEQ ID NO: 216668 - protein, 413 aa, unidentified
MNAVGIDVSKKKSTVTIRQPGDVVLLPPRDYRHTQSSINELIATIKGLDGETKVCMEHTGRYYEPVASWLTKADIFVSAVNPKLIRDFGDESLRAPKTDKADSKKIARFALDRWTKLRQYSPMDETRNQLKTMNRQFSFYTDQKTAMKNNLIALLDQTFPGANGFFDSPARSDGSQKWVDFVYTYWHVDCVRGKSLSAFTEHYRSWCKRKGYNFSAGKAEEIYRVAADLIAVFPKSENTKMLIRQAVTLLNATSQMVESLRIQMDQVASTLPEYSAVMAINGVGPTLGPQLMAEIGDPTRFTHREALTAFAGVDPGADQSGDHNRKSNRTSKKGSPYLRKTLFLIMDGLIQRSPADSPVYAFMDKKRSQGKPYLVYMTAGANKFLRIYYGTVRDYLKQKGLWPDSESDVVNPD

SEQ ID NO: 216669 - protein, 425 aa, unidentified
MNSNTNHKINQVSENTLVIGIDIAKHKHYACAIDERGRVLQKSFPVTQSRDGFEAFYTHLLALKSIHGKQDIIVGFEPTGHYWMNLATFLTNYGIPFVMVNPLHVNRSKELDDNLQTKNDQKDALVIARLMRDGRFSYPRLLEGVEAELRNGATLRSKIQEDLNALQNRIVRWIDRFFPEFTKVFKNFGKMAYAVLEKTPLPVDIQGKTPEELLFLYRQVEGMKSPQLPKAKQLVEVAQHSIGLTEGLVMARIEIATLLQQHHLLQEQLDTLNEQLGELAKQMKDYEYLASVPGIGDITIVDLLSEVGSLTQYEHPRQIIKLAGLTLRENSSGQHKGQKRISKRGRRKLRALLFRVMIPLIRHNQAFKQLHEYYTTRTINPLRKKQSIVVLCGKLLKILHALCKKKIQFDEQQMMKNLYCLERAA

SEQ ID NO: 216670 - protein, 403 aa, unidentified
MNSVGIDISKGRSTVAVMRPFGEVVISPFEVHHTDSELSALARRLKSLNGETRVVMEATGNYHAPVAKLLHDAGLYVSVVNAKLVHGYGNNELRRVKTDKKDAVKLANYGLDRWLTLPRYVPEEGARLLLKNCYRQYRQYSKVQTVLKNNLISLLDTVFPNVNRLFSSPVRGDGSEKWVDFVAEFWHCRCVTEKSEKAFTNKYQRWCKTHGYNFSEAKAHTIHAKASGHIGIMPKSETTKLLVEQAVVQLRTTSTTLTALKREMLTLAAQLPEYPAVMGMFGVGPTLGPQLIAEIGDVRRFYSKKALVAYAGLDAPPNDSGDVTGKHKSMSKIGASSLRRTLFLVMSVYLQNAPLDEPIYQFMDRKRAEGKPYRVYMMASANKFLRIYYATVKAYLESLEHTT

SEQ ID NO: 216671 - protein, 355 aa, unidentified
MRYFKNTEEFVFGKAVFCGIDVHKKDWIVCFVCDGEVVEKQRIPADFNRLEKMLMSYAGARSIQLVYEAGFCGFWLYRRLRAHGYLCTVTPPSLVPDSGSKVKTDNRDAQSLAFYLAAGLLKAVYVPPVEVESDRRIIRRRNQLRKALTRDKNQIKSFLHLHDIAMPADVRSKWSRAYLAWLASLSWSSPSDVFTMGSLLRSYARHREELVLATRYLRQLSRTEPYADNFKRLCALPGVGLITAMTFLLEIHDFARFKGGDQFASYLGLTPAQFSSGPHVRLGHITRQGNAHVRGALVESAWTVIRYDPHLRAKYERIRARGTNGKKAIVAVARSLAIRLRRCLLDETPYVVGVC

SEQ ID NO: 216672 - protein, 387 aa, unidentified
MQKPHDNSKVCRAAFVQDSTLVVVIEMALTSWLVAGMIPGVDREPLKKIAPDPEELLQLLYRWRDEAIKAGREITRIAVAYETGRDSFWLARWLRARGIDAHVIHATCVAISREHRRAKTDRIDTAMLRRGFLGWLRGEPGHCSLAIVPTVAEEDAKRPHRERESLVQERTSTVNRMKSILIQFGVRNFNPVLRKASEKLDAVRTPEGIPLPPNAAAALRRHMERLRVIKEQITAIERTRLQRLQRDPADKMNAMVFLLVRIIGFGVETAEQLVHEILFRDLRDRKAVARYAGLTGSPDESGSKRREKGLSRSGNGRVRTILIQLSWRLLKLQPGSELVLWYQKRTADAKGSRKPMIVAFARKLIIALWRYVNTGLLPEGFELKPAA

SEQ ID NO: 216673 - protein, 342 aa, unidentified
MEHYAGIDVSLECSSVCVVDASGKIIREGKVASEPDALISWLKSRGYELIRIGLEAGPLSQWLFAAMREAGLAVELLETRHVRKAFEAMPVKSDRNDARGIAQLMRLGWFRPVHCKSMGAQEVRAVLTARKLIQTKLQDVENSLRGILRGFGLKVGKTTDRSFSGRIQELVKGQPSLEAIGEALLSVRAGLLREFNAFEKRVRAMARLNARTRLLMSTPAVGPIVALTYASAIDDPARFKSSKQTGPHFGLTPKRYQSGETDYSGRISKVGDASVREALYQAAHVMLTKPVKGCPQLKSWAMRIARRAGMSKAKVALARKLAVILHRMLANGTPFNAAAAAA

SEQ ID NO: 216674 - protein, 377 aa, unidentified
MKKELDLGLDVHKESILTATAEEGRRGEVRDTGAISNDLHAVEKWIARLRKVHGKETRLRACYEAGPCGFGLARRLRQLGVECEVVAPSMTPTRSGDRVKTDKRDARKLARLLRAGELTPVYIPEATDEAIRDLCRARTDAVDDRRRSRHRLKGFLLRHGYRYQGKSSWSAAHERYLRELVLPHPAMKVILEEYLQGIAAAGERIERCEMGMRDLLEKWRLAPAVRALMAMKGFQVVAAMIVVSELGDIHRFGHPRQLMAYLGLVPTENSSSDKRRQGRITKCGNAHARWLLVECAQHYATPPKVSTHLSRRQEGQPQEVRAISWRAQNRLHHRYKALLGRRLQRNKAMVAIARELCGFIWELLRTQSCYQASSSPS

SEQ ID NO: 216675 - protein, 412 aa, unidentified
MEVLVERAAALDVHKARVTVCSRTPGVAGEREEQVETFSTTVRGLLVLADWLEAQRVTQVAMEATGVYWKPVWAVLEDRFDLVLVNAHHVKNVPGRKTDVGDAQWLCRLVEAGLLRPSLVPPKPVRALRNLTRYRKTQIQDRQREANRLHKILEDTGIKLDCVASDILGASGRAMLDALVAGTTDPDVLADLARGKLRTKIPGLREALEGRFDRHHALIVGHILAHLDYLDEAIAQLSQEIEEQLRPFAPAVDLLCSIPGVQRRTAEVIIAETGGDMTAFPTAKHLASWAGMCPGNHQSAGRRGAGTTRKGSKWLRAALAEAALAAARTKHTYLAAQYRRLSARRGPRKAATAVGHSILVACWYMLQTGQLYNDPGGDWYLRRDPARHTRRLVTQLEHLGHHVTLHQPAATG

SEQ ID NO: 216676 - protein, 352 aa, unidentified
MSRSSSSSAIATLGIDLGKNSFHLVGQDQRGAIVMRIKLSRSQLTQRLANIPPCLIGMEACAGAHHIGRQLRALGHDVRLIPAQYVKPFLKGHKNDDRDAGAIAEAVQRPTMSFVAIKTPEQMDLLALHRVRSRLVSQRTGVTNQIRGLLLERGITVRQGLAPLRQALPSILGSYSDALSLRIVHLIADLAEDWRQLDARIADVSAEIEALAAQDEHCQRLMSVPGVGPIISSAVVAAIGTGAGFRQGRDFGAWLGLVPKQEATGDRTILGKISKRGNKYLRMLFVQAAHIVLVRRPHGARLGLWPWIETAGRRLHRNMLVIALANNLARIAWAVLARGHAYQPRSASHAAA

SEQ ID NO: 216677 - protein, 337 aa, unidentified
MDQITTIGLDLAKRVFQVHGVDGSGRVVVRRQLRRHQVVPFFGKLRRCVIGLEACGTAHHWGRALSALGHDVRLIPPAYAKAYVRRNKTDPADAEAICEAVGRPWMRFVPLKSEAEQAITAVHRVRERLIGQRTALQNMLRGQLAEFGIVAAKGAWHIKELTGRLEQPGSLPEPLRPVLLGLAQLLAELERQIAAIDARIMAWHKASARSRDLATIPGFGPILASAMTARVVQPQRFTSGRDLAAWVGLVPKQASSGDTLRLGRISKQGDVYLRRLLINGAQAVLNSRRAKSDPWIQRLLASKPRLVAAVALANKMARIAWAVMVRQTSFRQVPAAA

SEQ ID NO: 216678 - protein, 320 aa, unidentified
MTRVICGVDVSSVSLAARIGRAGAEASFPNNPEGIFALAGFCCTHEVDLVAMEATGGYERQPFALLAEQHLAVAILNPRAVRRFAEGMGLEKTDAIDAGVIAWFAEVKRSPPQALAPASQQRLRALVTRLRQLTGIRTAQRNQARLITDPAVLASFTELLALIARQMRELETAIAGLIAADPLWRELDQTFRSIKGVAGRTVARLFAEMPEIGTLSNKAISKLAGVAPLANDSGKHQGKRRIRGGRAAVREILFVVASVAGRYEPDFILFQKRLRAAGKPGKVVRIALAHKLLVRLNAKAREVRNRIEATPITGPSSVAA

SEQ ID NO: 216679 - protein, 346 aa, unidentified
MRDNSEVFEISVVGIDLGKNTFHLHGIDASGHVILKKQVTRAGLLRLMSQLPSCLVGMEACGGSHDWARRILKMGHDVRLMGAQFVKPYVKSNKNDFSDAAAICEAVSRPNMRFVPIKGMEQQDVQSIHRARSLAVSHRTAQANQMRGLLMEYGIVLPQGMASLRGRIPDMLADADNDLTPIFRELLCQLADEVRRLDERIVCYDRQIRRLAEQSDACKRLMSIPGMGPMSATALVAAVADAKAFGNGREMAAWLGLVPRQHSTGGKSRLLGISKRGDSYLRKLLIQGAQSALRVASKKPDRLSKWVCELSERRGRNVAAVALANKNMRTAWVLLTKHECYHPAMA

SEQ ID NO: 216680 - protein, 425 aa, unidentified
MNYKQNEKINQVKESTLVVGIDIGSTTQYARAFDWRGIELGKVFTFSNSREGFESFKAWMQRLQDKYNKSDVIVGIEPTGHYWFDLGAYLEDEGILLVMVNPYAVKQTKELDDNSQSKNDRKDPKVIAKLVTEGRYSAPYTPDGVYADLRVMVANRKRLIREITQIKNRFARWFAIYFPEYTDVFGDYEVQSSMLLLKKACTPEAIVELGAEKINQIWRDAKLRAVGMKRATTLCETAKRSIGLKKGSSAARYEMKLLLEDYEYKKAQLDAVMEEIEKLCRKIPESEQMLAIKGIGVITVAGFLAEVGDVRRFESPRQIQKLAGLSLRENSSGKHKGQTTISKRGRSKLRAVLFNAAIPLIAKNPEFRSLHEYYTTRANNPLKKKQSVIAISCKLIRVFYAILANGVTYDPEKMISDIHRETQAA

SEQ ID NO: 216681 - protein, 439 aa, unidentified
MPIIHQGAAGIDIGSRFHVAAISPDLSEQSVRTFQAFTADLHAMADWLIQSGVTTVAMESTGVYWVPVYEILEDRGLEVILANARDAKGVPGRKTDVNDAQWLQKLHACGLLKASFRPDRQISALRSYLRQRERHLDYCAAHIQHMQKALTFMNLQLHHVISDVTGVTGMKIIRSIVRGQRDPKQLATLRDSRCKATEETICAALVGNYQPEHLFALEQAVLLYDFYQLRVHDCDEKIATALDALNQSTSVPDVPLPKPRHKTRQPNALNFDVRVPLYQLAGTDLTQIHGIGPYLALRLISECGTDLSRWPSAKHFTSWLTLSPGSKTSGGKVLSSYSRKTKNRITAHLRLAATTVGRTNTALGAFYRRLSARIGKAKAVTATARKIAVLFYNAMRYGMDYKDPGSDHYEQQYRKRVVKGLHRRAAEFGFTLHEVECVS

SEQ ID NO: 216682 - protein, 418 aa, unidentified
MDEIQSWFAGVDWASQKHDVWLADASGKRLGKRTFAHSGEGLAQMCDWLMATSGGKPEDIHVAIEVPHGAVVETLLDRGFKVYSINPRQLDRFRDRFSPAGAKDDSRDAETLSSSLRTDRRAFHQVSLAGPAIIQLREWSRMADDLRADQIRHANRLREQLQRYYPQMLQFDSDLAEEWVLKLWEAAPTPAKAARLRQAEVEKLLKRHRIRRIDAAKVLAILKEQALIVAPGVTEAAVAHIRVLIESIRLFTQQLKEAHRQLDKLCKLLAAPIAGENEQIGPEPEQTLGAILQSLPGAGRIVISTLLAEAFETLKRADYPILRKLCGVAPVTRRSGKSRAVTRRLACNPRLRNAIHYLADAARRSDEKSKAKYLALKARGCSHARALRAIGDRLLYVACAMLKNRTLFDPCLESRKCA

SEQ ID NO: 216683 - protein, 338 aa, unidentified
MMTTISMLAIDLAKGSFQVCAIGLDGAVLYNRVLSRTRLTNLLAEQSACVVAMEACATSHYWGRVAQSHGHEVRLVPAVYVKPFVKRQKNDKADAEAIAEAASRPTMRFVAVKSAETQGRAVAFRTHQCLVRQRTQLINALRGHLAEFGLVAPKGPASLKVLENALEDQASDVPGHVRGMGAIYVEQIARLTEVIGRLAEELEAASRTDTQLRRLCTIPGIGPVTAGAVAAFAPDLATFDSGRNFAAWLGLVPKQRSTGGKTRLGSVSKMGQTDIRRLLIVGAMSVILWVVRKGGSANRWLAALVMRKPKMVAAVALANKMARMIWALTTKEQDYRMA

SEQ ID NO: 216684 - protein, 431 aa, unidentified
MRKKAAVCLPFILARGLLGFWPEQSRTNGRDTRVPEALQSKQFELANTPMNSELYLGLDVDKEWIVIAVAEWGRNAPVHDLGAISNDVHALEKLLARLRKRYGPEVMMRACYEAGPCGFGIARRLGQLGVDCAVVAPSLTPTRAGDRLKTDKRDARKLARLLRAGELTAIYIPEPTDEAIRDLCRARSDAVDDRRRSRHRLKAFLLRHGYHYQGRTAWSAAHERYLRELVLPHPAMKVILEEYLISVQLASERIARTEAAMSDLLGKWRLEPAVRALMAMKGFQTVAAMIVVSELGALDRFTHPRQLMAYLGLVPSEKSSSDRRRQGSITKCGNAHARWLLVECAQSRVGGTAPPKVSKELSRRQQNQSPQVRLISWKAQNRLHQRYRRLMARRLQRNKVIVAVARELCGFIWELLRTQECYHAPCPSGIN

SEQ ID NO: 216685 - protein, 356 aa, unidentified
MKLVGIDVGKNSHHFCVMDKETGEFNVAPSSFSNNKEGFDFLINSLKPYSKKSILIGMEDTGHYHVALLKFLLSNGYPVALINPKTTDLTRKMEGGITKNDKLDTITICDVLDTPERKKQYRITKVDRFDLYEQRQLTRHHHNLKEELNVYCNRLQKSIDLVFPEFNTLFSSKYSIVYMNLLKTFGSAEAIASTDIRTIRKCFEIKGRGNRISLTPEKLKECAKNSVGISSEVETIQIKHLVSQITLIKEQIAEIDKKIEEFSIKNNSPILSIPGISHFSGTSILAELGDIGNYSKPSQIIKFAGVAPYHYESSQYNAQHTGITKKGSKYLRKTLYQIILTVINNNPVFKKYLNFI

SEQ ID NO: 216686 - protein, 409 aa, unidentified
MRYYLGVDWADQTHAVWVVDERGTKVAMRTVAHTAEGLTEWGRELNEWRAQGIELWAAIERPEGRVVDFLLDQGVRVYAVNPKTLDRARDRFRQSAAKSDPFDARVLADFLRTDHAHLRAVQPSSEAAQELKLLTDDYQRQIRQQTRLVNQLTTTLKAYYPRGLEVAELTTTLAREFLQAYPTPATLTALTERQWQRWARAHRLSETRTQQLWVVLQQPQLPVPAHVVRAKARLMQSLVAQLTVVIEGVDAYREAIEDFFAQLPAAQWIRTLPIGDHGITAPTLWARLGDAPGRWESFRHLQAQAGTVPVTIRSGKQQVVRFRFACDKSLRYIIDHVAFLSLRWSEWAQAYYARQRARGHSYRQALRALSAKWLKIIFVMWERQIPYDEQYHLAMMARQQLRQRQEKFA

SEQ ID NO: 216687 - protein, 341 aa, unidentified
MEEDIIIGVDLAKNVFQLHGARRDGQVVFRKKLSRPQFAKFCAEHPRSLFAMEACATAHYWARELMSLGHEVRLIPPIYVKPFVKRHKNDAADAEAITEAALRPNMSFVVPKSAETQALTMMMRTRDQLLEQRTATVNALRGHLAEFGLIAPVGLKNVERLRELVDVHPDLPELVVTMAKLHFNRIDQLSEEVDTLTGRIKSHCADSPKARRLQTMPGIGPIAAMVIEAFAPDMKCFEKGRDFAAWLGLVPKQHSTGGKTRLGQTSKMGQKDIRRALIIGAMSCIAAAARRGKRCHPWLQDKLDRKPKMVAAVALANRMARQIWAMITREQGYQSNQEVAA

SEQ ID NO: 216688 - protein, 311 aa, unidentified
MTYLGIDVSSTALDVAVAQGTAWQEPNTPAGIAALVTRVGALGPTLVVLEATGAYHLRVAAALGAAGVPVAVVNPRQVRRFAESVGQLAKTDALDARLLARFAAAVQPVPRPLPDAATQDLAALVDRRRQLLEMLTMERNRLAVARPGVRPSLRQTVRALERALAALEDETDRWVHGSALWRAEEDLLTSAPGVGVQTARMLLARLRELGTLSGKEIAALVGIAPFARASGKWRGTQHIRGGRAEVRSALYMATLTAVRCNPVLRATYQKLVAAGKPKKVALTACMRRLLVILNAMVKHHTRWQAHTPATA

SEQ ID NO: 216689 - protein, 334 aa, unidentified
MEKITTVGIDLAKSVFSLHGVDGAGRVVFKRTLRRDQLVEVVAGLSPCLIGMEACSGAHEWGRRFQEHGHTVRLMAPKFVAPYRKSGKNDGNDAEAICEAVTRPSMRFVPVKSLEQQALLAMHRVRQGFVVERTATINRLRGLLTEFGVVLPLRSVTVRRQAAAAAEGLPELARRAIGDLLEQLRVLDERIGDYDREIESQAKLCEPARRLMKIRGIGPTTALAIVATVGNAREFKNGRQFAAWIGLTPSQYSTGGKARLGHISKRGDAYLRNLLVQGARSVLNSAGGHQDRMSRWILELQPRRGYYRTLVAIANKNARIAWALLAKNETLRTA

SEQ ID NO: 216690 - protein, 355 aa, unidentified
MTSVKYIGMDVHKETISLAVMNTAGKLLMESIIETKASTILEFFAGLRGDLRVTFEEGTWAAWLYDLLQAHVTEIVVCNPRKNALLKDGNKSDRVDARKLADLLRGNYLKPVYHGEHGLRMLKELSRTYLTVSKDLVRVMNRLKALYRSWGIAYAGKSVYIPSQREVWLNEIKEAGVRRRAEYLYQQLDTLLPLRKEVRRELLSESRKHSATEILRDIPTIGSIRSAHLVALIQTPHRFRSKRQLWAYSGLALETHDSAQYCYVDGQLLRSRKPQQLHGLNQDHNHDLKGIFKGAAHKAASSPGPFHEFYERLLAKGTKPSLARLTLARKIAATTLTVWKKGVRFNPEQLKSQAA

SEQ ID NO: 216691 - protein, 318 aa, unidentified
MSMYFIGIDISKYKHDCCIISAANQKVVSKVIIKNNKAGFNELLTIIHSLANPADIRIGFESTAHYALNLELFLENSLLTFMEVNPVLISEYKKSKTLRRTKTDSVDCESIARWLMTVEYKPHSKGFYHAYSLKSLTRLRDKLIRQRSFYLVKITNAFSFQLKQLIDRMNFLDKQIEALDCQILEYYEKFDCYLHTIPGIGIIGAATILAEIGDISRFKNSSALVAFAGIDPTVRQSGEFNSTHNHMSKRGSPYLRHAIFLAATTCSFHNSPLNAYYKKKRDQGKHHLTATGAVARKLTTIIYAVLRDSKPYEPKKFC

SEQ ID NO: 216692 - protein, 351 aa, unidentified
MRKVYIGIDLAAKYCWGATVDGKGEIISLERFKTSEENLIAYVRSQRGERTVLLEECDLAGWAQRVLMPYARKVAVCDPKHNLWIHRDTVKNDKIDARKLAHIAMLGTYKEVYHTADERIYHLHLAVKDYDRLVGRTRGLKNQIKARLRAQGIICEGSKVFGKKGRQQALSLIRSPLLREMVASDYETLDFLLRKQAQAKGRFVRLAREIPVVSAWQEMPGVGPVGAAKFCAYVKCPHRFADKSDLFKYSRLGVTNSVTGGRQTKRQHLDRSGCGALKDVSGKAFRAAMCTRGDNLIKRSYERALAGSGSQLHARLTTERKILVIMWAMWKHGTAYDDDYDRKNGACEARL

SEQ ID NO: 216693 - protein, 404 aa, unidentified
MEVVHERCCGVDVHKKTVVACVITPAGQQTRSFGTTTRELRTLADWLEAEGVTHVAMESTGVFWRPVSNVLDGRGLTLLVVNAQHIKAIPGRKTDVKDAAWIADLLRHGLLRGSRIPDRAQREQQELVRYRTRLLQERAQVVQRIQKVLEGANIKLSAVLADVVGVSGRAMLEALVAGTADAEALAALARGRLRAKHAALTEALEGSVGPAQRVLLDSHLHQLDFLDGEIARLSEEIAERFRPFEAALVRLDTIPGIGQRAAERILAEIGADVSDFPTAGHLASWAGLCPGNHQSAGKRLSGRTRHGNTWLKAALVEAAWGAVHTRDCYLAALYHRLAARRGAKRAIVAVAHALLVIVYHLLRDSTAYRELGGNYFDERDREATARRSVRRLERLGFKVTLEVA

SEQ ID NO: 216694 - protein, 319 aa, unidentified
MKQVEDKIYIGIDVSKKKLDIQYDETGNVLTIENHKNNFKKLNDYIPRDKKRILVVLEATGGYEKEIVEWLVSRHIPVVVANARRVRDYAKAMGQYAKNDHIDSGVIREYGQQFGHKLHIKQAKSKLEKTIDELSRRRAQLISGRTKEKQHLATIQHGEGQKSIKRAIKFYNDEVDKITKKLALAVSKNDELQAKAELIQTVKGVGDVTTYTLIGELPELGQVDNNKIAALVGVAPFCRDSGTMKGKRTTWGGRSSVRAALYMATLSASRHNPAIKLFYERLIAKGKAKKVALIACMRKLLTIINTMVKNNEPWHAEMA

SEQ ID NO: 216695 - protein, 364 aa, unidentified
MDAPRRHLRAKVKAFQPSPREASVEQVITIGLDIAKYVFQAHGADAAGHTLFRKRLMRRKLLEFFAAQAPCVVAMEACAGSHYWAREIGKLGHTVRLIPPAYVKPFVKRQKNDVADAEAICEAAQRPNMRFVPVKSEEQQANGVLFRARDLLVHQRTQCTNALRGHLSEYGYVFPQGITQVAALIAHVEDPNATLPGNARTILKLLIDTFTTLEGQIHELDGEINRRSKEDPVARRLMTIPGVGPITATAITALVPAAESFRVGRDFAAWLGLTPLQKSTGGKQKLGAVSKRGERTIRRLLIIGACAVIQQASRRGAPAGSWLAQMLLRKPKMLVIVALANKMARVVWALLVKGGVYRAPAAAA

SEQ ID NO: 216696 - protein, 468 aa, unidentified
MPKSGPKSGRRDHTSPTTLLRVNPNAAGIDVGGASHYVAVPADRDDQSVREFAAFTGDLYRMADWLKACGIETVAMESTGVYWIPIFQVLEERGFEVKLVDARQLKRVPGRKTDVADCQWLQQLHSFGLLSGAFRPDNQVCILRSYMRQRAMLASYAGQHVQHMQKALVQMNLQLQHVIDDITGATGMRIIRAVLAGERDPHRLAALRDERCKNSAATIAKALQGDWREEHLFSLAQAVELVEAYQAKIAACDERIQAHLHTFSDRSDGQPLPPGRPPRADRHDLSFDATAELYRMTGMDLTAVNGLQAHTILKILSETGLDMSKWPTPKHFGSWLGLAPNNRVSGGKILSRRTTPNANRAATALRVAAQALHHSKSALGAFLRRKAAQLGMPKAITATAYKLARIIYTMLTKGTQFVERGQDYYERAYQTRVLKNLNRRANGSATPSSNTTSPSLNLLILDHEVRCH

SEQ ID NO: 216697 - protein, 320 aa, unidentified
MSTSSVVVGIDVAKAHIDVVVLGAPWDTQRFANEANAHEELAGRLQQMHAELVVMEATGGYEAALACALQAAGLAVVVINPRQARDFARSMGRLAKTDAIDARMLAELAVVLLRREDLASLLRPLSDPARQVLAALVARRRQLLGMLVAERQRLQLAADVVRPSIAAMIEAIRKQLDDLEAQLVGHVQAHFEPLERLLRTASGIGPVSSAALIAELPELGRLNRRQIAALVGVAPMAKDSGATRGRRRIQGGRFETRRALYMAALAATRSNPVIKTYYERLIAAGKLPKVALVACMRKLLTCLNAMVKTNSPWSDSPAGA

SEQ ID NO: 216698 - protein, 320 aa, unidentified
MESISVYRSALGIDVCAERLDWHRLPERSRGEVANTPDGIQSLVADLRKVGVDIVVIEATGGLQRQVASALVAAGIAVAVINPRQVRDFARASGQLAKTDQIDAQVLALFGLRLQPQPRNLPDAAALELADKLARRSQLVEMSAAEKNRRHRASTAMKRSIDGHLAFLDQAIKTLDQDLDDTLRGSPAWAEKVALLEVVTGVGPQTLRRLLIDLPELGKLDRHGIAKLVGVAPLNRDSGTFRGKRAIWGGRVKVRNTLYMAALSASRFNVPLKAFFERLKAAGKPHKVALVAVARKLLTILNAMLRDTSAWNPKLVEKRA

SEQ ID NO: 216699 - protein, 341 aa, unidentified
MESAAIIGIDLAKSVFQLHGADVTGKPLFRKKLTRDQLSVFLASQSPTVVAMEACGSAHYWGREIGALGHDVKLIPPIYVKPFVKRHKNDAADAEAISEAAIRPTMRFVPVKSAEQQSRAMVFKTRDLLVRQRNQIVNALRGHLMEYGIVVPAGFTFVRRLEREIEEPNTSLPMLVVELGRLLIDQLQSCNTKISVVERQMKEEAKRDPEALRLQTAPGIGPVSAMAIKAFGPDLNCFRRGRDFAAWLGLVPLQKSTGGKQKLGRTSKMGQRDIRRLLIIGAMTRIRWAVKNGAPEGSWLQKMLQRKPRLLIAIALANKTARAIWAMMTKGEEYRGEPVSA

SEQ ID NO: 216700 - protein, 342 aa, unidentified
MEISTIGIDLSKTTFHLIGLSPRGEIVLRKKLSRKQLLTFTATRTPLLIGMEACAGAHYLARALRDQGHDARLMPAQYVKPYVKTNKNDYLDAEAIAEAVQRPTMRFVPIKSDEQLDLQALHRVRDRWVARRTAVMNQIRGFLLERGIAIRKGPSYLVSQLQIIFSDGDSLFSGRLLHLIRELKLEWDELERKIEESSAELARIAKQDDGCHRLMEVPGFGPIVSTALVAAIGNGISFRKGRDLAAWLGLVPRQHSTGGKTRLLGISKLGNEYLRRMMLHGARSVVMQMERNPSALSEWLTNLSARRHRNVTVVALANKMARIAWAILSKGTHYNEPAFAAA

SEQ ID NO: 216701 - protein, 471 aa, unidentified
MGKGSGSGTTRGDRRRNARRERLRAVLPRDGAVIGIDLAEDKQALAVIDHDVRVVARKTVRVKAFRLGEALDWAVAQARAKGFGRVAVACEPTGPRWMQVQRLCAERGLPLVCIQPLVSHIAREQQDYTTHKADEADCVLIGRLAVELHCYVPEELDETWADLRHLGRRRAQLITAATASVQRIGDFLSVAWPVVTETCARPFDSVTWLAAMQVITSRCGGDPGKLAGAGLDEFTAAVRAALPAWGGQRPCGRVSAAVFAALTDTEGVVAWSRRGLLRRVADELGDLARIRAQLRDTEAGMAAVLGELGLSRLGDIPGLSAVGAAAILAETGDPRRYDSSSSLVKHAGLSPSGNASGAFEGRAHISRRGRPALRLAVWRAAWPLLLHNPVLAAKYAAMTAAADAAAQAAAQAGAGRRQVSAAAAAARARRASARVACAASLLRWLWCLVVHGTSWDPAVAAGTAPTPAQAA

SEQ ID NO: 216702 - protein, 476 aa, unidentified
MAKQTGPASGRRKTARNAERRKRAKKEVRAVLGLPVLHADTAGIDIGATEIYVAVPADRDEEPVRCFEAYTGDLRGIAEWLGKCEVKRVAMESTGVYWIPLWQILADAGFEVCLVNARHFKNVPGKKTDVEDCQWLQFLHSVGLLRGSYRPEQAICGVRTLLRYRLELIRFAAEHIQHMQKALEQMNVKLSHVISDLMGVSGLAIVDAILSGERDLRKLAQLRDPRVQASEETIMKSLEGDYRPEHLITLQHSLDLYRHYQKKIGELDQKMETFLSELPDRIDIRKYPMPPRRKKSRAHKAHNTPAFDLRTHCYRILGVDLTAIDGIDEITAHTVVTEVGPDLSAFPSEAEFAAWLRLCPNHGISGGKILSRATRKGKSRLAVALRNAAATLYSSQSPLGEYFRRMKARMGPAQAITAAAHKLARIIYHTITTGEAFDPEILARQDEKQQQKKEAKLRRQAKECGFELVRMQAAQA

SEQ ID NO: 216703 - protein, 358 aa, unidentified
MWCQSSDLIVITELETVMEHTVIAIDIAKKVFQLHWVDTDTGCIERLQLKRAKLLEWFANRAASHVVMEACGGAHDWARALSGIGHEVRLISPRKVRPFVQRNKTDAADAQAIWTASRQPGMHFVPVKTEAQQIVLSLHRLRAQLMKTRIMQTNELRGLLYEFGIVLPEGHAALLKALPAAMCDAKSRLPAVLMDSLDEQLRRIHQLQADIGSIERRLAQQMRDMPACKAVAEIPGIGLLTATAVVASMGTPTAFKDAREFAAWIGLVPRQTGTGGRVRQLGISKRGDAYLRTLLMHGARAVVIRAKDGPTWPWLAALLQRRPYSVAVAAVANKLARTIWAVLARGQAWRPQAWQAAH

SEQ ID NO: 216704 - protein, 333 aa, unidentified
MESQSQRHVGIDVSKDRLDVAVGSEGELWQVSNDSAGHSELLERLSEVKPALIVLEASGGYEAVVAGVLWDAGDPVAVVNPRQVRDFARGMGKLAKTDQIDARVLAMFGEKVPIEVRAPLDAEARELQTMVVRRRQLVEMLTMEKNRRPLVPSGRARKSLDKHIAWLEEAVRRASDDIDQTVRQSPLWREKEDLLRSVKGIGPVSARTILVELPELGRLNRKQIAALVGVAPFNRDSGRFKGQRTIAGGRSHVRTVLYMAAVTAARHNPLIRPLYQRLIAAGKKKKVAIVACIRKLLTILTAMVRDNVHFTGAPHPGLRPTAATAGRGGKISL

SEQ ID NO: 216705 - protein, 349 aa, unidentified
MAMTIIVEPTRAVTGGVDTHLDVHVAAVLDEIGGLLATESFEANQGGEHQLVGWLGSFGPLACVGVEGTGSYGAGLARLLAASGVDVVEVDRPNRQVRRRQGKTDTLDAIEAARAAQSGRATGRAKSRDGNVEAIRALVVAKRSARTTKTRSLNQIRHLGFTAPNPLRERLSGLTAARLAVEAASMRPRAGTDAVTFATKTSLRILGRRVLAIDAELVVLDTLLSALVTTTAPRLLELHGVGIHTAALLLVTAGDNPQRLRSEASWAHLCGVSPIQASSGKVTRHRLNRGGDRQANHALWRIALTRMSSDPRTRVYVERRTADGKSKAEIMRVLKRYIAREVFALLPRN

SEQ ID NO: 216706 - protein, 368 aa, unidentified
MLGCGSKEARTQSTRIRSAHLGFTVNEKGIVMTMIGIDPHKATHMAVAVDDDEQVIDEFTLRSSNDQAERLTSWAEGLGKREWAVESANGLGYLVARQLVACGETVFDVPPVLAARVRVLGSGKSQKNDPNDARSIAIAALRSDRLRVVEPDDHVVVLRLLVKRHRDMARLRNKHCSRLHALLIELEAGGIGGKISVTNASELLDRITVTDEAARYRVLVAREVVDDIARLDTTLKASKKRIAVAVQASGTSLTDIVGVGPIGAATIIGYTNDITRFPTKGHYATYNATAPIEASSGGNKRHRLNLRGNRILNHAIHIAAVTQLRHDTNGRIYYDKKIAEGKTPKEAIRALKRRISDAVYRRLAADNQ

SEQ ID NO: 216707 - protein, 407 aa, unidentified
MMKHVVAFDVSMGKSTMVIYNRYRQCEFEGEILHNRPSFEQLHETLQQLTKQDGQVPEIVFEATGVYSKGLEKFLQDTHYTYCCLNPIQAKDETKSMRRQKTDKADAHKLAQTHFRNERVPTYVEDDYYRQMRAWSRYYDELDTEINHLHNRMHAILQLSFPELETLFSSRSALFLNIVQLYPHPDEVLAHSKTVIRNRLKQNTRKNLSLKRAEEKGHALLEAAKDSYPAISNQDVRCDQVRDYARRIAELKEKKEQLIKQMVALSEGKVEYQVLISFPGIGEVTAVRIIGELGDIRRFKTHKQLNAYVGIDVRVYQSGKYEMKDIINRRGNRHLRKILFFMVKTMITLRQKTKNHFVEYYDKLKTQPQRKPHKVACIACMNKFLKVAFHLITHEITYDYEAATNYS

SEQ ID NO: 216708 - protein, 346 aa, unidentified
MNYIGWDLHQQYSQVAVMTKEGKVIDEFKVSHNPGVFSHPIMLRLFRQPAKVAVEACNGWYWVVDRLEEMGAEVHLAHPLKTKLIAEARVKTDKIDAKVLANLLRTNFLPESYLAPHEVRELREIHRHRAALVKLKTSVKNRVHSILSKHGIFFHLSDIFGIKGRQTLEKVMNQLKPVYAEELHRYLGLIDYLNKEIEKVERQIKSLAKKDKTIELLKTVPGIGEYSAFLIQSEIGDINRFSHPKKLISYAGLNPGADISGKHHYDKHITKQGNVWLRWILIQDAHQAAKSDERLKRIYQRISHRKGKNTAKVAVARELLFSIYWVLKKKAPYCPKSVTPGLAMVP

SEQ ID NO: 216709 - protein, 344 aa, unidentified
MKVSVLGIDLGKNVCSIVGFDETGAVVLRRRARRETLIGLAAKLPPCIVAMEACCGAHHLARLFANQGHDVRLMSPEYVRPYIKAQKNDDRDAEGIAEAATRPTMRFVGVKAQEQLDIQTLHRSRDRLVAERTALINQLRAILLERGIIVPQGKRKLEQYVTALMEGQDPNGLSQRIRTLIADVRGQWLELDRRIAVFDKEFAAFAKENEDARRLTTIPGVGVTIASALIAAVGNAETFEHGRDLAAWLGLVPRQSTTGGKPRLLGVSKRGNKYLRKLLIHGARAALPHIAERDTALGRWAKNLLARVHKNVAIVALANKLARIAWAVLRRGEKFTAKGLPLAV

SEQ ID NO: 216710 - protein, 365 aa, unidentified
MKKSNKDKETMAVEKPSTTLGLDIGDRFSHYCVLNSEGEVMEEGRIRTEEKALRRQFEGEERMRIAMECGTHSPWISRLLEKFGHEVIVANARKIRAITSSESKNDRNDAERLARFAHWDPRLLSPLHHRSVERQQDLTLIYARATLVRARTMIINSARGLVKSAGGRLPNCSSQAFEKQVKPSLPAAMAELVGPMLEQVTALNLQIARMDQQIEGLGKRFSEIRTLRTAPGIGPLVAATYVLTLDQSHAIAHSRQAGAFLGLRPRQSQSGDRDPQCRITKTGNTYLRCLLVQSAHYVLGRFGPDSALRRWGLKLAASGGQRGKKRAIVAVARKLAVILHRMWRSGESFQAFPTAPNHSRMSTGS

SEQ ID NO: 216711 - protein, 352 aa, unidentified
MKQTREKMSYTGKEVYVGMDVHKRTYSVTVICEGEIVKRDTMRADPEGIVHYLKRHFAGAKIHSVYEAGFCGFGLHRVLVASGINNIVVNPASIEVAANDKVKTDNRDSRKQAEQLFRGALTGIYIPTEAEELSRVLTRTREQIVGERARVANQIKGKLHHFGLMTFDDERQVTESYLKELEARDLAENLSYALGLLIAQWRFLTEQIKEIEKKLEGQAKKDESEKIYRSVPGVGPISSRVLSNELGSLSERFSNERSLFSFTGLTPSEHSSGDSIHKGHISRQGSSRIRKYLIEIAWRAIKKDEALKQIFGRIAKTRGKKRAITAIARKLIGRIRACFQQNCLYQLGIVAS

SEQ ID NO: 216712 - protein, 345 aa, unidentified
MFVGIDVHKHQHAAALIDERGGELAALVVPNSPQGYRRLLDWLGEHDATDAVIGVESPGSYGRQLVGALAAAGLEVLHVPAWRTHRERHRQGPGKTDPGDALAIADVVRRKRGELSPAMEPELVRALAMLELQRRRFVRDRTQAIQRLRSDWTQQDPVGEAGALRCNSERELRRLKRIRFGDSLTDQIAARCIRELARDIEDLNQRIAALDREIAELLDQHDNPLADLQGAGTNLTATIIAQAGDVRRFRDAAAFARFCGAAPIPCGSGQPPAATASTAAATDNSTPRSTASPSSNNDTSPPPKPSSPTRWPKARPPAKPDARSNATSPTSSTANSTPGPTTPQR

SEQ ID NO: 216713 - protein, 412 aa, unidentified
MADGTVSWFAGIDWGSEKHQVCLLDAAGKVVGEREFRHGGAGLAALCDWLVSVAGEPGRVAVAIEVPHGPVVDALLDRGFAVHAINPKQLERLRDRVSLAGAKDDRRDARVAAGGLRTDPHLFRPVEAGDPAVIVLREWSRLAEELQQERVRLGNRIRQQLWRSYPQLLAVSDDVTAEWVLDLWTLAPTPAKAARLREATLARLLQRHRIRRVEAEQVVGLLRQPAIPVAEGVTEAAVLHLRSLVARLRLANREFHQAERKLDELCATLSKSAAGASGAPPDATVLSSLPGVGPVTLATLLTEAAGPISRRDYAALRTLSGVAPVTKRSGKSCLVTMRYAAQVRLRNAVFHWARVAVLNDPTCRKRYAALRARGHSYGRALRRVADRLLGVACILLQRQVLFDPDHGTRAAP

SEQ ID NO: 216714 - protein, 416 aa, unidentified
METETHIIERSCGLDVHRDTVVACVLLPGPGRKVQKLMRTFGTYTTELLQLRAWLLEHGVTHVGMESTGCYWLPVYAVLEADPGLTLIVGNAHHIKNVPGRKTDCNDAQWLATLVRLGLIRPSYVPPPHLRELRDLLRTQRTFIHARTAERNRTQNLLERCNLKLGRVVDDVFCVSGVAMLRALAAGQTDPDALAALALGRLRAKRDELRLALDGRFLDHHRFLLQTHLETLDHLDAQIQKLQARIDPLLVPYREPIQRLMEIPGVGDRVAATIVAEMGVDMSLFATDGHLAAWAGLCPGNNRSANKRRGEPARKGNVHLQSMMVEAAVSASRTKGCYFKDKHRRLMARQGRKRANVSVAHKILVSVYHVLRTGQRYKELGSGYLDQLAERRVKNHAIRRLQQLGYTVTVEKKAAA

SEQ ID NO: 216715 - protein, 349 aa, unidentified
MKNISMIGVDLAKNVFQVHGVDAAGKVLVRRQLRRRQMEKFLAALPVGVVVGMEACGGAHHWGRLVQKLGHQARLMPAGYVKPYVKRNKNDGRDAEGVCEAMGRPTMRFVPVKSVESQAMQVLHRTRRLLVRQRTMAANALRSALSEFGIVAAQGLKGLRSLMEELEGEASGIPDMARMALLVLARQWEALNAEIDKLETQIVGAAKTDVVARRLMTILGLGPLGATAILAAVSDARVFKSGRDFAAWLGLTPRQFGSGGKQRSGGISKQGDRTLRTLLTLGATAHLKCERGRGPRDPWLRALLARRPFKVAAVAYAAKMARIIWAMLVSGEPYRAFGQRRKAVVQAAA

SEQ ID NO: 216716 - protein, 314 aa, unidentified
MVNDLTIPTRFIGCDVGKAQIVVFDSASEDVISLPNKAEPLAAFAATLDGNSLVICEATGGYEAVLLDAVVTAGRAVHRADARKVKAFIRSFGTLGKNDAIDARALAQYGRERHDRLIRWSPRERSREQLHLLVTTRREMVQQRVACNNRLQAPRAAGVRDRLRRLLALLDAEIAGIEADINALIHSHETLARANKVLRTIPGIGPVTAFQLIALMPELGTINRRQAAALAGLAPHPRQSGSSEGYRRTRGGRPEIKQCLFMASMAAARKNPTIHAFYQRLIGNGKKPLVALTAVMRKLIVIANARMRASLHSY

SEQ ID NO: 216717 - protein, 345 aa, unidentified
METMYYIGLDVHKKTISYCVKDGSGRIYGEGSIPATRLTLDMWMKTLPQPWTVAMEATIFTAWIYDHLKPHAAAVKVAHPLMLRAIAVAKKKNDRIDAKKIADCLRCDFLPECYMASTEIRERRRTLRYRNLLVRQAVQMKNKIAVLLMEAGVSYNKQKLHKVGYFRELLATNQDIDEGLKPLLRLCRETVVRLGKTESALVRSLQRDSLLMERVERLMTIPAVGPITALTWALEVGEVQRFSSIKKAISYCGLCGAERSSANITMRTPLSKQRNKHLQTVLIEAAKMAPRNSPELAMVYEQEKQKGHANRATLAVARKLVAYLVAVDRRQKEFLTVERENRTAA

SEQ ID NO: 216718 - protein, 316 aa, unidentified
MSAEGEAIRSNDYRKDTTVKAPSTRPAAVLGLDVGKSSHWACLIDRDGEVLASAPVRNREAELDALFASAPAGTLVVVDQFRNIGSLAVRRARAAGLGVAHLPGLAASRAAGLFAGEAKTDERDAAVIARTALGVPDSLSGVPGRGEALEAARALSSQRDHVVACATRDKNRLRAVLLESCPALEAAVDLSDRRWLELLTVPGIGPRTAAQLAVSVDIGRFPDHDHLASYCGIAPRVRSSGTSVRSVRASRRGDARLKSLLIFSCNSLVRSSGRYGEYYRACRARGMGHGRALKAVARKRLRAIYAVMRDRVPYRE

SEQ ID NO: 216719 - protein, 323 aa, unidentified
MNNKVGMNNTVARFIGIDVSKQWLDVACLPEREVQRFANDGPGLEQLRPWLAHLAPELIVLEATGGFETRAATALAAEGLALAVVNPKHVRDFARAFGILAKTDRIDALVLAAFAEKVHPPVRPLPDEERRELIDLVDRRRQLVTMRAEEKTRLAQATAAARQDIKEHIQWLDERLRRLDIDLTAKLRSSSLWKAKEEILTSVPGVGRVTVVTLLARLPELGSLNRRAIAALTGVAPFARDSGQHRGRRMIWGGRADVRSVLYMATVTAARINPVIRSFYLRLKLAGKPPKVALTACMRKLLTILNTMLRNNQSWQLPATQTI

SEQ ID NO: 216720 - protein, 344 aa, unidentified
MWIIGCDLHARQQTLAILDTATGEVVNETLAHEGDGVREFYSTLPGPVRVGIEATGSMKWFLNLMEELGIDCQVGHPATIRAAEPRRQKHDQRDAELLLKLLVENRFPSIWQPSKELLDLRALLLHRHQWVRLRTRIQNALQAIALANGLRRGSSLWSQRGQQAIRSLPLATHTAHRRSELQAMYERFEAEIEELNERVLEQANRRTTAGLLMTHPGVGPITALATDVFLGDPKRFRDGKALASYIGIIPRENSSGGRQRLGGLTKQGNPLLRFLWCEAAVHLVRRDPELRQFYRRKLVQKGLGKARELAALTGQVPFNVVSVRLVRHPAAESANRDLHSLFLP

SEQ ID NO: 216721 - protein, 360 aa, unidentified
MKKRLTKKASWFKENNFTAEDEIYVGVDVHKRNYHVAIWHNGRIGCAYSMTSDNNKLLRDIQQVRSSLKNIVYEAGPTGYGLVRLLRSTNLPAEVVAVSKTPRMTDTSAKTDRLDCQQLAEYAAKGLLTFVAIPTEQQEADRQVVRLRDQLTSKRKRIMHQVKSFLLQHSISWPGGNWSKILIERLRQLDISSELRFTLAQYLDEYEFFCGKTAETETKLRQIFSSERHSAAIEIFKSHPGVGNIVAWEYRAEMFNITRFSESKQISKYTGLCPRISRSGQTCHQGPITKTGRRQLRAMLVQAAWAWYRIDPHARQIYNRLLHNTGNGKKAIVGLAKRIAIHLWRMLCDGCLYDAKVVKV

SEQ ID NO: 216722 - protein, 378 aa, unidentified
MSNCTRYLGLDVHAETITAAIAEGRGRIRSIGKFPNRPEAVRKLIEKLGGGRNLRVCYEAGPTGYALYWQLTKLGVDCEVIAPSLIPKKAGDKVKTDRRDAEKLAQSYQAGDLTPVWVPTPEHEALRDLVRQRAAAKADESRAKHRLAKHLLRRGLREPEESGAWTHPWWRWVQSLQFEHEAQQVALADCIAEVLHMGERLARLDKAIDRLVETAPPHMRAVIEALQALRGVAKLTAVTIVTEIGTFKRFRRPTEMMGYTGFVPSEYSSGGRESKGRLTRAGNAHLRHVLGEAAWHARHRPWLNLRMKKVLPTLPAGVAAIAWKAQERLHRKFIRMTYCRKPAGKVAAAVARELVGFIWAIGTLVESRLDDDSKVRAA

SEQ ID NO: 216723 - protein, 400 aa, unidentified
MNAVGIDVSKGKSMVAIMRPFGEVVAEPFEVSHTDAELRKLVCFLAKLPGETRIVMEYTGSYWQPIAKVLHDAGFFVSVVNALLIYKYGNNSIRKGKTDKLDAVKIANYCLDRWADLERFAPVDQIRQTLKTCRRQYDQYIKLKVSLKNNLIALLDGTFPGINTLFKSAPRDADGHEKWVDFVGRFWHRECVCGNTEKVFANQYRKWCAKAGYKFSEEKAASIYAYAASQVNTLPMTDAIKCLVTLASAQLNTIIETVSVIQHEMLTLASQLPEYPIVMRMFGVGPILGPQLMAEIGDVRRFDRKQSLVAFAGVDAPPCQSGTFESKSRHISKRGSPRLRKTLFQIMSTIIQHAPADDPVFQFLDRKRQEGKHYYVYMTAAANKFLRIYYGTVTAYLEKL

SEQ ID NO: 216724 - protein, 316 aa, unidentified
MDGANQVWIGIDVAKATLDLHLLPSGQAHSLPNTSPGHTQLKKLLPDPSGCLIVLEATGGYEREVVADLIDAGYRVAVINPKRARDFARALGLVAKTDRIDARVLALFAQKIQPAPSQKTPEKQAEIQQLVARRRQLIDLKTQESNRWDVTHVKAAKKSIQAVINTLEAEIRGIEKVIESLVESDEEWRNKAQLIESVPGLGSVTAATVMADVPEIGKLNRQQISALIGLAPFNRDSGAMKGKRSISGGRKSVRCVLYMAAIAAKRCNPVIKAFAERLAQHGKPFKVIITACMRKLLVILNAIIKSGRPWMAQTTS

SEQ ID NO: 216725 - protein, 348 aa, unidentified
MEQNQAQAQENEHIWQWFGLDVSKKSFTAAFYNGIPDGSKSEVPTFESNQKGVKSFLSWRKKQIAAGFPSGIVMESTSYHSRDLANLLQKQDNSLHVSVCNARSVSYYIKSHVPHKTDKSDAVLIARYGHDFQPPRMKVRPREEKLLKELVSERMKLVNIKTMLSNKNNSLEFKDVRAINKDVLNCLKKKIKELDKRIAEAGKQTVEMNEEIELLDTIPGIARLSASVIYAELGSLKQYTRKQLSGMSGLYPRITQSGSSVKKSKLAKTGSAYLRQILFLDVNHAMGNIPALVALRKRLLARDNTCKMTARCACMRKLLLIAKGVVDSGIPYDPNFQQKKQEISLKMA

SEQ ID NO: 216726 - protein, 354 aa, unidentified
MKLYVGLDVGLEETSVCIVDSEGLTVREVKVNTEPEAIRSALEGYADRLDRVGVEASSLGIWLYRELRAAGLPIIVVEARHMRVSLSTMRNKTDRNDARGIAQMMRLGWYRAVHVKNIDMQKMRTLLTNRKLLKRKLVDLENHVRGALRAYGLLVGAVARGAYEARIRELIEHCDPVFAMSIEVMLDVRRALLEGYERLHRVLLQAVQHDPVCRRLMTVPGVGPVVALSFKVGVDDPHRFARSRTVGAHFGLTPKRHQSGTSIDFEGHISKQGDISVREALCEAAASLLLRVRKWSALRAWGLRIARRSSMLCAIAAVARKLACILHRMWVSETDFHVGFGAKIMQRLRLKPAQ

SEQ ID NO: 216727 - protein, 424 aa, unidentified
MKRTQNEKILQIKNETLVVGIDIGKESHYARAFDNRGIELAKLLRFSNTAHGYEALDEWMHKIMEQKEKTEAIVGFEPTGHYWFTLGDHLQRRGRRLGIVNPFHVKCTRELDDNSPTKNDRKDPKTIAMLVKDGRYRDVYIPADLYSELREAVSERERLQEQLIALSNQIHRWLDIRFPEFITVFKDWGGKTAQSTLKHFPTPARVVAAGTAGLLAIWQEHLKKISLKRAKRLVQAASGSIGRTAGSEAAEAALANLLTQYELITGQRQEIEQLMQELLLRVPNAGKMLEIKGVGMVTAAVIVSEIGDIRRFQDPRQILKMAGLSLKENSSGKHKGKTTISKRGRRRLREGLFRVMIPMLATNAEFRAMHRKNLTRATNPLSKMQSIIALCGKLVRVIYAMLTKGCSYDAEKMTRDMNRSMKAA

SEQ ID NO: 216728 - protein, 352 aa, unidentified
MKHERIVGLDLGDKFSYACVVSAETGEVIQEKRISTRASCLETFLAEQPAMLIAIETGTHSPWISRLLESLGHEVLVANARKVRLIYGGDRKSDKLDAQKLARLARFDPKLLSPIQHRGKDAQAHLALIRSRDALVSSRVGLVNHVRGSVKAFGARLPVCSTRTFARKARAVIPEELLAALEPVLAIIEKLSEQILVMEKRIKVLGKEAYPETNVLRQVTGVGAITALTFILTLEEPSRFKKSRDVGAFLGLTPGQKQSGNRDVKLRISKRGDEGLRRLLVQSAHYLLGPFGSDCDLRRHGEKIEAGGGGYAKQRAIVAVARKLAVLLHRLWLTREIYEPLRNSDKTLAQAA

SEQ ID NO: 216729 - protein, 470 aa, unidentified
MPNKVKSAPPKVKNSYRETLKMLNSHSAGIDVGSIEMWVCVPKKDASKENIKQFGSFTPDLIKLCNWLSECKIESVAMESTGIYWIPLFQMLEGRGFDVVLVNAHELKNVSGRPKTDRFDCQWIQRLHSYGLLKASFRPEDSICRLRVLMRHRKNLVEESCKHIQHMQKSLRLMNVVLEKVISDITGEVGMKIINAILRGEHDPYVLAKYRNERIKSSESTIAKALTGNYRKEEIFILQQAVDSYNHVNKQIKKCDNETEKLIAKIGKNYKNKFHKSSTCINTVEPKKFKNRRKGAFKGSSSKVSGYLQSVIGTEITDINGIDMLGALTLISETGFNMNKWATEKHFCSWLSLSPNRKITGGKLLSSRTKRVNNRAKQIFKTAAVTLRNSNCYLGAFYRRMRKKAGPGVAVTATARKIAIIYYHTLKHGRSFVELGADYYEKTYRDRIKINLEKRAGQLGLKLVELKQAL

SEQ ID NO: 216730 - protein, 411 aa, unidentified
MENVFACCAGLDIHQKSVEACVRRLEPTGPLHQQTRHWGTMTRDLLAMADWMAAQGVTHVAMESTGVYWKPIYNILESRFTVLLVNARHLKQVPGRKSDVRDCQWIAQLLQHGLLKGSFVPPRAQRELRDLTRHRAQLVEEKTRTVNRLHKVLEDGNIKLASVATDILGVSGRAMLEALMEGQEDPVKLADFAQRQLRGKIPELEKALEGHLTEHHRFMLRLLWKELAQQEELIAELDRKIEEHTRPFANEIERLDAVPGVDRRVAEVALAEVGSDVKPFPTHSHVASWAGMCPGNEESAGKRQRQRLTPGNRWLKRSLVQAAWAASHTKHTYLASQYRRLAGRRGRKRALVAVGHSMLVIFYHMLKDRTTYKDLGGDFFDRLEPERLTRYYVKRLEDLGHKVTLEYSVPA

SEQ ID NO: 216731 - protein, 354 aa, unidentified
MAAASIAHAHDPVRVTVGVDTHKDTHVGHAKDELGRDLGHLEVPTTARGYAALLAWARSHGEVVAFGVEGTSSYGIGLSRYLQGEGHLVLEVIRPARQDRRFRGKSDPIEAEAAAAAVLSGKAHNLPRASAQRVEMIRSLRIARASATKARTQAMNAIKALIVMAPESVRDALRNLPNAHLTSTCARLRPGHIVDPTAATKTALRSLAMRCQALEAEARELEIQLDQLTSDSAPVLRSRFGVGSDSAAALLIAAGDNPARLRSDSAFSMLCGSSPLPASSGQTKRHRLNRGGDRQANAALHRIVMTRLRWHGPTKAYMARRLAEGKSKPEVIRCLKRYVAREIYAVLAPVRTGA

SEQ ID NO: 216732 - protein, 357 aa, unidentified
MSNKATKLDFRGQVFHIGIDFHKRNWRVTVLNNGLELKTFSMNPSPEDLSSYLQSNYPGGEYYTAYEAGFCGYWIHRKLESLGIKNLVVNPADIPVNFKETVRKTDTIDSRRLARALYSNLAHGNYIPSLEQQGFRSLCRLRKQLVKDQARVKNRIKSFLDFSGIKVLSQNEISHWSGLFLNYLSNLDLGNEHSNETLSRMLGQLISLRNQIADLVKRLKTIVRQDEAILRVMNNLMTIPGVGFSCAIVLYSELMDIKRFSSVDKLCSYVGLVPDLRSSGGSEYTLGISKLQLQFLRAMLIECSWIAIRKDPALTAAFNTLSIRMKKQEAIIRIGKKLLTRIMYVWRNNEPYICSIV

SEQ ID NO: 216733 - protein, 387 aa, unidentified
MQPAHIQDFTLDDQTLTASLELASKNWKMALQDGMHRSPSEHKAEQEGAADRLEEAIGLIETTRREWGLPPSCRVVIVYEAGQDGFWISRALQKRGYEVVIVDPASIPVERQARRAKTDRLDAIRLLCCLRGWLRGERDRLHAVRVPEVEAEEMRHLMRDRGLLQKEVGQHRDRIRKLLRTVGCWVRVGPPFAGQLERGEVVCHDGAALPPCLRQRLMRECERLDLVTRQLKELEAALPEQLPEATARSVATLQRLRGVGQIGAHRLVLELFWRRFDNARQVGSCVGLVPQPYDSGQSRVDQGISKQGNRRVRALLIEMAWMWLRYQPDSALTHWFARRTTTGAGDPSAGKRGKRVAIVAVARKLVIALWRYLKDGVIPDGAELKYG

SEQ ID NO: 216734 - protein, 405 aa, unidentified
MVEKVWVGIDVGRKAHHAAAVDDSGAVLWSRRIRNDQAEIETLLDRVADVESVVWAIDMTAPESALLRGVLHSHHQQVRYVPGRVVHSMTGAFAGEGKTDARDAVVIAQTARLRTDLAPVSIPDDVAIELELLAGHRTELVAERTRGINRLRVLLTRIFPGLERCFDYSTLTGLAFVTKFVTPSSITAASDKEIYDHLRGHGVRRPTIPKMIGAARTAAVAQRIALAGEATTAALVQQAASSLILLTRQITDLDKQIAEVFSRHRYARILESVPGIGTRSGAELIAITGGDLASFGSAAKLAAYAGLAPVPHDSGNRHGTLRRPQRYHRGLRKVFYMAALNSSQRDGPSREFYQRKRTEKRSAVHALIALARRLVDVVWALIRDDREWTRTVPSRGDTRSAPVAA

SEQ ID NO: 216735 - protein, 427 aa, unidentified
MRNRNYKLEAITPSTLVVGVDIAKEIQWVRFVNYRGLEIGKAIKFYNNKSGFDSILASIKSICKEKGFDNVIVGMEPTGHYWKPLANYLLIDEKEVVMVNPSHTKRAKELDDNSPTKNDKKDALTIAKLVQDGRYYEVYMPHDIFAELRVLTNTRNSVMRRRNAVKNTMTAVIDEYFPELVTVFKEPLKGKTSIQILKSCPFPALILELGVEGVLIEIRKAVKKTVGIKKATQLVETAKTSIGVNYGITSAKLRLELLIEELELLNRQLTKIEEAMDLALDVTGFKKVILSVPGIGVVTAASFLGEVGDPMRFESPRQISKMAGYNLIEDSSGKNKSGTVISKRGRKNLRNVLYQMALSMVSVNPEIRVLYNYLKTRPNNPLKKKQALVVVAKKAITIIYNLIKKQSEYKAELVLGEFRKNQIKQAA

SEQ ID NO: 216736 - protein, 388 aa, unidentified
MSSQNEELNTRLQLNVCALIENHLAGLPTAALTGDGVKVSLPNRFNRKEAIMNYSGIDLHSNNSVVSVIDETDRVVAEKRLPNDLAKILAFLAPWQAELAGVVVESTYNWYWLVDGLQAAGFVVHLANTTAIKKYEGLKHSGDETDARYLAHLLRLGILPTGTILPAKHREVRDLARKRMQLVRSRTTHILAVENITARQCGTRITSNQVKQLDQTAVDQLHLPDDVALAVRANVAVIMTLSAQIAIVEKRLQEKVVPHADYALLTTVPGIGQTLATVIVLETGTIERFASAGNFASYARCVDSQRMSNGKKKGEGNTRNGNPYLSWAFIEAANFSMRFSTEARQFYERKKARTNPVVARKALAHKLARACFHMLKERKPFDVTRCFA

SEQ ID NO: 216737 - protein, 341 aa, unidentified
MDYFAAMDVSLEQSSVCVVDGTGKIIREAKVASEPEALVAWFAESGLKFTRIGLEAGPLSRWLHAGLTAAGFAAILIETRHLRAALGAMKVKTDRNDARGMAQLIRMGWFRPVHVKTVPAQEIRALLTGRKLLQIKLRDIELGIRGLLRGFGLKVGKVSEGKYDARIRELATGHPMLEPVAAAMLQARASLRAEYTKLHRMLLSIVRADAVCRRFMTAPGIGAVVAVSYRTAVDDPTRFHKSRDLGPYFGLTPSKYQSGEVDRTGRITKVGDVMVRTALFEAAHVILTRVTRFSTLKAWALRIAKQRGFKRAKVALARKLAVVLHRMWVDGTDFRWRKAAA

SEQ ID NO: 216738 - protein, 378 aa, unidentified
MPSENIIHIAIELSVSLWLVAVRLPGAEKSRLHRITGGDTTALLALIAELRARASAKLGQAVEVACCFEAGRDGFWLHRLLTAQGIAAYVLEPTSILVNRRARRAKTDRLDAEGMLRVLAAWLAGDGQICSMLRVPTPEEEDAKRPHREREHLVQTKLRLENRIKALLFTQGIRSRPSLRSWERDMAELRTGDGRALPPLLRTELDRLRRQLVVILELIRELEAERAAAIEAAADDAMVQKIIGLQRIRGIGPNVAAVLVREVLYRSFANRRQLASYVGITPMPHQSGGMDRDRNISRAGNPRARTMLIQLAWLWLRYQPGSTLALWFRERVGALQGRARRIAIVGMARKLLIALWRYVETGVIPDGVEITIPEAATA

SEQ ID NO: 216739 - protein, 373 aa, unidentified
MNLIQYVAMDVHNDSNAISVAPSDSTEVRRWGIIGGTHEHVQRLIKQLQAAHPEATLKFCYEAGPRGFPLVRFLRGLGHECIVVCPSRVPRRPGDRVKTDRRDADQLARLFRAGELNGIHVPEPEDEAMRDLLRSRDQVRRAQHRARQQLKMFLLRHNMRYAGTTSWTPAHLRYLARIKMPFPAQQFALQELMNAISEAGARLERYDAQLEREVAGWRWEPVVRALMSLRGMGLLNAATLVAELGDLRRFTRPAQLMSYLGLVPSEHSSGNERQQGGLTKMGNGYARRALVEAAHHYRVPARLTPHLQKRQEGLPKGVTQAAWEAQRRLHYRYKQLSGPGRKKAPVVMAAIARELSGFVWAIARQVQPHEART

SEQ ID NO: 216740 - protein, 450 aa, unidentified
MARNRKSVQNLPVIEPNAAGADVGATQIFVAVPADRDPEPVRCFDTFTADLEALADWLEKCRIRTVAMESTGVYWIPLFQILERRGIEACLVNAQHVKNVPGRKSDVADCQWLQFLHAVGLLRSSFRPDQEICAIRSLWRHRDSLIQMASVHIQHMQKALDQMNLQLHHVISDITGSTGLAILDAILAGERDPKVLAELRDWRIRATEEAIMKSLVGDYRDEHLFTLRQSLVAYRHYQGLIGEVDKKVAQWMSELPAKVDPTEEPIPEARNPRKTPYRNEPAGLRENLYAAFGVDLTQVPGLNSLTAQMLLTEIGPDLSAFPNVSAFAAWLRLCPDKRVSGGKVLSSKTGPTKNRAALALRMAAQGLHHSQTFLGEYYRRMRARLGAPKAITAAAHKLARIVYHLLTTRQAYDESVFTKQEMRFQKRREARLRAQARELGFQLVPVGTIS

SEQ ID NO: 216741 - protein, 348 aa, unidentified
MDTIGVDLHKRETQLCIGQADGSITEQRIVTSRERFTAVLGHRPPARILVEASTESEWVACHLESLGHEVIVADPNYAPMYATRARRVKTDRRDARTLMEACRAGTYRPAHRLSAARRHVRAELAVRDAVVRTRTRYVALAKALVRRDGLRVPSSTAERVGAHLAALAGSPPLAAELAPLLTLLPPLNTAIAAADQRLAELERTDPSVALLMTAPGIGAVTASALVATIDDVQRFASAHQFEAYLGVVPGERSSGELRRIGPITKAGNRRARWLLVEAAWRILRSKDPASAPLRAWARPIAARRGPRIAAVALARRLAGILYAMWRDSVPYDARKVRRPRRAPGGPAS

SEQ ID NO: 216742 - protein, 314 aa, unidentified
MDKTICGIDVSKDRLDVAVRPSGERFVVARTGTGLDELRTRLKVLKPNLIVLEATGGFETVVVAALAGAGLPVAVANPAQIRAFAKAIGQRAKTDPIDADVIAHFGEATGITPRPLPDAATQQLADLVARRRQIIDMIVAERQREKRANPRIKKSIGRLVKALERELSSVDANIDDAVRGSPAWREKEDLLSSVPSIGPIISRTLIAELPELGVLGRKQIAALVGVAPFTRQSGQWRGKSFIGGGRASVRTVLFMGAMAARRHNPVLKAFFERLVAAGKPKKVAIIAVARKLLTILNAIVCDGAPWKGTVGAVS

SEQ ID NO: 216743 - protein, 348 aa, unidentified
MTEIIRIGVATSKSVFQLHGVDAEEQVVLRRKLRRRDVLVFFARQGPTRVGLEACGGSHYWARELSALGHRVELIPPQYVKPYVPRGKHDAADAEGICEAMSRPRVQRRLVPIKSAEAQAALMLAGLRERLVRQRTQLINTIRGYAAEFGLVAAKGKAEIGPLLRRLQSEAAVPEGARVLFAELAEEQARLEAQIAAADRRLMAWHRQDEQSRRLAEIPGVGPIGASFLVLKAPDPQRFRSGRDFAAWLGLTPKNHSTAGKQRLGVITRAGDETLRSLLVVGATSVIQKVRRGTSRSASPWLLALLARKPPKLVAVALANKVARIAWKLMVSGVRYDPGRLAAAPATN

SEQ ID NO: 216744 - protein, 387 aa, unidentified
MLLDHPCDGLAAIRTQFGAIFVSLELSRSTWLVTSLSPGTGEKMSRRSVKAGDIAELLKLFAELKRKAQARTGESYPILTIQEAGLDGFWLHRCLQQDGIESHVVDPASIATPRRRRRAKTDRLDGETLLRSLLAYKRGEVRVCAMVVAPCPEEEDRRRLCRERKTLIAERIEHVNRIKGLLFGQGIFDYVPLRKDRRKRLEALRTGDRRALLPHLKAQIGRELDRLELLLDQIAAVEREQDALLAASKPAGETAAADPVTMLLALKGIGPNFTTDLWTEAFYRQFANRRKIAAYAGLAATPWRSGGIEREQGVSKAGNPRLRTTMIQLAWLWVRHQPQSALTLWFKANSARGRKRAIVALARKLLVALWKYVTAGVVIEGAVMKAA

SEQ ID NO: 216745 - protein, 401 aa, unidentified
MTLTVGIDWAKDEHAVCVLDARGAVRAHLTVPHTAAGLAAFCRRLTKMANRSELKIALERPNGLLADTIVAAGFTLVPIHPNVVKASRPRYSTVGAKDDRGDAYLLADLLRTDGHRFRALRPPSDEIRALRALVRTRDNLVAERVALANKLRSLLESYWAGAVVIFAHVDSPIALTFLERYPTPRSARRLGEKRMARFIAKQSYTGRRSPTELLERLRAAPSGVAGELVEAANGHAVLAYVSALRPIVARISELTKLIEHDVLALPAGRVVASFPRAGKVSAAQILVELGDDPARFQSDAQLAAEAGVVPVTHASGKSRGVCFRWACNKRLRRAITAWADNSRHKSPWAGDVYERARARGCDHAHAIRILARAWIRVLWRCWRNGVPYDASLHGGAQLFAA

SEQ ID NO: 216746 - protein, 342 aa, unidentified
MEKVRLIGLDLAKRAFQAHGARADGGVAFRKKLSREKVLSFMAEQAPCVVAMEACGSAHHWARAIGDLGHEVRLIPPAYVKPFVKRQKNDAADAEAICEAASRPTMRFVAVKTEEQQARAMLFRTRDLLVRQRTQLINALRGHLSEHGMVVPQGPSHVKVIAKAVEEATASLPLLVVELSRVFLEQIEKLSEKITELEKATSNEAARGSMSRRLQTVPGVGPITAMAIETFAPPMCIFKRGRDFAAWLGLVPRQHSTGGKQILGKTSKMGQRDIRRLLIIGAMAVVRWASRKGAPEGSWLRRMLARKPRVLTAIALANKMARSIWAMLTKSEDYRAPAAVAL

SEQ ID NO: 216747 - protein, 390 aa, unidentified
MERPMQKLNDFSRSLVALEPDSTLIAVIEMSLSSWLVAGIVPGVERQPLKKLAADESALLKLLHRWREEAEKAGRRIERVAVAFEAGRDGFWLARWLKACSIEAHVIHAASVAVSREHRRAKTDRLDTELLKRAFLGWLRGERDHCKMVAIPSINDEDAKRPNRERENLVSEQSRIINRMKAALIRLGIRGFNPKLKRAAGRLDDLRTPEDEPIPPNTLAELRRDMERRRLVRDQIRQIEEARLQRLDHAPGDGPHAMVRLLARVIGVGIETADMLVHEVLSRSLRDRRAVARYAGLTGSPDESGRKRREKGLARSGNGRVRRGMIQLAWRFLLHQKDSALAQWFRARTENARGTRKPMIVALARKLLIALWRLVRQGVVPDGVVLRSAQ

SEQ ID NO: 216748 - protein, 339 aa, unidentified
MKKVSMVGVDLAKGVFQVHAVDEQGVVIVRKALRRSKFVAWFAQLPPCLVGMEACATAHYWARELTKLGHPVRLIPPAYAKAYVRRNKNDAADAAAICEAVGRPSMRFVAVKTEQQQAMAGLHRVRDLLMKQHTMLINQMRGLMAEFGIVAPKGVPHVGELVSVLADPDDQRIPAPLRDALRATAELLRTIDRKLEGIDRQLVALGRDDPTYRHLVTAPGYGPIVASAMSAMVVEPASFRNARDFAASLGLVPRQDGTGGKLKLGPISKRGNRYLRRLLVNGAMAVLRGKRAKHDPWLVKLLASKPRKLVAVALANKMARIGWALMMRQEDFRRRPAAA

SEQ ID NO: 216749 - protein, 313 aa, unidentified
MSFIGIDVAKAQLEFARRPSGETGTVANDDGGIRALVERCQALPPTLIVLEATGGYETAVVAALAAAGLPVVVANPRQVRDFAKATGQLAKTDALDAQVLALFAERVQPAPRPLPDDAVQALDALLARRRQLVEMLTAERNRLLVARPTVRRDLQQHIRFLERRLREADDDLHTAVKASPAWRVKDDLLQSVPGVGRVVALTLLAELPELGRLSHKEIAALVGVAPLNRDSGTLRGKRLVYGGRAPVRAVLYMAALVASKCNPVIRAFYRRLRAAGKPAKVALTACMRKLLIILNAIARSGAPWQPERTLART

SEQ ID NO: 216750 - protein, 405 aa, unidentified
MVRYVGMDVHREFAQLEVVEDGIVRDEGKIGVTPEALRAWASELRPDDEVALEATGNSDAIATLLMPLVARVVVSNPSKTRAIAEAKVKTDKVDARILAQLLAADFLPPVWLPDDRTRSLRRQVMRRAQLVRQRTRLKNQVHAILARNLAPTPPVSDLFGKTGRHWLSRQLLPDDERASVQALLRQLDFHAHELALVNKELAEQALTDPVVARLMTIPGVDAIAGLSIVAAVGDFSRFDDPDKLVAYVGLNPKVRQSGNSAPVHGRISKAGRAHVRGVLVEAAWSASRAPGPLRAFYQRIKARRGFQTAIVATARKMTVLAWHLITKDEDYAFARPGLVTHKRRKLELAAGAPSRRGNHRQPGAAYNSKQRRDEENAIVEQAERAYEVLVAHWQPRKPAAAHRSP

SEQ ID NO: 216751 - protein, 346 aa, unidentified
MEYIAMDVHKKYTWARVENEKGDKLYECKLSHSHGTIENFVKRWTGGSAVAVETVGNWYWVVDEIEAGGGKPQLVNARLAKLMMGSVNKSDKLDAKGMNRLQRTGTLPTVWIPPSSVRDARELPRTRMVLSKQRTQLKNRVHATLGKYGFVVEGVSDAFGKRGREILTELMAKLPPHTEQALGRVLDQLDHVCENLKWIEEKMIEVFVPCPETTWLKTLPGVGDILAVVIWTEIGTIERFSRAEQLASYCGLVARENSSGGKIRFGPVRRDVNVYLKWAFVEAANSSVLNRKRCGYDHISRLYERIKARRGHGKAKVAVARHLSEASFWMLKKGEPYREPMSSTQR

SEQ ID NO: 216752 - protein, 316 aa, unidentified
MAKHTTICAGIDTGKRKLDVAIEGRRELLQVDNTAEGHKVLLAWLRQRRVKRVGIEASGGYEQPVVAELRRKRFVVVVFQPAQVRAYAKFHLQRAKNDKIDAALIAACTAAVRKIHAAPDPRLLPFAEQLTMIDQINEDTARLKNRIESCRNARINKLWQEDIARLEMREKAELKTLVASIRKHPDLAKRLELINSVDGIGLPTAVAILVRLPEIGRITREQAVALAGLAPYDDDSGEQVGVRHIEGGRKRLRRALYTASLDRQLIQLYQRLTAAGKEHKRALVACARKMLIFANTVVARGTPWCDEPPVRSLSVS

SEQ ID NO: 216753 - protein, 569 aa, unidentified
MILLGVDPHKSTHTATAVEPVSNQQVGSMRIEASLADYRRLLAWAKRWPQRKWAVENANGPGRHLAQWLIARGESVVDVPAAATSRVRELSRGGRRKNDQIDAAAAATVANLQGEGRDLAPEDHTTALALLDERRVNLAQARVRTVNQLHALLRDLLPGGAPTQLSADLAAKLLRSVRPAGDIETVRKDIAWDLVAETRKLDKQLTDNAARMQSLVEASSSTLMDTPGIGPVMAARLIGRTGRAHRFSTSAAFANYAGAAPVEIASALNSWRAWIAGGPPPTTARCSLASLRMTKRGWRLGVVAVLAAICISGPGRPEAIRTAPDLGPLPADRYDYTPQDYQRSQRASALLVRQCMAERGHSDFPLDPRYPSDPVVATAVSTDYGALDLATARRWGYGWDPAKSRALRPTGRRMTNAEYADFPACNAEASRRLMRGINLKRDWLYASTRAIGIDKAVKRDPRLRAAWDVWSRCVAEQGFRRYPDPVAAYTDTVWQRGSDGNTRHTQRERATAVADVTCKRRHHTAELWHAARARKQAVDITRHRDHYAAGLQALRTYRATIAEVLRRLG

SEQ ID NO: 216754 - protein, 344 aa, unidentified
MKDVRILGVDLGKNSCSIVGLDGAGRVLLRRRTRREGVIALAAKLPGCVVAMEACCGAHHLGRLLVEQGHEVRLMSPEYVRPYVKAQKNDDRDAEAIAEAATRPTMRFVALKSEAQLDVQVLHRVRDRLVGQRTSLTNQIRSILLERGIVVPQGRRSLLEALAVLSSEPDGRRVGTRVQRLLDDMLDQWRALDARIKALDDEFAEMARNDPAARRLATIPGIGVLNATALVAAIGDGRTFSRGRDLSAWLGLVPHQATTGGRPKLLGITKRGSKYLRKLVIQGARAALPSLARTATPLGGWLRGLLARAHGNTVVVALASKLIRIAWALLRNETTFVAGGAAVA

SEQ ID NO: 216755 - protein, 417 aa, unidentified
MGKIMERCAGIDVGKRFLLCCVLTGAAQDEPHSKTLRFDTTVPALERLRDWLNREAVTHVVMESTGSYWIPIFNILEGQFAVVLANPEEVRNRKGHKTDRKDAEHLADLLRHDHVRPSYIPAKPIRELRDLTRRRVQLIQDGTRERNRVQKMLEQTNVKIASVLSDLFGVSGQHMLLALLEGKATPEEMAGLARGSAKQKTPQLIEAMQGHRMTDHERFLIRSCLRHLACLEEEIEDLDTEILRRMQTPPFQEAFGLLQTLPGIGQLSAATILAETGTDLASFPSAEQMSSWAGLCPGNRESAGIQKGRHTTHGNPYLRTALVQCAWSASRKQGSVFEMRFQQLVKRCGPKRAIVAVAHQMLIILYCMLNGKVPFRGAESAPQQRRRKNRAHHHLRCLRRLGIQVQIIAAPDTPEGP

SEQ ID NO: 216756 - protein, 345 aa, unidentified
MKITTVGIDLAKDVFQVHGVDAHGKAVLRKQLKRKDVVSFFANLEPCLIGMEACGSSHYWARKLAALGHTVRLMAPQFVKPYVKTNKSDRNDAEAICEAVARPNMRFVPVKTGEQQAVLSVHRARQGFVKARTAQANQIRGLLAEFGIVIAKGMGHIAKRLPEILEDGENGVPGMMRELLQRLGENLKEMDKQVGELERQIKLWHRENEQSRKLEAIAGIGPITASAYVASVGDAKSFKNARQVAAWLGMVPRHEGSGGKVKPGRISKRGDVYLRTLLIHGARSVIRQFERKPDQAEGWLKELLARRHKNIAAVALAAKNARIAWALLAHERTYQGDYVASRAGA

SEQ ID NO: 216757 - protein, 417 aa, unidentified
MNDEVYYERCAGIDVHKKFLVVCLRIGRKSEVRNFGTLTSEIRELVAWLKDNGCQMTAMESSGSYWKPLYNIFEQENLPIMVCNAYHIKNVPGRKTDVNDAQWIARCLSQGLLNPSFVPDREQRELRDMTRFRKSQIEERARNINRLQKFLEGANIKLGDWVSDIDGKSATQLLELVIGKPDFTVDDVQKRMHGRMNATAEELFRSLEGSITPTQRELLAHIMAVIREQTAQIEKTDAMIGRSLSENYKAAVKALGEIPGIGRVSAEQILAETGVDMSRFRNQHSLSKWAGVCPGNNESAGKRKSGKTSPGNKTLKSTLTQCAKSAKKNKKSFFSAQYSRLVVHRGKNRATMAVAHSMLIAIYFVLSGHQFRDLGADYYIQFNREKKINSHVKQLSKLGVMIPNELLFPAIHCPPDG

SEQ ID NO: 216758 - protein, 388 aa, unidentified
MIYVGIDIAKLNHCASAIDSDGQVLIEPFEFLNDNDGFYTLLSKLSSFEKDSVIIGLESTAHYGNNLVSFLVTKGFNVCLINPIQTSSLRKNNIRKTKTDKVDTLVIAKAVALMDDPRFVTLYDVALMQLKNLGRFRMKLVKQRTRTKIQLTSYLDQVFPELQYFFKSGIHQKAVYAILKEAPSATRIASMHLTHLKNLLVSNSHGHFKKEMALELRVLAQKSVGTADRALSVQITQSIAQIELLDSQIDAVEAEIKDIVSSLDSVIMTIPGIGPINGGMILGEIGDIHRFSKPRKLLAFAGLDPSVYQSGNFSAKKTRMSKRGSSALRYALMNAAHNVVKNNKTFRDYYDSKRAEGRGHYSALGHCAGKLVRVIYKMLRDDVEFDLD

SEQ ID NO: 216759 - protein, 321 aa, unidentified
MTNPTTCAAGIDVSKHSLDFAIHGQPIRLTVENRLPGWRRLAAELSRAGVNRVGLEATGGYERGVVAFLRVAGFTVLVLQPLQVKAYARLHLRRAKNDPLDAALIAACTAAIDATPEPPDPRLVPLADALTFVEQIEEELVRLQTRLEHIELPRFRHMVMADIRRLEGRRRAELRRIVEALAGHDDLRRRLHLVQSIRGIGERTAIALVVRLPELGRLTREQIAALVGLAPFDDDSGLHRGQRHIGGGRKRVRRSLYMAALPAATLWNPACIALYKRLMAKGKCHKAALVACARKLLIFANAVVQRGSPWTERTAGAGVAG

SEQ ID NO: 216760 - protein, 350 aa, unidentified
MIIIGCDYHPGFQQIAFVDTETGECGERRLEHREEADKFYRDLGAQGALVRVGMEASGHARWFERLLSELRFELWIGDAAEIRTKRVRKQKTDRQDAQLILRLLLEDRFPRIWVPSGENRDLRQLLWHRHRMVQARTRMMNQLQAVALNEGLRCKKKLWREAGRAQLEAFKLAPWASQRRTDLLELLDRLNPTIAKLTQAIDREVEKCPAARRLQTHPGVGPLTALAFVLIIGKADRFQCGKQIASYLGLVPLEKSSGNQRRLGHITKQGNSLLRFLLVEAAQVTVRSLPEWRSKYCHLTLRRGRKIAKVAMARKLAVRLYWMMRKEWDYEQLRKFGSYAGKPGHRDGVK

SEQ ID NO: 216761 - protein, 323 aa, unidentified
MGIPTVSIDSTTIIVGIDVSKEYVDFFVLNRKGDPSGRRPRRLKDLTMLAAELAALEPQLVVLEATGGFETVVWAALEAAGLSVAVVHPKRVRDFARSLGLLAKTDRLDARVLARFGELLGPAPTPLPSREARAERELLRHLNALVAMRAQQRTRKRQLEGEGALASAERVIASLSEEIALLEQQVEQTLRERPAECERVARLRTAPGVGPKTSWALVAELPELGQLSGRQVAALAGLAPMARDSGRFRGRRRIIGGRARVRTALYMAARAAVRCDPYLAAFRARLLAAGKPKQVALIAVARKLLVALNAMIRDQRPWIPLPA

SEQ ID NO: 216762 - protein, 378 aa, unidentified
MAKVIMVGCDLHDRSMLLRFCVGSSEPQQASFANNEEGRERMIARLQQFAGEHKAKRIVFAYEASGQGYGLCDLLFDCGIECYVLSPTLLPKTPKGKKHKTDAKDAQMLLEQVRGHVLAGNPLPVVWTPPQRLRDDRELVRARIDLADEMTRVKLQVLSLLKRRGIAKPSWCKGPWSKRFVAWLRKVAEDQDQAVAPVLENLIRRYELHVAERARLDQAVRRLSQTDRYRAACHELRKLPGVGLLTAMTFLTEMGDLHRFHNRREIAAYLGLCPASSESGEAQDRKGRITRQGPARVRKLLCQAAWVSLRSCPESAAAYHRIRGGKSQRGKKALVALMRRLAIKMWHRALPCGVSCELEGRGGPHAPPFASAPPNTAA

SEQ ID NO: 216763 - protein, 342 aa, unidentified
MTEVSIVGLDLAKRVFQVHAAGSNGAIVLRRKLSRGQVITFFTKLPKCTVAMEACATAHYWAREIGKLGHEVRLLPPAYVKPFVKRQKNDAADAEAIAEAALRPSMRFVVPKTENQQACSMIFRTRDLFVRQRTQLINALRAHLAEHGVIAPQGIASLGLLSETIEDDSLGLELIVVETARVYLEQIGVLSARIADLEKALKSEAKRSANTARLMSMPGMGPITAMAIEAFAPTMTTFRKGRDFAAWLGLAPKQHSSGGKQVLGRTSKMGQRDIRRLLIIGAMTVIRWACRKAPPENSWLARMLARKPRMLVAIALANKMARSIWAMMTKNESYRDSSLAAA

SEQ ID NO: 216764 - protein, 378 aa, unidentified
MIFVGVDWAEAHNDVLVMDEGGVVLGRGRFSTGVTGLAQLHALVADCAEEPGEVIVGIEIDRGLLVDSLVGAGYQVYGVNPLAASRYRDRHTTSGAKSDAGDAKLLADLVRTDRHNHRLVAGDTEEAGAIRVLARAHQGLVWARQRQVNALRSALRDYFPAALEAFGTDLAQTDALAILTIAPTPERARGLSRTKIAAALRRAGRQRNIEQRAIELQSALRTEQPEGPSQIAEAFGAATAARVVVLVSLNRQITELEHAMAEHFDRHPDAEILRSLPGLGLVLGARVLGEFGDDPSRFTDPRGRKAYAGTAPITKASGHSLVVLARVARNRRLADACEWWAFCSLGASPGARRYYDALRARGKTHSQATRQLANRWVG

SEQ ID NO: 216765 - protein, 459 aa, unidentified
MKRKGRRTKGIEQAQPFAGLSKVNPHAAGVDIGAEEIVVCVAVNESTQLVRGFGNYTVDLHAIADWLTEHKIETVAMESTGVYWIPLFEVLEQRGFECLLISSRSLRRVSGRKSDITDGQWIQTLHSYGLLESSFRPQADLVALRSLLRHRRSLIDHRSPHVLHMQKALLQMNIQLSQAVSDVTGVTGQAIIRAILSGVRDPKMLASLREPGCKKSEEEIGKALTGTWREEHLFVLKQAVALYDFYTQQIQECDEEIERMYAETRPDWDGGELKPLPPRKRNSHSKNKFHETEKIRGHLKRISGVDISLVDGLGVSLAQTVILECGTDMSKFPTEKHYGSWLGLAPKHEISGGKVLNNKTLKTKNRAGQAFRMAAQSVKQAECPFGVFYRRLRARLGPAQATVATAYLIARVVYRMLKYKVEYDPLSVNEYQKQYEEQQIKYMRKRAAKLGYQLLPVPA

SEQ ID NO: 216766 - protein, 411 aa, unidentified
MRVHHNVCCGIDVHKKSVTACLMWGPADKEPQFEIRRFGTMTRDLQKLAEWLKQAGCEAATMESTGSYWKPVWNVLEGQIPKLILANAQHVRALPGEKTDRKDGKRLAELTRHGQVRPSYVPPRAILELRDLTRYRSKLLSAGSSERNRIQKVLEDANIKLGSVLSDLFGVSGQKMLQALIKQDTVDTAKVAQLAHWSLKPKMEANQQALDGKLRDHHRFLIDASLQHMRFIEEQLMRLDEEIQRRLQPYQEQYALLQTIPGIKETGAARILSEIGPDMSPFPDGDHLSSWGGACPGNNESAGKKFQSKIRKGNPHLLAALTECAWAATKKKDCHFRNKYYRLKSRRGSQRAIIAIDHAMLKCIYVVLSQRQPYQEPKPTSLTEAQKERKASSLCRQLRVLGYDVKIQKAA

SEQ ID NO: 216767 - protein, 452 aa, unidentified
MERSKSGALSMVNPRAAAIDIGSTMHMAAINPNADDNPVRAFGTFTGDLHDMARWFKTYGVTTVAMESTGVYWIPAYEVLEGHGFEVILVNARYAKNVPGRKTDVSDAAWLQRLHSYGLLRGSFRPEAGVATMRAYLRQRERLIEYAASHIQHMQKALMEMNVQLHHVVSDITGVTGMRIIRAIVSGERTPNTLAQMRDVRCHATIETICAALSGNWRDEHIFALGQSLALFDFYQTKILECDRKLEVALKALEIDEGYDVRQLPKVRTKRQQVNTPDFEVRSALYRVLGVDLTQIHGIGPSLALKLVGECGTDLAAWPSSKHFTSWLCLAPGNKISGGKLLSSKTRRSSSRAAALLRLAATTIGRSDTALGAFYRRLSARAGKAKAVTATARKIAVLFYNSLRHGMAYHDPGASQYEERYRSRVIGNLQRRAKAFGFILHEMPTEPDMAVS

SEQ ID NO: 216768 - protein, 341 aa, unidentified
MNVSKTVVGIDIAKRVFQLHWVDEESGEVVSLQLKRDKFLEHFASRQPCLIGMECCGGSQHWARQLTKMGHEVKLLPARAVKPFVTGNKNDRQDARAIWTAVQQPHIRSAAVKTEDQQAMLALHRMRSQLVKFRTAQINCLRGLLTEYGEVMPQGKANLLKGIADALARLSDRLPAMAIETLRDQWTRINKLDEEIKTIEQRINVWRKQEEACRQIAEIPGVGPLTATAAIAVMGDPKAFKSGREFAAFVGLVPRQVGTGGKTKLLGISKRGDTYLRTLLIHGARAVLSRATDPGLWASELCKRRPLNVAAVALANKMARTIWALLAHDRKYQREFVSQPL

SEQ ID NO: 216769 - protein, 360 aa, unidentified
MEKAHIITHSVRTAEGGLFMTKNNYYVGLDIAADNFVASIYQSPQKPVITKEGFENAFDGFNMLSAWLETQKINPINCVVCMEATGVYSEGIAHFMVSQGFKVSVEPPLKVKRAFDPIGHKTDPVDSRQIAEYAYRYSDELRFWQPKDEIIEKIRHLLTAREQFTKQSVALQNAMGAYKKHVVQVNLITGAHSHVLIELKKQIAEIDKELDRLIRKNPTISQMNNLLISLPGYGLLLSSSLIAMTGAFREITSYRTLAAFIGICPYQHQSGTSVYRPSHIRPFGPAYARKLLMLAARSVVTHNADFKKYYIRKLAEGKAKKLVLNNVANKLIKIACAMIKNNSRYESTYRSVNPMCLISA

SEQ ID NO: 216770 - protein, 358 aa, unidentified
MRIAYFIGLDIAKNNFQAFTADGKGREISNKKLSRNAMIQYFAQHPNAVVGIEACGTAHHWARTLTTLGHTVKLINPQRVKAFLGSRNKTDAADAKAICEALMHPGTTFIRAKSLEEQDIDHLLARRELLVQNRTQLVNQTRAFFSERGIVIPQGRHNFMKNLPQIIAEKWNEFSDKFQAILTDNYSDYRDLDEKIAKLDAMIKREATNTEPCKRLMQVSGIGPQTALALFAHVGNATHFKNGRQMSAYLGLTPREHSSGGKQRLLGITKRGNVRLRTLLLLGARAAILGIRRRKQGEDGQPARLSLLDKWVLGMVDRIGLFKAAVALANKVCRIAWALLARDEEFNQARLFRSAKAV

SEQ ID NO: 216771 - protein, 415 aa, unidentified
MSDQFAWFVGIDWGSQTHVLCLLDAAGELCGTRSVAHTADAVHEAIQWVLQHTAAAPAAIAVGIETPRGALVDTFLEYGFPVFAVNPKQLDRFRDRFTVGGAKDDRRDARAVADGLRTDRRAFRRIHADDARVIQLREWSRIVEELQEEEQRLANRLRDQLYRVNAAWLTLNPAADDPWLWTILHDTPHPEAWATVPRRRMTSAVRAHRIRRLTADDVIAVLRQPRLHVAAGVADAVEARIASLLPQLRLIHDQRLMGERRIDRLLESLETDPLEPESREHRDVQILRSLPGVGRMVAATMLTEATGPLADRDYGTLRAQAGIAPVTKRSGKRALFVHMRYACKRRLREALYHWSRTSIQHDGAARAYYDALRARGRGHARALRSVGDRWLRILIAMLRTRSLYDASRFDPAAAI

SEQ ID NO: 216772 - protein, 337 aa, unidentified
MAVAGIDSHKDTLAVAVVDDQGRELDRSEIENSAHGHHALIGWLGRHHPTRVGIEGAGSNGRVAALRLQDAGYEVVEVPPQLTAQARRRQRTQAKSDPIDALLIARIGLREPELPQIRPSRDIEDLRVLLRHRRELRSERTRLASRLHADLEQLEPGYQARIGRLTNERNLDRVRRLLGGDDRVRAQVARERVSRLRQLNRQIKRITGEIGLLAATFGSGLTTIIGIAELLAAELLAEIGDVGRYRTKAQFAMANGTAPLPASSGRIDRHRLNRGGNRQLNRIIHYVALTQISRSPEGRAYYERKRAEGKTTKEALRCLKRRISDRIYLMLRASALT

SEQ ID NO: 216773 - protein, 356 aa, unidentified
MRYYIGVDFHTQFSFVTVMDANGTIIEQKQLNHLDVPSIREFFSRFAPDASVSVEATRSWYWFVDLLQGLGLSVNLVHPKKTRIIAESTIKTDKIDASVLAHLDRCNFLPKAFIPDLHSRSLRELLRYHYSLVKFRTATKNKIHALLAKLNIQHEFSDLFGKAGSTFLNKLPLPDIFRLELNGYTSLLDHLKDSIDAVARVIENSCSQSPMASRLFNTPGLGHFSALLLAAEIADIHRFASFKKFCSYAGLAPSTHQSGSKIYHGHIIKDSNAYIRHVLIEAVSHTIKKDNSLFWFYRRIAKKHGTNKARVATARKLAKIIYFMLIRNQDYYPNKTILHSRVSPYTKLGTAPSVAR

SEQ ID NO: 216774 - protein, 337 aa, unidentified
MIIVGCDFHPSYQQVAMLDTETGKIEEQKLMHTTGEAERFYRAVALPALVGIEAVGNDQWFVCLLQKLGHEVWIGDASQIRASYVRKQKTDRRDAKHILQLLVEGRFPRIWIPGLEMRDHRELLIHRHKLVQIRTRVKNELQHLMLNQGMQKKQKLWSEQGRAALASLPLEPWADRRRQDLLNLLGMLDDQLEKLNDAVTQVARQYPDVHLLMSQPGVGAITALAFVLIVGDVRRFPRGKQVASYLGLIPREYSSGGKQRTGGISKQGNRLLRFLLVEAANIAVRFDPVFRKEYLHRCHQKHFTVAKVAAARKLAIRMYWILRTQTPYPKVLSSRVA

SEQ ID NO: 216775 - protein, 405 aa, unidentified
MFETEDVAVFLGLDVGKTAHHGHGLTPGGKKVFDKPLPNSEPKLRAVFDKLTAKFGTVLVIVDQPASIGALPLTVARDAGCKVAYLPGLAMRRIADLYPGEAKTDAKDAAVIADAARTMPHTLRSLELTDEITAELTVLVGFDQDLAAEATRTSNRIRGLLTQFHPSLERVLGPRLDHQAVTWLLERYGSPSALRKAGRRRLVELIRPKAPRMATRLIDDVFDALDEQTVVVPGTGTLDIVIPSLAASLAAVHTQRRAMEAQINSLLAAHPLSKVLTSMPGVGVRTAAVLLVTVGDGTGFPTAAHLASYAGLAPTTKSSGTSIHGEHAPRGGNRQLKRAMFLSAFACMNADPASRAYYDKQRARGKTHTQALLRLARQRISVLFAMLRDGTFYEPRTPTDVELAA

SEQ ID NO: 216776 - protein, 366 aa, unidentified
MDSVALSGGPIHLGLDVSKNKIAVGILRWDEQVPDTEMLFNDEPSVRRLIGRFDDPGRLRVCYEAGPTGFGLYRLLRSMGVACEVIAPALIPKAPGDRVKTDRRDCRRLARLHRAGELVAIRIPTEAEEAVRDLCRARAAVVGDRTRIRHRLSKFLLRHDRVWRQTAWTLTHERWLLGQRFDDPALRSVYAHYRAMLTAREAELAAVEADLAHWYTHGPFTDAVARLAAYRGVAQVGALTIASEVGDWRRFPAARTFMGFTGLVPSEYSSGEAVHRGHITKAGNTHLRTQLIESAWAYQHHPNLGVTIRRRQEHLDAATVARSWSAQQRLCARFRRLSARKSSSSVVAVAIARELAGFLWAEMTAA

SEQ ID NO: 216777 - protein, 377 aa, unidentified
MRNVRFIGLDVHAETIAVAVAELGGEVRSLGTVPNRPESVARLVKKLGKPEQLRACYEAGPTGYVLYWQLTQLGVKCEVVAPTLIPVKAGDRVKTDRRDAQKLARCYRGGDLTAVWVPDAAHEALRDLVRARLAAKRDQLRARNRLSKFLLRHGRRPSEGTKAWSGKYLMWLKSQRFEQVAQQVTLEDYQHEVEHAAERIARLERSIDVAIETLPVKMRAVVEALQSLRGVAQTSAVSIVAELGEVSRFAGARQLMGYSGAVPWENSSGERVHRGSISKVGNAHLRRIVVEAAWSYRHRPAIGHSLKMRQRHLSARICEMAWKAQHRLHQRYARFTARGKSKQHAVTAVARELLGFIWAIGIEAESGHCAKGMHRVA

SEQ ID NO: 216778 - protein, 312 aa, unidentified
MAQMVKTAGIDVSKPWLDVATWPTREATRVSRDAAGIAALIAWLTEHEVIRVGLEASGGYDRVVTDALQAAGFEVATLNPLRVRRFAEAKGRLAKNDTADARTIAQFTAVMVEAVPPPRQRDLDALAELLTYRRQLKGWSTDCINQLEHLRDGALRRKIERQQASFARELKQIDQKLADLVAEHDDWSVLVRRLRSVPGVGPVVSATLIAVLPELRALSRRAIASLVGLAPFDHDSGGHHGERHIKGGRKLVREVLYMAALSAKTHNPVIAAFAKRLEGKQPKVILTACMRKLLVILNAMLRDGTDCRAAAA

SEQ ID NO: 216779 - protein, 392 aa, unidentified
MFYLGIDIAKVNHVASLIDEDGSILVKAIKFTNSNEGLEKLIDSISNYDQSQIYCAMEATGTYWLSLFSALTDKGFNVSVFNPYQIKSFRGAYSNRKQKNDVIDSIIIANFLSFNGIEQTSLPNDDLLALKNLTRYRRNLVDNISKAKIQIKGILNKVFPEYSDVFSDTFGEASKQILLNCPTPSEVVNFNTKKLANLLKKASKGRHGTDTVRKVKDLAKNSFGIKFTGDACSFEIKQLVNQIIFLENQVDELNLKIKEIYSKFDSHLESIPGIGKKIAPVILAEIGDIHNFNSPNKLTAFAGIDPSENQSGNKKSTDGKTSKRGSPYLRHAIYQAAFIASNNDPVMHEYYVKKRSQGKHHYVALAGVERKLLGIIFHVLKENRDYRPSKFS

SEQ ID NO: 216780 - protein, 388 aa, unidentified
MIYVGIDIAKLNHFASAIDSDGQVLLEPFEFLNDNDGFYLLLSKFSSFEKASIIIGLESTAHYGNNLVSFLVAKGFNVCVINPIQTATLRKNNIRKTKTDKVDTLVIAKAVALMENPRFVTLYDIALMQLKNLGRFRLKLIKQRTRTKIQLTAYLDQVFPELQYFFKSGIHQKTVYAILKEAPSATLIASMHLTHLKNLLVSNSHGHFKKEVALELRVLAQKSVGISDRSLSVQITQSIAQIELLDSQIAAIESEIKDIISSLDSVIMTIPGIGYINGGMILGEIGDINRFSKPRKLLAFAGLDPSVYQSGNFSAKKTRMSKRGSSALRYALMNAAHNVVKNNMTFREYYDSKKAEGRGHYNALGHCAGKLVRVIYKMLKDDVEFNLD

SEQ ID NO: 216781 - protein, 353 aa, unidentified
MKKSTRFVYGIDLGDRMSHVCELDTKTGAVGIDTKLPTTKEALGALFGEIPRSLVVMECCGSSPWISRLAVRAGHEVIVADPRKLRVIWDTHKKNDRRDALVLAQAGAERSSNLVPVRHRSETTQRHLAVVRARALLVEARTKLVNGARGIVKTEGERLPRCSAESFARNAACDIPEELRAALGPLVGVLSALNAAIRGHDKEIERLGREVYPVTKLLQEVPGVGVLTSLAYVLVIEDPARFKRSRDVGAYIGVVPRQDQSGESDRQLPITKCGDGLLRRLLVQSAHHVLGPFGKESRLRTWGLALAARGGRNAKKRAVVAVARKLAVLLHAMWKSGGRFEPQRGAPAAVKAA

SEQ ID NO: 216782 - protein, 318 aa, unidentified
MNHFIGIDISKRDFHACFTEGGDIFKFNNDTPGIRLFIKTLKVHKCTQANTLIGLESTGSYHLPVAYLCAKAGYTVNVINPLITKKQNQTSLGRVKTDEKDAGLIRHCLISGAGQPFRETAESLALKMLVRNRARFSMLRQRMRLRHEEVKRRESYLKVRITDINLEFHDFLDEKVHFLDAILRKHEPQTQKLLQTIPGVGPQTAVTCLSEIGDIRRFSDAEKLTAWIGLDPRVHLSGTSIHGKGYITKRGNKLLRTRLYNAASVAVIHPPNLFHEFFQKKRNEGKPYRVALCAVMRKMVHVIHAVWTRGTPYTKKRP

SEQ ID NO: 216783 - protein, 342 aa, unidentified
MRLFVGLDVSLAKIAICVISEHGKIIDEAEAASEPEVLVRRLGDLDGSIAAIGLEAGPLSQWLHRGLTEAGLDAVLMETRQVKGALKAMPIKTDRRDAEGIARLLHLGWFRPVHCKSASAQETRAVLGARKALQQNMIALEMSLRGLLRNFGLKVGAISRGRFETRIRELVDGNPMLETATRPMLRARAALRLELAALERQVRQFAQYDPVCRRLMTMPGIGAVVALTFRAAVDDPARFRSSKRIGPWAGLTPSRIQSGVRDVSGGITKAGDVNLRRALCLAATVMMNRGRSTWLRTWGAQLAQRRGRKIAMVALARRIAVILHRIWVDGTVFEAEAAPQMA

SEQ ID NO: 216784 - protein, 416 aa, unidentified
MGKQRDIACGADIHKNTIVATILSLAGTKNQAKFGTTLSELLRFKFWLTDNGCGVVAMESTGTYWIPVYSVLEGSIEVVVANPYMIKHIPGKKTDLIDSDWLAELCLKDLIVPSRIFPKEDRALRSLTRAREGLVKIRTQLKNRIHRDLSSSHIKLSSVVTDIFGKSGMHILRGLLDDQSIDEIIKGIPSGRVKKNADKIKESIENNLDSSQIFLIESSLDLIGHVQDKIDRIDMDLKSKIITRLNDLKIAMSIPGIEFTSAATILAEIGNYRNFSSPEKLASYFGLVPFVNQSADKLHTGCITKHGSKHLRWIMVQVAHAASKKIGSKLRKFYLRVRARKGANVAIVALARKILCILYHLLMNQEMYEEPGAARKTRPNRLDQSTTQREFTAQEMIDILKRSGYEIRKIDRGACG

SEQ ID NO: 216785 - protein, 405 aa, unidentified
MKKIAGIDVHKKVLMVVIAEAASPEQIVRKDKFGTGRAELERLRVWLQQTEVGDVVMESTAQYWRPVWNEPEPFFALHLAHAQSNRAPQGRKSDWADARRLVKRFAAEELFLSFVPEPEQRDWRTLTRARQALVRDHVHLQNQIEALLEQASIKLSSVVSDLFGLSSLRILSALAEGQTDAEKLAQLADPRLRCGQQTLVDALRGRFREVHRQLLDQALQRLAILSKQIAELSRLAAQRLQPYASTLERLIEVPGIGAEAAQEILAEIGPTAAAFSSSAKLASWIGVCPGTQESAGENHSGRCPKGNRYIRRVLCQVAHAAARTKGSHFEVMFRRFLHKGYNKAIWAVAHKLCKIVWIILHHGARYLESGVVNPKAVQRAIQLHLKALRRLGYVLPPSPTPTSQP

SEQ ID NO: 216786 - protein, 308 aa, unidentified
MHYLYYVGLDVSKETFDASLVAFEDANEMAHRKFANSRKGICSCLHWVEKRHGILLDDVIFCAEDMGSYISEMAVCASDRTLNFNFSLISPLVIKYSMGIARGKTDRVDARRIAEYAITHYRKIALYLPAEKELCQLRTWLILRAHLAKQRVAKLVLLEKLDYKEKFADVSIQRSMLQEEIAYAETHMKTIEREMKELIAADSNICRNYKLLTSIKGVGPITAIVMLCSTLNFTKITDHRKFACYCGLAPFEHSSGTSVRGGCHTSSMANRDIKVQLNRSALIAIRCDPQLKAFTNAKWLKVNINSAS

SEQ ID NO: 216787 - protein, 345 aa, unidentified
MIIGCDFHPSWQQVSWVDTETGETGGCKLLHGSGEAKEFYQRLAAPALVGMEATGNSQWLIELVEDLGHVIWIGDAAQIRASYVRKQKTDKRDAAHILKLMLENRFPRLWTPDREQRDLRQLLLHRHKLVEIRSRVKNELQHLSLNKGVQRKHKLWSRAGQQALRELELKPWASCRREDLLGLLAMLNQQIGKLDQAVQQAAESNVQSKLLMTQPGVGPNTALAYVLTIGDVSRFRRGKQVASYVGLIPREESSGGRQKLGAISKQGNRMLRALLVEAAQIAVRYDEGLRKQYWHRCHQKPKGVAKVATARKLAVRLYWMLRTQSGYPEIVRIESSPRVPLVGAS

SEQ ID NO: 216788 - protein, 321 aa, unidentified
MQVIGNDMAKATFDVALPLPEGKYRTKAKFPNTPKGHAEFLAWRATHAPEAAVGMEATGIYHEALARALVEAGVVVYVANPARVKAFGQAEGIRTKTDRSDAKLIARFFEAQRPEKLHPYVPPTPSELKLRALVRRRDDLQEMLQMEQNRLEVADISVQQGINDVIRTLKDQIKHVRKAIQDHIDNDPDLRGRHQLLTSIPGVGDTSSAQLLAFLGDLNKYSDVRQVVAHAGLNPAQRQSGNYEGKARISRVGDANFRKKLYMPALTGKTHNPVLKAFEERLREKGKPFKVVMCALMRKLIHLVWGVLKSGRPFDPGVVLA

SEQ ID NO: 216789 - protein, 433 aa, unidentified
MLKLNYMSTLFVGIDVSSKTNAVYAMDFEENKYISSSFGNNQPGADKLVNMIAECMHKHKNLDTVLIVLESTSVYSVHISNFLSTSEVLMPYKPYVFCVNPKATSNYRKSYIGMEKTDPTDAYLIADFGRVGRTKKLEPWRGGQFIALKRLTRHRMHLSECITREKTYMVSNLYLKFSELQLLEGDDKPFGSLYGATSSAVLTEFLSPQEIIDMPEEELLTFLAGKSRNRISDLSKTSELLRKAARDSYRLDKCMYEPLNISLASSFNCIHAYQKEIKLIEQAIEKCINGMNPNALLILQSIPGIGPIWASGILSEIGDITVFHSSDALAKYAGLYWPKGDSGDFTSEDNKMSKAGNPYLRYYLGEAANSVRKHIPEYADFYARKYAEVTKHQHKRALALTSRKFVRLVFGLLVKNQLYTGEKLDTEYNIESN

SEQ ID NO: 216790 - protein, 321 aa, unidentified
MIEETVCVGVDVAKSTLDVAITDSGEIRQFANDDEGISQAVRYIAGVKPAGIILEATGNLEMPLAAALQAGRLPVAVINPRQVRDFARATGSLAKTDAIDARLLALFGARVKPEIRTLPDQKAREMRNLLTRRRQLIEMLTAEHNRLSQAGDDIRPSIETHIKWLEEALSEINDDLDRRIRLSPSWLEKDNLLKSVPGVGKVVSSSLLIELPELGMLNRRKIAALVGVAPLNRDSGTMRGRRTIWGGRAKLRAVLYMAALVASRRNPIIAAFYQRLLDAGKVKKVALVACMRKLLTILNAMMRTMTVWQPEIILRRVSVEA

SEQ ID NO: 216791 - protein, 413 aa, unidentified
MDVLHSRCCGLDVHKSSISACILLREAGRVQKHQRRFGAMTQDLHEIAEWLQQFGVTQVAMESSGVYWKPVWNILEGQFTIVLANAQHIKNVPGRKTDQKDAEWIAQLLQFGLLRPSYVPCEIIRDLRDLTRMRASLSQEASRISSRIQKVLEDANVKLASVATNTLGKSGRAMLEDIIVGEDDPEHLASLALGHLREKIPQLRLALEGKIRSHHRFLLRRLLDQLQFVEHEIALLDERLEEIGQQRPELAQAVARWDTIPGIDRVAGWALLAEVGDKMAQFPTAEQLASWAALCPGNHESAGKRLRGATRQGSPWLRRMACQCAWAAARTKNTYLSSQFRRLAARRGKKRAIIAVAHTLIVIGYHLHKNQRNYDDLGGDYFDRIHSDGLKRYLVKRLQQLGHKVTLEPIEAV

SEQ ID NO: 216792 - protein, 411 aa, unidentified
MLSVGIDVSKGESMVCALNQFGKVVLTPRRYKHVKSALGSLVERLRSFGDNDIRIIMEATGIYSLPVAKYFKEQGFFVAVINPYAMSRFRIGGQGSLRNVKTDKADSMTIAGYGRQCWDTLMEYNPAAETYWKLDYLLRLYQKILAYRVSILQELYGIIEQTMPGIKEIGIKSPQVSTAKDILLDFAKTFWHYDQITGMSEKKFISRYLVWAKKKGHRPDVGKAAAIYAMAKDGIPCLPADPIVKQSIHTNIEALERVGTTLRDILSQMSGLAKTLPEYDIVRAMGGVGDVLVVKLIAVIGDIKRLRKAKSLVAYAGIDPPPYSSGKFEGNKRRISKRGSTLLRKIGYEIMKSLTRNKRPEDGAVYDFIRKKEEEGKAKKQAKIAGLNKFLQIYYARVKSIYKKTTEGKAA

SEQ ID NO: 216793 - protein, 342 aa, unidentified
MQITTIGLDIAKNVFQIHGIDAAEKVVVRKQLRRGQVLAFFKALAPCLVGMEACATAHYWARELTKLGHQVRLMPAKDVKAYVKRNKNDAADAEAICEAVRRPTMRFVQVKSAEQQSQLMLHRTRDLLMRQRTQVINALRAHLGELGITAAQGQAGLRELLAIIAGSADERLPAEAHASLIVLAAELQAMQTLIASIEKRIIAHHRLDEASKRLRSIPGIGLVGATAIAATVTDPRAFRSGRDLAAWIGLVPRQDSTGGKQKLGPISKQGDRYLRRILVVGAHAVLKLARQKPEKYPWLTQLLARKPFKIVAVALANKMARIAWALLVKGGPYRARALAAAA

SEQ ID NO: 216794 - protein, 312 aa, unidentified
MADMVRLAGIDVSKQTLDVYVAPIGESRTVAYDEAGLAELCRWLIGAGVALVALEASGGYERRASEVLEEAGIVVRRLNPLRVRRFAELRGRLAKTDRLDARTIAEFARAYPEERHCPRDRRRERLAEHLLVRRHAQDAIVDCINQLEHLRDARLRRLILGRQAALKRLCDTLDRRLAELVAEHDDLVELSRRLQSVPGVGPVLATTLIALLPELGSLTRRQVAALVGVAPFDHSSGRQIAPKSIHAGRATIRKALYMAAMVASRRNPAIAAFAQRLASKPGKVRLVACMRKLIVSLNAMVRDGTQWQPLTA

SEQ ID NO: 216795 - protein, 439 aa, unidentified
MATIGIDAHKNFAEVAILEPGRPMRHRRIGTTPAELKAFVEGLGPQDQVVLEASFNTWALADLLQQHAGRVVVSNPMRTKAIASAKIKTDKVDAQVLAQLLAADFIAEVWVPDPTLRALRRRVSQRSALIHQQTALRNRVHAVLNRNLLDCPATDLFGKAGRQWLSKAPLPPEERQQVESALRLLAVLEAEIEAVERPLAETALGDARVLHLMTIPGVGLVTALAIVGVIGDVRRFPRPNQLVGYLGLDPCVRQSGERAARTGHISRQGQGHARGLLIEAAHSAVRTPGPLRAFHERIRSRRSRQIALVAVARKLAVLAWHLLHDDTDYRWASVTLTAGKLRQVERKAGQPIQQAPRSPARGQTTRREQERRLQLQAEEAYRAMVAARHAEMNAAASNGERLAGSRPDARRRSHPQPPLLSTRVDRVPPQPSPAPHATA

SEQ ID NO: 216796 - protein, 431 aa, unidentified
MLKINPLSTLYVGIDVSSKSNYVCALDFYKNKYINSSFANNQPGAEELALKILECLKEHPDITTIVAALESTSVYSIHIANYLSSCEELMRFKPYVFVLNPKCTANYKKSYIGLGKSDPIDAFVIADYARAGNIESEPWRGSQFLALKRLTRHRLHLVECMTREKTYLVSNLYLKFSELQMLEGDDQPFCDIYGATSSSVLMEYLSPEEILVSSEEDLIAFLAEKSRNRIKDISKTADLLKKAARDSYRLDKALYEPLNVSIASSFNCIETFKREIKVIDNAIEKEIKGLNPNAFIILQSIDGIGPVFAGGIIAEIGDITAFHSSDALAKYAGLTWKSNQSGDFDGEDTPMIKAGNRYLRYYLGEAANSMRKHNVEYGAYYRKKYNEVPKHQHKRALALTSRKFVRLVYGLLARNQLYSGVSLDTSIKDSN

SEQ ID NO: 216797 - protein, 366 aa, unidentified
METIYIGVDFHSRQQTICYLKTETGELVITELKHQDKERVRAFYQQFQGLVIVGLEASGYSPWFEALLEEIGCAVWLGDATEIRRRARWRYKDDRRDAEHIWELMAHQEFPRLHQPAPASREILRMLRYRQKLIKMRTMTKNSLQAIAMQAGLAKGSRLFTAAGLAEFRAVAMSPVLQYQRDHWLALLKPLNQELLETMKWFKAAAKDDAMIARLRTHPGIGLLTALCLQHTLQPVSRFRNQRKVVAYAGFDPLVRRSADSAIHLGISKAGSRMLRYLSVEAVHTSVRYDEDLKRFYKRVAERRGRPKAKVATARKLLIRAYIMMRDEIDYAEFRRRAVAARLARRGQGPPSVPEVLIGQSASPGA

SEQ ID NO: 216798 - protein, 433 aa, unidentified
MKVKYEDRLKGKMLAIKTGTLVVGVDIAKNYQWARFVDYRGIEHSHAIKFKNSKGGFDEILARIREICKLENFNDVIVGMEPTGHYWKAFANWLEKQKGITVVLVNPYATKQAKELDDNSQTKSDKKDALTIAKLVKDGRYFELYLPHDIYAELRGLSTTRTSLNKRKNALKNTITAVLDEFFPEYVEVFKYPLKGKASRHILKTCPFPKFINELGEDGVTDEIKKAVKKTVGRKKAKQLVEAAEASIGVDYGEEAARLKLRLMLDELELLEKQTEDLEKKMTEKLGQTDYAEFLLSIKGIGVVTLASCLGELGDPTRFDNPRQMSRMAGYNLVEDSSGKNKSGTKISKRGRKNLRSVLYQMAITMVATNDEMKQLYNYLKTREKDPLRKMQALIVISKKILTIIHTLAKKKENYNPDKVFGYVRREQFKSAA

SEQ ID NO: 216799 - protein, 344 aa, unidentified
MKVSVLGVDLGKNVCSVVGLDALGAVVLRRRAKRETLIALAAKLPPCVVAMEACCGAHRLGRVFAGHGHDVRPMSPECFRPYIKAQKNDDRDAEGIAEAATRPTMRFVELKSQEQLDMQTLHRSRDRLVGERTALINQLRAILLERGIIAPQGKRKLEQFLVGLMDEQGGAGLSPRMIMLVVDTRAQWAELDRRIAAFDAEFIRWTKENEDARRLATIPGVGPTIASALIAAIGKGETFEHGRDLAAWLGLVPRQFTTGGRPKLLGISKRGNRYLRKLLIHGARAALPHVAERDTPLGRWAKALLERAHPNVAIVAFANKLARIAWAVLRRGERFVVKGLPLAA

SEQ ID NO: 216800 - protein, 480 aa, unidentified
MNVKATRTKKQVNVENQAIKLLSKEELIRKIEVIKKELRSYTWRDLETNGKFAKNDKLSFITDDMLIAGCDIGSETHYIRAIDVRGRELSSRAFEFSNTSEGFANAKAWMLALAAKNDKKQIALGLEPTGHYWFALAAWMVSNGISVVQVNPYAVKQSKEIEDNSQLKDDRKDPKLIANLVKDGNYGMPYLPEKVYADMRRLSMFRDQLTEDRIRNINRLHRELKIYFPEYMDAFGKIDGAFTLEVLKVSAIPSDITALGAEGIKNIWHNEKLRGCGYSRANEIVSYAEKSVGLTDGTDAGREAVKWYAEQILKLDEQLAVIESTLHEKCREIPYAENILEIRGVGENILAGILAEMGDISRFDDVKEIQKLSGMGLVACSSGKHKGQTKISHRGRKRLRYWLFQAAKSAVSHADEFKQLHEYYTTRTNNPLKKMQSLVVIACKILRVSYTILKTGTTYDPQKLLKDIKRPTASQAPMAA

SEQ ID NO: 216801 - protein, 343 aa, unidentified
MERVYYVGLDIHKKTISYCIKLQDGKIVRHGEIAAERKALHQWTSELPGPWKGAMEATMFTGWVYDFLKPHALELKVAHPEMLKAITAAKKKNDRADSEKIADLLRVNLLPECHMASEEIRELRRVLRYRNMIVRTAVKMKNKISGLLMEVGATYSKKRLHGKKYFNELLERVEDVPPSVNDLLCLSRSGLEMFQGVQKKLLDTLRENDLIRERVDRLMTIPGIGEVTALTWALEIGNASRFSSTRQAVSYCGLCSAQKESGGKEQRGPISKKRNKHLQTVLIEAAKLAPRWSEQLAEVHAKELTRGNRNRATLAVARRLVAYMMAVEKRKTAFEPVTTAIAA

SEQ ID NO: 216802 - protein, 399 aa, unidentified
MAVVMIGVDPHKASHTAVAIDQAERVLGQVRVRATAAQAGRLVAWAAGWPERIWAVEGASGLGYLLAQQLVATGEHVLDVQPKLGARVRLLATGAANKNDPNDARSVAVAALRSPAVRLVRAENHAAVMKVWSRRHRDLSRARNQVACRLHEVLCELVPGGIGKEITAAQATSVLDKAGLPGAVALARCELARQLVDDLRRLDQQMRDTRKRLAVAATALRTTTTEVFGVGPVVAAVVIGEAGDVTRFASRDRFAACNGTAPIEVSSGPRKIYRLSRRGNRRINHAIHMAAVTQIRHLHSEGRAYYDRKIAEGKTRKEALRALKRRISDTLFACLQADARQAISGKGPGGHPGNDSVASAAGSHPAHQLFGQATPEPKATIRPRSSTTSPVRRKTSKTS

SEQ ID NO: 216803 - protein, 367 aa, unidentified
MKSIIYVGMDVHSTSFTLSCYSLRTQSAFATLKTEPTVRAVKKYLDGIRNFYEEECTFVCGYEAGCLGYTLFHQLTAMDIKCVIIAPTTIMRKSHEIKTDRRDAEKLAKVLAYGDYSSVYIPTAQDEAVKEYIRMRDDHKLMLKKNKQQILAFCLRHNKHYPNSYWTQTHLKWMSRLEFEGYLQDTFNEYLLTYRQLEEKIERLDAQIKQLCTLDDYREKVNKLICFKGIREHTALSLIVETGDFHRFESAERYAAYLGLVPGEHSSNDNQVRLGITKAGNRHLRMLLVEAAQSYSRGAVSQKSKALKSRQSNASPEVIIYADRAATRLRKKFIKMEFHSKKHNVAKTAVARELACFIWGMMTDKIA

SEQ ID NO: 216804 - protein, 350 aa, unidentified
MKIVGCDLHTRYQQVAMLDRETGELVERRLEHESGEARAFYAALSGPVQVGIEATGHTRWFERMLGELGHELWIGDAAQIRASVVRKQKTDARDAAHILELLLSERFPRIWRPTMAERDLRQLVWHRQKLVWMRNAVGNQLHALAMGEGVCRKKKLFTKKGRAELESLGLGIWASYRRQELLTMLDQLDASLHEMDGAVAKQAEQNAAAVLLMTHPGVGPVTSLAFVLTLGPVERFERSKQVVSYLGLNPREHSSGGRQRLGAISKQGNPMMRSLLVEAGHTAARLDGELRQDYQRLKLRRGSGVAKVAIARKLAVRMYWMLRGPASYAQLVRMQGSPRGTLVASKTSLA

SEQ ID NO: 216805 - protein, 343 aa, unidentified
MPLYGAIDLHSNNNYLVVSDEKDEVVLRRRELNLLEHVLRDLEPFGSSLVGVAVESTYNWYWLVDGLMEAGYQVHLVNTAAVRQYEGIKYTNDWSDARWLAHLLRLGLLPEGYIYPAAQRPVRDLLRKRSQLVRQRTAQLLSLGNIVTRTTGVRVSRSQLKELTLEEVGQQLVQPQVTLSAACSLQVVWTLDRQIERIEQAVSQQLKLDAAAQQTEQLLETVWGVGEILGRTILLETGPVGRFPQVGDYSSYCRAVTSQCWSNGRQKGENNAKCGNRYLAWAYVEAANYAARYYGSAQRFVERKTAQVNRALAIKALANKLCRASYWVMKEQVKFEPARLFGS

SEQ ID NO: 216806 - protein, 403 aa, unidentified
MTFDTTDVGVYLGLDVGKSTHHGHGLTPAGKKIFDKPLPNSEPKLRAVFEKLAAKFGTVLVIVDQPASIGALPLTVARDTGCRVAYLPGLSMRRIADLYPGEAKTDARDAAVIADAARTMPHTLRALELTDEITAELTVLTGFDQDLAAEATRTSNRIRGLLTQFHPSLERVLGPRLDHQAVTWLLERYGSPAALRKAGRRKLVEAIRSKAPRMAQRLIDEVFDALDEQTVIVPGTGTLDVVIPSLARSLAAVHEQRRALEAQIEALLEAHPLSPVLTSLPGVGVRTAAVLLVTVGDGTSFPTAAHLASYSGLAPATKQSGTSIHGEHAPRGGNRQLKRAMFLSAFAALHDPASRTYYDRCRARGKTHTQALLRLARQRIGVLFAMLRDGTFYQPRLPQETAA

SEQ ID NO: 216807 - protein, 408 aa, unidentified
MSLISLCALCPCMLTSVMVNNSLIGKSGVGEASEASRANTRRRREIGRVQVREAVTEQDPRRHRGTSPNSRLNRRRPTRTASSYLQVREKTMSEPVYVGIDVAKETFHVATLPNVLKTQLPNTRKGHRQLSQSLKNHTIALIVLEATGGYERPLTAELLSDSLPVVVVNPRQVRDFAKGMGQWAKTDPIDAQVLARFAQIVKPAPKTHSTPQTAELSELVRRRRQLNDLRTQESNRLLMIHHPKVKKSIQKMIKTLNFQIDEIDRLIREHIDSDANFKNKDRILRSTPGVGPQTSAMLIANLPELGKLNRQEIAALAGLAPWDRSSGKSNSKAHIWGGRKEVRSVLYMAAFTACRFNPVIRALAERLKQKGKAYKVVITACMRKLLIILNTMVRNQTLWTPEKSVKNT

SEQ ID NO: 216808 - protein, 401 aa, unidentified
MPQLWAGTDAGKSEHHCTVIDAEGERRLSRRVANDETTLLELIGEVLGLSEGEPVTWAIDLNAGGAALLIALLAAHGQKVLYIPGRTVHHASGSYRGDGKTDAKDAYVIADQARMRRDLHPLQEQDEIAVDLRILTARRYDLAADRTRAINRLRAQLLEYFPALERAFNYSTSKAALVLLTGYQTPTALRRTGQSRLTGWLANRKVRNAQAVAVTALEAARAQHTVIPGERTAAAMVRTLAAAVMALDKEIARTDALIEERFREHAHAAAITSMPGMGSLLGAEFIACTGGNLDAIGSSGRLAGIAGLAPVPKDSGRISGNMRRPRRYHRRLLRVFYLSAQVAARCCPASRAFYERKRNEGKSHKQAVLALARRRLDVLWALIRDQRTFTAEPPRRGLAAA

SEQ ID NO: 216809 - protein, 325 aa, unidentified
MQGKDRSEQETKTQSTVGIDVCKLWLDIHILPSEEAFRVPNTKAGSKEIVRRMGRYDVQLIAIEATGKWHRDLHRNLVDHGYPVRVVNPLRARLFAEAMGLLAKTDQLDARMLAVFAASLTEARPPAPEIIEALKELVQARCSAVEEQTSLTNQFKSAATVFLRRQLKRRLTQIAKHIKALETESLKRINADPGLARRYDILVSIPGFGDVVAMTLLAWLSELGSCNDKQIATLCGLAPWPDDSSDRSGARHIRGGRQIIRNILYLAAITAKSFNQPMKAFFQRLTANGKAKKQALVAVARKLIVLANTLVRADRLWQTEAPKCA

SEQ ID NO: 216810 - protein, 460 aa, unidentified
MARHRTAPAASAAPQSLPAHLQHLNLNAAGIDIGSTAHFVAVPPDRDPQPVRQFATFTADLHRLADWLSSCGVDTVVMESTAVYWIPVFELLDERGFKVLLVNARHVKNVSGRKSDVLDCQWLQQLHTYGLLSGAFRPADEIVVLRSYLRQRAMLVQGAAMHIQHMQKALQQMNVLLHQVVADITGTTGLKIIHALLAGERDPQVLAALRDYRCKHSAEVIAQGLQGTYRVEHLFALQQAVTLYETYQAQIVACDRQIAQYLATFSSVAPSPCPTPAKPRQRTGNPFQFDAHAELYRLTGVDLTRINGIDAVTALTVLGEIGTDMSRWKSVKHFTSWLGLCPGTKISGGRVLGTKSKPTANRAAAALRLAATSLYRSRSALGAYLRRMTARLGKPQAVTATAHKLARLVYSMLTHGTEYVDAGQDYYEQQHKERVVRNLTRRAKELGFVLVSDSPETAVT

SEQ ID NO: 216811 - protein, 349 aa, unidentified
MLADQVDHVVGVDTHRDEHVLAVVVAPSGAVVAQRSVRASARGYAQALRFVEQYSNGRRVWAVEGVGHYGAGLARHLSSRGETVLEIGRGPRDEQRLRGKDDQLDAIRAARTALASRTLTLPRAGERREALRLLLLARRSAVDVRRDALVQLRSVIVTCPDRLREQLRQLPAGRLVVRCSRFRRSSACTLDELASRLVLRSLARRVEAATVEAAELEREIHAHVRALAPGLLEEAGVGPIVAAQLIVTWSHHGRVRSEAAFARLAGVAPIPASSGQTIRHRLSRGGDRQLNCALHTVILHRRQHDPTTKDYIARRVAEGKTTRDAVRSLKRYLARHLYRVLDSQAPHMA

SEQ ID NO: 216812 - protein, 357 aa, unidentified
MAELNFTGIVGGVDTHKDLHVAAVVDQNNKVMGTQFFSTTRQGYRQMLAWMTSFGALKRIGVECTGIYGSGLLHYLQNAGLEVLEVIAPDRMERRKRGKSDTIDAECAAHAAFSGIRTVTPKTRNGMMESLRVLKTCRKTAISARRVALQIIHSNIISAPDELREQLRNMTCMQLIRTLGSWRPDASEYRNVTNVYRISLKSLARRYPELHDEIADLDVMIAAIVDELAPELIKRNAIGYESASQLLITAGDNPQRLRSESGFAALCGVRPVPVSSGKMNRYRLNRGGDRAANSALHIIAIGRLRTDDKTKEYVARRVAEGHTKMEAIRCLKRYISREVYTLLRNQNRQINSIPITA

SEQ ID NO: 216813 - protein, 472 aa, unidentified
MRTLTCTCGTGAGKKGCLKMKKDKKKEQKVVELDAFEQINHNAAGIDVGAEEFYVAVPKGRDTESVRKFPTFTADIHRLADWLARCRVTTVAIESTGVYWIPLYEILEERGFEVCLVNARHLKNVTGRKTDVLDCQWLQQLHTYGLLRASFRPPEQICAIRGLVRHREMLVEYRSAHIQHMQKALTLMNVRLTNVLSDITGMTGMKIIRAIVGGERNRKTLASYRDPKCAKSEEEIEKSLEGNYKREHLFTLKQALELYDFYDQQIKQCDQELETLYNEFESPDQPGTPAPEKRKRKRRKNQPHFDLAQSLYRMTGGIDLTKIDGLDALTVQEVLSETGTDMSKWPTVKHFASWLCLAPNNKITGGKVKSSHTPHTKNRASNAFRIAAQSLMKSKCALGAYCRRMAALHDAPTAITATAHKLAKIFYFMLKRREPYRPLATDYYETQHRDKVVRSLQRRAASLGFRLEAAVG

SEQ ID NO: 216814 - protein, 350 aa, unidentified
MLALDQGLDVVIGVDTHKHTHTAAALGSTGAVLDHLTVPADPAGYRRLIAFGQRHQAALWAIEGTGSFGAGLTTALLAGRQRVVEVDRPQRPVRRGGVKSDDIDAVRAARQALAGVGLSEPRCRGEREAIRVLLATRGQAVEFRTRAISALHALVTSAPDGVRERLRALPLGQLLRTCAGLRGSARQNAEEFATVVAMRSTARRALACEQEAAELETQLDGLVRQLAPELLGQLGIGPVVAGQLIASWSHHGRVRSEAAFAKLGGVAPIEASSGTVIRHRLNRSGDRQLNRALHTIVLVRMRQDPATKAYLQRRLAEGKTVREIKRCLKRYVARQLFRQLEALPRPLDRT

SEQ ID NO: 216815 - protein, 451 aa, unidentified
MRSSHQVPPRAVSLPCVNPHAAGLDIGSEEIWACVPADRDPQPVRSFGTFTPDLYALADWLAACHIETVAMESTGVYWIPVYEILEARGFKAHLVNARHLKHVPGRKSDVKDCQWMQHLHTCGLLTGSFRPEAERCALRAYLRHRATLLDYRAAHIQHMQKALQQMNVQLTQVLSDITGTTGLAMLRAIVAGERDPGKLARFRDRRCARSPAEIIKALTGHYQPEHVFALKQALALYDFYTDQLRECDAEIARQFQALKPQWPDELPPLDQDDKRDSHSKNAPPYEARTLLYELTGVDLVAIPGLNAGTVQTIVSEVGTDMTKWPREKEFCAWLTLAPYHEISGGKVLRRGTRKTRNRAGQAFRLAAQSVSRSHSSLGAYYRRMRARLGPKAAIVATAHKIARIVYHMLKHRTPYRDLSPEDYARRARERDIANLRKKAAKLGFALVDVPA

SEQ ID NO: 216816 - protein, 373 aa, unidentified
MDEDRAVCVGLDTHKAKIAVAVAEPGRSGEVRFHGEIANRPEAVRQLVERLGAKHGRLRVCYEAGPCGYGLHRQITALGHECTVVAPSLVPRRPGDRVKTNRRDALTLARLLRAGELTAVWIPDPTHEAMRDLVRARTAAMEAVRRARQQLQGFLLRHGRTFTGRKAWSPAHRRWLAGLRFEHPAQQVVLQEQIDAIDEAERRRDRLEAQIRELVPTWSLAPVVAALQAMRGVAFLSAVVLAAEVGDFRRFANPRQLMAWLGLVPSEHSSGSKVERGGITKAGNGRARRVLVEGAWSYRFPARVTGPIQARLEGVPEAVRTIAWKAQLRLCARYRRLVATGKNANLVTAAVAREMAAFAWAIAREAQPAGAAA

SEQ ID NO: 216817 - protein, 399 aa, unidentified
MHVGWDWASEAHDITIIGTDGQVIDRWASTHDEAGITASLERLAGHGSPVTLPIAIEATHSLVIDRLLAAGHPVVPIHPNAFHAARPRWGASKAKSDPGDSYKLADYLRTEGHRLRRLEPLSAETAQLQAIVRMRDDHVAAKVAATNQLQALLDRHWPGAAAIFARLDSPIALAFLEDYPTPSSAARLGEARMQMFCRRHSYSGRRTARDLVERLRSAPEPTGVLNDQTLTELIRAQVHHLRCLLTTIADLDRAAGAALLEHPKTNLLAPLPRIGEINLAQVIAELGPILERATDVHHACAEIGAAPVTRKSGKSESVTFRWAVNTRARKALVTFADNSRHASPWAAHLYAQARARGKRHPHAIRILARAWTRVIWTCWHANTTYNRAQHRAEQRLAAA

SEQ ID NO: 216818 - protein, 406 aa, unidentified
MRPLPGSAYVYAEWQECKAAFDYHIDVERHYYRWHGRPVLSKQCVKIVNSANVYLEVLMLHKSLLPVIGMDIAKNVFQLHTVNPETGELERRKLKRAKVAEFFANRAPSIVAMEACGGAHHWARMLLGMGHRVKLLPANHVRAFVTRDKTDALDAQAIYVASQQPHIREVPVKSLQQQACLSLHRIRTQLMKVRIMQTNAVRGLLYEFGLVLPEGHKRLLSCIQSELARAQLELGIPDELVLSLQEQLRRIDTLQNDIDALDARLASLVKQNHKMQAAVAIPGIGALTATAVLSAVPDLSMCDSARQFAAWLGLTPRQVGTGGRTQQLGISKRGDSYLRYLLISGARSVAIRSTRTKWMKELFERCHFNVGVVALANKIARTFWAVVVKSKPFNRGKWEVELSAAA

SEQ ID NO: 216819 - protein, 362 aa, unidentified
MPKMIWLGMDVHAASITVARYEDQAATAMVQTIANDPAQVRRLVRRLPAGCDVRACYEAGSCGYGLHRQLTALGVHCDVIAPALIPRRPGERIKTDRRDAEKLGRFHRSGELTTITVPTPSQEAVRDLVRAREDVRRDRTAARQRLAKFLLRHGHRYPGSHWTKRHWEWVCGRPFEGAARTVFVHYCDHVLALNERLAHLEREIHTFADSPVYQPVVARLSCLRGLATLSALMLIAELYDLRRFRTPRELMAYLGLVPSEHSSGARERRGRITKTGNALARRLLIEAAWAYRHPARQTRRVHQALTTQPPAVHAISDRALHRLTARYRRLLSRGKTPHHAVTAIARELCGFVWAIALVPDLA

SEQ ID NO: 216820 - protein, 355 aa, unidentified
MNTLNEKSIVVGVDVHKYSHTAVAMNAWGEERGTLNFTNNTLESYTYWLEQMGLKENIIVGLEDVNSYGIHLVKDLRSKNYHIRYIPAILTERERNKSTKHDKSDSIDAKRVGKVILTKYENTLPAKESIANERELHIAKSLDLLLMERRDLTKQKTITKNQLHYLIHQHYTESYREHCPRSFSKKAVKWFMNDLQEDKTILATSIVRRLQRLLFVEEQIYTISKEISVTGETSKEAIALTAIHGCGMVTACSIVAEAITVRRFKNKHHFSMYAGIAPTPHSSGRKHKMHTNPFGNRQLNRAIHTIALGQIAIKGDPTGKEYYQKKLKEGKTKLWALRCLKHQIAKVVFQKLRYA

SEQ ID NO: 216821 - protein, 402 aa, unidentified
MNSVGIDISKGRSTVAVMRPFGEVVISPFEVRHTDSELSKLARQLKSLDGEPRVVMEATGNYHAPVAKLLHDAGLYVSVVNAKLVHGYGNNELRRVKTDRKDAVKLANYGLDRWLTLPRYVPEENTRLLLKNCYRQYRQYSKVQTVLKNNLISLLDTVFPNVNRLFSSPVRGDGSEKWVDFVAEFWHCRCVTEKSEKAFTNKYQRWCKTHGYNFSEAKAHTIHAEASGHIGIMPKSETTKLLVEQAVVQLRATSTTLTALKCEMLTLAAQLPEYPAVMGMFGVGPTLGPQLIAEIGDVRRFYSKKALVAYAGLDAPPNDSGDVTGKHKSMSKIGASSLRRTLFLVMSVYLQNAPLDEPIYQFMDRKRAEGKPYRVYMMASANKFLRIYYATVKAYLESLEQV

SEQ ID NO: 216822 - protein, 425 aa, unidentified
MDVVAHRSSGLDVHRSIIVACVLLTQPNGRASKERGQFAATAAGLAKLVAWLKSFGVTHVGMESTGVYWMPVYAVLEQARGFELIVANAQHVKQVPGRKTDVKDAEWLAQLVRFGLMPKSFVPPKPIRDLRDLTRYRRTLTEVQGSERRRLIKLLEATDIKLAEVISDVFGVSGRAILRALIEGQQTATEMAKLARGHLRKKIAHLGDALAGRLDDHHREMLAIQLVRVEAAETDIATLDKQIAERLEPYAVQVDLLVTIPGIDWVVAAIIIAEIGVDMSVFPSAGHLSAWAGVCPGNNQSAGKNKPAGARKGNVHLKTALCNAAIGASRKRNSFFKSKYTKLKIRRGGGRAALAIGHKLLVCAYHMLSTGAFYKDLGEHYQDKRDAQRATNRCVRRLEKLGFKVTLEPSGEQANKLPTELAEAA

SEQ ID NO: 216823 - protein, 376 aa, unidentified
MKKDMRFVGLDVHGETIAVAVAEPDGSVRSLGTIPNREGSIRRLVKKLGPREDLRFCYEAGPCGYVVYWQLVGMEVSCEVVAPTLVPVKPGDRVKTDRRDAEKLARSYRSGDLTAVWVPDAEHEALRDLVRAREAAKKDQLRARHRLGKMLLRQGRRPLEGVKAWTSRHSQWLRGLHFEWPAQEAAFLDYLHEVDHMGERVQRLEHAIDRSVEAVPVQMRAVIEALQALRGVSKLTAVTVVTEVGNLSRFSRPSPLMGYTGLVSSEHSSGGKTRRGAITKTGNAHLRRVLVEAAWSARYRPNLSPALKKRQKDLSEEVKAIAWKAQHRLYERHRRLTSSGKAPQQVVTALARELVGFLWDIGVRVERGIATRKAAA

SEQ ID NO: 216824 - protein, 387 aa, unidentified
MTEFFDAHRPATAFDHDSTLVVAMELSGKSWQLGAVIPGVSRRPKVGVKARDMNEVMRVVDRWKAEAVRAGRTISRVVVAYEAGRDGFWIARELSSHGIEVHVMQPASIPVERKGRRAKTDRIDLDMLLRTLLAWLRGEPRVCTMVRVPSIEEEDARRPGRERDKLVRERVGLENQIESLLCLHGIHDFRPRLKKAAEKLEALRARSGAALPAQTMAQLRRLMKRRGVASEQIAEIDAMRVAEAEAPDSDRGAAMIRLLVAFCGMGLETATRLVREVFSRPFRDRRGIAAFVGLTGTPFQSGEMEREQGISKNGNTRVRCLLLQLTWRWLKFQPGSALSRWFFGRVGEGKGRIRKVMAVALARKLLVALWRYLQTGVIPEGARLADA

SEQ ID NO: 216825 - protein, 389 aa, unidentified
MKIFVGIDIAKLNHFAAAISSDGEILIEPFKFTNDADGFQLLVSKLESFDKNSIIIGLESTAHYGDNLVRYLVAEFYQVCVLNPIKTCQMRKNNVRKTKTDKVDTFVIAKTLMLQDDLRFITFFDLDMMDLKALGRFRQKTIKQRTRLKIQLTTYVDQVFPEIQYFFKSGLHQNAVYALLKEAPSPKEIASMHMTHLANLLKVNSHGHFTKEQAKELRVLAQKSVGANDSAISIQITQTIQQIELLDSQLQKIEAEITDIMKFNDSVIMTIPGIGYINGGMILGEIGDIHRFSNPNKLLAFAGLDPSVYQSGNFQAKTTRMSKRGSRVLRYALVNAAWNVVRNNATFKAYYDAKRAEGRSHYNALGHCAGKLVRVIWKMLTDEVEFNLE

SEQ ID NO: 216826 - protein, 405 aa, unidentified
MLEAMINSCAGLDVHRRQVVCTLIRDATRTTRDYPTFDRELKDLARWLKGEKVELAVMESTGIYWKAVFASLERAGIEGRVVNARHVKQVPGRKTDVCDSEWLAELAQCGLLRSSFIPPADLRELRLMTRYRRKLSGMLAGEKNRLHRVLDDAGIRLGCVVTDIDGVSARAMVEALISGGSTPEQIAEKALGRLKEKKDALQLALEGEISDRHRLVLQKILSHVKWLQHQIAMIDGQIVAAMKPYQEEWKLLQTIPGIDVVSAAMLIAEIGVDMTRFGSKERLCSWGAMCPGNHESAGKRKSGKTRKANPYVRSLLCEVVNSARKTQSQFQGLYKGLVIRRGHKRAVVAVGHRILQIIYIVLSRKEPYRDPEIDYEALVVHRNAPRWLAALQKHGYLSSVKSQVK

SEQ ID NO: 216827 - protein, 392 aa, unidentified
MFYIGIDIAKRSHQVAFLDDGGNAIVKPFAFQNSNQGFEKLVVAFAKYGISKDNCVIAMEATGHYWFALYFFLSDLGFSVKVFNPIQTDAFRDLSIRKVKNDIIDSINIAELLRFGKFSECVIPDENTIALKNTARFRYSMVDLCSDLKRKVVCLLDQVFPEYDKLFTDIFGVTSKQLLLNFSTPDEFNEISVTKLSNFISKVSQGRLGKAKAQDLKSAAANSIGISFALDSFSFQIKQLVEQIDFTEKQIEEIDLKLTGLLAATQYSVITTITGIGAVTGSLIVGEIGDINRFESAPKLVAYAGLDASVRQSGDFLGTQSKISKRGSPYLRRALWTAAFSASQHDPVLSVYYSNLIARGKSHKLAVTAVSRKLCNSVWAVLRSGTPYVPKA

SEQ ID NO: 216828 - protein, 355 aa, unidentified
MNQEKYIGMDVHQATISAAVMDSSGKLIMECILETKAATILEFIDGLRGTLSVTFEEGTPAAWLHDLLKPHVSHLVVCDPRRNALLRDGSKSDRIDARKLAELLHANKLHAVYHGEHGVRTLKELGRSYLTITKDLARVMSRIKALYRGWAIPCSGATVYAPRHRDEWLAKIPHPGVRLRAERLYQQLDLLQPVRQEARRDLLVESHKHHAVELLRQIPAIGPIRAALLVALLQTPHRFRTKRQLWAYSGFAVESHDSGEYRFARGRLVRNRERITVRGLNHNHNHDLKNLFKGAALSASTRPGPLCDFYVALVEKGMRPTMARLTLARKMAAITLTIWKKGVEFDAKQLNRQAA

SEQ ID NO: 216829 - protein, 361 aa, unidentified
MGRQTTISQKETPKKVATTRNVTIGIDIGDRWSRYCILDEQGEVVEEGRFRTTATSVGKHFQDVPAARIAIEAGTHSIWISEQLARYGHEVIVANVTELHAIVRNIRKSDQVDAEKLARYARLDPRILRPITHRSVEAQQELTVVRARDVLVRLRTAAVNAVRGLVKPCGVRLPSSSTSCFGKRCQDLLSGALLEALAPLLEQIEQLSEQIKQYDRMILEMSSVSHPETQVLRTVHGVGPVTALTYVLTLDDPHRFERSRDVGCYLGLRPRRDQSGGRDPQLGITKAGNVYLRKLLVECANYILGPHGKDSSLRRWGLQLAGKGKNARKRAIVAVARKLAILLHRLWITQSRYVPFYEAAA

SEQ ID NO: 216830 - protein, 337 aa, unidentified
MSVYVGIDVHRKRSQVAVVTGDGTVELNKNVVNGSEPMLRLIGDLPPGTPVAFEAAFGWGWLAALLEDYGFEAHLVHPLRCKAIASARLKNDKVDAATLAQLLRADLLPEAWIAPPAVRQLRALLRHRAGLVRLGTQQRNRIHAVVADVGFDRSGSYLSGPGRGWLAGLDLPPVSREVVADCLAVIDGLAPVIDRIDGELRQHAKADPRVKTLTTLPGVGQFTALVMLAEIGDISRFPSARKLASWAGLTPTVRGSDLHVRHGHISKQGSAWLRWVLNQAAQTAKRSPDFAATYSAIAKRRGKKIATIAISRKLLTRAWHLLAGMQATSTNEPPRRP

SEQ ID NO: 216831 - protein, 387 aa, unidentified
MSEAFDPRKSATAFDQASTLVAVLELSGKSWRAGASVPGVSRRPMRQLAPRDMSGMLKAIEQWKSEASKAGHEVRRVVVGYEAGLDGFWIARALREHGIEVYVMHPASISVERRGRRPKTDRIDVDILLRALLGWLRGEPRHCTMAPIPSEAEEDMREPGRQRETLTAARLKVENQMRSLLVRFGIADFRPRLKKAPEHLEKLRTFDGRPLPPNTKASLERLLARHRLLSAQLKEIETARERVVAIADPDRLGRMIQLLAALVGVGVETATTLVHEVFSRRFRDRKALAGFVGMTGTPYDSGGSQREQGVSKNGNPRVRRMLMQLTWRWLIFQPQSALAQWFLARTQGAKGRMKKIMAVALARKLLVALWSYVETGVVPEGARLAAA

SEQ ID NO: 216832 - protein, 390 aa, unidentified
MRFAGIDIASESHVVAVVDEGGEVVVKATPFAEDADGYSKLIERLGTPSDCKVAMEATGHYWQNLFAALAGAGFEIALLNPIRTNRFAQEDLARTKTDAIDALGIARFAQQKRPVPTRLPDSVTQELRELVRLRDRVVQDLGDAVRRLHRLVDLGFPEFTRYVKTLDSELATALLREYPTAAAFPVVPRPIAKLVYDGRHKVGAELARQLVDAAKVSVGRHHGDAYRVQVRYACEDVDVARRRLRELEARIETTLRDHEVGTLLTTITGIGPQTAARMVAEVGDFERFSGPEKLAAYVGAIPALKHSGKHRPKGAMTTMGSARLRCALWMPLLTAVVRNPWLRAYYRRLVAGGKKKKVALIAAMRKLIHAMYSVATNRKPFVARIPEVTS

SEQ ID NO: 216833 - protein, 485 aa, unidentified
MRRNKQSTARKATKAPKATPSPSGRGWDQMNRKQRREMARKIQAQDLSLEVVHPDAAGIDIGNEAHYVAVPPARDSQPVRRFGCTTVELKEMAAWLKQCGIRTVAMQSTGVYWTPVYDILEEAGFEVYLVNARETKNLPCKKTDVQESQWLMKLHTYGLLRNSFRPPQEIRQLRTYWRQRNDLVQSAGRYIQRMQKVLTQMNVQLANVISDLSGATGQAIVKAILAGERDPQALAALRDVRVKASEEQIARSLEGNWQEDLLFVLQQEQDGYEFCQKQMAECDKRLEQYLQQRADRSAGADLPEETRKGRRRRKKGNAPQFDMREALFRMAGVDLTRIDGIDVMTAATILSEAGWDMSKWPNEHHFVSWLRLCPDNQISGGKVIGKGRLPTTHRLTQALKVAASSLLRSDSYLGAQFRRLRTRLGAPVAIKAMAAKLARLVYRMLRYGMQFVDKGAWYYEQKHRQRQISSLKRKAAELGFQLVAA

SEQ ID NO: 216834 - protein, 385 aa, unidentified
MSQFSGSPQAAIDYNSTIIGALELSEKKWVLAVQLPGVDRHSRHVLDAGGETLASFVERLKARCAAAGRKIARVILTHEAGRDGFWLARFLARRGIEVHVMQPSSLPVDRRARRAKTDIIDVEMLLRTLMAWLRGEPRVCSMVPIPSEGDEEARRAYREREDLSGERRSIVNKIDGILATLGVKGYKALRRDRREQLKCARQPDGDPIPQKARARLERLLDRLELVLKLIVQVESERDAVLKKDAPADEAEGMIRSLTQLRAVGPDFATLLVREAFVRQFRNRRALGGYVGLGGTPFSSGGSKREQGIGKDGNRRVRAAMVELAWMWLRWQPDSVLSVWFRARVGAMGGRIRKIMIVALARKLLVALWRYVTDGVVPEGAKMKAA

SEQ ID NO: 216835 - protein, 345 aa, unidentified
MFYVGLDIHKSHITVCVLDSNGKVVQRCQVSDADKLLKRLSELPPFEVCYEASTGYGRFFELLSTVATRVAVAHPGLLRLIYQSKKKNDRADALKLAKLLYVGEVPQVHVPAADVRAWRELITFRKRLIEKRTRVKNGLRCVLRSLGINPPGGFGLWTKKGTAWLKSLEFDQPLHSVKRSMLVAELETHSQHVQLVEKELLAFSKHNRAVQLLQTIPGVGLRTAEAVVAFIDDPHRFANSKRLGSYFGLVPSQDQSGRTNRLGHITKEGCPVVRAMLTEAVWQAVRRSPTVKSFQQRVQRGESDRKKISVIATAHYLVRVMWSMLKNGTVWKEHKSIASAALAVV

SEQ ID NO: 216836 - protein, 375 aa, unidentified
MTMQTRFSGLDPRSYDVFAGLDVDKRSIVATFTDWGQSEKSLRMPYNSEHLLNYVRRHFPNQRIAFVYEAGPTGFGLFDDLVAQGHPCLVVAPSMVPRAPGQRVKTNRLDSKSLARKLRGADLHSIHIPSPTYRELRHLVQLRDTHVRQVAATKCRIKALLTYQGIEFPSANGTWSASVVGELQRLSCTGAVRFKLNDLIRTLKFHLQSAAAAEKEIRRFCMNDPELKQNITLLKSISGIGWVVATHLAARLGDPDEITKVDQIAGFLGLAGSEHTTGDHENRGSITGVGDKRLRSKLIQSAWVAITKDPELREFYERISKRHPKKYAARKAIVAVARKLTTRIYAVLKQQRPYTLRLDSSIASLTQKETGGPRE

SEQ ID NO: 216837 - protein, 333 aa, unidentified
MMLIGCDYHPSWQQISWLDTATGETGEKKLEHASGEAEKFYRGLPGPALIGMESTGNCQWFVEMATTAGHDVWIGDAAKIRASDVRQQKHDRRDAALILKLLMEGRFPRIWTPSGEQKDLRQLLIHRYKLVRIRAQVKNELQHLAMNQGVTKKRKLWSKAGEKVLRELPLKPWASRRREDLFKVREMLNGQVDLLDQAVVEAAEKNEKARLLMTQPGVGPITSMAFVLTMGDVNRFQRGKQVASYLGLIPREYSSGGHRRYGPISKQGSRFMRMLLVEAAQNAVRYDPGFRNEYLHRCHTKAKGVAKVAAARKLAIRLYWMLRTKTAERSAEK

SEQ ID NO: 216838 - protein, 367 aa, unidentified
MSRMKRLTVQQLDVSMDYLVIGLDLAKTDTAVIAITTDGELYAIDRLKYLDLLNQAKQLGPTVFAMEPCNGMTYLVHELEELGHECRVINGEAVKDYVKSHFAGQKNDLNDAQAIAFLAQDEMLKFIRTKAKSEMTMQTLQVVRQQLIKQRTCSVVCIKGICQNYGLIISKSIMSEAKIRLIIEESQKLPEEIKEPLKALLRNAARFTIDIKQIDKAIEQGLKGNDTAERLLEVPGLGPQCVSRLLTTIGDINRFEGPKNLAAYYGLVPRSHTTGHNEQMGKITKHGDRLMRSFLVQGAHAILILHTRGRLPKSALKKWIGKKLSGGMPRSKLSIALAAKLLRIAFAVLKYKKKFDIKKAGVARCSL

SEQ ID NO: 216839 - protein, 339 aa, unidentified
MNYVGIDWAYGRAAFCAMGEGGEIQAEGLISADEDGLAKLVLRLGSEARAAVEMMSGAVWVRDRLEASGWQVQVAHARKVRDVAPLACKTDKVDARVLAELRRRELVPALWLPSPSDRALRERLRRRAHLVKTRTSALNRISGLLTQFGLRVSRRRLRKPDGMKLLERRGVPAVWRASIRELLELVEEMDRRIDPIDRELRPLAHQDERVKLLRTIPGVGPLLGLTLAAEIGEISRFPGPAKLIGYAGLAPKVSQSGKRSQTGALSKAGSRTLRWAAVEAANQAWRPSNPWHLHYLRVSARHGKNPAKSAVARKLLIAAWHMLSRREPFRPAPASSCAF

SEQ ID NO: 216840 - protein, 362 aa, unidentified
MRIYKIGSGSPNSAPERALQSSDLFVGIDLHLKSWHVTILQNGVKLFCSNIAGRWEVLKKILDRFSVGRIHAAYEAGCFGVWLYDALLAYGASCTVVPPSLIPQESGNKTKTDRIDSTKLAFLLSKGMLKAVHVPSPEQRGHQEVFRRRIQLVSDRVNTQLRIKAFIRLHNLPLVGPRGRWSARFMEDIRQWTCSDPWLTNSFQALVVQLDALKAQIEQQTRLIQTLADLDCYRENVRLLRTIPGVGLLIAMEILLELQDIRRFTSSGALSAYVGLTPSQYSSGEHVRMGRITRTGKSHLRAMLVEACWILIGKDPVLAKHFNALKSRAGTKRAIVAIARKLLIRVRRILLDRTVYLIGKTA

SEQ ID NO: 216841 - protein, 424 aa, unidentified
MDRFLLISQQVVTFSSTRNVRNLNTRGAYTIGIDIAKRKHEAAVIDGEGAVIIKPFSFTNNCSGYNRLLAMLTKAKLPLDEVSFAMEATGHYWLALFTRLQKEGFRVQVINPVQTNSIRSFYIRQAKTDPRDALLIAEVIRFGHFSESTLHPENIYELRELCRGRHAIVSMQADVKRKVVALLDQVFPEYETAFTNLFGDTSMAILQTCPTPKELSEMPLEELCHLIEVSSHKRFRMAKARELQELARSSFGFAMAGDVFSTMIRLYAKHLVFLKQQVQEMDRKIAEIMDTLDTPITTITGIGPTLGAYILSEIGDINRFSSSAKLAAYAGIDPTMRQSGEYNGVRNRMSKRGSPYLRHAIWLAASSAVLHDPALKLYFQKKRDEGKPYMASVGHACRKMVSIIYAVMRDNKAYTPCIPNEISA

SEQ ID NO: 216842 - protein, 428 aa, unidentified
MEEKTLIVGCDVHQKTICFCLLDKATGQPVAAPFTLPNDRFGAEQAIQTLQRLLFHHRYTRLEVGMEATGFFWLPFYRAIERSDLLAPFHPRLVLFNPKLVAHFKKGLDLSPNKTDNRDARAVAERLRFGRLPVTHVPDDFWQGLRRLTRYRYHLAHDLAREKVRFVTYLFLKLSAWAQIQPTSDLLGATSAALLTEFTADDLVQMPLTALADFIARRGRHQFDDPEATAQKVREALRRSYPVTPELDGAVTFSLSLMRDHIRHLEQLLKRLDREIARWIEGVPNPLETVVGLGPVVCAGILAEVGDIRRFPGHPQLAAYMGLVWKRRQSGSFRAEDTPRVSGGNPYLRYYITLGANNLRQHNLEYKAYYWRKYRETPHHKHKRALVLTGRKLTRLVYTLLAKNTAYAIPQTVLKNGEEVALLMAEVG

SEQ ID NO: 216843 - protein, 370 aa, unidentified
MDQPITYVGLDVHKDTIAVAAAEAGKRRDVREYGKIANTPAALKTLAAKLAHGGRDLRFCYEAGPCGYGIQRQLSTAGHECVVVAPSLIPRKPGDRIKTDRRDAINLAKLHRAGELTPVWVPDQAHEAIRDLVRARLAAVRTLRTARQQLSGFLLRHGHHYNRPAWTLMHRRWLAGLRFDQALHHIVLEDCLAAVEAATERRDRLEAHIVAALPDWSLAPVVRALQALRGMAMVAAATLVAELGDITRFDNPRQLMAYLGLVPSEHSSGKTRRMGGITKAGNGAARRMLIEAAWSYRFPARISREQLSRQESLSKPIRETAWKAQERLCRRYRKLVRAGKPPTLVTAAIGRELAGFVWAIAKLAQPTITR

SEQ ID NO: 216844 - protein, 327 aa, unidentified
MTLSTLGIDIAKLKFNVCLINSSGKLHHKVFANTSTGFAQLREWLVKQGSECVHACMEATGTYGEALALFLHQAGHTVSVVNPAAIKAFAGSRLSRTKTDRVDAELIARFCLAQAPPAWTPLPAEVRELQALVRRLESLVEMRVAEENRLEAGITVEVVKASVEELITHLSAQIKHTEKLIRKHIKDHPKLREQSRLLDSIPGIAQTTAAAILAEITDFTHYKSARQVAAYAGLVPRERVSGSSVRGRTRLSKIGNARLRKALYFPAITALRCSPFFQAWAKGLQERGKCKMSIIGAAMRKLIHLAYGVLKTGKPFDPEWTKAAQMA

SEQ ID NO: 216845 - protein, 338 aa, unidentified
MRLYCGIDLHATNCWVAILDESLKVVRESKVPNDLGAVLAILEGHRDALEGVAVESTFNWYWLVDGLMDAGHQVHLVNTWAAQQYQGLKYSDDRHDARWLAHLLALGILPEGYIYPKEERPLRDLLRRRAFLVRKKSSLLLSMHGAFECRTGRRVKANDLAQWSAADIEAALGDPTTSLGITCLQEPMQAIDEQIRSLEKVVLKRARLREEFALLQTVWGAGKVLALTIMYEVGAIARFASVGDFASYCRCVKTDRLSNGKRKGAGNRKNGNPYLSWAFSEVAHYAARYYEQAQRYFQRKRAATNGIIANRALAHKLARASYHVMRDQVPFDPHRLFA

SEQ ID NO: 216846 - protein, 405 aa, unidentified
MEIFCGIDWAESHHDVALVDETGRQLVKRRIGDDMAGFTDLVALLAERTDGNPEQIAAVDVAIETDRGLLVAALLGAGHRVYAVNPKAVDRYRDRHAVSGAKSDPGDALVLAQLLRTDRDAHRPIPANTETGEVVKVLARAHADAVHARQQDSNRLRSLLREFYPAALQAFPDLTTKTALVVLQAAPTPAAAAALSRATLTDLLHAAGRGTRPADAARLAEIFAVTRLRQPAAVETAMGHAASAIVTTLIAANTAIRTLEQQLEASFEHHPDAEILDSFPGLGLVLGARVLGEFGDDRSRFTDAASRRNYAGTSPITRASGKGRVVLARHVRNKRLADACYLWAFSALTKSAGARAYYDARRAAGDHHNAALRRLANKLLGQLHHCLTDHTHYNETTAWTPALAT

SEQ ID NO: 216847 - protein, 407 aa, unidentified
MIFVGVDWAEAHHDVHVEDAEGRRLGEGRLPEGVEGIARFHELVGAHIEDPKEVIVGIETDRGLFVAALVAAGYLVFAVNPMSTSRYRDRHSSSGAKSDPGDAKVLADMVRTDRHNHRPVAGDSESVEAVKVLARAHQSMIWSRGRQANALRSTLREFYPAALAAFDDLASADATEVLKVAPTPSLGAELSLAKIAAALRQGGRQRRIDERAREIQAALRSPQLQGSALVASAMGASVKASVTVISTMNAEIANLAQQLEAGFEQHPAAKVVRSLPGLGTILGARVLGEFGDDPDRYASAKSRKNYAGTSPITRASGTKRVVLARYARNMRLADAIYLWSFASLTASPGARAFYDARRTAGDTHHAALRALGNRLVGILHGCLVNGSFYDEHTAWGHRSESTVAAAA

SEQ ID NO: 216848 - protein, 383 aa, unidentified
MIPVFAESADTAPIYVSVELSKRSWLVASLSPGTAKVSLSTLPAGDGEALCRHLRKLEDRAGTKSAAPVAIRLCFEIGYDGFWLARLLRARNIDTYVLDPASFLVSRRGKRAKTDRIDAEAMIGILKAYLAGDHSVCRIVTVPTPEEEDARRLMRERGDLIRERTKIIARIRALLALHGIAHVQALKGGDWATQLDNMRTGDGRALPPNLRQQITRCFERLALLNTQVKQIETARAEALSAENSSFPCPDKAARLEQLRGIGANGATMLVSEVFCRQFTSRRHLASFLGLAPSPYSSGSVDRDQGISKAGNRGARCLMVELAWGWLRYQPSSELTLWYRERFKGKGKRAAKVGVVALARKLLIALWRFVETGLVPHGAELRVA

SEQ ID NO: 216849 - protein, 401 aa, unidentified
MVDPEIRVGVDVGCRRHCVGIADPHGTILEEFDIPHTQEGFQHFFHRIEQHRQTPKLPVAVAMEGFNGYARPLDKLIQEHGYTLYNVNNLKLARFKQIFPGAAKTDRLDARKILELFHLKDQLPMAKNVLQEVVSTPSENEKLKRLTRRRRELVREKIRVVNRMQADLQAVCPELLAITNNASNLWFLHFVTCRNDLTKLARIGQNSLLKTPGVGKKYAGIIREWQKVAKFSLEVEYVGSMIITDAHRILDLLKQIEGLDKVMEPLSEKSEIAKRLGTIPGFGKTSVAELAGEIGTFERFESEASLALYLGMCPLTNQSGEFHGTRSPRQVNRRAKAAMMTAVARHVRCIPESKAYYEKKRAEGKKHNQAVRSLGRHLVRVMWSMIKQERDYEIRSLEKCS

SEQ ID NO: 216850 - protein, 401 aa, unidentified
MREFTATEERIESASAMATVGNAEAGERHAAYVGLDVHKDTIAVAVATPGRHDPEYRGEIANKPKAVQKLLTRLSEAYGGGLLLFCYEAGPCGYVLYRQILACGHDCQVVAPSRIPKAPGERVKTDRRDAVKLARLLRSGDLTPVWVPDQEQEQMRDLSRARDDMKAQERKARQQLNAFLLRHGHHWPSDKARWTQAHESWLSGLKMEQPWQQVVLEEYLQAERAASQRVAQLTDHLMRALPEWSLAPVVDSLIALRGVDKLAAIVLLAELGDISRFDSPRQLMAFLGLVPSEHSSGGRRRQGAITLTGNAHARRMLIESAWSYRFPARQTKHLKGKARGASQTAQQIAWKAQTRLCGRYRTLTRAGKNTKLVCVAIARELAGFIWDIVRQEMPRLAAKAA

SEQ ID NO: 216851 - protein, 340 aa, unidentified
MSEVSIIGVDLAKRVFQVHGALPDGNVAFRKKLSRSQFMKFLAEQPPCLIAMEACATAHYWGRAALGSGHEVRLIPPIYVKPFVKRQKNDAADAEAIVEAALRPTMRFVEVKSADQQSLGLLFRTRELLVRQRTQLINALRGHLAEYGIVVAIGARNVKVFQQALLDHGTRLPKTVLSISGVYFEQIAALTEKVTELEIALRRETARDGQATLLQTMPGIGPMSAAAIQAFAPPLENFARGRDFAAWLGLVPRQHSSGGKDRLGRISKMGQRDIRRLLIVGAMSIVNWASRKGSQDSWLMRLLESKPKMVVAVALANKMARRLWAMCVKKEVYEIPVLVA

SEQ ID NO: 216852 - protein, 386 aa, unidentified
METAVGKLAERSVASFPTAAGDRSFNPRSNKTVEKLDRRRFHEISPNSRKSRRGAGRRASSHSQGRDIVMDVAFTSFVGIDIAKRTLDAHVLPERRSLQHSNDSKGRRQLREQLPPPGLCLIVVEATGGYERALVAELIDAGYHVAVVNPRQVRDFAKACGHLAKTDRIDAAVLAQFGETIKPRTQAKIPEKQLELQDLVARRRQLVELRTGEMNRKEKATSKLVRKSLQETIDLLTKQIRRFEKQIAALVQSDDEWKQKIQIVQSVPGVGSQVSACLLADVPELGQLNRQQIAALVGIAPFNCDSGQFRGRRTIRGGRISVRCALYMAALTARRANPVIRAFADRLAALGKKPKVILTACMRKLLVILNTMVKNKTFWNPEISIT

SEQ ID NO: 216853 - protein, 332 aa, unidentified
MAYDFVIGVDVGKYFHHACVLDPQGRQVLSKRINQHEGSLRKLFGQFLADNASVLVIVDQPNNIGRLTVAVAQDMGADVRYLPGLAMRQLSRIHAGNSKTDVRDAYVIAHAGLNLPDSLHSVDRVEEVFIQLKVLNGIDEDLARAYTRLINQMRSALVGTYPAFEHVLRGQMIHRKWILHLLAKYGGPTKIRRIGKTRLAAFARSHKARNPEPVIDAMLAAIHAQTVSIAGAEYAELGVAMSAKDALAKLEHRKEIEAQVLKLIQDIPQTEILLSMPGIGPRSTAQILMTVGDMSDSPDAAHLASYAGLSPRTNQSGTSIMSNSPNRAGNKN

SEQ ID NO: 216854 - protein, 341 aa, unidentified
MSIMTVGIDLAKNVFAVHGVDQNGKAVLIKPKVARDQLAAIVAQLSPCLIGMEACSGAHHWARLFRTYGHTVKLIAPKFVTPYRMSGKRGKNDAADAAAICEAVTRPNMRFVPIKEEHQQVILTLHRTRQGFVEERTATYNRMRGLMSEFGIVLPQKVACMRKSIGAHLEDLPGYANQCIGDLLSHADQLDTRIADYDKTIAKAAREDARSKRLMEHRGIGPVTASAFLAGIGNGHDFKNGRQVAAWIGLVPGQYSSGGKTRLGRITKAGDAYLRSLLVMGARAILSGLGDKQDGFSRWARSLVERRGYWKAVVAIAAKNARLAWAVLKYGEDFRLNPTAA

SEQ ID NO: 216855 - protein, 408 aa, unidentified
MERFYLGVDWADQFHQVWVSDFDGKKVVEKKVTQNVEGLAEFGRWLDEQRAKPIELWAAIEKPQGRIVDFLLDHGVEVYPVNPKALDRARDRFRMSRSKSDGFDAYVLAQFLRTDHGHLRALKPNSVQAQELKLLTRDQQRLGHQKTRLLNQLTATLKEYYSRPLEVFSDLETQIALDFLKQNPTPDDLSKLTRRQWNRFAKREHHLGAERAQELWEQLNQPQLTVPEHVVRAKAHLLRVLLGQLDPLRKAVKSYEERIKSFFGSMPTAELFKGLPGAKTGTIIATLWAELGDAKSRWESFRHLQAEAGVVPVTKTSGKSRVVQFRFSCNKIMRHAAYWLAFVSLNRSEWANHYYRDQRAKGHSHHQSLRALGAKWLKIIFVMWRDHKPYDENYHLANIAQQKMRQAA

SEQ ID NO: 216856 - protein, 355 aa, unidentified
MKITTIGIDLAKNVFQIHGVDAKGNVVLRKVLKREQMAAFFANLPVCLIGMEACGSAHYWARKLEALGHTVKLMAPQYVKPYVKTNKNDAADAEAICEAVTRPTMRFVPIKSVEQQAVLALHSARQGFVKARTAQANQIRGLLAEFGIVIPQGIAHIATRLPEILEDGENGLPGDFRHLIERLGDHLKELDRQAQELEVQIQLWHRSHAESQKLAQIPGIGPITASALLAAIGDARHFANGRQLAAWLGLVPRQHSSGGKQTLLGISKHGDNYLRTLLIHGARAVIRFADRKPGDADRWLAGLLQRRHKNVATVALANKNARVVWALLAHDREYVTGYTPAPSSRSSTAPVAAGQ

SEQ ID NO: 216857 - protein, 346 aa, unidentified
MDHYAGIDVSLECSSVCVVDASGKIVREGKVASEPEALISWFISLGYELSRIGLEAGPLSQWLFAAMREAGLAVELLETRHVRKAFEAMPVKSDRNDARGIAQLMRLGWFRPVHCKSIGAQETRTLLTARKLVQSKLRDVENSLRGILRGFGLKVGKTTERSFAGRIRELASGHPSLETITEGLLAVHAVLLREFNSFEKQVRRVARSDTRTRLLMSIPCVGPVVALTYGSAIDDPARFKSSKQVGAHFGMTPKKYQSGETDYTGRISKIGDAWVRTALYEAAHIMLTKPVKGCSELKSWAMRIARRAGMSKAKVALARRLAVIMHRMLVDGTLFNPASKQIAVAA

SEQ ID NO: 216858 - protein, 339 aa, unidentified
MKYTPVGVDIAKHLIQVHFIDENTGDVVDKQLRRRDFLEYFSNRESCLIGMEACGGSQHWARELTKLGHKVRLLQARFVKAFVMGNKNDVMDARAIWMAVQQPGKEIAVKTEEQQSVLVLHRSRRQLVKFRTMQINSLHGTLLEFGETIHKGRAAMEREFPEALERMKERLPPYLITVLENQYNRLNELDSLIEDIEKQLTSVAKQNETCKRLLDIPCVGPLIATAAVATMGEASAFKSGREFAAYVGLVPRQTGSGGKIRLLGISKRGDTYLRTLFIHGARAAALLTKEPGLWITELKKRRPVGVATVAMANKLARTVWAIAAHGRKYDKEYVSIRSY

SEQ ID NO: 216859 - protein, 342 aa, unidentified
MEYYVGLDVSLKQTSICVVDQAGLVVREGVVGSDPEAISVFVRSKAPGAVRIGLETGPTSTWLWTELKRLDLPVICIDARHAKAVLKMQINKNDRNDAIGIARIMQTGWFKEVHVKDIDSHSVRALLASRALLVKIKRDLENHIRGLLKNLGLVIGRATFNVFAVRAEELIEDRPDLVAAVRPLLEARNAVEQQVSELDRKVMKLARRDAQVQRFMTVPGVGPITALAFKATIDDPARFARSRSVGAYVGLTSRRHASGEIDWSGRISKCGDAMLRSYLFEAAGVLLTRVPKWSTVKAWGTRLAKRNGLRKAKVAVARKLAVILHRMWIDGTEFNWSKEVAA

SEQ ID NO: 216860 - protein, 318 aa, unidentified
MTRRPVMSERVAVGIDISKDEIVIAVAPSGEQWTSPTTPEALERTMARIAALQPTVVVMEATGGYEAPVAAAGAAAQLPIAIVNPRQVRAFAQALGRLAKTDVIDAHVLAAFGLHVDPPVRPLPDAATQVLAAFVARRRQLIEMLTAERQRLAQATAPAVQKDLRAHVRWLERRIANVDDDLTTHIQGSPLWRAREELLRSVPGIGPIVARTVMAELPELGTLSRHGVAALTGVAPMNRDSGQYRGPRMIRGGRPSLRRALYMAAVVAARYNPPLAAFYQRLRAAGKPAKVALVAVMRKLLTIMNAMVKHETVWNPAN

SEQ ID NO: 216861 - protein, 329 aa, unidentified
MKGVARWKLSITCCCGLDVHKKSITACVLWAEAKGKSRKEKKRFGTFTHDLLQLADWLEQCGVTHVAMESTGVYWKPVWNILAERFEVLLVNAQHIKAVPGRKTDQKDSEWIADLLQHGLLRGSFVPPQPTRELRDLTRYRVSLVQEINRIANRIQKVLEDANIKLASVATDALGASGRAILEAMLAGEQDSARLAEMSKGLLRNKIPELKLALEGRMTEHHRFLLRQLFERLRFTESKRSEIEQEIDKRMLPFEDKVTRLCTIPGVDRVTAWGMLAEIGLDMNQFPSSGHLASWACLCPGNFESAGKRLSGKMRKGNVSLRRCLSQAA

SEQ ID NO: 216862 - protein, 345 aa, unidentified
MELHTIGIDLGKTVFHLVGLDLRGEVVVRKKFSRTQLLRFTANIHVGLIGMEACGGSHFLGRALREQRHEVRLIPAQYVKPYVKTNKSDYIDAEAIAEAVARPTMRFVPIKTDDQLDMQSLHRVRERWVMRRTAVINQIRGLLLERGITLRKGRHHVHAALPLILEDADANLSGAVRMLLTQLKLDLDQLSVRIDEADTVIQKTAHENEACRRLVAIPGIGPVTATALIAAIGNGGAFHKGREFAAWMGVVPREHSTGGQQKLLGISKRGNSYLRRLFVQGARAVLQQRMKQSSGLSAWLAQLTSRTHRNVAAVALANKLARIAWAVLAKNEHYRPSVVVDVAAA

SEQ ID NO: 216863 - protein, 347 aa, unidentified
MAAVMIGVDPHKGSHTAVAIGTGEEPLGELRVRASAAQAQRLLAWAAGWPERTWAIEGAAGLGHLLAQQLLAAGERVLDVQPKLGARVRLLAAGAVNKNDPNDARSVAVAALRSASRREVTADDHAAVLKVWSKRHRDLGRTRTQVACRLHAVLCELIPGGVSKRLTAAHAGGLLEAITPSGAVEAARCELAAAFLEDLRRIDAQMRDAKKKLTVAVAASGTTVTEVFGVGPVVAAIVIGAVRDVSRFPSRDHFAAYNGTAPIEVSSGPRKIYRLSRRGNRRLNHAIHMAAVTQVSHRHSDGRAYYERKLAEGKTPKEALRALKRQVSDAIFARLQADAQRAAAGTR

SEQ ID NO: 216864 - protein, 352 aa, unidentified
MIVLGADSHKRSHTIAAVAAGTGELLGDQTVQVGRRGSGVLLQWARALDSDRVWALEDCRHVSGSLERFLIERGERVLRIPTHLTAKARRSARQRGKSDHIDALAVARAALQERLGSFPAAHLDGPELDLRLLVDHRERLVRHRVELNNTLQWHLHDLWPELQLPGGALFSTKWSTRIGRRLARAEQTMRVRIARDELRRLRELTQAINQFERDITELVGQIAPQLLVEPGFGPLIAAKLVGEIAGAGRFATPAKLARVAGVAPIPASSGSTQRHRLDSGGNRQINAALHRVIVTRARCHAETRDYIARRRSEGKSTREAIRCLKRYLARHVWRLLQPPHPEQRKLPLSSNS

SEQ ID NO: 216865 - protein, 389 aa, unidentified
MQDVADQSVAPTTLGPDLCAIFISLELSRSTWLVTSLSPGRGEKMSKHSVSAGDIAALLARFSELKRKACARTGKSFPIVVIQEAGLDGFWIHRVLLSEGIESHVVDAASIATSRRRRRAKTDRIDGETLLRALLAHKRGEPRVCSMVRAPTPEDEDRRRVCRERKVLIMERVQHVNRIKGLLFSQGASGYEPLRRDRRARLDALQTGDGRRLPPHLKAQVCRELDRLELLLEQINAVEAERDALLNAEQTKVSAPPLMLLGVHGVGPEFASVLWSEGLSRHFDNRRQVAAYAGLVPTPWQSGSVDREQGISQSGNPRLRTTMIQLAWLWLRHQPGSALTLWFKDRIERNGGRRRKTMIVALARKLLVALWKYVTAGVIIDGAVTRAVL

SEQ ID NO: 216866 - protein, 420 aa, unidentified
MQVALDDQEIIARVAALDIGKAEVVCCVRVPGQGPRARRMQEVRTYTTMTRSLLAMADWLTELGVTRVVMEATSDYWKPPFYLLENTFQTWLVNAKDVKHLPGRPKTDRLDAVWLCKVAERQMLRPSFVPPPAFRELRDLTRYRVDLITARTSEKQRVEKLLEDAQIKLSVVASDIFGVSGRAMMAALVAGERDPKVLADMARGSMRGKTARLEEAFTGRFTDHHAFLLRTMLARVDGINADVDVVQARIDEQIAPFAKAVTRLDEIPGIGVTAAQVIIAEVGLDMTRFPTPDHLASWARFAPGISESAGRKKGGSSTGKGNRYLARVLGEAAVGAGRTKTFLGERYRRIAKRRGKKRAIVAVGRSILMIVWELLSDEEKRFIDLGPGYYDSRVNRNRSTRNHVRELQALGYKVTLEPAA

SEQ ID NO: 216867 - protein, 459 aa, unidentified
MSQERSKRVRRRKFKVQSLPQQLQHINVNAAGIDIGSEQHMVAVPEGSDEVTVRQFGTFTADLVALADWLAQCGVTTVVMESTGVYWIPLFELLERRGFEVKLVDARHVKNVSGRKSDVLDCQWLQQLHTYGLLAGAFRPPDEICVLRSYLRQKEMLVQASAQHIQHMQKALQQMNLLLHNVVSDITGVTGMKIIKAMLAGERDPQVLARHRHGCCHSSEETIAKSLVGNYRDEHLFALRQAVELYEIYQNKIADCETAIIAQLNSYPDSTDDEPPPASKPSNPAARIRRGVDMREMLFKKSGVDLFAVPGLGADTLLTVSSEVGFDMGPWKTVKHFTSWLSLCPGTRISGGKELKKRGKRKANRAAQAFRLAAATLARSQTALGAFYRRIKARHGGQHAVTATAHKIARIYYTMLTEGSAYVEVGQKAYEQKYQERRFAHLQKQAKALGLQLVPCQAT

SEQ ID NO: 216868 - protein, 322 aa, unidentified
MATLSCCGIDVSKDRLDVMVLPEEQCFSVPNDPAGYAELVELLRRLSIMAIGIEASGGYERGSVRALLAAGMPVRQVNPFKLRQFAKASGVLAKNDPLDARMIASFVAIMPTRPAQRRAPAVERLAEILAIRRQLSAEKVAAENASRLLESAMLQRLSRRRVARLAADIDMLDRHLAETVETDAVLERRCRLLTSMPGVGAVLAYTLIALLPELGRVSGKQIAALVGVAPYAFESGKHKGVRCVWGGRGPVRRVLYMGAMSASQWNPVLKAFHDRLAATGKKPKVVIVAVMRKMITMLNAMVRDDVTWADRPNGRHNVPTAR

SEQ ID NO: 216869 - protein, 349 aa, unidentified
MLADEVDYVVGVDTHRDQHVLAVVVASSGGVIAQRSVRSNARGYAEALRFTGDHAPGTRIWAVEGAGHYGAGFARYLSSRGETVHEVSRTARGERRLQGKDDLLDAIRVARSALASTARTLPRSGERQEALRLLVLARRSAVDVRRVAIVQLRSVIVTAPESLRDELRRLPLGELLRRCSRFRRSSSRTPDELAIILVLRSLARRIEAATEEARELEREILGHVRALVPELLNEAGVGPIVAAQLIVTWSHRDRVRNEAAFARLAGVAPLPASSGQTIRHRLSRGGDRQLNRALHTVILHRRHHDPATRDYIARRVAEGKTTRDATRILKRYLARHLYRVMQNAGPTMT

SEQ ID NO: 216870 - protein, 400 aa, unidentified
MRAVFGIDVSKTSSEVAILVNGEKVHGYTILNDAIGFNRLLGDLKTVHNPEIIFEATGVYSRRLQAFLEEYSYAYTRLNPLEAKKQLDSLRVRKTDKIDAEKLAKSQLVHNRKPTYVQEEVYQHLRDLSRFYQNMTEDLVRTKNRLHKVLQVTFPELETLLSTPTGEQYWNLVMAFPCKEFVLSLSQSNLCEIIRQSTSKRISEKRIAYLTDKLIKLAKQSFCAVKKTSPMLEEVRYYAQELLRLSERRQVVLNDMVALAQPLPEYDILRSIPGIAETTATSIIGKLGDIRRFQSSNQINAFIGIDLRHYESGNFLAKEHITKRGNPYARKILFKCIHNIASASHTNPCHIADFYEKRKRQSTIASTKPHTIASIHRLIRTMYYLITHNKLYDYSLTQNR

SEQ ID NO: 216871 - protein, 389 aa, unidentified
MSKITTIGLDLAKKVFHVHGVDVAGNVVVARRLKRKEVLAFFAKLPPCLVGVEACGSAHHWGREIAKLGHTVRLMPPRYVKPYVKRGKTDPIDAAAICEAVTRPTMSFVPIKGVEQQGLSMLHSARSLLIGQRTQLINAARGHLSELGIVAARGLLGFAELAAIVRDERDRRLPATARAALMVLVRQIEAISAEIASLDSILMKENKASELGSRLDTIPSVGPVIASAFRARVTDAKLFENGRHLSAWIGLVPENDSTGGKLKQKGLSKKGDRYLRSLLVNGAMAVVRQAQKRPDKHPWVTKLLGRMSAKQAAIAIANKTARIAWAIMVHGGVYETGHRAPPISSAGVRGCPDKRLGDGVIAAAAAHDCNARARGTRRKASRVAEVLMA

SEQ ID NO: 216872 - protein, 316 aa, unidentified
MSQSDVFVGIDVAKAQLDVALRPTGDTWTAPNDEAGLAHIVERLGPLRPALIVVEATGRLELPLLGALMAAALPVVVVNPRQVRDFARALGHLAKTDRLDAQVLALFGERVRPTPRPLPDPATQALSALVARRRQVIEMLTAEKNRCGQAPPALQPDIAVHITWLETQLQHLDDALGQQIRNSPGWRTQDELLQSAPGVGPVLSRTLLADLPELGRLSRKQIAALVGIAPLNRDSGTLRGVRTCWGGRAPVRAVLYMATVAATRCNPVIQAFYRRLCAAGKAKKVALTACMRKLLTILNAMMKHRTPWRAQVSPCA

SEQ ID NO: 216873 - protein, 376 aa, unidentified
MPSENTVHVAIELAVSSWLVAARLPGAEKVRLHRIEGGDTAALLALIAELRSSASRKLGGVAEVACCFEAGRDGFWLQRLLAAHGIAAHVLEPASVLVNRRARRAKTDRLDAEGMLRLLTAWLGGDRQVCSMVRVPTPEEEDAKRPHREREHLVQEKLRLVNRIEALLFTQGVRARPSLRSWERDLAELRTGDGRALPPLLRAELDRLRRRLVLILELIRETETERAEALAAAAHDATARKITALQRIRGVGANFAAVLGREVFYRSFANRRQLASYVGIAPTPHQSGGTDRDRSISRAGNARARTTLIQLAWLWLRYQPGSALATWFRERVGALQGRTRRIAIVAMARRLLVALWRYVETGVMPDGAAIRAEAAA

SEQ ID NO: 216874 - protein, 429 aa, unidentified
MGAMSESKVPGQEPQFAALVGIDWADQKHAWCLQAADATQRENGEVEHTPEAIEAFVGQLCRRFGHRPIAVAVEQVKGALVFMLSKYGPLHLFPVPPAMSAKMREALYPSGSKDDPRDADLLLELLLQHRDKLRRLSPDSEATRRVQNLVEERRNLVDEKTAQTNRLTNQLKIYFPQMLEWFEQLDTELVCTLLERWPTLEELQKVPPARLRTFFYKQRCRYPELIERRLVGIRQAMPAIRDVAVIEAKSAAVKVSAQVIRSLVRGIADLDRKIEEAAAAHPDFFIFESLPGAGAVLAPRLLAAFGSQRERYTNAEEVQTYSGIAPVTKRSGKKKWVHFRWACPKFLRQSFHEWAGHSIAHSRWARSYYQQQRERGKGHHAAVRGLAFKWIRIVFRCWKDGVAYDESRYLAALAKRNSHLAAVAGGTIL

SEQ ID NO: 216875 - protein, 408 aa, unidentified
MNPLFVGIDVSSRSNVVYLMNPDGSKYSSFSVQNNLGGAKLLSEKIVSALSSMQLSDVVIGLEATSIYGDSLVYALREDGSLGRFQRKIHILNPKQVKKFKEAYPDLPKNDWVDAFVIADHLRFGRIAKEVYLDDYRYHALKTLTRARFDVIQNLSREKQRFANYLFLKCSGMAQDKDIPNTSATTIALMEHFESVDELANTDLNELTAFISETGHGRFADPAATAKAVRAAASGSYRLPKTVNDTVNQAMAISIASMRALEKQVKILDKAIDQQFEIIPNTLTSIPGIGRVYSAGIIAELGDIHRFDSQASVAKFAGLVWHKNQSGDFEAEHSRMIKSGNRYLRYYLLEAANSARRCDSEFRRYYDLKFKEVNKYQHKRALAFTARKLVRLIFRLLKDNRLYIPPEG

SEQ ID NO: 216876 - protein, 354 aa, unidentified
MKRARKELQPGDRVFVGIDLHKKKWHVTARTAELELFSGSIPGCWKALQRILDRYQGHQIETVYEAGYFGFWLRDHLVEYGAECIVTPPSLIPQEYGNKVKTDRRDSRKLAHFLAKGMLKRVWVPTEKERYHRQVSRRRRQLVGDRIRTQSRIKAELKLYGIELPEPDGKWTKIYLGNLGRIRFNNRWMEENFKCLLEQYYFLDEQIIKQTRLLRELSKTELYRERVELLMTIPGIGMIAAMELLLELQDVNRFQRADQLAAYVGLTPSQYTSADKVRMGRITRVGKNSLRATLIQASWALIRKDGLMQEKYDRLKSRSGGKRAIVAVARTLLIRMRRMLLDNNPYVLGLIAAN

SEQ ID NO: 216877 - protein, 341 aa, unidentified
MSVIAPVFSFGLNGYAGSGLALQDKAKKRLMQITIGIDISKETLDAYRFPDNHHIQVANGRAGHKSLVRWIGKQNGSLVVFEATGAYHRNLEAALAANGTAFAKVNPRQARRFAEATGRLAKTDRVDAIMLAKMGAILGLKAHEPRTEALHILRELITARRALMKDKVAAKTRLQTTRQTLLKNQINARLKQIKIQIQQVDAAITEKVAQDEALSNKLDILTSIPGIAETTAFSMLIEMPELGTLEGKQAASLAGLAPMSRQSGKWQGKERIKGGRAFLRRAIYMPALVATRYNPGLKAKYDQLIRAGKSGKVALTAIMRKLVVMANALLRDGRTWSELRP

SEQ ID NO: 216878 - protein, 338 aa, unidentified
MQTYAGIDLHSSNNYIGVIDANDKRLYSKRHDNNLKQIIKALWPFKTNLQGIAVESTFNWYWLVDGLQEHGFNVHLANPTAIKAYSGLKHTDDKWDSFWLAHMLRLGILPQGYIYPKQHRAVRDLLRRRLMFVRQRASQILSLQSMITRNRGLNYTGAEIKRFRDEFIDVVFTDPHLVFTAKRNLAAIKFLDRIVGEIEAEVSSQLKLRKQFHMLLTTPGIGNILAMTIMLEVGDIGRFDKAGNYSSYCRCVESKKISNGRKKGENNKKNGNRYLAWAYVEAANHAIRYCPGAQRFFQRKMSKSKRVVAIKALANKLTKATYFIMRDQVAFDSTKLFG

SEQ ID NO: 216879 - protein, 420 aa, unidentified
MHELVRKEVSAKTLIVAVDCGKVANRALLASGERGVIGEPVSLSTLRDGITELERLIASAGSEGPPVIALEATGSLHRAWAAELERRFHGSLRLFAPSETQAARTQLGSRRFKTDERDCAALVSLARQGLGRRPDDQSIDALLSAVRHRRALVGMRKVLQQRLHDQLNALAPGLSAPTGHGRALKLKDPSGQAVLACAVAFLGRAPSARSLIARAPGRLTRRNALFWAERWRGCLPAPADSAQRAERLGWDLERWQLLQRDIACTELQLATLLAATPGQVLTTLPGVATVRAAAFAAHSLPIERFASAEHLYSATGLAPASYESGSLRKRGRISRAGLSEHRDALMGIAWGLSQRSSAFRQRDRELRARGKRPIEARVALARHACRLCFALLQTQEPFCEERYARTRHGAGGDGVNSYAA

SEQ ID NO: 216880 - protein, 409 aa, unidentified
MLLFVGDDWAEDHHDVELMDAAGRRLAKARLPEGVAGIARLHAMIGAQLGEDAEDAAGQVKIGIETDRGPWVQALIAAGYTVFAVNPLQAARYRERLGVSGAKSDAADAHMLADMVRTDSHQLRPVAGDSADAEAVKVVTRMHKTLIWERTRAGQRLRHALREYFPAALAAFEDLDAADTLELLAKAPDPASAARLSLAQISAALKRARRRDIPAKAERIRAVLRAEHLGQPAVVTAAYAASVRALVAVLGTLNEQVKILQGQVEAHFGRHPDAEIILSQPGLGPILGARVLAEFGDAHDRYASAKARKNYAGTSPITRASGKKKVVAARFVHNDRLIDALMTQAFASLQNSQGARAYYDRQRNRGADYNAALRQLANRLVGILHGCLKTGTPYDEATAWSHHLTKAAA

SEQ ID NO: 216881 - protein, 433 aa, unidentified
MNTPHPYDLVIGLDRSDKKADLCLITTATGQRRSQTIDTAPEALWEWLLALRQQHPQARVGLCLEQPAVHLIAFLEAYEWITLYPINPITLQKYREAFVTSRAKDDAKDADYLADLLLTHHAKLKPWAPEDSATRAVQQLVFHRRAVVDERTGLTNRLIALLKQYFPQALGLCGEDLWRPLATRFLLKWSSLQAVQKAKPASLKQFYYLNGSRSTKLLEQRLALIEKAVPVTDETASIESFALRVQLICRQLQLVQQTLTHYEKQIAAAYAAHPDHAIFVSLPGAGPVLGPRLLASLGSQRERFGAAADLQQYTGIAPVTKKSGGSCYIHRRYLCPKFHKQSFHEYSKESILWSRWAAAYYLQQRTKGSPHHTAVRALAYKWQRVIFRCWQNRTPYQETIYEAALRKSGSNLVTLFDRVELGKSPFKNPVKKS

SEQ ID NO: 216882 - protein, 389 aa, unidentified
MSSRAAVAAVQPAPTVPAVRSIIDLGMDVHKDSITIAVLPQAAKAPTRLEKLPNDLPKLQKWIARIARDGEIHACYEASGAGYVLHRALREWGYACDVIAPSLIPKRSGVHRKHDKRDAADLARLSRAGELVAVRIPSEADERVRDVVRCRETFQREILKSRHYILKFLARRGFVFREGTNWCTPHLKWLQHLTTDGSPLAPEDRFVYREYHALLLYKLQRREELDRHIERLAELPTLAPMVKQLQCFRGISVHSAMVLATEIVDWRRFERPNQLACYLGLIPREDSSGDRQRLGSITKAGNSHCRHVLIQAAWSYRHRPQTSVDLKRRQEGQPPAVITHAWKTQQRLHQRYNHLSYRKRPQIAVVAVARELVGFLWAVMRELEPVQAA

SEQ ID NO: 216883 - protein, 365 aa, unidentified
MEQVTRGEIVRVGVDLAKHVIQVHAIDMTGRVVVARGLSRERFAAWCVSLRPGCVVGMESCSGAHHWARRLRALGLEVRIVAAHHVTPYRLEGRRAKNDANDAAAVCEAVGRPSMRFVPVKDVQQQAMLSVHRLREGYKEERTACVNRIRGLLAEFGVVAAQTPEALRRELADLLEDASNEMPALARLALQRAHQHWLELDSHIGWCDERIRIHVSSDELARTATQLCGVGPVTASALVASVGDLGQFRSGAQFGAWLGLVPSQNSSGGKTRLGGITKRGDDYLRTLLIQAAKSAVMTAHKRRDRLSQWVVQLSARVGWQRAVVALANKHARILWAVLSRRAPFDANHLSTSPSAAHATASATAT

SEQ ID NO: 216884 - protein, 318 aa, unidentified
MMSTQYNYAGIDIAKRNFVIAVSSLSKTKTETNNPKGIAHTIEYLKKHNVALVVMESTGGLEIPAAKAIHRSGIAVIIANPRQTHQFAQSQSLTKTDAKDAKMLAFFAQMTAQKEGWQTMLYQPPTEAEEVLEALVNRRNQLVDMRTAEKNRLHQVHETQVESVKQLIAHFDRLIDELDKQIDEHTHTHFDGKAQVAEQIKGIGSITTATLMAMLPELGRLSHKRLASLVGIAPHPRESGETKFKSRCFGGRSAVRKALYMATVVATRFEPLIRGFYQRLLSKGKPYKVAVTACMRKLLTILNARMRDYFAENGIRTA

SEQ ID NO: 216885 - protein, 338 aa, unidentified
MSAIKVIGIDLGKSTFHLVGHDYSGREQYRHKLSRSKLLQFISVHEPTLIAMEACCGAHWLARKCQEYGHQVKLIPPQYVKPYVKSHKNDFIDADAIAEAATRPRMRFVSPKTEQAQLGVVIRRIRTGYIRERTATMNRIGSILTEFGFSFSRGHANMKRLFQWLADTGQPVPSLLVFELRDQLSHYNDLNDKIKEQDKKLETLNRDNELFTILQTVPGIGPMTASCCLSSVSDPKDFSNGRNFAAWLGLVPFQYSTGGKPRMLGISKRGNKELRELFIHAARAVLWRDETAQRYFGSWLTDLKLRKPFNVALVALANKLARIAWSVMATKKPFEIRV

SEQ ID NO: 216886 - protein, 398 aa, unidentified
MIYLGIDIGKDFHVAGCITDESKVVIQPFKFKSKSDGYKMLKGRLESITTDRTQVKIGMEATGHYWINLYEQLAKDGFALTVLNPLQVHAFRNQGIRGNKTDSVDALLIAKMLHFGDYVDRKAKQDVLLSLRYLTRYRHDLIEQITSIKNKIICLLDIVFPEYERLFSNVFGSASLALLREASTPEQILKLDNKKLQSILTKNSHGRFGTKDVPRIKDTARDSFGSAIAADIFDFQIKLTISQIDHLTNQVKELDDKISFLYNRLNLPLTTIPGIGPTNAASIIAEIGNIANFKHPKGPATALVAFAGFDPRLSESGKYKGHAKMSKRGSKYLRKAVYQTSFIASQRDLMFKAIYDKQRSRGKAHQVALSHVANKMLHVIWSVLKNNKPYVLMMSNLN

SEQ ID NO: 216887 - protein, 371 aa, unidentified
MNHVTSIGLDVHARSVTAVALDSITGEVRSQKFGYSPAEIAGWILQLDSPKAVYESGVTGFHLVRELREMGVDCIVGAISKMHKPASDRRKKNDRNDAEFLARQLMAHNIVEVFVPDVETEGARNLSRALEDIRDDLTRAKHRLTHLLIRWGYIWNEFNEDGKRRGSWTHAHWEWIRGIELPDAAARESLDYYISEVRHIESQKKAIEKRVAQCASRPRWRDRVEALRCMKGIETVTAFALTVEAGVFSRFDSARAFASWLGLVPSEHSSGERASRGGITKAGNSHLRKLLVEASWHYARATKERKRSLYDESVPASISNHAAVGVKRLVERRRHLSCELRKRPVVANVATARELACWIWALGRMSEGALA

SEQ ID NO: 216888 - protein, 391 aa, unidentified
MVCVGIDVAKDKHDCCILDSDGTIRADCITIPNNMDGFKQLLQTIRDCTKKSDKIKVGLEATGHYSYNILGFLLDNDLAVYVMNPLHTNLYRKSLSLRKTKTDRVDARTIATMLLSDVDLKSYTDTAYNNEELKSLTRYRFDKVRERAKLKQSVSRLVTILFPELEKLVPSLHIASVYALLSEYPGAKQISEIHLTKLTILLATASMGRYGKDKAIQIRDAARTSIGSVMPAKFLELKHTIKLIRELTSEIDEIEVSIQKIMDELNPPILSIPGVGIQSAAMILAEIGDFSNFESPDKILAYAGCSPSTYQSGKLTNCYAHMEKRGSRYLRYALYNATKYVCHWNPVFAEYLAKKRAEGKHYNVALSHATKKLVRLIYALQKSGKAYLVAA

SEQ ID NO: 216889 - protein, 449 aa, unidentified
MPKKRAKAVSLPIVEPDAAGADIGSTQIFVAVPPDRDSDPVRCFETFTADLEKLADWLQQCRIRTIAMESTGVYWIPLFQILERRKIEVRLVNAHHVKNVPGKKTDVEDCQWIQHLHACGLLRGSFRPVDEVCAIRSLWRHRDNLIELATIHLQHMQKALDQMNVQLHHVISDLAGTTGLAIVDAILDGERDPAKLAELRDWRIRASPETIMKSLVGDYREEHLFTLRQSLVSYRHYQDHIQKVDTRVKEMMQSIPSKVSDSDKPPKEKNPRKTPWRNEPPQLRDDLYRAFGVDLTQVPGINTLTAQMIFTEVGPDFSRFPTVAAFCSWLRLCPDPKISGGQVLSSRTRPTKNRAALALRMGAQGLHRSQSYLGDYFRRMRARMGTPKAMTAAAHKLARIVYHMVATKQEYDATVFQDQERKTQDRKRAKVLALAKELGFQLVPVEAVP

SEQ ID NO: 216890 - protein, 313 aa, unidentified
MENQTYIGIDISKCHFDLYVLPESNEYQFENNPKGIQQCLKMLETLRPKLTVMESTGGYEVALATGLHLAGLAVAVVNPRQIRDFAKAIGQIAKTDKIDARVIARFASTVEPPAKDVLDAKARQLKALVARRDQLVGMHVAERNRMEHAVDKDIVRSIKAVLKTFERQIVQVDSQIAEHIVQDPQLKRKADIVDSAPGIACTTASMLVTRLPELGLLNRRRIAALVGVAPINRDSGTFKGKRMTGGGRRRIRTALYMPTLAAIRHNPVIREFYNRLLAKGKTKMTAVIAAMRKLLTILNTMVAKNQCWNPNIT

SEQ ID NO: 216891 - protein, 352 aa, unidentified
MSSQEMFPNVTIGLDLGDKISRTCEIDAGGNLLKSAAVATTPGAIERYFGGRPRCRVALEVSTHSPWVSRQLKSLGHEDVVANASEVYGKRRRKRRNDRLDAEFLARQARADVKLLHPIQHRSAEAQQDLALLRARDQLVQARTKLINHVRGAVKSLGARIGKCATEVFATRAARQLPEPLRPSLTPLLEVIGDLTKRIRGMDQQVERMVEEHPEAVHLQQPAGVGVLTALAFVLVVEDPKRFRRSRDVGAFLGLVPKLDESGDSSPQLHITKAGDPLVRRYLVSAARYILGPFGPDCDLRRYGQTIAARGGKNASKRAAVAVARKLAVTLHRLWVTNAAYDPDWSQHRRAA

SEQ ID NO: 216892 - protein, 359 aa, unidentified
MQTQSNKLDFSGQNIFVGFDVHLKSWKVTIMTETLVHKTFVQPPEPKALHSYLVSNFPGGIYHSAYEAGFCGYWIHNQLVSLGIKSIVVNPADIPTTNKEKVQKEDKRDSRKIARSLRGGELTAIYVPSEKTLEDRAFLRTRKMLTKDLSRYKNRIKSFLYFHGIEFPPVFKNPQTHWSKRFTVWLESIPMGHDSGKQSLLSLIHESNHLRESLLRVTKQVRSMSKTESYQQQVKLLQSVPGIGLITAMTLLTELGNIERFNNIDQLCSLIGLVPSTNSSGEKEQVGDITPRGHNVLRSAIIESAWVAVRIDPALMKCYHDYCKRMEPNQAIVRIAKKLLSRIRYVLKNKQPYVCSVVK

SEQ ID NO: 216893 - protein, 400 aa, unidentified
MRTVFGIDVSKASSEVAILVNGERVHSYTMPNDIIGFSHLLKDLKTVSNPEIIFEATGVYSRRLQAFLEENSYDYTRLNPLEAKKQLDGLRVRKTDKIDSEKLASSQFVLNRKPTYVQEEVYQNLHDLSRFYQNLTEDIVRTKNRLHKVLQVAFPEIENLLSTPTGEQYWNLVSIFPTKHWVLELSEVELKETIRNSTSKRISENRVGNLAEKLVGLAKQSYSAISKTSPMIEEVKYNAQELIRLTNRREQVLQQLIALAEPLPEYEILLSIPGIAETTATSIIGELGDIRRFKSANQINAFIGIDLKHYESGDFLGQEHITKRGNPYARKILYKCIHNIASASHTNPCHIADFYEKRKRQSQTTSTKPHTIASIHRLIRTMYYLIMHNKLYDYTLAKSH

SEQ ID NO: 216894 - protein, 408 aa, unidentified
MDIVHPKCAGLDVHQKTVVACARIVAEGAVTQEVRTFGTTTRELLALADWLAARGVTHGAMESTGVYWKPVWHVLEGQVELILANAMHVRHIPGRKTDVNDATWLADLLAHGLIRGSFVPPAPIHELRDLTRTRKQLVREVAQHTLRLQKILEDANLKLTAVVSDILGVSGRAILEALIAGEQDPERLADLARGRLKASRATLVDALHGAVTDHHRFMLQLHLSQIDGLEAAVRTVEARLGEALAPFRAAVERLITMPGVSQTVARVILAEVGLDMTRFPTAGHLVSWAGLCPRLHESAGKRLSTRTRPGAPWLKTTLVQAAWAAVRTKQTYLRAQFLRLKSRRGPKKAILAVAASMLTASYHILKNGVDYHDLGADHFDRRDKAKLARRLIRRLHDLGLDVEIRPAA

SEQ ID NO: 216895 - protein, 356 aa, unidentified
MQSKAISFKGQKVFIGIDVHKKTWSVTTLLEVGMPKTHSQKASAKELFDFLNRHYPEAEYHAVYEAGFSGFSTYYALKEYGIECTVVNAADVPTTQYESVMKSDPIDSDKMARALRAGMIRGIYIREKDNLDDRGLVRLRKSIQQDLTRYKNRVKHLLHANGVEIPELFDRSPNWSKAFINWLREEVVLLSSTRASLDMLIEQVETLRQNLLTVTRKVRALRLKEEYAEKYDALTSIPGIGPICAITLLTEIYDVKRFRNERQFASYLGLVPTCHSSGEKASFGEMTFRGNKHLGPLLIEASWVAIHWDDALSVAFTNYRRKGLMPQESIIRVARKLSNIIFAMLKTENHYAPANA

SEQ ID NO: 216896 - protein, 323 aa, unidentified
MNSSNIIAGIDVSKSKLDIHIHPLEHYKIFENNVQSIDEMLDFLRLHNVTKVGLEATGGYEKLCAYTLLSNGFEVYIIQPRWVRDYAKSLGITTKTDKIDCSIISRYINNTDMRVTPLTVDNGNIDFLKHKLSRRNQLVEIAKIQKTQIQQVTDTSIIKQIEELLAILRNQIKTLEDEMITFIDQNQELKRKYISITSIPGVSKVTAITLICYLPELGTLQEKQISSLAGLAPFNRDSGFSKGKRCIQGGRSQVRTVLHMCILSAQKVNSYINPFFTRLYNQYKKPYKIASTAAMRKLLILANSLVRDDRVFTEEYSPQSVSI

SEQ ID NO: 216897 - protein, 315 aa, unidentified
MDPLTIGIDVSKATLDVATWPGGDVWQVTYDEDGLAGLVRQLCNLQPERVVVEATGRLEVTLLAALVAAGLPAVRMNPRQVRDFARATGHLAKNDRQDARLLARLGAQLAPDVRPLPTAETEALRALVTRRRQLLEMLVAEDHRQHQPGLPAGVREQIAAHVRWLREQVGGVDRDMRRAVQQSPVWKRDDQLMRSIPGVGPVLAATLLAEVPEFTTLNRRQVAALVGVAPIDRESGTFRGRRSTVGGRAAVRRVLYMAAVAAMRCNPTVRSLYIRLVEAGKPPKVALVACMRKLLLVTRAVLRSQRPWSPLGAHG

SEQ ID NO: 216898 - protein, 364 aa, unidentified
MENVRFVGLDVHADSIAIAVAEPGRGEPDTLVTIPNDRAVLLKRLRKLGKVKCCYEAGPTGFGIHRALTAEGIDCVVVAPSLVPTRAGDRVKTDRRDAMKLARFLRSGDLTEVYVPDKATEAIRDLERARDDAKKAERAARHQLGKFLLRHDRRYPGKTAWTGKHLEWIRAQHFEHEAQQRVLEDYLRTVEDLSERVERLTKSIMELVETWSLRPLVKALQALRGINVISATVLAAELGDLTRFESAPKLMGYLGLVPSEHSSGEGRRQGRITRAGNGHARRILVEAAWAYRFRARQSRAISERSAEVSPEVRRIAWRAQERLCAKYRKLTGRGKNKNKTTAAIARELAGFVWAIAREPAMLAT

SEQ ID NO: 216899 - protein, 311 aa, unidentified
MPNSRIIGIDIAKNKADVYDTRTQKHQTIEVDNYLEWVNMLKRDKPDLVVMEATGGYQRILAGLLSIAGIPLAIVNPRQVRDYAKSINQLAKTDAIDARVIAMFAQAAHVQAKALADDATQAMRDLMERRRQLVSMRVAEKNRAAQAIHPRVEKDIADVLAFLDKRLANLDDDLDDQIRNSPIWREAEDLLASVPGVGKVTARTLLADMPELGRLNRQEIAALAGLAPFNDDSAQYRGCRHIRGGRCQVRRALYMACVSAIRCNSFIGDFYRRLREAGKSAKCALTACMRKMLLLLNSIMKNKIPFSPKIT

SEQ ID NO: 216900 - protein, 356 aa, unidentified
MTSTTKYIGMDVHKESISIAVRNAAGKIAMECVIETKASMILQFVDGLRGDVHVTFEEGTWAAWLYDLLKPHVTRLVVCDPRRNALLQEGNQNDRVDARKLAELLQNNQLRSVYHGDHGLRTLKELVRSYMTITKDLSRVMTRVKAIYRSWAIPCSGKQVYSSHHRAEWLGKINESGVRRRAEFYYQQLDALRPLRQEVRRELLAESKKHKAWKQLCEIPSIGPIRAAVLLGILQTAHRFRTKRQLWTYSGLGIEVHSSADHHVVKGQLERKKKHIEIRGLNENCNHDLKNLFKGAAVVASTKPGPLEEFYAALLAKGMRPEMARLTLARKIATIVLIVWKRGVCFDAQYLKPQTA

SEQ ID NO: 216901 - protein, 371 aa, unidentified
MDESIKFFVGLDAHKDSIAVAVCEAGREPSRFVGTLGSDVQGVLKALRKYAPARQVSVVYEAGPTGYGLHRELTRRGYRCEIVAPSLIPRRAGERIKTDRRDCARLAELSRAGELKAIWVPDEAHEALRNLWRAREDAVNMRLKVRQQLKAFLLRQDRRYAGKTSWTRMHQRWIADQRFGHPADQIALTEYQLAVQAAEERVQRLTAALQQAVQGWCFEPVVAALRALRGIDVVSAIGLVCEIGDIGRFGSARQLMGYLGLVPSEHSSGNSVRRGSITKTGNAHARRLLTEAAWNYRFPARISNELRDRSKALPPGIRTHAWKAQVRLCSRFAQLSGRGVQANKVCVAVARELAGFVWSIAQQAAPSPATQ

SEQ ID NO: 216902 - protein, 596 aa, unidentified
MLPHSAPAPQSPRRFGVGIDTSRYGHYAAFLRDDLQPAAAELQFAESAAGYALLRQRLDGLAQQHGPVHFLVRLDAAGQYAENLLHFLHGLATASASAAGAPVPFHLSLSCGDPQRNKNYRAALFGSKKSDPIEARAAARFALTERPQSDIPLSLELRTLRQVAGRLQAVVRQRTRLLNQLQHLLALTFPELALLTKDLAAGWVLELVHRYPTAALLATATPTDLGSIPYLPDQKAAALHAHARTSIASLLGPSAEALVREQVRQLRDVSARQKRLETLLVATYRALPQANHLDTIPGIGAVTAAVLTAFILDIDRFATAGQLVAYFGVLPVEVTSGVDRDGQARVPRRFIMSRRGNDLVRRYLWMAALSAVRCNPAVRALYARVVAKHPQEKAIAIGHAMRKLLHLGFSVWKSGRPFDPHHYPWHAPAHLDSSDNDMSPGSTTSDQAKPQKDQAAGHKPDASPAPSVVTAARADSVAEEAPGGESAFIDFAHVKQQLSLARVLDQLGLSARLRGTGPQRRCACPLHRGDARGRTFSVNLDSNVFQCFAKQCGQKGDVIDLWAAVHGLSLRQAALELVQTFGLEPAPRRGTEKRNG

SEQ ID NO: 216903 - protein, 386 aa, unidentified
MHDSTDLPFPERTAIQGDSATLFVSLELSRSTWVATSLAPGSKKMSKHTLVGGDGRKLLDLLARLKTRAEQRIAAPVKVVAIHEVGLDGFWIHRLLEANGVESHVVDPASIAVPRRHRRAKTDAIDGETLLRTLMAWQRGEPRVCAMTVPPSPSEEDCRRVSRERATLLRERIQHTNRIRGLLFGQGITNYNPLHKNRRECLEELRTGDGRSLPTHVKAEILREIDRLELVLRQISEVEAERDEMLRLSKASSPAALLMQLKGIGAEFATVLYLEGLFRHFENRRQLAAYAGLAPSPWKSGSIDHEQGISKAGNPRLRTTMVELAWMWVRYQPDSALSGWFRQRVGSERGRTRRISIVALARKLLIALWRYVTHGEIPAGAVMKPV

SEQ ID NO: 216904 - protein, 456 aa, unidentified
MAKPAKTKNKTKGEWEEGLAALNRNAAGIDVGNAEHYVAVSEGRDPEPVRTFGSFTADLHRMAQWLKACSIETVVMQATGVYWIALFQILESYGFQVNVVNARHTKTLPGRKTDLLECQWLQKLHTFGLLNNSFRPTEEIQVLRTYLRQRENLVAASSTCIQHMQKTLTQMNVQLANVISDISGVTGMAMLRAIIAGERNPERLATLKHNRVRASREEIARSLEGNWREELLFVLEQSLELYDLYVRKIAVCDQRIERYLKMMAPKREPGQQSDPAALPAAKQQPHFSLKDQLCRITGVDLTRVAGLQVQTVQTIISEIGVDMSRWKTEKQFASWLGLCPDNRISGGKVLKSGTRQVVNRAATALRLASRSLIRSQSALGANFRRLRSKLGAPKAITAMAHKLARLIYRMLKFGTEYVDKGMAAYESRYRQQQMKRLAKQAASLNLQLVPVPEVTG

SEQ ID NO: 216905 - protein, 386 aa, unidentified
MKRNDLSRSLVAFDQDSTLVAVIELSLKSWLIAGLVPRLARQPLKKQSADAEAIVKLLYRWREEAVKAGGKIERIVVAFEAGRDGFWLARWLRERGIEAYVIHPTSIPVSREHRRAKTDRLDTALLMRAFLGWLRGEAKHCSMAAIPTLAEEDARRPNREHEHLVGERSRIINRMKATMIRHGIGNFNVKYRKAAERLEEVRGPEGMPLAENTLAELRRDMARLALVRVQIKEIEKTRLERLKKAPQEGSHPMVLMLAKVMSIGIETADMLVHEVLSRGLRDDRAVARYGGITGAPDESGSKRREKGLARAGNARVRRGMIQLAWRWLMFQKDSGLAQWYRARTASARRDVRKTMIVALARKLLIALWRYVTTGEIPLGARLRPAQ

SEQ ID NO: 216906 - protein, 412 aa, unidentified
MELLVERAAALDVGKDEVVACVRVPGPGGRGRRQEIRTYPTFTATLETLAEWLAAQGVTQVVMEATGQYWKPCWYVLEQRGFALLLVNAHHVKILPGRKTDVGDAAWLCELLECGLLRGSFVPPPAIRQLRDLTRYRKRLIQAHSAECQRIQKTLEDAGIKLDSVAADILGVSGRAMLKALVAGERDPGVLAELARGRLRAKLPQLRQALKGRFSDHHGLLVGLALDHLEYLEATIATLDGRVDEVIAPFAVARDRLDTIVGVGKRAAECIIAEVGVDMGVFPTAGHLASWAGRCPGNNVTGGKRRSGRPTKGNRWLGEVLVECAWAAAHSRDTYLAAQFWRLARRIGKKKAAGAVGHSILVIAWHLLAYDCDYHDLGGDFFVRRDSDRARQRAVAQLQALGYQVTLQPTAA

SEQ ID NO: 216907 - protein, 355 aa, unidentified
MKKHSHSKGWTIGLDLGDRFSQVCVLDAKGEVTARVRVATTVKGLEAALRRYAGARVVLEVGTHSPWVSHWLEEKGYEAIVANPRRLRSITQSDRKDDRTDAEQLARLGRADPRLLSPIRHRGLGAQRDRALLLVRDGLVRSRVALVNQARGLAKPLGLRLPRCTPEGFASRLRREGLVEAFPGLSALVAMVDELTRKIRQLEREIEVVSRERYPETQLVRQVSGVGPVTGLAFVLTLEDPRRFRRSRSVGAYLGLRPRRRQSGERDPMLRITKAGDPYLRRLLVQSAHYILGPFGPDTDLRRFGERLQARGGRAGRKKALVAVARKLAVLLHRLWVTGEVYEPLRGAGAQATAA

SEQ ID NO: 216908 - protein, 409 aa, unidentified
MRYEEGKVETNASSIFAADSSRVVRSPFGIESASLDKSEAPKWSLIDFLTNQDHVNRFDKTYYEGGTMIYVGMDVSSKDFVIHAIDDKGKIKFKGSIAPSRAGLESLIGSLGIQKKLFVYEAGNQMRWIHDYLKKQKQDVHVVHPNEVKWITANQGKKTDKVDAKKLAELARLDGLPQRVLVVEGDARELRDLVNARAILQKKRIDLCHMIRGYAKQEGFSLPLKFFTSNDWQVKLEKMKLKSFTKTIIVALQNSAEKLQFEEKELLVEINKYENKKIELIKTIPAIGDLTARILFAALVEAERFKNKKAVANYSALAPTIYQSGNTVQMGPVNRDGRKEVRTALLQCAHCIARMKAASAKPLKEFFERIAGRSGKKRAVVALARKLLTVVYGVMKSGQVYDPKQLSAA

SEQ ID NO: 216909 - protein, 347 aa, unidentified
MRFYNRQHRHYCGIDLHVKTMYVCILDAAGRVLVHRNVKSTPEAFLEIVAPYRDDLVVAAECMFTWYWLADVCAAEGIAFVLGHALAMKAIHGGKSKNDKIDSHKIASLLRGGLLPQSYVYPAAMRSTRDLLRRRLHLVRKRGQLLAHIQNTRAQYNLPDFERRLAYPANRDGVADHFPDCSVRKSIEVDLALLERYDTLINDLELTLVRDAKRHDGDAFHRLRSVPGIGKVLALTILYEIHDIRRFDRVQEFASYARLVKGRKQSGGKMLGTSGAKMGNVHLKWAFSEAAVLFLRHATGGKKFLATIEKKHGKGKALSILAHKIGRAVFYMLSRDTVFSLEKFMAA

SEQ ID NO: 216910 - protein, 410 aa, unidentified
MEVIYKRCCGLDVHKEIVVACLLIREGGKVLKEIRTFLTMTVDLVVLHDWLKAHQVTHVAMESTGIYWKPVFNLLEDFTVLLVNAAHIKTVPGRKTDVKDCEWIADLLSHGLLRGSFIPPEPIRDLRDLTRYRKSLTDERVRQVQRLQKFLEGANIKLASVATNVMGVSGRAMLEALIAGSTDPQVLSELAKGRLRKKLPELKKALEGRFRSHHGFMVAEILTHLDFLDEAIERVSQEVSSRLVPFSKIVELMDLVPGINQRVAEGVLSEMGVDMSCFPSHRHAASWTGLCPGNNESAGKRKSGKTRKGNQWLRRYLIEASWAAVRKRGTYLSALYYRLVPRRGKNKAIVAVAHSLLVMIYHILKDQVPYHELGSDYFNKLNAAYVQRHHVKRLESLGFKVILEPLPKAA

SEQ ID NO: 216911 - protein, 438 aa, unidentified
MSNKVFFNLDELFISVGIDVGADFSWMSIALPNQQFVGKPYKILHNSIDSLTTAVSKIKEAEELYSLESRIFLESTGIYHYPLFCYLRDKGFNCSVINPIITKNSTNINIRKVHNDRFDSKKAALVGLKPDLKVSLMPSDLALNCRNLCREYYDLMDNRSAYVNKLQGELRMAFPQYLGIFSKVTINTSLTLLETYTSPSAFLKADRQEIIDIIKSTARFGITYAQNKYNAIIQAATDANQFGYIIDSNIKRIRLYISFIRKYDEEINSILESLHELVDANEDSDFVKQIHLIETFKGAGFLSAVSIMGEIGDFSAFSKPKQLFAYFGLDPAVKQSGKFEGTKVQMSKRGSAIARRVIHTLTLQSISISRNREAKNPVLREYYLKKCDSKPKLVAMGAVSHKVCNMIFAILRDNKPFKIIAPQEHIKQYNSAKCDIAA

SEQ ID NO: 216912 - protein, 343 aa, unidentified
MEHFAGLDVSVNETSICIVDDSGRIVREAKVASEPHALLQVLKNSAYRFKRIGLEAGPLSQWLYSALAEAGLPVICVETRHMRAVLQARINKTDRNDARGIAQMMRAGLYRPVHVKTLRSQKLRMLLTHRKLLQSKAIAIDNDLRGTLRNFGLKVGVVGAGKFEARIKKLVENLPDLAVLVEPLLMVRQVLREQTVVLHRRVLAIVRDDAVCRRLMTTPGVGPVVALTYRATVDVPARFRNFRAVGAVLGLTPCKYQSGEINRTGAISKCGDEMMRVMLYEAAQSMLVRSAKWSWLKAWAMQIARRRGMKKAIVALARRLAVIMHRIWVDGTEFRWTREIAAA

SEQ ID NO: 216913 - protein, 346 aa, unidentified
MLYVGLDLSRQRLDVHVLDEEGRTVEVTAVHPDADALRTLAGRVLRHGQEVSAVIESMTGSRFVHDTLEGLGWEVAIADPVKAKGLAPLAAKTDKIDAHVPAELARRDLVPEIWLPTPGVRAERERARFRLHLVHHRSALKCRIHATLMTFGHTVPVTDLFGTSGRELLAGFELPEPWATTLATSLAMLDELDERIDECGRELARLGADHPYIPLLMTVPGVGPVTAYTIASEIGDIRRFASPKKLTRYTGLCPLVRRSGNRDFRGPLAKNGPKYLRPALIEAATHAARDACYRDRYERTKHRLGRGRGAKVARIDIARQLAEAIWHVLSKNEPFAPAGPAILLVA

SEQ ID NO: 216914 - protein, 321 aa, unidentified
MTRIICGVDIGSSSLAARIGQDGAAATFANTPEGIAELAAFCESHQVALVAMEATGGYEQRAFAQLSEHGLPVAVVNPRAVRQFAQSMGWLEKTDAIDAGMIAWYAQTKKSQPLCLAPPTQLELRARVTRLRQLTEVRTAQLNQQRLVTNDAVQKGFRAMLKFLSEQIEELQQAIAALIEADPLWRELNQAFRTIKGVADRTVARIMAEMPEIGTLSNKTISKLAGLAPLANDSGKHQGKRAVRAGRASVRDILFLVGSVVARYEPDFVAFQQRLRTAGKPPKVVRIAVAHKLLVRLNAKARQVRQHSGNFELSWSASQQP

SEQ ID NO: 216915 - protein, 412 aa, unidentified
MRVIGLDVSRSVAEIAYLENGRLRAGGRVGLRRDELEHFAAKLKPDDHVVLEATGNTIAIANVLTGHVGKVIVANPLQVRLIAEARVKTDKIDAAILAQLYASGFLPEVWIPDEATQAMRRQVSRRAQIVRQRTRLKNEIHAVLAAHLIARCPATDLFGKKGRAWLSLQPLPMDERIGVDQRLHELDRLAENLQQVERILAQSAIQDDRLRKLLTITGINTTVAIGLISAIGDIARFRSPEKLVSYFGLNPSVYQSGLQPAKHGHISKRGRSYARAMLVEAAWAAAQTAGPVRAFFLRVRDRRGQQIAAVATARKLAIIVWHVLTRNEAFAWDRPALTARKTRELELQAGMPARRGSRKGSAAAYNLKSVRDLERAAGEQAEHAYQRLFSRWKQARPQASAVRAPWPPIRTP

SEQ ID NO: 216916 - protein, 347 aa, unidentified
MNKFIRIGVDLGKRYFQVHALLSEDGRAVTRKLRRDGFLAFFAEAGPCLIGMEACGSAHYWGRELRAMGHDVRLIPPIYVKPYVKRGKNDAVDAAAVCEAVSRPDMRFVPIKSAENQASLMLHKTRELLVKQRTMSVNALRGHLAEFGVVAAKGVGHVGELLEKAKNDATLPEIAKAAVKIFAQQLEAIGAAIVALEKEIAAVHARSETSRLLAGVPGVGKIVATAIVASVPDPSVFKSARDFSAWLGLTPRQNSSGGKEKLGAITKQGNRYLRKLLTLGATSLLRVAGKRNGVLRDWILALLARKPARLVSLAIANKLARIIWAMMTTGEAFRTEIMARTKEPSMA

SEQ ID NO: 216917 - protein, 346 aa, unidentified
MWIIGCDFHPSWQQVAWFNSESGESGEAKLENGNGEAERWYGQLPVPSLIGLEATGNAQWFVEMLQQMGHEVWIGDAAQIRASYVRKQKNDKRDAAHILRLLREGRFPRLWTPSAEQRDIRQLLIHRHKLVEIRTRVKNGLQHLAMNRGMQKKRKLWSEAGQKALRELPLQGWAGQRRQDLLVLLKSLDEQIGQLDQAAEETAQRDKVAQLLKTQPGVGPITALAFAVTIGDVTRFQRSKQVSSYVGLIPREHSSGGKQRLGGISKQGNRFLRQLLVEAAQSAVRYDESLRRPYQQRCHRKPKGVAKVAAARQLAVRLYWMLRTNTAYPEIVRIESSPRVPLVGAS

SEQ ID NO: 216918 - protein, 320 aa, unidentified
MDVTHSGSRFVGIDVGKAHIDVHVRPSGEAFRLTRDPAGLAELVARLNPLTPALIVLEATGGFERVVTAALCGAGLPVAVVNPRQIRDFARATGRLAKTDRVDPKVIAHFADAVRPDQRPQPDAAARELADLITRRRQVVAMISSETMRSHQARLPAVRRRLAAHLDWMNQELRQLDADLDTAVRANPAWQERATLLVSVPGVGDATTRTLLAELPELGTLGRRQIAALAGLAPVAHDSGQHRGTRHIRGGRGTVRAALYVAAWIGSRWNPTLKDIYQRLRAAGKPRKVALVACMRRLLTILNAIRKIQRAREHTSERSA

SEQ ID NO: 216919 - protein, 474 aa, unidentified
MFPGLVSNPQVRLGSLTNTQGAPHNRLSILASQNPCMHVYFCNLTLVEMIMKPQSTSSFTAFVGIDWADKKHDFCIQAAGSGQREFGTLDHAPEVIAKWAYSLRDRFGGGPIAICLELAKGPLVYALQRFDFLVLFPVHPSTLAKYREAFVPSRAKDDPTDAELALDILLRHPDKLQPLKLQSIAMRTLTALVEERRSLVNDVTSITNRITSTLKQYYPQVLDWFEYRDTLIFCDFLNRWPTLKQVKRARRSTLESFFHEHNGRRAHLVEERIQGIRAATALTEDESVIGPCQMIVQVLVEQLRVLLQAIDRFDAEIDVVTKSLPDYDLFAALPGAGHIQAPRLLVAFGEDRDRYASAAEIQRYSGVAPVVERSGNKCWVHWRIACPTFLRQTFVEWAGSTIPRSFWAEAYYQQQRSKGCSHRVAVRALAFKWIRIIYRCWKTRTPYDESVYLKALKNRGSPLLANLSESAKMT

SEQ ID NO: 216920 - protein, 415 aa, unidentified
MPNPLFVGIDVSSKDNVVCCLSNDDEKKPLCRFTVLNNRPGILELKQRISRLVHKHGFNQIRFGLEHTGCYSTHAAMYLQRHLDFGCEDVNVYMFNPSLIKEFKKARFLDAPKNDRVDAWYIASKLMAGHLPHPFTWSEPLLALQRLTRARFHLMQALTRESNFLMTNLYLKCSDYTLAFNNKLSATSLAVMEEFESIEALAEASMDELTQFLIRHGKNRFDDPQAVAKNLQKAARSSYRLPKAVADSVNLAMASSIRVIRTIQEQLKSLKKAIEDHLGTIPQTLDSVPGIGPVFASGILAEIGDINQFESHKQLAKFAGLAWTQHQSGNFTASQTRLIHSGNRFLRYYLIEAADSVRMHDPVFAQYYALKKAEPKQFAHKRALALTARKLVRLVFSLLKTNQLYQPKGGNRQTS

SEQ ID NO: 216921 - protein, 373 aa, unidentified
MPKYSTAFGMDVHLRSTTVCALDADTGEAVTRRFPGNPWGEIAGWMDGFPGPSLAAYESGYLGFAPQRELAGLGVECVVAAVSKIPRSAADSASKNDRNDAARMAKAILAHDISPVWVPSPEVEGIRDLAGAYDGATARLATAKQRPLAFLAKRGFAYGGTTPAGNPRKYWTYDFLRWLDKVRPEDDGGVRTLAALRNEVEAAAEARADLLSEYRAAVDASPIAAEAAALQSIKGCAFALAAAFSAEVGDFTRFRSGRQVTAYFGLAPSQRSSGDSVRLGGISGAGNALVRKLAVEGSWCYAAARHQPKLMPRDTGVPLEIRMHGRKGSERLLRRREEMLARGMPAAKANAATAAELVRWLWALGMMCREGAE

SEQ ID NO: 216922 - protein, 312 aa, unidentified
MTPSIIGIDIAKDRLDVHRLPDGAAKRFTNDMAGHTALLDWLAQTRVARIVYEPTGAYHRALEQALAAKGLPLAKVNPRQARRFAEATGKLAKTDRADAAMLARMGLALAPDTRPLPSQILRDLKELHLARQALMKDWTAAKNREKSLRLPLLKRQNQKRQRQIETQIAAVEAEIASRIAANAELAERLAILESIPGIAKITACALLIEMPKLGTLDGKQAASLAGLAPLARQSGRWTGRAFIRGGRASLRQALYMPALVATRFNPQLKAKYHQLITAGKPTKVALTAIMRKLIVLANALLRQRRNWAENPA

SEQ ID NO: 216923 - protein, 454 aa, unidentified
MVSKNKQAARAETPLTPIHRRAAGVDIGSTFHVVAVPAGLDPEPVRSFQSFTTDLHRLADWLVSLGITTVAMESTGIYWVPLFELLEGRGLNVVLVNARDAKNVPGRKTDVNDAQWIQQLHSYGLLRASFRPSAAIVALRAYLRHRERMLEYAAAHVQHMQKALMQMNLQLHHVVSDITGVTGMKILRAILAGERDTDVLAAHRDVRCKASVATIREALTGTYVPEHLFALRQAVELYDTYQAKLHECDAEIERTVRALPKEDEAGAPPPGRSSRVQKNEPRFEIRALLHALLGVDLTQIHGLGPYSALRLVAECGTDMTRWPTSKHFASWLTLAPGSKISGGKVLSSRTRPSANRAASLLRLSAVSVGRTTTALGAFFRRLATRAGKAKAITATARKIAVLFYNTLRHGTAYVDPGANYYEERYRQRTVENLRRRAEALGLTLVPAETSGGAS

SEQ ID NO: 216924 - protein, 377 aa, unidentified
MKKDIRFVGLDVHAETIAVAVAEADGEARSLGVIPNRPESVRRLVKKLGPAESLQVCYEAGPCGYVLYWQLSGLGVHCDVVAPTLVPVKSGDRIKTDRRDALKLARSHRSGDLTPVWVPDAEHEALRDLVRAREAAKKDQLRARHRLQKLLLRRGLRPAEGIKAGTVRYLTWVKTLQLEPAALAATLLDYIAEVDHAHERIERLERAIDQAIEAAPEAIRAVIEGLQSLRGVARISAATIVAELGQLSRFGRAKQLMGYAGVVSSEHSSGERIRRGAITKTGNAHLRRILVEAAWAYRHRPYLGGELRRRQKNASENVKEISWKAQHRLHSRYARLMGRGKTKQLAMTAVARELAGFVWAVGVEVERQLASRPARAA

SEQ ID NO: 216925 - protein, 341 aa, unidentified
MKVSTLGIDLAKNVFQLHGVDHEGHTILRKKLTRAKFVQFVIQMEPCLIGMEACSSSHYFARLFTRYGHEVELIPPQYVKPYVKTNKTDAADAEAICEAVTRPNMRFVQIKTEEQQAVLALHTERGILIRERIACANSLRATLAEFGITIAAGQNHLTRELPAILEDGENGLSPFVRTSIYRQSKHIRELEEQVKQVEEALASWYRTQEACQRMAKIPGVGMLTATYVVAAVGNARQFSTAKQFASWLGLTPKEHSSGGKQQLGGISKRGDGYFRYLLVHGARALTAWVNRNGAVEENSWLQGLLERKHYNVAVVAMAAKTARIMWSILSHNTEYQPRQLA

SEQ ID NO: 216926 - protein, 356 aa, unidentified
MAQNYKKDFNGQNIFVGIDVHLKTWSVSVALPSGYLKTHTQKASAKELFEHLNKNYPNGIYHVVYESGFSGFSTYYALKELGVDCMVVHAADVPTTQKEKVTKSDPVDSRKLARSLMNGELQGIYVHSKESLDDRGLIRHRTMLLKLIGGTKSRIKHLLYNNGVPYPDEFAQDSKHWNRRFIRWLQHDVQLLSETRLTLDLLIEELLYFRARILDVNRKIRDLANTDKYRRQYENLISIPGIGAIISMCLLTEIDDISRFSNQRQFASFLGIVPVMKASGDDCYVGQKTFRGNKALGPKIIEAAWITIKHDGELAAKFGQLCLRGMKRNKAIVRIARKLSNRIFSILKNDKEYICS

SEQ ID NO: 216927 - protein, 320 aa, unidentified
MMAQNGLVVVGIDVAKDKVDACIRAFGLRQTCPNTAQGHRKLVAWLRKCQVGKAVMEASGGYEREWRKVLHDAGIEVRIVDPKRVRSFAQSAGRLAKNDAIDAEMIAWFAETFSEAPGQMHDAAHEELVALVKARIALVELKTRLQSQSAHAAPGPAQKAHTRVLKSLATEIEKLEGAIAAKVKATADFAERAEIIESVPGFAETTSANLIAGMPELGRVSDQIAAALIGVAPYVDDSGQRRGERHIQGGRRWVRNAIYMPCLGAATQNNPVIRAFYDRLIAKGKEPKVALIACMRKLITILNTLLARRQKWDPSRYALS

SEQ ID NO: 216928 - protein, 315 aa, unidentified
MDEPHRVTTCVGIDVSKDRLDVHLRPSGEAFAVARDGKGLENLIDRLAALDVSLVVLEATGGFETIVAAAFAGAGLPLAVVNPRQIRNFAKALGRLAKTDAVDAEVIALFAEKIGPQARPVATAQAQALGELVARRRQVVEMIGMEANRRRRVTDKRLAKKIERHLAFLEKELADIDADIDTGVRAIPAWREAEDILTSVPGVGPVTARTLIAELPELGAIDRRKLAALVGVAPFNRDSGQWRGRRMIGGGRTSVRNVLYMAALVAIRHNPIVRATYLRLTQRGRPKKVAIVACLRQLLTILNAMLRTKSAWKTA

SEQ ID NO: 216929 - protein, 343 aa, unidentified
MSIVAGLDIHRRQITFDALDRVAGEVSRGRIASTPAAVGAWVERFGGRELEAALEACAGWLFVVEALLEAGATPQLAEPAETSALRGKKRRAKTDRADARHLRELLAEGRLPEAWIAPAQVREWRTRTRLRLRLLEERGQWLHRIRATLFHHGVPAAALPADLCNRQGREALASLVLPPASRERIEVALCLLEAIDRQLGTLERELRRLARKQPGCQALMRHYGIGPLTAPTILCELGDVRRLSASREAVRAVGLDIGVHRSDRRSRPGKLTRQGPPEARWALYEAAQSATRRTSPDHAHYLELKAGGLSHKQASLTIARRLTRRCFHTLRELGPQALEPVGD

SEQ ID NO: 216930 - protein, 370 aa, unidentified
MKKRITFVGLDTHKNSIEAALADDGRNTEVRLYGTIGGDLASLDKMIRKLQTTGVELRFVYEAGPCGYEIYRHLRANGFHCDVVAPSMVPKRSGDRIKTDRRDARNLARLYRAGELTAIYVPREDDEAMRDLVRGRQDAIHAQRKARQQLGGFLLRHGFRYSGKCVWTLAHRRWMAEIKMPHPSQQVILEDYVHSVEECTQRVHRLTEQILQLMPDWRMHPLVTALQALRGVAPVVAATAVAEIGPMGRFERPRQLMGYLGLVPSESSSGGSTRRGGITKTGNGHARRALIEAAQAYSHPARISRVILNRQEAVPEPIRQIAWKAQLRLCARFRKLTARGKSRNRVVTAIARELSGFMWAIAKQVPVPQD

SEQ ID NO: 216931 - protein, 349 aa, unidentified
MEQNEVILGVDTHLDTHVGAVISDTGRLLGTLSVSTDAAGYFELLTWANSFGQLQRAGVEGTGTYGAGLARVLRDHEIEVLEVNRPDRAMRRSKGKSDPTDAENAARAVLSGRATAIPKEQSGAAEAMRAVSVARRSAVKAKTQAINQLRALLVSAPQEIRERLLKTKTTECVEGCARLRSLGKTPMLQTLTTTLRLLAKRWLTLAEELKALDTMLDSLTSLHAARLRERFGVGPQTAAVLVAVAGDNPERLKSEAALAALCGTSPLQASSGKTVRHRLNRGGDRSANNALWTIAMVRMRSDPRTRAYVERRTKEGMSNKEIHRCLKRYIVRELYPLILADLADSTLAT

SEQ ID NO: 216932 - protein, 339 aa, unidentified
MKVSTLGIDLAKNVFQLHGVGCNGQTVLKKKLTRDKFLPFLMQLEPCLIGMEACASSHHFARVLRQYGHEVKLIPPQYVKPYVKTNKTDAADAEAICEAVARPNMRFVQIKTAEQQAILVLHTERNILIRERTACANSMRAILAEFGTIMPRTLSQLYKKIPEILEEYDNELSPFVRCSVARQLEHLQSVEDQITLIEQELSRWAKTQPACQRVMKVPGVGLMTATYLVASVGNGQQFHSAKQFAAWLGLVPREFSSGGKQRLGRISKRGDRYFRYLLVHGARAVAAVIERHKDNMPWLYRLLNKKAYNVAVVAQANKTARILWSMLVQHTEYRTLSVV

SEQ ID NO: 216933 - protein, 359 aa, unidentified
MEQILSKKQNWLKQVHLAEDDDLYVGIDTHKKSLHVALWLNDSSAVDFVMPPDSAKLIDILNKLRKALRMVVYEAGPTGYTLARTLQDAKIPVGVVAPSKTPRQSAPDSKTDSLDARKLAEYAAKGLLRHIAIPTKYQETQRQLTRFRQQFVEKQTRVKLQIKSFLLQHGIDQPQGLSHWSGSAIEKLKSIRLSEPLRYCLDMLIEELCFIAKQIKLAEQKIKDVFSGKPICTTVKLLVTHPGVGQTIATQFAAEIFNPKRFKDKTQLAKYVGLAPSIRQSGQTLRDGPILKTGRPQLRCSLIQGAWIWIQNDHNAYKTFCRLIHNTGHKNKAITAMARKLAVHLWMMARDNKPYDSAA

SEQ ID NO: 216934 - protein, 408 aa, unidentified
MEVLHQRCAGLDVHKATVVGCLRVQEHGRVRHEVRRWGTTTAELLALGDWLRQAGCTHVAMEATGVYWKSVWHILEGELDLLLANPAHIRNVPGRKSDVNDATWIADLLAHGLIRASLVPPGPIQALRDLTRTRKQLMREIGQHKQRIQKVLEDANVKLASVVSDVFGESGRRMLKALSAGETDPSQLAALRDGRLTASRETLAAALHGKVTAHHRFLLSQHLGTIAHLEQTVAAFERQIEAVAAPFNPAVACLVTIPGISVTAAHVIIAEIGVDMSRFATAAHLRSWAGLCPQLNESAGKVMSRRLRHGAPWLKTVLVQCAWAATRNKNNYLHAQFVRLRARRGPQKAIIAVAASILTTAYYLLRDQVAYRDLGSLYFARMDKERTAQRLARRIKELGYEVEIRKAA

SEQ ID NO: 216935 - protein, 346 aa, unidentified
MPMLAGRVDFVIGVDTHKQSHTAAAVDALGGVHHVTSISTDIAGYRSLLSWARAVAPGRRVWAVEGTGSFGAGLTVHLLEAEEWVCEIDRPERPARKAGAKSDEIDALRAAREALARTHLAQPRRRGEREAIRVLKVTRRQAVRVQSQAVSQLKALLVNAPDELRSRLRGLSSAELISHCARLHLQCSRGPEWRATLIALRATARRAQMAEAEVDQLERELAELVGTHTELIAEMGVGTVVAAQLLASWSHPGRFRSEAAFASLAGAAPIPASSGQVTRHRLNRAGDRDLNCMLRTVVLTRLRHDPRTQAYRARRRAEGKSDREIERCLKRYIARHMFRVMEGRGA

SEQ ID NO: 216936 - protein, 336 aa, unidentified
MDITTIGLDLAKHVFQVHGVNEVGHVVIKRRLRRAQVITYFASLPPCLIGMEACATAHYWARELRALGHEVRLMPPQYVKAYVKRGKNDAADAAAICEAVTRPSMRAVPVKSEEQQSALMMHRARELLVRQRTQLINAVRGHLAEFGLVEAQGPWHVPRLLASMQEDRRVPELARQILQLLASQLGEVGKRIAEIDARIVAWHKTSPVSRRLATIPGIGPLIATAIAATVPDPDIFRRGREFAAWLGLVPRQRSTGGKQRLGRISRLGDKYIRQLLIVGAQTVLLRSKAARSNAWIQGLLARRPRLVVAVALANKMARVVWAVMAKGQSYRQVAPA

SEQ ID NO: 216937 - protein, 307 aa, unidentified
MHAKFSNDNKGFRQLVKWIKKHTDCQIEELLICFETTGMYSLQLASFLSQINIDFVMENPIQIKRSMGLVRGKDDYVDSQRIAEYAYMRKENLKHTKLPSEELIKVQNLLAIRERMVRQKAGYQTSLGEYKRVLVQQQQKDLFLLLNNMISALKKQILKADKTLIEIIQSNKKLMNTYTLLTSIKGIGVILAANILVTTICFTKFNDSRKYACYCGTAPFKYSSGTSIKGRTKVSQMANKKMKALFNLAALSAIRHDPELKLYFDKRKANGANGMSTINIIRNKIIHRVFAVIKRGTPYVVMAKYAA

SEQ ID NO: 216938 - protein, 450 aa, unidentified
MSKPKPQVIEDEEHQRVFERVAAIDVAKASGMVCVRLPGRDGRPRASKVWEVPAVTSAVTELGRRLLSDRVQMVTLEATSDYWRIFYYLLEALGLAVQLVSPAQARQLKGRPKTDKHDAMWLARLTEWGMLRPCFVPPAPIRALRDYTRARTDYVRERTRCYQRLEKLLEGALIKLSSVASKLTTESAKDMVRALIAGERDPHVLAGLARTRMKAKHDALVEALTGMFDAHHGELAQLELDQVKFLDQNITQLEARIRDTLAAIPEAQGVDADGTTGPAAGTGPDAPVLPAAARLAEIPGISPDLAATIIAETGLDMTRFPTAAHLVSWAGLCPAANQSGPRARAGKKKHGNAYLRGALGQAALGAARTGTFPGERYRRVARRRGKAKAQVAVARSILTIIWHLLADPAARYTDLGPDYVASRTDRDKKIRNHVRQLQALGLQVTLAPAA

SEQ ID NO: 216939 - protein, 393 aa, unidentified
MRKPRKQKKPLNDLSRSLTPFDLNRTLITVIELSKESWLVAGIVPGVERQPLKKLAADENGLLKLLERWRAEAEKAGHKIDRIAVAFEAGRDGFWLARWLRARGIEAHVIHAASVAVAREHRRAKTDRLDTEQLKRAFLGWLRGEREHCKMCAIPTFAEEDAMRPHRERETLVGEQTTIINRIKATLARLGIRSFNPKLKKAPERLEHLRTPEGEPIPPNTIAELQRDLARKQLVAEQILQIEKARLEQLKQAPKAPPNLMVLVLMRVIGIGIDTADMLVKEILSRNLRDRRAVARYGGLTGSPDESGKTRREKGLARSGNARVRRGMIQLAWRFLEFQKESALAKWFEARTKNARGSRKKMIVALARKLLIALWRLVRDGVVPEGVVLRPAH

SEQ ID NO: 216940 - protein, 385 aa, unidentified
MSHSTPESDRIMIGIDPHKASWTAAAVGPGLQPLATVRVPVGPHGDLRRFVARWPDAIWAIEGAGGLGAPLAARLSADGIAAVDVPAKLAARVRVLSTGHGRKNDDADAISVAVAALSAAGLRTVDEEVTALRALVEHRDDVVKTRTQTVNRLHVLLTQLIPAGAPRQLTADTAAQLLRTVRPRSLGPRTLRRLAADLITEIRRLDRRITVANTEIADAVQASRSTLSELRGIGNLTTGKILARVGDVHRFRSAAAFASYTGTAPIEVSSGDVVRHRLSRAGDRQLNCCLHTMAITQLQRDSPGRVYYLRKRADGKSHKEALRCLERRLSDVVYRCLIRDADPQNGAGPRGHQGATTNSSATGSTPTAGSSDKSLPGPATTDSTT

SEQ ID NO: 216941 - protein, 419 aa, unidentified
MSFKILKNNCCGLDVHKTWIYACIGITDSFKRTEYKQARFSSFTKGLQELCLWLAKYNCIDVCMESTGKYWIPVFNVLEKNNIFVTLSHPKYTKPQKGNKTDRKDAKWICDLYMCGMVKPSFIPPADIRQLRDLVRYRFKLTCMITGEKNRAHNCLTVSNLKLDDVFSDIFGKSSRSITEQILQHPGEVFDVAPFVDSRCKTPIEEIQAAVDGAISHEQAVKLRQCLKHIDELEMHKAEIEREIFRLSQKYESVLDLIRTIPGFDKNPLTAIQVLSEIGADMSVFPTAKNLVSWAGCCPRNDQSSRKIKSTRISRADSYFKPVLVQIANALIKSKKHPEFTTRYRRIKARRGHKKAIIAICRMILTAIWHILTDLKPYTPEGFLESRPVNKEKVLTISQALNLIKQRGYIIKDDVGPVT

SEQ ID NO: 216942 - protein, 340 aa, unidentified
MQITTIGLDLAKSVFQMHGVDAGGQAALKKKLRRAEVLKVFGALPPCLVGMEACATAHYWARELSALGHEVRMMPPSYVKAYVRRQKNDAADAEAICEAVTRPTMRFVPVKSAERQSVLVLHRSRELLVRQRTMLINAIRGHCAEFGMIVPQGARRAAELVDQIREADVDALPVLAKGALLMLADQLQALAGQIHALERRLLTWHRQDQASQRLATIPGVGLISATAFAASVPDPSLFRSGREFAAFLGLVPRQNSSGGKDRLGRISKMGDGYLRKLLVVGATSVIRRARTRDLASAPWIRALLERRPARVVTVAMANKTARIVWAVLARGEAYKVPAAA

SEQ ID NO: 216943 - protein, 373 aa, unidentified
MSKVSKFVGLDVHKETIAVAVARGDSAAESLGSIPNDPDAVVKLVHRLGADDGLWCYEAGPCGYELQRLLSELGVNCIVVAPSLIPTKPGDRVKTDRRDALKLARLLRSGDLTAVWVPDAAHEAFRDLTRARQAAQEDLTRVRHRLTKLLLRLGVRAPATAWSKAYRQWLDALTLPQSLQQLVLDETRLAVAQGEQRVERLTAAITEAASQVSQAAPIAAWQSLRGIRLTTAAMVGAEIGDVTRFRSPRELMAYAGVVPSEYSSGGSTRRGRITKTGNAHLRFALVEAAWHYRHGPRLSKALKARQQGQPAEVLAIAERAQRRLNSRYRHLVARKTKQQAVVAVARELLGFIWAIAWAVHPDQRLRPAQRQAE

SEQ ID NO: 216944 - protein, 416 aa, unidentified
METKSCDKELKFLVGIDLGGENHRACIVSDSGHEVSSRTFPHSGNGVSELLRWLEEHTGADAAVVGVAMESPRGAIVEALLERGYQVFAINPKQLDRFRDRFSVAGAKSDQRDALVLGQSLRTDGRLFRHLDPEHPKILRMRELTRAHEQTGHELHVLTNQLGDLLRRYFPTLLTLCPGADELWLWSLLELAALPKDAARLKPARLEKLLREHRIRRYSAADLHSILQAPALPMAPGSAEAIAERVKLLLPRLVLLREQKVGLESKIEGVVEDLESDETFAGRRDVRIIRSLPGVGRNFVATALSEASGALANRDYAALRGMGGTAPVTKQSGKTELVSMRQACNRRMREALHHTANVFVRHDPRAARQYAELRQAGHSHARALRGVGDRLLAVLVAMLKQQTPYSAEQRQIPTAA

SEQ ID NO: 216945 - protein, 348 aa, unidentified
MNLKRIGLDTSKAVFTLHGVDQDEKAVLLRNMKRAEMEAFFAKLPPTHVALEACGGSHHWGRRLASFGHTVQLIPPQYVKPFVRRGKNDRNDAEAISEAAARPGMPSVAVRSAEQQAEAIVLSARELLVRQRTQLVNAVRGHAAEFGIIAAKNISQLPVLLETVAAAQTVPTTAKQLLEFLGGQVAQLDERIGELERRMKQQHKANPVSQLLAEVPGIGPIGALSLALTIDPGRFQSGRHFAAWLGLTPKEHSTGGRQRLGGISRAGNERLRQLLVLGAMAVIKYAKPGSKTASAGLLALLERKPRKLAAVALANKMARVVWAMMATGEAYRGSKKVATQAAGVAVAA

SEQ ID NO: 216946 - protein, 348 aa, unidentified
MMLIGCDFHPSWQQVCWVDTDTGETEECKLVHAPGEAEKFYRRFPAPALIGMEATGNCQWFVEMLAALGHEVWIGDAAKIRASEVRQQKHDRRDAALLLRLLIEGRFPRIWTPSSEQKDMRQLLIHRYKLVRLRAQAKNGLQHLAMNQGLQKKNRLWSKKGQKLLRELALQPWASRRREDLLHVLTMLDGQIESLDLAVKQAAEQNENAKLLMTQPGVGPVTSLAFVLTMGDVSRFPRGKHVASYLGLIPREYSSGGHQRLGSISKQGNRFMRMLLVEAAQVAVRCDPQFRSEYLHRCHEKPKGVAKVAAARKLAIRLYWMLRTQKRYPEIVHVESSSRVPLVVRHGG

SEQ ID NO: 216947 - protein, 399 aa, unidentified
MYYLGIDIGKQKHVAAMLDAEGNICLKPLSFDTMGTGYQKLIFGIKSITTDKNGIRIAMEATGHYWLNIYEKLKADSYDVTVLNPLQVSSFRNQGIRGSKTDNVDSILIARVLRFGETMETKLPESDILALRHLTRYRTDLIQETTMAKNKIIGLLDQVFPEFSSLFSDTFGAAAMQLLKEASTPEEIIDIDETTLCTILNKASCGRLGKEQAVKIKDAAEHSFGLQTAVDAFSLQIKLIISQIEHLKGIVAVLDKKIEQLYAKQDLSLTTLPGVGTITAAAIIAEIENVEKFKSRSGGAAALVAFAGMDPKLKESGKYSGQVKISKRGSPYLRRAIYLASFIAIQNDDYFRAVYDNHRQKGKSHKVALIHVGVKMLHIIYSMLKDNHPYMPKNCMEEN

SEQ ID NO: 216948 - protein, 346 aa, unidentified
MKTVTLDVHAEACQMAVVTECGEVVYEAKVETSPEALRRAIEGVPGAKRVVVEEGPMSALIHDALKDVADEVVSCDPTRNALIARAEDSNDERDARRLALLARVGAIRRVYVPPEPYRSLRSLTHYDQTLAEAVTAAKNQLKALCRRHGIRCKGARVYRSDGRSLFLKAAPNASVRWQMESLYRRLDQVRRERTRSRRMVLKQARKGRVMGRLEAIPGVGPKTGPPIIAWIADPARFRNRGAKSSYGGLGLKQDVSNWKPTGRAHASRRGNRELKRALFLSARGALRGKNALRRRYDARIASGWEDRKAIRDIARTILFIACAIWKSGKEYDDTKVSVPRTERGAQ

SEQ ID NO: 216949 - protein, 345 aa, unidentified
MEQIIRIGMDTSKHIFQLHGVDAAERPVLRKKLGRRQMVEFFAKLPPTVVGMEACGASHYWARVLGEFGHQVKLIAPQHVKPYVGRNKNDSRDAEGLCEATGRPTMRFVPVKTPEQQAALMLAGIREQTITRRTQLSNAIRGYAAEFGITVAKGLDKIEPLLAQIAQDQSLPALTRKMFAMQGCQYAQLQAELTVIEARLRAWHRDNADSRRLARIRGIGQVGATGLVMKTPDPHAFSSGRHFAAWIGLTPKDHSSGGKTRLGKITRAGDERLRSVLVAGATAVIQQARRGRGNPSPWLLELLKRKPPKLAAVALANKNARIAWKLMVTGEHYDDARMLGASAAA

SEQ ID NO: 216950 - protein, 348 aa, unidentified
MLIIGCDYHPGFQQIAFVDTETGECGERRLTHREEAEQFYGGLKERSVRVGMESSGHSRWFERLLRDLRFELWIGDAAEIRTKRVRKQKTDRQDAQLLLRLMIEERFPRIWVPDAENRDLRQLLWHRHRMVQMRTRVMNQLHVVALNEGLRRKKALWRAAGRKELESIALAHWASRRRQDLLDLLDQFTPKIQERTRALEEEVEKRPVTRRLMTHPGVGPLTALAFELVIGTPERFHCGKQIASYVGLVPSEESSGDRRRLGHISKQGNVLLRFLLVEAAQVTVRSQPEWRSTFFHLAMRRGRKIAKVAMARKLAVHLYWMWRQGCDYGQWRKLGSHAGEPGHRDGVQ

SEQ ID NO: 216951 - protein, 447 aa, unidentified
MKKKKPISKRSAKLPKHLLHLNQHAAGIDIGSRSHFVSVPEDTDDQPVREFLTFTDDLERLAEWLISCGVTTVAMESTGIYWIPVFEILEYHGLEVRLVNARHVKNVPGRKSDVLDCQWLQQLHTYGLLRGAFRPADQVCTLRAYVRQRSTLVRSASAHIQRMQKALAQMNLQLHNVVTDITGVTGMSIIKAILAGERKPHALAAFRDKRCKNSEETIARSLHGNYRPEHLFNLRQAVELFEFYQQKIADCDQQILAQLRQFDSPDDNGPDSKPPRSMEEALQRMSGTDLSSINGINTNTALKIIAEIGIDMSRWKTVKHFTSWLGLCPGSKISGGKVLSSATKPVANRAAAALRMSAMTLFNSKSALGAYFRRQRSRLGAPKAITATAHKLARLIYNMLKYGSAFVDSGQEQYEERYRSRVLQGLKRKAQEMGYKLVSIQEDPQTA

SEQ ID NO: 216952 - protein, 432 aa, unidentified
MKYKMKQKQNQRITRINEKTLVVGADIAKQIHVARAVDFRGIELGKECTFINLEEGLVKLATWMKDLQQAQDKTEILFGVEPTGHYWFPLAAFLQGEGIKVVLVNPHHVNKTKELEDNSQTKSDYKDAKVIADLVRNGHYSEPNLPTGAFADLRILMNLREKVVESSNQVKARIHNWFDRFFPEYPQVFKDWSGKASLMTLHQFPIPQEIASIGARGVLAHWKTEIKQGVGIKRAEKLYKAATTSIGLTEGIVAARIELATLLAQYKLYTEQIETVMEKVMNILGEIPGTAQMLSIPGVGVTTVAGFLAEVGDLSKYDHGQQIIRLAGLNLIENSSGKRKGKTGISKRGRSRLRGLLFRCIMPMVAKNAEFKALHKHYTTRSLNPLKKKQSLIALCGKLIRVLYTLGTKKKEYDANEILGSIRLAQFEQDAA

SEQ ID NO: 216953 - protein, 407 aa, unidentified
MIFVGVDWAEAHHDVCVLDAEGSVLGRRRIPDSLVGASELHALLADHLGDDDDAQSVIVGIEKDRGLIVTALVAANYQVFAINPLAASRYRERHHVSGAKSDPGDAKVLADLVRTDRHNHRAVAGDSALSDAIKLLARTHQNTIWNRQRQVNSLRSALKDYYPGALEAFGTDLSGPDAVAILALAPTPALGRTLSRAKITSALRRAGRQRRLDERTERIHEVLHRDQLRQPTTLENAYGVTTEAAISNIAQLNVSLTKLEASLSEHFKQHPSAKVILSLPGMGTVLGARVLGEFGDDPNRYRDAKSRRNYAGTSPVTKASGKSRVVLARHSRNKRLGSALDQWAFSSLLPSPGARHYYDDLKARDKHHRKAIRQLANKWVGILHACLENDCPYDENIAWKTREERAA

SEQ ID NO: 216954 - protein, 349 aa, unidentified
MRSFQPPADTRFYAGVDLHARALFLVVLDHDGQTRFARNLPAQPEPFLRAIAPFRAGLLVACECVHCWYWLADTCRDHDIAFVLGHAWAMKAVHGAKTKCDRKDAEAIARLLRGGNFPPAYAYPRERRSLRDLLRARLRLVRQRAELYGHVHTARRQANLPPVSSDVKYKCKRAAITADIADPFVRRRVETDLVLLAPLDTAIRQLEAELEDAAKEHYPTELAVLQSTPGVGLVLSLTILLEIDTIDRFDTRQQFCSYARLAGAVQTSDNKRAGAGNRKAGNAWLKWAFSEAAVLSAQKDERIGAYLQRLASRLGKAKALSALAHKLGRAFYHMLHTKEVFDVTRFVRH

SEQ ID NO: 216955 - protein, 414 aa, unidentified
MYYVGIDIAKRSHVACVMSEDNSLMVKPFEFLSTQSGFKKLLVHLQSLSCSLSDVIIGMEATGLLFENLYRYLKELDFRVVLLNPYQTSKFREMDTMKRVKNDNIDSVMIAALIKSGRFSEGYVSDEQLQSLRELYRHKASLDDQLKALKRQSGTLLAVVFPELEQVISNPFNVTGLALLEKYPTAKHYEYASVDRILKTFRGIKGNNFNQAKALKLLALAKESIYSGVAKEARAMNIRSNIALIRLLQEQMAQCDEEMLHLFNNKATSISQEQQHEISELIDNLRTIPGVGDKTILALLAECGNLDRFTDAKALVGFLGLYPTLEQSGGTLRYGRLAKRGARLAKKAIYLAAIAAIRHNSELHTLYDKYRSKGRAKKECIIIVARKLIQIIYAVYKRNTPYDPIRVFVPKPNQ

SEQ ID NO: 216956 - protein, 408 aa, unidentified
MERYYLGVDWADEFHQVWVSDPEGKKVIEKKVIEDVEGLTEFGRWLDETRAKGIELWAAIEKPHGRIVEFLLDHGVVVYPVNPKALDRARDRFRMSQSKSDSFDAYVLAEFVRTDHGHLRALEPNSDPAQELKLLTRDQYRLVRQKTRLLNQLSRTLKEYYVRPLEVFSDLETNIALDFLQQYRTPQALAKLTRRQWNRFSKREHHLGEDHCKELWEKLNQPQLEVPEHVVRAKARLLAVLVVQLKTLRDAVDSYNERVKSFFAYMPAAELVRMLPGAKTGTIVATLWAELGDAKSRWESFRHLQAEAGVVPVTKASGKSRVVQFRFSCNKIMRHAAYWLAFVSLNRSEWANQYYRDQRAKGHSHHQALRALGAKWLKIIFVMWRDHKPYDENIHLANITRQKMRQAA

SEQ ID NO: 216957 - protein, 399 aa, unidentified
MLRDYDCVDVFIGVDVGKDGHHAVALDKSGNRLLDRALPNDEDELRQILQDLGSHGRLLFVVDQPATVGALAVAVARADGAVVGYLPGLAMRRIADLHPGEAKTDARDAFIIAEAARSLPGTLRSLELGDEQRAELVMLCGFDDDLVAQATATSHRIRGLLTQIHPALERVLGPRLDHPAVLDLLRTWPTPQALRQAGTKRVAARLRKLAPRIGERLAEEISQALDRQTVVVSGTESAGIVLAQLAGMLDGLHTARNTVLAKVEALVEAHPLHRVLTSLPAVGVRTEARILTEIVGKEFQTAAHLASYAGLAPVTWRSGSSIRADHASRKGNKVLKRTLYLSAFAALKDPLSKAYYDRKRAEGKRHNQALIALARRRCDTLFAMLRDGSLYHPKTPQTP

SEQ ID NO: 216958 - protein, 304 aa, unidentified
MNGIGIDVSKRRLDIGTTDGETLKVSNNPAGYAELDAWLKTRPAIQIVLEATGGYEQAVLDFLHKAGHPVIRANALRARRLAQGLGKAAKTDRLDALVLAQMAALVELPSYQPLEPWQRKMREFVRARRQTMQALTVARQQQEMVTDRELRRLMQGNIIRLQSMVERLGKQIAEQVAQQPQLAVLKSMKGVGPALQAVLASYLPELGQISGKAIASLVGVAPISHDSGTMRGRRSIHGGRAEIRQVLYMAAMSAMRHEPRLRDFYRSLRARGKEGKVAIVAVMRKMLVILNARVRDASSGPIPA

SEQ ID NO: 216959 - protein, 356 aa, unidentified
MENLSKDFIGKAFVGIDVHKNSWKVCVLGDVGFKKEFSCDPETKVLVKSLENLLPKFSFDCAYEAGFSGFWLHDELYEYEGFNCIVVNAADIPTSDKERAQKEDRRDARKIASQLKAGALRGIYVPSKEDVSLREVQRLRYTMTKDLVRYQARIKSFLMRHGIEVPKAQFKDAKAHWSKKFMKWLSALKLGTAGLSFTLNQLIETTTRFRAQKAAVLLELRKQIQASSKKNAFEKLMSIPGIGVIGASTILTEVVDINRFRTYEKFHSFIGLVPSTNSSDVVEKIRGITHRSNRRLRNVLIEASWIAIRYNTDLFVKYNELKQRMNSNKAIIRVAKKLSSQVRYVLLELERQATTA

SEQ ID NO: 216960 - protein, 417 aa, unidentified
MSDACDVLYVGVDWADTAHRVIVLNTARQVLHDWVVPHTGEGLTTFATRLVALTDGDADRVAVALEMPRGPLVDALLERGCHVFAINPKQSDRFRDRFSPAGAKDDRRDARVLADALVTDRGPFRALTAEDPLVIRLRELSRVEAELQQELRRLTNRLRAQLQRFYVQPLALCPAADAPWLWALLQLAPTPAAAARLREPRLARLLRTYHIRRVTAADVHAHLQGPALPVAPGVTEAASSHVAVLLPQLHLLQQQRRTCAQQLEQLLQQLAKRPDPAEPQREHRDVTLLLSLPGVGRTVAATMLAEASGPLAARDYHALRTQTGVAPVTQASGRRRVVQLRTACNRRLRQVVYHWARVSTQVDPLSRAHYRALRRRGHSHPRALRGVADRLLAILIAMLRTGTRYDASYRRAATLVA

SEQ ID NO: 216961 - protein, 360 aa, unidentified
MRIIGCDLHARQQTLAMLDTVSGEVVNRTLQHEGNEVREFYSELPRPVLVGIEAIGPMQWFLNLLEELGIECQVGDATKIRAAEPRKQKHDRRDAELILKLLVERRFPAIWRPSKEQLDLRALLLHRHHWVRLRTQIQNALQAIALANGLRRGPGLWSYDGQAKIAFLPLPPHASYRRSMLQALYRKMEEEIEQLSAQVAEQAERRSGAQLLMTHPGVGPVTALATDVFLGDPQRFADGKALASYVGLIPREYSSGARQRLGALTKQGSPFLRFLWNEAAAHAVRRDPDLQRFYRRKLVQKGLGKSRVAAARKLGIRLWIMLRDQIDYEQFCRRGQKQSCAACTGMLEVRFGANGHRPVG

SEQ ID NO: 216962 - protein, 362 aa, unidentified
MRIIGCDLHARQQTLAMLDTTTGEVVEVTLKHEGDNVREFYSSLPRPVRVGIEATGSMQWFLNLMEELGIECLVGHPAQIRAAEARKQKHDRRDADLILKLLAENRFPAIWLPSKELHDLRALLRHRHQWVRMRTRIQNALQSIALANGLRRGTALWSQDGQSRIASLPLAPHTAYRRSELQALYEKFEAEIEKLNQRVEEQACKRLGARLLMTHPGVGPITALATDVFLGDPARFADSKALASYVGMIPREYSSGGRQRLGGLSKQGNPLLRFLWGEAGAHAARKDPELQRFYRRKLVQKGLGKASVAVARKLGIRLWIMLRDQIEYNEFCRRGQKQQKSSDACAGMPETPNGANSHRPVD

SEQ ID NO: 216963 - protein, 434 aa, unidentified
MAKVINKNAAGIDIASNLHYVAVSPEKSTTPVRSFKGFTRDLHELANWLVSLSIETVAMESTGSYWYHLYTILLDYGIEVYLVNAYHVKNVPGRKTDVLDAQWLQELHANGYLTACFQPDNLTRELRTYVRLRKQIIRDMAKETQHMQKAMVCMNIKLHDVINDINGETGSKIVNAILAGERNPLVLSQLRHHRIKCTEETLIKSLEGNWREEQLFCLQMARDRYRELEQHLRKVDEASERVVKLLASPEVEEVKVPYRPSKNKQPIFNVSQLLYNAYGVDVTEIYGYKQTTALTVFSEIGPNVKEKFTTVKQFLSWLNLVPDNKISGGKVLSSKVRKRKNQAGQAFREAANGLWNAKNPFGDYLRSKKSKSGSGQAIVATAKKIATIFYKMVTEKIAFDPYIIDGNRENYLRSRVNHLSKTIQKLNLELDGYL

SEQ ID NO: 216964 - protein, 433 aa, unidentified
MIKINYMSTLFVGIDVSSKSNVVYAMDFDENKYIDSSFPNNQPGADTLVEMIVSCMRKHPALNTIIVALESTSVYSIHIANFLSSSELLMPYKPYVYCLNPKMTANYRKTYVGMDKTDHLDAFLISDFARVGRTKKCEPWRGSQYLALKRLTRHRLHLAECITREKTYMVSNLYLKFSELQLLDDDNQPFSNIYGATSSAVLTEFLSLQEIIDSPEEELLQFLAEKSKNRIADISKTSGLLKKAARDSYRLDKCMYEPLNVSLASSFNCIQTYQKEIRLIDQSIEKCINGMNPNAFIILKSIPGIGPVWAAGILSEIGDITAFHSSDALAKYAGLTWLKNDSGDFVSEDNHVSKAGNTYLRYYLGEAANSVRRYVPEYAEFYSRKYAEVTKHQHKRALALTSRKFVRLVFGLLVKNQLYTGEKLDNERNTEPN

SEQ ID NO: 216965 - protein, 419 aa, unidentified
MVRRMSFRAEGERSESGARNLCFGHGVMPCPAAGGTRLRLMVPRPALRAGCPCMFTSSSRPARQTCCSLEHELVSQLLVSASARFTLSKQPERLSIMNMNLQGGAVQRQSHPNAGIDVSKEHLDVCWETNELRLGNDGAGWSELAAKLKAADVDLVVVEATGGYERGLVLALQQTGLTVARVNPRQTRDFAKSMGVLAKTDALDALARHPQRQRFITPLVDERRQLLASLMTRRRQVVEMRAAEQQRLEHADAMATRSINAVIRALDKQIRQIDKDVDGHMERHFKQQRELLDSVKGVGAVTTLTLLSALPELGRLGRKPIAKLAGLAPLADDSGKRRGVRRIWGGRAQVRSALYMATLSAMRYNPTIAAHYRRLLAAGKPKKVAMVACMRKLLVILNAMLRDNAQWDPARHLVTATSA

SEQ ID NO: 216966 - protein, 383 aa, unidentified
MKAVCGLDVHKDSIFLCILHSDGELFEQVFGVLTFQLEEMRKLLQKHHVFEVCMESTSIYWIPIWRVLSPHFTLRLVNPYFIKQLPGHKSDVKDAQWIAECTLKELVRGSFVPPEIIQQLRQYDRRIFDLNAEIVRKVSKVDGVLQRCNIRLSNYVSNIECKSYRDVVRRLSEGVTNPNELMKLVHGRIVNRHGTETILASLTGVVSQAEIDVLRQLHEEIDIAESHRNECQQRMLEICEKHFPEELERLQKIPGIKERAATSLIAEIGTDMSKFETANHLASWSGLRPRNDESNKKIKSRKITHGNVYLRNTIIQCAWAASRQKDCFFSRFSYHQTIVRRKNKMKVIVAVARKLLVAVWHVLHDKTDYVDFKPDREESANNG

SEQ ID NO: 216967 - protein, 327 aa, unidentified
MTASVASHNQIFIGIDVGGLSFEAAWHRGGSTQYQNRPDAIAAFVARLSVEKQIIRIAVEPTGGHEKALVKALRGAGLPVEMVHTSRFAAYRKLIGAKAKSDTSDARLLAAYAAAPEEVRGRKAGHVVLPQDDVREQLAELAARRDQLKHMIHAETCRLSTVRSPSIRDEITAHLQAMRQADRKTHDAMMQLVRQRDELRNAKRLLQTIKGIGDKTALTSIAAVPELGLISNKAAAALVGVAPFARQSGTMKAPARIHGGRALVRNAFYMAAVTASRHNPVLAPFYARLIAAGKPVKVALVAVMRRLVVYANAVLRSGQPWKGAEIG

SEQ ID NO: 216968 - protein, 410 aa, unidentified
MERMLERCAGLDVHKKTVTACVRVPGTHGDRTQHVRTFDTTTAGLLVLRDWLAAHAVTHVAMESTGVYWRPVYYVLEDAFACILANAAQIAQVPGRKTDVKDGVWIAQLLEHGLIRASFVPPAPIRELRDLTRYRKVLIHERTRHAHRLHKVLEDAGIKLTSVASRLLGVSGRAMLDALVAGTTDPEVLADLARGRLRQKLPALRQALVGRFRSHHAFLVSQLLAHVDYLDEAIQTVGGHIDEVMVPFTDELARLDTIRGINKRTAEVIIAEIGVDMTVFPTAKHLASWAGLCPGNNESAGKHRSGKTRPANRWLRAALIEAALAASTRAAPGAFAARYRRIMPHRGHKKAIVAVAHAMLVTIYHQLTRQTTYHDPGTDYYDRRHAERLRRRALQTLERQGYRVTLEPAA

SEQ ID NO: 216969 - protein, 419 aa, unidentified
MFKIFYRNCCGLDVHKTWIYACIGISDAAGKTEYHEARFSSFSKGLRTLAEWLQKYDCKLVCMESTGKYWIPVFNILEKTCDVTLAHPKYTKPQKGNKTDRKDAKWICDLFMCGMIKPSFIPPAAIRQLRDLVRYRSKLTNMLTSEKNRAHNCLTVSNLKLDDVFSDVLGKSSRSITEYILDHPGETFDVTPFVDGRCKTPIEEIQAAVDGSVSKEQAAKLRQCLEHIDELTAHKQKIEEEILQIAAPFSDYLDLLRTVPGCSSDKMTAVTILSEIGCDMSVFPSSKNLTSWAGCCPRNDQSAKHVKSTRISRAGAWIKPLLVQISNALIRSKKHPEFSERYRRIKARRGHKKAIIAICRMLLTAIWNILSKLEPYTPDGFINDRPSDKKKTMSTAEAIKLLKSRGYIITDLPVDPVTA

SEQ ID NO: 216970 - protein, 316 aa, unidentified
MAKPVEKITLGIDVAKDQLVICQWGCEQLLTLVNQPAAIQAWLETLCGPVRLAIEPTSHYHLAVVEAALACGHQVYLVNPRQLVHYRYAVDVRNKTDAVDAWLLARYLEHEAAQLRPFRPQDRRAQRLWALLTRRATVVQSRQQLQQSFAEVRLSIQALLSQFQQLLQRLDQQIQHLLRELGWWPDYLRCQSIPGIGPANAAALVAAYHRGAFAGSDAFIAYLGLDIRLRESGRFKGKSKLTKRGEPELRRLLYCGSNAACNHPRFAAYRQRQLDKGLSKIAARVALARKLARIAFTLMNQQETFATEQKTHCMAP

SEQ ID NO: 216971 - protein, 351 aa, unidentified
MSQKTNAVAVRTIGIDTGKNTFHLIGLDEQGTIVLREKLARGRIARRLANASPCLIGIEAGMATHYVARELLALGHDVRQVPPAYAKPFRQGHKNDFRDAYAIAEAVLRPSTRCVPVKTDDQLDLQALHRVRSRLVGQRTAVINQIRSFLLERGIAVRQGPRFLRQRLPEILAKRIDVLSPRMIAIIEDLSGDWRRLDERVERVTEEIEQLAHGSESCRQLMTVPGIGPLIASAMVAAIANGAAFAKGRDFAAWLGLVPKQRSTGDRTILGHISKRGNRYLRTLFIQGARVILLRPANWARHSFGPWLTAAAKRLHHNVLATALANKLARIAWTILAQRRNYETHVVTEAA

SEQ ID NO: 216972 - protein, 349 aa, unidentified
MGEVITIGVDIAKLVFQIHGVDAEGTVVIRRRVGRARVLEFFADLPPCRVGLEACATAHQWARELAKLGHDTRLMPPTYVKAYVKRGKNDAADAAAICEAVTRPSMRFVPIKSVEQQSMLMLHRARDLLIRQRTQLTNALRAHLAELGLVAAKGREGLHQLTAVVTECGNERLPSDARFACQAIVTQLHSVQIEISGLDKRISQTHRANADSKRLATIPGFGVILSTAVAATMADPKAFRTGRDFAAWIGLVPRQNSTGGKERLGSISKQGDRYLRRLLVIGATSVINSARARPYKYPWVIELLGRRPTKVVAVALANKMARIAWAVLAKGERYRAPTRSSNAVVPAAA

SEQ ID NO: 216973 - protein, 368 aa, unidentified
MSNYVTAIGLDVHARSIKACALNPMTGEVSRASFGYDPASVAEWALGFESPKAVYESGVTGFHLCRALRALGLDCAVGAVSKMQRPAADRGRKTDRRDAEFLARLLACRNVVEVRVPDERTEAARDLSRALADARDDLQRAKQRMSKFLLRHGHVFDELTPTGRRRGNWTRAYWRWADSIEFGEPDDDAAYEHYRDCVRRCEEARDALARKVAESAGRPEWKPVVDALRCVKGIDVATAFLLACEMGDPARFPNAPSFASWCGLAPSEHSSGESASRGGITRAGNAHVRSALVESAWHVPMSSRDPKPLAPGQEVAPAVRRHTTKCNRRLIERREAMAAAGKRPCVANCATAREMACWVWAIARMATA

SEQ ID NO: 216974 - protein, 331 aa, unidentified
MVYAAIDIHKHVFHAAALDVESGEMHEQRFAASREALRRWASDVNPVVVAIEATCGWRWVVRELQAAGLEVQLADPGQAVALKGKRRRAKTDRLDARWLVHLLARQMLPRSWLPPEEIQRLRDLTRTRMALNQDRTRWAQRLHAFLVHEGWSCPRARLLTREGRRWVDGLKLDAHARAQVDRLLRLIAGPEEELIELDSELRQLAGRDNRLRALQGIYGVGPIIACHLLAEIGDARRFRRARQLVRVAGLDPVVLESGESKRRGRLAKAGSPQLRWALVEAAWHARRQGSPDHQLYQAVRQRAGAQPATLTAARKIARRSYHVLANLEPVR

SEQ ID NO: 216975 - protein, 475 aa, unidentified
MPAKTVWLVMKANKVSALRGKRGLHRVKGAEPPIEAVSQLTDTNPNNHEQLSNIERKTDTMKTYIPRNCKPVEPQKSIRLPRPKPAAPVTTAALLGRPDAIAKGLVLFIGLDVHNDSIAVSLAPSDSAEVRRYGIIGGEHDDVLKLAKKLAEAHPGILLKFCYEAGPRGFALCRCLRSHGLDCILVCPSKVPRKPGERVKTDRRDADGLARLYRAGELTGIDVPEPEDEAMRDLIRARFQVGKQQHRARQQLKMYLLRHNLRYGGQSSWTPAHLRYLAKIKMPFPVQQIVFQEMLEVISEATARLERYDQEIQRAVPGWRWAPAVRALMSLRGMALLHAATLVAELGDFNRFAHPGQLMGYLGLVPSEHTTGKDRQQGGITKMGNAPARRALVEAAWQYRAPARLSPHLKKRQEGLPKTITDIAWEAQRRLHHRYTHLTRVGKKKSQVAVTAVARELTGFVWAIARQVKPVAATP

SEQ ID NO: 216976 - protein, 400 aa, unidentified
MTAVWAGIDSGKRAHHCVVIDATGRVLLLRRVGNDESALLELIAAVLAVAGGDPAVWATDLNAGGAALLIALLAERGQQLLYIPGRIVHHAAATYRGDGKTDAKDARIIADQARMRTDLQPVRGADQISTDLRLLTARRTDLVYDRVRTINRLRATLLEFFPALEAAFDYSKKAPLILLSGYQTPEAIRRIGATRLAAWLKKRGCRGSTSVAAKALTAANAQHTVLRTKTMGAQLVAQLAQQIAVIDAAIAQLDEQICKRFDQHPNAPILLSMPGFGAVLAATFIANTGGDLRAFETVDRLASVAGLAPAPRDSGRISGNHHRPRRFNRRLLRTCYLAALSSLKNSPASRAFYDRKRAEGKNHKQALIALARRRITTLWAMLRDRTTYQEPPRPALAPAA

SEQ ID NO: 216977 - protein, 341 aa, unidentified
MRFVGADLHKKSITFCVVEVVDRKTRVVHRQRMLCKDVAKIERFFETVVPFEVTVEATIGYDWFAALAERLAARVVLAHPGKLRIIAESTRKTDKIDARVLADFLAYDMIPEAWRPTPRVRSHRSLVRRRQKLQSRITSIKNTIRGILTRYNGDRRDAFTKLGWQAVQKLELLDEERWLLGDLREDLDQALERLQKSDQRLARFAAGATLKEREAREVLATMPGVGPVTIETILAELGDWDRFRCADAVVSFAGLDPRVRESDGHRLNLKLSKAGSPLLRWIMIQLAHRLKRLSPRWRCSFERLSKRIGKKKATCAIARRLLLVIYAMLRDGQAYRMSAAA

SEQ ID NO: 216978 - protein, 364 aa, unidentified
MWSGSKETVIEQGSPRPSKGKPEQLCGLKDRILLERANRIISFREEVKMAETTVRSFVGIDVSKKWLDVAVIPSGETWRTENTIEQIGVLVERLKETGVARIVVEATGGFEVRLVAELYAAGLPVARVNPARVREFARSIGQLAKTDKLDSIVLARFAEAVQPPLTRLPSEAEQALSALLARRKQVLDMLTAEQNRLGTAPAGIRSSLQEHVQWLKDQCRKLDREIDQFIQDHPDFKKKDEILQSTPGVGKITASMLMANLPELGECDRKQIAALVGTAPFNRDSGFKKGRRSVQGGRSNIREVLYMAALSATRYNSAIKTFYQRLLAAGKKKKVALVACMRKLLTILNSMIAHNSFWKPSLST

SEQ ID NO: 216979 - protein, 352 aa, unidentified
MQHFIGCDVHTRNQVVAWIDEQTGEIKKRRLEHEGQEVKEFYAQFPRGTVVGIEATFPVHWFERLMGEVGHELWVGDAARIRASEVRYQKTDPRDAEHLLDLLRTGRFPRIWVPSLEERDLRQLLVHRMKQVRTRTQVKNQLHALAISQGVCRKGKLFSVKGRAELERLTLLPWAARRRKELLESLDRLDEQVRELDRAVEEAGRERQEVALLRTHPGVGMVVGLAFALTVGPIERFSNSRKLVSYWGLNPRENSSGGRQRLGSISKQGNSMMRWLLVEAAQTAARLDPQLRRTYQRLKKLKSSGLAKVAVARRLAVRLFWMLRTRNNYAQLVHMSGSPSSAVVPPQGGPKL

SEQ ID NO: 216980 - protein, 427 aa, unidentified
MPYKVAGIDVHKRMLHVVVSDVQVDGEYDFTRRVFGSLPEALRSLAAWLIEQQVEEVVMESTAQYWKPVWGTLERYWKPICQTREGALATSGTLHLALALSNRGRRGRKKDFRDAERLVKRLVAHELTLSFVPDVEQRLWRTIVRTKYQLTRNRVQLQNRLEALLEEAHIKLSSLVSDLLGASARRMLEAIAGGEINRETLAALADRGLRATQEQLQDALGVCQELNPVYRRLIKMVLDEVASIDKRIDQLNQEMASLLRPHEDQVKRLAEVPGLGVDSAQQIIAEVGATAATFRSEKHLSSWVGACPGDEESAEVNHSRRSPQGNRHMRRILNQAANAAAKHKGSIFQVLYGRYVPRLGHNQTIGIIAHKLCRLVWKILHRGIRYEERGPEVSKASKQKRTRKMIRQLRRLGYRIEPSPSQSAITA

SEQ ID NO: 216981 - protein, 340 aa, unidentified
MTLYAGIDLHSNNNLLAIQDHDGKRIFQKKLKNDPNKVLAALEPYKEDLDQIAVESTYNWYWLVDLLMDEHFEVKLANPSAIKQYEGLKHTDDKHDAFWLAEMLRLGILPTGFIYPKETRPIRDLLRKRGHFVRLRTSLILSLQNILLRNHGKTMNVEKIKQKTHNNVAEALQEENEDLALSGKASKESIDFLSQKIQEIELHIKKEVKSNISYKFLHTVPGIGPILALTITLETGPIERFPRVGNFTSYCRKAPSKWTSNEKKKNKGNTKNGNKYLSWAFAEAVQKARQYDKSARDYFNKKVSKSNYPIAYASLANKLARASYYIMRDEVSFDHRKLFA

SEQ ID NO: 216982 - protein, 285 aa, unidentified
MLVYTGIDYHKRTSTICFIFPDGKKDVKTVLSENLVKELVNRKNLLVGIEASCGVNHVVDQLKTAGINVKIINPNKFRGIGIGGKKTDIKDAEALAECLKVNFIPEVYHKGIGARRLKSLLRIREQYVQSRVSATNHTRGILREYGITINAGAENFWDEIAGKLEQLDFDILKQKLTDMVFESRRLAAKEKDVEESLKILLAGDPRAVYLQSIPGVGLMTTAALLAIGDDFSRFPNAKSFASYLGLVPSESSSGDKVRRGAITKAGKIWQKIFNSWSEIDIDFLQ

SEQ ID NO: 216983 - protein, 389 aa, unidentified
MSSESTAVTALAAVARSIIYLGLDVHKDSITTAVLPKGAATPTRVERLPNDLPRLKRFLDRLARDGDLRACYEASGAGYVLQRAMREWGYACEVIAPSLIPKRPGVKRKHDKRDATELARLYRAGELTPVRIPSEAEERVRDVVRCRETFQREILKSRHYILKFLARRGLVFREGTNWCAPHLRWLKHLTTEQSPLSPADRLVFREYHALLEYKLQRRDDLDREVARLAELPTLAPAVQRLQCFRGIALQAAMVLVTEIVDWRRFERPTQLAAYLGLVSREDSSGDREWRGSITKAGNSHCRHVLIQAAWSYHHRPAVSMDLKRRQAGQPPSVIAHAWKAQQRLHQRYNHLSYRKQRQIAVVAVARELVGFLWAVMQDCASPAIGESAA

SEQ ID NO: 216984 - protein, 292 aa, unidentified
MAQNDLVVVGIDVAKDKVDVCIRSLSLRQTFPSTPQGDRKLVAWLRKHQVNKAVMEASGGYERAWAKVLREAGIEVRIVDPKRVRSFALSAGRLAKNDAIDAEMIAWFAETFSEAPSQKHDAAHEELQTLVKARLSLIDVRMRLVSQSEHAAPGLVQKAHAHILKSLASEIAKLEAISSANLVAGMPELGQVSDEIAAALIGVAPYDDDSGKRRGERHIKGGRRWVRNAIYMPCVGAATQNNPVLKAYYQRLIAKGKEPKVAIIACMRKLIVILNTMIARRQKWDPSRYALS

SEQ ID NO: 216985 - protein, 455 aa, unidentified
MAGAALRPAYGEYTMTTPPSTSSARYVGLDVHKRTIVVCIMDAAGKVISTERLSTTREAVESFAKHVLEPTDHVALEATTNCWPIAALLKPFVQSVTVSNAMATRAIAKAKVKTDKVDARVLAHLLRCNYLPPVWHPDEQTQRMRQLTGRRAALVQQRTKLRNRIHSVLHMRMIETPSQLFSTKGLEWLKNLLASGELDDDAVFMIESDLRLLESLQQEIDRFEKLLAEEAYACDQVRLLMTLPGVDMLVAMALLAALGDISRFRSPREVASYLGLVPSTRQSANKCYHGPITKCGNVQARWMLIQACQRLGRNPGPLGNFFRRLKKRKNHNIAVVAAARKMAMIAFLMLRNHEPYRYAIPRTTEAKLARLRIRATGKKRKGGPGKGQKGVAKRPGGGRTIKSLDRVYAEEGLPQRKQELPPGERQMLKATGCEQFAESLASDRVVPRKSAKTSC

SEQ ID NO: 216986 - protein, 355 aa, unidentified
MANDEPELLQLVGDVLALADGREVTWAIDMTGGEPALLLSLLIAHGQDVLYLPGRLVNRAADGYRGEGKTDARDAYVIADQARMRRDLQPIRPGDEAAIELKLLTGRRADLVEDRTRTVNRLRGTLLSMFPALERALDVTNVGPLKLLTEYQTPAAIRRVGVTRLTKWLANRRVRNARALAEAAVEAAQRRHTAIPGERTIARLVHTPAEGVMALNEQIAEMDKLIEGRFREHELAEIVESVPGIGTVLGAEFLAAVGGNLNDFASPDALAAFAGVRRRRPRAPRLGKGQRRPASADRLPPQAPTRLLHLGAGEHPLRSELASVLRPEARRGEEACPGRDGPGPPTGQRPVGTDP

SEQ ID NO: 216987 - protein, 392 aa, unidentified
MQYVGIDVASLKHDCTIITDQGEILKDGLTITNDSNGFEDLMDTMRGLGATPETTKIGMEETGIYHERIRTHLMRCGYNVYTINPALIFHSRKAETLRSTKTDKVDALVIARYLMMHKGSLHSYTPSLYHLDALKSSTRIYHAKRETLARTKTELKRLLHSVFPEFKSHYDPLSQWALDLLESYPTPEDIAKMHEKTLIRILRTNGNRMETAKHIRMLAKQSVGQSDSMSRQLIRFAICDLKHFKAQIREIKAVLEEQMKPFSHIMSIPGVGALTGATILAEIGDIERFSHKTKLLAYTGIDPVIYESGKFKAKNTTLSKRGSRYLRSALFMAARAACVNTSIIKDNKFRRKYEAKIREGKHHYTAVFAAAKNLTYTIYGILKSGQPFEYDY

SEQ ID NO: 216988 - protein, 387 aa, unidentified
MTVRTVSNLPAATHGETVRCLFAIELSKQSWIIGFITPLSTRIGRRILSGGDWKGLLKLIDEVRARVSREMGRTVEVMSCYEAGYDGFWLHRQLEEHGVRNYVIDPASLQVDRRMRRVKTDRIDTERLLRSLMAYLRGEPKVWSVVRVPSVAEEDARRLHRERDRLICERVQHVNRIKGLCALQGIYDYNPLRPQAMARLEQLRTAQGGALPARLKSEIKRELHRLKLVVEMIATLDAERDAIVEDVTSTHVNAEKIRALHKLKAIGPEFAAVLVGEIFHRDFNNRRQLASYVGYAPSPFQSGNVAHDQGISKAGNRKGRTTGIELAWLWLRYQPDSDLSVWFRARVGTVKGRIRRIAIVALARKLLVALWRYLETGLVPRGAVFKG

SEQ ID NO: 216989 - protein, 345 aa, unidentified
MQSMYYIGLDVHKKKISYCIKDGSGTVHSEGAVPATRLELDLWMKRLPQPWSAAMEATIFTGWIYDHLKPQAAALKVAHPLMLRAIAAAKKKNDRIDAKKICDCLRCDFLPECYLAPTALRECRRTLRYRNLLVRQMVQMKNKIAVLLMEAGVSYNKEKLHKVGYFRELLADNPDINDGLRSLLRVCRETVARLGKTESALVRALQRGPLLAERVERLMTIPAVGPITALTWALEVEEVQRFTSIKKAISYCGLCGDEKSSANTAQRTPISKQRNKHLQTTLIEAAKMAPRYSPDLAALYDFERQKGHANRATLTVARKLVAYLMAVDRGQRNFLVIKNEARAVA

SEQ ID NO: 216990 - protein, 349 aa, unidentified
MKIIGCDFHPSYQQIAMLDSVSGEIVEKALSHERKEEVRTFYAGLEGSVRVGIEASGQSQWFERMLAELGHEVWIGDAAKIRASCERKQKTDRRDAELLLRLLVEDRFPRIWVPTAVERDARQLLLHRHKLVRLRTQVKNQLQAQALNQGVQRKRKLWSEAGRKQLESLPLLPWASRRRAELLQLLDQLEASISELDRAVAEQASARPAARRLMTHPGVGPVTALAFALTMGPTERFQRGKQVASYLGLIPSEHSSGGHQQRLGHISKQGNPFLRGLLVEAAQSAVRYEPEMRRAYQRLAQRKCRALAKVAMARKLAVRLYWMLRLQVNYAQLIQGSHAGQSGTFCGRS

SEQ ID NO: 216991 - protein, 341 aa, unidentified
MMEKQTGFFFGIDVSKLWFDVSLMVVINYQKQKMITERFDNTVDGLALFKKWLQSHKVKFNNDTLVVIENTGVYHRLLWEFFSKNHITVHIGNAAHIKRSFGIARGKNDKIDSQRLCSYAYKNDDELKAAPALNPVFLTLKDLMTSRTRLKAQLTANKTYLKELKRINDQATQKAMEKAYKMAITGLEKSINEIENQIALLVKSDSSISGNYNLLISVPGIGHVTAVYILCCTNNFAGKISGKQLGCYAGVVPFSERSGTSVKGRNKVHKMANKELKSLLHMCALSSIKYYPEFRNYYDRKENEGKHPNSILNAICNKIVLRAVAVVNNQKKYVENYKKVA

SEQ ID NO: 216992 - protein, 345 aa, unidentified
MPVAEVDTFAGIDVSAHELSVALRRGQGHDKPAMAKFPNHPSGHKALVAYLLRGGGRVRVCLEASGNYSLDLALTLQAHRQVEISVINPRRARRFAESLGERSKTDPVDARVLCEYVARMPWVRWQPPSPVALHLRALTRAIADLGVIHTQQNNRAYAAAASQALPVLVVKEMQRHKKYLEQRMTRLRREAVRLIACDPELDRRFRLMLTTIGIAETSALQILGELAVLPDMLDARQWVAFSGLDPRLFKSGKSVEKRPRISRSGSRHLRRALYMPALVALRRDPYLRVFYQNLLARGKARLQAVVAVMRKLLHALFAMFRSNQPYDGSKLCAVDPAVHAIAACA

SEQ ID NO: 216993 - protein, 321 aa, unidentified
MEQPAFVGIDVAKDTLAICTWGRPEVTEIANTPSAIADWLSTLPGNARIGLESTSTYHRLAAGLCVSAGHTVHLLQPRDMCHYRRTVAPRGKTDSIDAQVLARYVAHEHANLRAWEPPTEEQEQMDIYLNGRAFCSRLRSSVGQVRKTNPTLSKLLEEVEKSMDRAINEFDKAIKRAARKNPGMTDGWTRIQSVDGVGPVVAAAVGNLVLKHDFKSADSLIGFVGLDPRPRESGTYKGRRRLSKRGPSEVRRLLYLAAMAGVREGKAWRPLQEAYSKRGLPRTAALCIIARKILRVIWAIWNKAGATFDASRYAGPLPQAA

SEQ ID NO: 216994 - protein, 316 aa, unidentified
MNQTVYWIGIDVSKAQLDGHIRPTGAAFQVPNTEAGIAALVQRLQQLQPALVVMEATGGLETPAAAACGAAQIPVAIVNPRQVRDFAKATGKLAKTDAIDAQVLAHFANAVQPEVRPLADEESQQLAEVVARRRQLVEMLTAEKNRLGTVRGAMQQEIQAHITWLETRLEALEVRLKQSIEQSPLWLARVNLLQSVPGVGAVLSSTLLVNLPELGTLTHKQISSLVGVAPLNRDSGKKRGQRMIWGGRAQVRAALYMATLASTRHNPIIKIFYERLCEKGKLKKVALTACMHKLLIILNAIVKTGVPWQPNLVEEA

SEQ ID NO: 216995 - protein, 354 aa, unidentified
MIVIAADPHKSTHTAAAVDPLTGELRGSETVSATAAGHGRLLDWGRSLDSQRVWAIEDCRHVSGSLERFLVAGGERVVRVAPKLMAGARRSLRQRGKSDQIDALAVARAAIREGLDSLPAAQLDERALEVKLLLDHREDLVGQRSDDQRRLRWHLHDLWPELSIPAGALDRECWLQKLARRLSRAPRSARVRVSRELVRSIRQRTRRERELEREIVALVSQQAPSLLEIPGCGALSAAKLLAEAAGFDRFASDAQFARLAGVAPIPASSGRTDRHRLDRGGNRQLNCALHRIAVTQGRVDADARAFLAKKAAEGKGRMEALRCLKRHLARRVWKAMRAPQKATAGRAPDTLVLT

SEQ ID NO: 216996 - protein, 396 aa, unidentified
MFNPQIFRLMRAVCGLDVHKDSVFLCILCETGEVIEKVFGVLTHQLREMRRMMQSHGVSEVAMESTAVYWIPVWRVLEPHFHLKLVNPYFIKQLPGRKSDVKDAQWIAECTLKDLVRGSFVPPERIQQLRQYDRRIFDLDAEIVRKLAKLDAVMQRCNIRLSNYVSNTDTKSYKDVVRKLCEGVTDPEELIKEIHSRITNRHGRETILSALTGVVSDAEKDTMRQLRDELDLAERHKQECMDKMLHICKTYYPEELRRLMTIPGIGERAATSLIAEIGVDMTKFQTAAHLASWSGLKPRNDESNKKIKSRRITHGNIFLRKTIIECAWGASRTKDCFFSRFSFHQTQIRKKNKMKVLVAVARKLLIAIWHVLHDETDYKDFSVKNDCETSVRENNG

SEQ ID NO: 216997 - protein, 357 aa, unidentified
MEYGAIDLHKKESQIRILTRSGEVIDQRIVTTRERLTHVFWGRPRMRVLVEASTESEWVAQHLEEIGHEVIVADPNYGPMYGHRSRRIKTDRRDVAALTEACQQGTYRLAHRKSARQHDVQCRLNVRQEVTQARTRAISLARAITRAAGLRIRSGRTETFLTRLAAIELPTSMKTTLSPLRSLIEICDDELVAADEAFATLVAADPMVKRLTTLPGIGPITASAFVAALDTVSRFERAGQVTSYLGLVPQEHSSGEKQRRGRVVRSAQPHLQSLLVQAAWRVSRASDPATENFRAWAQAIARRRGKKVAMVALARRLARTLFAMWRDQRDYQPTRTQKRSPTSVAATIAEASTGAAV

SEQ ID NO: 216998 - protein, 343 aa, unidentified
MAILFVGIDLAKNVFQVHGVDSAGKVVITRQLRRKQVIDFFSKIPACLVGMEACGTAHHWAREVSKLGHIVRLMPPSYVKGYVKRSKNDAADAAAICEAVTRPSMRFVPIKSADQQALLMLHRTRDLLIRQRTQLINALRAHLAEFGLVASTGREGLAQLAAIITDGSNREALPSAMKQALQAIVDQLAALELQIGTLDRAIHAHHRANDMSCRLETVPGIGVIGATAIASTVTDPNDFKSGRDFAAWIGLVPRQHSTGGKERLGGISKQGDRYLRRLLVIGATAVVRHARQHPQKHPWIMRLLAKKPAKLVAVAVANKMARIAWAIMAKGGCYRAPELAAAA

SEQ ID NO: 216999 - protein, 402 aa, unidentified
MNAVGIDVSKGKSMVAIMRPFGEIVSTPFEIKHTTSDINSLVELIKSVEGESRIVMEHTGRYYEVLAHQLSEANLFVSAINPKLIKDFDNDSLRKVKSDKADAVKIARYALDKWQNLKQYSVMDELRNQLKTMNRQFGFYMKHKTAMKNNLIGILDQTYPGVNTYFDSPARSDGSQKWVDFASTYWHVDCVRKMSLNAFIVHYQNWCKRKKYNFSQSKAEEIYGKAKELVPVLPKDDITKLIIKQAVNQLNSASTTVESLRTLMNETASKLPEYPIVMAMKGVGASLGPQLMAEIGDVSRFTHKGAITAFAGVDPGVNESGSYEQKSVPTSKRGSSDLRKTLFQVMDVLIKTHPQDDPVYQFLDKKRAQGKPYYVYMTAGANKFLRIYYGRVKEYLSSLPES

SEQ ID NO: 217000 - protein, 355 aa, unidentified
MNEVTTRKGSWTIGLDLGDRFSQVCVLDAAGEVEARFRVATTRKALERGLARYPGARVVLEVGTHSPWVSHQLEEAGFETIVANPRRLRSITQSDRKDDRADAEQLARLGRVDPRLLSPIRHRGLSVQRERARLAVRDGLVRARVLLVNQARGLAKPLGLRLPKCTTEGFASRMRREAMVESFPGMAALVAMVEQLTQSIRALDREIEAVGLERYPETELLRQVAGVGPLTSLAYVLTLEDPQRFPRSRSVGAYLGLRPRRRQSGEQDPLLRITKAGDPYLRRLLVQSAHYILGPFGPDTDLRRFGLRMIARGGRAGRKKALVAVARKLAVLLHRLWVTGEAYEALRGAAAPAAA

SEQ ID NO: 217001 - protein, 370 aa, unidentified
MSQSRTLFIGMDVHKDSIAVAYVAQDHGAEVTYLGARGTRQCDIDQLVRKMQSKAKHLLFVYEAGPCGYWLYRYLPRKGSDCWVVAPSLIPHKPGDRVNTDRRDARQLARLARSGDLTVVYVPKVEEEAIRDLSRAREDAISDLKDAKFRLKAFLLRQDIRYVGRAHGGPAHLRWLSEVVCPTPAQQIVFQEYVRAVQEHTERLQRLEQELQEQVDAWRLNPVVEALQALRGVQFTVAVTMVAEIGDLTRFDTPRELMQFLGLIPSAYSSGEQRRQGSIPNAGKTHARKAVVEGAWAYRYPAKVSRHLQLRLEKPPKMIQDLSWKAQVRLCTRYRRLVSRGQHATVVTVAMARELVGCMGAIATQVPLTA

SEQ ID NO: 217002 - protein, 391 aa, unidentified
MIYVGIDVSKDKHDCFITNSDGEVLFKSFTITNNREGFETLFQRIRTVSKDLNKVKVGLEATGHYSYNLLGFLLDNGLPTFVINPLHTNLYRKSLSLRKTKTDKVDAHTIASMIMSDVNLKSYSDTSYHNEELKSLTRYRFDKVKERAQLKQSVSRLVTILFPELEKLVPSLHMASIYALLTEFPGASAVASAHLTRLTNLLSESSRGRLGKDTACIFREAARRSIGSRMPAKSLELKHTIKLIQELDAEIDEIENEIKSIMDEINSPILTIPGISYRMGAMIIAEIGDFTRFDSPDKILAYAGMSPSTYQSGQLDNCYAHMEKRGSRYLRYALYNATKYVCYWDESFGAYLAKKRAEGKHYNVALSHATKKLVRTIYAMEKSGQTYQTSH

SEQ ID NO: 217003 - protein, 375 aa, unidentified
MSKIRFLGLDVHADTIAVSVAEPDGEVRPLGIIPNRLESVRKMVAKLGPVNQLKACYEAGPTGYVLYWQLTSLGVACEVVAPSLVPVKAGDRVKTDRRDAAKLARSYRAGDLTPVWVPDAAHEALRDLVRTREDAKQDQLRARHRLNKFLLRHDRRPPEAVKKSWTQKYMTWIKEQVHFDQPALEATLLDYVHEVDHMAERIQRLEKSIDIAIEKAPPEMRAVIAALQALRGVAKITAVSIVAEVGRLSRFEKARQLMGYSGLVSSEFSSGNRIQRGGITKTGNAHLRRVIMEAAWAYQRRPWVGGALLKRQHGVEQEIKDLAWKAQWRLYHRYCKLAARGKNKNQIVTAVGRELLGFIWAIAVRIEGRAAACAA

SEQ ID NO: 217004 - protein, 369 aa, unidentified
MAKPITYVGLDVHKDTIAVALAASGLRGEVREYGKIPNTPAALKALAVKLAPAGRDLRFCYEAGPCGYGIQRQLSGAGHECAVVAPSLIPRKPGQRIKTDRRDAINLAKLHRAGELTPVWVPDQAHEAIRDVVRARQAAVRSLRQARQQLSGFLLRHGRHYHRPAWTQLHRRWLASLKFDQAVHHIVLEDCIAAVEAAMARRDRLEAHIEAVLPEWSLAPVVEALQALRGVRLVAAATLVAELGDITRFTNPRQLMAYLGLVPSEHSSGRTRRQGGITKAGNGAARRMLIEAAWSYRFPARIAREQLLRQERLAKPIRDIAWKAQERLCRRYRKLARTGKQPTVITAAIARELAGFVWAIAKQVQPMAT

SEQ ID NO: 217005 - protein, 430 aa, unidentified
MKSNTQNAKIEAITEKTLVLGIDVGSETHYARAFDYRGIEYSKKPFKFSNTEAGFVTFKEWILDLKERHEKDKVVPGMEPTGHYWFNLGKFLQDNEMKPVLVNPHHVKKSKELDDNNPTKNDRKDPKVIAGLVREGRYMIPYLPDGVYADLRTASNIRFQLQAELTRIQNRISRWFNIYFPEYKTVYGKPDAKSGMLILKQAPLPEDILTLGIDGVNQIWRDAKMRAVGKARAKTLIEAAEHSVGSKEGAVSARMEIRMLLEDYESRNIRLQEVMTLIEELVNQIPMAEKLLEIKGVGIKTVSGFLAEVGDISRFNNPKELQKLAGLALVENSSGKHKGKTTISRRGRKRLRYLLFEVAMSLVAKNPEFRELHTYYTTRRLNPLKKMQSLMAVAAKLIRVFYAILTKGVDYDPKKMVNDIKRPAVYLQTA

SEQ ID NO: 217006 - protein, 358 aa, unidentified
MRLYAGCDLHAKSNYWGIVDGEGKRVFKKKVGNDGERILGMLEGFRGDLEGVVVESTFNWYWLVDLLMDEGYRVYLANPTKMQKYSGLKYGDDEDDAFWLAEMLRLGILPVGYIYPKESRPMRDLLRKRAHLVRMRTSALLSWQNILSRNVGGRGRRAEEKGRKLREWRMGLLESEDLVLAGRVSEEVVEVLGQKIREVEGVILERVMGWESYGGLLSLPGVGKVLGLTILLETGPVGRFADVGHYVSYCRKVPSQWLSDGKRKGQGNRRNGNRYLAWAFSEAAELARRFHAEPRAYYQRKMAQTNAAVAHSALAHKLARVAYYILRDGVRYDPQKLFGGSWAGAESLGGGLAESHAT

SEQ ID NO: 217007 - protein, 418 aa, unidentified
MSVLNSLFVGIDVSKTSNQVYAMNFDQKKLLSFSAPNDSEGASKIEAKLLECLNKNNLEKVVIVLESTGMYSFHIATYLSSSEYLANYSVVVYCINPKTSQNYRKSFSEMDKTDPKDSYILADMARVSKVNSLSPVKGPQKLALQRLTRHRKHISEQIVREKLYVLNNIFLKFSAFDRKYDGFSPFSDPFTATAQAILLEYKSPEEIINTSIEDLTSFVATISKNRFADSKKVAETLIKCARMSFRLDKSAYEPINTAIASSLCILRCLQNELKHIDKEIENLIKGFNADEYKCLISIPGIGPTFAAGILSEIGSIKQFDNEEALAKFAGLTWRRHQSSENEHEDTPMTKTGNAYLRYYLIEAASMAILHNPVYKEYYQKKYNEVKTHQHTRALALTARKLVRLIYGLMSKNQLYNAN

SEQ ID NO: 217008 - protein, 394 aa, unidentified
MCQQYKTEASMLKHNILFIGLDTHKTFTEVAYIEDQRGAKSTHIGKILSNKAAFKKLARQLQSKYPDATLHFVYEAGPCGYWIYRLLTSLHHCCYVIAPSLIPKKPGERIKTDKRDALKLAKLLKSEELTPIYVPEPEDEAVRDLSRSRETAMKDLKDAKYQLKALLLRNNINSKVKDNWSLQHLRWLAELVLPHPCQQIVLQEAVSTITERLKRLKRLDNELTHQVKNWRFYPVVKAIQALRGVRLLVATGVIAELGDLTRFDHPRKLMSYLGLVPSEHSSGGKRRLGAITKCGNSRARRLLVEGAHSYKHNANISKEMQLRQEGLSKEVIDMAWQAQLRLCRRYNRLMHKGKHRNVVVTAIAREMIAYIWAISREVVLPKVDVKLRLARMPA

SEQ ID NO: 217009 - protein, 463 aa, unidentified
MAAGKSLWGNRKERKEWARRLQSEDPGLEVVHPHAAGIDVGNSAHYAAVRPDRDMEPVRRFECFTADLYRLADWLRSCGVRTVAMQSTGVYWIPLYEILEERGFEVYLVNARHTKNLPGRKSDVQESQWLLKLHTYGLLSNSFQPSAEIRMLRTYWRQRATHVEGAATCIQRMQKALTQMNMQLANVISDISGLTGQAIIRFIIAGERDPHKLAALCHPRIHASQEEVAKSLEGNWRPELLFILQQEVEMYDTYQRRVAECDERLQKHLASFADTLSVRATMDKPKRKKAAKNAPHFDLSSELQRITGVDLTRIDGINVMVSQTILSEVGLDMSRWKTEGHFASWLGLCPDNRISGDRVLGKGTRRVVNRAATALRQAANTLIRSRSYLGAQYRRLRTKLGAPKAITAMAHRLARLVYRMLKYGQAYVDKGTEYYEERLRQQQIQLLRKRAAKLGLHVMEPQA

SEQ ID NO: 217010 - protein, 396 aa, unidentified
MTTVGIDIGGRRHAVARCRTGQTRADREILRVSQDRAGFSALDAWLGRQPDPVTLVTMESSGHYWMPLASHLARRGIPVALVNPLAARYFAKSRLGRTKSDPADARSLAEMAMRDAPVVRDPFAGVELRQAARFAMTLVTEQARVCQRLHRLVELGFPELLEVFDDPTCLTAREVLRLAPTAEAAWRRRTGTLADANKGPGHRRLGDTKAERLRHLAADSIAVPELATEVAFEVDLLLDQFDLLERQIEAAEAHVATLLDGELARRLQTIPGVGPATCAVLIAEIGDIGRFESFDQLLAYAGVHPAERSSGRKGANPETAWRMSKAGNAHLRAAVYRIAVVGTVHNPVIAAHYARKREAGKSKMNAIGHCMRKALGIVWGVWRNGADFDPAWGSGT

SEQ ID NO: 217011 - protein, 415 aa, unidentified
MKNVCGLDVHKDSVFMCILKAHGEKIEEKFGVVTPESDRLRDMLVAHSVGEVAMESASIYWLPIRRVLSCYFEVKLVNPCFIKQLPGRKTDIQDAHWIATVLQKELIKGSFIPEPLIQELRQYERRIFYLNLNLLRTEQSIDLLLQRYNIRLSNYVSDIGGQAMKKVIDAIILGETTPEALLSLVHKRTRNKHGYSTILSSLTGIVSKSVRILLKFSREESQLYERQIEECYKEMAAICNAHFSLGMGVIKSIPGIKEQSAMRIIAAIGTDMKAFLTASAIVGWAVLKPRNEESAGRIKRRKTLHGNKYLRGLLVQCAWATCRTKESRLYYKFQTLSKRMNDNKSLLANARKLLVIIWNILVKKQPYTTTSWDKWGGYKRMQSRPLYLWWENPVFLTSAIFIFKNNQYCLSISFD

SEQ ID NO: 217012 - protein, 451 aa, unidentified
MSKRSNKPTGLPVIHDRAAGIDIGSRFHVVGVPPEFCDEPVQTFQAFTGDIERMADWLVSLGIQTVAMESTGVYWVSVFEVLQGRGIHVIVANAREARSVPGRKSDVNDAQWLQRLHACGLLRASFRPERDIAALRAYLRLRERHVDYAAAHIQHMQKALTLMNLQLHHVVSDVTGVTGMKILRAIVGGQRDPAILAAMRDVRCKATNETVRAALVGNYQPEHVFELTQALALYDFYQERLGECDAEIERALLELNADKQDPTEPMPKPRHRTVQPNAVGFDTRPLLYQLTGVDLTQIHGIGPYLALRMVAECGTDLSKWPTAKHFTSWLTLAPGCKISGGKVLSAHTRKTTNRVSALLRLAAVTVGRTNTALGAFYRRLATRVGKAKAVTATARKIAVLFYNAMRFGMTYQDAGADRYEQRYKERVIKQLHRRAAEFGFTLQEAEPQRVS

SEQ ID NO: 217013 - protein, 354 aa, unidentified
MKKIFIGIDFSKEKFDATLIQAEGLKECAPSVHEVFYNKTSGYRRLVKWVKAHAEGFAADTWLFCGENTGGYSIGLSNYLYASGYDMWLECAYKIKHSAGIQRVKNDKADSRAIAEYAMRNYDKMILHKPQSGSLTCLREIFLYRHSLVRQKVALQVRRDEKRLTQEKSDARAFMSFTSKHLITEVNKAIAKCDQKIKEIIASDDELREIFDIITSMPGIGVQNATCLMVYTDNFQRFDLNSRKIACYYGIAPFGRQSGTSVNSRPQVSPFANRMIKSLLSQAALAAIKFDINVHSYYQRLIERGKHPLLVHNNIKNKMLHILVAMVRDRVKYNPDNVYRKSNEVSLAPQVLNI

SEQ ID NO: 217014 - protein, 413 aa, unidentified
MKQISNDFVAHIGLDWADQKHDVCLKVPDMDKLEYDIIQHTPEAIDEWALMLQKRFNNKAIAICLELKAGPVVYALLKYEFIVLFPIPPNALAKYREAFTQSGAKDDPSDAYLQMDYLVKHPSALKPLIPDNEETRILQRLVEDRRVLVSDKVRITNRITAALKSYYPQVLQWFNDIDTQMFCEFMQKWSTLEKAKYARKSTLTKFFKSHRCVRSAVIEKRLKAIQQAMPLTEDNGVIVPFERLACVLSTQLSHVMHAIHDYDLEIAKRFRSHTEHDIFEALPGAGPVFGPRLLVAFGTNRDRFESSDEVSRLSGVSPVLKRSGKKSWVHWRYSCPKFLRQTFVEWTNQSIRYSFWAREFYDEKRASGKSHQATIRSLAFKWIRIIYSCWKNKTPYDESVYLFALKKRKVVTQ

SEQ ID NO: 217015 - protein, 343 aa, unidentified
MEYYVGLDVSLKQTSICVVDQSGSVVREGVVDSDPEAISVYVRSKAPGAVRIGLETGPTSTWLWTELKRLGLPVICIDARHAKAVLKMQINKSDRNDAIGIARIIQTGWFKEVHVKDIDSHTVRALLASRALLVKIKRDLENHVRGLLKNLGLVIGRAKFNVFAVRAEELIEGRPELIAAIRPLLEARTAVEQQVSELDRKVMKLARHDAQVRRFMTVPGVGPITALAFKATIDDPARFARSRSVGAYVGLTCRRHASGEVDWSGRISKCGDAMLRSYLFEAAGVLLTRVPKWSAVKAWGVKLVKRNGLRKAKVAVARKLAVILHRMWIDGTEFNWSKKEIAA

SEQ ID NO: 217016 - protein, 343 aa, unidentified
MKLHVLGIDLGKTVFHLVGLDSTGKVVIRKRCSRRQLLAFTANLQVQLIGMESCSGAHFLGRALRDQGHEVRLMPAQYVKPYVQTNKSDYIDAEAIAEAVQRPRMRFVPIKSEEQLDLQALHRVRERWVMRRTAVVNQIRSLLLERGLTLPKGRRYVEEALPRILEDAELPLSGSFRLLLAQLKLELEQLSARIDQLDMAILERAKEDEACQRLTTIPGVGPVTATAVIAAVGNGSAFGRGRDLAAWIGMVPGEHSSGGKQTLLGISKRGNSYLRRLFVQGARSVLQQRHRQAPGLSSWLAQLLARKHQNVVIVALANKLVRMAWAVLCKGERYRAPVLAVST

SEQ ID NO: 217017 - protein, 331 aa, unidentified
MENKWIIGIDVSKGSLDVYIQSVQYYFVVSNDTHGFTKLLETCCIQLKCRVRELYFCFENTGRYSRLLAVFLTESGILFTMAPAMDIKKSMGMKRGKSDRIDSKAIALYAWQKRDEIRPTVLNSGMVAQLRQLLTLRDKLVRHRTAYKNSIKDLRDTFFEGETSFLNESHHRMIEYLNHEILLVEKEIETIIESSEQWLINYKLIQSVKGIGSVLGKYLIIYTENFTRIDNPKSFACYAGIAPFEYSSGTSIKGRTRVHPFANKLLKSLLNTAAMGAIRINGEYKAYYQRRTQEGKNKMSTLNIIRNKLVIRVFAVVKRKTPYVDLTKFAA

SEQ ID NO: 217018 - protein, 443 aa, unidentified
MARPGMILISEVADAPDIMGISKPAGLKFHRRGGENVNPLFVGIDVSSKNNVTYLMKPDGSKHSSFSVQNNLGGAKLMSEKIVLAMETMGLNDVVIGLEATSIYGDSLVYALREDRRLGRYQRKLHVLNPKQVRKFKESYPDLPKNDWVDAFVIADHLRFGRIGKEVYMDDYRYKSLQTLTRARFDVVQNLTREKQHFANYLFLKCCGMAQDKDIANSSATTIALMERFETVDELAYADLDELTKFIDETGRNFADPAAKAKAIQTAARNSYRLPITVNNSVNQAMAVSIATMRALGKQIKVLDKAIEQQFEIIPNTLTSIPGIGKVYSAGIIAEIGDIHRFSSQASVAKFAGLVWTQHQSGDFEAQHSKLIKSGNRYLRYYLLEAANSVRRCDSEFRRYYDLKFKEVNQFQHKRALALTARKLVRLVYRLLMDNRLYIPPEG

SEQ ID NO: 217019 - protein, 339 aa, unidentified
MKLKRIGVDLAKRVFQLHWMEIETGEICRLQIKRNQLVEFFANRKPCVIAMEACGSAHFWGRKFKSLGHEVRLIAAQFVRPFVKSNKTDIADAQAIWETAQRPGMKFVALKSEEQQSVLALHRMREQLVKMRTMQVNQLRGLLYEFGISLPQGRKKGMSRVEEEVALLEGRLSPMVIELIRQQIQRIKTFDQDIAGIENKLLLWKKEDKASQKLMDIPGVGILTATAAVATIGDAKIFKSGRELAAFLGLVPRQSGTGGRVKLLGISKRGDVYLRTLLIHCARSSIQHKRYPWPWIDKMLLRRPYNVVVSALANKMARTIWALLAHNRTYDKEYASEVA

SEQ ID NO: 217020 - protein, 421 aa, unidentified
MKSASNVEISTALPEDPPGGVTAGLDWARDDHAVSVIDDRGRERARCTLTHTAAGLRELVRFLNGHGAVEVAIERPDGPVVETLLSAGFTVVVISPNQVKNLRGRYGSAGNKDDRFDAYVLADTLRTDRARLRPLIPDTDATVALRRACRARKDLVNHRVAVANQLRAHLRNVLPAAVGLFSELDSAISLAFLTRFDTQDKIDWLTPTRLGDWLSKQGYSGKVAPTVLHQRILNAAPGATGVHGANQAHITASYVALLHTLAAQIKALSAQIDTQLDAHADAHVFTSLPRAGRVRAARLLAEIGDCRARFPTPESLTCLAGAAPSTRQSGKSRTVGFRWACDKQLRDAVTDFAADTRHTNPWAADLYNRARARGHDHPHAVRILARAWLHIIWHCWQDHLAYDPAKHRALQRLTTTQTEAA

SEQ ID NO: 217021 - protein, 352 aa, unidentified
MSKITITGIDLAKNVFHLHAVDSTGRQVKAIKLSRLKLTEYLHRSEPITVAMEACASAHHWGRLCQLLGHEVRLISPQFVKPFVKSNKNDRNDARAICEAAQRPDMHFVPVKTVEQQAVLSLHRVREMLIGQRTATINQLRGLLTEFGLTAPIGRRALHNTIPALLEDLMKISPTFLVSCIKQQWEHLGELDQRIDNVTTQIEMHARQSDVTRRLQTVPGIGPITASALEAYVGNATQFRAGRQLAAWLGLVPRQHSTGGKPMLLGTSKRGDSYLRRLLVHGARAVVASVRSSPNVQKQDKTIMGWLARKHMNVAVVAMANRNARIAWAVITQERNFDRNFRDQLANQLAAT

SEQ ID NO: 217022 - protein, 349 aa, unidentified
MVVVGADVHKQTHTFVAVDEVGRELGHKTFPATTPGHRDAVCWARERFGHELRWAIEDCRHLSARLERDLLGAGQKVVRVPPKMMAEQRRVARTRGKSDPIDALAVARSAQREPDLPVASHDEKSRELKLLVDRREVLVKTRTGAINRLLWHVHELDPSMAPPKASLDRQVRQRTLAGQLATLSGIVAEIARDELADVIELTGRINELERRITPLTEKAAPALLGMPGVGVLTAAKLVGEAAGISRFKSEAAFARHAGIAPIPVWSGNTAGRVRLTRSGNRQLNAAIHRIAVTQIRMDGLGKTYYEKKKAEGMSTPEALRCLKRRLARIVFNHLTTDQPASAAPIPAAA

SEQ ID NO: 217023 - protein, 434 aa, unidentified
MEIIHNHSAGIDIGSRNIYISPGYSEVKVFGTFTCDFKLAASYLLEKGVQTIAMEATGYYWAILYDILTENGFDVWLVDGRQTRQVPGRKTDVKDCQWIQQLHSYGLLNRCFVVQGDLKNVKGYQRLREDHLRSASMHINHMQKAMIEMNIRLPEVLAQVQGASGMAIIQAILGGERDPHKLLSLCHGSVLKNKSAEILAALEGFYTDHGLFALRQAYQAYQFYQKQIGECDTALNDLLCKINQNKDHFEPGPCKPIRHHKPQIDELGNHMLDLFAGRDATVLPGITDYSWLQIYSETETDLERWPSEKHFTSWLGLSPGQNDSGNSKKRAKKKGRPNAGQIFRLLAQTLLQSKKISFGAFGRRLRGRKGPMIALKALARKIAVQYWRLMVKGQEFVDQGIANYEMIMLKQKEKYVKKLAMELNLEIVDFNNRY

SEQ ID NO: 217024 - protein, 377 aa, unidentified
MLVARSGVGYFLDAESKDVSAPFKTKIMFKERNSPMAYYAGLDVGLKSTFICVVDEKGKVMLEETVASAPDIIARALRKRKLCYKCVGLETGQLSIWLTKGLMAEGLPVVCMDARQVAAGLSARVNKTDKNDARGIAHLLRCGLYREVHIKSDQSCEQKVLLGTRRKLVEQSCAMEGSIRGLLKIYGIRLGSARRSTFIPSIHAAIKNLSVSVQTAVGTLAEALAHLRGALEKLDASVREAAESDPQCKLLMTVPGVGPVVAMHYVAAIDGSGRFHNARSVGAYLGLTPRQYASGETQRQGSISRCGPIHCRRMLYEAANNILNICKRPSALRTWGLKLARKKGHRKASVAVARKLAIIMQCMLVSNQPFKDGKQAA

SEQ ID NO: 217025 - protein, 359 aa, unidentified
MREQRNKISFRGQKIYVGIDVHLKSWSVTVLSETSVLKKFSQHPSPEALYGFLTRSYPGAEYHSVYEAGFCGFWIHERLTALGIDNIVVNPADVPTKSSEKLRKTDTVDSGKLARSLRANELKGIYTPDSVSLEVRSLIRLKNSITKDTTRQKNRLKSQLRYLGIEIPQEFLTPFSNWSKRFFAWLKEIETLTPSGRQALDIHIRHLEELRRQKLEMTRALRTLAKTDRFREPLRLIMSVPGFGQATGMAFLSEICDITRFRNAEQLAAYIGMIPMCHSSGEKDGTGDITIRKHAVMRCNLIEAAWVAVRQDPAMNLFYTEQCKRMPKSKAIVKVARKLVNRLFFVLKHQTEYVNSIVS

SEQ ID NO: 217026 - protein, 328 aa, unidentified
MSASSEQIFIGIDVSKASLDLAIRAQSKARQFANTEEGIGALLASLEQQRQKIAVVLMEATGGLEHPAAVALCLAGYAVMVVNPRQAHDFSKSLGYLSKTDKIDAQALAQFAHTLYCSERRDKLLLKLATPEQEVLAAMVTRRSQLVGMRVAESNRLAGSHRTQRQSIETMIKAIDQQIQEVDGGIADGLGAHFKAKLELLKGMKGLGTTTKAVLMACLPELGQLNAPEIGKLVGVAPLNRDSGTMKGRRTTWGGRGNVRSALYMASLSAVRYDPVLKAFYQRLRAAGKPAKVALVACMHKLLTILNAVIKSGRPWQATFGCAQLANA

SEQ ID NO: 217027 - protein, 365 aa, unidentified
MNCVGIDVSHGKSIIVVMRPFGEVVVSPFEVLHTDSELSKLAGLLKSLDGETRVVMESTGYHHTPVAWLLHDAGLYVSVVNAMLVHDYGNNSLKRAKTDKKDAVKLANCGLDHWLTLPRYVPEEDTRLMLKTCYRKYQQYSKVQTMLKNNLISLLDIAFPDANRLFTSPPRADGSEKWVDFVAAFWHCECVCNLSEKAFTAKYHKWCRKHRYKFCEDKTLDIYSSACGHFGVIPKTDTAKLLVEQAVFQIRATSTTLAALKQEMQSLAASLPEYPVVMGMFGIGPALGPPLMAEIGDVRRFHSKKALVAVAGIDAPPYQFGQMDVRSHSISKRGSASLRRTLFLVMSVILQHATMNEPVYQFMNK

SEQ ID NO: 217028 - protein, 365 aa, unidentified
MTAAPTVEQEPIIVGIDTHKDIHHAAILSARGALIADQQFPATSRGYAQLLAWTATVGPVAVFGIECTGSYGAGLVRHLLAEGHDVREVNRPHAHTAARRGKTDAIDAEAAARKILAGEAPVVPKNTSGVVESIRMLTLARNSAVKARSIAQTQLQNVLVTAPGELREQINATTGPKARIAACRRLRPDTAGLTDPMQAAKLTLRTLANRVEVLNEEIGDLDQQLGQLVAATTPTLVSKIGIGTGHAAQFLISAGENVGRLHTDAAFARLCGVAPIPVASGKTHRMRLHRGGDRQANRALHMIAVVRLRYDPRTVAYMERRRAEGLSKKDVLRCLKRFIAREVYNDLRRDLSAVSSTRPLVALEG

SEQ ID NO: 217029 - protein, 376 aa, unidentified
MEHDSTLYVGLDVHKDSITVAYALGAGEVELPGKIGTTKTDLDRLCKRLQSKARHVCVVYEAGPCGYGLYRQLVQKGFDCMVCAPSLIPRKPGERVKTDRRDAVKLVRSLRAGDLSAVYVPTVEDEAFRDLARAWMTAKDDLRQARQRLKSFLLAHDVRYAGHADWGPAHRRWVSQYAFGSEWQQFAFEELRRTIEDRLAQCQRVEAALREAVTMWRFYPAVLGLQAMRGVQFTTAVGMLAELGDLSRFGHPRQLMAWLGVTPSEHSSGDKRRQGSITKTGNSYARKLLVEAAWSYRHPARVSADIQRRHEGIPKSIIDRAWDAQIRLCRRYRRLTARGKNANTTVVAVARELSGFIWDIGRLAMSLALPCRTEAT

SEQ ID NO: 217030 - protein, 349 aa, unidentified
MVILGADLHKRSHTVVVIDETGRKLDEKTVAATSEGHLELRRWAIRWPDRRWALEDCRHLSRRLEADLVVAGESVVRVPPKLMAGARRSAREPGKSDPIDALSVARAALREPDLPVARLDGPERDLRLLVDHREDLVADRTQAINRLRWHLHELQPGDEPKPRSLGRSIVLAELERRLAPLEGTVARIARELVTRIRDLSGTIDALEREIARLAERLAPLLLALQGCGHLSAGKLLGETAGIGRFSRSAQFARHNGTAPVPVWSGNVVRHRLSRGGNRQLNVVLHRIAITQIRLGGPGRAYFEHRLAAGDTKTEAIRALRRRISDEVFRRMRHDEAVQAAVPANLPAAA

SEQ ID NO: 217031 - protein, 353 aa, unidentified
MTTMTPARPSVTGGVDTHRDEHVAAALDGVGGLLGTASFPTTAAGYGALLAWLRSHGEISSVGVEGTGSYGAALARHLTNSGVRVLEVSRPNRQVRRRYGKSDVVDAIAAARAVLSGEATGTPKTHDGPVEALRALKALHRSANKARTQAINQLRAVLVTAPDDLRARLRDLPRGELLRTCAAFRVAADDDSLAGIIRLTLRELAARVAFLDTQIKHAVVRLKRITEQFAPSLVAMYGVGPDTASTLLLTAGDNPDRLRNERSFASLTGSCPVPATSGLIKKRYRLNRGGDRQANAALWRIAMVRLSNDPATRAYVQRRQTEGKTKTEAMRCLKRYIARNVFNTLKNETPLTT

SEQ ID NO: 217032 - protein, 399 aa, unidentified
MSMAELRVALDIGSKQHRVGIGTADGKLLEEFEISHDREGFELFFSRISIYEKRLGLPVVVAMEGVGGWARPLDRMILRHDYQLLNVNNVKLARFKEIFAAPAKSDKIDTRKMLELIRMREVLPLAKAVVHRVEAIPAENEQLKRFTRCRRQLVEEKVRVVNRLQSDLHAVSPGLLEITVAVDNLWFLNFLTCREDLTKLVGLKRASLLKIAGVGKVYAAKIEAWQKHATFAEETAWVGEMVIADTQRALDLVRQIQALEERIETISASSEIASIIRTIPGFGLISSATLAGEIGTLDRFAFETSLALYTGMTRLDNSSGTYVGTKNTRQVNRQARAAMMTATARHIDNVLESRAYYDKKRAEGKTHNQAVRALGRHLVRVIWSMITHQRSYVSKNPIT

SEQ ID NO: 217033 - protein, 411 aa, unidentified
MAAVMIGVDPHKGSHTAVVIDQAEMVLGQVKVRVRASAAQVQRLLAWAAAWPERTWAIEGAGGLGHLLAQQLAAAGERVLDVQPKLAARVRLLAAGDVNKNDPDDARSVAVAALRSAACPPVRADDHAAVLKVWAKRHRDLSRARNQVVCRLHAVLCELVPGGVSKQIYAAAAARILDQIQPAGAVQAARRELAGEFRADLRRIDAQRRDTRNKLAAAVRASGTTVTEVFGVGPAVAATVIGDVRGISRFPSRDCFAACNGTAPAEVSSGNRKVYRLSLRGNRRLNHAIHMAAVTQIRCKHSKGRACYDRKLAEGKTAKEALRALKRQVSNAIYQRMKAGARRAATTAGPGGHLGNGSVASAAGSHPGHRLFGQATPGPEPTLRLRPGRSKATRPPSSRPARRPVPAHTST

SEQ ID NO: 217034 - protein, 369 aa, unidentified
MKKHITFVGLDVHKNSINVALADEDRNGDVRYYGAIGGTLDDLDRVVKKLSSSSRELRFVYEAGPCGYDIFRSLTDKGYACSVASPSHIGKKPSERIKTDRRDAMMLARLHRAGELTYVFVPRAEDEAMRDLTRAREDALKAQRVARQQLCGMLLRLGFRYQGRTAWTPAHFRWLTERKMPTPSQQVVFQEYIHAIEETTQRVERHTQQIENLIPSWRLAPVVKALHALRGVSRIVAATMVAELGDLTRFENPGKLMAFLGLVPSEHSSGQKRRLGAITKCGNSHARRVLVEAGQAYSFQARITPLLLKRQEGVSQEVKDISWKCQVRLCARFRRLTATGKNRNTVVTAIARELAAFMWSIAKQVPISA

SEQ ID NO: 217035 - protein, 347 aa, unidentified
MDYFAGLDVSLETVSICIVNATGDILVEKKVEAEPSAIITVLKHFARPLKRVGLEAGPTSSWLYSELRGNGYPAICLECRHVKAGLSAMRNKTDRNDARGIAQLVRLGWFRQVYVKSEEAQRIRMLLVNRQQLLTKALDLENSVRGSLKVFGLRVGTVTRRTFESRVLELVAVDRVLTAITEPMLRVRRALIEEFERLDRLCRRLARGDIVCRRLMTVPGVGTVVALTYRTGIDAPERFSRSRDVGAHFGLTPRRYSSGQTDYDGRISCCGDAMVRTALYQAANVLLHHGRWSSLRSWDMRIAKRSSVKAAKVALARRLAVVMHRMWVDGSDFRWSSAATAVPTSRQ

SEQ ID NO: 217036 - protein, 416 aa, unidentified
MNAVGIDVSSRKSTVAVLRPLGEVVCLPFDVSHDADGLASLAEKLKAIDGETRVVMEHTGRYYEAVEKALHEAGFFVCAVNPLLIKEYGANSLRRVKTDKADAVKIARYALDNWADLRDFTPMDAIRYDLKTLNRQFQLASKQRTASANNLIALLEQSFPGIRKCFDSPVRSDGTQKWVDFAHSFWHVDCVRKQPFPAFCERYRKWCKRHAYLFKLSNAEEVYALAKRAVVLTPKSKVVKVLVQEAANQLSSISRSVEVYRAEMDRLAAMLPEYPVVMAMYGVGKSYGPQLMAEIGDVRRFERKQALVAFAGIDPMPNQSGDKNVRSNKSSKRGSPYLRKTLFNVIRTYLQCAPQDEPVFQFLNRKRAEGKPFYVYMLAAANKFLRRYYAKLRDYFASLDTLQPVAPIPTILKAAL

SEQ ID NO: 217037 - protein, 329 aa, unidentified
MKVLQSVVGLDVSKDTLAVCYQVGPRLQHQEVANTPAGFRQLVRCGGATSLYVLEATGPYYLAVAYHLVAAGAQVAVLNPLVVKRFIQMHLGKGKSDRKDAQWLLRYGQQQATPRWQPEEALLVECRQLEQVVELLIRQKTMVHNALEAPQAQPVVSPVALAQLRQTLLDLAEQVQELEAKLLTMVEGRYPAEMPLLYSIPGIGRKTAAYLLLFAGGFTNFQNSRQLIAKAGLCPREFSSGTSVRGKARITKMGGALIRSKLFMCSWSARRANGACRALYDRLVAKGKNGKLALIAVCNKLLKQAYAIVTSGVPYQTDFTKKVAVPLVF

SEQ ID NO: 217038 - protein, 423 aa, unidentified
MKLATEHRFTALVGIDWGDRKHDFCLQVAGSEHRESGVLVHSPEAIARWATGLYSRFGGPIAVCLEIAKGPLVHALQRHDFIVLFPVNPATLAKYREAFVPSRAKDDPTDAEIALELLLRHRDKLQMLQPQSADMRTLATLVEQRRDLVGDKTRITNRLNSTLKEYFPQMLDWFEDRDTLLFCDFLQRWPSLKHVKRARQATLQSFFSAHNLRRARLIEERIHSIRSASALTNDPAVIGPHQLLVQALVAQLRVTLQAIDDFDAAIIEVAERLPDYQLFAALPGAGSILAPRLLVASGEHRERYRSAAELQNYAGVAPVLERSGNKCWVHWRLACPTFLRQTFVEWAGSTIPRSFWAGAYYQRQRAKGCSHQAALRALAYKWIRIVYRCWQTRTPYDESVYLNALKRRGSPLIAHLATTTQVT

SEQ ID NO: 217039 - protein, 405 aa, unidentified
MPYILALDVSMGHSYSVLYKDDTCLFEDEIEHTQRGFHALLEEIQHLPERPLIVFEATGIYSRPVEKFFQDHHFSYCLLNPLEAKKQMEESTLRSWKTDKSDAHRLAQTHLKNQRQPKEVQSNFYLEMRDLARFYQEIEKKITRLRMDLHNCLQLTFPELEQFFSNRLTPYALTLIRLFPHPDFVLASTRTKIKNKLINETRKKISANRAEQKADQIIHYAQCAYPAVERDSIHCQKTIYYAELLQDLLEQKKALATQMIKKAEGSPCFLLYQTFPGIGALTAALLLGELGDITRFKTHKQLNAFVGIDIRRYHSGKYTGQDRINKRGNPKARKIIFFTIRNMIRQQRAAPNHIVDYYYKLKKQPIPKKEKVATVACMNKLLKCMHAMVRAHTEYDYAYAVSVDH

SEQ ID NO: 217040 - protein, 361 aa, unidentified
MQKLNDLSRCLTAFEPDGTLIAVIEMSLMSWLVAGIVPGVERQPLKKLGIDEGALLKLLHRWREEAEKAGHGIKRIAVAFEAGRDGFWLARWLRVRDIEVHVIHASSVAVSREHRRAKTDRLDTELLKRAFLGWLRGERDHCKMVAIPTIKDEDAKRPSRERESLVGEQNRIVNRMKATLIRLGIRGFNPKLKKAAERLEGLRTPEGEPIPPNTLTELYRDMERRRLVTVQIRQIEDARVERLDQASSDGPHAMVRLLARVMGVGVETADMLVQEVLSRNLRDRRAVARYAGLTGAPDESGRKRREKGLARSGNARVRRGMIQLAWRFLKFQKDSTLAQWFRARTENAFGTRKTMIVALAR

SEQ ID NO: 217041 - protein, 481 aa, unidentified
MGRRRTLRYETGLSFAPRRALENVGNVWYAQSARKLTWELPGPRTGAMEPAEQSREQDAPASAGASHKEGAMERVIERGCGLDVHKKTVTACVRRPGPRGEREQQVRTFGTTTAEVLALRDWLEAQGVTHVAMESTGVFWKPIFYVLEEAFVCVLANAAQIARVPGRKTDVEDCRWIAQLLEHGLIRSSFVPPAPIRELRDLTRYRKVLIQERTRDANRLHKVLEDAGIKLASVASDVLGVSGRAMVEALVSGTTDPTVLAELARGTLRKKLPALRQALAGRFRPHHAFLVSQVLAHLDYLDEAIETVSARIDEAIAPFAAEVIRLDTIPGVNKRTAEVFIAEIGVDMGVFPSAGHLASWAGMCPSNNESAGKHRSGKTRKGNRWLRGARTEAALAAGPRTAKGALAARYRRVMRHRGHKKAVVAVAHAILVTAYHLLARKTTYQDLGRDYYDRRHAERARHHAIQALERQGYRVILEPAA

SEQ ID NO: 217042 - protein, 364 aa, unidentified
MQKISTMQASGKNIFEGQLIIGLDLGDRSSAYCVLNEAGEIVLEHKLATTPEAMKQVFGSLPRCRIAMETGTHSPWVSRLLTALGHEVIVGHAQKVRLITKSRKKDDRLDARTLARLARIDPQLLSPVKHRSAQAQLHLTEIRARAVLVSARTALVNAARGLVKSYGERLRKCDTQQFLRETSGLSTRLREALEPLLREVESLNERIQEYDRRIAKMAKQTYPETALLKQVKGVGDLIATAYVLTIEDPHRFRKSRDAGCFVGLQPGRRNSGESEPQMRISKEGDEYLRTLLVQGAHYILGPFGKDSDLRRWGQKLSARGGKNAKKRAVVAVARKLAVLLHRLWVSGEVYEPLRNSQKAMSAAA

SEQ ID NO: 217043 - protein, 375 aa, unidentified
MCERAVLTNRPSLDLSPFVLEGHRACRGAWDRSGVFLNPNSCMGLEPGPSKEGSWMMAQNDLVVAGVDVAKDKVDVCIRSLLLRRTFASTAEGRRELASWLRRNKVGKAVMEASGGYEREWAKALRDAKIEVRIVDPKRVRSFAQSAGRLAKNDTIDAEMIAWFAETFDEARGQSYDATREQLHQMVNARQALKEMQAKLETRREHAVPAAVQRIHARISKTIAVELVKIEATISALIQATPRFAELAEIIESVPGIGRVTSAALIAAMPELGQANNKIVASLLGVAPYDDDSGRRRGERHIKGGRRRTRNVFYMACLGAATQHNPVLKAFYDRLVAKGKLKKVALTACMRKLIGILNIMIERRQKWDAKRYAVS

SEQ ID NO: 217044 - protein, 396 aa, unidentified
MAAIWAGIDAGKTHHHCVAIDESGRWLLSRRVANDEPELLELLADVLAFGDEVTWGIDLADGGAALAIAILLNHDQPVHYISGRAIHRASESYRGEGKTDAKDAAVIADQVRVRRDLHPLRAADDTITDLKILTGRRMDLVADRTRTVNRLRAQFTGVFPGLERALDLTHTGPLILLTGYQTPAAIRRIGTKRLETWLRNRHVVRADRLAEIAVQAAERQHTSLPGEKLAAQLVHTLARDVMGLNQQVAELDKDIEAKFRDHHAFDVITSMPGLGVILGAEFLAATGGDMTIFGTADRLAGFGGVAPVPRDSGKISGNLRRPQRYNRRLQRVFYISALFSIRHCDESRQFYDRKRTEGKRHTQAVLALARRRVNVLWALLRDGRCYELTPPGALAA

SEQ ID NO: 217045 - protein, 440 aa, unidentified
MNRVIPTNAAANTRKESNIMKAWNEVTHFAGFDWAKDHHDVLVLDNTGKIAAELRFEHTAAGWSLCQQKLAAFPHLAIAVESGHGAAIERLMVLGYRVYPVHPRSSKSYRTRKLPSGTKTDHFDCWALADALRLEGESWHMLNTPEPLVQRLRLLCRDEVALIEQRTALINQLQQALYEYYPAALAAFDDWTSLSAWAFVARFPTPQALVKAGKRQWEKFLHTQKLYHPEWYQKRLAIFAKAAEFCGPEAVIAAKSVLATALVKLLQILEQQLAGYRLLITECFKQHPDYHVFASLPGAGPKLAPRLLAELVALQPLADQPQVLQCLAGMAPVSYQSGKVSVVYLRRQCNRFLRATLHLWVDLSRHYCDWARIYYEAHKKKGQSHACALRCLGMRWLKIIAAMIRSHTPYDAALHARSQLQHGSWVLQLQPKLSITKDAS

SEQ ID NO: 217046 - protein, 419 aa, unidentified
MTSDFEWYAGIDWASEQHRVCLLDGGGRPAGEREFAHGGDGLAELCAWLIAMSGSEPQKIAVAIETPHGPVVEMLIEHGFAVHSINPKQLDRFRDRFTVAGAKDDSRDAHVLGHSLKTDAHGFRRLKVDDPVIVELREWSRLGDDLKQERNRLANRLRQQLWRYYPQMLELAGDDIAADWLLALWDEAPTPASAAEISTQAIASLLEAHRIRRFDAAEVLRILRQRPLTVAPGTIAAASAHIRILAERLRLVNRQVKEANRKLDRLCRKLEQAGESEAGNRPEQRDVAILRSLPGVGRINLAALLAEASEPLKRRDYHALRLMSGVAPVTRRSGKVCLVIRRLACNARLERALYHWARVASQRDPISQKRYAALRRRGHSHGRALRTVGDRLLALACTLLRRQVLFDPDYHCKEVAAAA

SEQ ID NO: 217047 - protein, 347 aa, unidentified
MKFYTTFHQFYCGIDLHARLLYVCILDERGNKVVHQKIKADPHQLHKLLKPYIGQVVVGVECMHCWYWVSDFCREMNVEFILGHALYMNAIHGGKAKNDKIDSYKIASLMRGGNFPLAYNYPAETRATRDLLRRRTYVMRHGSELKAHVVNTDSQYNLPAQSLNLKNVSARDGLRHYYDDAVVQRMIALDMNILDCYIRELKHVESFIEGKAKEHYGALLNIVRTFPGIGQILALTILYEIGDINRFPSVQQFASYSRLVKCKAESAGKTYGTSGNKIGNGYLKWAFSEAAVLYLRGNDNAKRYLAKLQKSMSKGKALSALAHKIGRCVYFMLRDKKVFDEDKFLNR

SEQ ID NO: 217048 - protein, 330 aa, unidentified
MKIQNTYPDGLPLCLGVDVAKAKLDCVLLRNDGKYRNKTVANTAKGFADLSDWLTKQHVSEPLHVCMEATSIYWEDIAQYLAEAGHTVAVVNPALVKAYGQSLSVRNKTDATDARLLASFCRERRPEAWQPYTASEKTLRALALRRQSLVDMQTQEKNRLGVAREDITDSLKEHLAWLESEIKRIEKLINKHIDSDPELREKSKLLCSIPGVAEHTTAVLLAYLGRIRQCEKASAFAAFAGLTPCRHESGTLKGKSTLSKKGHAFLRRALYMPAMNATYKTAWGKAFHARLQANGKPGKVIIGAMMRKIAQVAFAIIKSGKPFNPHLHPA

SEQ ID NO: 217049 - protein, 424 aa, unidentified
MYPMKEWKEITHYAGFDWARDHHAVLIVDAAGQIVADFEFEHSQKGWETFAEKIALYPNLAIAIETNQGAAVDQLLQRELTVYPVNPVASESYRKRKAPSGTKTDHLDCWGLADALRVDGHGWKPLRPRDPLTEKLRLLCKDEVALIQQRTLLVNQLQQALVDYYPAALEAFEDWTADFTWEFIIEFPTPQSLVKGGKRRWEKFLHTHKLWRPETAQKRLEIFARADRFKASEAVIEAKSQLALSLCKVLRTLDQQLEQYRKQIEALFKDHPDHDLFGSLPGAKAVLAPRLLGAIGTDPDRYGSHNVLQCFAGTAPTRYQSGQVNRVKIRWACDPFLRHTIHLWANAFRKATVWGQTYYEKKREQGMSHACALRCLGQRLLKIVFRMISDKRPYDGELHARNQKKHGSWVLDLVNGTAASNPGE

SEQ ID NO: 217050 - protein, 321 aa, unidentified
MTYIGIDVSKDTFVVAYSPEKNSKTKTFKNTTRGIHEFIRTISKDEHHCVMEATGNYSALLVYLLSEAGITTSLENPLKVKNFARAMLSTVKTDEIDARLIALYGEKMQPAPYKLRSDAILTLKQKRTVIRQLKKQLIATRNLKGSMEVLPFFDAKCKKSIEKTIAFLEKQVKDLEEDLSSLACSEYKKQMDLLTSVKGIGITLAAALIMATGGFTYFDNAKQLTRHLGLSPTYQQSGTSVNFKGHINRNGDSSLRSQLYVAAFASLRCNAECKACYDRLRSNGKPGKVAVIAVANKLIRQAFAVVTQEKPYVDGYISSKK

SEQ ID NO: 217051 - protein, 339 aa, unidentified
MEALYGGIDLHSNNSVVVVKDAEGKVLYRRRLENDLQRIERALAPYRAGLSGVVVESTFNWYWLVDGLLEAGYPVKLANTTAIQQYSGLKHTDDESDAEWLAEMLRLGILPTGSIYPPAERAVRDLLRKRAHLVRQRTANILSIQNLVQRNTGARMKSDAIKALAPEQPAQRFANPDVALAIATTVRVRQCLDTEVAALEKVVLGRVKLRPEFVKLKSIPGVGDILALTIMLEAGAIGRFPSVGDFASYCRCVGSKRLSNFKKKGAGNVKNGNRYLAWAFVEAANFAIRYSAPIRRWYQRKQARTDGIVARKAVAHKLARAAYYMLRDQVGFDVTKAFA

SEQ ID NO: 217052 - protein, 340 aa, unidentified
MTAHVCGIDIGKTVFHLIGLSKEGQIVAKRRFTRKQLIIHTVNMPACLIGMEACPGAHYLARVLRAQGHEVKLMPAEYVRPFVKSNKNDYIDAEAIAEAVQRPTMRFVPIKSEAQLDLQALHRVRDRWMGRRTAVINQIRGFLLEHGITIAVGPAHLKRQIPSILEDADNLLSPRMRALLVELRDEWEKLETQIEEIDREFSQVVKKEENCRRLLTIPGIGPLTATALTAAIGNAMAFHKSRDLAAWLGLVPRQHSTGGKSRLLGISKRGNPYLRRLFIHGGRAVVARAKRENHTFGNWLDQLEARSPRNAVVVAMANKLARIAWAVLTRGQVYRATVCP

SEQ ID NO: 217053 - protein, 392 aa, unidentified
MYIVGIDIGKNHHEASIVSPEGKQIGRSLRFATTHKGADSLMSFIFKNIGNSPCVFGMEATGHYWYPIYSFLKAKGYTIYVINPIQSDSLRKMYIRQTKNDSIDSFLIAEVIRFGQFGTTSMADENILAMRQLCRYRDSVISSRTEIKLRIGTIMEQIFPEYEKQFSSLWVSTSMGILEKYLTPENIENAPIDELFEIIKDKSHNRLTKAKAISIKEAAADTFGIKIAQDAFSFQLKQLIDRMNFLDKQIEALDIEIMKYYEQFDCYLHTIPGIGMIATATILAEIGDIHRFKSSSALVAFAGIDPTVRQSGEFNSTHNHMSKRGSPYLRHAIFLAATTCSFHNSPLNAYYKKKRDQGKHHLTATRAVARKLTTVIYAVLRDSKPYEPKKFC

SEQ ID NO: 217054 - protein, 388 aa, unidentified
MFKTVERPDAPAAIRMDIGAIFVSLELSRSTWLLTSVSPGAAEKMSQHATPAGDLRRLFECLAELKRKALARTGKTYPIIVIQEAGLDGFWIHRALEREGIESHVVDAASIAVPRRRRRAKTDRIDGKTLLRTLMAFKRGEPRVCAMAKPPSVEEEDRRRLGRERKTLIAERVEHVNRIKGLLFTQGAIDYQPLRRDRRARLEALRTGIGDPLPARLKDLISRELDRLELLLAQIKAVEAERDALLAEQSRQAPAAAAMLLAFKGIGPEFATVLWLEGLFRSFANRRQVAAYAGLAPTPWRSGSIAREQGASKAGNPRLRATLIELAWLWRRHQPKSALTLWFEDRVKANGGRVKKALLVALARKLLVALWKYVTTGLVIEGAVMTTA

SEQ ID NO: 217055 - protein, 411 aa, unidentified
MLKIVYPICCGVDVHKRFIVATIATTNDENITSYLTKRFDTYTEDLVAFKDWLLQHNCKDVCMESTGKYYIPVYNILEDYVKVTVANPKYVKAIRGKKTDKKDSIWIADLFKHDLVPGSYIPPKPIRMLRELFRYRFKLVNNRSSERNRLQNCLTVSNIQLASVLTDMTGKSATSIINYITTCETFDPEYCKSLLQKSAKKKAYDVIKSIVGYSISDEQSTKIDVCKKHQDNLDEHIQSIQDKMYELAKPYEKQINHICTCPGFQRNSAIYTIAEIGVDMTVFKSAKHLCSWAGLTPTNNESAGKKKSVRISKAGCYIKPLLVQCGLAALNSKDNPEISNRYKNLKMRRGHKKAIIAIARLLMTVIYHILQDKVCYDKELYSRYNQLPTSKEITIEQAIALAKRQGYKLVC

SEQ ID NO: 217056 - protein, 371 aa, unidentified
MDDSSKTLFVGLDVHKDTIAVAYAPEDRGAEVVSVGMIGTRQYDIDKLIRKLESKSATLVFAYEAGPCGYWLYRYLTRRGLTCSVVAPSLIPRKPGDRVKTDRRDAMTLARLLRSGDLDSIYVPTVDDEAIRDLSRAREDAVRDLKRSKVRLKAFLLRQDIRYEGRANWNAAHLRWLARVVCPTPAQQIVFQEYVHTVTERMDRLRRLEGELHTAVKTWRLQPVVDAVQALRGVDLTGAVTLIAEVGDLTRFDTPGKLMSYLGLTPSEYSSGASRRQGGITKAGNGHARRALVEGAWAYRYPAKVSRHLQLRLEKVPTEVRAIAWTAQVRLCKRYRLLSARGKHVNQVVVAIAREMAAFAWAIARTVPIAS

SEQ ID NO: 217057 - protein, 388 aa, unidentified
MTNGYYVGMDVHQRTTSLCLMDGEGAVVREWKIRTAPKELDELHRELRRLCGDTPVTLGLEASTAGKATFQHLRKLGRNVAMAHPRALRAVTTSETKTDSNDARTLAHLLRLNFFPRAYVPEEPIERLRTLVRLREEQVDKLRRAKVQVRTLLVKHQLQHESLRYDDIFGVQALHWLKGVDLPDPYAQRQLVLLLEEGALYARQVEELTRELAKFGADEKTVAILQSVPGIDYVLALTILAEVGDVHRFPNRRKFAAYCGLVPKNRDSGEVVGRHSKLRHGSSRLKWALMVAVQAIRKSGKGRFAILLRRLEKRIGTPKALAAVAHRLAFTVYGLWKTGTLYDEISARQYAWKRRHLRRDAAEAPAAPRPAEAVERMLKQIGAVGEGS

SEQ ID NO: 217058 - protein, 369 aa, unidentified
MGEYSEAFVAFDVSKTKHALAIADGGRGSEVRFLGEVPSSPAAVERLIGKLAGRYGKLHFCYEAGPTGYGLYRQIEALGHACLVVAPALIPKRPGERVKTNRRDAVTLARLHRAGELTGVWVPDAVHEAVRDLVRAREAAVDDRRRKRQQLLSFLLRHGRIYSGGGHWTLAHRRWLAKQGFEHPAQQIVFQEAIDAIADADQRLRRLEQQLALIVPSWSMAPVVEAYQAMRGASFIVAVTFAAEIGDVRRFETPRQLMSFLGLVPAESSTGQTVRRKGLTLAGNRRARRVLVEAAWTYRYPARVGETLRARFEGLPKAVRDIAWKGQIRLCARYRRLSNAGKKLPVVVAAIAREIAAFLWAIGREVAPA

SEQ ID NO: 217059 - protein, 316 aa, unidentified
MTNYIGVDVSKDSFDAHSTSLGSRQFSNDGTGFKLFKKWIGISAHVVMEASGPYYLRLADDLYRSGFLVSVINPLVIRRFCQMNLQRAKTDRKDALAIAQFAHLTNPSVWSPAPEHLQQLLQMQSVMEQLTKQLTSTRNALEALHQHPHIYQGALKSLQQVERAQQQQIVQLEKEIMELTKLHYQAEFGSLVSIPGIGKKTAVLLILSTHGFSRFENIKQFVAYTGIAPRIFQSGKTINKKPKISKMGMADLRRSIFMCSLKAIKYNQACKNLFDRLRAKGKAAKVALMAVSHKLLRQAFALAKSKEIFQSELSLV

SEQ ID NO: 217060 - protein, 367 aa, unidentified
MKKISTAAVKQTHNFAEQKLTIGLDLGDRSSWYCVLDEAGEILLEQRLATTPKAMNEVFGGMPRCRIALETGMHSPWVSRLLSELGHEVIVAHARNVRLIGESRKKDDRLDAQTLARLARIDPQLLCPVRHRSAKAQADLTVIRARAGLVRARTALVNTARGLAKSYGERLRGCNVRNMNPEKAEGLSPELQKALEPLLAGIESLSERIRECNERVEQLAQQSYPQVALLEQVKGVGTLIALTFLLTLEDAHRFRKSRDVGCYLGLQPGRRNSGQSEPQMHISKEGDPYLRTLLVQGAQHILGPFGADSDLRRWGLKLAERGGRNGKKRAIIATARKLAVLLHRLWVSGEVYEPLRNLHRMAMPAAA

SEQ ID NO: 217061 - protein, 430 aa, unidentified
MKSNTQNAKIEAITEKTLVLGIDVGSEMHYARAFDYRGIEYSKKPFKFSNTEAGFVTFKEWILDLKERHEKDKVVPGMEPTGHYWFNLGKFLQDNEMKPVLVNPHHVKKSKELDDNNPTKNDRKDPKVIAGLVREGRYMIPYLPEGVYADLRTASNIRFQLQAELTRIQNRISRWFNIYFPEYKTVYGKPDAKSGILILKTAPLPEDILTLGIDGVNQIWRDAKLRAVGKARAKTLIEAAEHSVGSKEGAVSARMEIRMLLEDYESRNTRLQEVMILIEELVRKIPMAEKLLEIKGVGIRTVSGFLAEVGDISRFNNPKELQKLAGLALVENSSGKHKGETTISRRGRKRLRYLLFEVAMSLVSKNQEFRELHNYYTTRRLNPLKKMQSLMAIAAKLIRVFYAMLTKGVDYDPKKMVSDIKRPAVYLQAA

SEQ ID NO: 217062 - protein, 454 aa, unidentified
MTRKTNRKRKKKSASKSPAPATKMNPDAAGIDLGATVHYVAVPADRDPQPVRHFGTLTEDLQALADWLGACEITTVAMEATGVYWIPLFQILEGRGFEVCLVNARHVKNVPGRKSDVQDCQWLQYLHSVGLLNASFRPPAAICAVRSLMRHRESLMRTSCDHLLRVQKALDQMNVQLHHAVTDITGVTGLAILDAIVAGERDARVLAGHRDPRCKKSQAQIAKALLGDWREEHLFTLCQSLKAWRFHQQLMGECEQQIDKHMGSLEDRSDGPPPPSVKKSIKPPEQPMRQHLFSKFGVDLTAVEGVSIQTSLAFLAEVGTDVGKFATAEHFASWLGLCPDNRITGGRTHAAHTRKVSNRLATALRMAAQSFHRSKSSLGDWFRRIRAKLGTKAAVTAAAHKLARILYAMVKHRTPFDPDRIGNPEQARARKERFLRRQAEQLGFALTPVEGEGS

SEQ ID NO: 217063 - protein, 340 aa, unidentified
MSLYGGIDLHANNSVIVLINEQDEVIYRKRLPNALPTILEQLAPYHTEMKGLVVESTYNWYWLVDGLMEADYRVHLANPAAIQQYSGLKYTDDHSDARWLAHLLRLGVLPEGYIYPKAERAVRDLLRKRAHLVRQHTSNVLSVQNILVRNTGARFSVKRLQELTKQELKSLLAEEPQVLAVTSSLAVLDCLRQQIKTLEKTVHKRLHHTPAYEQLLTVDGIGTILAQTITLETGAISRFPTVGNYASYCRCVDSTKISNGKRKGTGNVKNGNPYLAWAYMEAAQFAMRFQPAAQRFYQRKLAQSRNNTVLARKAVAHKLSRACYYIMRDLVPFEAAKAFG

SEQ ID NO: 217064 - protein, 409 aa, unidentified
MRYYLGVDWADQTHAVWVVDASGAKITARAVAHTAEGLGEWGRALDEWRAQGIDLWAAIERPDGRVVDFLLDHGVVVYPVNPKALDRARDRFRQSSAKSDPFDARVLADFLRTDHTHLRALQPSSEAAQELKLLTEDCQRHIRQQTRLVNQLTATLKAYYPRALEVAALTSALAREFLPAYPTPAAVTALTERQWQRWARAHGLSAARAGDLWAVLRQPHLPVPAHVVRAKARLMQALMEQLMPVVTAVAQYRKAIDDFFASMPAARWARTLPIGKHGITAPTLWARLGDAPGRWESFRHLQAHAGAVPVTKRSGKQQVVHFRFACDKALRHVVDQVAFLSLLSSAWARAYYDQQRARGHSHRQALRALGAKWLKIIFVMWQRQVPYDEQYHLATMTRQQRQRGQKQCA

SEQ ID NO: 217065 - protein, 391 aa, unidentified
MVCVGIDVAKDKHDCCILDSEGTTLVDCFTIPNNMDGFKSLLQTIQDCSQKSDKIKVGLEATGHYSYNILGFLLDNDLPVYVMNPLHTNLYRKSLSLRKTKTDRVDAKTIATMLLSDVDLKSYTDIAYHNEELKSLTRYRFDKVQERAKLKQSVSRLVTILFPELEQLVSSIHGTSIYALLSEYPGAKQISEAHLTRLANILVKTSRGHYRKDKATHIRDAARTSIGSVMPAKSLELKHTIKLIQELTSEINEIEDAIRKIMDELKPPILSIPGMGFHSAAMILAEVGDFSNFNSPDKVLAYAGCSPSTYQSGKLTNCYAHMEKRGSRYLRYALYTATKYVCYWNPVFTEYLTKKQAEGKHYNVALSHATKKLVRLIYALQKSGKAYLAVT

SEQ ID NO: 217066 - protein, 342 aa, unidentified
MDYYVGLDVSLKQTSICVVDQTGAVVREGVVDSDPEAISVYVRSKAPDAVRIGLETGPTSTWLWTELKRLGLPVICIDARHAKAVLKIQINKSDRNDAIGIARIMQTGWFKEVHVKDIDSHSVRALLASRALLVKIKRDLENHVRGLLKNLGLVIGRAKFNVFTVRAEELIEGRPELIAAIRPLLEARDAVGQQVSELDRKVMKLARHDAQVRRFMTVPGIGPITALAFKATIDDPARFARSRSVGAYIGLTSRRHASGEVDWSGRISKCGDAMLRSYLFEAAGVLLTRVPKWSAVKAWGVRLAKRNGLRKAKVAVARKLAVILHRMWIDGTEFNWSKEIAA

SEQ ID NO: 217067 - protein, 418 aa, unidentified
MATVEIVYPICCGIDVHKNFLVACIATTDERSQSIHLIRRFSTYTGDLRKLADWLASHNCKDVCMESTGKYWIPVFNILEKTCNVCLTHPKYVKAIKGKKTDKKDAKWIAELFKCDLVRSSFIPPADIRQLRDLCRYYVKLTEINTSEKNRGQNCLTMCNFKLDDVFSDVFGKSATRILDKILETQSLDFDIAPLIDRRCKATVEEIRAALDGEFVLAQAEKLKLIRLHIENICGLKATLERLILQLSTNYQPQINLLMTVPGISSPLTAIRILAEIGADMSVFETAKQLCSWAGVSPQNNESANKKKTTRISRAGVYLKPLLVQVALAACKSDKHPELKDKFQIIKKRRGHKKAVIAITRKLLTAVWHILSKSEPYNAELYHNSDKPPINRVLTPEQAFAYFISRGYQILMPEPKAA

SEQ ID NO: 217068 - protein, 389 aa, unidentified
MQDVAHRPVAATTIGSDLCAIFISLELSRSTWLVTSLSPGHGEKMSKHSVKAGDIAALLARFSKLRTKACARTGKSLPIVVIQEAGLDGFWIHRVLLSEGIESHVVDAASIATSRRRRRAKTDRIDGETLLRALLAHKRGEPRVCSMVRAPTPEDEDRRRVCRERKVLIMERVQHVNRIKGLLFSQGASGYEPLRRDRRARLDALQTGDGRRLPPHLKAQVCRELDRLELLLEQINAVEAERDALLNAEQTKVSAPPLMLLGVHGVGPEFASVLWSEGLSRHFDNRRQVAAYAGLVPTPWQSGSVDREQGISQSGNPRLRTTMIQLAWLWLRHQPGSALTLWFKDRIERNGGRRRKTMIVALARKLLVALWKYVTAGVIIDGAVTRAVL

SEQ ID NO: 217069 - protein, 451 aa, unidentified
MSPKPEVPAEALGLVHPHAAGLDIGAAEIWAAVPPERDQPSVRAFGTFTPDLQALAAWLAACGVTSVAMESTGIYWIPIFELLEARGLEVYLVNARHIKNVPGRKSDVADCQWIQRLHSYGLLSASFRPEAEMVVLRAYLRQRTMLIEHRAAHIQHMQKALHLMNLQLTQVLSDVTGVSGMAIIRAIVGGERRPAKLAALRNARCQRSEAEIVKALTGSYRPEHLFALKQALTLYDAYSTQLAECDREIESHYAAIKPRFDPDDPDTPLGPDPKTNTHSKNAPDFDVRRQLFQLVGVDLTEVHGLHVSSVQQLLAEIGTDMRKFPTVKHFCSWLGLAPHNDITGGKVKRSRTIKNHNRAGQVLRLAAQSVGRGQSALGAYYRAMKGRIGVAQATVATAHKLARIIYFMLRDRQPYQPISPEEYHQRQHTRQIAALKRKAAKLGFTLQPQAV

SEQ ID NO: 217070 - protein, 326 aa, unidentified
MEHELHYIGIDTAKEKLDVDVLRPDGRHRTKKFANTTKGHDELVSWLKGHKIDHAHICIEATGIYMEPVAECLYDAGYIVSVINPALGKAFAQSEGLRNKTDTVDARMLAEFCRQKRPAAWEAPHPLERALRALVVRHQALTDMHTQELNRTETAREVQRPSIDAHLLWLEAELKRLEKQIKDLTDDDPDMKHRRKLLESIPGIGEKTSAVLLAYIGLKDRFAHARQFAAFAGLTPRRYESGSSVRGASRMSKAGHVSLRRALYMPAMVATSKTEWGRAFRDRLAANGKKGKVILGAMMRKLAQVAYGVLKSGVPFDASRHNPVAA

SEQ ID NO: 217071 - protein, 405 aa, unidentified
MFVGIDWASQTHAVCVLDDAGTKHANFQVGHTADGLDQLIARLGRLGDPATLPVAIERPDGRLVDRLLEAGHPVVAVQPNAIKAWRDAEILSGAKNDPGDAHLLAEYLRLRRHRLRVLAPFSAETRALRAVVRTRGDLVDQPVATANQLGACLEAFWPGAKGIFADLATPIALDFLARYPTPESAANLGERRMAAFLTKHGYCGRRPPAQLLTRLRAAPPGLCGTVEVEARRDAVLALVGVLRALLAAIKDLDRSVVAHLGEHPDAEIFTSLPRSGQINAAQVLAEWGDCRPAYADAEAVACLAGATPVTKQSGKHTAVSFRWACNKRFRQAICTFADNSRHASPWAAKVYADALARGHDHPHAVRVLARAWIRVIWRCWIDQIPYDPAKHGAAQKLTEIATSAA

SEQ ID NO: 217072 - protein, 342 aa, unidentified
MTITTVGIDLAKNVFAVHGVDHNGKTVLVKSRVTRAALPGLIAGLSPCVIGMEACSGAHYWARLFRLYGHEPRLMAAKFVSPYRMAGKAGKNDAADAQAICEAVRRPHMRFVPVKDESQQAMQCLHRTRQGFIEEKTAAYNRLRGLISEFGVIASQSTAALRYAAAKHKDSLPAQVRQCIEDLLAHITRIEEQIAEYDRILSQVAKTDNRSQRLMKLKGIGPTTACALIASIGNAHDFKNGRQLAAWLGLTPSQYSSGGKSKLGRITKAGDAYLRTLLVQGARSVLIRADKKTDSFSRWVCSLVERRGYWRAVVAIAAKNARLCWASLHYGDDFKFYNTSAA

SEQ ID NO: 217073 - protein, 444 aa, unidentified
MKILALDLGKFNSVACFFNSKTRKSKFLTTPTNREHIASIFKSAKADLVVMEACGPSGWINDLAQDHGLKTLVCSTNEEAWRWANVKRKTDRDDALKLARMAAMGELKAVHTPSPEHREFRSLVKYRKTLDQRINKTKNTIRAWFVNHGIEIASGEKAWYTGREKIDSFRKPLIDCDANELWKGELDIELTILDSLTEQLGGVVKKLEAIGKTDERIRRVQTIPGVGPRTAEILVACIDDPHRFENGRQVSAYFGLVPRQYQSGETDRNGRITKRGNPLARTILVECAWASLRYNPWAKGVYERICGKQKTRKKKAAIALARKLAVIAWAMLRDERDWDPAQMIAVTKSYDGKLPIDEAELAAMPKKECRHKRKRRMAKEAEAAKEAESKPTNTRKRRKTTEHRSTPTTQSSAATRSTRTQHSAKRTNKTSTRSPRARKPVSRT

SEQ ID NO: 217074 - protein, 416 aa, unidentified
MNKIFVGLDVSSKSFSMACIDGEGKVILKTKTFKNSPQGASSALSSLLSIIPEGTSSEISIGTESTSFYDFHLANFFSSCPQLQNHKVSVRRVNPLRINRFRKAVHEIHKTDKSDPIIIAEFLRMGKNLPPPHNPSDPFAPLRSLTRFRVHLVNAIVREVNFLLSNLFLYLSEFASQKPLKISSKTSLALIEELSPEEIAEKSVEEIVVFLTRNGKGRFREPEKIAETIKYLTRESFRIRAELARSVHFVLINSIRNIRALKESLKEVSKAIREEMKAFPNTLVTVPGIGEILSSGIIAEIGDIGRFERDDQIAKLAGLVWGRFQSGGFEGEERRMIKSANKYLRYYICEAANSVRRNVPQFSNYYWKKYKESRSNHHKRALVLTARKFIRLVFNLLKEGKIFRPEGSSGEETNDS

SEQ ID NO: 217075 - protein, 460 aa, unidentified
MKLYLGGDASKGYTDWVIISETKKKLLDNFQLDDTFEGHNQLYNAIKCCVDKYPNVEIYAALESTGGYENNWLNTLKGYQKVFNIQVARVNPLAVFHDSKANMTRTITDAVSAIRIAEYQINHPDNIRYEQDTTWKSLRRHWNFVELQKKQRVQTINQLDALLYSANPMLLTYKTDKLSNWLLEVIIQYPTANLLAKANAEELSKIPYVSLSKAEEIIASVQKSIASSTDENTGVLIKQIALQIKMFDQTIESQMSLIKKEMVCPEIHILKTFKGIDTTSAIGLILEIGVVERFYSVKSICSFFGLNPKFKQSGDKIIGVRMSKLGSKNMRKILFNIAIGAIVHNPLIYEVYQRKLSEGMSKMAAIGVCMHKILRIIYGMLKNMKAFDAQVDKQNASRSSSKQDEKNQQKVAYIVKTRRFQEYDQNAPISIRQTKKRKEQTLSQCEITSQSAGSANSSQM

SEQ ID NO: 217076 - protein, 340 aa, unidentified
MLGVGLGKNVFSVVGLDASGAVAMRRKVRRETMIALAEKLPPCIVGMEACCGAHHLGRVFAAHGHTVPLMSPEYVRPYGKAQKNDDRDAEGIAEAATWPTMRFVELKSQDQLDMQTLHRSRDRLVGERTALINQLRAILLERGKVAPQGKRKLEQFLTVLMDEQDGADLSPRMIQLVADARVQWAELDRRIAAFDAEFARWVKENEEARRLTTIPGIGAIVASALVAAVGRAESFDRGRDLSAWLGIIPRQFTTGGKPKLLGISKRGNSYLRRQLIHGARAALPYVTERDTPLGRWAKALLGRAHHNVAVVAFANKLARIAWAVLRRGERFAAMGMPTAA

SEQ ID NO: 217077 - protein, 329 aa, unidentified
MFVGLDLHKNYLQTAVMDEQGRLLSQERIPNKDENIEEFASKRLRDSHAEIVIESSSTWYHVYELLSKNQNCHVVLSNPVKTKAIASAKVKTDKVDALTLANLLRTGYIPESYIPPRHIMDLREMVRYRTSLVRMRVEAKNKIHAILLQNGTRITQKPFTIGFVEELRRLGDYRIDGYLSIISSLSQQIQTVSNTIKREATEDESTRLLMTIPGVGYFSALLILSELGDINRFTDSHHLCSYAGLTPSTHSSGGVTYHGSITRTGSRYLRWILTECAKAHIRTRRDSQLTRFYTRLAKRRGGSKATVAAASKLLRIVYWVLKEKRPYHS

SEQ ID NO: 217078 - protein, 395 aa, unidentified
MNKIVHYIGLDVHKETIAVSIAPQNSTEVRRYGIIGGTLDAVDKLVKKLAQENAELRFAYEAGPCGFVLCRHLRHKAIHCEVIAPSLIPKKASDRVKTDRRDADQLARLFRAGELTAVHVPDQEDEAIRDLVRARTAAMTDQRQGRNRLKGFLLRLGFRYTGKSSWNDAHKRYLSGLVMPQGPQQIAFQEYIHAIDEATDRLERLTKAVEDALPGWKWEPVARALMSLRGVQVLTAMTLVAEVGDFSRFDDPRSLMHFFGLTPSEHTSSDKRVQGGITRCGNAHCRRVLTEAAWHYRLNPKVSETIQKRQEGQSKQVRLIAWKAQERLHKRFLRLSAKKKSVVAATAVARELVGFVWAIACQVKPAEQAAAPEIIRTCRGRVYRLDPEKKFQKHK

SEQ ID NO: 217079 - protein, 386 aa, unidentified
MENSSSQTRQCETFAESHNVTDIKFASFIGVDLHKTTVTLRAVDPSENIISSLTIHTKSVNKIEDWIIALPKPRWMAVEAVSFIEWFIDRYRDCVDRIDIADATELSRRKGKRRKTDRNDALDIAVRLVRGDCPLGFIADEPLMHLRKLGRHWRQLSKTLSKAKQCIKSMFHASNIHGPKLNGATAQSWLLAHGHLLKDAQRDAFANFTDIISLIERQRECLRRKIIFANRSKEFSARTTMLKSVPGIDEIWSCIIAAEVGPFNRFPNADALEFWAGLTPDNKESAGRTQSGKITKAGSATLRWAICEAGVALCRSDARQEAIRQRLIKKAGNAKANVAMGRRLLRTIYAMMRDGTLYECTEPTKFPNLKKAREARWNKRNKKEVA

SEQ ID NO: 217080 - protein, 347 aa, unidentified
MMIIGCDFHSRSQQIALLDTETGELVERRLEHESGEAKRFYEGLKEPALVGIETTGYTRWFAEMLAELGHELVVGEAGKIRAQRPRKQKHDRGDAQHLLELLVRGDFPRVWLPSPEERDVRVLVEHRHQLVELRTRAKNGLQAMALSYGLRRRGRLWSERGQEELKKLPLREGMERRREDLLRLLGQLNTWVKELDQRIEQEAARREDAQRLMTHPGVGAQTALATVLVLGPVERFPDARHLTSYLGLIPEEDSSAGRQRFGHLTKQGNRLMRFLLVEAAQTASRYDARLRRAYRRLAFRKGAAIAKVAVARKLAIRLFIMLRDQIDYAEFCRRGSHAGMLGDVALA

SEQ ID NO: 217081 - protein, 425 aa, unidentified
MSYRIAAVDVHKKMLAVVVTDIDGEGEYQFERRKFGATSGELHVLAQWLDQQQVEEVVMESTAQYWKPVWAALERYWKPARQKREGASKMAGTLHLCQAKSNRGPRGRKNDFADGERMIKRLIAQELILSFVPDPEQRLWRTVTRRKHQLTRTKVGFKNQLESLLEQAHIKLSSFVSDLLGLSARRMLKALADGETDPAVLAALADCRLRATPEQLRDALGACAELNGVFRRLLKMALEELELIETHIEKLEREAMDLMQEHQDAVQRVAEVPGFGLDSALQMIAEVGPQAATFDSEKQLSSWIGVCPGNEESAGEQHSTRSPKGNRQMRRLLDQAAQSAVKVKGSIFDVTFQRLLPRLGYQQAIWAIAHRLCRLLWLILHKGVRYEERGPAVSAKSKRTRESRMIRELRKLGYRVEKEPTPAHA

SEQ ID NO: 217082 - protein, 424 aa, unidentified
MRFIGLDVHRDFCEVAIAEAGAVRSAGRVKTEPAALLLFAQSLGADDQVALEATGNALGIARIIEPHVRRVVLANPKAVKGITRAGAKTDRIDARTLAQLLAGGFLPAVWLPDEQTRVLRRRISARAQLVRQRTRAKNQVHATLVRNLKGKPPVSDLFGVRGRRWLADQELPADEQETVAACLRQIAFLDGEIGQVERALAEQVLASAEMRRLLTLPGVNFVTAAALLAAVGAIGRFPTARQLVSYLGLDPRVNQSGSEPARHGRISKQGPGETRHVLVEAAWHASRTPGPLRAFHQRVAGRRGRNVATVAVARKLAVVAWHMLSRGEDYAFARPSLTREKLRRLELMTGAERQKGKRISVWVTREQHQLDKELAAQAELAYRRLAQDWQPTISKGTGAAPGRASRRPSSGQAARQETAPPPAL

SEQ ID NO: 217083 - protein, 342 aa, unidentified
MEEVSIIGLDLAKRRLQAHGARADGGVAFRKTLSRDKVLAFLAERPRCVVAMEGCGSAHHWGRAIGALGHEVRLIAPVYVKPFVRRQKNDAADAEAICEAAIRPTMRFVAVKTEEQQARAMLFRTRDLLVRQRTQLINALRGHLAEHGVVAPQGSANLKGLAEAIESDMTSLPLLVVELSRLLLDQLDGLSKKILELEKATVQEATHEATLRRLRTMPGVGPITAMAIGTFAPPMAVFRRGRDFAAWLGLVPRQHSTGGKPLLGKISKMGQRDIRRLLITGAMAVIRSASRKGRADGGWLHRMLARKPRMVLAIALANKMARAIWAMLTRGEDYRVPAAAAC

SEQ ID NO: 217084 - protein, 372 aa, unidentified
MDKVITEAFVGLDVSKDNYAVAIADTGRLGEVRSYGLIASTDIAIHQLVVKLSKKYSQLTFCYEAGPTGYGLYRQLTKMGQTCIVIAPSMTPTRPGDRIKTDRRDAIRLAQLLRAGELTEIWVPDEIHEAMRDLVRARLSAVEDLRRKRQMITSFLLKHSRTYPGKKTWTVRFQCWLQHQKFNYPAQGIALQEMVLAERHARERLERLTAAIEELVPDWSLGVVVEALQSLRGVALIGAVTFMTEVGDVRRFDHPRKLMSYLGLVPSEYSSGSRTQRGGITKAGNARVRRTLVEGAWAYKWPARVGSKQMYQHRKVFPEIQDIAWKAQSRLTARYRLLIRQGKKSTVAVTAIAREMVGFMWDIARRSMPKNA

SEQ ID NO: 217085 - protein, 355 aa, unidentified
MDSLKYVGLDVHQATISAAVLDAEGKLVMQLVLATRAAALLDFLHGLRGTIHLTFEEGTHSAWLYDLLVRRVTRVVVCDPRKNTLLKSGNKNDTIDARKLAELLRAGLLSPVYHGEKSMMTIQQLGRSYAALTEDTTRVMARLKALYRGQAIASVGKKVYGQRHRGEWLTQLGDPGLRRRAELLYQQLDALQTLRREARQELILESRKHEAVKHLRTVPFLGPIRAALLIGKVQTPHRFRTKRQFWAYCGLALETRSSADYRFEDGQLVRTRKPVFIRGLNWNHNHELKNLFKGAAITASGREGPFRIFYQGLLDKGILPAMARLTLARKIAAITLTIWKKGEAFDAEHLKTQAA

SEQ ID NO: 217086 - protein, 398 aa, unidentified
MATPSMTKTRANTNPSPGPIEPVGQITGGADTHLDFHLAAARDGLGRTLGTRRFPATLAGYAALHAWLLGFGPLAMVGIEGTGSYGAGLSTYLTEQGVRVVEVNRPNRQKRRRTGKSDPADAIAAAAAAQSGEATATPKLRHGPVESVRVLRILRKQLVSARTALLNTLHALLLTAPAPLRESLHGLSTTALLKACAALPAPARPAKGLRGNKRIDANTQLAQALRDNDTTVRAALAQLADIIAEHDAHIGQLDTDLAVLIGVIAPRTLGLFGLGPDTTGQLLTTLAQRPEGLHSEAAFARLSGVAPLDASSGKHENHRLSRAGDRQANAALYRITLTRLRYHQPSRDYLAGRLRPGTKHTKKHLIRCLKRYIAREIYPRLTADLAALNTHHQQALCA

SEQ ID NO: 217087 - protein, 350 aa, unidentified
MTMVGGLDVHRQQITFDYVDDDGLVHWGQIRPATRKTLRGWLAEHFRDGDADFALEGCTGWRYVSEELAAAGLGVHLGDPAETAALRGRKKRAKTDRADARLLRTLLVEGRFPESWIPPAHVVEVRTLGRLYCTLMDERRAWQQRIHAQVFHQGCPPIRALLTRAGREALAGAELSAAGRQYVDTALRRIDELSAEIDPLRTQLISFARRQPGCRALQRHYGVGWLCAVIIWAEIGDARRFSSSDQLVRFAGLDVTVYSSDAKRAPGHLSRQGSPELRWAAFEAAKSAARRGSPDHGYYHKLAAKKDGHNGKNPTLAVERKILRRCYHTLRELGDAALALPDIRPQEVAA

SEQ ID NO: 217088 - protein, 389 aa, unidentified
MSLDHPFDGPTAIRTHIAAIFVSLELSRSNWLVTSLSPGKGEKMSKHSVAAGDTAELLALFAELRRKAEARTGHSYPIVTIQEAGLDGFWLHRVLQQNGIESHVVDPASIATPRRRRRAKTDRLDGETLLRALLAYKRGEPRVCAMVVAPSPEEEDRRRLCRERRTLIEERITHVNRIKGLLFAQGISDYAPLRRDRRARLEALRTGDGRELPSHLKAQLGRALDRIELLVDQIKAVEAGQEALLAAARKPASEEAVPDPVTMLLALKGMGANFAAVLWSEAFYRQFANRRQVAAYAGLAATPWQSGGIRHEQGVSKAGNPRLRTTMIQLAWLWIRHQPQSALTRWFKERSQQGRKRAIVALARKLLVALWKYVTQGVVIEGAVMKPAA

SEQ ID NO: 217089 - protein, 343 aa, unidentified
MGRKIGVDLHKNSFRVCYYQNDEKYDFETYHVSVKGLEHFKKGLRKADELAVESTGNTGHFVRSIEGKVKRIRVVNPMQFKVISESVKKTDDEDALKIAKFLSKDMIPEVRMKTKQEGQLASLIGTRDKFVKLRTALKNKVHNILNANGIVTKTELLTSDKSLDKVLGNKLDEACLFELEIIVSEIRNLNEAIKKIDAQVKERGQKLDGFKGVTSITGIGDMSGTILLNTIGDVKYFRDEKALASYFGIVPRIRSSNETTHMGRITKMGNKIARTALVQSTLIAIRYSPYLRAFYDRLKAKKGSGKAIIATARKLLGIVYNTLKNNWVFEDFNNYKLAPQGAY

SEQ ID NO: 217090 - protein, 366 aa, unidentified
MTRYVGLDAHSKTCVFVIQDENGKIVREGSVPTTSEGLRTMRDRGDLDPGTMVALESGTMAFYVARRLTKLGLAPHVIHANEVRATALRPNQKSDRRDAIELCEGLRRQRYRTRVHVPSESIEQLRETLGRRRHFVRLKTMQVNAVKRLLRAAGLQPLGRALGSEAAWTKLLTAVAIDPVLHAFISSHRAVWRCAHEQIGVLEASLRVQQEPLQRDFDRLQTVPGVGPVVAMTVLAVLSDAHRFPTAKHAASYAGLVASTYDSGERVQHGRITRRGSSELRSMLCEAAHHAWRPNHPLNPYFASLCARRGYKMAVVAVAHRLCRIVYSMLRHGTDFDLNKLAVEKGHFEHRSVRQYRRKSSTAASA

SEQ ID NO: 217091 - protein, 314 aa, unidentified
MDHNNAVYGVDVSKAKLVIARYDMQTLVEIDNRAEAIAAWLAGLPKAAVVAMEATGIYHRLLAHLAHAAGMRVYVLNPQTLKHYAQAIGQRGKTDGCDARMIVRYAVHEQAKLRCWRPPAADRLSQLLERRHTLVGVRQTLAQSFCGLPMLKAASRSLLASLERTLGRLDILIRHELARVPGAAALYERLKSIVGIGPVVAAQLVAVFNTLSFARVGAFIAYTGLDPRPNDSGDRRGRRSLSKRGPPLLRCQLYNAGMAAANSKLFKPTYKQLRERGLQTTEAIVILARKLARIAFALYKSGGVFDAHKHLKIA

SEQ ID NO: 217092 - protein, 386 aa, unidentified
MAVIVGMDPHKRSATIEVVDERGQKMAVGRYGTDNAGYAEMLRACRSFPQRVWAVEGCNGIGRHLAHRLVHDGEVVLDVPAKLSAQVRVFASGNGRKSDPVDAHSVALAALRTPDLVRVEVDPDLVVMGMLADRRDELGRARTQTVNRLHRVLLELFPGGAKKFLSAAQARALVATIKPRDLVGKTRRRLAVELISELESTDKKSKAVDKDLHELVTARGSTLMDLHGIGPSGAARLLADVGDIRRFRDRNRFASWNGTAPLDASSGAQQRHRLSRAGNRRINRTLHIMAVVQLRNATEGRAYFDAKKAAGKTSMEAMRALKRRLSNVVHARMLADQKRREAAGPGGHSGTTLQSSVTGLTPDTGPSDKPQPEPAANPAYPRQTTP

SEQ ID NO: 217093 - protein, 342 aa, unidentified
MRGYHYVGLDVHKKSISYCVKKGDGTVVSEGKIGARRQDLDEWLKGLPKRWIGGMEATMFTGWVYDYLEPHAVELKVGHPLKMKAITAAKHKSDALDAGTISDLLRCNLFPECWMVPQEIRDLRRVLRYRNLLVREAVRMRNREAGILMECGLEYDKKRLHGKKYFRDLMESLDDDTPRTVKELLVLTRSNYEIFDSGQKRLVKELEQNEALRERIERLMSIPGVGVVTALTWALEIGDPNRFPTVKDAQSYCGLCAGRDESAGKSKRGPLSKQRNAHLQTMLVEAAKLAPRHNPQLAAAHQKEMERSSNPNRATLAVARKLVAYLLCVDKSGEKFELRDSA

SEQ ID NO: 217094 - protein, 431 aa, unidentified
MRTLEGIFNLPISGRKEMKRQENKACGADIHKRFLMACILARDGSKVLNRFEMTVEGILSFASWLKENKCKKVAVESTGNYWHLVYQVLDDEFEFILGNAFKTRRHSGAKTDKRDAEWLAELCLNNQIDPSRILPKEDRELRALTRARKGYVDFRSKAKARTIQELEACTIKLASELSDVFGKSGRHILQGLVDGRSADDIIESIPSKKVKKNKERIKQAIRAGLSTVSIFLIKSHIQLIDEVDKKLVQLDAQISRLLKARKRDIEIAMSIPGIGFISAAAILSEIGDYRNFASGKKLAAFSGLDPSVYESAGKRYTGKITKMGSKYLRRMIIECAHALSKTKARTQLKRFFLRVMARRGKNIATVALARKMLVVLHHLLINQEMYKDDGLAKPKKVKVRFSEESNYPSLDEMIEVLVGAGYFVKKDSLGG

SEQ ID NO: 217095 - protein, 366 aa, unidentified
MKISPVAIERIQIFKESQRTIGMDLGDRSSQYCILNEAGEVIWESKLPTTPKGIEEVFSRIPRSRMALETGTHSPWVSRQLTELGHEVIVAHARNVRLIGESSRKDDRLDARTLARLARIDSGLLSPVRHRSAKAQIHLTVIRARATLVSARTALVNAARGLTKSYGARLPKCGSEQMNREIAPGLSQELREALDPLLAEIESLNERIAEYDRRIEKVAKEAYPEAALLRQVKGVGPLIALTYVLTLDDPHRFRRSRDAGCFLGLRPGRRNSGMSEPQMHISKEGDRYLRTLLVQGAHYILGPFGQDSDLRRWGLKLAKRSGKNAKKRAVVAVARKLAVLLHKLWISGEDYEPLRNNNHKVVAAVA

SEQ ID NO: 217096 - protein, 342 aa, unidentified
MKIIGCDFHPSFQQIAMVDTETGEQTEKKLTPGEAVQFYSRLPGPVLVGMEACGNTLWFERVLAKLGHQLWLGDAGKIRALEVRKQKTDRRDAELLLQLLLEKRIPRIWVPSPEQRDLRQLLLHRHKLVGMRRQVKNQLQHLALNQGVQQKHKLWTAAGRKLLQELVLTGWTAQRREELLALLDDLDPRIGKLDQAVREAAEKDRVAQRLQTHPGVGPITALAYSLTLGDISRFAHSRQVVSYLGLNPAEHSSGGRQRLGSISKQGNPMLRSLLVEAGQSAARLVPELKRAYQRLKHRKHSSVAKVMVARKLAVRLYWMWRNQQPYSATRMQGSPSHPVAEV

SEQ ID NO: 217097 - protein, 477 aa, unidentified
MKNPQSDNLQAPDAKPKRRRRNKGMCLEDRPVLEANAAGIDVGAREMFVAVPPGRDENPVRVFATFTEDLERLTDWLEQCGVTTVALESTGVYWIPLFEILEQRGIRPCLVNARHMKNVPGRRTDWHECQWLQFLHSVGLLRAAFRPGQDVCAVRTVLRHRNELVSAASQHVQHMHKALTQMNLQIHHVISDITGLTGCAIVDAILAGQRDGAELAKLRDPHIKADTETIRKSLEGNWRPEHLFTLRQSRDLYRIYQQQIVNCDLEVEKMLREFEPRTDPTERPLPPDRKRYRGGSKRRKKNGHPHPKFDMRTETYKLFGVDVTQIPGLEENALPLFSEVGRDMSRWPSAAHFVSWLALCPDNDISGGKLLWRGARKVKNRAGHLFRMAAFSLHHSRTPLGNYLRRMKAKLGPEAATMATAHKIAVIFYTMVKNQVEYDETIWDARDAQREKRLEAKLKRQAKQLGYELVPIEPKAA

SEQ ID NO: 217098 - protein, 359 aa, unidentified
MEQKRFVGIDLGKRTYEIKFIHSNGKVTGTNGLTSPKGRKELYKKLNQTDRVAIEVCSLAMVMVKEIRKEVGCEVVLLNPSQIALIYRSVKKNDKEDALKLARLVQKFSNEELPSVELPSEHEENLRQILTEMRQLKHDRTKEINRMHAIFLESGITEITKKDLDNNNNRKECVKMLNGLFLLQAERNIKKLELIEKQIEEVEGLLDKEIEGDRNIEKLEEIPGVGKQLASAFVAFLGDGSRFPNVGAIGAATGLVPRLDMSSTICRLGHITKCGNRNLRSLLILAAWSHVRSKGSGALREKYLYMTQVQSKGKKIAIVAVARKLAELMYTLLKTGTSYENRPSTSISQLAVEALSKAS

SEQ ID NO: 217099 - protein, 367 aa, unidentified
MEKKIAYVGIDYHSETLSLAVMVDGEKDFLSSLTMKNNDKNILKYLKKLSKEFDIKACYEASCNGYSFQRKMKKWGFHCDVIAPSLIPKKPGDKRKNDYRDARHLTQLYANGQLTTVHPPSEEQESIRSIVRCRLSLKENEKSVKLQINSFVLSHGFHWSGSRWTVKHRQWLNALQLRDDFSRKVLDEHLGHLEYLSARINHLDNLIREIAESEVYAPSVKKLKAFKGLDILSAMILITEITDFRRFPNPRSLMAYLGLIPSEDSSGGRQKGGCITKTGNHRCRTQLIESVQHSMKKPIISYKMKHNLEQIDPASASIAIKCMHRLHKRFWALVMKGKSRNKAVTAVAREFVGFIWAMMTQNEPAAI

SEQ ID NO: 217100 - protein, 410 aa, unidentified
MEAIIERVAGVDVGQATVVATVLVGAAHERARKETRAFRTVTRELVEMREWCLAKGVTHVAMEGTGVYWRPVYELLEDAFEMILGNAQHIKNVPGRKTDVKDSEWLADLARHGLIAKSFVPPKPLRQLRELLRYRRKLMESRTAERNRLLKLLETANIKLASVVTDVFGVSGRLMLDALIEGTATPATMAALAKGVLRKKTRDLEHALEGRVEAHHRFLLGLQLRRLDQADADLAVLDARIDEALTPYQPQCQLLQQIPGVNRVVAAVVVAELGTDMGVFRSAQHAAAWAGVCPGNNESAGKHKGAGARKGNVHLRTALVEAAVAASHKKGSYLRDKFYRLRARRGTKRAAMAIGHKILIAAYHMLATGLPYRDLGATYLDGVEKRRTTRNLVRRLERLGYEVTLGTKAA

SEQ ID NO: 217101 - protein, 319 aa, unidentified
MAQNNLVVAGIDVAKDKVDACVRTLASRPTFSSSTPGRRQLVAWLRKHRVTKVVMEASGGYEREWAKTLRQEGIEVRIVDPKRVRNFALSAGRLAKNDAIDAEMIAWFAETFNEGPSQIYDVDREELQGLVKARLGLINLRTRLEAQSEHAAAGLVQKAHARLLKGLDNEIAKLEAGISAKVKSTPDLAERAEIIDSVPGLGGTSATNLVAGMPELGQVSDKVAAALIGAAPYDDDSGKRRGERHVKAGRRWVRNAIYMPCVGAATLNNRVLKTYYQRLIAKGKAPKVAIIACMRKLIVILNTMLARRQKWDPLRHAVN

SEQ ID NO: 217102 - protein, 385 aa, unidentified
MSELNDLSRSLTSLEQDKTIIAVIEMSQSSWLVAGIVPGLERHPLKKLEPSEEELVRLLIRWRTEATKNGHTITRIAVAFEAGRDGFWLARWLRARDIETYVIHPTSVAVSREHRRAKTDRLDTGLLKRVFIGWLRGEPDHCHMAAIPTLAEEDAKRPNREREGLVRERTRIVNRMKSCLVRFGIRNFKPTLRKAPARLATLGTPEGVPLPPNTLLELGRDMARLRFVMDQIKEVEEARAERLEQAPQEKTHAMVRLIARVIGVGIETADMLVHEILSRQLRDRRAVARYAGLTGAPDESGNKRREKGLAKAGNARVRRGMIQLAWRFLVFQKDSALARWYQTRTESAGKKRKTMIVALARKLLIALWRLVTIGEVPAGVVLRAA

SEQ ID NO: 217103 - protein, 358 aa, unidentified
MAGKVTETAVVGGVDTHKDLHVAAVVDQNNKVLGTQFFSTIRQGYRQMLAWMTSFGALKRIGVECTGTYGSGLLRYLQNAGLDVLEVTAPDRMERRKRGKSDTIDAECAAHAAFSRIRTVTPKTRNGMIESLRVLKTCRKTAISARRVALQIIHSNIISAPDELREQLRNMTRMQLIRTLGSWRPDASEYRNVTNVYRISLKSLARRYLELHDEIADLDVMIAAIVDELAPELIKRNAIGYESASQLLITAGDNPQRLRSESGFAALCGVSPVPVSSGKTNRYRLNRGGDRAANSALHIIAIGRLRTDDKTKEYVARRVAEGHTKMEAIRCLKRYISREVYTLLRNQNRQLNSIPITV

SEQ ID NO: 217104 - protein, 341 aa, unidentified
MKVSTLGIDLAKNVFQLHGVDHEGHTILRKKLTRAKFVQFVIQLEPCLIGMEACSSSHHFARLFTRYGHEVKLIPPQYVKPYVKTNKTDAADAEAICEAVTRPNMRFVQIKTEEQQAVLALHTERGILIRERIACSNSLRATLAEFGITIAAGQSHLTHELPAILEDDENGLSPFVRTSIYRQSKHIRELEEQVKQVEQALASWYRTQEACQRMAKIPGVGMLTATYVIAAVGNARQFSTAKQFASWLGLTPKEHSSGGKQQLGGISKRGDGYFRYMLVHGARALTAWVNRNGAVEKNAWLQGLLERKHCNVAVVAMAAKTARIMWSMLTHNTEYQPRQLA

SEQ ID NO: 217105 - protein, 416 aa, unidentified
MKIVRPICCGMDVHKNIIVATIGITNKKTRITEYIQETFSTLNPDLLNLKQWLINHKCFDACMESTGKYWIPVFNILEDEINIYLTHPKYVKAIKGKKTDKKDSKWICDLFKHDLIKFSFIPPKEIRALREVSRYRYKLVGMRSSERNRYQNCMTVSNIGIGSVFSDPFGKSAQAIMKEVLESDIIEDEKILKCIHGSCKNKDKILDSIKHCNIETDQRFKMNESMTHMEELQVHINNCEIEIMKRAAPMFDRFMHITQLPGISTLSAILIISEIGVDMKQFESDKQLACWAGLAPANNESANKKKSVRISKAGQYLKPLLVQCALGAIKDKEGYFGIKYSRIKKRRGHKKAIIAIARMMLVSIYHMILTGETFNPSDYESFKNPKPPIKQQVLTEESAIEFLKKSGFDVSKLTKP

SEQ ID NO: 217106 - protein, 350 aa, unidentified
MTIVENRTITVTGGVDTHLDFHVAAAIDSNGGVLGVETFDTTTGGYRHLVGWLAGFGTISLVGVEGTGSYGAGLTRHLTGKGIRVVEVDCPNRRARHRAGKTDAIDAIAAARAALTGTATGVPKSRTGNIEAIRILTIARRSAANEWIAVVSQIRHVTFTAPDEIRSRFMGMTPITLVRTTAALKPRRTDADIVRYTTLSSLRELGRRALFLREQKMRLNAEMRPLIREVAPSLLEVYGVGFDVAAKLLIAVGDNPHRIRSEAAFAHLCGVAPIPASSGKIQRHRLNRGGNRQANSALYRIMLTRLSSDPRTKAYVAKRTAEGKTMGEIARILKRYIAREVYPHLASTIG

SEQ ID NO: 217107 - protein, 337 aa, unidentified
MGSYVGIDLHRQRSVIVVLDDDGNRVSWSRIDNSAVNLAREVTAAGPGAEVAMEACWGWYWAADVIAECGVRLHLAHPLGIAGYANRRVKNDIRDATLLADLLRMGRLPEAWVAPPAVRELREEVRYRHKLSRLQTGLKCQVHQVLGKEGAIPETKGIWWSGGQRWLDELQLADVYLNRIGSLRDLIELHDREIHQSDARIHRVLRGHPGYEAIQQIAGVGRVLGAVFVAEIGDVHRFTDPRRLCSWAGLTPRLRESDAHSHRGHITKMECGGAGLARRFCLSFGGDDDNRWRYRHPSGPADLRLCRSGHGRGPRRAGDAGAPRPVARLVGAVPRGR

SEQ ID NO: 217108 - protein, 324 aa, unidentified
MELSAIGIDVSKETLDVNVFTGGKPLGKQFANTEQGFGQLIGWLAHRRLGRVHACLEATGRHSLGVALALHAAGHVVSIVNPAQIRDFARTRLGRNKSDAVDAGHIREYGTMFRPPAWRPPSPALRRLCELQTMRAGFVASRVEWQNRAGSLGGEAAARALAEATIAHFAAQIAAVDAAIAETIDTDDDLRGKHDLLLSIDGVGQTLAALVLAELPGSDVITSSAQAVAYAGLNPRQFQSGSSINRPTRISKVGNATLRGGLFMPAMVAIRHNPAVAALAARLRAKGRLTPKQILIAAMRKLLVICFGVLKSGRPFDAALAMPA

SEQ ID NO: 217109 - protein, 428 aa, unidentified
MAKAKAQSVIQTDDDTLYYERCAGIDVHKDLLVVCLRIGRKTESREHGTTTGEIREMVRWLKENGCQMVAMESTGSYWKPLYNIFEQEELPAMVVNAYHIKNVPGRKTDWNDAFWIAKCLAQGLLKPSFVPNREQRELRDMTRFRKSQIEERSRNINRLQKFLEGANIKLGSWLSDVEGKSATALLELIIGKPDFTIDEVKARMHGKMKATPEEIFAAIDGYITPTQRRFFAHVMNIIREQTSLIEITDDMIKSSLNDEQKAAVAALDVIPGIGVVSAEQIVAETGTDMSNFRNQHAFSNWIGVAPGNNESAGKRKSGKTTYGNKTLKSTLTQCAKSAVKNKRTFFSAQYSRIVSHRGKNRATMAVAHSMAIAIYFVLQGAAFNDLGADYYNQFNREKKINSHFKQLSKLGVNIPDDALRELLQLPSA

SEQ ID NO: 217110 - protein, 402 aa, unidentified
MNAVGIDVSKSKSVVAIMRPFGEIVSTPFEIKHTASDIHSLIELINSVEGESRIVMEHTGRYYEVLAHQLLEANLFVSAINPKLIKDFDNDSLRKVKSDKADAVKIARYALDKWQNLKQYNVMNELRNQLKTMNRQFGFYMKHKTAMKNNLIGILDQTYPGVNTYFDSPARSDGSQKWVDFASTYWHVDCIRKMSLNAFIDHYQNWCKRKKYNFSQSKAEEIYGKAKELVPVLPKDAITKLIIKQAVDQLNSASTTVESLRTLMNETASKLPEYPVVMAMKGVGTSLGPQLMAEIGNVSRFTHKSAITAFAGVDPGVNESGTYEQKSVPTSKRGSSDLRKTLFQVMDALIKTKPQDDPVYRFLDKKRAQGKPYYVYMTAGANKFLRIYYGRVKEYLASLPES

SEQ ID NO: 217111 - protein, 410 aa, unidentified
MEVLYQRCAGLDVHKKTVVAAVRLATENRLVTEVKTFATTTAGLLALSDWLAENGCTHAAMEATGVYWRPVWHVLSDGEIELILANAAHVKNVPGRKTDVSDAAWLAELLAHGLIRASFVPDGQTQELRALLRTRKQLVRERTRHTQRIHKTLEDANIKIDGALSDILGKSGRAMLEAMIAGESDPVRLAALAHRNVKASQGELEQALRGRVTAHHRFLLKLHLGQVDHLDAAIATIDGEVEASLAPFRTAVELVSTIPGVSALSAEMIISEIGLDMGRFPTVGHLISWAGLSPRNDQSAGKRRSTRMRKGAQWLKTTLVQCAWAAKNKKSSYLQAQFRRLLSRRGPQKAICAVAASILTAAYHMLKDGTCYQDLGPEHFNRRSKTTHSQRLVRQLQRLGYAVEIKPIAA

SEQ ID NO: 217112 - protein, 420 aa, unidentified
MKAFKTSDFAALIGIDWADQKHDICECPLHNKKISLSVISSQPKSIYSWAIDLKKRYPNQKVAIACELKKGPLIYALEQFDHIVIFPLNPATVAKYRKAFAQSGAKDDPSDAFIQFEMLDRHMDRLRPIEPEGADIRSLRLLSEYRRKLVQDRVDMTNRMSDLLKCYYPQVLDWFKEKDTLIFCNFLAKWPSLVEAKRARKSTFIKFFNENKSRYNAVNERRIAEIKSAFPLTEDLGIIEPSRIMIQLLVPQLRSLIESIERMDNEIKTRYKQQNDKNIFDSFPGAGPQLAPRLLVAFGSNRSRYQDASEIQKYAGVAPVLERSGQKSWVHWRHSCPKFLRQTFVEWAGQSVRFSFWAKAYYQQQIEKGKPHNTAIRSLAFKWIRIAFRCWKTYTPYDESKYLETLKERGSPLLAYAVKS

SEQ ID NO: 217113 - protein, 346 aa, unidentified
MSYSTTVGVDLAKNVIQVSVVNGRGKELSNRSLSRKKFAEFLGKQKPSLVAFESCATAHYWARAAERHGHEARIIPAKAVAPFRQGHKTDSNDALAVAEAARRPNIKEAPMKTTEQQGLQAIHRSRELLIQECTALSNHLRGILLEFGIAIPQGFASLLRTLPEVLEDGDNELPDLYRPTLHRMYSRLLELREDIEAMTGEVASLVKDHPVCSKLTALEGIGPISALLLYATMGSGKAFSGSREFAAYLGLAPRQYSSGSKTNIVGLSKKVGNSRLRSVLILGARAYTYRMKEPKGSKDKWLKAIIERNGVSRAAIALANKNVRTAWAMVTQGTQYQRRPQLEMAA

SEQ ID NO: 217114 - protein, 340 aa, unidentified
MKLYTGLDLHSSSSYLGIIDESGKRVFKKKLPNDPGVILDTLAPYKNDIIGIVVESTYNWYWLVDLLMAEGYTLHLANPTAIQKYSGLKYSDDQHDAFWLAEMLRLDILPEGYIYPKEDRPIRDLLRKRGHLMKLRTSLVISLQNIINRNNGFKLKGSKIKSLMIDHVAPFLEANEDLALAGKVSKDSIDFLTRQIKAIEANVEGEIELREPYAQLLTIFGIGKILGLTIMLETGPISRFDKVGNYVSYCRKVSSKWISNDKGKGKGNKKNGNKYLAWAFSEAAELARRFHPEARAYYNRKMKKPNFMIAHAALAHKLARAAYYVMRDQIPFIPEKLFES

SEQ ID NO: 217115 - protein, 385 aa, unidentified
MAHRPEAIEQWARALHQRFGGPIAVCLEMAKGPLVHALQRYGFLVLFPVNPATLAKYREAFVPSRAKDDPSDAEIALELLVHHRDKLQALKAQSAPMRALSTLVEQRRNLVGDKTRITNRLCSTLKEYFPQALDWFEDRDTVLFCDFLQRWPSLKHVKRARQTTLRSFFFAHNLRRSELIEERICAIRCASALTDDVAVIGPCQLLVQVLVAQLRVTVQAIDAFDAEITELAKGLPDYPLFAALPGAGAILAPRLLVAFGEQRERYASAAQLQQYAGVAPVLERSGNKCWVHWRMACPTFLRQTFVEWAGSTIPRSFWASAYYQRQRDKGCSHQAALRALAYKWIRIVYRCWQSHTPYDESAYLQALKRRGSPLLAAVSAAPRSA

SEQ ID NO: 217116 - protein, 367 aa, unidentified
MDKCIMLGIDVHDAKLVIKMASATDQPETLRVENTPSGRRTLWQQLHERARRVGSARVVMAYEASCQGFGLYDDATDEGFECYVLAPTKIPRSPAHRRRKTDERDAQGILEIMRGHVLAGNPLPSVWIPDPQTREDREIVRSRLDVAEKITALKAQVQTLLKRQSTRRPKGTGQGWTKGFEAWLQALTGRQSPLPHGARVALATLLRQRAALDEETVRLDAEVAALAEQPRYAEPARALVGVKGVGLLTAMVVLTELGDLRRFANRKQIGAYLGLVPSSDETGERDERKGHITHQGPWRVRRVLCQCTWARVRTDPGDKAVYARIAARNPKHKKIAVVAMMRRLAVLLWHIGRTAQERYGCYADAAA

SEQ ID NO: 217117 - protein, 399 aa, unidentified
MKTYILRATQTVEPQKSNPHLPPPLLAGRVLFIGLDVHNDSIAVSLAPADSTEVRRYGIIGGEHDDVLKLVKKLQAAHPGTVLKFCYEAGPRGFALCRCLRSHGLECILVCPSKVPRKPGERVKTDRRDADQLARLYRAGELTGLYVPEPVDEAMRDLIRARYQVGKAQHRARQQLKMYLLRHNIRYAGNSSWTPAHLRYLAQIKMPFAVQQIVFQEMLEVISEATGRLERYDQEIERALPGWRWEPVVRSLMSLRGLALLHAATLVAELGDFHRFEHPGQLMGYLGLVPSEHTTGTDRQQGGITKMGNGPARRALVEAAWQYRAPARLSPHLKKRQEGLPKAITDIAWEAQRRLHHRYQHLTRVGKKKSQVAVTAVARELSGFVWAIARQVKPHDSKP

SEQ ID NO: 217118 - protein, 354 aa, unidentified
MKKLVKQIVGIDVAQKELVVCLGRMTDEWCPELFAYKSFTNNVKGFNALENWVKKLANPEVPVRFVMEATGVYHESLAYYLFGQGYAISVVLPNKISNYFRTLEVKTITDQTASQAIALFGLERKLEDWKRPNVVFKRLRQLVRERDQLVQERTIVKNQLHAEKSEAEPGSSSMMRMKKRITLLDKQEMEIKEEIQSIVKKDTSTNDAVKLISTIPGIGLLTAVTVLSETNGFELIRNKRQLTSYAGLDVVQKQSGTSVQGKPRISKKGNKYLRKAMYLPALSVIRCDERFKAIFTRVVVKKGIKMKAGVAVQRKLLEMTYTIFKTNQPYDKDYFKKEMEKQSIKEDKIRAVIN

SEQ ID NO: 217119 - protein, 343 aa, unidentified
MKLSRVGVDLAKNVYQLHGVDRSGKTVWKRRLKRHQWIKVLLDTAGPECEIGMEACAGAHHWGRELQSRGYTVKLIPPQFVKPYVKSNKSDAKDAEAICEAMSRPNMRFVTVKRVEQQDIQATHRIRAELMTQRTAKANQIRGLVAEYGLVAPKHLSSLRAAIPCWLEDAENGLTGDFRTLLQGVWTDLLLLDDRVDEMDQVIKRLADNNEDCVRLQQLRGVGPMTSTAMVATVGDARQYPKSRQMAAAIGITPKQHSSGDRDRLLGISKRGDVYLRTLMIHGARAVVARAKHKDDRLSRWVTNIANKKHPNVAAVALANKTARMAWAMLRNETDYDPDFALR

SEQ ID NO: 217120 - protein, 309 aa, unidentified
MDIIVGIDVSKERLDVAVSPSGASFCVGNDHDGIEELTRRLKAQKADLVALEATGGFETLAVAKLAACDICVIVVNPAQVRAYANAIGRRAKTDAIDAALIAAFVTATKPQIRPLRDAQTQALSALVDRRRQIVQMIVAEENRLRMALEKTTRKSIKRLLDALRREMESIDADMDDHIRKSPLWRVREALLTSVPGVGRATARTLLAEMPELGSLDRRQIASLAGLAPWTRQSGKWKGKSFIGGGRSKVRAVLFMAALVASRHNPFLKAFRDRLVASGKPKIVAIVATMRKLLTILNAIIRENKPWQNA

SEQ ID NO: 217121 - protein, 358 aa, unidentified
MCKAKQTHTKGAVMKTYYIGVDLHCNNTEIAIETKGHIEARYSLPTSISAIRKVLDSLQGKKYLAVEETTLAGWFYRNLHPYVDQLTVCDPRRNHLIAADGDTDDKIDAGKLAALLRGGFLRPVHHSQDDRRIDLKQWISLYHRCVQNRSRQICRMRANARSFGLEIPTRVIKNAQHRPTWLQNQNLPALARQLQTLWIGLDATTRQIELARKYLQQFARSEPVIKQWNQLPGIGTVRALTLLAYLDTPYRFPSKSKLWKYCGIGLERSASGADKFGNPKPARLRMSSRRNGILKNTILGAAHTAICAQENPFKTHYERMVKNGITPANARHTLARKLLTVIWGIWKSHSIYDLTRLG

SEQ ID NO: 217122 - protein, 349 aa, unidentified
MLTDEVDYVVGVDTHRDQHTLAVVASPTGAVVAQCSIATRGRGYAQALRIAQDYAAAARVWAVEGAGHYGAGLARYLSGHGEIVLEAGRSPRDERRLRGKDDGLDAIRAARAALGSDQLALPRAGQRREALRLLLLARRGAVDVRRQALVQLRSVIVTAPERLRRELRVLPQQRLIERCSRLRRSASRAPDELAATLVLRTLARRVQAATAEAAELEAEIAAHVRALAAPLLDEPGVGPIVAAQLIVAWSHSGRIRSEAAFARLAGAAPIPASSGQTSRHRLSRGGDRQLNRALHTVILHRRLHDPVTKDYIARRVAEGKTRRDAVRLLKRYLARHLYRLLQNQEPLMA

SEQ ID NO: 217123 - protein, 355 aa, unidentified
MSQEKYVGMDVHQATISVAVTDSRGKLIMESILETKAATILEFLQGLHGSLSVTFEEGTSAAWLHDLLKPHVTRLVVCDPRKNALLKDGSKSDRIDARKLAELLRGNQLTSVYHGEHGMRTLKELGRSYVTITKDLVRVMSRIKALYRSWAIPCSGTSVYAPRHRAEWLDKIAEPGVRLRAERFYQQLDLLQPVRQQARHDLLTESRKHHAVKLLHQIPSIGPIRAALLVAQLQTPHRFRTKRQLWAYSGFALETHDSGEYRYVRGKLQRNRERMTVRGLSNSHNPDVKNLFKGAAISASTHPGPLYDFYVALLEKGMRPTMARLTLARKIASITLTIWKKGVDFDATQLHRQEA

SEQ ID NO: 217124 - protein, 389 aa, unidentified
MHISTDRSEAPTAIRTNLCAIFVSLELSRSSWLITSLSPGNGEKLSKHAVRGGDVTGLLARLSWLREKALSRTERHFPIIVIQEAGLDGFWLHRVLQAEGIESHVVDPASIATSRRRRRAKTDRIDGEAVVRTLLAYKRGEPRVCAMVKAPSRKEEDRRRITRERKVLTGERVSHVNRIKGLLFAQGIFGYEPLRRDRRARLEERRTGDGRALPAHLKAQICRELDRLELILEQVKTVETERAALLAEAEDAATPTSAAMLLDVKGIGPEFAAMLWSEGLFRHFDNRRQVAAYAGLAQTPWQSGSVDREQGVSKSGNPRLRTTMVQLAWLWLRHQPQSALALWFRGRVEQNGGRMRKTMIVALARKLLVALWKYVTAGIVIEGVVMKAS

SEQ ID NO: 217125 - protein, 405 aa, unidentified
MNEFIANGVKGAEPVTGLVGVMQALEGAGNVYGAYIGLDVHKETIAVAVAECGRDAPEYYGEIANTPKKVARLIERLSARFGGERLLWVYEAGPCGYGLYRQIVASGHDCEVVAPSLIPQKAGERRKSDRRDALGLARLSRAGELTGVWVPAPEQEAMRDLTRAREDMKKLELKARQTLGAFLLRHGRVYTGKSRWTQAHFRWLETVSFDSPVQQIVLQEYIEAVKAAQRQVGGLEQQMRAALPQWSLAPVVEGLMALRGISLISAMTVLAELGDISRFDSPRQLMAYLGLVPSEHSSGPRRRQGGITKAGNAHVRRILAEASWNYRFPARKTRDIEKRAEKTSEAVQAIAWEAQKRLCGRYQHLLRAGKIKQQVVTAVGRELAGFIWAIACEVMGKDHGSRATA

SEQ ID NO: 217126 - protein, 396 aa, unidentified
MPEIWAGVDIGKEHHHCVVINADGERLLSRRVLNDETELLHLIGDVLAISADVLWAVDLNHGGAALLICLLLSHDQPMAYLTGLAVHRASATYKGEGKTDAKDAFVIADQARVRRDLGLLRPGDEIAVDLRTLTNRRLDVVFDRTRQINRLRAQLLEIFPALERSLDLVNKGPVMLLTGYQTPAAIRRAGVQRIETWLKNRKVRGAAALAKTVVEAARAQMTALPGEKLAAAMVVRLAKGVMALDEEIVELDALIEATFREHPHAEVIRSLPGMGPKLGAEFIAATGGDMDAFGSADRLAGFAGLAPRPRDSGRVSGNLRRPRRYHRGLLRSMYLSAMVSITTCPASKAYYQRKRSEGKGHKQALLALARRRLNVLWAMIRDGQCYQGSPPVTTAA

SEQ ID NO: 217127 - protein, 394 aa, unidentified
MKLIGIDIGKNKHFFCVMDQQTGEIISQPVSFSNDKEGFDFLVQKIKSYPKDSILIGMEDTGHYHFALLKYLLELQYTVALINPKTTDFNRKMQGGITKNDKLDTINICDVLDTPERKKQYRITKVNSFDLYEQKQLTRHHHNLKEEENVYKNRLQKCIDIVFPEFNKLFNSKYGIVYMNILKMFGSAENIANTDIRTIRKCFEIEGRGNRISLTPERLKECAISSIGISSSAEVIQIKHLTAQIELIEEQLTEIDKKIEEFSIQNNSPILSIPGISHFSGTSILAELGDISNYSKPSQIIKFAGVAPLHYESSQFNAQHTAITKKGSKYLRKTLYQIILPVIRHNPVFNKYYQLKISQGKGHRCAQGHCVRKLLRIIYHLLKTNQQFDPQLLR

SEQ ID NO: 217128 - protein, 325 aa, unidentified
MSISMIGLDTAKSVFQIHALNNAGKVEMKRKLQRGELIPFFEKQEACTVVMEACGAAHHWGRILSGLGHDVNLIAPEAVKPFVKKGKKTDAADAAAICEAALRPEVKFVPVKRLEQQGVLALHSARSLLVKQETMLANAMRGLATEFGLTVPKGIGRLDELMALVNADEAFPELARQVFTGLRDHCRATAQRIATLEAGIVVHARRDDTARRLAAIPGIGPLTASLIAVTVVDIGVFKSARHFAAWLGLVPRQYSTGGKSRLGRITKAGNREIRRLLVLGATSMVYRAPRWNSAAGVWTRRLLERRPVRLVTVALANKMARIAWP

SEQ ID NO: 217129 - protein, 356 aa, unidentified
MVNSNKLDFTGQPIYIGLDVHKKSWSVSIHSAICEHKTFRQPSEVNVLVNYLKRNFPGASYHAVYEAGYSGFWIHDQLREKGVACTVANPADVPTKEKERRTKRDRIDCRKLARSLRAGEIEGIYVPCRPKLEDRSLVRTRQSMVRKQTRCKNQIKGILFFYGIPLPEDCTERHWSRKFVRWLERIHMERASGDVALKIHLEELKHLRQIIAALDREVRVLARTEEYAAQVRLLRTIPGISTLTAMILLTELQDISRFPSLDELACYVGLIPDTHESGETEHTGSITKRRHAPLRASLVEASWTAVRKDPALLMTFQKSCKRMRKTRAIVKIARKLLNRVRYVLKNQRPYILGVVQ

SEQ ID NO: 217130 - protein, 344 aa, unidentified
MQHYVGLDVSVKETSVCIVDKAGKVIREVKVATKPAEILAVLTEEALAIERIGLEAGPLSQWLYGALAEAGLPVICVETRHMKAALSAQINKSDRNDARGIAQMMRVGLYRPVHVKTLASQKRRMLLTSRQLLQAKALDIENDLRGTLRNFGLKVGMVGTVKFEARIRELVADHPDLAAIVEPLLIARRVLREQLGVLHRQLLEIVRHDEVCCRLMTTPGVGPVVALTFRATVDVPSRFTSSKAVGAAFGLTPRRQQSGEIDRMGGISKCGDALMRETLFEAALVLMTHRGKWSWLKAWGMKIARHRGMKGAIVAVARRLAVIMHRMWVDGTEFRWTREEAAAT

SEQ ID NO: 217131 - protein, 406 aa, unidentified
MSIHDLSDAVVVAVDVGKNVFAVSATDGHRKKLVGPLEVPMTRRGLEGAVARIGEVLPAMAPVWVGIEAAGHYHLPLLADSCWPEGWQLLQLNPAHVAEQRRIQGRRRIKTDALDLEAITELVLAGRGTPFAGRTDALEELRALAGHRARRIQARTAVKNQLQGQLDRTFPGLSLALADVLGTHVGRLITEHFTDPARLAALGEARFIRFAANRGVHVTRPVAARLVAAARDALPQQGAAAARGVLAADLALLDVLEAQAAAAEDALAALLPATPFQILSTVPGWGTVRAANYGAALGDPSRWPGAAQVYRASGLSPAQYESAGRRRDGTISREGSVPLRRALVDLGLGLWLNEPAAKAYGAALRVRGKKGKVIVCAMAHRANRIAYALVRDQAPYDPARWPLQEA

SEQ ID NO: 217132 - protein, 312 aa, unidentified
METLIYVGIDVSKDRLDVHLRPLGESFTCGQSAPEIDGLVVRLQALPVTAIALEATGGYESIVVAALSVAGLPVVVLNPAQVRSFANALGKHAKTDEIDASVIAHFAEAVRPEIRALPDDSTKSLADLVARRRQIVDMITAEKLRLGSAPKLVQKSIKRLIKALQRELDSVNDDIDGMIKASPAWRYKENLLITAPGIGNTTARILLAELPELGRLNRRQIAALAGLAPFTRQSGQWRGKSFIGGGRKSVRCALFVSALSAKTHNKTFKTFFENLVKAGKPKMVAMIAVARKLLTQINAMIRDNRPWTEQKT

SEQ ID NO: 217133 - protein, 436 aa, unidentified
MKQIVIGVDPHKLSATIEVVDQHERVLGSGRFATDKAGYAAMVGYVAQWSRPTWAVEGSNGAGRSLAQRLVADGEHVVDVPAKLAARVRLLDTGHGRKTDAHDAHAVAAAAVRAKKLRVLSENPELESLRMIVDRRDELTRQRVQTVNRLQRLLAELIPGTSKKDITVLQAKAKIASVRPRDLVGKTQRRIAAEELADLVAVEKKIKTLTKDLKTIVEASGSSLTTLPGVGTIVAARVLAEVGDVNRFADRNRFASWTGTAPLEASSGEQVRHRLSRAGNRRMNHMLHIAATTQIRLDTAGRAYYRRKIAAGKTRMEAMRCLKRRISDAVFRQLLADARADANRPVGAGPGGHCGASQESSAVDLPPHIDTSDQPLPGPAHPTLPGTKPHANPCAASAPRPSRRRAGAVKVERPTGRTTLTATSAGAHSAAPKPPS

SEQ ID NO: 217134 - protein, 370 aa, unidentified
MSSVARPAGPVHVGMDTSKNTIMAAVLWPGEESPVTERILSEEPSVRRLLDRLADKAGGREWLRCCYEAGPGGYDLYRLLDSMGIACDVVAPSLIPKGSGDRVKTDKRDSRRLARLHRAGELTAVRVPSRDEEAVRDLARARTALLEDRKTAQKRLTAILMRHGRTWRGPTYWTRAHRDWIAAQKFAEPALATAVSCYRAALQTRETELAAIEAELLPWVSREPLAGPAARLMCYRGIAELTALTLAAEVVDWRRFPAARAFMGFTGLCPAEASSGDTARRGHITKAGPQTVRTALVESALAYRHPAAIGAVLRRRQRDASPDTLARSWKAQRRLHDRYVHLVSHGKTPPEAVTAVARELAGFTWAEMTS

SEQ ID NO: 217135 - protein, 316 aa, unidentified
MSESTSFVGIDVSKNVLDVHVLCTGEHWQVGNDQAGCASLVERLKPLGKTMLVVMEATNVFWRMAAAALAGAGLACAVVNPRQVRDFAKSMGILAKTDAIDAQVLAQFAQRVKPPVRALPDAQCQVAAELLARRAQLMGMRVAEKNRLGTANAKKVRKDIEATIAFLEKRLAALDEEIDRWLKSTPIDQSRADLLQSFTGIGQNAARSLLITLPELGRLSGKQIGALAGLAPFAKDSGGKRGQRHIAGGRAVVRAALYMPALSAITHNPVIRALYQRLVQAGKHHYVAITACMRKMLVILNAMLRSGKPWKASHHA

SEQ ID NO: 217136 - protein, 322 aa, unidentified
MNKYKETFGVDISKDVFDVHGSVVGHDQYRNDPSGFKKFLDDLPKNSLVVMEATGYYHYRLAQFLYKNGVVVSVVNPLSVKRFVQMKLAKVKTDKSDARAICDYGMLNEVPLYNALTDVQSECLQLFSLLDSYLKQRTATKNKMRGEEALGIPSKFVYRSLRRNRKQLDREIKGIEEKLLSLIKQDQQQQLTLLTSIPGIGQKTALFLIVVTDGFSKFEKASQLCSYVGITPTIRESGSSVRGRSRISKVGNRKLRNLLFLCAFNACKYNRACREIYERIVNKGKSKKLALIAVANKLLKQSFAIVKSGRPYDEAYVSILPK

SEQ ID NO: 217137 - protein, 343 aa, unidentified
MKLSRVGIDLAKNVYQLHGVDRSGKTLWKRRLKRHQWLAVLLDKAGPDCVIGMEACAGAHHWARELQSRGYTVKLIPPQFVKPYVKSNKNDANDAEAICEAMSRPNMRFVAVKRIEQQDIQATHRIRAELITQRTAKANQIRGLVAEYGLVAPKQLSSLRAAIPCWLEDAENGLTDHFRSLLQGVWDDLVALDDRVGEMDQAIKRLAENNEDCARLQQLRGVGPMIATAMVATVGDARQYRKSRQMAAAIGITPKQHSSGGKDRLLGISKRGDVYLRTLMIHGARAVVARAGHKDDRLSRWVTNIANKKHPNVAAVALANKTARMAWAMLRHETDYDPDFAIR

SEQ ID NO: 217138 - protein, 349 aa, unidentified
MSRYIGLDAHATSCTLAVVGKSGRQLGSQVVETNGAALLEAIKAIPRPRYLCIEEGTQSAWLYEVLSPVVDELVVTQQNRKSTGNKSDKLDSFGLATGLCKGTLPRRIYKAPQRYAELRALAHTYNKIAWDVARTRNRLKSLYLSRGVHATGKSVYGTAQRDEWLSLLPTTYRSAAALLYAELDQMVEIKAAAREQLVKESHRHDISHVLETCPGLGEVRVAQVISTVITPHRFRTARQYWSYCGFSIVMRSSSDWVQGSRGFERKAVLSTRGLSRQFNRVLKEVYKSAVISVLKDATHPLTLHYERLLAAGTKPPNARLTIARKISALSLAMWKNEERYDPARQTTHR

SEQ ID NO: 217139 - protein, 425 aa, unidentified
MRLVYPVCCGVDVHKTFLVATIITTTNSILPKYQQKRFSTYYSGLLDFKQWLFANNCKDVCMESTGKYWVPVWNVLEAASINVVIANPKWVSAVKGNKDDKKDSKWIGDLFRMGLVPPSYIPVRDIRILREFTRYRSKLVSMRSSEKNRFQNAFTVCNLTLDAVVSDMFGVSATAIENYLLDTDDVDPNHCVYLLRGSLKKKASDVVEAVKGFNMTAEQKERVRIIQGHFDDIDKRIVQIDHVILRLTADYEAQISLLCTIPGIDRRLAITIISEIGTDMSVFGSSKRLCRWAGLTPGNNESAGKKKSVRISRAGVYLKPALVEAAHAAVKATQKSPYFRIKYERIMKRRGKKRAIIATARMMLTAIFAMLQSGEVFHPCDLLKFDMPDELKRKQTLSSAKDAVKLLVSLGLVPEGSISLDPLAG

SEQ ID NO: 217140 - protein, 339 aa, unidentified
MSTSYRRCCGIDVHKKSVTVHVLPPQGQLEVKPLEREFRTFSRELRRLRGWLKRYQVSEVVMESTGQYWRAVWNVLEGEMPRLVLVNPQHVKALAGRKTDRIDSRRLARYLENHDLQGSFVPAREIRELRDLTRSRVHLLEEVNRVKNRIGQLCEAGNIKVSSVASDLFGVSGRRMLEAVAEGKRDAGWMADYARGTLRGKKKQLEQALEGSFTEHQRWMLREALSHLESLEAQIARVESEIERRIEPYEEHIRRRLTIPGVDRITSWTMLAELGPDMNVFPDARHAASWAGICPGNRESGGKRLNGRTRKANPYLRRVLCQAAWGSQPQQKYLLVGSL

SEQ ID NO: 217141 - protein, 366 aa, unidentified
MTTTSASVATYNLFVGIDIAATTAKVSRVYPGKTATRALTIDQTPSGFEILKQRLCSIGLSARSILVVMEATGSYWVTLASTLADSGFVVSVINPSQAHHFAKALLKRAKTDAIDAQTLAHLASVLQPAAWNPPPEVYTELHQRLAERDSLLEMRQQARNQLHALIQYPNVVVAVKKRIEQLIETLNTQIDEVDAELETALALDPEWAASAQRLQSISGIGFLTAVWLLVATLNFTVCKTADELTAYAGLAPHPFQSGTSVYGRPSIGHTGNARLRTMLYLATLSAARYNPVIKTFYNRLREAGKPMKVARCAAARKLLHLAFAVVKQREDFDPLYMQKQQKCVQEGITHSCQAKSRRNHAKSLSS

SEQ ID NO: 217142 - protein, 352 aa, unidentified
MSQPDNSKEETKMKLYAAIDLHSDNNVTVVIDEQDQVVYQKRLANDVAMIVEQLSVYRASLQGIVVESTYNWYWLVDGLMEQGYKVHLANTAAIQQYEGLKYTDDHSDARWLAHILRLGVLPEGYIYPRADRPVRDLLRKRSQVVRQRTTNLLSIQNLMARNTGSSLSANQIKGLDVQQVDELLPNGDLALAVKANLSVMCSADEQTEILERTVTQRVKLRPQFSFLKTVPGIGQILALTIMLETGDIRRFSSVGNFASYCRCVGSQKISNGKKKGKGNTKNGNKYLAWAFVEAANFAIRFNAKIKSFYQRKKAKTQGVVAIKAVAHKLCRACYYIMRDHVAFDVTKAFGQK

SEQ ID NO: 217143 - protein, 316 aa, unidentified
MNTQDHNEINVGIDASQSTLDVYIRPQGDFQSFENNPEGIRSAIRFIKSFKPTRVLIEATGRLEMAFFCAAHKAGLPVCVCNPIQVRNFAKSTGRLAKTDKLDAQDIAHFGEALKPALTDLKPEKLRLLSDLLTVRSQCLDMSTMQKNRLQRMPKTVHQPIRNILKKITQEVACIDQQLDKLIAEIPQWQDKVNQLTSAKCVGKVLAYTLLSELPELGHLNRKQIAALVGIAPMNRDSGRHKGNRYIRAGRHKVRTVLFVSMMSAIQCHPKIKPMYERLVAAGKPKKVAIVACMRKQLTILNTMVKNGTYWDENMI

SEQ ID NO: 217144 - protein, 344 aa, unidentified
MDHFAGLDVSVKTTSVCIVDDTGKVIREVKVTSEPEVLLTVLKSASYRFKRIGLEAGPLSQWLFSALAEAGLPVICVETRHMQAVLKAQINKTDRNDARGMAQMMRVGLYRPVHVKTLRSQKLRMLLTHRQLLLSKAIALENDLRGTLRNFGLKVGMVGKVKFEGRIRELVENLPDLAVLVEPMLIVRRVLREQIVILHRRLLAIVRDDEVCRRLMTTPGVGPVVSLTYRATVDIPARFRKSKSVGAVFGLTCAKYQSGEVDWDGRISRCGDEMMRTMLYEAAQAMMRSKKWSWLKAWAMQIARRRGMKKAIVALARRLAVIMHRIWVDGTEFRWTREQAAVAA

SEQ ID NO: 217145 - protein, 393 aa, unidentified
MIYVGIDVAKDKHDCFIVNSDGEVLYDVFTIQNDMDGFEDLLFKIKTASKDLSKVKVGLEATGHYSCNILGFLKSKGLYTIVINPLYTSLSRKSVSLRKTKTDKVDARTIASIIMSDVSLKPYSDTVYHNEDLKSLSRYRFDKVSDRSKLKQSVSRLVNILFPELEKLVSTLHAKAVYALLSEFPGAHQVASANLKHLTALLSTASKGHFGREKANEIREAARRSISSYLPAKSLELRHTIKLIHELNAEIAEIETEIKKIMDSIDSPTLSVPGISYALGSVIVSEVGDFSRFDNPDKLLAFAGCSPSTYQSGQIYSTHAKMEKRGSKYLRWALLNAAKYVCKWEPTFAVYLRKKLAEGKHYNVAVSHAAKKLVRLLYHLETTGEKYIPQTLS

SEQ ID NO: 217146 - protein, 430 aa, unidentified
MKSNTQNKKIEAITETTLVIGIDVGSETHFARAFNYRGFEYSKKPFQFSNDEAGFEAFKAWIFDIKEKHEKDKVVPGMEPTGHYWFNLGKFLQDNDMKPVLVNPHHVKKSKELDDNSQTKNDRKDPKVIAGLVKEGRYMIPYLPDGVYADLRTASNMRFQLQAELTRIQNRINRWFGIYFPEYKTVYGKPDAISGMMVLKQAPLPEDILTLGVDGINKIWRDAKLRAVGKKRAQTLISAAEHSVGSKEGAISARLEIRMLLEDYESRNARLQEVMTLIEELVKQIPMAGKLLEVKGVGIKTVSGFLAEVGDISRFSSPKELQKLAGLALVENSSGKHKGETTISRRGRKRLRYLLFEVAMSLVGKNPEFARLHSYYTTRKLNPLKKMQSLMVIACKVIRVFYAILTKGVDYDPAKMLGDIKRPTAYLQAA

SEQ ID NO: 217147 - protein, 410 aa, unidentified
MDAIVERVSGVDVGQAMVVATVLVGGAHQRPTKATRRFRTVTRELLAMREWFQEHGVTHVALESTGVYWQPVYALLEDAFEMIVGNAHHIKNVPGRKTDVKDSEWLANLARHGLIAKSFVPPKPVRQLRDLVRYRRKLVESRTAERNRLLKLLETANIKLASTMSDVFGVSGMLMLRALLEGRAQPSEMARLAKGQLRQKTEDLELALDGRLEDHHRFLLTLQLRRLDRVESDIAQLDARIDEALAPYQEQHERLQQIPGVGRVQAAVLVAELGTDMRVFRSAKHAAAWAGVCPGNNESAGKHGGTPVRKGNMHLRSALVEAAIAASRKKGSYLRDKFYRLRARRGVKRAAMAIAHKILIAAYHILSDGAAYRDLGDAYLDGLEKRRTTRNLVRRLERLGYEVTIGPKVA

SEQ ID NO: 217148 - protein, 425 aa, unidentified
MNYKQNEKINQVKESTLVVGIDIGSTTQYARAFDWRGIELGKVLPFSNSREGFESFKAWMQHLQDKYKKLDAIVGIEPTGHYWFDLGAYLEDEGIRLVMVNPYAVKQTKELDDNSQSKNDRKDPKVIAKLVTEGRYSAPYTPDGVYADLRIMVANRKRLIREMTQIKNRFARWFAIYFPEYTDVFGDYEAQSSMLLLKKVCTPEAIVELGAEKINQIWRDAKLRAVGMKRATTLCETAKRSIGLKKGSSAARYEMKLLLEDYEYKKAQLDAVMEEIEKLCRKIPESEQMLAIKGIGVITVAGFLAEVGDVRRFESPRQIQKLAGLSLRENSSGKHKGQTTISKRGRSKLRAVLFNAAIPLIAKNPEFKSLHEYYTTRANNPLKKKQSVIAISCKLIRVFYAILANGVTYDAQKMLSDIHRQPQAA

SEQ ID NO: 217149 - protein, 346 aa, unidentified
MRVITIGIDPHKSSHTAVAVDGAGHKTGQRRFVVNAGTFTQLMRWCEPWPERRFAIEGAGGLGRALAQQLAAAGEDVVDVPSTLSARARLLATGGDRKTDPADALHVAQVALFRQDLRKVTPEDQSTILRLLTERHDDLVNERTRTTNRLHAVLRDLLPGGAPTGLSADKAATLMKGIRPITATDNCRRDIARDLLAHLRRLDQQAKANEAQIRDALAASQTTLTSLPGLGTVLAARILGHIGDIDRFPTEHHFASYVGAAPLDASSGKNIRHRLNTGGNRALNSALHIIAVCQIRNPGRGQDYYLRKIAEGKTPAEARRALKRRLSNVVYRIMKRDRRSHLATAA

SEQ ID NO: 217150 - protein, 329 aa, unidentified
MQAITTIGLDIAKSVFQVHGIDAAGNVLIRRQLKRRYVLAFFQKLSPCLVGIEACATSHYWSRQLKALGHTVRLMPPAYVKPYVKRQKNDAADAEAICEAVTRANMRFVETKTPEQQSCLMLHRTRQLFIRQQTSVINAIRAHLAELLAIVTDASDQRVPEVARACLAALGAQLRALKAQILEFDRRILAWHRSNETSRRLDAIPGIGPALATALVASIADPKAFRSGRDFSAWIGLVPKQHSSGGKEKLGRISKQGDRYLRSLFTAGALAVIRYAKIYGSKHRPWLTALLARRPTKVAAIALANKLARMVWAMMTRGERYKEPVALAA

SEQ ID NO: 217151 - protein, 434 aa, unidentified
MLTSDPMTPFRGAASAALRREQNRAYADQFAGLVGIDCGRTFHKLVARARDGRRHQAVRVDVNRVGFEAAHTYLRRTFPGIRPSEMLVGIEFAGHYGATFAQFLRLQGYAIVTVLSSVTKKLREVEDNSPRKDDAKDAGQICQLVSDGLFVGHAVLSDLVSQMRVLSTERLRLGVEETRLRNRLRSALDLAFPEVLEAFATLRNRTPLAIVARWPLAQDLAAASPRSVHAQLRLSSQNHIGRERTKQLSADARTSIALLDAAPARRAEIQRMVARRAFLMEQMAACEAELAELVEAHAGAKALCTLPGIGVVVAAALVSEIGTPETFLSPRQVLKLAGMNLAGKSSGTSVRGRIRQTKRGRPLLRRQLFLLAGRWCQSRGLYRDYYLAYVARNGGSKIKGLAAVARKLVPLVLHIIQTGEPFDAARWGRQRHIA

SEQ ID NO: 217152 - protein, 334 aa, unidentified
MQNITLIGIDLGKHSFHIHCQDKSGKALLRKKFTRTKLMQFLATCPPSVVVMEACAGAHFMARCISDFGHETKLISPQFVRPFVKSNKNDFVDAEAICEAASRPSMRFVQPRTETQQAMRALHRVRESLIRDKVKTTNQIHGFLLEFGISLPIGDAVIKRLSLVLAEHEIPEYLSRLLVRLHTHYLYLVEQIAELESELSQSINADDTAQRIMTIPGVGPITASLLSSQLGDGKQFSCSRDFAASTGLVPRQYSTGGKSTLLGISKRGDKNLRRLLVQCARSFIMRLERKHGKLAEWVREQLNKKHSNVVTCALANKLARIAWAITTQKKEYQA

SEQ ID NO: 217153 - protein, 370 aa, unidentified
MLDTTTFIGLDVHARSIKAVSLDVMTGEVRAATFGYDAGAVAGWVRSVDPRARCVYESGVTGFDLQKRLSGLGVDCVVGAVSKMIKPSADRRRKNDRNDAEFLARMLSVGNVVEVWVPDDECEAARDLTRALEDARDDLSRAKQRLSKFLLRHGLAFDERTPTGRRKGNWTRAHWSWIESIRFAEGADNDVLAYYVDAVRRAAEEKARLEGLVEPEARKPRWRRRVDSLRCLKGVDTATAADLVFEAGEFSRFRNARSFAAWVGLTPSEHSSGESDRRGAITKAGNKHLRKALVEAAWHYLTCSGRPKDLAKGQAPDRVARRHAAKGVRRLVERREALLARGVHNNKANVATARELACWVWAVGLMAEEA

SEQ ID NO: 217154 - protein, 314 aa, unidentified
MTERFVGIDVAKDQLDIAVRPSGDRWVVANDLTGVAELVDRLTGLAPRLIVLEATGGYEWPALAALAARGLPVVAVNPRQVRDFGKAVGRLAKTDRLDAEILALFAERVQPAVRPLPDEATQQLQAWLARRRQLVEMITAEENRQQQAPPAIRRQIERHVQWLREQLAELERQLAERVRQSPAWREAESLLRSVPGVGPVLARTLLGDLPELGQLDRRQIAALAGLAPLNRDSGTRRGRRAVWGGRAPVRGALYMASLVATRHNPVIGAFYHRLLAAGKLKKVALTACMRKLLTILNAMMKHRTAWKPAPAVGA

SEQ ID NO: 217155 - protein, 355 aa, unidentified
MNSAKYVGMDVHAATISVAVRDAAGKLIMESVLETKASTILQFIHGLRGELHVTFEEGTWAAWLYDLLKPYVTNVVVCDSRRNALLKEGSKSDRIDGRKLSELLRANLLRPVYHGEHGLRPLKELVRAYLTLRQDLTRVMNRVKAIYRGWGIPCAGQSVYYPRHRDEWLSKITQAGVRRRVQLCYLQLDMLVGLRQQARQELLVEAKKHPAWKLLRSIPALGPIRAAVLMAIVQTPHRFRTKRPLWKYGGLAVVTHSSADHRYVEGQLQRAKKPVSVRGLDFSHNHDLKDLFKSAAIQASTREGPFREFYDALVAKGMRPEMARLTLARKIVTIAFTVWKKGVVFDAKYLKPQTA

SEQ ID NO: 217156 - protein, 417 aa, unidentified
MTDDMLYHCAAGIDISKRDAKVCVRSLKPGKKRQTNQIKVFGATISQIGLLRQWLIAEGVQSVVMESTSSYWKSFYDGLSEAGFQVVLANATRVKQLKGRKTDISDAAWLAKLACLDMAPPSFVPTRDIRDLRLLTRSRVKLVQRRTSVMASLEKMLEDTGIKLSAVSSKLLNVTGRTVLEAICNGCTDPIELAKLSHLRNTVGPQLVDALECVVRPVHVVVIRSHLDQIDALEAEIMKLDEVITSHAIRYADQISLLTTIPGVDVVLARSIIGEIGVDMSVFPSPDHLSSWGGLAPGSYESAGKSKHSKTRKGNKFLKCAMSQAARSAILTKDSYLKARFHKVCSKQGKAKAYTATAHTMMKIIWAMLTNNTAYQEKGGDFYTRTATPAKQARIQANAEAQLKRLGVNYIIIPSTT

SEQ ID NO: 217157 - protein, 394 aa, unidentified
MKLIGIDIGKNKHFFCIMDQQTGEIIFQPVSFSNDKEGFDFLIQKINSYPKDSVLIGMEDTGHYHFALLKYLLNLQYTVALINPKTTDFNRKMQGGITKNDKLDTINICDVLDTPERKKQYRISKVNSFDLYEQKQLTRHHHNLKEEENVYKNRLQKCIDIVFPEFNKLFNSKYGTVYMNILKTFGSAENIANTDIRTIRKCFEIEGRGNRISLTPERLKECARSSIGISSSAEVIQIKHLTAQIELIEEQLTEIDKKIEEFSIQNNSPILSIPGISHFSGTSILAELGDVSNYSKPSQIIKFAGVAPLHYESSQFNAQHTSITKKGSKYLRKTLYQIILPVIKHNPVFNKYYQLKISQGKGHRCAQGHCVRKLLRIIYHLLKTNQQFDHQLLR

SEQ ID NO: 217158 - protein, 402 aa, unidentified
MNCVGIDVSKGKSMIAVMRPFGEVVVSPFEVRHTASELSELARLLKNLDGETRVVMESTGNYHAPVAWLLHDAGLYVSVVNAMLVHDYGNNSLRRAKTDKKDAVKLANYGLDHWLTLPRYVPEEDTRLMLKTCYRQYQQYSKVQTMLKNNLISLLDTAFPDANRLFTSPPRADGSEKWVDFVATFWHCECVCGRSEKAFTTQYQKWCRKHGYNFSEDKALDIYASACRHFGVIPKTDTAKLLVEQAISQLQTTSSALAALKQEMQSLAASLPEYPVVMEMFGVGPTLGPQLIAEIGDVRRFHSKKALVAFAGIDAPPYQSGQIDVRSRSISKRGSASLRRTLFLVMGVLLQCAPMDEPVYQFMNKKRSEGKPYRVYMMASANKFLRIYYASVKAYLDSLEHD

SEQ ID NO: 217159 - protein, 347 aa, unidentified
MKEYISFDSHKHYTLMEREDRVTGRTRQCRIAHRRGVIVTALRGCEPGTPVALEATGNWYWIVDEIEQAGLVPLLVHPRKAKLMMGCINKTDKLDVHGLNLLQRNGTLPTVWIPPGPLRDLRELTRTRMVLSRHRTQLKNRILATLSKYALNLTEVSDAFGRKARQVLDARVRELPPETERTTRLLLLQLDFNQNQIHELEVRPHELVCVTPDMQLLMSLPGIGEILATVIVLEAGDMARFPDGPHFAAYAGTTPRVHASGDKTRYGRTRPDVNRYLKWAFAEAGNSVALNHERHPDLHVSRLYHRTHQRHGHAKAIGAVARHLAEATFHVLTRHQEYQDPKRKTRA

SEQ ID NO: 217160 - protein, 418 aa, unidentified
MNEEGNTRGTRRYVALDIHKHYCVVAGVDREGRVLLQPVRVEHADLEGWLKKNLLPTDQVVIESTTNAWHVYDLLAPLAERVLVANPIRVKQIACARIKTDIRDTLILARLLAANLVPVVWVPPMHVRQLRQLLSQRRQLVETHTQIVNRMHSVAHRHHLKHERGKRFNEKNTGWQKDKTLCSLEQFQLGLEMENLAHIEKQIERISREVRKMCHKKPWAESMTYLMQLPGFGVITAMTVLAAIGEIERFETPKHLASYSGLTPGLEQSGTKNRGKGITKEGRREFRWALVEAAQRAVKSDPLLKQRFQEMQKRMHRNQAIVAVAHRLLELVWYVLTRRQPYRHFSHERIAYKYLTWAWQMEDEARDGLTRQQFTRYYLMRLGIGQDLTRIALNPKYPRKLASEADLLALRPELKHIE

SEQ ID NO: 217161 - protein, 369 aa, unidentified
MEKDTIYVALDDSKRKLVIAILRPGATEPEEQEIPKDPPHIQRLFRRLRREGPVQACYEAGVSGYDLYRQITACDVACHVIAPALTPRRPGQRIKTDRRDARKLVRLLRAGELTPIRVPDEAEEAARDLVRCREAVRRDVVRWRHRLLKLLDRHGRLWVTEKNWTQRHWTWIRAQHFELAALQRAFEATVFALEQALVRQAELDKEIAILAATAPYRQPVGWLRCFRGIDTLSAMVLLAELVDFHRFRRPRHLMAYLGLVPSEYSSGETHRRGALTKAGNTHARRVLVEAAWHYRHRPTVGRALANRSQAQPDEVVKHAWQAQQRLHRRYRHLVGHGKRPPVAVAAIARELVGFLWAAMTRLEMRTHVA

SEQ ID NO: 217162 - protein, 358 aa, unidentified
MAITTIAHADPTRVTVGVDTHGDVHVAHAKDQLGRRLDTVSIPSTPTGYRDLLAWARGLGQVAAFGVEGTGSYGAGLARFLREADQVVLEVNRPDRAARRRQGKSDPVDAEAAARAVQAGEVTITPKARDGHVEMLRSLRVARTTAMRARTQAVNALRSLVVTAPAELREQLRGLSTVRLVRVATTLDPGSLTSPTAAAMLALRILARRYQALDAEITTLDSELDRLTAKAAPRLLALFGVGPDVASALLVAAGDNPERLRSDAAFSMLCGSSPIEASSGKTIRHRLNRGGDRQANAALYRIVIVRLRWHQPTKDYMARRTAEGKSKKEIIRCLKRYVAREVFPVLREMNQADPATAA

SEQ ID NO: 217163 - protein, 423 aa, unidentified
MMKLKYSICCGLDVHKNVIVATIVTTNKDGISEYKQKSFSTINSDIQKFHIWLIENNCYHVCMESTGKYWIPIFNYLENDIDVCLTHPKYVKAIKGKKTDKKDSKWIADLYKFDLVRCSFIPPKDFRQLRELSRYRFKLVCMKSSEKNRIQNCMTISNVGIASVLSDPFGKTATEIISYLLEHTADSMDEKAVRKLIKKGAKSKSDEIIEAIKGYTIDTDQVKKLELARGHLEYLDDMITQTEVELYVRIKPYYEFVEFVSTMPGMTELSSTIVLAETGVDMDIFDDAKHLCSWCGLSPANNESAGKKKSVRIAKAGDYLKPMMVQCALAAIKSKKQPYFAIKYGRIKKRRGHKKAIIAIARMMMVCIYHMVSEKKPFTPTDYEELMDPQNHVESVVLNENNVFAYLESLGYDSSKLVKRNDN

SEQ ID NO: 217164 - protein, 370 aa, unidentified
MRIIGCDLHARQQTLAMLDTETGEVVNLTLMHEGNNVREFYSKLPRPVLVGIEATGSMHWFLNLMEELGIECRVGHPAQIRAAEPRKQKHDRRDADLILKLLAENRFPAIWLPSKELLDLRALLLHRHQWVRMRVRMQNALQAIALANGLRRGPALWSYDGQAKIAFLPLLPHAAYRRSALQAMYKNMQSEIENLTRRVAEQAGNRCGARLLMTHPGVGPVTALATEVFLGDPQRFTDSKTLASYVGIIPREYSSGEHQRLGGVTKQGSPLLRFLWGEAGAHAARRDPELKRFYRRKLVQKGLGKARVAVARKLGIRLWIMLRDEIDYQEFCRRGQLQQKTVRPVVGMPETGNGAKSHRPSDEATRLPES

SEQ ID NO: 217165 - protein, 419 aa, unidentified
MSFKILKNNCCGLDVHKTWIYACIGITDSFKRTEYKQARFSSFTKGLQELCLWLAKYNCIDVCMESTGKYWIPVFNVLEKNNIFVTLSHPKYTKPQKGNKTDRKDAKWICDLYMCGMVKPSFIPPADIRQLRDLVRYRFKLTCMITGEKNRAHNCLTVSNLKLDDVFSDIFGKSSRSITEQILQHPGETFDVAPFVHGRCKTPIEEIQAAVNGAISKEQAVKLRQCLKHIDELEMHKAEIEREIFRLSQKYESVLDLIRTIPGFDKNPLTAIQVLSEIGADMSVFPTAKNLVSWAGCCPRNDQSSRKIKSTRISRAGSYFKPVLVQIANALIKSKKHPEFTTRYRRIKARRGHKKAIIAICRMILTAIWHILTDLKPYTPEGFLDSRPVNKEKVLTTSQALNLLKQRGYFIKDDPLSVS

SEQ ID NO: 217166 - protein, 333 aa, unidentified
MRDFKMTVSSSNYQSIHGVNVGIDVAKETLEIAARPTNEQWSIKNRVEEFPDLIEKLRQLAPERIILEATGGWEAPLANHLAAAGLPVVVINPRQGRDFAKATGKLTKTDQVDARVLAHFGEAVKPQIRPLPDEQTQALADLLTRRRQLVEMLAAEKNRLVTVQHRPALKHDVEAHIKWLEKRIDQFDDDLRQQLEKSTVWRVNDQLLHSVPGVGDVTARTLLSQLPELGTLSDKEIAALVGVAPHANDSGRRKGQAQIKGGRANVRSVLYMATMTATRCNSVIKAFYQSLLAKGKPKKVALTACMRKLLVILNAMIRKQKSWNPPPITAANS

SEQ ID NO: 217167 - protein, 325 aa, unidentified
MNEVTKFFGIDVSMGTFDVSTADQKHFQFSNDVEGFSRLLNLLDDQSHCVMEATGAYHQKLATWLYSHAIKVSVINPTVIKRFAQMRLRLAKTDKADADMIRQYAEAEKPEVWSPPQEYVMQACEINGLVMLLIRQRTALKNRLHSVLHKEGSFSNILKSLHRQIKHLDQEINQLEKSMEDLIKKYEGEMLTSLCSIPGIGKKTAMFLIVLTDAFRSFENSKQLCAYLGLAPTIKTSGKSVRGQSRISKTGNGVIRSLLFMCSFTACQRNKACRELYTRMVNKGKSKKVALIAVANKLLKQSLAIAKSGIIYDEQYQSMKPASVH

SEQ ID NO: 217168 - protein, 355 aa, unidentified
MLTIGIDAHKRVHVAVALDERGQEVGIWRGPNSRAGWAELLAWAPGRSEGRQFGIEGAWGYGRGLAQHLVAADEHVYEVNARWTAAGRRRARNQSKTDRLDAQAVARFVCQEGLGLAQITAEDESAVLDMLTVERNSAVGEATRTRNQLHAHLLQLDPEYHQHLPPLRSRAGVRAAKEYTVEGTDLLRLERASAVRRLAVRLELAEDQADEMANRIRALVADRFLPLTRLCGVNLLTAGAIAGMLGPGRRFSTDAELAAYAGVSPLEASSANTTRHRLNRGGNRRLNAVLYRIAITQAHHSPEARAYLSRRTSEGKTRKEAYRALKRYLARAVFRLWAECIRDMEACSAPRSTCG

SEQ ID NO: 217169 - protein, 349 aa, unidentified
MKKIIVGIDVSKEKIDASAILVTGNQLGMQKLDYQTFENRPMGFRRMVVWAKHLVKGITLDDVMFCCETTGAYDHKLCDYLFAKGLDIWRESALQIKKSSGLRKGKDDKADSLAIAEYAMRHADKAVYYVSPSQDIRELKELLLYRHKLEQEKASTTVRVAGLKATAGKSPSRNFILRDAQKRIKQLEKSIKECEKQILEIYGRNEEMKKSYTHITSIKGFSIVNATAMIAYTNNFKNITSSRKLASYYGVAPFREKSGTSIDKKAKVNCYSNTMLRSYLTMAAKHTIKANGIYFDYYNRMIAAGKCYGIAINNVKNKLLNLSISLVKNDMDYEACHEYKRLQGKAELA

SEQ ID NO: 217170 - protein, 426 aa, unidentified
MRVLYDRVAAIDVHKDMVKVAIRVPGAKRGTRKTDVLEFRTFYGVLQAMARELRGRGVTHVVMEASGVYTDPVYYALRELDFTEVMVINPAHAKALKGHKTDAKDAIRLLDLYECGLLSGSYIPDPDLREVRDLARYRMKTVQARTSEIQRLQKALETAGIKLSSVVSDVTGGSATAMIEALISGERRGAVMAGLAQTRLRTAGKMADLSMALTGRFTDHHALMCRLHRDRIKVFDDAVKDLDAKIAPLVARYAREAELLNTLPGFGDVIVAGWLGAIGPAPHQHFATASRLASWATLCPGNYISARKSKGGRTGDGGAYIKPLLIQAAWAAVRVPGRLQARFGRLVRKFGGPRNKGAQKRAITAIAHTLLKIAYSVLKTGKPYADLGADFYTCRESPDARQDYLMRQLRKLNPGYVITITPAETA

SEQ ID NO: 217171 - protein, 345 aa, unidentified
MFRPELYVGVDIGSETFTVSIGKFEEKEGWRISAKPMTFGNNFDALNQFLSWLNENKAQTHNCIVCMEATGVYGEALAYFISTNGYKMVIEAPLKVKRAFDPKGHKSDPVDSRQIAEYAYRFFDELRPWKPKKEAIEQLKTLLAVREQLVEQRTEHKNANKAIKRKVVRTPLAENVHDKSIEELTKHIKAVEKEIKRLIDDDPSSRDLHNLIVSVPGVGSILATFFVLTFYSAPEPFNPKALAAYIGICPYKNTSGISRNKKSTSRRYGPSTMRRLLHLAAMSARTHCPKFQKYFLRKLAEGKPKQLILNNIKNKLVKIVCAIARTKTPYIAGHRSIHPQLIKAK

SEQ ID NO: 217172 - protein, 340 aa, unidentified
MQVSTIGLDLAKRVFQVHGVDSAGRVIIRRQLRRGQVIDFFAKLPPCRVGMEACATAHHWARELMARGHEVRLMPPSYVKAYVKRSKNDAADAAAICEAVTRPSMRFVPVKSVEQQAALMLHRTRDLLVRQRTQLINAMRAHLAELGIVAAQGRDGVRALIGMASSDQLPAAVRDCLGALVKQLEAAHQQILEIERRLHAQHRASETSRRLETIPGIGVIGATALAATVTDPTVFKSGREFAAWIGLVPRQSSTGGKERLGPISKQGDRYLRRLLIVGAMAVIRHARCHPEKHPWLIQLLARRPAKVVAVALANKTARIAWAMLVRGEDYQALRRLAAAA

SEQ ID NO: 217173 - protein, 422 aa, unidentified
MVVEPKEEQWTSSSDGAPGWTSTKRRSPRVRVPGEGGTRQQQTRTFRTTTAGLVVLRDWLASFGVTVVGMESTGVSWKPCDWLLEDDVEVWLLNARHLRNVPGRKTDVADAAWICQLVEHGLVRPSFVPPKPIRELRDLTRYRKALVQERTREAQRLHLLVEDAGIKLSSVASDTLGVAGRLLLEALTHGTHDPEVLADLAKGQLRKKLPALREALQGRLGAHHALLLAEMLARIDHLDETICRLSQEVARRRAPFSPLLALLKTIPGVSTRVAEVLLAEIGTDMGRFPTAGHLASWAGLCPGTGESAGKHFSGQTRKGSRWLRMALVEAAKAASPTKGTYLAAQYARLKRRRGHKRATIAVAHAILVIAYYLLLLEREEPYADLGADYFLDRRSSDAYKNRLVRQLERLGHKVTLEPADAA

SEQ ID NO: 217174 - protein, 343 aa, unidentified
MAIVGAFDVHRAQLTYDYVDTETGEVRLGRIRPADRENLRAWLGRFEGETGVAFAVEACTGWRYVADELRRAGCEVHLAEPADLSRDRGPKKRAKTDAADARHLRELLQQDRVPESWIPPTEVLEARATARLYKDLTEERVGWAQRIRATLFHQGVPSLEKVLNASGRALLPGVELSPAGHRAVEVGLRQIDRLSAEIKVLGQELRDRAQVQPGCRALVKAHYGVGPILAFVIWAEMGDPRRFSSSSDAVRYAGIDITVYSSDGRRSKGHLSRQGPSLLRWALYEAALHASRLTSPDHPYYEAVKARHLGDAQIAILSVARKLARRCYHTLRELGSEAWPAAA

SEQ ID NO: 217175 - protein, 338 aa, unidentified
MDHYAGIDVSLEYSSVCVVDATGKIIREAKVLSEPTALIAWFGSLGVKPVRIGLEAGPLSQWLCPALREAGLGVELLETRHVRNALKTMPVKTDRKDARGIAELMRLGWQRPVHCKSMAAQETRALLTTRHLVQSKLHDVEMSLRGTLRGFGLKVGKTTPRRFEARILELVAGHPSLEVIAKTLLEVRAVLLSEFNGFEKRVRTMARTDPRVRLLMSAPGVGAIVALTYASAIDDPARFKSSKSVGAHFGMTPKKYQSGETDFTGRISKIGDKGVRIATYQAAHVIMTKPVKGCSGLKSWAMKLSKRAGMKKAKVALARKLAVIMHRMLADGTTFANA

SEQ ID NO: 217176 - protein, 350 aa, unidentified
MKTIAKAVPVTIGLDIAKNFFQVHAVDGSGQVVLRRKLSRGEVLGFFEAQPKVLVGIEACGTGHYWAREIAALGHEVRLLPPTYVKAYVKRGKTDAADAEAICEAVTRPNMHVVPIKTPEQQAALMMHRARELLVGQRTALVNALRGHLAELGIVTAKGIHRVADLLAELVGVENTKIPPLARASLRCLAAQIEAVETQIDELEALIIEWHKGNEASQRLAKIPGVGPITASAVVATIDDASHFTSARHLSAALGLTPRQNSSGGKARQGGISKAGNTDLRRLLFIGAIAVIRSKRAQEAGSWLARLLERRPAKVVAIALANKTARVIWAMLRRGEAYRAPTRAATAAPA

SEQ ID NO: 217177 - protein, 355 aa, unidentified
MNAIKYIGMDVHVATISIAVLDANGKLIMEVTIATQAGALLDFIRGLSGTLNVTFEEGTSAHWLYTLLEPRVAKVVVCDPRQNPRRLGEKKSDRLDARKLAEWLRLGTLKPVYHGNSLGPALKELARSYRTLVSDTARVMNRLKALYRARGIGCAGTRVYSPRFRDQWLEQLREPGARARAERLYRQLDLLLPLRQEARAAMVAESRKHPAHKILCSIPALGPVRVALLLALLQTPYRFRGKRQLWTYAGLALVTRTSADYQMVDGQVTRARKPALVLGLNANHNHTLKGLFKDAAASTLAHPGPFKDFYTTRVAQGMKPELARLTLARKIAAIVLTLWKKGECFNVEHVKAQAA

SEQ ID NO: 217178 - protein, 442 aa, unidentified
MSRIPISEKKRNERSLKVQDCILVGIDPACYKHTAVIYTPSRTAIAKVHNINNNRKGFQNFENRLMSIKKLYPNIPIKLAIEASGEYWKPFQHYFRQRGMETIFVPPLFVKRTRDLDDFTPRSNDPKDAVRIANLAFEGRYFIIEEQSDVFENLRHLVRTWDIITDQLTRCQHRIQSYLASYFPEFNLLFSSVVGVTSLAVLEHWPFPQDLCQVTAEQMNEMIKKKMGNGHVDKEKTTQLLALAQESVGISNGIEGARIRIGAMIEQAKFYKKQLAELRKTISHTLNEIYYSENIKSVFGIGAISIAQFLGYLGDLYNYQKVKQILDLAGLSLIATESGTFKSKQQISHRGRKNLRRVLYEMTLHFLRAPGTARLKYLKCRIKGKTHRQAVIACIPILIKIIFAVVKQNRKYIPLAKDDPMILEIKKYEKLVIKAPRKKMAA

SEQ ID NO: 217179 - protein, 428 aa, unidentified
MTQSPNPTPPTFAAFVGIDWADQEHAVCLSPADTLKPEQFTIHHTPEAIAEFVAMLRCRFGGQPVAIALEQARGALLYALMGHEFVRLYPIHPATSKRYRDAFAPSGAKDDPVDARLIWELLVKHRDQLRPWQPQDATSRQLTLLCEHRRDLINQRTRLVQQLQAALKTYFPQALDWTGEDLASVMATDWLVRWPTLEQLQRVPPKTVRAFYYAHHCRRPDLVQQRLHQIKTAQPLTTDAAVIAAHSLRVQSLAHQLRPLLASLAAYDQQIQALFATHPDAAIFTSFPGAGECLAPRLAAAFGTDRDRFPDADSMLRWSGIAPVTRRSGKFQTVHRRYACAKFLRQTFHEFARCSIKFCEWARLYYETQRAKGKGHHAAVRALAFKWIRILWRCWRDRRPYDDSLYAAALRRSGSPLAKLLPLPSQQP

SEQ ID NO: 217180 - protein, 346 aa, unidentified
MMIIGCDFHPSWQHVSWLDSETGDCGERKLVHANGDAQQFYKALAAPVLIGVEARGNSQWFVELVEDLGHEIWIGDAAQIRASYVRKQKTDKRDAAHILKLVVEGRFPKLWMPDREQRDLRQLVLHRHKLVEIRSRVKNELQHLSMNKGMQKKRTLWSQAGQKLLRQLPLKPWAACRREDLLGLLEMLNQQIGKLDRAVQEAAEQNPQARLLMTQPGVGPNTALAYVLTIGDVSRFPRGKQVASYLGLIPREESSGGRQKLGAISKQGNCMLRSLLVEAAQTAVQHDPGLRKQYQHRCHQKAKGVAKVATARKLAVRLYWMLRTQVAYPEIVRIESSSRVALVGAS

SEQ ID NO: 217181 - protein, 433 aa, unidentified
MHEVEDEPLFADRAAGIDIAKAGVEVTVRVPSEARAGARQQETRSFATTRRDLLSLADWLRSWGVTKAGMEATSDYWKPVYFVLESQGLDCELYHAAAVKALPGRPKTDRADSVWLARITERGSLPSSFVPPEPIRRLRTHTRYRRHLTQACTAEKQRVEKLLEDGHLKLSSVISSIHGVSGRAMLEAIIAGQRNPKVLAQLARGTMRGKIARLEEALDCSFFTGEHVAILGMMLAAIDSLTAQIGQLTARIEVLAEPYLRQIEQLDAVHGTGRISAQDVIAEIGVDMTIFPTAAHLVSWAKWCPQVAQSGGKRKGSNAAGRGNPYLSAALGEITISAGRTQSFLGAKYRRLVKRMPKKKALVATGNSVLTIFHALLSDPAASYHDLGPDYHQQRTGIRRQARNHIRNLERLGYHVTIQAINPDTGELLTPTT

SEQ ID NO: 217182 - protein, 362 aa, unidentified
MRIIGCDLHARQQTLAMLDPATGEVVHKTLTHEGNNVREFYSTLPGPVRVGIEATGSMKWFLQLMEELGIDCQVGHPATIRAAEPRRQKHDQRDAELLLKLLVENRFPSIWQPSQELLDLRGLLLHRHQWVRLRTRIQNALQAIALANGLRRGSSLWSQSGQRAIASLPLATHTAHRRSELQAMYARFEAEIEQLNQRVLEQAGQRPTAGLLMTHPGVGPITALATDVFLGDPKRFSDGKALASYIGIIPREHSSGGRQRLGGLSKQGNPLLRFLWCEAAVHAVRRDPELRRFYRRKLVQKGLGKARVAAARKLGIRLWIMLRDRIDYQEFCRRGQRQQRSGGACAGMPGERYGAKSHRLID

SEQ ID NO: 217183 - protein, 401 aa, unidentified
MNAVGIDVSKGKSMVAIMRPLGEVVAAPFEVGHTATELNELAKFILKISGETRVVMEYTGVYFEPIATALYDAGLCVCVVHAQLIHNYGNNTIRKVKTDKADAIKIANYALDNWDKLKPYTPIDEVRRQLKAYSRQYRKFNKLKTMLKNNFIALTDSTFPGVNELFSSPPRKSDGHEKWLDFAIKFWHAECVCSLSQKAFTERYRKWCHKAGYYFLESKAEDIYAAACGHIGLLPKDENTKQLVQQTIIQLTSICSSLSVIEYKMTELAGLLPEYPVVMEFRGVGRILGPQIMAEVGDVLRFKKKESLVCFAGLEAPPYESGKFESHNRTISKKGSPHLRAALFQVMDCLLKTQPANDPVFQFIDRKRSEGKHYYSYMCAGSAKFLRIYYARVKEYLTALE

SEQ ID NO: 217184 - protein, 395 aa, unidentified
MSGEGEAIRSNDYRKDTTVKAPSTRPAAVLGLDVGKSSHWACLIDRDGEVLASAPVRNREAELDALFASAPAGTLVVVDQFRNIGSLAVRRARAAGLGVAYLPGLAASRAAGLFAGEAKTDERDAAVIARTALGVPDSLSGVPGRGEALEAARALSSQRDHVVACATRDKNRLRAVLLESCPALEAAVDLSDRRWLELLAGFGGAWGIARSGAEGPRAEAAGEAAAASTAPPPALVEAENRQVRFLAARISEALDEAGALEAETAALLEGDETYACLLTVPGIGPRTAAQLAVSVDIGRFPDHDHLASYCGIAPRVRSSGTSVRSVRASRRGDARLKSLLIFSCNSLVRSSGRYGEYYRACRARGMGHGRALKAVARKRLRAIYAVMRDRVPYRE

SEQ ID NO: 217185 - protein, 412 aa, unidentified
MELLHRRCCGLDVHKETVVACLRLVSDGKVTTEVRTFQTTTADLLRLSEWLAANECTHVAMEATGVYWKPVWRILDDGEFALVLANAAHVKNVPGRKTDINDAMWLAELLAHGLIRASFVPDAQTQEMRNLLRTRKQLVREQSSHVLRVQKTLEDANIKLDSVLTDLMGKSGRAIIEALIAGETNPVKLAGLADRRVKASFEEFREALRGRVTRHHRFLLRLHLNQIDALDAAMATLDAQVEANLGPFRTAVELIGSIPGIKNLGAHVIVSEIGIDMSRFPSAAHLISWACICPRNDESAGKRRSNRARKGGTWLKTTLVQCAWAAVKKKDSYLQAQFYRIKARRGPKKAIMAVVASILTAIYHMLKDGTMYKDLGRNHFDRRSSDQQKNRLVKRLVDLGYVVEIKPLAATA

SEQ ID NO: 217186 - protein, 330 aa, unidentified
MKNYVDVIGIDVSKLTIDAHIHKKEVHKEFSNTLRGYVSLLKWTNKHLLMGSYFFCFENTGHYSSNLSVFMSEKGIDYVEENPLSIKRSAGIVRGKTDKLDAVMISRYAWLHKEELVLSSPKKFYMQELGRLLSFREQLVRDRTGKISSLKEMQSLLSSPSTDICCKTIEKTIHYLSKQITLLEQRIKTLMADDELLNTNFELLKTLKGVGLVLASQLIYHTSNFKRFNNWRQFSSYCGVAPFEYSSGTSIKRRNRIHYIGDRKMKTLLTLASVSAIQCDSELKLYYKKKVAEGKPKMVALNNVRNKILSRAFSVIKRGTPYVELKQFAA

SEQ ID NO: 217187 - protein, 419 aa, unidentified
MKTLHKRCAGVDVHKTEVVVCLRLVTHGKVEREVRRFPTTTHGLLELAQWLESARCTHVAMEATGVYWKPVWHILDGRFALILANAAHVKTVPGRKSDVNDASWLADLLAHGLIRPSFVPPAAIQELRDLTRTRKQLTREIAQHSQRIQAVLEEANVKLCSVITDILGASGRRMLKAMIAGEIHAHKLAALGSERLGCAPETLIDALTGHMREHHRFLLAQHLQTIEQLEKTIAAFDTRIEEKLMPFRDTVERLKEVPGLGSTATGVILAEIGLDMSLFPSAGHLLSWAGFVPRLDESAGKSRSTRIRKGAPWLKPVLVQAAWGATRKKNSYFQAQFLRDLLPSLNSGQVVLPRHDRLVAQICGLERRTGRSGKDSIDHAPNGHDDLANAVAGAAAATRSKYRYDSSLDWVAGPDADAA

SEQ ID NO: 217188 - protein, 347 aa, unidentified
MTTIEDARVITGGVDTRADMHVAAALDSIGGLLGVQEFPATAAGYASLLGWLRGFGTLAVAGVEGTGSYGAGLARHLAAAGVRVVEVDRPDRQDRARQGKSDPLDAVSAARAALSGRASGAPRGRDGAVEAIRALMVAKRSARQERIQAINQARALIMTGPEELRARFVRRSPAQLIEAIAALRPRPGDVPGFATRVALRELGRRAQFLDAQLDRLDELIGPLVTARAPGLLALHGVGPDTAAMLLVAAGDHPERLRSESSWAHLCGVAPIPASFGKTAGRYRLNRGGDRQANSALWRIVIVRMNSHPATRAYADRRSEEGLSKKEIIRCLKRYVAREVYRQLRNGA

SEQ ID NO: 217189 - protein, 370 aa, unidentified
MKDAGRNPTRRRRRRARSWKFESAIAVIGIDLGKNSFHVVGLDERGAIVLRQKWSRGQVEARFANMPPCLVGMEACVGAHHLSRKLNSLGHDARLMPAKYVRPYSKGQKNDFRDAEAIAEAVQRPTMKFVATKTADQLDLQALHRVRERLVSQRTGIINQIRAFLLERGVAVRQGLRFLRAELPRILATPPDVLSPRMVRIIEDLACDWRRLDERVEGLSNEIEAIARQDAGCERLMSVPGIGPIISSAMVAAIGAGDVFTKGRDFAAWLGLVPKQISTGDRTILGKISRRGNRYLRVLFVQAAWVVLIKPKIWERHGLKPWIEAAKKRLHHNVLAIALANKLARIAWSVLAHGRSFEASKLAAAVTQPA

SEQ ID NO: 217190 - protein, 410 aa, unidentified
MSMLGVALDPATVIVAVDPGKVLNRVWMSNGAGMLAAPVSLPVAREGISQLERMLEEHAAANPVIAIEATGSLHRSWVAEMERRHPGSVRLFAPSETRAARIQLGSGRFKTDDRDCAALTYLARQGAGRLHADESGVEALRAAVRHRRGLVADRRVAQQRLHDQLNALCPGLSAPVGHGRSLPLDSPTGLAVLACAVAFAGRPPRLRSLTCRAAGRLTTSTAQYWVQRWHGCLPPPADADQRARRLGRDLDRYRRLQADITTVDEEIAGLLSVTQGQILTTLPGVGTIRAAAFAAHSLPIERFPDAEHLYSATGLAPALYESATLHRRGRISRQGLAEHRDALMGIAWGLSQHSPSFIARDAELRARGMAPIQARVALARHACRLVYRLLRTQQPFDEQRYRRGRLGRER

SEQ ID NO: 217191 - protein, 312 aa, unidentified
MDATVIGIDVAKDRLDVCVRPSGESFVVARNGAGIEDLAERLKKLAPRVVAIEATGGFETVVAAGLAAAGVPLVIVNPAQVRAFAQALGKRAKTDPIDAAVIAHFVEATKAHPRPLPDETTRLLADLVTRRRQIIDMMIAEGQRDRRLANKRLKSSIARLRRALEKELAEIDSELDDHVRGSPAWAAKEDLLASVPGVGPIIARTLIAELPELGALDRRKIAALVGLAPWTRQSGQWRGKSFIGGGRKTVRTALFMAAMVAARHNPVLKAFRDKLVAAGKPKLLALIAVARKLLTILNAILRDNRPWQPKTA

SEQ ID NO: 217192 - protein, 514 aa, unidentified
MFKKPDSNQGLNVKSNRLSLLAFEFNGDTFIVIPIGIISKLVVKFLGAYFIIFKKQTIMKRKQISLEVVNPNAAGIDIGSRSHWVAVGQNAQDVKEFGVYSQDHQELCEWLKKHKVTTIAMESTGTYWQNLFSSLVVFGFDVILVNGRQTKNIKGQKTDILDCQWIQKLHTLGLLSSSFLPDSTTAVIRTYSRHRQNILKQSASAILKMQKYLRLMNMRLDVVVKDIVGLTGTKIITAFIAGEKSGKVLAQNRHYNCRKSEEEISKALQYNGREDYYFALKQEWETYLHIQKQIDQVDVQIKRHLEKVIDTDDDKKQHIASNKPYKRKNKNTIRNTDMNQLSYQYFEGVDLMAIEGVNDALLMAFISEIGLEGIKKFESSKQFTSWLRLAPNNKISGGRVLSHHLPKGSNRLKVALRQAANTIGNLKDGHLSDFFRRINYKKGRATAISATARKLAVIIWNMLTKGIPYHPPTEYLFLDQKRKLKMLSRIKKNIVKFDIRPEDIGLSKILNIST

SEQ ID NO: 217193 - protein, 349 aa, unidentified
MSKPTDSVQATVFCGIDVSAATLAVAVIEQDQPLQQREFSNRASGHKALIGWLGKRQSMVRVSLEATGIYSLDLALALDSAPGIELAVLNPKMVNRFAQTLRRSKTDAADAIVLAEYSGRMPFMAWQRPSLHGLQLRAMGRHIAALSVEHTRERNRLHTAEASQAAPRCVIQDLRRSLAALERRMVKMRREARALIAKDAAIDERFRLLTSIPGIAATSALQILGELVLLAPEMTVRQWVAHCGLDPVHRDSGSSVHKPSHISRAGNRYLRRALYMPALSAVRWDAHLKAFYELLQARHKTKLQALIAVARKMLHAIHGIFRSQTPYDGQKLFPALLHCQTHNPLPSPI

SEQ ID NO: 217194 - protein, 343 aa, unidentified
MEIHAIGIDLGKTLFHLVGVDSCGNVVVRKRCSRSQLLAYTANVRVQRIGMEACSGSHFLGRALREQGHDVRLMPAQYVKPYVKTNKSDYIDAEAIAEAVQRPTMRFVPIKTEEQLDLQTVHRVRERWVMRRTAVVNQIRGLLLERGLTLPKGRSHVDRALPDILADATLRLSDSFRVLLAQLGLEMDQLTARIEQMDAVIHRTATENEACQRLTTIPGVGPVTATALVAAIGNGSGFRRGRDLAAWVGMVPREYSTGGKQKLLGISKRGNVYLRRLFVQGARTVMQYRSKQAPGLRCWLDQLMARAHQNVAIVALANKLVRMAWAVLCKNETYRPPALVAAT

SEQ ID NO: 217195 - protein, 367 aa, unidentified
MEKSSTVFVGMDVHKESIDITVAEPGGEVRRLGQIGGDRGSLLKMVRRQQSKGRKLVFVYEAGPCGFWIYREITALGHACMVVSPSLIPRRAGDHVKTDRRDSERLASLARAGELEAIHVPDIRDEAIRDLVRGRDDAVIAQRRVRQQLKALLLRNDIRYVGRTSWTGAHRRWLSELKLPEPAQRIVFEEYVDAIVVATARIERLTRAIETEVAGWRFAPVVGALQAMRGIQFVHAVTLVAELGDLTRFGSARQLMGYLGLVPREDSTGEHRRQGSITKAGNSYARRALIEAAWAYRYPARVTRIIATRQTGIPKAVCDIAWRAQLRLSAKYRRMNARHLNHNKIVVALARELSGFVWAIGQSVKPQ

SEQ ID NO: 217196 - protein, 408 aa, unidentified
MNPLFVGIDVSSKNNVVCLMKPDGTKFSTFSVQNNLGGAKILSEKIVSALDKLQLSEVKIGLEATSIYGDSLVYALREDGKLGRYQRKIHVLNPKQVRKFKDAYSDLPKNDYVDAFVIADHLRFGRIASEIYMDDYRYRSLQTLTRARFDAVQNLTREKQRFANYLFLKCSGIAQDKDIPNTSATTLALMEAFESVDELANCDLESLTAFVSAAGRGRFADPEATAKAVQAAARGSYRLPKTVNDSINQAMSVSIASMRALESQIKVLEKAIEQQFEIIPNTLTSIPGIGLVYSAGIIAEIGDIRRFESQASVAKYAGLVWTQHQSGDFEAQNTRLIKSGNRYLRYYLLEAANSVRRCDSEFRRYYDLKFHEVNKFQHKRALALTARKLVRVVFRLLKDNRLYIVSES

SEQ ID NO: 217197 - protein, 341 aa, unidentified
MDYYAGIDVSLECSSVCVVDATGKIAREGKPASEPEALIAWFRSGFAVGRIGLEAGPLSQWLYAAMKQAGLAVELLETRHVRDAFKAMPVKSDRNDARGIAQLMRLGWFRPVHCKSIGAQETRAVLTARKLVQSKLRDVENSLRGILRGFGLKVGKTTERSFAGRVHELVANHASLAIIAEALLSVHAVLLREFKVFEKQVRSLARSDAKARLLMSTPAVGPIVALTYASAIDDPGRFKSSKRAGSHFGLTPKKYQSGETDHTGRISKIGDTSVRTALYEAAHIMLVKPLKGCSQLKSWAMRIARRAGMKKAKVALARKLAVILHRMLADRTPFNAAAAAA

SEQ ID NO: 217198 - protein, 402 aa, unidentified
MIFINCLGIDISKSESVVAHYKDEVLVKEMVIQNNQNGYRYLKNYIKHLDSLFILFESTGIYSRGMKRFCEIHKIDYLEMNPLEAKFKTSSLRSWKTDKSDAHKLALLAFRMKGSKVQRHPEEIYFELRERARFHLEMEINQNRLKVELVETLHQTFPGLEKLFTNRYSKIALNIAKAFPHPDFVSTLTHDELVEKVLHSTDKGISVNKAHKYVQKLIEIKNNSFPNVDKSSFLLQKVQYLCDKLLIGIEEMKEFDQEMIDLAKNTTEFENIISIPGIGELTAALLIGELGNIREFKTNKQLNAFVGIDIKRYQSGTSKSKDTINKRGNKKARRLLYLIIMNIIRGRNHYQSHIVDYYYKLREQPHGKTHKTAVIASINRLLKTIHYLIVNNKLYDYQKAPH

SEQ ID NO: 217199 - protein, 360 aa, unidentified
MRYVGIDYHKRYSVLCATDERGQELKRRRISGNSASGFAQFFSELGEENKVVMEACWNWGWLYDLLGEIEAVGEVVLAHPYKTRLIAEAQIKTDQLDAQNLANLLRADLIAQSHAPSAATRARKHLLRQRLFWVRLRTMLRNRMHAILDRQHGLERPQLKNFFSRRGQSWIEKVKLPCAEDRPLLEQDLEVTELLDQKIKQLDRQIGRTQSAEEKLLESIPGIGPLFSSVIGTEIDGITRFNSAAKLAAYAGVVPTTHASGGRVFNGRLLWQCNKWLRWALIEASWSAIQFSGYFGGIYRNARARGKNKNVAITVVAHRMAKIIWLLLKEQRPYTETLPDRSADGVTAAPRRKPALACAS

SEQ ID NO: 217200 - protein, 337 aa, unidentified
MQIAIVGPDIAKSVFQVHGADKAGRPVLRRRLRRREVLRFFANLERCLVGIEACHSSHYWARELIALGHEVRLIPTQYVRPFRRGGKNDANDAEAICDAASRPAIHSVAVKSAEQQAIQSLHRTRERLVHERTAKANQIRSLIAEEGIICAKGIAQLRRCLHELLAERDRNTPLLCSLIALFLEQLAALDQWIGELDAKIRELAKNSAVCRRLVRLPGVGPVIATAIAGTVGNAHAFKNGRQFAASLGLVPGQRSSGGRTVLLGITKRGDSYLRKLLVQGARAIMRVAKRHDDPQSLWVRQLLARRHKHVVAVALANKLARTIWALLVKGEAFAMAR

SEQ ID NO: 217201 - protein, 515 aa, unidentified
MELDADFIKSLVRTVMREWKAKPISPSNAPEMQQALQAALSQPELQRALLAEVIQAAQGDKKLRKALAEEAVQLDILQRLNPNAAGLDIGAAEIWACVPHGRDPQPVRMFPTFTSDLKALADWLQACGITTVAMESTGVYWIPIYELLEERGFQVFLVNARHLKNVPGKKTDVLDCQWIQQLHTFGLLRASFRPAQDMCALRAYVRHRDNLIRYRSAHILHMQKALAQMNVQLTLVLSDITGETGMRIIRAIVAGERDPQKLAQFRHPRCAKSEAEIAQALTGHYRPEHVFELKQSLALYDFYTDQIKACDAELEAKYTAVKPVVDVAAHPLPATPKSKHNRPKNSPDYDLRTYLYQMTGVDLTAVDGLNTVLVQDILADIGLDMSPWPDDKHFTSWLRLAPHNDISGGKVLRSTTGKTTNRAARAFRLGAQAVSRTDTALGAFFRRMRAKHGAAKAIIATACKIARIVYHMLKDKREYVDHGADYYEHKYQEQVLKRLKRQAAKLGMQLVPATA

SEQ ID NO: 217202 - protein, 379 aa, unidentified
MQSIKTWAGVDVSAKMLAAHRLREGKQEGREFANDAAGHRDLLKWLGKRARVCVEATGVYHLQLALTLQAAGVELMVLNPRVAKDFARALSNRSKTDQVDARALLEYVQRMAFTAWQGPRPSVLELRELARRISELVHAAVDEKNRLHARNVAAISSTVVGDVKAHVAQIERRIMQIEKAAVTVIDDDDDLRKQFQILRGITGIGRRSAILLLGELAVLDPAMTVKQLVAHAGLDPRVYESGTSVEKPARISKVGNARLRAILYMNALSAVRHDRGARLYFAQMVARGKKPMQALVAVMRKLLHGIWIVLQRRVWFDSAVLFAASLAKAESSDSAVAANEPEPSQDHPQGRSEAEELREQLDPGSAEATRSRKRRSKAA

SEQ ID NO: 217203 - protein, 341 aa, unidentified
MDHFSGLDISVKETSVCIVDDKGRIVRELKVASEPDALLAVLTNHHFKRIGLEAGPLSQWLFSALAEAGLPVICVETRHMRAVLKAQINKTDRNDARGIAQMMRAGLYRPVHVKTLRSQKLRMLLTHRKLLQSKAIAIENDLRATLRNFGLKVGIVGKVKFEERIKELVEGLPDLVVLVEPLLIVRRVLREQLGILHRRLLAIVRDDDVCRRLMTIPGVGPVVALTYRATIDVPARFQSSKAVGAVLGLTPSKYQSGEINRTGGISRCGDEMMRAMLYEAAQIMLVRSTKWSWLKAWAMQIARRRGVKKAIVALARRLAVIMHRIWVDGTEFRWTREVAAG

SEQ ID NO: 217204 - protein, 397 aa, unidentified
MIAVGIDVSKSKSTVAILNGDGSIRAKPFDVHHVADELQALVDYIKRTSEPPTILMEPTSHYHYPLLKAFTEAELPVCLINPYQMKKYGDIELRKAKTDKRDSLRIAQYALEKSYSLIPYTPQDQKYEDLRFLSRQYSQRISTLTVAKVQLLSLLDETMPGITTILPLKSRDPDNCVLLRFIKRFKSFDVIRKMGKTRFLDSYQVLVKKTKDRFAGSKGLAIYELVLNSVTTRGENPLSAMTQDQCVDLVSTSQKAADEINLQMRIIAETMPEYKVLRSMAGVGDRLGPIILGEIGDIRRFHSGKALNAYAGNDAPPYQSGQFESRNRHISKRGNPALRKACFEVMQALKLTKPQDDPVYLFLLKKEQEGKPYNVAKMAAVNKFLRIYYARAMELYK

SEQ ID NO: 217205 - protein, 356 aa, unidentified
MSQKLDTSPAVIGIDIGKNSFHIIGQNQRGAIVLRQKWSRGQVEARLANLPPCLIGMEACVGAHHLSRKLQMLGHDARLMPAKYVRPYSKGQKNDFRDAEAIAEAVQRPTMKFVATKTANQLDLQALHRVRERLVGQRTGIINQIRAFLLERGIAVRQGLRFLRAELPGILATRNDVLSPRMLRIVEDLAADWRRLDERIEGLSGEIERLARQDKGCERLMTVPGIGPIISSAMVAAIGTGDAFSKGRDFGAWLGLVPKQISTGDRTILGGISRRGNRYLRSLFVQAAWVVLVKVGPKHWDRYGLKSWIEGARKRLHHNVLAIALANKLARIAWAVLNKGRAFECVMTNEMTSRPA

SEQ ID NO: 217206 - protein, 402 aa, unidentified
MNCVGIDVSKGKSMIAVMRPFGEVVVSPFEVRHTANELSELAGLLKNLDGETRVVMESTGNYHAPVAWLLHDAGLYVSVVNAMLVHDYGNNSLRRAKTDKKDAVKLANYGLDHWRTLPRYIPEEDTRLMLKTCYRQYQQYSKVQTMLKNNLISLLDTAFPDANRLFTSPPRADGSEKWVDFVATFWHCECVCGLSKKAFTAKYQKWCRKHGYNFSQDKALDIYASACGRFGVMPKTNTAKLLVEQAISQLQTTSAALAALKQEMQSLAASLPEYPVVMGMFGVGPTLGPQLIAEIGDVRRFHSKKALVAFAGIDAPPYQSGQIDVRSRSISKRGSASLRRTLFLVMGVLLQCAPMDEPVYQFMNKKRSEGKPYRVYMMASANKFLRIYYASVKAYLDSLEHD

SEQ ID NO: 217207 - protein, 354 aa, unidentified
MLIIGCDFHTRYQQIAMAREETSELLVERRLDHESGEAHAFYRSLQSSHEPVRVGIEATGPMHWFERLLTELGHELWIGNSAKIRASEVRKQKTDERDARLILDLLLAKRFPRIWVPTPAERDLRQLLWHRHKLVRLRTMLGNQLHFLAMSQGLCRKKKLFTKKGRAELGNLTLGPWASRRRAELLKLLEQLDPPIAELDRAVLEEAQRREDAVRLMTHPGIGPVNALAFVLIIGPITRFPYSRKITSYLGLNPTEESSGGRRRLGGISKQGNTMVRWLLIEAVHHAVRQDPALRQDYQRLKFRRGHAVAKVAIARKLAVRMYWMLRSGADYAQLVRRQGSPGPTLVNASSSLG

SEQ ID NO: 217208 - protein, 388 aa, unidentified
MKQVTTIGLDLAKKVFQVHGVDAAGVVVVRRSLRRRQVLAFFAKLPSCLVGIEACATAHYWAREIGKLGHQVRLIPPAYAKAYVRRNKNDPADAAAICEAVSRPSMRFVTIKTEAQQAAAGLHKVREMLVKQRTMLINTLRGLMAEFGVVVAERPRHVSELMAILADRTDRRIPTPLHEGLSALVETLGGLERRIEIVDKQILGWGRDNATCRHLITIPGYGPVLSSAMAAMVVAPAAFAGARHFSASLGLVPRQDGTGGKVKLGPISKRGNGYLRRLLVNGAMAVLCSKRAKEDPWLAKLLESKPRKVAACALANKMARIGWAVMMRQEDFSRRQHDQPRPSPSQSGTVLAAVKTEARACGGGLRPVLTAAAPGATRKPGRDGETAL

SEQ ID NO: 217209 - protein, 430 aa, unidentified
MKSNTQNAKIEAITEKTLILGIDVGNETHYARAFDYRGIEYSRKPFKFSNTEAGFVTFKEWILDLKERHEKDKVVPGMEPTGHYWFNLGKFLQDNEMKPVLVNPHHVKKSKELDDNNPTKNDRKDPKVIAGLVREGRYMIPYLPDGVYADLRTASNIRFQLQAELTRIQNRISRWFNIYFPEYKTVYGKPDAKSGILILKAAPLPEDILTLGIDGVNQIWRDAKLRAVGKARAKTLIEAAGHSVGSKEGAVSARMEIRMLLEDYESRNTRLQEVMVLIEELVKGIPMAEKLLEIKGVGIRTVSGFLAEVGDISRFNNPKELQKLAGLALVENSSGKHKGGTTISRRGRKRLRYLLFEAAMSLVAKNPEFRELHNYYTTRRRNPLKKMQSLMAVATKLIRVFYAMLTKGVDYDPKKMVSDIRRPEAYLQAA

SEQ ID NO: 217210 - protein, 349 aa, unidentified
MIIGGLDVHRAQVTFDYIDTDTGEVCRGQIQPATRQSFRRWLGARFQGRLDVQLAVEGCTGWRYLVEEMQRAGIEPHLAEPADTAAQRGRKKRAKTDRLDAKLLRELLSQGRLPESWIPPAHALEARTRARTYLALAEQRRRWLQSIQAQLYHEGVPRVESLLTHQGRDLLARAELSGAGREKVEMLLELIVALDCKLQVLKSQIERLARALPGPRALDRLYGVGPLTAVVIWAEMGDCRRFKRSDQAVRLSGLDVTVWSSDSKRAAGHLAKQGSPALRWALYEAAMCAAREGSPDHAYYKSVKDRLKGKRAAISVARKLARMCYHILRELGEEAMAPADCPVTQVNAA

SEQ ID NO: 217211 - protein, 355 aa, unidentified
MTQINVANRYSTFIGIDVDKHSYSFTVKERNTMNRSKKIPADPKQLYNYIKNSFGHKKVLCAYEAGGSGFGLYDYLKKKRISCLVIPPSAIPVARNEKVKNNRIDSQRIADYLKADNKIKPIRVPEGSYRELRHLTKIRENYVQSRTIAKQRIKALLLSANLYSVYKDADNNWSYSYIENLKQISCSEAVRLRLNMLLLDLEYARNQTLAIHRQLKKFCQDQPEIDKYRSYLQSIPGIGFISAVSLLARIGDPSLLKNERELGAFLGLVPREHSTGDAVNQGSITHLGNQRLRGLLIEAAWTAIRIDTQLGKFFERIKSRHHPRIASRKAIVAVARKLTLIIYRILKEQRNYVRH

SEQ ID NO: 217212 - protein, 363 aa, unidentified
MSEITRVGVDLAKQVLQVHAVDANGRRVAARSLSRDNFMPWCAQLPPGCLVAMEASSSAHHWARKLVALGLDARIIAAQLVTPYRLQGKSGKNDANDAAAICEAASRPQMHFVPIKSIEQQSMLCVHTLREGIKADRTACINRIRAMLSEFGLVFAQKTCNLRQAPPGVLEDASNELNGVARLAIQRAWANWQELDEHMAWCDARIAAHGKTNAQVHQAEQLMGVGPVTASALVAAVGDFKQFRNGAQFGAWMGLTPKQNSSGGKTSLGSITKRGNIYLRTLLIQGARSAVLTAHKRDDPISKWAYQLREKSGWQKAVVALANKNARILWAMFVRGAFDARHVSVKPGAAQAAQTPPLAAVPM

SEQ ID NO: 217213 - protein, 398 aa, unidentified
MPIPSVSDRWPKEGASTGTYLSLEGRQWGDGRLNSEPKLREVFGKLQAKHGAVLVVVDQPASIGALPLAVARDMGCPVACLPGLTMRRIADLYPGEAKTDARDAFVIVDAARVMPHTLRSVDLEDETIAELEMIVGFDDDLAGEATRISNRLRGLLAQIHPSLERVLGPRVRHPAVLKLLDQFGSPAQIRKAGRRRLITLIRPKAPRMAERLVEDIFTALDEQTVVVPGTDAAALIVPSLASSLQAVLDQRKLLASRIEELLEAHPLSKVLTSTPGIGVRTGARILIDVGDGSSFPSAAHLAAYAGLAPATRSSGSSIRGEQPSRRGNKQLKRAFFLSAFAALADPASRTYYDKMISQGKHHKHHTQALLCLARRRADVLFAMLRDGTIYEPQPAPSA

SEQ ID NO: 217214 - protein, 346 aa, unidentified
MEYFIGIDVSLEASSVCVMDQGGAVVKETKVLSEPDALIAFVHGLDHEVSCIGMEAGPLSQWLYKHLTEAGLTIVLMETRQVKGALKAMPIKTDRRDALGIAQLLRMGWFRPVHCKSVSSQEIRALLATRKTLQGGAIAIELSMRGLLRGFGLKVGLVSKGLLDARARELAEGNSTLKALVTSMLRGRAALRAELIRIDKRLRDIARTDGACRLMMSVPGVGPLVALTVKAGIDDPGRFRSSKMVGPHFGLTPRRDQSGERDVVGGISRAGDAGVRTALYQAATSMLYHSSKNSWLRAWGMRVAQRRGMKRAVVAVARRLGVVLHRMWADGTVFRFSQTDALVKGA

SEQ ID NO: 217215 - protein, 338 aa, unidentified
MEAYAGLDLHGDNVYCGISDENDKRLFENRFPCDIETICKALEPYRAYLKGVAVESTFNWYWLVDGLKERMFPARLASPSGMEQYNGLKHGNDKSDSFFLAKMMRLGILPEGYIYPKEERAVRDLLRRRMRLVQIRSGRILSLEALWNRETGKELSSNAAKTLTEKDLEEALNDKNVRMSAKQMTEHVAFLNGQIKDLEKLVLKQTDLKSEFAGLLTVPGIGKILAMTIVMETGAIGRFPSPGDYASYCRTVDSELSSNGKKKGKGNTKNGNRSLAWAYVEAANFMVRHCPEAKAYFQRKMSRTLRVVAIKSLAAKIAKACFFIMRDGVSFDVKKMFG

SEQ ID NO: 217216 - protein, 325 aa, unidentified
MSLSIGVDVSKGKFDVALLTAQSKYRCKVFHNTASGFEEFLHWIETHVEQGRSNAQVCMEATGTYHQELANYLFDHQVRVFVVNPLRVKRFVESEGLRNKTDKGDAKALARFALHNELEPWEAPSKGVRELQALVIRLESLQTMRLSELNRLEVAHPSICDSIATIVAALESQIETVRQLISKTIDDDPDLKQRQDLLETIPGLGSTSIPSLLAYIGKPERFSTAKALTAYAGLTPAIRQSGTSLDKRQGLHPMGHRALRKALFYPAMTAGRYNPIVAALWQRLKAQNKPGKVILVACMHKLLAIAYGVLKSKRPFDPSLVPQSA

SEQ ID NO: 217217 - protein, 318 aa, unidentified
MPEPTVVGVDIAKRTFDVAIGVTGNTETFSNDDAGHDALLTKLADMPIDLVVMEATGGLERDLACALDAAGFAVAIINPRQARNFARAMGYLAKTDRIDAKALAELAQVLARHPERDRFINPLPTPEQQALQALVARRRQLVAMHVAEHQRLSICHTAAQKSIEAIILAIRAQIDDVEAELAKHILTHHAELASRLESVRGVGPATVASLIADLPELGQLSRRQISALVGVAPFNRDSGQMRGKRAVFGGRGQVRRSLYMAALAAIRFNDVIKRFYNRLVAVGKPKKVAIVACMRKLLTILNAMVRTGKSWDDSYHPA

SEQ ID NO: 217218 - protein, 388 aa, unidentified
MLYVGIDIAKLNHYASAISSDGEVLIEPFEFTNDNDGFRMLLSKLDQFEKESIIIGLESTAHYGYNLVNFLVSRNFRVCVINPLQTSAMRKNNVRKTKTDKIDTFVIAKTVMLIDRPRFVTLYDIGLMQLKNLGRFRQNVVKQRTRLKIQLTAYMDQVFPELQYFFKSGFHHRTCYALLKEAPSPDMIASMHLTHLTHLLKSNSHGRFKKETALELRVLAQKSVGTSDKSLSIQVTHTISQIELLNDQLMDIENEMTDIVRSLDSPIMTIPGIGYVNGGMILGEIGDIHRFSRPNQLLAYAGLDPTVYQSGNFQAKKTRMSKRGSRALRYALINAAHNVVKCNDTFRNYYDSKRATGRSHYAALGHCAGKLVRIIFKILTDEVAFDLD

SEQ ID NO: 217219 - protein, 345 aa, unidentified
MYRTRVGVDLAKEVIQVCIYRNKKVQSNVEMTPNEFLCWLFQNKPATIIFEACGTSNYWKQKAIEAGHDARLISAKLVAVVRQNQKTDKNDALAIVQAALLPDVTFIGGKTVEQQQLQSIKRLRELAVKHQGASQKQLVSLLLELNIRIPNRKGGMICAIEDVLEDAENGLSAECRTAIYTAKELLKELIIAVQCYDDCLEKSVVIHSDCKRLLKLEGVGTMNAINLYLALGCSDIGVFSKGKDASACIGLTPIQHSSGGVVKLGSIGRHCKNSILRSQLVCGAMAAVNQAVMREAKTTKDFWIKGLVERRGKKCAAVALANKTVRTAFAMLTQGTEYKAELLAA

SEQ ID NO: 217220 - protein, 315 aa, unidentified
MMGVNAAIDVGKEWLVVQLGSGGEQFSEPNELRAIKRIAKRLSQAGCERVLIEGGSYQSVLIAALRAAELPVVVVNPRRVREFAKSIGQLAKTDDIDAGMLALYGERTQPPLRELPDEQSQTLRASWVRREQLIQMLVMEENRLEHAAENAKAVRHNLRSHIDYLQKQIKQADDDLDRGVRNSALWDKYEILSSVPGVGPVLSVALLSDLPELGRLNRGEIAALAGVAPFNCDSGTLRGQRRIEGGRPRVRRVLYIATLAAVRCNPMLKPFYRRLRAAGKPAKVALVAAARKLLTILNVMLKTKTAWSPPCQVAE

SEQ ID NO: 217221 - protein, 356 aa, unidentified
MTQEAYGVLDYDVFVGIDTSRNSFAVTVLDHYGLEKTKKIPSDPENLHQYIQRVHSGKKVLYGYEAGPTGYGLRDYLRGAGERCMVIAPYNIGRGRNERVKTDRIDSKKIATVLRAAEVKEIRVPEGAYRELRHLVKIRESYSKLQTQSKLRIKSILLLENLYIQLPEEGKRWSNRFIRCLEQFIARTSTAASKRIAAYMNDLKYSRQQLSDATRELKIYSAGKETIRQNLDYIESIPGIGFITAVTILSSIGDPKGLRGVREMGSFCGLVPCERSSGEQIRRGEITHTGSRRLRTLLVESAWIAIQKDVGLRRFFESLYRRSSSKQKAIVAVARKLSMRICSVLRESRPYKLATV

SEQ ID NO: 217222 - protein, 342 aa, unidentified
MQIHSVGIDLGKTTFHLVALGAAGKVLVRKKFTQKQLLAFTANMQTALIGLEACSGAHFLGRALRDQGHDVRLIAAQFVKPFVKSNKNDFVDAEAIAEAVERKNMRFVPIKTDDQLDLQAIHRVRDRLVSRRTAVINQVRAFLLERGMVFAQKPAKLKAAMADILENAEANLTPQMRNLIDMLWGEWKTVEQQIEELTDKLEQISASDAGCSRIRKIPGIGPIVATAIVAAIGNGAAFRKGRDFAAWLGLVPRQYSTGGKAKLLGISKRGNIYLRKVLIHGARAAAMRIKRDRAPIGAWMDALEARAPRNVLVVAMANKLARIAWAVLSSGNEYRPVASTPA

SEQ ID NO: 217223 - protein, 360 aa, unidentified
MKKDIKERSGLTVGVDLGDRWSRYCVLDEQGQILEEDTVATTGRAFGKLFSDRPAARVVIEVGTHSPWVQRLLEELGHETITANPRYVRLIYSSRNKNDKLDAERLARLARVDTKLLHPIQHRGGTAQADRALLRSRNALVECRTKLINHARGIVKSIGGRLPSCSTTCFHKRVREDLPDELKPALSPVLDTLAALTKKIQCLEARIARLAAKRYPETGLLRQVSGVGPLTSFSFVLTLEDPERFKNSRAVGPYLGLRPRQSQSGESDPELRITKAGDTDLRRLLVGSAHYILGPFGPDTDLRRWGLALATRGRKNAKKRAVVAVARKLAVLLHRLWVTAEVYEPLRNNKSLIVPEAVSA

SEQ ID NO: 217224 - protein, 449 aa, unidentified
MKRKARNKKRLQEHLEQVNLYAAGIDIGSTSHFVAVPSSLDDRPVREYSCFTGDLEHMADWLKDVGITTIAMESTGVYWIPAYELLEERGFEVCLVNPRHLKNVPGRKTDVLDCQWLQQLHSFGLLRGSFRPSGEICVFRAYMRQRSMLVESAATHIQHMQKALRQMNLLLDNVVSDITGKTGMTIIRSILSGQRDPVILARYRNHNCKNSKEIIAQSLKGHYKEEHLFSLRQAVELYDFYQRQIADCNQAIAMALDKIEGPDDLDELPPQKSKARRKNKSLPFDVRQNLHNITGVDITKIDGVKETTALKIISEIGTDMSAWPTVKNFASWLGLSPGNKITGGKVISSKTKTCANRAAEAFRIAAYSLTKSKSALGAYYRRKRSQLGPPKAITATAHKIARLVYSLLKYGTKYVDPGQDYYEKQYRDRIIKNLHKKAKSLGYEMVPQS

SEQ ID NO: 217225 - protein, 360 aa, unidentified
MERYLGLDAHGQSCTFGVIGPSGRRIRHDVVETNGAALVQYVKSLPGRKHLCLEEGTQSAWLYEILSPHVEEIVVVGLYEKSRGPKDDLRDAFQRAEELRTNQVQTSVFKAPRSFATLRELSRVHTMLVRDVVRVQSRLKAMYRGRGIPVAGKTVYGARGREEWLAKLPASGRAATARLYEEYDALLELKQAAEKEMLSEAAKQPIAKVLATAPGLGPIRTAQLLPVVVTPHRFRTRKQFWAYCRLAIVMRSSSDWVRTEHGGWARARIQQTRGLNRNHNSRLKSIFKGAATTVLTSYPTDPLHEHYRQLTAAGTKPNLAKLTLARRIAAVVLRMWKDGKEYDPETLRAKQSTDSASPTP

SEQ ID NO: 217226 - protein, 347 aa, unidentified
MNKPLYFVGIDVASATFTSAVGQMGEKWQIVVRPAQFANVYDSFPKYLAWLQEHEVKPDNSVICMEATGVYNEVLAHFLVANQYAVAIEPPLKVKRAFHPAGHKSDPVDSCQISEYAYRFWDELSSWAPRHELLEQIKTLLTTREQFVVEKTGHINSLTALKRKAIHTPLAEKMHEKAISELKEHIRQIEEEIQRLIDQDPDYRTLVGLLISIPGVGLLLAAHMLVVIQSAPLPLSPKFLAAFIGICPYEDSSGTSLRHAATSRHYGPPALRKLLFLAALSICAHNPQFRTYFLRKVQEGKPKQLVINNIANKLLKVMVAVVRTQTAFIANYRSVNPGLLSMALTKS

SEQ ID NO: 217227 - protein, 327 aa, unidentified
MAKRTTICAGIDTGKRKLDVALDGSSEQLQIDNTPEGYKVLLDWLRRHRVKRIGIEASGGYEQAVVAELRRKGIVVVVFQPAQVRAYAKFHLQRAKNDKIDAALIAACTAAVKKIHTPPDARLLPFAEHLTMINQIGEDITLLKNRLETCRNERIQQVWKEDISRLAKRERTEFKALVAAIREHRDLAERLDLIYSVSGSGMPTAVAILVRMPEIGQLTREQAAALAGLAPYDDDSGNHVGVRHIDGGRQRLRRALYTAALPASFRWNPHLITLYKRLIAAGKGHKRALIACARKLLIFVNAVVARGIPWGHERPPTVAASALPQTG

SEQ ID NO: 217228 - protein, 367 aa, unidentified
MKRVIGMDIHRTFAEVVIWEAGQLRPAGRVDMSRAGLEGFGRTLSKEEDEVVIEATGNAMAVVRALEPHVARVIVANPMQVKAIAYAQVKTDKIDAGVLASLRAANFLPEVWLPDTDTERMRRQVARRNQVVRHRTRIKNEVHAILHAHLVPCCPHDLFARVGRDWLGRQTLPDDERAAVARHLRELDRLGEDLDVLDRDIAQAAINDPVVKRLLTITGVNLIVAAGLVAAIGDVRRFASSEKLVSYVGLNPRVRQSGLGLAQHGRISKQGRSHARAMLVEAAWAAAKAPGPLRSFFLRIRARRGHQVAAVAVARKLAVLCWHLLTKEVDYQWARPALVANKIRAMELQAGQPARKGNKLGRLTFTT

SEQ ID NO: 217229 - protein, 339 aa, unidentified
MGIVGGFDLHRRQITYDYIDTSTGEARRGVIKPASRAEVRDWLRHFEGRDAAFVLEGTTGWRFVVEELRRAGIDAHVAEPADARALRGPKRRAKTDRADARHLRDLLLSGSVPESWIPTEFIADLRTKVRLRKALVDQRSGWIKRIHAQLFHHGLPEPPNPHSLHGRQWIAAAPLPPVAHQVVDVAYEMIDALDVQVDKLDAELRAIARRQKGCLALQTQWGVGPVISTSILAELGDASRFSSSRRTVRYAGLDVTVDDSDGKRTRGHLSRQGAPVLRWAAFEASNTAWRKASPDHDYYIATKARLGTKRARISVGRRVLRRSHHLLAALGEGAIEPVG

SEQ ID NO: 217230 - protein, 338 aa, unidentified
MQGWATKEDGMTSAQVFVGIDVSKAQLDVALRPEGRLSAPNDDAGHAQILERLRAVAPTLVVLEATGGLEIPITGILAAAGVPVVVVNPRQVRDFAKATGRLAKTDALDAQILAHFAEVLRPTLRPLPDAQTQVLAAILARRRQLVEMLTAEKNRLGSASTPVRTSLRTHITWLERELQHTNTHLADAIHQSPVWREKDDLLQSVPGIGPVATSTLLANLPELGTLTGKQIAALVGVAPLNRDSGTWRGTRTVWGGRAQVRAILYMSALVATRFNPVIRAFYQRLCAAGKAKKVALTACMRKLLTILNAMLKHRTRWAHPTGEAEAVRDGQLSPSGGY

SEQ ID NO: 217231 - protein, 342 aa, unidentified
MIDTMIGVDLAKNVFQLHGASLTGEIKFRKKLTRVQFQKFIAKQPACIIVFEACGGAHYWAHEAQRLGHHAKLIAPQYVKPFVKRQKNDAADAEAIVIAAQRPEMRFVEAKSSEQIARGVVFRARDRLVRQRTEQINALRSVLYEQGRVFSKGTHQMKKIAEYLQQVDNGLLSLVREECDELLASISDLTTRIQAKTLKLKKLSQQSEISRRLQTIPGVGPLTAMAVEAFAPSMDIFRRGRDFAAWLGLVPKQHSSGGKERLGKISKAGQVDIRRLLIIGAMTRIAWAGRKPCEDGSWLDRMLKRKPKMLVAIALANKMARTIWAVLTKEEDYRDPAKIVAA

SEQ ID NO: 217232 - protein, 416 aa, unidentified
MEKRHHKVYVGVDVHHQIHRVAIMPIALLHRSESNWKEAKFLDIKNDYADFDRLDVAIREHVLCSNEAAIAVDHTGGHYSEPLVYFLQSRGYDVYHLEAKAVKAARERLLDEESKSDTIDAAGAAYLLYLRDVHGFSFRISAVTPELGSKASVLRCLVIQRQQYNKLATQLTNRLHQFLVAVFPEAEAKYFTKLLRIVPHYPTPRDIVTSQGLAGVKYVSRKDKELLIALAGQTVGAPGDVYRELVRDLSLKRNEAIARRESVTHFIENEVATHPYGEILLSFPYFGSIAAATIIGVVRDTDRWPDKKKLKKALGVYGTLKQSGTSTGKGRMGKEGSRHGRRALFQVVLRCIVRNAPDNDFKDYYLRQVARGKPRLKAVVATMGKLAEVIYYCLSTKELYQYQGKYRSVGRADPDD

SEQ ID NO: 217233 - protein, 404 aa, unidentified
MYGPFNVASSTRIRFAVSLQLPRATAPSLVRRVEVVRVQVAQDDQEIIARVAALDIGKAEVVCCVRVPGQGPRARRMQEVRTYTTMTRSLLAMADWLTELGVTRVVMEATSDYWKPPFYLLENTFETWLVNARDVKHLPGRPKTDRLDAVWLCKVAERQMLRPSFVPPPAFRELRDLTRYRVDLITTRTSEKQRVEKLLEDSMIKLSVVASDIFGVSGRAMMAALVAGERDPKVLADMARGSMRGKTARLEEAFTGRFTDHHAFLLRTMLARIDGINTDIDIVQGRIDEQIAPFAAAVTRLDEIPGIGITTAQVIIAEVGLDMTRFPTPDHLASWARFAPGISESAGRKKGGSSTGKGNRYLALDQACRRVVSTGLKGKGLTLPGFATPTLPSGKGLCGEEDIA

SEQ ID NO: 217234 - protein, 357 aa, unidentified
MKKRAQDILRNEKIFVGLEDSKKTWQLCVRNNGVIIHETSMPAKFEVLRNYFNNKFPECQIQVIYEAGFKGFELHDELEANGFDCIVTPPHTVTEEKCQRKKNDRIDCRRLAKNLENGDYHSCYVPDKELREDRQISRTYEQIQIDITRVCNRIRRTLEFHGLDNGLSPGSWNKAMYARVKLHLDDIEISQSLRFSIKIMFNELEQLRQLRKEILQQLRTLAKSDRYKKNVELIQSTPGIGMFTAIRLALEWGDVSRFKRKEEFASFLGLVPSDYSSGEKERQGHITKQGNSSVRSWLVECSWMAIKHDPVLLDKYRRVLKNCGSKKKAIVAVARKLAIRLRRILLNGEPYVVGVVE

SEQ ID NO: 217235 - protein, 357 aa, unidentified
MAALSIADVPANVTVGVDTHKHSHIARAKDGLGRHLGQLEIGTDPRGYAGLLAWAQGFGPVITFGIEGTSSYGAGLTRFLRAQGQAVIEVLRPVRRDRRFGSKSDPIDADAAAGAVLSGKATAVPKAGDAGVEMIRALKIAKQTAIKARTQAVNAVKDLIVMAPDPIREQLRNLKTPALVRTCSAYRVAGASDPTSAIKLSLRSMCRRYVVLDQEVRSLEKELDALTIRLVPQLRQLFGVGQDVAATLVLAAGNSGGRLRSEASFSMLCGASPIPASSGMVQRHRLNRGGDRQANAALHQIVVVRLRYNEATRAYFAKRKADGKSKKEIFRCLKRYVAREVYRTLVDPREEAARSAA

SEQ ID NO: 217236 - protein, 348 aa, unidentified
MTLVGCDLHARDQQVAVLDTATGEIQERRLVHDGDSVEQFYTTLPGPVTVGIESTGYALWFHALLHRLGHEVIVGDAAKIRAMVVRKTKTDRRDAAHLLDLLRHDRFPTVWLPDPAVRDQRTLLAHRMRLVRMRTMVKNGVHAIALNYRLALGPSLFTRAGVAQLQALSLPAHTSCRRSESLELLSWLNTHIKGLDDQIEEAAHAHPEAQRLMTHPGVGPLSALATVLVLGSVTRFPTSKHVVSYIGLAPAIESSAGKHRLGRITKQGNALLRYVLGQAGQAAIKRDPDLKRLYYAVLHRRGRSRAKIAVARKLLVRLYVMLRDQIDYPTFLHRAPAVARRKEMPSTS

SEQ ID NO: 217237 - protein, 342 aa, unidentified
METAVTIGLDLAKSVFQVHGVDASGEVVIRRRLIRAKVLDFFAKSPRRLVGMEACAASHYWGREIRKLGHDVRLMPPSYVKAYVKRQKNDAADAEAICEAVTRPSMRFVEIKSTEQQSVLVLHRVRQMLTRQRTQLSNAIRGHMGEHGLVAPVGRNGLARLIAIICKDDDDRLPEATRASLRFLVAQLELVNAQILENDRRIRTNARATETGRRLMEIPGVGPVLASAIVAAVPDPRAFKCGRNLAAWIGLVPKQNSSGGKERLGGITKQGDRYLRQLLVIGSLAVIRYAQRHGTKRPWLVQLLARRSPKVAAVALANKTARMIWAMMISGEHYREPQIAAA

SEQ ID NO: 217238 - protein, 450 aa, unidentified
MEETVIHAFVIAFVFAGRAIHMRSYHSVGRIGNEKSVDLSITNSVIGEIFMNAVGIDVSKGKSTVAVIQPFGVVIAEPFDVFHTDSGLKELVNFIKSLSGETKVVMEYTGTYYEPVANALHNAGLFVSVVNPLLIDDYDTNRVRKVKTDKIDALKIASYALDRWMNLRKYEPTETVRKTLKIMNRQCIKLNKILVMQKNSLIALLDCFFPNENTLFTSPRRESDGHEKWVDFVARFPHVDSVTKLTISAFATKYQSWCKKEHYNYSKSKAEQIHAYARTIVSTLPLTDAVKKLVSDAAKLLNSTLEALGTLHSEMDTLASQLPEYETVMNLYGVGKVFCSQLIAEIGDVTKLKSGKSLVALAGIDPPPNQSGKDDPKSRRISKRGSPALRKTLFLIMSIYLQRQPADEPVYQFLDKKRTEGKLYKVYMIAAARKFLRIYYARVKEVMSKE

SEQ ID NO: 217239 - protein, 436 aa, unidentified
MDPSKQQLLAGKYIIGIDPAKAKHQAVILTPDGLQLGKSFAFDVSYEGYSVALWHKIALQLPLCKTDNTIFAIETSCNLWMTLAFYLKGEGYTVVMVSPLTTHLSRPMAHHDFSRTDPKDALLIASNAHHGNFDLYQEYSTSSNAMHRLGITYDKLRKELAQNRSRLRAALEHLFPEFLSILEPDTQTAHYLLKRYLFPQEFLAMDRELEAKALAAISRHQHGMNTLLQLQVAAQRSIGVVHTLEECPAQRLTVNCWLALIEALTAQIETIFSALVSLAQQLPEYDFLRSLKGVSHLSAALFLAEVRDIHRFHHYKQIQKNAGLNLRLSQSGQYVGARHISHLGNRRLLWLLYSMAEETAKWIPEVRIKFLRRQLKICKYRKNIIASTAPLLKLIMVLVKEQRPYQMRSETLDQMRALEQQVLQRKEERQKHKHAA

SEQ ID NO: 217240 - protein, 347 aa, unidentified
MLYAGLDLSRQRLDVHVLDEDGRTVEVTAVRPDVDALRTLVATIGRHGQAVTAAIESMNGARFVHDQLELAGWDVEIADALKVKGLAPLAAKTDKIDAWVLAELTRRELVPAIWLPDPTVRAERERARFRLHLVRHRTALKNRIHATLIAFGHPVPVTDLFGTRGRALLAGLAIPEPWTTTLATSLGLVDELGTEIDACERDLRAMGAAHPYVSLLRTAPGIAWVLGYTIAAEIGDIGRFASSKKLTGYTGLCPFVRQSGRRDERGPLAKNGPKYLRWALMEAAIHAARHPVYRARYERTKERLGRQRGANVARVEIARELTTAIWHMLTKNEPFAPGRPPVHALVA

SEQ ID NO: 217241 - protein, 344 aa, unidentified
MHIASIGIDLGKTTFHLVALGERNKVLIRKKFSRAQLLAYTANLPSSLIGLEACAGAHFLGSVLREQGHQVRLIPAQFVKPYRKSNKNDFLDAEAIAEAVTKENMRFVQIKTQEQLDLQAMHRVRDRLVQRRTALINEIRGFLLERGITFAAHPIHLRKNLPAVIEDAEQNLSPRLRWLLDRLWQEWKQIESEVQMISEEIERISDEDVRCRQLRQIPGFGPLVSTATVAAIGNGAAFRRGRDFAAWVGVVPRQYSTGGKARLYGISKRGNPYLRRMLIHGARAVLFRIKRDTGGFGQWVHRLAQRAPRNKVIVAIANKLARIAWAVLSSGKDYRHQPLQPAAA

SEQ ID NO: 217242 - protein, 344 aa, unidentified
MSKKIQPKPIQPISSTLFCGIDVSAKTLAVALHQQDRAFQQRDFANTKAGHQQLIAWLSNRGGAVRVSLEATGIYSLDVALALDACPGIEVAVLNPKLVNRFAQTLRRSKTDKADAQVLAEYSLRMPFERWQRPDRVALELRAMGRHIDSLTREHTRLKNRLHAATGSASTPRCVVQDMKRSMEGLQKRIVKLRREAVAMVEKDSELKRKLARMLGIPGIGETSGVQLLSELASLDPLMGAREWVAMSGLDPSHRESGTSVRGTSRMSRQGNRHLRGALYMPAMVGVRFDPHLRAFYEALQSRHKTKMQALMAVARKLLHAIFGMFKTDTAWDGAKLFPQMKLA

SEQ ID NO: 217243 - protein, 353 aa, unidentified
MNSLTDLREVVDVVIGVDTHVQTHSAAVVDAATGGVLDEITVEATAEGYCELVEFANNHPMLRAWAIEGTGGHGAGLSRHLLEMSEIVIELDRPKRAARRNGAKSDPLDAIRAAREAMARPRLGTPRTGGERQALSVLLAARRSAINASTEAQQQVFSLVIAAPEPIRVRFRGQKLAAMLNTAANLRVHASWDTETTSTVVALRTLARRAHAMLKEARELQKAIVAIIRSWRPDLLEEFGVGPIVAATVLCAWSHPGRIHSEAAFAMLAGVAPIPANSGQVTTRYRLNRYGDRQLNNALHTVVQSRIQYQPATRDYVARRTAEGKTSREIKRCLARYVARDLYRLLENTATAA

SEQ ID NO: 217244 - protein, 390 aa, unidentified
MYYCGIDVAKRKHAIALLDEHGQPVQRPFTIENTRAGFDHLLQALAHLQEPVLIGLEATGHYWWALYEDLTRHDHPVVVLNALQVHAFRKSGVRKVKSDRTDASWIAEFLGFSQPEPAQPTTAVFLQLKEVSRFRYHLSDQIGDCKRKLLSILDRVFPEYETLFSSVFLNSSRQLLAKAASAQELATFDLAELTEFLKTSRRSRFGRTKAETVQTVARQSVGVRFLADAAQLEVRCLLAQIDLLEEQRDQVDGALAQLMDQIPQHLTSIPGVGPTTGAALLAEIGDVQRFDAPEKLVAYAGIDATVYQTGQFEARQMHMSKRGSPYLRHALWQAASMAIQYDDELRVYYDHKRQEGKSHGTALGAVCRKLLTRVYIVLKENRPYEVRTKH

SEQ ID NO: 217245 - protein, 461 aa, unidentified
MRKQKQKKRQSRKSRNEGLHVIRPNVAGIDLGSREHYVCCPSKDGLSSIRHFGTTTPELNELADWLESEGVESVAMESTSVYWIPIYELLEKRGFEVLLVNARALSSVPGRKTDVLDCEWIQRLHSCGLLNGSFRPGEAICRWRSLVREKNMMEDRRADWMRRMQKSLDQMNVQVHHAVSDISGLTGMSILRAIVEGERDPQTLAKLRDPRCRKSEAEIAKHLTGNWRDEHLFVLRQNLAMYDHISLQLDEYKAEIIKVMAELEPPDASQGEVPEIENKNKRKNIRKRGQEPLRLALYRLSGVDMTRLSGIGVETTEVVLSEMGTDLSMFPSENHFVSYINLAPKLAISGGKPIKGKRCGTAPSRIGNALRMAAVALRNTDTALGAEYRRISRRKGASVAVFAMARKLAKLIYRTLRWGQAYVDEGAKAYEERFTANRLRACKETAKQFGYKLLPMEVEAA

SEQ ID NO: 217246 - protein, 373 aa, unidentified
MLGPPAPTGGGIPIGIATEEDDMPRIADPEQAVTGGVDTHAEVHVAAVVDLVGRVLGTEEFPATAAGHQKALDWMRGHGRLAKVGVEGTGSYGSGLARYLTVHGVEVVEVIRPNRQTRRRRGKSDAVDAVAAALAALNGDAAARPKTHDGAVESIRMLRVARRGAIKARTQAANQLRDLVVTAPQSLCDRLAPLPTVERVAVAARLRPGDLTDPAGAATVAMATVARRYQMLTAEIDQLDGQLDQLVEHTAPPRLLAKQGVATQVAAALLVAVGDNPTRMEREASFAALCGVSPVDASSGKQRRHRLNRGGDRQGNSALWRIVITRMAHDPRTRSYVARRTAEGKTTKEIIRCLKRYVAREVYKTLVAVASSP

SEQ ID NO: 217247 - protein, 353 aa, unidentified
MKTYYVGMDVHRASIVIVVLNGAGKVVMQSVIETGAERVRGYLKQLRGKVYVTFEEGTQANWLHEVVRSLVTEVVVCDPRHNKLMQSGNKSDRVDAQKLAELLRLGSLKAVYHGDNGVRALKELVRSYDCLVSDTTRVMNRLKAIYRGRAIGCAGHDIYRQDRRAQWLEKLTERGAKQRAGFLYQQLAALKPLRHEAKRLMVKEARRQRAYPWLMSVPQFGSVSVAQLLAIVSTPHRFRSKRQFWTYIGLAVVTRSTADHEVVNGVLRRSQRPVSTRGLNRNHNHLLKRVFKNAASSACHGGPFKAAYERRVTQGMAPSLARLTVARQLAAITLALWKRGEQFNPERMKQQAA

SEQ ID NO: 217248 - protein, 429 aa, unidentified
MQNESIPDARGPVFCGVDTHADSHWLCVLDLRGRKVLSRQFPADAAGYEALAGAIAAAGEPACVAMEGTSSYGAGLTRHLASLGMPVREALSPARTQRRRPGQGKCDEADAERAARAAMSGSRLGTPKSQDGWVDGVRCMLAARSGAVKARTSAINTARSLLTTAPEGLRSRFRGMAGPRLMEELPSVRAEGALGAALGALADLWAAARDAALDMERAIEASLEENCPALLAMYGCGPVSAAKLAVAAGDNPGRLRSEASFAAICGACPIPASSGKTVRHRLNRGGDRQANSALHEIARQRVMRDPETAEYAERARGRGKSDREVMRCLKRYVAREAYRALMRPHEIRRPEDASELVAARRAAKVSQVRAASILGTSEKYISMLERGQRELKPIRRAYEAWVEAGLPLDWDRQAFEAERKMDSKKHLAK

SEQ ID NO: 217249 - protein, 349 aa, unidentified
MYYVGVDYRKRYSVATVLDAAGTMLARKRLDNRLDAFRDFLEPYDKDETKAVVEATRSWNIPVDILEQLVDKVILANPGEVKLIAKARISTDKVDSLSLAKLLRVGWVPEAYLRPKTNREQQLILRIRCFLVQLRTRVKNRIHDLIDRQDEAVRSTATGFSDLFGKKGMTWLRSLELGHPVDALLCQLLAVYDALAKEVRRSDRLVVKLFAADNDCKLLVKTPGIGVFFAVLIKTEIGSIERFASSSRFCSYAGVVPSTQSSGGKVWHGRIIKESNRWLRWTLVEAVRPATVASAGLRAFYEYYRRTKGNRVAKVVTARRLGCIVYRVLRERTPYFERPVQSHGRRQAG

SEQ ID NO: 217250 - protein, 344 aa, unidentified
MDNHTQYSGFAGVDLAKKVMQIHFVTGDGEITDKQVKRAEFLDFFRNRTKCLIGMEACGASQDWARKLEAMGHEVHLMSPKAVKPFVSGQKNDYNDAIGIYKAMFNGVRRVPVKSTEIRDLQTLRRIRSQVTKDKVKEINHVRGLLAEYGIVMGKSITAFNKGISSALESLKERGDVSPLVAEELQTTVESIKTKIERQKRLDREIEQLARGCKNYENFLKTPGVGPFTAAMLCVLLCDPAIFANGRQFAAYIGLAPRSRGSGGKNFIIGMPSKFNCDSESRAVFVECAQALARYKNKSPWVDGILRRKPKKVAVIAIANKLARQVWAMANKGESFKQMTILTA

SEQ ID NO: 217251 - protein, 482 aa, unidentified
MKKEKANQAERAKRPTRRRRKELARRIWSDKPGLDVVHRDAAGIDIGSREHYVAVGPDRDAEPVRVFGCFTTDLRRMAEWLKKCRIKSVVMQSTGVYWIPVYDVLEQYGFEVWLVNAQDTKNLPGRKSDVQESQWLLKLHTYGLLRRSFRPTPEIRGLRTCWRERGEYVQQAGSCIQRMQKALTEMNIQLATVLSDLSGDTGMNIVRSIVAGERDGKRLAEFRDPRVKASKQTIAKSLEGTWLPEQLAILQRQLGDWDHIQRQIAACDVDLQAMLQQIPTAQVQHQQALAAAAAPVDKRKRKKNGKSSKNEPKFNLAAELQRVTGVDLSRIDGIKAMTIMTVISEAGLDMSKWATEDHFVSWIGLSPRNDVSGGKVLKRKTRKVKSRLATALRTAATTLRKSDSYLGAQFRRLRGRLGPPKATTAMAAKQARLVYRMLKYGQEYVDKGAVIYEQKYREQQIRFLQKKAAQNGFALVPVQKHA

SEQ ID NO: 217252 - protein, 359 aa, unidentified
MREQRNKISFRGQKIYVGIDVHLKSWSVTVLSETSVLKKFSQHPSPEALYGFLTRSYPGAEYHSVYEAGFCGFWIHERLTALGIDNIVVNPADVPTKSSEKLRKTDTVDSGKLARSLRANELKGIYTPDSVSLEMRSLIRLKNSITKDTTRQKNRLKSQLRYLGIEIPQEFLTPFSNWSKRFFAWLKEIETLTTSGRQALDIHIRHLEELRRQKLEMTRALRTLAKTDRFREPLRLIMSVPGFGQATGMAFLSEICDITRFRNAEQLAAYIGMIPMCHSSGEKDGTGDITIRKHAVMRCNLIEAAWVAVRQDPAMNLFYTEQCKRMPKSKAIVKVARKLVNRLFFVLKHQTEYVNSIVS

SEQ ID NO: 217253 - protein, 343 aa, unidentified
MKIYALGIDLGKTVFHLVGLDASGQVVVRKRCSRTQLLAFTANLQVQLIGMEACSGSHFLGRALRAQGHEVRLMPAQYVKPYVQTNKSDYIDAEAIAEAVQRPRMRFVPIKTEEQLDLQALHRVRERWVMRRTAVVNQIRSLLLERGLTLPKGRSHLDEQLPRILEDAELNLSGSFRVLLAQLKLELEQVAARIEQMDRVIQKTAKENEDCQRLTEIPGVGPVTATALIGAVGNASAFGKGRALSAWMGIVPGEYSTGGKQKLLGISKRGNKYLRRLFVQGARSVLQQRHKQAPGLRDWLAQLLARSHQNVVVVALANKLVRMAWAVLCKNQRYRAPAFAVTT

SEQ ID NO: 217254 - protein, 410 aa, unidentified
MEVVHAHCAGLDVHKETVVACVRHMTDGKVTTTIKTFNTATQELLALSDWLSAENATHLAMEATGVYWKPVWNILSDGEFELVLGNAAHIKNVPGRKTDVKDAAWLADLMAHGLVSGSFVPDQTTQEMRDLLRTRKQLVRERTSHTQRIQKTLECANIKLDSVVSNVVGVSGRRMLEALISGQTDPKELAAMAHGRLQATPAELEAALRGRVTAHHRFMLKLHLDQIDSFDEAIARIDKEVKDNDKNFRAAVELLKSVPGVGTLAAEVIVSEIGIEMNRFATAGNLVSWAGLCPKNDESAGKRRSNRLKAGAPWLKTTLVQCAWGAARSKGTYLHAQYVRIRARRGNQKAICAVAASILTTVYHMLKDGTFYEDPGPDYFDKRNKDQQANKLVNRLQNLGFNVTIQPAAA

SEQ ID NO: 217255 - protein, 407 aa, unidentified
MFVGIDVAKESLVACAMDDQGEDVFHSYSVENNRPGCLKLINLIADNANLLQPDIIKIGMEATNVFWEHCYRLIKKHELLNSNFKLQLYTVNPKVVSNFKKAYTDLPKNDNVDAWVIADRIRFGRVENSSSPEALYRALRHITRHKFKLAQQIKAEKARALNLVFLKFSDFTQKSPFGTFTKASMALLENYTLREIVNTDVLELAEFLHQNSNNRLGGSTPIEKITTALKKAARNSYRLKPEIDQAITQTLSMTFDNIRFYQSQSKRLKRVLKRQLKAIPQTLITVDGIGPVLTAGIISEVGDINRFDKETNLASYAGLTWTEHQSGSFTAEETHLTKKGNKYLRYYLVEAANSLRVHNDRYKSYYYKKYNEVPKHKHKRALVLTARKFVRLVFALLSKGEIYQPRR

SEQ ID NO: 217256 - protein, 271 aa, unidentified
MKDVQKYVGLDVSKNAIAVSIADPGRSEPRFHGTIQNKPEEIRKLMKKLGNPENLLVCYEAGSTGYGIYRLLLSMDIECMVVAPSLIPKRSGDRVKTDKRIEVQIHEEALQSEHAPVIQALQTLRGVAEVTAVTLVAEIGQFSRFSNPRQLMSYAGLVPKEYSSGSSRWQGSITKTGNSQIRRSIVEVCWSYRHRPSLKGELLKRQEGQNKEAKRIAWNAQHRLHMKYHRISAKGKGGKIAVVAVARELLGFIWAIGCAIEDKQISELKVS

SEQ ID NO: 217257 - protein, 338 aa, unidentified
MNIVFLGIDLAKNVFQLCGLNLAGKPVYTKRTGRKELLQTLANIPACLIGVEASTGAFYWQREFEKLGHKVKVISPQYVKPFVRGQKNDGNDAQAIAVALMQPTMQFVPPKSPEQQDIQALHRARQRIVNRRTATVCQIRGLLLDRGIPIGSAVSRARRAIPLILEDAENGLSSRMCRTIAELYELFNDLGRRIHFFDKEIGTVFRQSEACQRIARVKGIGPKTATAIIAAIGKGTEFKNGRHFAAWLGLVPRQHSSGDRQVLMNMTKKGDKHLRTLFIHGARAVVRVATNNDDGHMNQWVNQLKGRRGFNKTTVAVANKNARIIRSMLRNETEYQVV

SEQ ID NO: 217258 - protein, 391 aa, unidentified
MTQVIMIGCDLHDRNMLLRYAVGTSQPQQLAYDNDAAGRRRMIARLKSLAEKNNAQRIVFVYEASGLGHGLSDQLHDQGIECYVLSPTHLPKTPKSARLKTDARDAQMLLEQVRGFVLAGNDLPVVWTPPQRLRDDRELVRARVDVANEITRVKLKITTLFKAREIRIASPTKCRWTKAFITLVRGSVIPSLDPVVGVKLKLLLDRFEMYRKEQAELDKALVKLSKEPRYKVPCAELRKMPGVGLLVAMTFLTEMGDLLRFDNRRQVAAYLGLCPSSNESGQKDDRKGRITRQGPARLRKMLCQAAWVSVNRCEQAASDYHRIKQNQKSRSKKALVAMMRKLGIKMWHRALACGVSAELLGRDRPVKDFAPSRQRDESPPSPSRQPLGCAG

SEQ ID NO: 217259 - protein, 344 aa, unidentified
MGVLSPLGYYGVRMNSYVGIDVSKDELVVHVLPAQQDRVFPNTTQGLVELVGWLVELGGCRVAFEASGGYERALLDALHQAGVVAMRLPARRPRNLARALGLKAKTDALDARVLALAAQMLPATATPPATAPVQELREWLQLRTALVQERDNHRRRIQQIRQWLQLRTALVQERDNHRRRIQQIRQASVQTFLRSVIDSLQQRIAEVEQQLRCALERCPVQIAAAPGLGPILRATLAARLPELGQLDRRQIASLIGLAPYNRDSGRWRGQRCIGGGRADVRRVLYMATWAAIRARSPLASTYQRLVAAGKPKKLAVTACMRKYLTMLNAMARDQAPWAPATSTA

SEQ ID NO: 217260 - protein, 409 aa, unidentified
MQECNVAAGEMETASSQVALSAASGQGAAKQYAAYVGLDVHKETIAVAVAEPGREEPIYRGEIANTPKKVERLIAKLSEAYDGGLLLFCDEAGPCGYELYRQIIASGHDGQVVAPSQIPKKAGERIKTDRRDALKLARLLRSGDLTAVWVPDQEQERMRDLSRARDDLKAQERKARQQLNAFLLRHGQHWPKGKSRWTPAHEHWLAGLKMDDPWQQVVLQSYIDAERAAGERVAQLNDQLMRALPEWSLAPVVDALVALRGIDKLAAIVLLAELGDISRFDSPKQLMAFLGLVPSEHSSGGRRRQGAITLTGNSHARRMLIESAWSYRFPARQTKHLMAKAANASPAAKRIAWKAQVRLCGRYRTLTRAGKNTKLVCVAIARELAGFLWDIVRQEMPRLTPAHPSATSA

SEQ ID NO: 217261 - protein, 381 aa, unidentified
MRQVCGLDVHKDSVFVCILNECGVVFQEKFGVLTPELEQLAAKLQELDVSEVCMESTSVYWMPVWRVLEPYVAEMKLVNPYFIKQLPGKKSDVKDAEWIATCLLKDLIRGSYVPADIIQQLRQYDRRISDLNAECVRKLGKLDAAIQRCNIRISNYLSTTDSKSYKDVIRLISEGVKDPEELIKVVHGRIVKKAGRDVLMASLSGVFSNTDIDIIRQLREEVELAERHKDECQSRMDAICQQHFSEQLKNLQTIPGIKGRSATAIIAEVGSDVSSFQDAAHLVSWCGLKPRNEESAGKIKARSITHGNKYLRKTMIECAWAASKTQGCFLNRFSYYQIVVRHKNKMKVLVAVARKILVAIWHVLHDNVAYRDYTPDIVPAA

SEQ ID NO: 217262 - protein, 372 aa, unidentified
MQKTLYVGLDVHKVSISVTTAEEGRDGEVRFIGTIPNTPTDVAKLAKRLANGGRRLEFCYEAGGCGYGIYRQLVDLGHGCTVAAPTLIARKPGERIKTDRRDSQKLALQHRFGDLTAVWVPDPVHEAIRDLVRARMDAVMQLMRARQQCLAFLLRHGRNYGPGKKNWTLRHRRWLAAQTFDLTTHQIVFQDYVEAVWSAQDRRDQLEARISAMLSDWSMAPLVEALRTVRGIDLISSVIFVAAVGDLGRFESPRQLMAYLGLVPSEQSSGSRIRRGGITRAGNGEARRMLVEAAWSYRYQPRVSSGKTDVVERQPKPVRDIAWKAQVRLCSRYRKLAAAGKKPTVVVTAIARELSGFVWAIGQTVRPPMRQV

SEQ ID NO: 217263 - protein, 402 aa, unidentified
MSMAELRVALDIGSDRHRVAIGTGDGKIVEEFEITQNREGFELFFSRVAVHEKRLNLPVVVAMEGIGGWARPLDQMILQKGYPLLNVNNVKLARFKEIFPAPAKSDTIDTRKILELMHMREVLPLAKAVLHRVGETPVENEQLKRFTRRRRQLVEDKVRVANRLHGDLQAVSPGLLEITGDVDSIWFLNLLTCRDDLTKLAGMKPASVLKIPGVGKAYAARIAAWQKHATFAAETEWVGEMVIADAQRVLDLIRQIQAMEQRIAAIAASSEIATRIRTIVGFGPICSATLAGEIGTIDRFGGEASLALYTGMTRLDNSSGKHIGTKNTRQVNGHARAAMMTAVARHINYVPESKIYYDRKVAEGKSHNQAVRALGRHFIRVIWSMITHQRDYFSKFPTTAAA

SEQ ID NO: 217264 - protein, 343 aa, unidentified
MDQHIGLDVSLKDTSISVRQDGKRIWRGKCASDPKLLAEVIRKRAPNVKRVVFETGPLSVWFFHSLTAEGLPAICIDARHAKAALDMAANKTDANDADGLAHLAEVGFYREVRVKGFDSMLMRTLIAARRQLMKMRVQMSNQIRGLMKTFGLVVPKGAGSVFDRNVMSLLEGEDNLARIIMPLLKAWGDIRLRVAELTKQLVAMAGADQRCRLLTSVPGVGTVTATAFAAAVEDSINFKNSRAVGAWVGLTPKRYQSGEVDYEGHISRRGDAKLRTLLYEAASVILNRSTETNALRTWALALKERLGFKRAAVALARKLAVIMHTMLKTGELFDPNAGAAVPT

SEQ ID NO: 217265 - protein, 354 aa, unidentified
MSERFVGIDWATRRARWHAVTPAGAVIDEGWTPADEGGLAMLVGHLGPDAVACLEMMSGAAWVRDQLAAAGWKVQIADARKAKAVGSLAAKTDKLDARVLAELVRRDLVPQVHVPTFADRELKERLGRRMHLVRLRTAAMNRAHGVLSQFGVTLAFKRLRGPDAEALLIERGIPEVWRRSIAEAVAVVTMLDARLIPLEKELRPLARADARVRLLVTIPGVADLLGLTIASEIGDISRFASARKLIGYSGLTPRVYQSGQKARTGKLSKTGSTMLRWAAIEAAQQAWRPSNPWHQLYVDVKQRCDGKGNPAKAAVARKVLIAAWHVLALQQPFSPSRPRGAAPVPASSSCVLAD

SEQ ID NO: 217266 - protein, 336 aa, unidentified
MEYGAIDLHARYTWIRLVTADGVVTYEGRVPTTREQLTAAFTGRPPARVLVESSTESEWVAQTIEACGHEVVVASPGYALMYGHRDPRIKTDRRDVVALAEACRRGIYRRAHRVSGEQRQRRRELKVRELLVRQRTALINLLRAELRQEGLRLRTCAAEGVVRQYRALTIPAAVAAGLALVIAALEDLSDAIAASTAALTATASADPIVRRLQTAPGIGPITGLTYRAVLDDVRRFGDARGVAAYVGLVPKEDSSGDRKRRGRITKAGPTGLRVLLIQASWVVWRQREGGGALYAWVQRLAARRGKRIAVVALARRLARILYAMWRDEKDFRVQPA

SEQ ID NO: 217267 - protein, 415 aa, unidentified
MEIVYPRVAGIDVGKKLVAVAVRTPGSEPGQRHQQLRKFKTFYPVLQQMVGWLVAQGVTQVAMEATGVYWRPVFHALCEAEQLEVLLVNARHVKNVPGRKTDAKDAEWLAELCEVGLLRGSFIPPAEIAAIREVCRYRKKLTQARTSELQRLCKVLEDGGVKIDSVASSITTVSARAMVEALIAGERDPRVLAELARGVMRKKIPDLAMALAGRFGEHHALLARMHLEHIDHLSGMIGRLDGEIEQVVAPFAEQVGLLCTIPGIGERTAQVLIGEIGVDMSRFPTADHLASWAGLCPGNNESAGKHRSGKTRKGNREVREALVEAAWAAGRTGTYLGARFRRLHRRFGKQGGSKAAVAIAHNLLVIVWFVLHDRAGYRDLGADYFTRHDNPDAKKRRLIRELQALGYTVDLTPAA

SEQ ID NO: 217268 - protein, 350 aa, unidentified
MERYKEFREKQVFFVGIDVHKKTYHVTGVWEDGREEFSKSMPADKEILVKYLDRWRLSRIFAVYEAGYFGYALHDYLIEHGIECKVTPPSLIPGEYGNRVKTDRRDSRKLALYCAKGFLKGVYVPTVEERSHRQVIRTRRQLVNDRIRKQNQIKSFLTQYGIPLPDVVGKWSKQYMEKLNCLRLHDRWLQKSFMELIRAYEFVDGQIEEQTNLLKELSKEERYRERVAILRSIPGIGIIGAMEMLLELQDVERFSTADQLAAYVGLTPSQFSSGDRIRMGRITRVGKQHLRALLIEAAWIFVRKNAKANKIYTRIRARAGSKRAIVAIARRLLLIGRRLLINNKMFAQIA

SEQ ID NO: 217269 - protein, 340 aa, unidentified
MQSYQKNYLGIDVSKPYFDVSLLIVIEYQKQELKTTRFSNDSEGLKLFQKWLKENKVSLDNHTLCVMENTGVYHRLLWQFCSTNNITIHIGNATHMKWSFGIARGKNDVIDSKRICQYAFKHADELRATPALNPVFLKLKDFITSRTKLLEQKNSIKKYLNELKLSNDKATQKILEHSFKASLEGVEKSILLIEKEIDKIIVTDEKIEQNYNLIITVPGVGKFTALYILCCTNNFATKISGKQLASYAGVVPFEHSSGISVKGGNHVHKMANKELKKLLHMCSITSIKYYPEFRAYFDRKKAEGKNGMSVLNAIKNKIVLRVVAVVNKQKPYVDNYSKAA

SEQ ID NO: 217270 - protein, 338 aa, unidentified
MEVSNQPKWFGIDVSKATFDTSVSPGATRKGPWIKLPRTPQGCERCWQWVDHQVVQGQVPSLVMEATSGYGKEMANWLLALRPEARIAIVQPWRVRQYAKGFGMVNKTDALDAILLARFGETYNPRLYHPMTPAYEQLRALTRERAAMVKEAIRLGNRNEIESNSPIAQKIREQTLAKVEHAVKELDQAIKAQIAKDPELKRDARRLRTVPGVGPVVSATLMGECGDLRDYSHRKALLTFTGVAVKVSESGSSVHEPAHMTKRGSGRVRQVLYLGAMALTRGHSPMAEFYHRLVKEGKPDMVALGALMRKILVTCRAVLVEEQDYDPKYQRKPPSEPI

SEQ ID NO: 217271 - protein, 338 aa, unidentified
MPSASPNPPPPAIPSVVGIDVGRSALDAASDGPVGAGPALPRRIPNDAAGIARLVAALIVHGPALIVLEATGTYHRPLLAALLAAGLPTAVANPAQVAAFRTSRLGREKTDTADARLLAHFARVHGAELRRAVPTDPVQTRLRELVADRDDLVAEQTRLTNRIHATGFGGDAAVGGWLAADLSQVAARLKEVEAATDQLLAELPKAAVLMAMPGVAARTAAAVLGYLPAGVWGNAKAAAAYAGVHPRREQSGQRDRSRLSKQGHAGLRRYLWMAALASIRWDPSLAAVRDRLVARGHAPKSAVRAVMHKLLRRMMGRLRAHAAAVAGGPISDPLPLAA

SEQ ID NO: 217272 - protein, 452 aa, unidentified
MNKETENRSKEKAVVAMPIVNADAAGIDVSATMHAVAVPIGRDTENVKEFGAFTEDLFAIADWLRQCHITTVAMESTGVYWKQLYLILLEYGFEVSLVNARHVKNVTGRKTDMDDAQWIQKLHSCGLLNSSFLPDESTETLRTLVRHRKRLLEDSSKYVLRMQKALELMNIKIHSTINDIMGKTGTAIVEAILRGEREPKNFLQYVDPRIKADHETIKKSLTGNWRDEHLFLLSENYGLYGFIQKRIFCCEKKIEECLQKQVAIDNEGIIEPLPNKHKKRNNKKTKNQPVFNVRDYLNKIHGVDVTEIYGIKEGTALEILAETGKGLKAWENEDKFVSWLNLCPNNKITGGKLISSKVMKRKAGNATQAFRAAANSVQRSDNWLGDYFRRMKAKGGNKYAIIAVARKLAIIYYKMITEKKDFKPLNMDDYKQKHNIAKIAYLEKKLAKLKSA

SEQ ID NO: 217273 - protein, 338 aa, unidentified
MDLYTGIDLHSNNGFYGILNEKGERIFQKKLPNELPRVLKILEPFKKDIKAIAVESTYNWYWLVDGLMDAGYPIELANPAGMTQYNGLKHADDKSDAFFLAKLLSLHILPTGYIYPREERAVRDMLRRRMMLVQHRTSHILSFQSMISRQTGSGMPGNTIKTLKKEDIQDYFNDEYLILIGETNISVIRHLTEKIRRFEKAVQKRVKIKPEYEKIQTVPGIGKILTLTIMLETGPLSRYAGAGNYASYCRTVKAIHTSNNKKKRNLNQKNGNKYLGWAYVEAANYMKRYCPEAKRYHQKKMARSKQVVATKALASKISKACYYIMRDQVDFDAEKMFG

SEQ ID NO: 217274 - protein, 416 aa, unidentified
MNAVGIDVSSRKSTVAVLRPLGEVVCLPFDVTHDIAGLASLVEKLKALDGETRVVMEHTGRYYEAVAKALHEAGLFVCAVNPLLIKEYGANSLRRVKTDKADAVKIARYALDNWADLRDFTPMDAIRYDLKTLNRQFQLASKQRTASANNLIALLEQSFPGIRKCFDSPVRSDGTQKWVDFAHSFWHVDCVRKQPFAAFCERYRKWCKRHAYLFKLSNAEEVYALAKRAVVLTPKSKVVKVLVQEAANQLSSISRSVEVYRAEMDRLAAMLPEYPVVMAMYGVGKSYGPQLMAEIGDVRRFERKQALVAFAGIDPMPNQSGDKNVRSNKSSKRGSPYLRKTLFNVIRTYLQCAPQDEPVFQFLNRKRAEGKPFYVYMLAAANKFLRRYYAKLRDYFASPDTLQSVDPIPATLKASL

SEQ ID NO: 217275 - protein, 343 aa, unidentified
MSLSMIGLDTAKSVFQIHGVNETGKAELKRKVRRSELIAFFEKQESCTVVMEACGAAHHWARILSGLGHTVKLLVPEAVKPFVKKGKKNDAADAAAICEAAARPNAQFVPAKTVEQQGILALHTARALLVKQQTMLANAIRGLATEFGHVVPKGLHNLELLVALVDADAAMPEQARQAIAELHQRCGELAKGIQSCEAEIVKHARNDPTARRLATIPGIGPITASLIAATVVDISLFKTARQFAAWLGLVPRQHSTGGKTRLGRITKAGNKEIRKLLVLGATSMLGRAEGWHSALGGWLRDILQRRPVRLVTVALANKMARIAWAVMTRNEVYRAQGGVAATA

SEQ ID NO: 217276 - protein, 331 aa, unidentified
MSNIIGIDVSKASLDCAYLRDPDQEKAKRKSCHNEVRCFASLVAWAEARSGLPVQSLAFVIEPTHVYHEQLVQFLHHAGATVYLVNPGRVRKFAEGIGILSKNDLVDADLLTRYGLIARNLIVYQPVAQEVNDLRSLLNRLEVLERNLRSELNRQEKIGKTMVFHRLEQQSIAQTIKRLRTEIMTFKRAIRQCIKSTPSLQQNLDLLCTIPGVGAKTAWVMLVILGSRTFRSAPEVASFLGLNPIEKRSGKSQYRRPRLSKSGSGNYRQQLYFPAMVATRKNPDIQALYERLLAADKSKMCALGAAMRKLVHICYGVVKNQTPYQAQSAQP

SEQ ID NO: 217277 - protein, 370 aa, unidentified
MDSITYVGLDVHKTTISVAVADGARSGEVRQLGAFANRADVVRKVVERLERPGRQLRFCYEAGPCGYGLHRFLTGLGHACTVVAPSLVPIKAGDRIKTDRRDAVMLARLHRAGELTAVWVPDVAHEAMRDLVRARATAMKVLSKARQHLGGFLLRHGKIYSGVRTWTQAYRRWLTTVRFDHPAQQIVLQDYIDAVTDAERRVDRLTRQVTEHLPGWSMAPVATAIQAMRGVALINAVTIVAEVGDFSRFGNPRQLMAYLGLVPSEHSSGSTVRRGGITKAGNLHARRALIEGAWTYRMQARVSRKLYDRLEAVPQNVRDIAWKAQVRLCGRWRRLAASGKPKVVVTTAIAREMAGFIWAIARQLQPQATG

SEQ ID NO: 217278 - protein, 388 aa, unidentified
MIIKYSVGLDVSAADIKACISVIDIEQRVKVQFSKTHSNTKKGLLELYNWIIKSHKSPEIPLVVCMEATGVYHENSAYFLLEKGLRISIVLPNKAKKYLQALGLKSKNDKIDAKGLAQMGAEQNLKEWKPLGNFFYDLRILTRQHEVLQKNITSEKNRLHAAETAARQVKIELTQIKQLITFLKKQLAIIEVEIHKMIETNPTYKDKFARVCKLHGIATLSAATIIAETGGFELFENYKQVVSYAGYDVVENQSGKHQGKTKISKKGNSKIRRILHMPALVARGKEGTVFEKLYTRVFEKTGIKMKGIVAVQKKLLLMIYYIWKKDLIYDINFSNIQKEELAPPSPLKIDKEKQLKKATYNVASQGEHPLSYRSMPPLRKANILKNVV

SEQ ID NO: 217279 - protein, 430 aa, unidentified
MKSNTQNAKIEAITEKTLVLGIDVGSETHYARAFDYRGIEYSKKPFKFSNTEAGFVTFKEWILDIKERHEKDKVVPGMEPTGHYWFNLGKFLHDNEMKPVLVNPHHVKKSKELDDNNPTKNDRKDPKVIAGLVREGRYMIPYLPDGVYADLRTASNIRFQLQAELTRIQNRISRWFNIYFPEYKTVYGKPDAKSGILILKAAPLPEDILTLGIDGVNQIWRDAKLRAVGKARAKTLIEAAEHSVGSKEGAVAARMEIRMLLEDYESRSIRLQEVMTLIEGLVKQIPMAEKLLEIKGVGIRTVSGFLAEVGDISRFNNPKELQKLAGLALVENSSGKHKGETTISRRGRKRLRYLLFEVAMSLVAKNPEFRELHNYYTTRRLNPLKKMQSLMAIAAKLIRVFYVMLTKGVNYDPKKMVNDIKRPAVYLQTA

SEQ ID NO: 217280 - protein, 372 aa, unidentified
MKKIVKYVGLDVHKDSITIAIADEGRDGNVRVYGKISNDLGQIDNVMRKLISQNAELHCVYEAGPCGYPIYRHLTSKGIDCVVVAPALIPKKTGDRVKNDRRDATHLATLHRSGELTPVYVPDQADEALRDLVRARKDIQISLRKVKQQINAFLLRQGISYPGKSKWGKAHLNWLAELKMQHPAQHIALTEYLDAMEDHEARVKRIEKAIEQCCQTSRLLPVIEALQALRGISLLSAVTVVAELGDLSRFDTPAQLMAYLGLIPSEHSSGGTIKKGPITKTGNTHARRTLIESAQAYRMPARKSKAIRKRQEGLPDDVLDIAWNAQLRLCHRYRRLIAKGKNHNVVITAIARELAGFIWAIARAVPIVAAER

SEQ ID NO: 217281 - protein, 352 aa, unidentified
MEKITTVGLDLAKLVIAVHAMDADGRRVLRKVVRRDQLLGWSAALPPCVMAMEACGGAHHWARELTRQGHTVRIMAAEFVRPFRKSGKNDANDAEAICTAARQANMRFVAIKSIEQQAALCVHRLRQGLVEERTALINRLRGLRTEFGVVAPLSPEKLRRDLARCQDPEDARLPATVREFVGDQVTALDQLEARLAAYAEQIAAQARGSEVAKRLQSIAGVGPTTAAAMVATVGAPQEFRNGRQFAAWLGLVPKQHSTGGKTRLGRITKRGDAYLRTLLILGAKSALQAALRKPPQQRHRLQRWIVDVFSRIGYHKTLVAIANKHARIIWALLAKGEDFDMQRLTPKVVAVA

SEQ ID NO: 217282 - protein, 324 aa, unidentified
MSSVVGIDIAKSTFDVATPLPNGKYRTRGKIPNTSKGFEQLDSWLKEHASLGARVVMEATGVYHEALAEHLYHQGYEVVVVNPARVYHFKKSEGVHYKTDKVDAKLLADFAQAKHKKNLFPWKPEPTSLRHLRVLLKRLDDLQEMLQMERNRLDTAHRAVRESIESHIKHIEKDIAQTRRLIDQHIDNDPDLGSKRDLLLSIDGIGEKTAAVILAELGDVSEFRSARAIVSFAGLNPKLNESGTLKGRTPITKAGSGRLRRALYLPCVTAMNMSEPMMAMKSRLKANGKAGKQIVCAGMRKMLHIVFGVLKSGQMYDPKLALAR

SEQ ID NO: 217283 - protein, 377 aa, unidentified
MKKELYLGLDVHKDCIITAVAEEGRKGEVRESGAISNDLHAVEKWIGRLRKAHGKETLLRACYEAGPCGFGLARRLRQLGVECQVVAPSLTPTRSGERVKTDKRDARKLARLLRAGELTEVYIPEPSDEAIRDLCRARSDAVDDRRRSRHRLKGFLLRHGYRYQGKSSWSAAHERYLRELVLAHPAMKVILEEYLQAIAAAGERIERSEEAMRVLLEQWRLVPAVHALMAMKGFRTVAAMILVSELGEVHRFAHPRQVMAYLGLVPTENTSSERRRQGHITKCGNAHARWLLVECAQHYAAPPKVSKELSRRQQGQPNAVRAISWRAQNRLHRRYTRLLARRLQRNKAMVAIARELCGFIWELLGTQSCYQAPSPPV

SEQ ID NO: 217284 - protein, 427 aa, unidentified
MPYQIAGIDVHKRLLAVVVADVAVEGDYRFTRRMVGTSPNQLRELAAWLVAQEVEEVVMESTAQYWRPVWEVLERDWQPRRQPREGAGLKSGTLHLAQAQSNHGPHGRKKDFPDAERLVKRLVAQELTLSFVPDAAQRLWRTVMRRKCQVTCNRVQLQNRLECLLEEAHIKVSSLVSDLLGASARRMLQALADGETNPATLAGLASRRLRATPDQLCDALGACTTLHPVYRRLLKLTLEELQVIEDHLAQLDQEMAGLLSPHQPAVQRLAAVPGLGVDSAQQIIAEVGATAATFPSGKHLSSWVGACPGDNESAGVNYSHRSPKGNRQMRRLLNQAANAAVKTKGSIFEVVYRRLVPRLGHQQTIGAIAHRLCRLIWKILHQGVSYEERGPAVTRHRAQRRAAKMIRELRSLGYRVELAPSPSSSPA

SEQ ID NO: 217285 - protein, 407 aa, unidentified
MELVALYKRVIGLDIHQAQITACALIEEPDGTTRIEQRQFGGFKRDRRELAAWVASLRPDEVVMESTGIYWKSPYAALEAVGIRAKVVNARHVKNVPGRKTDVSDAHWLATLARAGLLRGSFVPPAKLRELRLIARQRQKLVGQLASEKNRLHKVLADSGIRLGVVVSDLHGKSARAMIKAIIAGQSPNEVLKLASTRLRASREEIFDALQGDLSPSHRFVLDELMCHIEELEARIARFDARLLTELESERNTLALLQTIPGVDLIGAAMLLVEIGTDMDAFGSADRLASWVGICPGNNESAGKRKSGRIRKGNLYVRRLLCEFAHAASRTTSVFKSKFQSLVIRRGYKRAIIAIGHKILRNIFFMLRRREHYRDSATDYEALFVQRNAPRWIKALTKFGFIAPASA

SEQ ID NO: 217286 - protein, 423 aa, unidentified
MTAFEKRSRAQQAAAVVGVDAGKFRHVLVVRLRGQPDSKPFAFPTTRAGFDDAVSFIRRQTDAPAAQMLVGIEFAGNYGFTLAHYLDQLGYPVVSVLPAHTRRWKEVAHNLTLKTDAKDALGITDLTAQGHFVGFPFLQPAYAELRYLVSGRDRLSRLRRGGITRLRTVLQVVFPEFEQLFKSFTYRTPFAVLEAFPGPQEILAAPKRAVLRVLKTASRGHLAEQMYQQLVEAARGTLALASAQGALRAEIGLLIQRHALYEEQIAGIEDQMVAALEGLPEAESLLSIPLVAPVTAAGFIGAIGDPQAYDSSRQILRLAGLTLVEKSSGTHQGQPHISKQGRPGLRALAYLLAVRGIARQGPFRAEYDRLMARNGGQPHKAFIAIARRALRMMFAVARERRAWTPEAPSRTRPLADSAAGGIV

SEQ ID NO: 217287 - protein, 323 aa, unidentified
MNKGIKYFGLDISHLVFDVTDSDGNYYQFKNNEFGFKKFTKLLNTESHCVMEATGYYHYQLAYHLLESGIKVSVENPLAVKRFIQMKLSKIKTDKSDSKLICEYAGQVELKLWQGNSMTEIECLQIVRALSVYTKQSTMLKNKLHGEAVLGNPSKAVVSSLNRSLKQVKKELETLESKLLTLVKQLHQDLLTRLKTIPGIGPKTAIMLVVLTGGFDRFSSASELCSYAGLTPVIRQSGSSVSGRPRISKIGNQKLRNLLFMCSFNACKYNKACRDLYERLVAKGKSKKLALIAVCNKLLKQAFAIAKSGLIYDDTYRSVLVKN

SEQ ID NO: 217288 - protein, 347 aa, unidentified
MRFYRGTHEYYCGVDLHARTMYLRLADQQGTVLVNRNIACTPSAFLDAVAPYKHDLVVTAECVFCWYWLADLCAQHSITFVLAHALYLKAIHGAKAKNDAIDADKLLVLLRGGAIPVAYVYPPGMRATRDLLRRRLYFARKRAELFSHIQNTFHQYNLVKPAGEMNVAKHRARLADCFSDPIVRAIVEADLQLCSVYDTLIKDLEKKIEQQARLDEPMSLVLLHSIPGVGKILALTLLYEIHAIARFARVQDFSSYCRLVKPEHNSAGKRVGSGGAKIGNAHLEWAFSEAAVCFLHRNPRGQGMIKRLRKRYGPGKALSILAARLGRATYFMLKNERPFDMERFVAN

SEQ ID NO: 217289 - protein, 342 aa, unidentified
MSQHYAGLDVSLDHTHISVLDEAGALVWRGACPTSPDAIAKSLRERAPCLARVGLETGQLSTWLTTQLRRRRLPVICLDARHARAALKLQLNKSDPGDAYYLAQIVRTGWYREVAVKSMDAHALRMLLVARAQLVNQRQTVANTIRGLVKTFGHIMRPGAKLGFADQVTAILDDNPRLGATIGPMLEVWRALRTQITIMDRTIVMRAKNDPITRRLMTVPGVGPVVGLAYQAVIDDPTRFRSATTVGAYLGLTPRRWQSGEVDRQGAISRCGDAFLRSYLFEAATTLLSRVGKPSRLKTWGLALAARTGWKKAKVAVARKLSVLLHRLWVRQTDFVAHFATT

SEQ ID NO: 217290 - protein, 313 aa, unidentified
MYYIGIDVSKKDLSIFDGDNDLNFKNTEGLKAFKRYLKKRYRHFDNLGILFEATGIYSEPLQAFCAHHKIKAYRINPKQSHNFARSLGVRSKTDTIDARTIHAYQKLIPEESLQVPVIDLVARKLSGYLTSYQFIQKQRISLANHLEGIREKSLLKRLQQELKRIEHLEEDLLGEVKAYICAHPRLKEDYERLLTIPGIGEKAAFTLLTFFQHYPDTNRAQVTALAGLDPIQKESGTSVKGKAKISKNGNRALRKMLYMPTLCAIKYNRKMADFYERLLSHHKPKMVAVIAVMRKLLLVAHALYRSKTAYVPI

SEQ ID NO: 217291 - protein, 343 aa, unidentified
MNHAAIDLGGKESQICIRQPDGTIIEERKVPTRKLTELVATWAPSRVVMETSAEAFRIADAAIAAGHQVRVVPGTLVRLLGVGERGIKNDQRDAQQLSKASWQTDVPSVHIPSQPARELKSICGARDVLVGTRTKLINNVRGWLRTQLWKLRNGTTATFADRVRGHAASLGEVLPEHIERQLRMLAVVVEEVKAADKQLQKLASEHQVCRRLMTVPGIGPVTALRFVAAIDEPGRFASAHRVQSYLGLTPGEHSSAERERRTGITKAGPMELRRTLIQAAWAAMCRVRTSHPMIDWARRLAERRGRPVAAVALARKLAGILFAMWRDGTTYQAKRSAEAMEHS

SEQ ID NO: 217292 - protein, 355 aa, unidentified
MGSAKYVGLDVHKDTISIAVMNSAGKWIMESIIETKAITILQFFQGLHGDVYVTLEEGTWAAWLYDLLKPHVTQVVVCNPRKNALLLKQGSKSDQIDARKLAELLRLGALSAVYHGEHGLRMLKELSRSYLTISKDLGRVMNRLKALYRSWAIPCAGAQVYAPRHRAEWLAKITEAGVRRRAELYYEQLDALRSLHKQAKKELLSEGRKHSATKLLRQIPGIGPLRATQLVALMQTPHRFRTKRQLWNYSGLGLETHDSAQYCMVEGQLQRSKKPQQLRGLNDNHNQDLKNIFKGAAMRASTAAGPMRDFYEALLAKGRRPTMVRLTLVRKIAAITLIVWKKGASFDAKHLKQAA

SEQ ID NO: 217293 - protein, 407 aa, unidentified
MMQGAEVRVGIDVGCRQHRVAIGDAAGRVLEEFDLPHTAAGFAEFFLRVERQAAQQQAAAVVVAMEGLNGWARPLDQQIQQRGWQLLNVNNLKLARFKEIFPGPAKSDAIDARKMLELLALRVHVPVARAVLQEVPAHPVINDQLRRLTRRRRQLVWEKGRVLTRLLADLQAVSPGLVTITGQVDNRWFLQFLTCRRDLRQLARLRPQSVRQIRGVGRHYATVITQWQPTAAFGPEVEWVAPMIHADAQRVLALLNQIDALEEQIAALATESALAQRIDSIPGFGLVCSAELAGELGTLARFASEASLALYVGMAQLDNSSGQRVGSKPARQVNTRAKAALMIAVDRHRKQVAASQAFYEKKRAAGKTHNQAIRALGRHLIRVLWAMLSHDRDYELREPTARSDEAA

SEQ ID NO: 217294 - protein, 353 aa, unidentified
MEKITRTGVDLAKNLIQLHGVDSMERVVVRKAISRQKFLEWFANLEPCLVAMEACSAAHYWGRKLRALGHEVRLIAPQLAAPYRKGGKHVKNDRLDAEAICEAAGRPHMRFVAVKTADQQNVLLLHRIRNGSVEERTALVNRLRGELVEFGVFLPQGIDAFRAHFIESLEDGTTELNGVARTALERGWEHLEALDQQIAWCDAQVAMHVKHDSNAQRVMAVIGIGPLTASAAVSTVGDARVFKNGRQFAAWLGTVPKQASSGGKTRLGRITKQGNTYLRTLLFQGARSAVMAAQRRTDRLSRWIVGLQARVGWYRTLVAVANKHARILWAILAKGERFDPSYVPTRAAPPTGP

SEQ ID NO: 217295 - protein, 389 aa, unidentified
MFFLGIDIAKLNHVASLVSDNGNIVFSNFMFKNSLEGFLSLIDKVKSIPKDDIVIALEFTGHYSDNFVNFFFNRKFNVTLVNPANVANFRKSYGRDSKNDRIDSINIAKMLLSREYSLVTQSDIEYLSLKKLNRIRDSLVKQKSKCKILLTRNLDSIFPELHLLPSGIHSKAVYTLLKKYPSSEEIAALGIDVLTNILKTNSRGHFCEKTAYIIKSQARSSVGFEDISLSFHISQLISSIELLEEQIRNTEKQINAIIEKLKPVILSIPGISNVACACILGEIGNISRFRSPSKLLAFAGLDPKVRQSGQFRALSCRMSKRGSKYLRYSLIYTAWNAVRNNEVFSNYYALKRSQGKNHYKALGHVAHKLVRVIYKLMKDNIPFNAEQLI

SEQ ID NO: 217296 - protein, 340 aa, unidentified
MSEITTIGLDLAKHVFQAHGIDAEGTTVLRKRLRRGQVLAFFSRIPRCVVGLEACATAHYWARELGALGHEVRLMPAQYVKAYIKRNKHDAADAEAICEAVQRPTMRFVPVKTTEQQATALLHRGREQLVRQRTMLVNALRAHLAEFGMVAAQGLRNVGELIAIVRDDGDTRLPDVARQVLQVLAAQLEQIEAAIAALEKQLMAWHKTNAVSQRLASIPGIGSIIATAIATTVADPGVFRSGREFAAWLGLVPRQNSTGGKTRLGGITKRGNRYLRRLLINGASANLLRSKATKADPWVIGIRRRRPPLVVAVALANKTARIAWAVMLRQKEYQPRALAA

SEQ ID NO: 217297 - protein, 385 aa, unidentified
MSTFDQTDAPAASEYATVHMAFELSKANWKIGVLLPGSPKLSRFTVKGGDVTTLSGRLASLRAKAERCGKPVRILSCYEAGLDGHWLHRWLTDQGVTSYIVDPSSIEVSRRGRRAKTDRIDLEKLMRAFLAHLRGEPRVCSMLHVPSAQDEDRKRSSRERDRLLKEQTAHTNRIKALLFGQGIRDVMPLKPGFIASLEAMRTGDGRALPARLKEELVREHERLCLAHKQVAALEAQGKAELRVAAPGSVAAKIMQLIDLKSIGVISGQKLVNEVFYRSFDNRRQVGSYFGLTGTPYDSGESRREQGISKAGNSRARNLAIELGWLWVRHQPGSELTRWFRERVGDLKGRIRRIAIVALARKLMVALWRYLTTGLVPTGAVLHPSF

SEQ ID NO: 217298 - protein, 346 aa, unidentified
MSKGRRAVEEILGSEATVFCGVDVSAATLSTAVFWESGWELERREFANSAAGHLQLMGWLSKRRRPVRVTLEATGIYSLDVALALDEAEGFGVQVLNPKKASDFARSLGRSKTDRADAAALAEYSLRMKFEPWRRPSREVLELRALSRHLATLTEEHTRQGNRLHAAEASRTSPRCVREDLKRTMAGIQRRLTRLRREARAMIEREAEMKRKWLRLIAMLGIAEVSAVQILAELAGLDEQMTVRQWVAHSGLDPAHRTSGTSVRKPSHISRHGNRYLRKALYMPALTAARFDPHLKAFYEELLMRHKTKLQALTAVARKMLHAIYGIFKTDTPYDGSKLFPQLLTA

SEQ ID NO: 217299 - protein, 375 aa, unidentified
MKEKVRFLGLDVHAETIAVAVAEQDGEVRSLGTIANRAESIRKLVKKLGPVDQLRACYEAGPTGYVLYWQLAELGVKCEVIAPTLVPVKAGDRVKTDRRDAEKLARCHRGGDLTAVWVPDAGSEALRDLVRAREAAKQDQLRARHRLSKFLLRSGQRPAAGLKAWTQLYMAWVRQLRFEQVAQEWTRLDYLHEVEHMAERVVRLEQAIAEAVKLASPEIQEVVKDLQALRGIAQISAVTIAAELGNITRFESARQLMGYSGTVPREDSSGKRAQRGSITKTGNAHLRRIAVEAAWSYRLRPGIGPALRKRQDGVPEDLKEIAWKAQHRLHKRYSRLAAAGKDQRKIITAVGRELLGFIWSIGVKAETAARQRIVA

SEQ ID NO: 217300 - protein, 380 aa, unidentified
MTQKRYVCGTKSECPSLASMVAEVRPKRRYARMKVLIGVDPHKASVAVAAVEEATSELLERASFPQDRSGLRSLERWARRFPERRWAVENAGGLGRHLAVRLAGSGEPVVDVPPKLSARVRVLSSFAGNARKNDRVDAVATALAASRNERLAAVDPEAASEALRLLSERREDLVAERTRALNRLHALLRDLLPGGVARTLSADRAARILRGIRPKGTSARLRRRLASEVLRDVRTLDRKIADLSGRIEAEVEASGSTLTRIFGIGPILAARIIGTVGDVRRFPTKAHFASYSGTAPLEASSGEVVRHRLSLAGNRKLNYALHMVATCQARSDARGGVYYRKKIGEGKSRKEALRCLKRRVCDAVFRNLMADSQAPSRNAA

SEQ ID NO: 217301 - protein, 396 aa, unidentified
MPEIWAGVDIGKEHHHCVVINADGERLLSRRVLNDESELLQLLGDVLAISTDVLWAVDLNHGGAALLIGLLLSHDQPMAYLTGLAVHRASATYKGEGKTDAKDAFVIADQARVRRDLGLLRPGDEIAVDLRTLTNRRLDVVFDRTRQINRLRAQLLEIFPALERSLDLVNKGPIVLLTGYQTPAAIRRAGVRRIETWLKNRKVRSAAALAKTAVEAAQAQQTALPGEKLAAAMVVRLAKGVMALDEEIAELDALTEAKFREHPHAEVIRSLPGMGAKLGAEFIAATGGDMDAFGSADRLAGFAGLAPRPRDSGRVSGNLRRPRRYHRGLLRSMYLSAMVSTTTCPASKAYYQRKRSEGKGHKQALLALARRRLNVLWAMIRDGQCYQGSPPVTTAA

SEQ ID NO: 217302 - protein, 346 aa, unidentified
MSQPQHFVGLDVSVKQTALCVVDAQGRVVHRALVESDPVVIGGHLLALGLPFERVGLEAGPLSPWLYAGLVEAGLPAICVETRHMHAVLSARINKSDRNDALGIAQMMRVGLFKPVHVKTPASQQRRLLLTSRKLLQRKVYDIENDLRGQLRNFGLKVGVVGAVGFEQRVRDLVGDLPAIAAVVIPLLAARSALRVQLAKLHKMLLDEVRADPVCRRLMTAPGVGPVVALTYRACIDNPARFSRSKCVGAHYGLTPRLYQSGETARVGRVSRCGDAMMRAALYEAALVLLTGLRGRWSTLKAWGMGVAKRRGMQKAIVAVARKLAIVLHRMWRDASDFRWSTAQAA

SEQ ID NO: 217303 - protein, 341 aa, unidentified
MTLYIGVDIHARQQTLSYLDTEDGTTGQVELQHERDDVKGFYRQFQGEVIVGIEACGYTNWFEELIEQLGHKLLVGDAAEIRRLARRRQKNDRRDADLLLDLLVHNEFPALFRYSRESREVLRQLRYRHKLVKLRTMVANTLHALAINAGLSLRAKLLTQGGRRQLRTLQLSAISQQQREELLSLADELTRRIQTVEQWLQTQASSDARVVRLQTHPGVGLLTSLCLVHTLGDLSRFSATRKVAAYVGFDPMEDSSAERKAYGGISKAGSRLLRYLLVEAGQTAAKHDEHLKQFYRRLLPRRGKARAKVAVARKLLIRCFIMGRAEIDYAEFLRRGQKEAE

SEQ ID NO: 217304 - protein, 360 aa, unidentified
MQPEASKIWRCQKTMLYVGVDVGKSKCRASMMSAQGKIIKEIDFSNNSNGISSLISHLSIDDHVVMESTGPYWLDLYNHLDDLHISVMLANPLKTKAIASARIKSDKVDARILAHLLRTNLIPECYVPPKEMREIRSLVRHRVSIVKLRTMVKNKVHALIDRNGLKHEFSDLFGKAGMQWLRSLELSGLDRLMLDNYLLHLESLNVQIERVDDEITSKASVDRDVKILMSLTGISVYSALLIKSEIGAIERFGDYKKLVSWAGLAPSLHQSGDVEYHGNITKQGSTMLRWIMVEAARVASNHDPRLRAFYERVKHRRGDQKAVVALANKMLKIIWFMLTWKEEYESANEKSYARKLNSLE

SEQ ID NO: 217305 - protein, 351 aa, unidentified
MSHQTTTEAIITIGIDLGKNTFHLIGMDARGKILLRRKIARGQLQSCLANVPVCLIGMEACAGAHHVGRQLAALGHDVRLLPAQYVKPFLKGHKNDYRDAEAIAEAVQRPTMRPVPLKSAEQLDLQALHRVRRRRIGQRTAVINQIRAFLLECGLPVRQGLAGLREALPTLLSQRTDVLSPRMIHLIEDLSDDWRQLDERIETLTRDITALAREDAGCRRLMDVPGVGVITASAMVAAIGTGAAFSKGRDFAAWLGLVPKQISTGNRTILGGLSKRGNRYLRTLFVGGAQAILQHPHNWPRYRFGRWLMTAAPRLRRNVLAAALANKLARIAWSVLYRERGYDAGIAVQVP

SEQ ID NO: 217306 - protein, 345 aa, unidentified
MQTMYYIGLDVHKRTISYCVKDGSGTIHAEGTIPATRFDLDHWMKTLPQPWTAAMEATVFTGWIYDHLQPHAAALKVAHPLMLRAIAAAKKKNDRIDASKICDCLRCDFLPECYMASTAIRERRRTLRSRNLLVRQMVQMKNKIAMLLMEAGVSYNKQRLHKAGYFRELLATNPDIDEGLVSLLRLCRETVVRLQKTESALVRSLERDSLLLDRVERLMTIPAVGPITALTWALEVGEVQRFSSIKKAISYCGLCGAEKSSGSTVQRTPLSKQRNKHLQTTLIEAAKMAPRNSPDLAMLYEREKQKGNANRATLAVARKLVAYLMAVDRGQRDFQVLETNNCIAA

SEQ ID NO: 217307 - protein, 481 aa, unidentified
MNGPLPVPQVPRLFWTSPMRVNRRSPTPAVADAPKAERTPPREGSCISSLGPRRPEPVRAARIMNTDWTQHVYFAALDWASDHHDILVLDRQGAVQAEFRFAHTADGWAEFTLKMQPFTGAPITLETSSGPAVDQLLQRGWAVYPVAPSAAARYRERKVPSGTKTDRHDTWALADALRTDGHAWRPLRPQDEATATLRALCRDEIALIEQRTALVNQLQAALREYYPAALAAFDDWTAPYAWALLLQFPTPAQLQAAGKRKWEKFLHTHQLWRPQTLAARLELFAHAQALPASPAVTAAKSLLAVSLAKILVTLQTQLDEYRRRITEAFRQHPDHDVFGSLPGAKATLGPRLLAEVGDVREEYPDADALLCQAGVSPVSYQSGKVNKCRLRRACNKILRATVHLWANSSRLTCEWAQAYYQMKRDEGQSHASALRCLGKRWLKILWRLWQNHEAYNEAKYLAQLQKRGALTWTKLQTPQTV

SEQ ID NO: 217308 - protein, 345 aa, unidentified
MKSVTLDVHRGKTQFTVSLETGEVVAERVVKTKASVLKREVANVPGPKRVVLENGGWAAWIYDAVKDVADEVIVCDPTRNKLISEAEDSDDRRDAKRLGVLSRAGALHAIYVPPEPYRTLRSLVQHEGNLTKEITRSKLRLKAFCRREAVEYHGKSIYGKRGRDLVFKAFPERSRFQLGSLYRILDAMRSERVLVRRELQRYSLGLPVIARLQTIPGIGAITARKLVAWIVDPGRFKSLNALSAYAGLGLKHDISNWRPLHRAHASKRGQREVKAALFVAARAAVQAGQNGFAKRYKARIASGWEDRKAIRDIARKILFCASHVWTSKREYDDGRINTLFGAAAS

SEQ ID NO: 217309 - protein, 342 aa, unidentified
MDKFEQASERRVLGADVSLEKFDAGIAGPGSSQDLRSIKVRAFPRTLEGAGKCLEWMDQAGGADAVVMEATGYYSRELLEFFHQHRPSLPGFIANPFLIKRYGEGLGVRTKTDAQDARVIACYGVERKLRPFREKSPEHKELERLHKDRDALVDMLKSEQQRALGAVRNATAQKVHERLSQELKQGIKDLDQEIRRVVKTSESLEKQVDLMVTIPGVGLHTATLSLGLLGDFTQFERGRQLSSFAGTAPKLKDSGKTVHGRTVLVKRGHPRIRKALFLSAMTAVRQEGPLRQIYLDLIAKGKAKKSALGAIMRRILLLMRAVLSSGLPFDPGRMGKPQPAVS

SEQ ID NO: 217310 - protein, 408 aa, unidentified
MIERCAGLDVHRDTVVATVRRPGPGGARRSQTRTFRTVTGQLQELSDWLASEKVTLVGMESTGVYWKPVYYVLEDRFPVWVINAEHLRNVPGRKTDVADSMWIAQLLEHGLVSPSFVPPRRIRLLRDLTRHGRRLTEERTRTIQRLEKVLQDAGIKLTSVASTILGKTGRAILAALLAGEEDPAVLAELARGRLRPKIPALREALTHRFRIEHHGLLIAQMLAHVDFLEDSIADTYRQVDVLLRPVAELVELVMTIPGVGRRVAEVLIAEVGLDMSAFPTAGHLASWAGICPGNNASGGKRRAGRTRHGSMWLRIALTEAAQAAARTHGTYLAAHHAQIRGRRGTQKAIGATRHDILLAYYHIVRDRVPYHDLGPDWNDRRRSTQQQARRLVRQLERLGLNVVIEPNG

SEQ ID NO: 217311 - protein, 368 aa, unidentified
MQETMIQIKTADKLFIGMDLHKNTSTFVVKNKDGKLINFAKVLTDKNEVTRYINSIRRNNADKGLSLVVEPVSQWYYYADLIENLGVDVHLAHPMEVKAIAHARIKTDKIDADVLADLLRTNFLPEAYFAPAEVRGWKEQCRFRASLINLRTQTKNKIHAILFKHSLKHNFSDLFGKSGRRWLAALDLKEPFKNNLNKYLSLVDYLTEQIVLAEEIITNTVINCPQAKLLISIPGISYCSALTIMAEIGEIDRFISVKHLQSYAGLIPSTYNSGDKQIHGRITKRGSKWLRWIMIEAAYHQMNCKRIPGFGAYYNTLKKRKGSKTAAVATARKLLAVVWRLLKDNRPYEVADPRCWKSRPIASKLSSI

SEQ ID NO: 217312 - protein, 341 aa, unidentified
MKSILKQVVGIDVGSQELVLALGSLFSSLHTEIKAAKAFRNSEKGFNELLEWVEKLKDQEAPLWFVMEATGVYHEKLAYFLNSKGYKLSIVLPNKISNYMRTLETRTITDKTCAEAITRFGLERAVREWQKPNPTFKKIRQLTREREQIIAERTIVKNQKHAEEAEAHPSQSSIKRMEARIRLLVNQEKEIKREISKLIAKDEATSRIVKLLCSIPGIAELTAATIVGETNGFELIQSRRQLAGYVGLDVREKQSGISVKGKACISKKGNKYLRKAMYLPALCAIRFDTNFKNHFARLVSRHGIKMKAVVAVERKLLELAYTLYKNNKRYQPNYSSNAEAA

SEQ ID NO: 217313 - protein, 341 aa, unidentified
MDHIAIDLGGKESQICVRAQEGTIIEETCCGTLRLASYLKKRPPSRVILETSSEAFRIADAARELGHDVRVVPATLVPSLGVGSRGVKNDKRDPRILSEVSTRIELPSVHIPSELAREWKSCCTAREALVSSRTQLVNSVRGWMRSELLKVSTGGLGTFPARVRLRAKATERGLPEFIDNLLRVIELLNDRIAFADKELKQLAAEHPVCKRLMTIPGVGPVTALRFVAALDQIERFPNASAVQSYLGLVPGERSSGIRQRRTGITKAGPPRVRWALSQAAWVLRIKRPLDPLSLWAKEVEKRRGKWIANTALARRLAGVMYALWRDGSRYEPSRLRPRSAP

SEQ ID NO: 217314 - protein, 310 aa, unidentified
MAQPVFAGIDISKARLDIALGDKFFSIEHTEENMSELVEKFKAASPQLIVVEATGGLEGPLVAYLAEAQLPVVAINPRQVRDFAKAKGQLAKTDKIDAQILCQFAEAIKPPRRPIKDAECRQISDQVARRRQIVSMISQEKNRLSRASAQVRKDIEHHIAYLKERLDLSNKDIERVIKASSLYQETAELLSSVPGVGPVTIASFISFCPELGNLNRRQIAKLVGTAPLNSDSGPKTGARHVWGGRKTVRNQLYMATVSAIRCNYKIREFYLRLIAAGKKPKVAITACMRKLLTILNAMVKQRKTWQLSEV

SEQ ID NO: 217315 - protein, 351 aa, unidentified
MKELMAGMDLHGNNIMVGLVDREGKRLAHQKLPCDLKRVLEFLSPFKERLETLAVESTYNWYWLVDGLQAAGYPVVLANPAKITQYSGLKHADDKSDAFFLAELLRLKILPTGYVYDAERRPVRDLLRRRMSLVRQRTALMLSFKSLFTRTTGEQMSLSRLKAMEVKEAQTLYEHPANQLIAGLQIQHIEQLDASIGRLEKAVLSVARELPCYPQLQTLPGVGIILGLTITMEIGDIKRFAGPGQFASYCRTVAARCTSNGKQKGENNRKCGNKYLAWAFVEAANFARRYDEPCRKWHERKAAKTSNVIATKALACKLAKAAWHVVAHEADYDGSRVFPRRAGEKNENMQT

SEQ ID NO: 217316 - protein, 426 aa, unidentified
MAEKKMGPQPEFAAFVGIDWADRKHVWCLQAADSRKRETGELEHKVEAVEAWVGELCRRFGHRPIAVAVEQVKGALVFLLNKYECLHLFPVPSTMTAKMREALYPSGAKDDPRDADLLLDRLGQHRDKLHRLSPDDEATRRVQNLVEERRKLMAERTAQSNRLTSYLKIYFPQMVEWFEKLDMPLVCDLLERWPTLEELQKVSPEELRRFFCQHHCHRGLRERRILAIGGAIPARGDRAVIEAKSAVVKVIVQLIRSLLEGIAELNRKIEEAAAEHPDFFIFDSLPGAGAVLAPRLLAAFGSQRDRYRCAAELQTYSGIAPVTERSGKRKWVHFRWACPKFLRQSFHEWAGHSIAQSTWARAYYQQQRDRGSDHHAAVRALAFKWVRILFRCWKDRVAYDENKYLAALTKRGSPLGKLFVVGLASL

SEQ ID NO: 217317 - protein, 343 aa, unidentified
MGEVSTIGLDIAKSVFQVHGVDGIGAVVMRKRVGRAKVLEFFGGLSPCLVGIEACPSAHYWSRELQALGHTVKLMPPSYVKAYLKRSKNDANDAAAICEAVTRPSMRFVPIKSEQQQSGLMLHRTRQLLVRQRTMLSNAIRGHMAELGIISAKGRNGTAELLQIIANVADDRIPPVARFCLDLLARQYLSLSAEVASIDKRIHAWHRACAQSRRLEEIPGIGPIVATALIAEIGDWAAFRSGRNLAAWIGLVPKQHSTGGKERLGSITKQGNRYLRWLLVAGAMAVIRYARQHGTRRAWLSRIMDRRPAKVAAVALANKIARMAWAIMVRGERYREPKLLLAA

SEQ ID NO: 217318 - protein, 413 aa, unidentified
MIYCGIDWAERHHDAALVDDTGELLAKRRITDGAAGYQLLTDLLAEYGDTEDAPIPIALETSRGLLVAVLRTGKRQVFAINPMAAARYRDRHSVSRKKSDPGDALVLANILRTHMHAHRPLPQDSDLARAVAVLARAQQDATWNRQQNSNQLRSLLREYYPSAPDAFATWRNGLCRPEARELLRLAPTPSQAARLSRTQIQAALKRAGRKRGIEAEADRIREVFRAEWAHQPQLVEDALGKQMLALLIQLDAACTAADDLAKAVEEVFPQHPDAEIILSFPGPGVQLGARVLAEIGDDRSRFADARGLKAYAGASPITRASGKKSSIIRRRVKNDRLNHAGYLWAFAAPNGSPGAKALYRRRRDVHGDWHAAALRNLFNRMLGQLYRCLQEHTPFDELVAFPTPSLEAEKAAA

SEQ ID NO: 217319 - protein, 347 aa, unidentified
MKKIFIGIDVSKEKCDATAISAENGLTGVEKLDYLVFENRPKGFRTLLSWAKKLRSDIPQEDILFVCETTGAYDRALCDYIYSKGLDIWRESALQILWSSGVRRGKDDKTDSLMIAEYALHHMDKVHLYESPDSRILEIRTLFLYRRKLEQEKTSKLVRIKELEATAGKSRTLTFILRDAKKSIRQLEKSIKECEDKILELIEADKALNKSYQHLDSVKGLGIVNITALIVYTNNFKAFKTSRKMATYWGVAAFWSKSGTSVDKRADVRNLSSSMLKSYLTQAAMHTIAKGGIYHDYYHRKIAEGKTHSIALNNAKNKLLHLAMSLVTHDMDYEANYEFLRTQRVAN

SEQ ID NO: 217320 - protein, 342 aa, unidentified
MNQVSTVGLDLAKYVFQAHGADASGSVVFRKKLRRHQVLSFFAALPPCTVAMEACAGAHDGGREIGKLGHTVKLIAPAYGKPFVKRQKTEASDAEAICEAAQRPTMRLVAVKSEQAQAAAVVFRTRDRLVRQRTQAIHALRGHWAVFGIIAAKGPLHGPKLIALMDDPTSDLPHAARVILGILGQELQALNERIVMLDREIARQAKENAVARRLMTIPGIGAVTATALAVLAPPAETFRRGRDFAAWLGLTPVQRSSGGKERLGRTSKMGERTLRRLLIIGASAVARWAARKGPPAGSWFARMMSRKPPLLVRVALANKMARVVWALLVKGGVYRAPVVAAA

SEQ ID NO: 217321 - protein, 402 aa, unidentified
MKNAVGIDVSKGKSVVAIMRPYGEVVYSPFELKHTASDISSLIDLIKSIDGESRIVMEHTGRYYEVLANQLSNANLFVSAVNPKLIKDFDNESLRKVKSDKADSVKIARYALDKWNLLQQYSDMDELRNQLKTMNRQFNFYMKHKTAMKNNLIGILDQTYPGVNTYFDSPARSDGSQKWVDFASTYWHVDCVRKMSLNAFIDHYQKWCKRRKYNFSQSKAEEIYGKAKELVPVLPKDDITKFIIKQAIDQLNSTSTTVEELRKLMNETAAKLPEYPVVMQMKGVGPSLGPQLMAEIGDVMRFTHRNAITAFAGVDPGVNESGSYAQKSVPTSKRGSADLRKTLFQVMDVLIKTMPQDDPVYKFIDKKRSQGKPYYVYMTAGANKFLRIYYGRVKEYLATLQS

SEQ ID NO: 217322 - protein, 314 aa, unidentified
MSVSTCFIGIDVSKDQLDVAIRPTNEKMSFANDDDGIDMLIKRLLPFQPHLIVLEATGSYHQLVLGRLLACGLPAIAINPRQSRDFARAIGRLAKTDSIDANVLAEFADKIRPELRSIPDEATQQLDAICTRRRQLVTMLTAEKNRHHSGPAAIRSQIKKHIVWLEKQINELQRDLDKLIRSTPAWREKDDLLRSCKGIGPTTSHTMLASLPELGTLSRHRIAALVGVAPFNSDTGKYRGQRHVQGGRIDVRCVLYMATLAAIRSNPVIRAFHHRLIAAGKAKKVAITACMRKLLTILNAMVRTNTRWTANFGS

SEQ ID NO: 217323 - protein, 330 aa, unidentified
MLYAGMDIHKRNTHAVVKTEKGEVIKEDEIRTKEKKIKQFFEDIEEEFEVAMEATGNYEFFYETLEDLASEVHLANPYKTRLIAEEKVKTDKVDANALADLLRGNLLPTSYIPSKEIRNLRRLVRRRVKLGKQRTEIKNQIKDELRRQIIDYSNRSIFKNDGIKFLEDLDNPIIDSCLSIYQTIDEELEIVEKKLTDQGMEYEEVRLLNTIPGVGPYSATLIFGEIADINRFSSEEKLFSYAGLVPTVHQSGEKNYHGRLSKECNKYLQWILVQCVQQHIRYCSNSKISSFYRKLKKKKPNNVAKIATARKLLQAIYWMLKNHDEFRVKG

SEQ ID NO: 217324 - protein, 422 aa, unidentified
MLEETQDTEELIGRVAALDIGKAELVCCVRVPSAQGSGKRLQEVRTYPTMTRSLLVLADRLGALGVTRVVMEATSDYWRSPFYLLEAHGLECWLVNARDVKHLPGRPKTDKLDAVWLCKVAERQMLRPSFVPPPAIRMLRDLTRYRADLVAVRTAEKNRVEKLLEDAQIKLSVVASDIFGVSGRAMMAALIAGERDPKVLAQLARRRLRAKLSLLEEAFYGRFSDHHGFLLERMLDRIDQATADIAALEAKIDQEIAPFQAAVDQLDEITGVGRTAAQVVIAEIGVEMGRFPTAGHLVSWARFAPGVKQSAGKQKGKATTGHGNPYLARVLGEAAVAAGKTDTFLGERYRRIARRRGAKKAIVAVGRSILIIIWHLLSDPDARFHDLGPGFYDTRIDADRRKRNHVRQLEALGYKVTLQPAA

SEQ ID NO: 217325 - protein, 429 aa, unidentified
MKDTVDRHSIFKELKSTIRGSEKYLLVGVDVAKNDHHAFFGTPNGKTLRKNLVFDNSIKGFEALRSLASDIRNQHGLVEVVYGLEPTASYHKPLAEYLIRQDEHVVYVSNVAVAKNRALLDGRWDKNDKKDAANVADLVGQGRCLYYDVPEESLRELRSLIGFRIRLKKEEHALRMRLRNNVFAQFFPELDKLYIKAGQPDDLVLSIAEHCLDPREIAGMEFDAFLKLITQRKIRIEQERRLRELWEFAKKSAGCLVHDAARWEAKSLVSKLKAVRETVKGNEQRMEAAARKFPEYECLLSIPGFGPIVSAMVLAGIGNPSRFNSRKQVLRLAGLDLSAERSGKDSDRAKPVISKQGKAAMRYALVQAAMVASSLNPDIRSYFSRLIKGRELERGIKLKMKVKLAAKLLVVAWTLMKRREQFKPSCFSG

SEQ ID NO: 217326 - protein, 393 aa, unidentified
MCAVFGINVSKTSSEVAILVNGEKVHGYTMPNDIVGFSRLLEDLKTVSNLVIIFESTGAYSRRLQAFLEENSYDYTRLNPLEAKKQLDGLRVRKTDKIDAEKLASSQFVLNRKPTYVQEKVYQNLHDLSRFYQNLTEDIVRTKNRLHKVLQVAFPEIENLLSTPKGEQYWNLVSIFPTKHWVLELSEVELKETIRQSTSKRISENRVGNLAEKLVGLAKQSYSAISKTSPMIEEVKYNAQELIRLTNRREKVLEQLIELAKPLPEYEFLLSILGIAETTATSVIGELGDIRRFQSANQINAFIGIDLRHYESGDFLGQEHITKRGNPYARKILYKCIHNIASASHTNPCHIADFYEKRKRQYLQQILMQFLQYIVSFRQCITLLRLTNFTITL

SEQ ID NO: 217327 - protein, 365 aa, unidentified
MQQTISSQTDMMTATTTSGLTIGIDLGDQWSQFCLLDSNGTVCEEGRVRSTRSAFQARFGTLAPARIALETGTHSLWASELLAELGHEVIVAPVREVRALTGSHNKSDQVDARKLARYARVDPTILHPVRLRDSDQQRDLVLIRARAALVRARSLLVNTVRGLVKPFGYRVSSCDADCFANRCREELPGDLWTSLGPMVEQVAQLTQQIQDYEKQISTVVEQKYPDAAPLRSVFGVGPVTALTFVLTLADPQRFTRSRDVGCYLGLRPERSQSGEHDPQLGITKAGNTYLRWLLVECAHRLLRVDAPDSAIKRWGQKLCERGGKNAQKRAIVAVARKLAVLLHKLWITQQCWEPLYGVRPMTARS

SEQ ID NO: 217328 - protein, 341 aa, unidentified
MGIVVAGFDVHRAQITFDALDTETGEIATGRIRAAPEAVEQWVGRFAGREVHVALEACTGWYFVARSLERAGAVAHLAEVAETRALRGRKRRAKTDRADARWLRKLLSEGRLPEAWIPPDHVCWLRIRTRLRKTLGDEAVAWRQRAQATLFHLGLPALPAGYEGRRARQWLSDLELPAAARERIEVCLAMIEAIEAQMAPVESELRAFSRRQPGCQALERLFGIGGVTAPAILAELGDVTRLHRSRQAVRMAGIDIGVNRSDRRSRVGKLSKQGAPALRWALYEAAQSACRPTSPDHAHYLALKERGLSHPRTSLTIARKLARRCYHTLRELGPAALEEPA

SEQ ID NO: 217329 - protein, 341 aa, unidentified
MEEVTTIGLDLAKNVFQVHGIDAAGNAVVRRKLRRGEVLQFFASSPPSLVGMEACCSAYYWAREIAKLGHEVRLMPPAYVKPYVKRGKTDAADAEAICEAVTRPTMRFVPIKTEEQQAAAIELNARDLLVRQRTQTVNALRGYLGEYGLVAAQGAAKLSELIDALRRGDVDGLPIMAREALLELIEQIDSLEERIERMERRMVRRARQDETAKRLTAIPGIGAITAVALQGLVPDPGGFASARHFASWLGLTPKSRSSGGKERLGRISKQGNGMLRRLLILGATARLRYARRGHHDGDWGERLLARRPFKVAAVALANKMARIAWALLTKGGTYRTSAAAA

SEQ ID NO: 217330 - protein, 343 aa, unidentified
MNEVTTIGLDLAKNVFQVHGIDASGRAVVRRQLRRSQVLPFFEKQAACLVGIEACATSHHWAREIAKFGHEVRLMPARYVKPYVKRNKNDAADAEAICEAVTRPTMRFVEVKTEEQQSVLMLHRTRQLFVRQRTTLINAIRAHMAEFGIVAGIGRNGVERLLRLIDGGMDKRLPPAAEECLRALQTQLVLVKRQILEADRRILAWHRSNELSRRLEAIPGVGPLIATALVASIPDPHAFGSARDVSAWIGLVPMQNSTGGKERLGGISKAGNRYLRSLLVVGALSVIRRAKQVGYTRRPWLAELMARRPVKVAAIALANKIARIAWALMVRGTRYREPVPQAA

SEQ ID NO: 217331 - protein, 338 aa, unidentified
MDISTVGVDLAKNVFQVHGMNKRGKMIVRKRLSRGKFLEFFANLPPCLVAMEACGSASCWGRRLQVLGHEVRLISPQFVKPYVKTNKNDFNDAEAICEAASRPRMRFVPVKTIEQQDIQCLHRVRQLLVQQRTALVNQARGLLREYGVFIPRGIGCFRRAMPEVLEDGDNELTDLTRPLMADLYTRVQELDQHIDGYKRHIEALSRARPVCQRMEKVEGVGALTATAVMAAAGDAKVFKNGRQMSAWLGLVPRQHSSGEHNRLFGISKRGDVYVRSLLIHGARSVVLRCKHKSDPKSRWLQGLIQRRGFNRACVALANKNARTLWALMAHGEEYRPAA

SEQ ID NO: 217332 - protein, 354 aa, unidentified
MKHTTKYVALDVHQATTLAVVRHESGRVIARAIVPTEEKALVEFVRGMRGAIHVAFEEGTQAQWLHDLLVPLVERVVVCDRRGQRRQGNKNDAVDAAELAELLRRGGLRAVYHGSAHRADLKEFTRTYRSLVEDATRVMLRLKALFRARGIRTPGTAVYHPQGRAQWLAQLPERGARFRAEALYAELDVLRALRPKAKAAMLAEAKRDPAWAVLQTIPFFGPVRVALLVATMRTPWRFRTKRNLWAYAGLAVVTKSSADYTLVAGRPVRRQRAPMTRGLNRNHNRVLKNVFKGAATAATARAGPLQDCYHGMLARGMRDELARVTLTRKLAALTLRLWKTGEHYDPTKLTIQAR

SEQ ID NO: 217333 - protein, 332 aa, unidentified
MTYVGIDVSKATFVVAYSSAKSSKTKTFKNTTKGVHEFIQTLSASEHHCVLEATGNYSSLLVYLLSQVGITVSLENPLKIKNFARVMLSVTKTDETDARLIALYGEKMQPAPYRLRSDAILTLKQKRTVIRQLKKQLIATRNLKGSMEALPFFDPKCKKAIEKTIAFLEKQVKNLEEELAVLAQCEYKKQMDLLISIKGIGVTLAAALIMATGGFTYFDNAKQLTRYLGLSPTYQQSGTSVNVKGHINRNGDSSLRGQLYIAAMASLRCNAECKECFDRLRSNGKPGKVAVVVGAQKLVKQALSAVSFTQLPGPPERTRYRLPSFCLKKKTK

SEQ ID NO: 217334 - protein, 409 aa, unidentified
MDVVYERCCGLDVHKKSVVACLVTPGSGRAPRKELRTFGTMTDDLLALGDWLAAAGCTHVAMESTGVYWQPVWNLLEDRFALLLVNARHIKAVPGRKTDVRDCEWIADLLRHGLLRGSVVPDREHRELRELVRYRTALTRERAAEVNRLQKVLEGANIKLAGVASDVLGVSGRHMLDALVAGATDPAALAGLALGQLQKKRPELERALAGRLGPAQRYLVATMLAHIDALDATLAELSDKIREQMRPFEGAIERLDTIPGVGRRIAEIVVAELGTDLRRFPTAGHLASWAGLCPGNDESAGKRRSGKTRKGNRSLRWALIEAAQAASRTRGTYLAAQFHRLAARRGKKKATVAVAHSILVAAYHLLTRPDLYADLGGDSFDRRDREAVEHRLVRRLEALGNKVTLEKVG

SEQ ID NO: 217335 - protein, 409 aa, unidentified
MDVIYPRCCGVDVHKREVVACLVTTGPNGVPSKVIRAFGTMTPDILALADWLAAHKVTHVAMESTGVYWKPIWNLLEDQFALLLVNARHVKAVPGRKTDVRDCEWLADLLRHGLLTGSVVPDRPQRELRELTRYRTSLVRERTAEANRLQKTLEGANIKLASVATDILGTSGREILAALVAGETDGAELAQFAHGRLREKLPQLEQALVGRVGPHQRFLVAQQLAHVDFLEASIAHVSAEIAARVRPDEEAIARLDTIPGVGRSVAETLVAEIGTDLTRFPSAKHLASWAGLCPGNHESAGKRRSGKTRKGSPWLRACLVQAAHAASRTKGTYLAAQYRRLSARRGRAKAAVAVAHSILIIAYHVLIDGTVYCDLGGNYFDERDRQGVERRLVHRLEGLGYTVSLTPAA

SEQ ID NO: 217336 - protein, 359 aa, unidentified
MDNNEDGTRHVVGGVDTHKDLHVAAVVDGQDRVLGTACFATTRQGYRQMLIWMRSFGDLRRIGIESTGSYGAGLLRFMQQAGIDVLEVTAPDKHDRRRRGKNDDLDAQNAAHAALAGRRTVTPRSRDGMVESLRVLTVCRKTAVAARRVAIQIIQTTIVSAPDGLRDTLRSMTRMQLVRTLAAWRPDLTAYREVEAAYRISLKSLARRYLELHDEIADLDAMISAIVDDLAPELIARNSIGYTGAAQLLLTAGDNPERLRSEASFAALCGVSPVPASSGKTIRHRLNRGGDRAANSALHIIAIGRIRTDSATKAYVARRTSGGHSKLDAIRALKRYIAREVFHIITRRHREINQTRIAA

SEQ ID NO: 217337 - protein, 392 aa, unidentified
MIIVGIDVASQKHDYFMLQKETGVVFRSSSITIPNTLNGYKKLHKDIQSFCGATSDYTVRIGLESTGIYSTNITTFLVSEGYEVMMINPILTNMVRKASKVHCPKNDNLDSQTICKYLVDNMGSFSPYTSTLYHTLALKSLSRKRFYIVDELRKAKLNVYKLVHLMFPEFESFFSNIYVLSALSILKEYPSPQKLAKAHANKVSTLIHGRCKCSALELIDAAKNTAGIKSDYYSFQLIDAIEELEHIQKRVEKYDVQIGNYVKQHFPNLLTIPGVGYITAGLIVGEIGDINRFHSADSLVSFAGIDCTVYESGNYKAKHTIPSKKGSKYLRYALFQVARIAWQWDPVFKDYYLKKQSEGKHFYVILGHIQKKLLRVIYSLMKSGLNYKVISA

SEQ ID NO: 217338 - protein, 338 aa, unidentified
MKVYAGLDLHATNTYVAMIDAENKVLYKQRHRNDVPSILSALDPFREDIQGVVVESTFNWYWLVDALMDHGYRVHLANVSAIKQYEGLKQIDDRRSSLWLANLLRLNILPTGYIYPKEERPTRDLLRKRLQLVRHRTSHVLSVKNILARNLGIRMKTYDIKKLKASEVSTLFADTEMRLAIMSSVGLIQHFQEEIDCIEKVITKKFKVKEEFKKLLTVPGIGEILGLTIMLEVGHIDRFPTVGNYSSYCRCIRSLHTSNGKVTGYGNSRNGNKYLSWAYLEAAHSARRHHEMIQRYYERKRAKTNKVIAIKAVSHKLARASYYVMRDGVDYDEARLFV

SEQ ID NO: 217339 - protein, 338 aa, unidentified
MTLYCGIDLHSNNSMISLINDTDQLVSEKRLDNDFEAIATHLQPYQDDIHGIVVESTYNWYWLVDGLMEQGYPVHLANTLAIQQYNGIKYSNDATDARYLAHLLRLGILPTGYIYPKALRHVRDLLRRRLLLVKQRTAQLLSLQSLIGRHTGQRLNCLKMKQLQQADLAHYFDTPAALFAAQQSHRLMQQYNAQIEAIEAYLLEQCEPNDTYRLLTSMPGVGRILGMTILLETGSIERFAKVGNYSSYARCVPTDRISNGKNKGKGNAKNGNRYLAMAFVEAAHYAAIWNPVIKRYYQRKCRKVPVMVAKKTVANKLTRACYHMLKDGAAFDVERAFG

SEQ ID NO: 217340 - protein, 326 aa, unidentified
MEDFHACIKVRTELGGINIKGTRSFENAEKGFRELLAWSLKHKKDSCALGFVMEATGVYYEDLAHFLYRNGQNVSVVLANKMKNYMKSHNIKTKTDKVDSKVIAGFGIERELEGWQPMSPVYKNLRDLCRELQSLKKEVQRAKSQLHAMDRSHEKHQSILDLKTEQIEFYQRAIVTIQENVHNVVDEDPALKEKIRKVQTAPGLGFETTVILACETNGFALFNNIRQLVSYAGLDVAFNDSGKFKGKARISKKGNSRIRQALFMPSLSAVRANDPIKSLYERICDRNPGIKRKGIVAGMRKLLILTYVLWKKNEEYDKSYQWQERQ

SEQ ID NO: 217341 - protein, 354 aa, unidentified
MSHKLNTAIAVIGIDIGKNSFHVVGHDERGAIVLRQKWSRGQVEARFSNMPPCLVGMEACVGAHHLSRKLNSLGHDARLMPAKYVRPYSKGQKNDFRDAEAIAEAVQRPTMKFVATKTADQLDLQALHRVRERLVSQRTGIINQIRAFLLERGIAVRQGQRFLRTELPRILATPPDVLSPRMVRVIEDLAGDWRRLDERIEGLSEEIEAIARQDAGCERLMSVPGIGPIISSAMVAAIGSGDAFSKGRDFAAWLGLVPKQFSTGDRTILGKISKRGNRYLRVLFVQAAWVVLIKPKSWERHGLKPWIEAAKKRLHPNVLAIALANKLARIAWSVLARDRPFETSVITNATAQTA

SEQ ID NO: 217342 - protein, 343 aa, unidentified
MQAITTVGPDIAKSVFQVHGVDAAGEVIIRRQLKRRHVLPFFEKLPACVVGMEACATSHHWSREIGALGHTVRLMPPAYVKPYVKRQKNDAADAEAICEAVTRANMRFVETKTPEQQACLMLHRTRHLFIRQQTSVINAIRAHMAEFGIVARVGRNGVAELLAVAADPTDRRLPEVARTCVAALGVQLRMLKAQILEFDRRIGAWHRSNQTSKRLDQIPGIGPALATALVASVPDPKAFRSGRNFSAWIGLVPRQYSSGGKDRLGGISKQGDRYLRGLFTAGALAVIRYAKIHGTEHRPWLTALLARRPAKVAAIALANKLSRMAWAVMAKGERYKEPAALAA

SEQ ID NO: 217343 - protein, 372 aa, unidentified
MGEHSDVYVAFDTAKLKHAVAVAEAGRRGEVRFLGEVDNRPPPIERMIKKLGKRYGKLHVCFEAGPTGYGLYRQMQALGHDCLVVAPALIPRRSGERVKTNRRDAVTLARLHRAGELTAVWVPDDVHEAVRDLVRSRLATAEDVRRKRQQLLSFLLRHGRIFVSGDHWTRAHRRWLAEQRFDHPAQQIVFQDAVAAIEDAIERVRRLEQQLADIVARWSMAPMVAAYQAMRGVSFLVAVTFAAEIGDVRRFDTPRQLMAFLGLVPAESSTGEKVRRSGLTLAGNRRARRVLVEAAWSYRHPARVSETMRPRLEALPKTVRDIGWKAQVRLCGRYRRLSAAGKKLPVIIAAIAREMAAFLWAIGHQVTPAVVR

SEQ ID NO: 217344 - protein, 345 aa, unidentified
MLYVGLDFHKYYSYLTVMNAQGEVIKRARVQNHPDRLLCFLGQLKHQFTVAVEATWNWYWLQELFEEHHITMKLVHPQRAKAIASARIKTDKIDSEILAHLLRTDLLPEAHIPTRQTRLLRERLRYRASLVRLLAQIRHKLHAIVAKNGLSLPNRNILSKKSLSYLREVCLADAFRQAIDGYLGIIELLRHQIEQVNSTIGSQAQQDPRALRLTELYGVGPYLALLIVAEIDDITRFPRAKSLCAYAGIVPSVHSSGQTHYTSSITKQGSKWLRWALVEVAQHIHKKPPFDRFYQRVKSRRGPRIARVAVARKLCKTIFYMLKQQQECTEVGQTRWGHGLAGPQA

SEQ ID NO: 217345 - protein, 269 aa, unidentified
MSINVGIDVSKGSLDVCLLNNQTKSGQRYRKFKNDKGAHSDLNSWLLKTAKCKAEDILITMEATGIYHEPIAFYLHMAGFLVFISNPGKAKKFSQSLGLVHKTDKSDSYMLALYGDAQGSRAHLWTPDSLNVRNIKSLSRRLSALEKDRLRESNRLEASEISDAHERVICSIKRVISLIDEEIASIEEEIDLAIRSDPTMNKNHQLLQSIVGVGKVMSRELVYLFSAKQFSSAKQAAAFVGLIPRLNESGNLKGRTTLSKVGPSRVELC

SEQ ID NO: 217346 - protein, 353 aa, unidentified
MRIVVALDVHRRQITYKTLDRESGEVRRGRIVPATRGAVREWLEQFAGREAEFVLEGTTGWRFVVEEIEQAGHPAHLADPAETASKRGRKRRAKTDNADCDLQLKLLLAGELPESWIPPAHILELRTRVRTRKLLIDQRTAWQQRLQAQLFHQGVATGLKPRTRAGREALARAELSPAGRELVALALRAMDAIDRELAPLDRALRSFAHRQPACRALIANLYGVGAISATAILAELGDCRRFASSDDAVRHSGLDVTVHQSDNKRSAGHLSHQGPELLRWALFEAAHQSARRGSPDYAYYLQVARRIDHNRACLSVARKLCRRSHHILRELGDAALAPVERERQTGEAIQAAA

SEQ ID NO: 217347 - protein, 371 aa, unidentified
MGESSKTLYVGLDVHKESIAVAYAPEDRGAEVASLGSIGTRQCDIDKLIRKLQSKGATLVFVYEAGPCGYWLYRYLTRKGLSCHVVAPSLIPKKPGDRVKTDRRDAITLARSMRSGDLTAVYVPQIEDEAIRDLSRGREDAMRDLKATKHRLKAFLLRQDIRYEGRANWNAAHLRWLSEVVCPTRAQQIVFQEYVRAVTEQHERLQRLETELHEEVKGWRLYPVVEAIQALRGVELTGAVIVIAELGDLTRFDTPRKLMSYLGLTPSEYSSGERRRQGGITKAGNSHARRALVEGAWAYRYPAKVSRHLQLRLENLPAEVQAISWKAQVRLCKRYRQLTARGKHVNQVVVAIAREMAAFAWAIARTVPLAP

SEQ ID NO: 217348 - protein, 477 aa, unidentified
MLQRKSVPLNRKLASNPPAVYRVTDSSSCSVSSQRSVPEGILIREDVDAPISWVLPSRLTQNLTKKGGDNVNKLFVGIDVGSRNNAVYIMNPDGGKNSCFNVQNDIGGAKTISKRVVSALNDMNLSVVDIGMEATSVYGENLTCFLREDGSLGRFDRKLFVLNPKQVSKFKDMYSDLPKNDPVDAFVIADSLRFGRIGTPIYMDDYRYQALQKLTRARFYAVQNQTREMQRFKNYLYLKCSGLAQERIFSDSYGVSAMALYEAFETPDDIASTDIEALTAFIANAGKNRSPRPDEIAKAVQAAARGSYRLPKTVNDSVNQVLSISISSMRAMKAQIKALEKEIERQFANIPNTLISIPGVGPVLSAGIIAEIGNINRFDSQEKLAKYAGLAWSQYQSGTFEGQNSRLIKSGNRFLKYYLYEAAYHHVRCDTDYKRFYDLKFKEVNKYQHKRALALTARKFVRLVFRLLKDNRLYIPA

SEQ ID NO: 217349 - protein, 370 aa, unidentified
MSVRRILAKTIDTDLEYEAIGIDLAKNCVSAALLTTDGEVVCIDRLDYSELEKSAQALSSTTFAMEPCTEMNYLVQKLEAWGHRCLVIGGKNVQNYVENHYSGQKTDLNDAQALAFLAQDTQLRTIKAKDVEQQKYASLTTLREQYIKQYRQTIVSLKGICQAWGLNISKGISGKARLKDLIENHAAFPEELKESLVDMVTHAQTAQKALNKITKTLEELAKSDKVCQLIQTIPGLGSICSCRLRATVGDIKRFKSPKDFPAYYGLVPRSIATGHNEKKGKITHRGDRTMRSLMVQAAGSLVNMATKGKLKSKQLTKWILKKQKEKMPWGKLVCAVAAKLLRIVRAVLISNKPYNSKIAGVAKCSLPKGS

SEQ ID NO: 217350 - protein, 413 aa, unidentified
MGYKVAGIDIHKQVLMVVVMLVQAGGLVEKRERGRFGTTTPELEKLAAWLQALEVQEAVMESTAQYWKPVWCELEGKIPTLQLAQAFSNRARRGRKDDFRDAERLVRRLVAGELVLSFVPDPEQRNLRTMTRMQVHLTYDRGRLHNQVECLLEEMRIKLSSVLSDLFGVTGLCILDALAKGETDPQKLAALAGNRLQCTSQQLGAALTGRVLAMHQRLLGLYLQRLKLIDQQIDELKHMIAKALQGHQEAVQRVAEVPGFGADSAQQMIAEIGAEAATFPSAGEMASWVGTCPGQNKSAEENHSSRSPKGNRYARRVLTEAANAAVKTKGSHWQVVFRRLLPRLGYQQAVWAVAHRLCRVVWRILHDNVRYVEQGLNRDPKARANRARTLARALRQLGYKVELIPLTPAPVAT

SEQ ID NO: 217351 - protein, 408 aa, unidentified
MNTLYVGIDVSSKSNVVYLMLPNGDKHSNFSVANSHEGSTLLVKKIYSALTSHSLDTVLIGLEATSVYGVNLVYFLREDATLAPFNRKIHVLNPKQVKKFHDTYNDLPKNDYVDSFVIADCLRFGRINKEVYMGDYRYKALQNLTRARFFAVQNLVKEKQRFMNVLFKKYSTMTQEKVFSDAFSTTALAVYDEFESAEALANMDLHELTDFIIEKGKNRFPDPDAVAKAIQKAARSSYRLPKTVNDSVNQVLSISITSMKALESQIKEFDKAIKALMELLPNVLISIPGIGPVYSAGIMAEIGDINRFDNQASLAKYAGLAWKQHQSGEFEAEVTRLIPSGNRFLKYYLCEAAFSLVRCDKKYSDFYHLKYKEVNRCQHKRALALTARKFVRLVFRLLKDNRLYCPAK

SEQ ID NO: 217352 - protein, 394 aa, unidentified
MGKIYVGIDIAKDRSTACGIEEGGKSLFELTFTMDGAGFAALLKTIEANGGTPGDAVAAMESTACYHINLYSFLSAKGIEAVIINPLLIANYAKLSLRKTKTDKKDAQTIAQFILAHKDSVTQLAISQDIQDMRDMARERESLCHQISAAKVEIQRVLQMTFPELAAMTNPLTKVMLHFIQRFSSARLVSIAKPSAIEKTLKEKPCSCRLRFTPKELIEAARKSIATVSPAKELILSGKIETLVHLQKRRDELTKALTKYCESTIVEDLRIVTSINGINNTMAATLLAEIGQISNYLSHKHLIAFAGIDPTVYQSGKYEGASRISKRGNRHLRRVIWLMTISVIQHNPIFRNYFLKRRNEGQPFKKAVFATAHKLMRVIFAMLSKKSFFVVECV

SEQ ID NO: 217353 - protein, 327 aa, unidentified
MKDTMIGVDLAKNVFQVHVASLTGEVRFRKKVRYPQFLQFMASQPPTLVVLEACGSAHYWARELMNAGHEVKLITSQYVSPFVKGQKNDAGDAEAIVIAAQQPEMRFVAPKTEAQQARAVLFRCRDRLVHQRTELINALRGTLYEFGVVVPKGIAHLKRIEEFVADDSVSLPAVVRKECRDLLEQIDEQSARITEKTHAMDGLSKESGMVQLLETMPGIGPLTALAVEAFAPSMKSFRSGRDFSAWLCLVLRQFSSDGKERLGRVSKAGQADIRRLLIIGAMTRVNSASRKPRMLVAIALANKMARTIWAMLTKQENYRDTVLSAAA

SEQ ID NO: 217354 - protein, 322 aa, unidentified
MEQFYLGIDVAKNTLDCALLLPNGKLRHKSKLSNNSKGFAALTQWIHSQKAKKIHVCMEATGIYWEAVAQYLADAGHVVSVVNPFQIKSFAGACLQRGKTDKLDAGLIALFCAKQCPEPWKALSPDKQVLRAFVLRLDALQTMRVQELNRFQVARDVVRDSIAAHIQWLDEQIEALKKEIGQHINKNPDLKDKHELLDSVPGIGEHTSAFLLAFGIHPERFGNAREASAFAGIEPRLHNSGTSIRGKPRMSKRGHAILRKALYMPAMVTLYNTRWGKQFRQRLAAAGKPPMLIIGAMMRKLIHVAFGVLKSGKPFNPALHGA

SEQ ID NO: 217355 - protein, 434 aa, unidentified
MTASDSTARPCNLVAIDIAKAKHDVLVELPNGKRRKMIVRNQLSDFRQLVAYLKRLDGALEIALEPTADYHRNLAYFLKAQGFAVKLVSSIAVARTREALHNSWDKNDPKDAQVILHLLRNGNTQYFYDPVVEQTNDLQELSKTHFQISLRKTRVQHSLLNHYLPLYFPEAERFLSNSRSSWFARLLFEFPTPQAITQLTENEFLERASRLLKRKQSKAAILRALYAKAQESVALPVSLESQAIATFRLTLAQHLELCRIRAELEETAHELLQDQLDYQILRSVPGVGPIIALTVLAEAGDLRRFGHERQFLKFCGLDLATSQSGAYRGRTQLSKRGNSRLRSALWMAARRATHMQENTFRQKFSRYLRADTTNTDLRRKAYTACTAKMARTIYGLIKHEQFYRAYREDAIPEPGGRTRSHGPLRQAASGGLTS

SEQ ID NO: 217356 - protein, 344 aa, unidentified
MDLGDRTSWYCVLDESGTVVLEQKLSTTAKALREAFGGMPRSRIALETGMHSPWVSRALSELGHEVIVAHARNVRLIGESRKKDDRLDAQTLARLARIDPQLLCPVKHRSAKAQADLTVIRARAGLVRARTALVNTARGLAKSYGERLRGCNVRNMNPEKAEGLSPELQRALQPLLAAIESLSERIREYNERIEQLARESYPQVALLKQVKGVGTLIGLTFLLTLEDPHRFRKSRDVGCYLGLQPGRRNSGQSEPQMHISKEGDPYLRTLLVQGAQHILGPFGVDCDLRRWGLRLAERGGKSGKKRAIVAVARKLAVLLHHLWVSGEAYEPLHNRHRNPLSAAA

SEQ ID NO: 217357 - protein, 390 aa, unidentified
MPMYFVGIDISKYKHDCCIISAANQKVVSKVIIKNNKAGFNELLTIIHSLANPADIRIGFESTAHYALNLELFLENSLLTFMEVNPVLISEYKKSKTLRRTKTDSVDCESIARWLMTVEYKPHSKGFYHAYSLKSLTRLRDKLIRQRSFYLVKITNVLDHTFPEFKPFFNERLSKTALYLLENYGSAEKMARMNSASYEKLRSVSRGKFSPQQFLRLKELAANTVGVNNSIFDVELNSLLSLYKSLVKEIDTIKKEINQLIEEVHPHYMSVPGIGPLSAAVIYSEYGDISNFTNPGQMLAFAGIEPGINESGTESHGGKMVKRGSSQLRYTLINCCLPLIRFDMTFATYYAKKRGEGKPHRVAITHVAKKLIITSRITRAQMTDISFPET

SEQ ID NO: 217358 - protein, 338 aa, unidentified
MAIVTVGIDLAKNVFAVHGVGSSGKPEFVRPEVRRSKLLELVASLPACLIGMETCSGAHHWAREFEKHGHTVRLMAPKFVAPYRMSGKRGKNDANDAAAICEAVTRPSMRFVPIKSIEQQAVLFVHRARQGYVEERTALINRLRGLLSELGIVLPLKASVMRREVRKVLEDLPGWCNTVVGDMLSHLTRLDERITEYDKHLSQIAQHNDHARQLMKLAGVGPTTASAIVASVGNGHDFKNSRQFSAWLGLTPGQHSSGGKARLGSIKKAGDSYLRTLLVMGARSLLMKAANHSDSVSRWALKLKERRGFGRAVVAIAAKNARMCWAALRLGEAFKVPA

SEQ ID NO: 217359 - protein, 346 aa, unidentified
MKVLIGVDPHKTSLAVAALDEASGELLERASFPQDRAGSRALERWARRFSERRWAVENAGGLGRYLAGRLAGSGESVVDVPPKLSARVRVLSSGNARKNDELDALATALAASRNERLPAVDAEAASEVLRLLSERREDLVAERTRALNRLHGLLRDLLPGGVAGKLSADRTARILRGIRPKGASDRLRRRLASEILRDVRTLDRKAADLERRIEAEVEASGTTLTEIFGVGPILAARIIGAVGDAARFPTKAHFASYAGTAPVEASSGEAVRHRLSLLGNRKLNYALHMVAVCQARSDARGGVYYRKKIAEGKSRKEALRCLKRRVCDAVFRCLVADSRTPSCSAA

SEQ ID NO: 217360 - protein, 410 aa, unidentified
MDTLIERCAGLDVHKETVVACVRVPTRGGGREQCVQTFGTTTAQLLALRDWLVAHGVTRVGMESTGVYWKPVYYVLEDAVECWLLNARHLRNVPGRKTDVADAAWICQLVEHGLVRPSFVPPKPIRELRNLTRYRKAQIEERTRGAQRLDKVLQDAGIKLSSVASDVLGVSARAMLRALVAGTRDPELLAELARGTLRKKIPALREALHGRFGPHHALLVGTILAKLEFLDEALAQLSAEIAQVIAPFTAEAVLLRTIPGVDRRTAEALIAEIGVDMTRFGAAGRLASWAGWCPGNHESAGRQGSGKTRKGSKWLRTYLTEAAKAAAGAKGTYLAAQYARLRGRRGSARATVAVGHSILVAAYYILDRHQPYRDLGPDYFRRRHSREHQMRRLVRQIEALGFRVTLEEAA

SEQ ID NO: 217361 - protein, 343 aa, unidentified
MKDTTIAVDIAKDVFEIAVSHEPGVVNEKHRVSRKKFLSFFANRPAATVVMEACGSSHHWGREINKLGHRVVLLPPHVVRPYVQRNKSDQTDAKGMLEAYRNKDIKPVPVKSIEQQSVTALHRVRSSWVASRTASLNMSRGLLRELGIFIPVGARKVVPTVLELVEDADSRLPDAIRNTLHEVCMEIRDYEKRILGVEKQLEALSKQIPTVGLLRTIPGVGLLTSTALVAFIGDIQRFRSSRQFASFLGLTPRLRGSGFAVHLGSISKQGDRYLRSLLTHGARSVLIRAGAMEKPDRLRAWALKVYSRRGHNKATVAIANKLARTVWAVWKHNTEFQSYPKAS

SEQ ID NO: 217362 - protein, 340 aa, unidentified
MDITTLGIDIAKSVFQFHGVDADGGVVVQKKLRRGAVLDFLGKVGPCLIGMEACATSHYWAREIAALGHEVRLIPPAYVKPYVKRQKNDAADAEAICEAVTRPSMRFVPAKTAGQQSVLVLHRARDLLMRQRTMILNAIRGHLAEFGIIAAQGPRQVMGLIARLRDEGDARLPEIARSALLALGAHLEALAGEIRALERQLMVWHRADATSQRLETIPGVGLITATALAASVSDPSVFKSGRQFATFLGLVPRQNSSGGKDRLGRISKMGDRYLRKLLVVGATSVIRRAASNPTKTGAWVRSLMERKPARVVTVAMANKTARIAWAVMTRGETYRTSPIA

SEQ ID NO: 217363 - protein, 362 aa, unidentified
MGEYSRTLPERTMGLDLGDKYSHYCLIDREGEEIESGRVATRAEALEAKFHSIGAGRVVMETGTHSPWVSRLAERCGQEVIVANARKVELISKNRRKRDQVDAELLARLGRSEPELLYAVKHRGEEAQRGLVLLKSREALVKARTQLITHLRGAVKSLGVRLPSCSPECFHVRMVGQIPAGLGGLGGSLLEVIGKLTEQIRRLDREVERFCRQEYPETELLRQVQGVGPLTSLAYVLVLEDPGRFERARSVGNYVGLCPAQDDSGEQTPQLRISKEGDSMLRRLLVGSAQYLLGPHGVDSDLRRWGLKLAARGGKNAKKRAVVAVARKLAVLLYVLWSRAEVYEPLRGRAEVGAEPACALTA

SEQ ID NO: 217364 - protein, 371 aa, unidentified
MKSILSVGMDVHKNSFSLCAYDGYTGEIVSESTFASDVKLVIKFIEALKSRYENDVEIKCGYEAGCLGYSLYKLLTARGVDCVILAPTTMQVSAKNKMVKNDRMDALNIAKNLASGSYKTVYIPDEEDVEIKEYIRMIHDFKKELQRVKQEICAFVLRHGYQYDGKSKWTIRYMNWIRELEMSEIQRETLNEYIAEMENLNDKIDRFMNRINEIYQSERYHEKVSKLRCFKGIETFAAMTIQVETADFERFPNAKAYASYTGLTTGEHSSGDKNNRIGITKQGNTVIRKTLVECAQALAKGNVYAKKSQRLKSRQKGMNVNIIVYADKATERLKKKYQKLIERNVPRNKAIVAIARELACFIWGMETGNIH

SEQ ID NO: 217365 - protein, 378 aa, unidentified
MNRIIKIGMDVHTTNYTLCIFEPSFEHDGTVHCITQVKPEVKNIIHVIETFKKKHENEELNIVCGYEAGCLGYSLYHELKEKGIECAILAPTTMKTEKGGRKLKNDYRDAKMIAECLAYGGYSAVHVPTELDNSVKEFIRMRDDIKENLKSIKQQIIAFLTRNGKQFEGKSYWTRKHIDWINTVSFSEPLLQDTLNEYMIEYNHLCDRVEILDRQIEKISLKEEYVEKVQQLQCLIGIKTHTALSLIVETSDFNRFKKGNMYSAYLGLIPGDDSSGGHENKVGITKAGNSHLRRLLVEAAQGYTRGRVGFKSKDLKARQEKCGSEVVAYADRANERLRRKYYRMTLRGKKYNVAKTAIARELACFVWGIMTDHIDLCS

SEQ ID NO: 217366 - protein, 415 aa, unidentified
MGRVFEAVFERVAGLDVHKAQVTACVRVPDGDGQRAVHLAQFATTVRGLLALADWLKAFGVTHVAMEATGVFWLPVWHILEDDFELMLCNARHVKNVPGRKTDMSDAQWLCQLMEAGLLRGSFVAPKPQRRLRALTRYRKTQIAERQREANRLHKALEDTGIKLDCVASDILGASGRAMLDALVAGTTDPEVLAELAKGRLREKIPALREALEGRFEAHHALIMGAILAHLDFLDEQIQRLSDAIEAELGPTRKAGVTLAATITGVAQRTAEVMVAEIGTDMSVFPSAGHLASWAGRCPGNDQSAGKRRSGRTRKGSKFLTMALQEAALAATRANGSYLQAQYRRLRPRIGHRRAVGAVMHSILVAYWHMFKNGEIYRDLGGDHYQRRDPARQINRLVAQLERLGQHVTLQEAAT

SEQ ID NO: 217367 - protein, 353 aa, unidentified
MNSPMDENEVILGVDTHLDTHVGVLINTNGNLLGCLAVTTDTSGYLKLVTWANSFGMLKRAGVEGTGTYGAGLARVLRDHGIEVLEVNRPDRSKRRLQGKSDPTDAESAARSVLSGNATAIAKTQSGVAEAMRVVSVARRSAVRAKTQAINQLRALLVSAPQDIRERLWKTKPADCAKGCARLRSRSATEFLNILTTSLCLLGKRWLALAEEVEKLDAILENLTRQHARRLREQFGVGPQTAAVLLSTAGDNPERLKSEAALAALCGVSPLPASSGKTVRHRLNRGGNRSANNALWTIAMVRMRGDPKTQSYVARRSAEGLSSKEIQRCLKRYIVRELYPLILADLADSARSC

SEQ ID NO: 217368 - protein, 344 aa, unidentified
MTSYGGLDVSLRSVAICVVDETGHVQLEAKVSADVDTIAQKLAEFSKADLRIGLEAGTLTQYLTHGLRALEFDVVCMEARQVAAALSAMRNKTDRNDARGIAQILRTGWYNAVHVKSMQSHEVRALLSSRRVVLAKCVDVENEIRGLLKVFGVRLSSHVPHGAYDEAVRPLAQSRPALMRALLPLLEARGVLYGTYLKLDNDVKAVVRADPVCRRLMTVPGVGAITALTFRAAVDDPTRFRSSRNVAAHFGLTPRRFQSGETDNAGHISYAGDADVRCALYTAAHALVTRSNRWCTLKAWGVRLTKTRGRRRAVIAVARKLAVILHRMWMDGSEFQWGSKEVVA

SEQ ID NO: 217369 - protein, 455 aa, unidentified
MSRAKKRKMKAAKESSALPILRPNAAGIDIGATEIYVAVPPDRDPEAVRSFPTFTEDLHRLADWLKVCGIETVAMESTGVYWIPLFQILEARGFDVCLVNARYFQNVPGRRTDVSDCQWLRYLHAVGLLRPSFRPADQVCVLRSLSRHRDSLIQTASTHILRMQKALDQMNLQIHHVISDITGLTGLKIVDAILKGERDPKILAALRDGRIKASEETIIKSLVGDYRWEHLFTLRQSLAAYRNYQKLIAECDHEIERHLKTFDSGVDSKAKALAPPKVRRRKLFGNQPSFDLRGHLYRIFGVDLTEIPGVSILTGHTLLAEVGPDLSRFPSASAFVSWLGLCPDNDITGGKKVAVGTRHVNNRAAWALRMAANALRNSRSGLGDYYRRMRARLGPPQAITAAAHKLARIIFHLLTTHQAFDETVFARREEQTQRRRETVLRNQAKALGFQLLPVA

SEQ ID NO: 217370 - protein, 430 aa, unidentified
MKNQSSDATLTGFAALIGLDWGHGAHAIALEISGANTETSTLEHSAENLHQWLDQLEKRCGGRPVAVAIEASKGAAVYALLERPWITVYPIHPATSTRTRAAFRPSGAKDDTPDALVLLSLLQHHRDRLRPLQLDDEATRTLARLVEARRKAVDRRTLLSNQLQSTLRDYFPQALELVGDNLAAPLALDFLERWPRLTDVQAARNATLKSFYQRHNVRRPELIESRVQRIRSARLLTRDAAVTEVAVRTVRLLVAELRVLQEHIAAFETAIAQAFAAHPEKNLFRELPGAGAVLAPRLLVAFGTLRDRFADAGAMQRYFGVAPVTEKSGGRVWVHWRWNAPVFVRQTLVEWAGQTVVYCPWAKAYYEQQRGKRVGHWAILRALAFKWLRILWRCWQKSEAYEEEKYLRQLEQRRSPIAALARQFAKQMAS

SEQ ID NO: 217371 - protein, 367 aa, unidentified
MCVGLDTHKAKIAVAVAEPGRSGEVRFRGEIANRPEAVRQLLERLAEKHGRLRVCYEAGPCGYGLHRQITALGHDCTVVAPSLIPRKPGERVKTNRRDALTLARLHRAGELTPVWIPDPTHEAMRDLVRARTAAMEAVRRARQQLQGFLLRHGRVFAGRKTWSPAHRRWLAGLRFEHPAQQVVLQEQIDAVDEAERRRDRLEAQIRELVPGWSLAPVVAALQAMRGVALLSAVVLAAEVGDFRRFATPRQLTAWLGLVPSEHSSGAKVERGGITKAGNGRARRVLVEGAWSYRFPARVTGELQARLEGVPEKVRAIAWKAQLRLCARYRRLLAAGKNANLVTAAIAREMAAFAWAIAREAQPAGAAA

SEQ ID NO: 217372 - protein, 338 aa, unidentified
MMQFKFFVGIDVSKDTLDFSVVREGKEISAFKIENSLRAIKTTLLNLKKIKGYELSQVVFCLEYTGLYNNHITHCLHSVGAHIWVEKAIQIKRSSGLQRGKSDKVDAQRIAFYAFRNQDKARLWVAPRAVIQQLKKLTGVRERLLIMVAQLNKPIQESKRFDTKEVFDVIKKSCQSSLKAIKTDLKKVEKKITEVIKADASLNHLFELITSVDGIGGVIACEMILTTNEFKNINDPKKYACYAGVVPFEHTSGSSVRGRNRVSHFANKNTKRLLHMASLSIIRYQGELKTYWLRKLQEGKHKMIILNAIRNKLIQRVFAVIKRGTKYEKNYSHSLQGS

SEQ ID NO: 217373 - protein, 407 aa, unidentified
MELPAIFQSVVGLDVHQAKISACAMIEQPDGTLTVEHREFGAFKRDRRALAEWVRTLGPDLVVMESTGIYWKSPYAALEQVGIAAWVVNARHVKNVPGRKTDVADAQWLATLARAGLLRASFIPPADIRHLRLIARQRQKLGGMLASEKNRLHKLLADAGIRLNVLVSDIHGQSGRAMVKALIEGQPLPEILDLAGRLRASREELFEALQPEQLSDAHRFVLSEIMAHIEELEARMGRFEQTLLAGLAAWEPQLVLLQTLPGVDRIGAAMLLVEIGTDMASFASAEKLASWVGICPGNNESAGKRKSGKIRKGNAWVRRLLCEFAQAASRSRCGLKEKFKALSIRKGHKKAIVALAHKMLRIIFAMLKNHTPYQDQAVDYEALLVQRNAPRWIKMLLKHGFISPAST

SEQ ID NO: 217374 - protein, 332 aa, unidentified
MSKFKQIVGIDISKETFDCNVYNQSQTEAFINNREGFDSFRDKVLLKLRCKKEEVFIAFENTGMYSYNIAVYFEEQGYNYIMLPGLELKRTLGIVRGKSDKIDAKHIARYAYEKREVIKPGKLASATIMKIKKYLSLRDSLVKSRTGFKANFSESRKVYSRDEYGEYLEVLETQIKHFDAEILKVEQIIDELLKSDEELQKQYSLLTSIKGIGPQISLYLIAYTNGFTKFENARKFASYIGVAPFPHQSGTSIKGKMKVSQLALKKINALFEMGARSAIQYDIEMRLYYQRKVAEGKEKESVINAVKNKLTLRAFAVIKRGTPYVNIMRFAA

SEQ ID NO: 217375 - protein, 343 aa, unidentified
MSISMIGLDTAKSVFQIHGVNEAGKVELKRKVRRSDLITFFEKQERCTVVMEACGAAHHWARILTGLGHTVKLLAPEAVKPFVKKGKKNDAADAAAICEAAARPDVKFVPVKTVAQQGILALHTARALLVKQQTMLANAIRGLATEFGHVVPKGLHNLEPLVALVAADDAMPAQARQAIAELYKRFGELAKGIQSCEAEIVKHARNDAMARRLATIPGIGPITASLIAATVVDISLFKTARQFAAWLGLVPRQNSTGGKTRLGRITKAGNKEIRKLLVLGATSMLGHAEGWHSVLGGWLRNILQRRPVRLATVALANKMARIAWSVMTRNEVYRPAGGVAAKA

SEQ ID NO: 217376 - protein, 337 aa, unidentified
MTIMRIGLDTAKHVFQVHGVDEREELILRRQLRRSEVERFFAQLPPTRIGLEACGAAHHWARVLRALGHAVVLLPPQYIKPYLKRGKNDALDAEAICEAMSRPSMRFVPVKSAERQAALMLLSARDLLVKQRTMLINAMRGHAAEFGVVAAKGPVKLSELLQRVHAAEAGVPRLAREIMSIMSRQLDALAAELKGLEARLMAWHKADPVSQCLATQPGIGPIGAVSFALKVGDPQGFRSGRHFAAWLGITPKEGSTGGRCRPGRISRQGDEALRRLLVLGATARIRFAKAASASPWLLNLLARKPNKLAAVALANKMARTLWAMMVSGQTYRHPKEA

SEQ ID NO: 217377 - protein, 387 aa, unidentified
MIKNKGRVVGLDVHPDSFAGAVVEGTDPAQARVLSSSTRVELEQLEQWALRHTSTEDRLVLEASGNAFAVATRLRTIGRKVEILDSHRAGKVGKVYCANDRVDAVKIARIYLSALSPIVWQPDAKTLERREIFSAYQAVVKESTRAKQQLRSMLNEHCVRLEKGFRLCHPNAIRRLVALREWTAARTMLLQQLHGTLVAARARRTLLRRHMAQEIVAEEALLRLTRLCGINLITLYGVVAAVGDVRRFSHSKKLVAYLGLNPSVSQSGNFEGSGALKRHGRGALRALLIQSAKKLLEVNNPLQKWGLAVAARRGRNKAAVAVARKLCVALWHVLMGHTIGVLERLDTLETKLSKFATEMGPAALRAFGYHNKAEFVEKKLYVLRSYP

SEQ ID NO: 217378 - protein, 347 aa, unidentified
MSTSTDHSRTDLPSDPGSPGSRMYAGIDVSKAKLDLARSGSGSGSGSDAVETFANDAAGVGRVVEVLAALGPALSVVVVESTGGLERPLVEALLDAGLPVALVQPGRVRYFAKGLGILAKTDRIDALVLRRFGELAAPRLLERRSKNQAELRDLVACRRQLVQTRAQQYNRRSSTFSKAALRSIDAVVGALDRQVESLDRQIRRLLEADDDFKHLDGLLRGVPGVGPALSATIAAELRELGRVDRQRACALAGVAPFNDDSGAVKGKRSIRGGRTALRCVLYMAALSAMRSNPVIRAFAARLKAGGKAGKVVVTACMRKLLTLINAMLRDGLTWDQLDVVKKLATNG

SEQ ID NO: 217379 - protein, 401 aa, unidentified
MVSDFKKGRYNLMKIFVGIDIAKLNHFAAAISSDGEILLEPFKFTNDADGFQLLVSKLESFDKNSIIIGLESTAHYGDNLVRYLVAEFYQVCVLNPIKTCQMRKNNVRKTKTDKVDTFVIAKTLMMQDDLRFVSFYDLDMMDLKALGRFRQKTIKQRTRLKIQLTTYVDQVFPEIQYFFKSGLHQHAVYALLKEAPSPKEIASMHMTHLANLLKVNSHGHFTKELAKELRVLAQKSVGANDSAISIQITQTIQQIELLDSQLEKTEAEMTDIMKFNDSVIMTIPGIGYINGGMILGEIGDIHRFSNPNKLLAFAGLDPSVYQSGNFQAKTTRMSKRGSRVLRYALVNAAWNVVRNNATFKAYYDAKRAEGRSHYNALGHCAGKLVRVIWKMLTDEVEFNLE

SEQ ID NO: 217380 - protein, 419 aa, unidentified
MSVEQDPQTGRAPSPVTKVITVTAGVDWASEDHAVAIVDEQGRPVERFSVTHTASGLRRMTTRLLRAGVSQVAIERPDGPVVDALLEAELTVFVIDPKQVKNLRGRYGSAGNKDDRFDAHVLADVVRTDRARLRPLTRDSEQTITLRMAVRARQDLVHARVAMANQLRAHLQTTLPGAIGLFRDIDSAITLRFLARFPSQDKADWLSRTRLGNWLRSIGYNHLANLDRLWEHLHDAPRGTTGLQGAARAEITLALVAALTALKTQIKALEDQIADQLAEHPDAAIFTSLPKAGTVRAARLLAEIGDARGRFPTPEALACLAGATPSTKQSGKVKIVTFRWAVDKQLRGAVIDFAGDSHHANPWAADLYAKARARNHDHPHATRILARAWLHIIWRCWQDGVPYDPAKHHALQRLQHQKA

SEQ ID NO: 217381 - protein, 395 aa, unidentified
MRFVGIDVGAERHVVASVDAVGAVLLKPTGFSEDAAGYQHLRTVLGSATDTLVAMEATGHYWKNLFAVLVTQGFAVALLNPLRTRRFAAEELQRTKTDAIDALGIARFAAQKRPAASRLPDPTTEELRERLRYRDRLSQDFGNRERQLHRLLDLGFPEFPRHVHDVGSELATAILRDYPTAAAFQGVSVRRLGTLRYDGRHAVGAELAAALLAAAAASVGQHHGPAYQGQVRDACEDLDILRRRLRTLDRDIERVLERHEVGTLLTTIDGIGPQTAARLVATFGDFSGVRSGAALACYVGEIPGLRQSGKRTSVRARLTPIGAARLRAKLYMPVLSAVRYNPWLRAYYAALIARGKLPKVALIAAMRKLFHAVYSVATHRRPFVPHVGVPLEAQT

SEQ ID NO: 217382 - protein, 397 aa, unidentified
MTQAKTWVGLDVHVAKVVAAITDAESGELQTRRLSGRTAKVVELCSSLPAPVKVSYEAGPTGFGLARALEQAGVGCLIAAPGKIARPATDRVKTDRRDAELLVRLLMAGQLSAVRVPSVREEACRDLVRAREDVRGDLMRARHRVGKLLLRHDRRFDGNNWTQAHRQWLNDVELDDSVAQTVLLDSVGAVDALLVRREALERQMAALVPDSPWAQTIGRLRCLRGIDTLTALGLAAEIGDFERFDRPGRLMSFLGLVPSEHSSGERRRQGAITKSGSEHARRLLVEAAWHYRRRPARGRELARRQDCQPQHVCAISWQAQRRLHRTWQRLDAERGKRRTLVAVAVARELAGFCWAVATADRARSSTTLVEEAADTRPSAPAHPRFSYEQPPSGHARS

SEQ ID NO: 217383 - protein, 368 aa, unidentified
MDERIKFFVGLDAHKDSISVAACDASREPARFVGCLKPDISGLLKVLAKAGPPSQVSVVYEAGPTGFGLRRELRRRGYPCDIVAPSLIPKRPGERIKNDRRDCSRLAELSRSGELRPIWIPDEAHEAMRDLCRAREDAVGMRLKARQQLKAFLLRNGRIYPGKTSWTKSHLHWIAEQRFEHLGEIALGEYQLAVQSSEERVLRLTRALEEAIKGWRFEPAVAALRALRGIDTVSAAGLIAEIGDIDRFASPRQLMGYLGLVPSEHSSGNSVRRGSITKTGNGHARRLLTEAAWNYRFPPRMSTTLRARSSSLPEPVRNHAWKAQLRLSARYSQLSSRGPHANKICVAVARELAGFVWAIARQAQHTVQ

SEQ ID NO: 217384 - protein, 386 aa, unidentified
MKSNTQNAKIEAITEKTLVLGIDVGSETHYARAFDYRGIEYSKKPFKFSNTEAGFVTFKEWILDLKERHEKDKVVPGMEPTGHYWFNLGKFLQDNEMKPVLVNPHHVKKSKELDDNNPTKNDRKDPKVIAGLVREGRYMIPYLPDGVYADLRTASNIRFQLQAELTRIQNRISRWFNIYFPEYKTVYGKPDAKSGILILKAAPLPEDILTLGIDGVNQIWRDAKLRAVGKARAKTLIEAAVSARMEIRMLLEDYESRNTRLQEVMVLIEELVRKIPMAEKRLEIKGVGIRTVSGFLAEVGDISRFNNPKELQKLAGLALVENSSGKHKGETTISRRGRKRLRYLLFEVAMSLVAKNPEFRELHNYYTTRRLNPLKKCSHLWRLQPS

SEQ ID NO: 217385 - protein, 343 aa, unidentified
MHVNTIGVDLAKNVFQVHGVDSAGKVVITRQLRRKQVLEFFSKLSGCLVGMEACGTGHHWAREISKLGHTVRLMPPSYVKGYVKRSKNDAADAAAICEAVTRPSMRFVPIKSIDQQALLMLHRTRDLLIRQRTQLINALRAHLAEFGLVAETGREGLAQLGAIITDESNHEVLPSAMKQALQAIVDQLAALELQVGALDRAIHAHHRANDMSCRLETVPGIGVIGATAIASTVTDPSGFKSGRDFAAWIGLVPRQHSTGGKERLGGISKQGDRYLRRLLVIGATAVVRQARLHPQKHPWIMRLLAKKPAKLVAVAVANKMARIAWAIMAKGGNYRAPELAAAA

SEQ ID NO: 217386 - protein, 391 aa, unidentified
MVCVGIDVAKDKHDCCILDSDGMVRADCFTIPNNMDGFKQLLQTIRNCTKKSDKIKVGLEATGHYSYNILGFLLDNGLPTYVINPLHTNLYRKSLSLRKTKTDRVDARTIATMLLSDVDLKSYTDTAYHNEELKSLTRYRFDKVRERAKLKQSVSRLVTILFPELEKLVPSLHIASVYALLSEYPGAKQISEIHLTKLTNLLATASKGRYGKDKAIQIRDAARTSIGSVMPAKFLELKHTIKLIRELTSEIDEIEVSIQIIMDELNPPILSIPGVGIQSAAMILAEIGDFSNFESPDKILAYAGCSPSTYQSGKLTNCYAHMEKRGSRYLRYALYNATKYVCHWNPVFAEYLAKKRAEGKHYNVALSHATKKLVRLIYALQKSGKAYLVAA

SEQ ID NO: 217387 - protein, 355 aa, unidentified
MSQEKYIGMDVHQATVSAAVRDRNGNLLMECVLETKADTLLEFVQGLHGTLSLAFEEGTLAAWLHDLLKPHVNQVVVCDPRKAALLRNGNKNDRIDARNLSELLRTNQLKPVYHGEHGLRTLKELGRSYLTVSKEMTRTMNRIKSLYRSWAIPCAGTTVYAPRHRREWLAKMAEPGARVRAEHLYEQLDHLQPIRVRARRELLQESHKHDVVKRLRQIPSIGQIRAALLVALLQTPHRFRSKRQIWAYSGFAIETHDSGEYRYVRGKIQRNRERITVRGLNRNHNPDLKNIFKGAAISASSRPGPLQDFYETRVAMGMRPTMARLTLARKIAAITLTLWKKGANFDPQQLRRQAA

SEQ ID NO: 217388 - protein, 362 aa, unidentified
MKTQLKNQQIAILGIDLAKTTYQVHGIDQQGTTILKQKCTRRKLVELLSNLKPCTVVMESCAGSNYFSRKFQGFGHSTKLIAAQFVKPFVKSNKNDVADAQAIAEAASRPSMRFVATKQVWQQDLQSLHRNRQRLIKNRTALMNAIRGILYEYGVVIPVGRFALSRAVSAILSGQDEDNDLTYDSKELLQIQLSELLALEEKIAWHNSKLERIASESQSCAKIMAIKGIGVITATTVLSAVGDPKQFKNGRQFAAWLGLVPKHSGTGGKNHNLGISKRGDSYLRALMVHGARSVLWACMAKKKRGAELEPLEAWVYRIHEKRGWNKASVALANKSARIVWALLSSKGEYDAKKTSGPMTHAA

SEQ ID NO: 217389 - protein, 309 aa, unidentified
MTIASCFIGIDVSKGWLDCYIHPQARRYRLANDAKGHAALVELLERQGGFCVLEATGPYDRALRLHLHGAGQRFHRANPRKARQFARSAGFLAKTDRVDAMMLARYGAAMSLPDEEPCEPERQELRALMDRRDQLVEMRKSERIRLAEPHADWMKASLLQVIDMLDRQIAALQARMDALLASTHTLLQEEAILRSAPGIGPVTARVLLAHMPELGKRNRRAISALAGLAPIACDSGNLRGRRCIWGGRKRVRDALYMAALAACRSGPFQAIAKAMREKGKPAKLVLIAVARRLLVTLNAAIRDNKPVRT

SEQ ID NO: 217390 - protein, 323 aa, unidentified
MNKDIKYFGIDISHLVFDVTDSEGNYYQFKNNGSGFQKFSKLLDLDSHCVMEATGYYHYQLAYYLLESGIKVSVENPLAVKRFIQMKLSKIKTDKSDSRLICEYAQQVELKLWKGNSKDELECLQITRALAIYTKQSTMLKNKLHGEDVLGNPSKAVVRSLKRNLKQLNKEIETLENRLLILVKHTHQDLLTRLQTIPRIGRKTAIMLVVLTGGFERFTSASELCSYAGLTPVIRQSGSSVKGRARISKIGNQKLRNLLFMYSFNACKYNKACRDLYERIVAKGKSKKLALIAVCNKLLKQAFAIAKSGLIYDDTYRSTLVKN

SEQ ID NO: 217391 - protein, 367 aa, unidentified
MKKVSTAVTKQSRNISRQRLTIGLDLGDRNSWYCVLDEGGQIQLEQRVRTTANALREMFGAMARCRIALETGTHSPWISRLLSELGHEVIVANARKVRLIGESRKKDDRLDAQTLARLARIDPELLYPVKHRSAQGQADLMMIRARAGLVRARTGLVNTARGLAKSYGQRLRGCNVRNMNPEKAEGLSPELQRALEPLLAAIEELSARIVEYNDRIEMLAAESYPQVALLKQIKGVGTLIALTFLLTLEDPHRFRKSRDVGCYLGLQPGRRNSGQSEPQMHISKEGDPYLRTLLVQGAQHILGPFGIDCDLRRWGLKLAERGGRNAKKRAIVATARKLAVLLHHLWVSGEVYEPLHNSIRTTVAAAA

SEQ ID NO: 217392 - protein, 419 aa, unidentified
MSFKILKNNCCGLDVHKTWIFACIGITDSNNRTEYKQARFSSFTKGLQELCDWLAKYNCNDVCMESTGKYWIPVFNVLEKNNIWVTLSHPKYTKPQKGNKTDRKDAKWICDLYMCGMVKPSFIPPADIRELRDLVRYRFKLTCMITGEKNRVHNCLTVSNLKLDDVFSDIFGKSSRSITEQILQHPGETFDVTPFVDSRCKTPIEQIQAAVDGAVSAQQAVKLRQCLNHIDELEMHKAEIEREIFRLSDKYEDILTLIRTVPGFNKNPMTAIQVLSEIGGDMSVFPTAKNLASWAGCCPRNDQSNQKIKSTRISRAGSYFKPVLVQIANALVKSKKHPEFTTRYRRIKARRGHKKAIIAICRMILTAIWHILTDLKPYTPEGFLEPRPVNEAKTLTTSQALNMLKQRGYIIKDEAVPVA

SEQ ID NO: 217393 - protein, 421 aa, unidentified
MQQEAHEEFAAFIGLDWADSKHDVCLQAAGSAKRECFILTHTPEAIDAWVSTLRTRFNGHPIAVCLELNKGPIVSALRKYDFLVLFPINPLTLARYREAFTPSRAKDDPTDAALQLELLLTHRDKLQPLKPQSPAMRVLEQLVEHRRRVVNDRVRITNRLTSTLKNYFPHVLQWFQEKDTSVFCDFLSRWPTLKAAQLARRSTLETFFRDHHVRSADIIEKRLQAIKTATPLTSDEGVIAPNVLFVQALVSQLRVTLDAIETFDHAIAQRAQSHPDFPLFQALPGAGPVFAPRLLVAFGEQRARYASAAALQQYAGIAPVTERSGKKSWVHWRLQCPQFVRQTFVEWAAESIRHSFWAQIYYQQQRDKGKAHQAAVRALAFKWLRILYRCWQDRTPYDEATYLQALTRRGSSLLQNLAKGT

SEQ ID NO: 217394 - protein, 374 aa, unidentified
MENSITHVAMDTHKKQHKIALHYPCREEIVEFTINNTVRDIKKMVNKIKKHAPGKVEFCYEAGVCGFTLKRRIEQFDCRCSVIAPSLVPRKPGERVKTDRRDARKLLMMFQAGLLTEVNAPSEHQEAARELTRLRETAKDNLKRIRHQLLKFLTRHGYVYSNGNHWTQRHIAWLRTIEFTEPMLTNVFESYFNEMIYCIGRLEALDKEVELLAGSQEYKEIVGLLRCFHGIDTLTAITIITEIFEFGRFESPRHLMSYLGLTPSENSSGDKQKKGSITKTGNKRIRRLLNETSWHYRHRYVPSKVLKKRRKGQPQWAVEIADAAGRRLSKRHRHLVSKGKMTCKANIAVARELAGFIWFVVTQYHARKNTKDAA

SEQ ID NO: 217395 - protein, 308 aa, unidentified
MLGIGIDVSKAVLDVAVGGQEQVRRYANDAKGVRRLIKWLHTLTDVRIVIESTGGYEVAAADACVASGLWIARVNPRQARDFARAVGQLAKTDSLDARVLAEMAAALHARLRPHQVAPSWQAELQAWLRRRRQVLEALQRTRQQWDMALPSLRRLMAKTMTVLRKEMVAIDAHLTELTQAHSTPALRSAKGLGPVFQTTVLALLPELGRLSRREIAKLVGVAPLNNDSGKMLGKRRIYGGRADVRIALYMATLSAVRWEAVLREHYQQLRARGKAAKVAMVACMRKLLGILNARRREELRAEELSTLA

SEQ ID NO: 217396 - protein, 459 aa, unidentified
MNRKQRREAMRKIQSEEISLEVVHPNAAGIDIGNESHYVAIPPSRDSQPVQRFGCTTAELKAMATWLQQCGIRTVAMQSTGVYWIAVYDILEQAGLEVYLVNARDTKNLPGRKSDVQESQWLMKLHTYGLLRNSFRPAQQIRTMRTYWRQRNDLVQSTGRHIQRMQKALTQMNLQLANVLSDVSGVTGQAIIKAILGGERDPHKLAEFRDPRVKASEEQIAQSLEGNWQEDLLFVLKQEQDGYEFCRKQMAECDRQLAQYLQQREDRSQGAPLPEEKRKTRLKKKKGNAPQFDLREGLFRLIGTDLTRIDCIDVMTAMTVISEAGWDMSKWKTEDHFVSWLRLCPDNRISGDKIIGKGRLPTNNRVSIALKMAASSLRLNNTYLGAQFRRLRTRLGAPIAIKAMAAKLARLVYRMLRYGMKYVDRGAAFYEVQNRQLQIKRLKSKAAKLGLQIVQAPAA

SEQ ID NO: 217397 - protein, 429 aa, unidentified
MAYRIAGIDVHKKILAVVVCDIDVEGEYTFEPRKFSSSPEQLRYLATWLLEQEVEEVVMESTAQYWKPVWEALERYWKPISEGREGAKRKSGTLHLAQALSNRGRQGRKRDFPDAERLVKRLVAGELTLSFVPDAEQRLWRTVTRKKNQVRRDRIRLQNQLESFLEEAHIKLSSLVSDLFGFSSQRILGAIAQGETDPAQLAALADERLRATSEQLCDALGACTELNPVYRRLISMALEELRLIDEQISRLDRELAGLLKAHQGAVQRLAEVPGLGVDSAQQIIAEVGPIAAAFPSAKCLSSWVGVCPGSDETAGVNYCHRSPQGNRHMRRLLHQVANAGARTKGSIFEIVYRRLVPRLGHNQTIGAIAHRQCRLIWLILHEGVRYEERGSGLTKRSKQLRTWKMVRELRNLGYRIEPPSSELNQAPGH

SEQ ID NO: 217398 - protein, 341 aa, unidentified
MERLYYIGLDIHKKTISYCVKKVDGTVVQQGKIAAEREALLKWMEGLPGPWYGAMEATIFTGWIYDFLKPHAVDLKVAHPEMLKAITAAKKKNDRADAEKIADLLRVNLLPECYMLSEEIRELRRILRYRNMIVRTATKMKNKISGLLMETGTPYNKNKLHGKKYFGNLLERVEDVSDSVKDMLKLSRSSLEMFEAIQKKLVHTLRKDNLIRERVRRLMSIKGVGEVMALTWTLEIGDPSRFHSSRQAISYCGLCSAQRESAGKEQRGPISKKRNKYLQTMLIEAAKLAPHWNPQLAALHEKELTRGNRNRATISVARKLVEYMMAVERQQKDFVPSELAA

SEQ ID NO: 217399 - protein, 386 aa, unidentified
MKTVAGLDVHKDSVYLCILRENGEKIERVYGVLTPQLDSMRDFMAENKVSEVAMESTSVYWIPIWRVLVDSFELKLVNPYFIRQLPGRKSDVKDAQWIAECVMKELIRGSFIPSPLVQRLRLYDRRIFEINAELVRKYSKIDAILQRCNIRLSNYVSNTDCKSYKAVVKQISEGVTSPQELLRHVHKRIINKHGEDTILAALTGVVSDSEIDMLAQYVAESAILEDNKNKCIEKMREICNSEFKEQMKNLQEIPGVSERSALTVLAEIGPDVNAFPSAKHLVSWCGFNPRNDESNKKIKSNKITHGNRFIRIASVQCAWAASRTKDCYFSKFYAFHTQVRKKFKLKVVVAVARKILVCIWHILKFNVPYKDFEPQKSVTKDCTQFA

SEQ ID NO: 217400 - protein, 355 aa, unidentified
MNDLKYIGLDVHQTTTSIVVLDAAGRQLSSTVVQTHAQELLAFVQAQRGTLHVTFEEGTYAAWLYDLLAPQVARLVVCDPRHNALLQAGCKNDPIDAHKLAELLRLNALRPVYHGQQSLRSLKELSRSYLSLVQDSTRVMNRIKALYRSRGIACGGKEVYSPHHRASWVGRLPEAGVHLRAQLLYQELDTLRQLRRQAKRALLAESRKQAASRSLRSVPGLGTVRTALLLALVQTPFRFRSKRFFWAYLGLGLVTRVSAEFCLVNGQLQRSGKTPAIRGLNLNHQRQLKEIFKSAASTAVQRPGPWRQFYQQRVALGRKPALVRLTVARKLAALTLSLWKKGGRYDVERMKSAAA

SEQ ID NO: 217401 - protein, 353 aa, unidentified
MKVTTIGIDLAKNVIQVHGVDERGKVVLRRQLRRGQVMDFFAQRPGCLVGMEACGSAHAWARRLMKLGYTVKLMAPQFVKPYVKTNKNDAADAEAICEAVTRPNMRFVPVKSEEQQAVLSLHRARQGFVRQRTAQANQIRGLLAEFGIVIPQGIRHIARHLPEILEDAENTLPGAFRQLLRQLGEHLKTLDELVHAMEIQIQQWHGTNEASQRVSAVAGVGALTASAMVASVGDARNFSSGRQLAAWLGLVPRQHSSGGKSKLLGISKRGDVYLRTLLIHGARSVIAAAGRRKQSPVGQPSVQQRADRWLEALIARRNRNVAAVALANKNARVIWALLAHGDCYQAFYPLVAA

SEQ ID NO: 217402 - protein, 350 aa, unidentified
MIRTASMSAGQILGTVDGQQVVGLDIAKSVFQSHTVDMSTGEIINIQLKRAKLLEYFANKAPCLIGIEACGGAHHWARKFKAQGHSVRLIHARAVRPFVTGNKTDATDARAIWLAIQQPGTKFVGVKTLEQQATLVLHRQRELLQKMKVMQTNALRGLLYEFGATFAKGKNALFSEIEAALEALVTDLPQYVVDSLREQTQRIKKLLEDIKTIEQRLAQRLRADADMKRVFAITGVGLLTATAAIATMGEATAFKSGREFCAWLGLVPKQSGTGGKVKLLGISKRGDTYLRTLLIHGARSVLLHAKEPGPWLEQIKARRPTNVACGDRGAGRQVGAHDLGDRCKAAGIPA

SEQ ID NO: 217403 - protein, 461 aa, unidentified
MSVKKKAGQPHRAGRKRVDWKALEIVHPDAAGIDVGGSEHWVAISPDRDPEPVRRFGCFTADLREISRWLIEKGVRSVAMQSTGVYWMPGFEVLEQQGLEVYLVNAQHTKNVPGRKSDIQECQWLLKLHAFGLLNNSFQPTDEIRIARTLWRQRSNLVAEASSVIQRMQKVLTEMNVQLSNVLSDLSGLSGMKIIGAILEGERDPWKLATFVEPEVQATAEDIAKSLEGNWREELLFVLRQHVEFYRIYQQKITDCDLRLRKHLESLGSKVDLKTQPIGHRPKGKKKSKNAPGFDLRTELYRITGIDWTQINGIDVLTAQTVIAEAGADLSAFPTEKQFASWLGLSPTNEQSGPRILNRRTRKVVNRATVAFRNAALTLLRSQSYLGAQYRRLRTRLGAPKAITAMARKLACLFYKLIKHGQPYVDKGTEYYEAKYREQQIRSLAKRAQKLGLQLVIPKTA

SEQ ID NO: 217404 - protein, 392 aa, unidentified
MYIVGIDIGKNHHEASIVSPEGKQIGRSLRFATTHKGADSLMSFIFKNIGNSPCVFGMEATDHYWYPIYSFLKAKGYTIYVTNPIQSDSLRKMYIRQTKNDSIDSFLIAEVIRFGQFGTTSMADENILAMRQLCRYRDSVISSRTEIKLRIGTIMEQIFPEYEKQFSSLWVSTSMGILEKYLTPENIENAPIDELFEIIKDKSHNKLTMKKAFSIREAAADTFGIKIAQDAFSFQLKQLIDRMNFHDKQIEALDIEIMKYYEQFDCYLHTIPGIGIIGAATILAEIGDISRFKNSSALVAFAGIDPTVRQSGEFNSTHNHMSKRGSPYLRHAIFLAATTCSFHNSPLNAYYKKKRDQGKHHLTATGAVARKLTTVIYAVLRDSKPYEPKKFC

SEQ ID NO: 217405 - protein, 412 aa, unidentified
MPDPLLVGIDVHRQTNTVHLMDSQGQAVAKAFAVANNRPGSQALASKLSEVASAGGYDCLQVAAEATGFYWWHLFVALSQDPLLAQWPLSLYPFNARPIANFKKAYIDLDKSDAIDPFVIADRLRWGRDLPQPFQADATITALRCLTRHRFHLTQNLAREKAYCLAYLYLKASEYTQLKPFSDVFGAASRAVINDFASVEDIAAIPFAQLVAFIDDKGKSRFADPASNAQLLRQVAQDSYPLPEPMQVPVNLILRQCLQSISASEHQRQRLDAVIAEHMQAVPNSLQTIPGFGPVYAAGIIAEIGALERFHYDEAKVAKFAGLKWRQTQSGDFQADETRLTRSGNPYLRYYFTEAANSVRLYDANYAAYYQRKYDEVRTHQHKRAIVLTARKLVRLVVRLLTTNQSYQPRRQ

SEQ ID NO: 217406 - protein, 346 aa, unidentified
MMIIGCDFHPSWQQVSWLDTETGETGERKLVQSAGDAERFYGQVPAPALIGMEATGNCHWLVDLLADLGHELWVGDAAQIRASSVRQQKTDKRDAAHILKLLVEGRFPRIWMPSSEVRDLRQLLLHRYKLVILRARVKNELQHLCLNKGLQRKHKLWSKTGQQMLRELPLKPWASRRREDLLRLMAMLDQQIEPLDEAVKAEAQRDKMALLLQTQPGVGPITALAYVLTMGDGSRFPRGKQVASYLGLIPREHSSGGRQKLGAITKQGNRMLRMLLVEAAQTAVRLDPEFRKAYLHRCHQKPKGVAKVAAARKLAVRLYWMLRTQKPYPEVIRIESSPRVPLVGAS

SEQ ID NO: 217407 - protein, 455 aa, unidentified
MAKKGKKHTPAPENMPIIHPHAAGIDVGAEEHWVCVPADRDARPIQKFSAFTCDLHRLADWLTACQITTVVMESTGVYWIPLFQILEAHGFEVALVNARHAKNVPGRPKTDRFDCRWLQKLHTYGLLAPSFRPPEAICQLRSLLRHRDNLIQMTVKHIQHMQKSLDQMNLHLHHVISDITGVTGLRILRAIVAGERDPHTLAAYRDYRIKSSEDTIAKALEGDYRAEHVFTLTQSLALYDFTHTQIAACDQEIERVLGTFDSLVDPDEHPLPPPTTAHRQPQRNEPAFDLRAHLYRITGVDLTHVPGLQAMTIHTVLSEIGLDMSKWPTDKHFASWLGLCPDNKISGGKVLSTGSRPVQNRASRALRMAAQSLRTSPSYLGAFYRRMRSKLGPAKATTATAHKLAKILYHMVQEKTPYRERGAEYDIHKDHERKIRHLRKQAKHLGFDLVPQVSH

SEQ ID NO: 217408 - protein, 383 aa, unidentified
MTVVVSENNEANEAIDAIFVSIELSKNSWLVTSLSPHTGGKLSRHGVPGGDIAGLLDRFLQLKRKAHERTGRECRLVIIHEAGFDGFWVQRVLEAEGYESHVVDAASIATSRRRRRVKTDRLDGETLIRALLAFKRGEPRACSMVRIPSPAEEDRRRICRERKILLTERVRHSNRIKGFLFSQGIRGYSPFQRDRREQLETLRTGDGHPLPDHLKRQINRELDRLELLQQQIAQVEAERDEMLAREKQSSQEVAMLTNIVGVGPEFAGVLWSEGLCRHFDNRRQVAAYAGLAPTPWQSGSMDREQGIGKSGNRRLRYTMLEMSWLWLRHQPRTALSRWFNERIAQSGGRFKKVMITALARKLVVALWKYVTAGVVIEGVRLRA

SEQ ID NO: 217409 - protein, 345 aa, unidentified
MSEVEFVKQEPQFAAFIGIDWADKRHVWCLQAMGSEKRESGELEHSPEAVEAWVGQLYQRFGNRPIAVVLEQSRGALVFMLSKYEALHLFPVPSTMAASMRQALYPSGAKDDPRDADLLLDILVQHRDKLRRLVPDTEATRRVQNLVEERRKLVDEKTEQSNRLTSHLKIYFPQMLDWFEQLDTELVCTLLLRSPTLEQLQKVPPAQLWTFFRKHHCRDQERIERRILAIRQAIPAIGDRAVIEAKSTVVKVIVRLIRSLLEGIADLEEKIEEAAAAHPDFFIFDSLPGAGAVLAPRLLAAFGSQRERYGSAGEVQVYSGIAPVMEKSGKKKWVHCRIACPKFLR

SEQ ID NO: 217410 - protein, 376 aa, unidentified
MSKLRFVGLDVHADTIAVAVAEPDGEVRSLGVIPNRPESIRKLMGKLGRPATLRVCYEAGPTGYVLYWQLCEMGIACDVIAPNLVPVKATDRIKTDRRDAEKLARCHRAGDLTAVWVPDAAHEALRDLVRARLAAKRDQLRARNRLSKFLLRHGRRPPPGATPWRLRYFRWVQHVRFDLAAQQITLADYLHEVEHAAERITRLERAIDEAVAAAPARTRQVIDGLQSLRGVAKLSAVTIVAELGQVSRFASAPQLMGYAGVVSSERSSGERVRRGWITKCGNAHLRRIVVEAAWAYRFRPVISRTLAARQCTDNERVRAIAWKAQHRLHSRYCRLVARGKCRQQVVTAVGRELLGFIWAIGVELERGADRDIPQAA

SEQ ID NO: 217411 - protein, 371 aa, unidentified
MRFYSSQHQFYAGIDLHARSMHVCVLDAGGTVVYDRNLACHFPTLLEALAPYRGDLVIGAECMFGWYWLADRCAENHIPFVLGHALYMKLIHGGKPKNDRLDAAKIARLLKGGNFPLAYVYPQGMRETRDLLRRRMYLVHKRAELITHLEILNAQNNLPPFGKKLSYAGNRAELHIPERFAHPSVHMSATLDLDLIDKLDELIAEVELYLTRTAKVDDVQMYHRLRTIPGVGPILALVLLYEIHDLARFEEVGQFLSYARLVRCEHESAGKKLGWGAKKIGNAHLRWAFAEIACLFLRASERAKQWKQKQEQKHGSGKALGILAARLARSVFHMIRKQEAFDAKRFWSGQVSGEQPGPSRKKPAKSRKKAS

SEQ ID NO: 217412 - protein, 370 aa, unidentified
MAYDFVIGVDVGKYFHHACVLDPQGRQVLSTRINQHEGSLRKLFGQFLADDASVLVIVDQPNNIGRLTVAVAQDMGVDVRYLPGLAMRQLSRIHVGNCKTDVRDAYVIAHAGLNLPDSLRNLDRVEDVFIQLKVLNGIDEDLARAYTRLINQMRSALVGTYPAFEHVLRGQMIHRKWILHLLAKYGGPTKIRRIGKARLAAFARKHRARNPEPVIDAMLAAIHEQTVSIAGAEYAELGVTMSATDALAKLEHRKEIEAQVLELIQDIPQTEILLSMPGIGPRSAAQILMTVGDMSDFPDAAHLASYAGLSPRTNQSGTSIMSNSPNRAGNKKLKNALWQSSFASIRFHERSRQFYERKRKEGKRLNAAAT

SEQ ID NO: 217413 - protein, 413 aa, unidentified
MDILYPCCAGLDVHKDTVVVCVRRVDAKGKMRQQTRTFGAMTGQLLELADWLAQEGVTHAAMESTGVYWKPIWNVLEDQFHILLVNAQHIKQVPGRKTDVKDAEWIAQLLQHGLLRGSFVPAPPQRALRELTRQRRQLIQAKASVANRIQKVLEDANIKLGSVASDVLGVSGREMLRALIAGRDDPEALAELARRRLRAKIPELRLALHGRVTEHHRFLLRLLLEEVEQHEAWVARLTARIGEVLTSPLAEAVGRLATIPGIDERAAENILAEIGVDMSRFPGAGHLASWAGMCSGNRESAGKRRSGRTTKGGRWLRATLVRVAWAASHTKGTYLQAQYRRLAGRRGKKRALVALAHTILGIIYHVLKGGATYRELGADYFDRLDSERLTRALVRRLEGLGHKVTLQPQEPAA

SEQ ID NO: 217414 - protein, 358 aa, unidentified
MSSVPVFVGLDYHQDSIQVCILDGQGKCLANRRVPNDAVVVADLATRYGRPVRIAVEACCGAANFAQELSATYGLPIDLGHPGYVARLKGSPDKTDLTDAQLLADLVRVDYLPKVWLAPDFIRELRRLTRHRQQLVCRRRDIKLRIRGLLRENRLKCPFANAWTKPWLAWLRDQALLSENDRWLANEHLDELEMLNKRITAVEARIDAFTAGDPVIAHLLGMQGVGRVTAVTLRAEVGDFQRFHTGKQLARFCSVSPRNASSGHRQADAGLIKAGNPQLRAVLIELAHRLMHSRNRWSKKGYALLNRGKPKNVAVAAVANRWVRWLHHEMHRLAAAGLTSAPARQKGPAPSAVTIAST

SEQ ID NO: 217415 - protein, 386 aa, unidentified
MKRDDLSRSLVAFDQASTLVAVVALGLRSWLVAGLVPSLTRQPLKKLRSDPDALLGLLLRWRDQATKAGGRIKRMVVAFEAGRDGFWLARWLRARGIEAHVIHPTSIPVSREHRRAKTDRLDTGLLMRAVLGWLRGEPKHCSMAAIPTIAEEDSRRPNREREKLVGEQTRAINRIKSTLVRFGIRAFKIKLRQASKHLEELRGPEGEPLPPNTMAELRRDLARLQIIRAQITEIERARLERLKRVPRQGTNPMIRMLTKVMGIGIETADVLAHEVLTRKLRDQRAVARYGGLTGSPDESGIKRRERGLARAGNARVRRSMIQLAWRWLMYQKTSALAQWYQARTAGAKSGLRKAMIVALARKLLIDLWRYVTIGKVPPGAVLRPAT

SEQ ID NO: 217416 - protein, 379 aa, unidentified
MRRVCGLDVHKDSIYMCILYENGSKIESVFGVLTPELDKLRDLLVSHHVCEVALESTSIYWIPIWNILSVDFSLKLVNPYFIKQLPGRKSDVKDAEWIAIVLQKGLIRGSYVPDRMIQCLRQYERRNHELSKNIVHAEQRMDMILQRCNIRISNYVSCISCKGYQKVVNAIISGESNPKGLVTLIHKRTLNKHGRQVVEDSLNGFVSDTDRDILRQYRDERMQMEQHKSENKAKMQAICEAHYCEELELLQTLPGIKEESAANIIAEIGVDMKMFLTASAIVGWAGLKPRNDQSAGKIKSRKITHGNKYLRKILVEAAWSAARTKDSRFMKMYQRLLARGKSKQKALIAVARKLLVLIWNMLSKKEAFNPEYKRRIQAA

SEQ ID NO: 217417 - protein, 464 aa, unidentified
MQLRLGIDIACRAAHQVSLADEQGRFIWTGRRFRTTPQDLARLWSMLPEGTDPADIVVVMEPTRNAWVPLAAWFRRRGAEVVLVPPERSADLRRYYAKHTKSDRLDSQLLARLPILHPDGLHAEQGLGPGDALKRAAKLHSTLTHRRTQSLARLDALLEILGPAWHAAIGGDLANRTPLKFLAAGYADPHVVKRLGRTRLARFCYRHSRGAWGEPHADALLAAANQTLELWSGGELDYPDLAEDIALEARLALQLTEELKDLDERTALLLREADPTGILTSAPGVAAITAAAILGRLGDPNRFTSLAGARAFTGLVPILDASGVNGRHGGPTKRGDAVLRQALFMAAGQARRIDPTLAAKYHRLMTDAGKHHNSALCHIATTLLTRIIACWRAEQPYQLRDVDGTPVTIDQARAIIAERYAIPKDLRARRRTTDTARTDRRNKESPSAPSTGPSKPNATTPTAA

SEQ ID NO: 217418 - protein, 462 aa, unidentified
MSKKRTYGSADVEHVDVAALVAMLTVGCIVAVDVAKTKFVAAIAKATGEVLKIVRFSHPVQTLTFLKLVEAIRDAKLSPRVVMESTGTYGDALRYQCHLRGVAIEMILPKHTHDFAEVVDGVPSTHDAKAAVTLVQLTLIKPGRRWTPDDDGRRDLRALLDQRSLQTKELDVYHGHLEAYLARHWPELLSLIDVREQRSWMTLLKAYPGPHRVAEAGSEAAKLLHTASHGRFSKEHIKAIVDAAGTTFGVPMRQSEEAMLRFLVENMEEHTKGIDALDDELAQRVKEDDVASRLAAVVGPACAASIVSRLGSPTLFASAGALEKAMGLNLKVRSSGEKQGQLHITKRGPAQVRQLLYFAVLRMLQADPIVAAWCKARKSYDGESGKRKAIVAVMRKLVRALWHVAKGPRFDASKLFDVRRLDLTSASAESKVSPPTSVSQLAPTRAPSRSRRRAKDISQQVA

SEQ ID NO: 217419 - protein, 345 aa, unidentified
MTIVETRAVTGGVDTHAEVHVAAALDSIGGLLGVKEFAATAAGYADLLDWLGGFGTVALVGIEGTGSYGAGLARHLAKAGVRVVEVDRADRQDRHRAGKSDPLDAVSAARAALSGRAAGAPKGRDGAVEAIRALMVAKRSARHERTQAINQARSLIVTGPDELRARFARHTPAQLVSELAAMRPRPGEVPGYATRVALRELGRRARFLDAQIEHLDELIVPLVTARAPGLLGLYGVGPDTAALLLIAAGDHPGRLRSEAAWAHLCAAAPIPASSGKVTRWRLNRGGNREANHALWRIVITRMSSHPATRAYIDRRSKEGLSKKEIIRCLKRYVSREVYPYLRPAR

SEQ ID NO: 217420 - protein, 347 aa, unidentified
MQIIGCDFHPSYQQIAWLNTETGEMREATLEHEGGEAHRFYASLPGPVRVGMEAVGNAQWFERMLAELGHELWIGDAARIRAMAVRRQKTDRRDAVHLLELMTSGRFPRLWVPTPPVRDTRQLLLHRHKLVGMRRAIKNQLQHVALNQGLRRRHKLWSELGRQQLASLPLSGWTARRRDELLAWLNHLDGRIEVLDQAVVAEAERWPAVQLLMTHPGVGPVVGLAYVLTLGPWQRFPRGKQVASYLGLIPREHSSGGRQRLGAISKQGNPLLRSLLVEAAQTAARYDEELSRDYRRLAMRKHRALAKVMVARKLAVRLYWMLRENRPYTPPPEVRKQGRPNHSVVAV

SEQ ID NO: 217421 - protein, 342 aa, unidentified
MKTFVGLDVSQKKTSVCVIDHNGNKIRMANVDTHPGVIADYLFSEGFDKSKIGLETGPLCVWLYHSLKSFGLDIDCIHARHVHAALSMQLNKTDQNDAFGIARLVLSGWYKPVHVKSLECHQQRLILTSREKLVQLRVAVTNQIRGLLKTFGVVLPLGKNSVFEHAVLDSSPSLETIKPAVMMLLDTWEHLSGQIRKFNYMLEKLARNDPVCQILQSVPGVGVLTALSFKTSIDDPSRFRRVSDAGAFLGLTPKKYQSGEVDRNGGISKQGNRMTRTLIYEAASCLLTRYGKDTSLAIWANELRHRMSYKKVIVALARKLTTLMLSMWKSETFYNERLKAVN

SEQ ID NO: 217422 - protein, 355 aa, unidentified
MADVHYIGLDVHRDTISVAVLSREGKLVMQSVVPTLASALLDLLRGIRGTLHVTFEEGIHSAWLYDLLQRKVTRVLVCDPRKNKLLKSGNKGDLIDARKLAELLRNDALSPVYHGELSSLELQRRTRSYTMLTEDTTRIMARIKAVYRGQAIHYHGKSVYRPNRRESYLAQLPTEGLRQRAALLYQELDAVHPLRLRAKREMLAECRKHPAMKWLRSVPFLGKVRTAVLIGRVQTPHRFRTKRQFWSYCGLALETHDSAQYRVLDGQIERKPRFVQVRGLNWNHNHDLKDVFKGAALMASNHDGVLRQFYSGLLSKGMRPEMARLTLARKIAAITLRIWKEGGTFNAEQVKPQAA

SEQ ID NO: 217423 - protein, 403 aa, unidentified
MNAVGIDVSKGKSMVAIMRPFGEIVSKPFEIKHTTSDIQSLVKLINSIDGDSRIVMEHTGRYYEALAYQLATAGLFVSAINPKLIKDFDNDSLRKVKSDKADSVKIARYALDKWGELKQYSIVEEIRNQLKTMNRQFGFYMKHKTAMKNNLIGILDQTYPGVNTYFDSPAREDGSQKWVDFATTYWHVDCVRKMSLNAFTEHYQNWCKRKKYNFSKSKAEEIYGKAKELVPVLPKDDLTKLIIKQAIDQLNSASSTVEELRTLMDHTAAKLPEYPIVMAMKGVGPSLGPQLIAEIGDVSRFTHKGALTAFAGVDPGVNESGSYAQKSVPTSKRGSADLRKTLFQVMDVLIKTKPTDDAVYLFLDKKRAQGKPYYVYMTAGANKFLRIYYGRVKECLASLPESN

SEQ ID NO: 217424 - protein, 450 aa, unidentified
MSNGNGVSRGDRNRNARLDRLRALVPVTNAIVGIDLADKKQMVVVCDHDSKVLARRTYRCRTWDLGTALDWAHERAAAKGFAGMTVSCEPTGHRWRVLAQLAADRSMPFVCVQPAVSSWSRRAEDLTHDKTDEKDAVLIARLTAQLRCYEPEPVDETWGRLRHLGARREQLITESSGQVQQMRDLLECVWPAALECAQQPFRSRTWIAALTVIVDRDGGQFDRTRRLGLARFEQAVLREISKRGGQKPCRRIARSVFAALADPAGVIAHRAGALERVQLLLEDWRTAHHRLADTEQRMTGVLDELGLTGLVTSITGISAVGAAAILAQTGDPHRFATARALVKHAGLAPREKLSGTFTGRTKLTGQGRPGLRLAAWRAVWGAQRANPVYGARYRHLTTREHNRLKPTQAQTVIAAAILRHLHAVISTGQAWDPSIATHGTRSAIRTTAAA

SEQ ID NO: 217425 - protein, 363 aa, unidentified
MTNQTVHVIGGVDTHKRTHYAAVIDDNGRRQGHREFAANSAGYAALLAWMRSHGPIVAIGVESTGSFGATLTRFLLDAGEHVVEVNKPNRQARHLEGKSDRLDAEQITRSVLASTGVATPKAKSGPIEVIRTLRVARASAIRARTQAFNNLFGTMIGAPSSVRDELVELTKRTFVNRCLEQEPETEDLLELIDEPERLVVASVKLTLRNLAQRWKTLDAEVKALSRQIEAVVSHVAPELVELFGVSSELAGQFLVTVGDNTGRIRNEAAFAKLCGVSPKPASSGQKSGRHRLDRGGDRSANSALYIVAIVRLRHHQPTRDYVERRTAEGLSKREIIRCLKRYIAREVFAALPRSHPEVELQAA

SEQ ID NO: 217426 - protein, 426 aa, unidentified
MDILYPCCAGLDVHQATVMACVRWVTPGGKVRKRVREFKTVTGDLLALADWLRSHQVPLVAMESTGVYWKPIWNLLEGQFELWLCNARDVKQVPGRKTDAKDAEWLAQLLQHGLLRPSFVPDRPQRELRELTRQRAQFIGDRTAVINRIQKVLEDANVKLSTVATELLGASGRAMLEAIIAGESAPQALAALARGTLKKKYAQLVRALEGRITDHHRFLLRELYDHLVHQEQLIARFDERIAQQLATEALSPAAAAEEPLPFDAAVEYLRTVPGIDQRSAENILAEIGTDMSRFPSAQHLASWAGMCPGNHQSAGKRKSGRTTDGNRWLRRALTQAAWAATRKKDSYLAAQYRRLSSRRGKKRAIVAVGHTLLTAAYYILRDHTTYTDLGPDHFQQLHPERLKQYLVKRLQSLGFAVTLTTQPEAA

SEQ ID NO: 217427 - protein, 417 aa, unidentified
MNSPPETTVIDRYIGVDIHKHYVMVGGQNRSREWTLRPRQVQMPRFRDWAEKNFRKTDAVVVEATGSVWDIYDIIVPHVGKILVADARSIRQIAEARVKTDKRDIERMITQLLGGIVPEVWVPPVPVRELRSLISFRWRLTKQITMSKNRLQSVVQRFNLDLPEGGLLTEKNRSWWEEQEFSDLTGFEVERDLEIVETLEGQKEALDQKLAELSNSEPWASDIVFLMQIPGMGLILSMVVLSAIGDITRFSHPKELVSYAGLSPGVHISGETNRGKPITKEGRKELRWAMVEAAWRTKESDPYWKAQFKRLEKRMHRNQAIVAVARRMLVSIWHILTKRETYRHFDEEDIAYKMLIWAWAMDKRSRKGMTPQQFAKYGLLRLGVGQDLERIERGGAFRRIAPTEEILALKPELAPPR

SEQ ID NO: 217428 - protein, 384 aa, unidentified
MEALLYCCCGLDVHRDLIEACILRGADAEPEIIRQSFGTAKPELQRLMNWLSQNDCYTVAMESTGVYWKPIFQTLELGAEYMEQLWVVNANHMRNLPGRKSDVADAEWIATLLRHGLLEKSFVPSVPIRDLRECARLHRTFVQERSRYVNRLEKFLQTHGFKFSSVMKDILSASGRKLLDILQQTGSLTRADVEKNCRRLRRSTDEISAAVCGNLSVAERRLLGRLLHKLDSSQEDINGILEDMRLLCSPFQEQLAIVDSVPGFDQESSMEIIAEISAAPQEHFSSAEKLCSWAGVVPRNDESAGRVKSRKTLHGNAYVKSILCQAAWAAVSVRNSPFHAWYWSHQHKLGQKKAIIAVARKLLKLIYLLLSSGRLYQPPLPVKT

SEQ ID NO: 217429 - protein, 423 aa, unidentified
MIKLKYSICCGLDVHKNVIVATIVTTNKDGISEYKQKSFSTINSDIQRFHNWLIENTCYHVCMESTGKYWIPIFNYLENDIDVCLTHPKYVKAIKGKKTDKKDSKWIADLYKFDLVRCSFIPPKDFRQLRELSRYRFKLVCMKSSEKNRIQNCMTVSNVGIASVLSDPFGKTATEIISYLLEHTADSMDEKAVRKFIKKGAKSKSDEIIEAIKGYTIETDQAKKLELARGHLEYLDDMITQTEVELYVRIKPYYKFVEFVSTMPGMTELSSTIVLAETGVDMDIFDDTKHLCSWCGLSPANNESAGKKKSVRIAKAGDYLKPMMVQCALAAIKSKKQPYFAIKYGRIKKRRGHKKAIIAIARMMMVCIYHMVSEKKPFTPTDYEELMNPQNHVKRVVLNENNVFAYLESLGYDSSKLVKRNDN

SEQ ID NO: 217430 - protein, 407 aa, unidentified
MKHVIALDVSKGKSTVAIYNGYRQCEFEGELNHTRVDFERLHKKIEDIKLLDGQVPDIVFEATGVYSKPVEAFFKDYGYAYCRMNPLEANLQMAKMRRNKTDLSDAHELAKTHFKMERETTYIQDDYYEQMRAMTRYYDEIEEEIILLKSRMHAILHLSFPELEQLITPSSALFLNIVQLYPHPELLLVHSKTIIKNRLKTNTRKNLSLARAEAKAAVLLEAAQNSYPAIKVNDIRCDQVRDYAARIADLLEMKNSLVRQMVVLSEGRKEYLIYRSIPGIGDSTACRLIGEIGDIRRFKNAKQLNAYAGIDIMRYQSGTTQYRDRINKRGNKHLRKILYFMVCAMLMAKGKPNHFVDYYYKLKKQPQKKPHKVAIVACINKFLKVTFQLLKQNILYDYESAIQVQKS

SEQ ID NO: 217431 - protein, 369 aa, unidentified
MEKTTRFVGLDVHKASIAVAVADAFGDPEDHGQIANDPSAVRKLVDRLGGPDVHLAVAYEAGPTGYALQRQLTAMGVACLVVAPSLIPTRPGDRVKTDRRDAAKLARLLRSGDLTPVWVPDEAHEALRDLVRDRDDAKEDLLRAKHRLSKFLLRRGIHPPAGVRAWSRAHEAWLNRLAFDHRADQLVFDDYWSVVRDGKDRVRRLEAALVGCAAESPHGEYLAALQAMRGIGFISAVTIVAEAGDLRRFPTARAFMAYVGLVPSEYSSGGSRHRGRITKTGNRLIRHVLGQAAHNARYRPNVSSSLRARQRAVSPAVVELDRRAQARLHHRYRSLVGRIGRNKTVIAVARELAGFVWALGQLVARPVAA

SEQ ID NO: 217432 - protein, 377 aa, unidentified
MNKVIMIGCDLHDRSMLLRVAVDQGDAVTKRFANTSAGRGQLLAWLRERRDVEGAFRTVFAYEASGQGFGLYDELSVVGVECHVLSPSHLPQRPAARRRKTDERDADAILRELRGHVLAGNPLPDVWVPSRELRDDREVVRARLEAVEKQTKVQHQIKCLLKRSAAEIPSEVGSAWTNRLVRWLEQLRDRTRGDLSLGAVSVLGSLLRQREAILREVKHLERAVFALAEAPRYQESVRRLVELTGVAELTAMVFLTELGDLGRFANRRQIGAYLGLVPSTHESGEQNDRKGRITRQGPARIRKVLCQAVWTRVRHLPEEQARHGRIAHRSPKRRKAATVACMRRLAVLMWHRVQPHAEPSRAMQLASPAGDRPRRSG

SEQ ID NO: 217433 - protein, 412 aa, unidentified
MKDLLEISCGLDVHKEKIVACILTGPLGKPTRSEIREFTTLIPDMIALRDWIVSQNCHHVAMESTGIYWMPIYEILEDAFYGDITLLVVNARHMKNVPGKKTDMRDSEWISTLLRAGLLNGSFIPEKRIREFRDLNRYRKSVIRDITSQKNRIEKFLQSSGFRLSSFISDIFGASGRNIILHLIEHGQIDKTALDSCLKTKTRNRIDEILMSVNGTLSEHQKAFLRILMTHYDSLKKHLAEIETSLEKDMAPFALQVEQLNSIYGISTTASCAIIAEIGIDMKPFKTAEHICSWAGLCPGNNESAGKRKSASVTKGNPYIKSMLCEIAWVIAGKRNTYLSAWYWRIKQKKGAKKAIVALARKLLVIIYTMLKQGTLFDESCFETRRKNCEQKQLSRYIRELEKHGYHVEAQS

SEQ ID NO: 217434 - protein, 482 aa, unidentified
MKKRNIYLNQSQELLHLFEEAGSSKKVMCVPMDYAKHDHLVMFCNGHGDILRKPFSVKNTPEGIAYIDDQITRSCRRRGIKKDHVFFGGEDANSFAKNFVSTLRCKGFLVANVNAHDAKKQRGNLQASTDRIDLMGIAAMLLNYRANCSPAQSGTYRNLRTLVRHRRKLVQMLTEVKNRVHGIIDEIFPGFLSEKNSGIIPFRQSSLYLMEDRFSPKQIRRRRRQTLIEILKRFGTSKAEKTAAKLQQYAAKVLHAPGEYVDTMQLSLAQHIKHIRCLKESVSQMDKEIALNLAQTQGAFLTSVRGIGLVLAAGVTAEIGDLNEQKPLNNLASYSGIVPRVKQSGGTGGKTYTGPVAKRCNRILKDYVVKSAYHIGLHGPQDLMADYKRRDASGQHADFGMGRRYLRMAINLMRTSQVYLPPNLRKTGFTLEERAGYYLMSWPYLREKWKKVGVLDVVFANNRPLGLWRQIVQELYDIELKL

SEQ ID NO: 217435 - protein, 419 aa, unidentified
MERSRSKVCGIDVHKRFLVATILERNGQKKTGKFLNSLEQLLKLKEWVITEQCQVVAFESTGEYWISLYEVLQGYVEIIVANSYHIKGIPGKKTDTIDSEWIAELALNDLISPSRILSKEKRDTRALTRLREKLVNERTDHKNRVHKVLDSACIRLSAHFTDLFGKAGLTILKCILSGIPPDEIVRKLPKRLRTRSDAILDAIRTQLSVHQLIQLQTSVTMIELLTGKIKGLERTILNDLQKDRRKLQILMSVPGIGTIGATTLLAEIGDVNDFSTPDKLAKWVGITPRVYQSANKHHTGSITKQGSKHIRWILVEVAHSCIRTKNTALRDFFNRIFNRSGYKKAIVALARKILKLVWHLLINDELYQEKNSPLTKSARMPKHSQNDSFSVSAAIELLVKAGFQVIDGDDNTDKRVLGT

SEQ ID NO: 217436 - protein, 344 aa, unidentified
MDHFAGLDVSVNETSVCIVDDTGRIVREVKVASEPDALLPVLRNPAYRFKRIGLEAGPLSQWLFSALAEAELPAICVETRHMQAVLKAQINKTDRNDARGIAQMMRVGLYRPVHVKTLRSQKLRMLLTHRKLLQSKAIAIENDLRATLRNFGLKVGVVGKVRFEARIKGLVENLPDLAALVEPLLVVRRVLREQIVILHRRLLAIVRDDEVCRRLMTTPGVGPVVALTYRATVDVPARFRKSKAVGAVFGLTCAKYQSGEIDRSGRISRCGDEMMRVMLYEAAQSMLRSKKWSWLKAWAMQIAKRRGMKKAIVALARRLAVILHRIWVDGTEFRWTREQATAAA

SEQ ID NO: 217437 - protein, 350 aa, unidentified
MDKELYIGVDVSKQTLDLAYYDGESIDWKKAHIKVSNNNAGFKKIGSWVAKVSKGFDIVLFCMEYTGLYTQDFRLWLEEKHYIYRMVEPRKMHRFEPDLDDGLRSLDRIKTDELDSFRIAIYCEQNHRKILRNPSTLPPPVYFKLKRLLAERKQTVKQSVLYKQQLHDICAYDTDLSVERKNGQLKTLNDALKGIDNEIDMYIKEDADISKNFSLLTSIPGIGRVVALETIVLTENFMAIDNPRKYACYIGVAPFKKESGTSVRKGSSVSKKGFKQAKADLSIACLVCMQHIPNIRDYWERKRKEKCSGIVFNAIKFKMILRMFAVIKRGTPYVETDNYRNGKNKQPGVN

SEQ ID NO: 217438 - protein, 337 aa, unidentified
MVYGAIDLHMRDSQIRIIDAEGRELRGGRVRTSAARLVEAFDGYGPMRILVETGTESEWVAQALEAVGHELVVADPNFAPMYGEIRRKVKTDRRDVVALSEANRHGWYRATHRVSRPQRERRQWLCSRRHLVQMRTGTISLMRSLLRQAGYRLPTGSSARVPARLATLTLPAGLQDTLAPLRRMVETLTTEIADVDARLAGVAATDPIVQRLQSVPGVGSVVALTFRAFVDDIDRFAHAGQVSAAIGLVPREDSSAERRHRGHITKAGPRELRSLLVQAAWACWRSPASGTLRVWVERLAGRRGKRIAVVALARRLSRILFAVWRDQSVFDAATLAA

SEQ ID NO: 217439 - protein, 391 aa, unidentified
MIYIGIDVAKDKHDCFITNSDSEVLFKAFTIFNNLDGFNDLYQKIESVMDDVTKVKVGLEATGHYSYNLLGFLLDNGLPTFVINPLHTNLYRKSLSLRQTKTDKVDARTIASMLMSDVNLKSYSDTSYHNEELKSLTRYRFDKVKERAKLKTSVSRLVCILFPELEKLVPTLHMASVYALLSEFPSAKHVATAHLTRLTNLLSESSKGRYGKDTAITFRDSARASIGSNMPAKSLELKHTIKLIQELDSEIDEIENEIKIIMDEINSPILSIPGINYRMGAMIIAEIGDFNRFDSPDKILAYAGFSPSTYQSGQLDGAYAHMEKRGSRYLRYALYNATKYVCHWDPTFAAYLAKKRAEGKHYNVAISHAVKKLVRVIYHLEKTKQQYIKAA

SEQ ID NO: 217440 - protein, 353 aa, unidentified
MLAEMVDHVVGVDPDRDWITAAVVDSSTTGVVATARFAAKGLGYREAMAWADEYSTDTERAWAVEGTSSYGRGITAALANSGEWVIEFDRAKEKATKDGAKTDTLDAVRAARETLGRDKWASPRTHDGIREALRVHTVARDSAVHARTAAINELKAFVVTAPDHLRDQLRGLKRRSLVKRCAGFRHSDNQPIDEQCTRAAMRAVARRIIQLTDEIKTHEKTLRVLVEEAAPQLLGEFGIGPITAAALYVAWSHSGRCRNEAAYARLAGVAPIPANSGQTQDRHRLNRGGDRQLNTALHTVAVTRIRAHPPTQDYKQRRLAEGKTDREIRRCIKRYIARRVWRLLENPPLEEAA

SEQ ID NO: 217441 - protein, 350 aa, unidentified
MVTIGADLHKRSHTLVAVDEQGRKLGEVTAPATPAGHLVLLDWAEARFPERRWALEDCRHLSRRLERDLLVAGESVVRVPPKLMAGARRSGREPGKSDPIDALAVARAALREPDLPVARLDGPEREVRLLVDHRDDLVAERTRAQARLRWHLHELTPGEEPSPRSLDRRHVLDGLEARLAELEGTVARIAAELVSRIRELTAAIDGLEHEISRLVAGLAPSLLALPGCGPLTAAKLVGETAGIGRFRSAAAFARHDGTAPVPVWSADSGRHRLSRTGNRQLNLALHRIAVTQIRLGGRGRDYLAKRMAAGDSKTEAIRALRRRISDEVYRRMRQDEAYRATSQVPLAMAA

SEQ ID NO: 217442 - protein, 315 aa, unidentified
MVEISMICAGCDVSKTKLDIALYPGTAFLSVAYDAAGLKQLDAFLKKHRVARVGFEASGGYEWRLLAHLRRGPVAAARFQLGQIRHFAKSRLQWAKNDRLDAALIAAFTASIEELPPLPDARFDELNAEMTYLEQLEARIAVLKTMAETTILARLKRLHEHDIARLETRRKARIALIARQAAQDATLAHRLDLLVSIKGIGLRTALSLAIRLPELGSIGRGQIAALIGVAPYDDDSGGRRGRRHIRAGRTRLRKSLFMSAFTASQHNPDLRAHYQRMRAAGKHHLLAIVAVTRKLAILANAVIARGTPWTPVHTR

SEQ ID NO: 217443 - protein, 347 aa, unidentified
MNFYTTQHKHYCGVDLHARTMYVCILSQEGVVLLHRNLPCDAEKFLLAIHPFREDLVVAVECIYSWYWLADLCAKEGITFVLGHALYMRAIHGVKAKNDRIDSHKTAVLLRGGLMPRAYVYPAEMRATRDLMRRRLHFVRQRSSLLAHIQMTHHQYNLDSPGPRISYRSNRNGLGEGFADASVRDSIAADLALIDHYEVVIGELELAVLRQARIHDPNAFRLLTTLPGIGRVLGLTILYEIHDIGRFPSVQDLASYCRLVKCEKSSAGKKLGTSGAKIGNAYLKWAFSEAAVLFVAKCAQGRVLLNRLERKYGKPKALSILAHKLGRAVYFMLARNQAFDLERFTKS

SEQ ID NO: 217444 - protein, 358 aa, unidentified
MQSNKKSFKGQKIFIGIDVHAKTWAVETITESGFTKRHSQEASAKVLFDFLSRNFPDGEYHAVYESGFCGFSTYYQLKEYGINCVIVHAADVPTTQYEQIMKTDKIDSGKLARALRNGTIKPIYIRERENLDDRAGMRIRKTIQKQLSGYKARVKHLLHNNGVKLPARFDKPGTHWSRAFMNWLKDEVVLLSSTRHSLDLLIKQVESMRKNLLEATRYIRKLATSDKYKVNYELLLSIPGIGFNVAMCLLTEIYDFKRFSNENSFAHYLGLIPTCHDTGDKHSTGGMTFRGNKVIGPMIIEACWVAIYKDYGLSLAYCSYRQRMKPQLAIVKVARKMSNIIFSVIKNGKKYEPYKWEI

SEQ ID NO: 217445 - protein, 344 aa, unidentified
MPHYVGLDVSQKTTAICVVDEQGRRLWRGACVTDPGAISARVLRHAGVVDVKVGVETGSMTPWLVHGLRRAGLDVECLDARRVKAALQMRLNKTDENDAEGLAQVLRTGWYRPVHVKSFDAHRARALLGARAQLVGMTTRLSNMIRGVLKTFGLLPGAGRGLRFDRRVEALLEGAPEIGLIVRPLLATWRQLREQIAVFDKAVQQRVRADPICRLLMTVPGIGALSSLVYVSTVEDPGRFSRSRAVGAHLGLTPRRYQSGETDRSGHISRCGDGLARTLMYEAAVVILHRIKRSLHLKDWAAAIEQRSGPGKARVALARKLSVILHSVWRSGEPFRWTPHTIAA

SEQ ID NO: 217446 - protein, 320 aa, unidentified
MRTSQKTPDTIATIGIDIGKNVLHLVGLDKGGAIVLRQKLSRGQLARRQANIPRCLIGMEACSGAHHIGRELVALGHAVRLIPAQYVKPFLKGHKNDYRDAEAIAEAVQRPTMHFVTIKTPDQMDLLALHRVRSRLVSQRTGVINQIRGFLIERGITVRQGPMPLRKALADILSCGAVSPRIVCLISDLAEDWRRLDDRIATVSAEIEALAGQDESCRRLMSVPGVGPIISSAVVAAIGNGAGFKQGRDFGAWLGLVPKQESTGDRTILGKISKRGNKYLRTLFVQAAHVVLARRPSAAMQRLWPWIEQVHVRWNVGFRG

SEQ ID NO: 217447 - protein, 412 aa, unidentified
MDRLVERCAGLDVHKDSVAATVRIPGPGGQRLQETCTFSTTTRGLLTLADWLGSYGVTLVGMESTGCYWKPVYYVLEERFECWLLNAQHLRNVPGRKTDVADSAWICQLVEHGLVRASFVPPKPIRELRDLTRYRKAQIEERSREVQRLDKVLQDAGIKLSSVASRTLGVSVRLMLEALVAGTHDPELLAELARGRLRRKLPELREALTGRFRSDHHGLLVAQILAHIDYLDETIATLSARIEEVIAPFSRERELLETIPGVARLGAEVLIAEIGVDMSVFPTSAHLASWAGQCPGNHESAGKRRSGKPRKGSKWLEKTLTESAKAAARTKGTYLAAQHARLRGRRGPGKATGATRHSILIAAYHILERRLPYQELGADYFDQRRSLQQRTKRLVRQLEQLGHTVTLQPLAA

SEQ ID NO: 217448 - protein, 345 aa, unidentified
MNVTAVGIDLAKNVFQVHAVDARGKVVLRKQLRRAQVAGFFSNMPPCLIGMEACASAHHWGRTFERFGHTVRLMASQFVKPYVKTNKNDVADAEAICEAVGRHSMRFVPIKSVEQQAILSVHRVRQGFVKARTAQANQIRGLLGEFGLVIPQGIYNVAKRVPELLEDASNELPVPFRHLIERLTQHLKELDRQVKEFEKEIIEWHRSSELSRKLEAIPGIGPLAASALVASIADAHSFDNGRQVSAWLGLVPRQSSSGGKPTLLGMSKRGDAYLRTLLIHGARSAILAAKNKVDNTQGWLTNLLKRRHPNVAAVALANKNVRTVWALLAHGRKFQADYMPTRMAA

SEQ ID NO: 217449 - protein, 408 aa, unidentified
MEAVHERCCGLDVHKDLIVACLLTPGVGGRPKREIMQCKAFTRDLLALADRLAEAGCTHVAMEATGSYWKPVFNLFEDRFTLVVANARHLKAVPGRKRDVKDAEWIADLLRHGLLRPSFIPPRPQRELRELIRYRTTLTAERAAEINRIQKVLEGANIKLGSVASDVLGVSGRAMLEAMIREVTDPVALASLARGQLRKKEDQLQAALQGLVGDHQRFMLAEQLDHIDDLDRRIERLSSEVERRLGVDNADRDRLDGIPGVGKATAEALLAEIGPTLETFATADQLCSWAGVIPGMHESAGKNASGRAPRGNRALRAVVVQAAHAVGKTKSYPGARYRRLAARIGKPKAALAVGHQLLRIAFHLLKEQTTYQELGVDYRDDRSRERLTQRYTRGLQQLGYNVDLKPVT

SEQ ID NO: 217450 - protein, 343 aa, unidentified
MQAITTIGLDLAKSVFQVHGVDAAGNVVVRRRLKRRYVLPFFQKLPPCLIGMEACASSHHWSRELGALGHTVRLMPPAYVKPYVKRHKNDVADAEAICEAVTRANMRFVPTKTPEQQSCLVLHRTRHLFIRQQTAVINAIRAHLTEFGIVAPVGRRGVEQLLDVVADSNDRRLPEVARACVAALGAQLRMLKARILEFDRLIMAWHRANQTSKRLDEIPGVGPALATALVASVADPKAFRSGRDFSAWIGLVPKQHSSGGKEKLGHISKRGDRYLRSLFAAGALAVIRYAKIHGTKHRPWLTALLARRPTRVAALALANKIARMAWAMMAKGERYKEPVALAA

SEQ ID NO: 217451 - protein, 392 aa, unidentified
MSQQHCHFDASRSLTALEQDSTIIAVIEMSQSKWLVAALVPGVERQPLKKLDAQEEELLKLLHRWRNEAGQAGREIKRIVVAYEAGRDGFWLARWLQARDVEVYVIHPTSIAVSREHRRPKTDRLDTELLTRAFLGWLRGEKRHCSMVAIPSIEEEDARRPNRERQNLVTEQTRIVNQMKAIFARLGIRTFRPTLRKAEEKLKGLRTAERTPLPENTRAELRRHLARLHVVREQIRAVEQERLRKLAAAPAAENGSHAMVRLIARVLGIGVETADMLVNEVLSRHWRDRKAVARYAGLTGSPDESGRRRRERGLARAGNARVRCGMIQFAWRYLRFQKDSALAQWFAARTADRRGSTRKTMIVALARKLLIALWRLATTGEASDGIVLRPAS

SEQ ID NO: 217452 - protein, 343 aa, unidentified
MQITTIGLDLAKNVFQVHGVDTTGQVVVRRSLRRSQMLPFFANLPPCLVGIEACGTSHHWARELIKLGHEVRLMPPAYVKPYVKRGKTDAADAEAICEAVTRPTMRFVPVKSLEQQAALSIHRARDLLVKQRTQLINMIRGLLAEFGVDIPKGLERALLMARQIVDGKAPEVPIEAAKIVATLSRQALDTHVRLREIDRDLLVSLRGNDVARRLMTIPGIGPVGATALAASVTDPHQFRSGRQFAAWLGLTPLQKSSGGKERLGRITKMGDKYLRKLLVVGMTALVRRARQNPESDPRLADLLARKPTRVATVAMANKTARVIWAIMTRGETYRAGHRPALAA

SEQ ID NO: 217453 - protein, 422 aa, unidentified
MLGVGIDFAEEFHVVALGRPGDGVFAVTRVDHCPTALEALVARINALEPNPAAVRVVLETSHGALVERLLDAGYVVVPVNPDLVARRRGPARKKDDATDARIACLLALDCHEPLRPLIPHGELAAELRAIARDDERAARDERRLLNRLRADLVATFPAALTIVGDDLGAPTMLRLLERWPTAAELGGASRDELVTFARSVHYGWPERLTGRIAEALAREEFVARDYLVRAKAATIRLAANQLLLLEAQRRAWERRMGELLLGARQTGRRREPRADIQTQQFPGGEIYLSFPGLGDRLAARVAGEIGDHPEMFTSPNGLQCYAGKAPVTRRSGKSELVVSTRLACNGHLRDAVQQWAFCSLRRSGWAREFYDGQVGKGKHHNAALRALGNRWLEILWYCLIRRVHYDEATHVANRNRALQQAA

SEQ ID NO: 217454 - protein, 332 aa, unidentified
MKYNTFIGVDVSKLTIDAHLHLINVSKTFSNNEKGFASLLAWVKKHGKVSDLTKAIIAFEHTGMYSIKLAMYLNEVNVSFAMLPALQIKQSIGIRRGKSDQVDAQRIAEYAWLHRETLQATILPAKGILRLQSLLTLRDRLVRDRGGFEATWKEQNKALDEKEYKGMFQIYKSLIQNLTLQIKKLESQIKAVIDSDEKIKVNYQLLTSIKCVGPVLAANMIACTHNFTRFTNWRKFACYVGTAPFEHQSGTSIKGKTRVSSLSNRQIKKLIHLVAICACAYNPELKGYYKRRVSEGKNKMSTLNVIRNKLIARMFAVVNRGTAYVDLMKYAA

SEQ ID NO: 217455 - protein, 381 aa, unidentified
MTTLATRNTQEHTTEGTLFVAFELSEKTWKLGFSTGHGQKPRERTVTARQQEGVLEEIAQAKRRLGLAETAPVVSCYEAGREGFWLHRLLQAHGVTSHVVDSSAIEVNRRQRRAKSDGLDVRKLLSMLMRYHAGERQVWQVVTVPSVEAEDQRHLHRDLETLKQERASTTTRIKGLLSSQGIRVTSLSTLPEQLDALRLWDGSPMPPGLRRRVLRVYAQHTFLSEQIAEVEAERRSQLQASTDASIDQVRQLMQLKGMGINGAWLLVMEFFGWRAFKNRREVGGLAGFTPTPYQSGESAREQGITKSGNRHVRWMTMELAWSWLRFQPASALSVWFRARFGSGGARLRRIGIVAVARKLLIALWRFLKTGVIPEGAELKKA

SEQ ID NO: 217456 - protein, 355 aa, unidentified
MASITLLGIDLAKTIFQLHGLDELGRPQLKRTLRRRALVQFVAKLPACTIAMEACSSSHHFSRKFQQFGHEVKIISPQFVRPFVQGNKNDAADAEAICEAASRRNMRFVATKSVVQQDIQCLHRVRKRLVHNRTALTNEIRSIVGEFGIVFAKKRSALVEGIKGLLNGSCPREELSSEGLTLLQDLYSELLELDQRIENCELKLKKISSQPQCQRLFKVGGLGLLSVTALAVALADPGQFKNGRNFAAWLGLAPRHQGTGGKNRILGISKRGDMDLRTLLIHGARAKLRGINAKCRAERKLDPLEDWAYRLCQRQGYNKATVALANKNARIAWSISAHKTEFESHKAVVSLKEGA

SEQ ID NO: 217457 - protein, 351 aa, unidentified
MYYAGLDLHRKYFTLCVLTSEGQVVCDRRRLPAELEPLTSILREVGSPVTVTVEATLQWAWLHDRLTAAGFPVQVAHPHQVKLISHARCKTDPIDARKLAELTRVNLLPSIWVPSPEVRSWRQLIRGRAALVRWRTRAKNRIHGCLAAENLRVATTDLFGRAGREWLAHAPVSPSARRDIEVQLAVITALETQITGYDTDVKRIAKHPDAQRLQTIPGIGVFGAALLLAEIGTIQRFHSAHELAAYAGLVPSTRSSGDKTSHGGVSGASNHWLKWILIEAVQTLKQVPGPVRFHYERLLRAKGKPKATVAAARKLCTYIYWMWTQELSYAAWLETETKRVGCPMHTLASSA

SEQ ID NO: 217458 - protein, 358 aa, unidentified
MTDHDTIREVFVGVDTHKHTHHAAVCDRLGRPLADREFPTNTAGYAALAAWARSFGQVNAFGVEGTGSYGAGLTRALSAAGLVVVEVNRPDRAARRAKGKSDSLDAYAAARTAAAGTATGTPKTGDGIVEAIRCLHVAYRSAVKARTQCINQIHALLVTAPANLRQQMSHLSTLTMVTTLSRLRPGTDLTGPATATRYALRSLARRYLALRTEINDLNHALSDLTTQAAPDLLARPGVGTHVAAQLLVTAGDNPERLHSEASFAHLTGTAPIPASSGQRHRHRLNRGGDRSANHALHVIALSRMRHDTRTQAYVQRRTTEGLTKKDIIRCLKRAIAREMYHLLRPHPQHQDTPTKTAA

SEQ ID NO: 217459 - protein, 434 aa, unidentified
MGELKKILENTAGIDIGSEKVFVALEGKAVRNFRTFTSSYKELCMYLNEHGIVHVAMEATGIYWCTLYDILEQAGFDVCLVNPSDTKNFPGRKTDVQDCQWIQTLYSYGLLKKSFVPEDIVRKLRVYTRMREDKIQMGASHIHHMQKALIQMNIRLPEVLSQTHGASGIKMIKAILEGERNPHTLLNCCTSDLKKRKGNDILLALEGNFKTEYLFELQQAYDGYMFYLNQVKRCDQETEKILEEFYSKSDNNFTDNNKPKPVRHHKPDIKNLHNLLLGIHGANSTTLPGLTDYSLLRLTAELGNNIQQWPNVKSFVSWLGLAPGKNQSGKMNKRSKKRAITRGGQIFKQAAQSLMISSKIGLGIFARKLKARRGAGIAIKATARKIAELYYNLNKNGLEYVESGIAFYEQKQKEQQLKYLTKKALELNLQLVSY

SEQ ID NO: 217460 - protein, 421 aa, unidentified
MNRDRPIVGIDVAKESSYYCILTSTGEVFLKPFEAKNDLQGLNYVLERLQKTEETFGIKPAIVLESTGHYSSRLVHTFTSHMYEVFLVNPIQSHCIKTAAIRKVKTDKVDCEDLARLYMLKDLTPVHIPSSDLADLKVLCRTLHELIKQKARTVSKLAASLEPIWPGFHLTFSNLSSKGALAILSNYPSPTSFLKADQEALIQSIAIVSRRNRCFAEKKYQILRKTAEEALLIGVPVRAYAVTVETWVVCLKQIIDLIDDLNTSIRSLSSNISDVALLQTIPGIGESLAPIIAGEIGGINRFHHAKQLVAYAGVDPSVRQSGKFVGTKNKLTKRGSPYLRWAIFIAATVSVRKDSRGFLNPVIGEYYENKIKTKARKQALGAIMNKLLRIIFSVLKSRKPFQLRTSLNLVVKDQNRQLTVA

SEQ ID NO: 217461 - protein, 339 aa, unidentified
MQLYAGLDLHSRNTYIGIMDKEFRRVFGKRVLNKLPLILKTLEPFQDQLKGIVVESTYNWYWLIDGLMDAGYQCVHLANPSAMKQYEGIKHTDDQHDAFFLAQMLILGILPQGYIYPKEDRPVRDLARKRLFLVRHKTSHILSLQSLIARCCGQRVSANDIRKFTVEDLQQLLKEEHIVLSAQANLDTIVFLKQQIQRLEKTIQNKVKLNKAFQQLMTVPGIGLILAMTIMLEVGDIGRFAQVGNFASYSRCVSSQRLSDGKSKGHGNRKNGNRYLSWAFTEAAHLSRRYNEHFRSYYNRKVAQANTSLATKALSNKLARICYYIMRDQVPFRQELLSH

SEQ ID NO: 217462 - protein, 337 aa, unidentified
MEYFAGLDVSMEETHLCVVDREGVVTAEARVSSAPETIIAALAKAPSCRCVVLETGRMAPMLYHGLNESFVPVICIESRQAHQALKSMTTHKTDRNDARGLAHLARTGFFKPVHVKSMPAHAVRSLIIARKKLVGQRVTMDNQIRGLAVVFGIRLPHALTVAFLEQAPQMSDGIDGLSAAMRGLVAAREAVLKAVLAIDGDIKRLVRASDACRRLMTIPGVGQLTALAFVAAIDDPDRFKRSRDIGAYLGLVPRRYQSGEVDDTGSISKCGDRRVRTLLYEAANVMLTRYKGALRLKDWALAIAKRANKRKARIALARRLAIIMHAMLRDGTDFTSA

SEQ ID NO: 217463 - protein, 357 aa, unidentified
MSHKLNSAIAVIGIDIGKNSFHVVGHDKRGAIVLRQKWSRGQVETRLANLRPCLIGMEACVGAHHLRRKLQMLGHDARLMPAKYVRPYSKGQKNDFRDAEAIAEAVQRPTMKFVATKTAEQLDLQALHRVRERLVSQRTAIINQIRAFLLERGIAVRQGLRFLRAELPGILAKCSDVLSPRMLRVIEDLAGDWRRLDERIEGLSGEIEGLAQQDQACLRLMTVPGIGPIISSAMVAAIGTGDVFCKGRDFGAWLGLVPKQISTGDRTILGSISKRGNRYLRALFVQAAWVVLFKLGPKHWERYGLKSWIEAAKKRLHHNVLAVALANKLARIAWAVLNKGRAFACVKTTDATASQPA

SEQ ID NO: 217464 - protein, 399 aa, unidentified
MIYGLDVHKEFIQVCALGARDSKRKEYRIAGTEEAIEEWARTLGPRDQVVLEATFHSWAIHDIVARSAGRVVVANPMEVKAIAHARIKTDKVDAYTLARLLQADFLPEVVLPDASTWALRQLVSHRRLLVKQRIAIKNTIRSTLNRRLIPQPEGDPFSRKARRWMRSLELPPTERFLLHNSLDLLEAIDERIAAADAELLAAARVEEQARLLMTIPGVGVHVALGLLAAIGDIHRFPSPEKLSAYLGLVPRVSQSAGRCHHGRITKAGSTHVRSLVVEAAQSLARSPSPLATTYWRVRRKRGHNVAVTALARKLVVVAWHLLQKGEPYRYAPAPRTRQKLRELIPRDQRRRADPSPETLEQVYREAGLPELSPPSQAERRAAAVNRRARTRMTNSSPRA

SEQ ID NO: 217465 - protein, 349 aa, unidentified
MIRNKPRGATVYGVDLGKNIFHVVGADPAGNIIQRVKFRRDTLLAFFERAEPALVGMEACPGSQWLARKLQAMGHSVRIIPAQFVKPYVKSNKNDTIDAAAIAEAVVRPTMRFVQIKRPDQVDLQGLHRIRDQLVGSRTRLICQMRAFCLEYGVSIRQGAGIFKVDLPRMIADESNDLTPTMRRLLAELFDDLGRLEKRIAEVTREIEGLAARNEAARRLMTIPGIGPLAATALLAAAGNGQQFRKARDMAAWLGLVPQQYSTGGRTQMLGISKRGNRYVRRLLIHGARSCVIHLDRTRDRLGTWIAKLQSRMHVNKVTVALAAKITRIAWVVINRPGAVYERRDPAIA

SEQ ID NO: 217466 - protein, 355 aa, unidentified
MNDAKYIGLDVHQATISVAILDSAGKLVMEAILETKTATILQFIHGLRGSLHVTWEEGTWAAWLHDLLKPHVTEVLVCDPRKNNLGKVGNKNDRNDARELAELLWRGKLQPVYHGEHGVRTLKELARSYLTLTRDLTRVMSRLKAIYRSWAIPCAGQQVYAPRHRTEWLAKVSEPGVCRRAEFYYHQLDALAALRQEARRELLHESRKHFAVQLLRQIPSIGPIRAALLVALIQTPHRFRTKRQFWAYIGLALKTYGSGEYRFVGSQLQRSKKFLAIRGLNRNHNHDLKNIFKGAATWAAATPGPFQKFYEACLARGVKPSMARLTLARKIASITLLVWKKGVRFDAEHLKPQAA

SEQ ID NO: 217467 - protein, 356 aa, unidentified
MLYLGIDQHARQNTISLRAENGDVLQARQVSTQPEKINDFFEQLTRERLRNGESFVAVLEVCGFNDWLIRMLQDYRCHKVILIQPDDRKKRKTDRRDAAALSELLWVNRDRLLQGKPVRGLRQVDIASTTDQQNRRLTTLRKDAGGDLTRVINKIKQILRRHNLQWEMPTKTFPTMAAIAWLKQLVLPEIDHLEMNHLLVALEQVEQRKKELEKVIAQRYDTSKEAAILSSMPGMGGGFTAMSLACRVGRVERFPRAHSLANYWGLTPGCRNSGENNQRLGSITKAGSTTARWLLAQLVYKVLRKDARLREWFKRIKRRRGSTIARVAVMRKLATIIWHMLSKRKTYAECRELAAA

SEQ ID NO: 217468 - protein, 395 aa, unidentified
MFIVGIDVAKRSHEVCMITSDGQTVQRPFSIRNNCTGYNLMLEKIRKHTNIKSQIVFAMESTAHYWLALFTRLRKDGYHVILLNPIQTSAMRDMFIRKIKTDAKDSFIIAELIRFGRYAESNVAQDRLLALKELCRNRFYLVDMAGDLKRKLIALIDRVFPEYEAQFDTIFCKSSVALLKKYPTPQKLSNAHLDKLTELLWNSSNGHFGEWKARELKELARNSFGVEDCDGAYSTLILLMLDQIQSLSGKADALEKEISRLFQSFDTTVTTIPGVGPIIGAVILSEVGDISRFSSADKLAAYIGVDPSVNQSGEFQAVHAHMSKRGSPYLRRCIWMASQVAVQRDPMFRAYYEKKAAEGLKYMTIIGHVTRKMTAVIFAILRDHKVYEPVLPTAA

SEQ ID NO: 217469 - protein, 366 aa, unidentified
METQPTSAAPVDPAVQVTIGVDTHRDLHVAVALDQQGRWLGTRSFPTTPAGCAALTTWATKYGALGPVGIEGTGSYGAGLARWLRAHGRAVVEIDRPDRRDRQGRRRRGKSDPTDAEAAARAVLAGTAVGQPKAADGRVEMIRLLRVARRSALKARTQAANQLHALVLTAPDPLRARLRGLTLERLVAVAAAFRPGSRLTTPLAATRLALKSLGGRYQQLSAEIATLDGQLSQLVATAAPALVAVKGFGPETAGALLVAAGDNPDRLRSEGAFARLCGVAPLPASSGRTTRHRLNRGGDRDANRALYLLVLGRMSWDPRTRDYVTRRTAEGLSKPEIIRCLKRYVAREVYQLLKAPTDVPMALDNP

SEQ ID NO: 217470 - protein, 309 aa, unidentified
MIHPVYIGCDVAKAHLDFFDAGTQKYIRIDNNPTAIGDWLSTLEGREAHVILEATGRYDRFLCAALETWRRPYCRVNPARARDFAKATGQLAKTDAIDAWLLSRMGETLAPPVAAPLDPARRKLSSLHTRRDQLVAMRQQERLRLHTADPLECDSIARHIGWLDAEIAALEKDCQSHVRENGMLNEQSIRLRSIPGVGPVTAFTLMAHMPELGGSSPGAMAALAGLAPFNADSGIHRGQRHIRGGRKRVRDALYMAALVAYRLKSPFARLVQAMQAKNKPFKVMIIAIARKLLVIANAVIRDKTMFKAA

SEQ ID NO: 217471 - protein, 455 aa, unidentified
MRIVYQRCCGMDVHKDSVTACVLLIDEYGEWRSEKRKFRTMTRDLREMSAWLASLEVEAIAMEATGVYWKPVWNILEAEKKFHLLLVNAHHVKQVPGRKTDQKDSEWIADLLQHGLLKASFVPPPVIRRLRDLTRMRVKIRQMLATFANRIQKVLEDANIKLGSVASDVLGVSGRHMLHALVEGQQDPEQLAALAQGRLREKRAELQLALEGHITDHHRFQLKFLLEFVQFGEKQLSQLEAEIRCLLAQVEPASVPPEDTATAELAAPGAGAETPATAQKSPLQTVVELWDTIPGVDELTATTLVAEMGANMDQFPSAGHAAKWAGICPGNKESAGKRLSGKTPKGSVWLRRALCQAAWSASRTKDTYLAAQYHHLIVRKGKKKTIVAVAHTMLTIAYYIAKRQCPYQELGGAYFDRLNADTMQRRLVKKLKSLGYEVTLTPITPIVREPIAQSC

SEQ ID NO: 217472 - protein, 346 aa, unidentified
MMIIGSDFHPSWQQVSWLDTETGETGDRRLAQADGEAERFYRALAAPALIGMEATGNCHWLVDLLAGLGHELWVGDAAQIRASSVRQQKTDRRDAAHILKLLVEGRFPRIWMPSSEVRDVRQLLLHRYKLVTMRARVKNELQHLCLNHGVQRKHKLWSKAGQQVLRELRLRPWASRRRDDLLGLMAMLDQQIEPLDEAVKAEAQRDKMALLLQTQPGVGPVTALAYVLTMGDVSRFPRGKQVASYLGLIPREHSSGGRQKLGAISKQGNRMLRMLLVEAAQTAVRLDPQFKKEYLHRCHQKPKAVAKVAAARKLAVRLYWMLRSEKPYPEVVRIESSPRVPLVGAS

SEQ ID NO: 217473 - protein, 414 aa, unidentified
MADFAWYVGIDWGSETHVVCLLNASGQIEGTRTVVHTAVAVQEAVQWMREQTGAPPEAMAIGIETPRGVLIDTLLEQCFAVFAVNPKQLDRFRDRFTAAGAKDDSRDAHVLGDALRTDPRAFRRVEPDDPVIIHLRELSRMVEDLQEQEQRLANRLREQLYRVHAPWLSISPAADEPWLWTVLNASPHPTTWRQLPRRRISPALRAHRIRRLTVEDIITTLRQPTLVAAPGVADAVGARIASLVPQLILVHHQRTTAERQIDRLLEQLAATETTDSEPREHHDAEILLSLPGVGRMVAATMLTEAVGPLADRDYATLRAYAGAAPVTKRSGKRAFFVHMRYACKRRLRQALYHWSRTSIQHDTAARAYYDQLRARGHYHARALRSVADRWLRILVAMLRTRTLYDAARFGSAAA

SEQ ID NO: 217474 - protein, 478 aa, unidentified
MAIRSMNRKQRKELTRQLRSEDPGLDVVHPRAAGIDVGNGAHYVAVRPDQDREPVRRFECFTADLHRLADWLLACGVETVAMQSTGVYWIPLYEILEERGLEVYLVNARHTKNLPGRKSDVQESQWLLKLHTYGLLNNSFQPTAEIRTVRTYWRQRAEHVRAASTCIQRMQKVLTQMNVQLANVISDLSGLTGQRIVRAILAGERDPKHLAELSDFRIHASREDITKSLEGNWRPELLFVLKQEVEMYDIYQQRIGECDRELKAHLKRFADNVHQEPTEAGSVSEEQKDKVPAKLTRSGKRAQGNAPCFDLRSELYRISGVDLTRIDSISVVVAQTVISEVGLDMSRWNTEAHFASWLGLCPDNRISGDKVLSKGTRHVINRAATALRIAATTLLRSRSYLGAQYRRLRTRLGAPKAITAMAHKLARLVYRMLKYGQDYVDKGMQYYEDRHRRQQIELLQKSAAKLGLQIVEIQAVKG

SEQ ID NO: 217475 - protein, 377 aa, unidentified
MNHVPTEACPLAGPTPSAVDTSEGGTVPIVIGIDAHKNTHTAVAVNAATGVEIDQIVVPARTKGHLRLVRWARKLDADRIFAVEDCRHVSGRLERDLLKHGERTRRVPPKLMAGARRTARTGGKSDPIDALAVARAALREPDLPEARLEGPERDLQMLVDYREKLVWRRTEDQSLMRWRVHDLDPEISIPKGALDRKVWLDDLRERLLSMQPTVAIEICLDTLERIVAATAKVHELQRRIETMVKKLAPSLLAVQGCGALTAAKIVGETAGVDRFSSEAKFAMHGGIAPLPVWSGDRTRFRLNRSGNRQLNTAIHRIAVTQIRMHQPAKDFMARKLSEGKTKTAALRSLKRHIARRVFDAMMKDTIKTPAGLQSAAA

SEQ ID NO: 217476 - protein, 346 aa, unidentified
MEHYAGIDVSLELSSVCVVDGQGEIVKEAKISSEPEALVSFFKGLGFPMKRIGLEAGPLSQWLHAGLAQAGFETILLETRHVKAALSAMTVKTDRKDARGIAQLLRMGWFRAVHAKSMGSQEVRALLVARKQLLGRLIDVELSIRGILRGFGLKVGPVTRRGFEARILELVTGQATLERITTAMLSARAALKAEYEKLHKAVLAIVREDAVCRRLMTVPSVGPLVAITYKSAMDDPSRIAKSKAAGALFGLTPKKYQSGEKDVTGGITRTGDEMVRTALYEAANVLLSRITRFSKLKRWGMDVAKRRGSKRAKVALARKIAVILHRMWVDGTTYRWAAAEPIAAQA

SEQ ID NO: 217477 - protein, 403 aa, unidentified
MAAVMIGVDPHKGSHTAVVISPAEEPLGELRVRASAGQAGKLIGWAAAWPERTWAVEGAAGLGRLLAQQLVAAGERVLDVQPKLASRVRLLQAGDTNKNDPNDALSVAVAALRSTVCREVIADDYRVVLKVWSKRHRDLARTRNQVACRLHSVLCDLVPGGHQKEISAAHAARILAQATPSGAVALARAELAAEFLADLRHLDGQLRDTRKKLAAAVRASGTTLTQVFGVGPVIAGTVIGDVGDVARFPGRDHFASYNGTAPVEVSSGNRKIHRLSLRGNRRINHAIHMAAITQLRHKHSEGRAYYDKKVAEGKTHKEALRSLKRKVSDAIFARLQADARQARESGPGGQPGNGSDSSAASSHPERQLFGPATPGPDTTIRPGTTAGTPSPSKPALKKTRPAT

SEQ ID NO: 217478 - protein, 337 aa, unidentified
MYYIGLDIHKKTISYCVKDAAGCVHREGKIGSSRRELDAWIGTLPQPRMMAMEATIFTGWIYDYLLPHAEKVKVAHPLMLRAIAAAKKKNDKIDAAKIADCLRCDFLPECHIAPTEIRDRRRVLRYRNLVVKQMTQMKNRVSGLLMETGVSYNKQRLHKVGYFGEMMSTNADINDAVRPLLNLSRGMIRRSGKLEYDLVSSLERDPLLKERLRRLRTVPGVGSITALTWALEIGDYTRFSSNRQAISYCGLCADEKSSADKVMRMPLSKQRNKHIQRVLVEAAKLAPRLSPELAMIRARELERGNPNRATLAVARKMVCYMLAVERRQQDFVQTAAA

SEQ ID NO: 217479 - protein, 343 aa, unidentified
MSKRIYVALDVHLKFIVAVWQVMGVGGRKKLTIEGTPEGLRKLVQAVGPGEVWAVYEASGSGLEVHDRLTEHGWKVWLLAPTHLPQSTDSRKNKSDERDAHRMLDVLVAHGELGTKLPWAWIPTRKTREDRELVRRRLKLAEKLGQIKNETTGLLRVEAIRKPESLKTAWSDKHIAWLRGVAGTISAPVGKVLRGLLDELGFYQDQIRQMDEELQKLSEEPEYRDSTARMMELEGVGRLTAMTFLLELGDVNRFTNRRGLARYTGLTPNRYASSDVDHKGHISRMGPYRLRKVLNQAAWAHVRTGGHWASWYAETAKRRGAKIAIVGLMRKLAIDLWHLAKAA

SEQ ID NO: 217480 - protein, 493 aa, unidentified
MGACGLESGDVVLAAIPIRKMTIGIAQTLLLVIEWRIAMPKRTTGDRPELKTVSVGAAAIDIGSKMHMAAVNPACTDVPVRSFGTFTQHLHDLADWFKACGVTSVAMESTGIYWIPVYEILEQRGFDVILVNARYAKNVPGRKTDVSDAAWLRQLHSYGLLRGSFRPDAEIATLRAYLRQRERLVEYAAAHIQHMQKALMEMNLQLHHVVSDITGATGMRIIRAVVAGERNPDVLATYRDVRCHSSPETIRAALVGNDRDEHIFALTQSLELYDIYQAKMLDCDRKLEVLIAALSNKGGKPVGKLSKPRIKTKQVNTPTFDVRTALYGVLGVDLTEIHGLGPSLALKLVGECGTDLRAWPSAKHFTSWLCLAPGNKISGGKVLSSRTRRSSSRAAALLRLAATTVGRSDTALGAFYRRLSSRAGKSKAVTATARKIAVLFYNTLRHGMSYRDPGADHYEQQYRSRVLANLQRRAKSLGFLLQAIPGDADPAVS

SEQ ID NO: 217481 - protein, 307 aa, unidentified
MDVASAHLDVAVHGQTTVRRFANTVQGIAQLLRMLPPSSVLGLESTGRYHAPLALAAHAAGLCVHVLNPLDARRYAQSVGQRGKTDRLDALVLARYICHEHAHLQQWQPPTACQVVLRELLAHRATLVRQRSALAQAGCHNKALARLDEPVLAALQQAIRHIDEQLASTVQADPASQEAFEHITSVPGLGLVCGSLLVMLFGRMQTRSADAVVAFTGLDPRPNDSGKKTGQRRLSKRGWPEIRRLMYTAAMSAARTKTWNSFYRAQRDKGLSTTAALVVLARKLLRVAFSLFKQHAPFNPALVAVRT

SEQ ID NO: 217482 - protein, 377 aa, unidentified
MTECSAYVGLDVHKDTIAVAVALPGRAVPAYRGEIKHQRRSLERLIRRLSPNGEVLSFCYEAGPCGYGLYREIIELGHRCEVVAPGLVPRKPGDRVKTDRRDALSLARQYRSGELTAVWVPGEEQEAMRDLTRGREDMKGIETKARQRLGAFLLRHGRVYRAGKSRWTQTHFRWLERQKFDQRVQQIVFQEYVDAVKEAQARVAGLEAQMRSALEGWSLRPVVEGLIALRGVDVVTAMTVLAELGDITRFDSPRQLMSFLGLVPSEHSSGAKRRQGAITKTGNGHVRRVLVEAAWSYRHPARKTAHLRRKASLASREVQAIAWSAQKRLCARYWHLCQAGKAMNCVCTAVARELVGFIWAIACEVMGLAHTSRLAPV

SEQ ID NO: 217483 - protein, 357 aa, unidentified
MLSSNVKYIGLDVHKEAIAIAVLNGAGKLVMESIVETKSSTLLDFLHGLRGELHVTLEEGTWAAWLYDVLKPHVREIVICNPRRNALLKEGNKSDKIDARKLAELLRSGMLRAVYHGENELRTLRELARSYLTVSKDLKRVKNRLKALYRSWGISCAGKQVYTPRHREQWLSKIAQVGVRRRAELLYQQLDGLQVLRHTVRGELLAESRKHKAVKILRQVPLVGPLRAALLLALMQTPHRFRSKRQLWTYSGLAVVTHDSAQHRYVDGQLQRSKKPQQIRGLNQNHNHAMKDIFKSTALSASCCAGPLQDFYAGLLAKGMKPDMARLTLARKIAAITLTLWKKGGSFDAEHLKSQAA

SEQ ID NO: 217484 - protein, 356 aa, unidentified
MSSQTAVGWDIHRKFSQLSVVQRSEQGEIQVVKRIRLEHADRPGMRAALSQLPPGTPVAMEGAFGWPWIADLLDELGLDPHLGHPPAIKVLAKNEAKADRVDADRLGRFWLRGIFPKSYLSTPEVRNLRERLRYRMALVCLRSGMKNRVQAILHRQGILHDFSDLFGKGGRAFLKTLALPAAGRAVLDGWLAQIDLVGEHLAEVEAWMEEHLEADEIVRLLKTIPGIGLILAHVIRAEIGQLVERFPSRKHLTSYAGLAPVADDSADRHGRRHIASACNHTLRWALIEAAGCILRSKSCPTNLRQLHNRLTHGGRVHKSQAKVAVARELCELVYVIWKKGEPYREPTVVRPPRAKR

SEQ ID NO: 217485 - protein, 340 aa, unidentified
MNITRLSIDLAKDIFQLYGVDSKQKCVLTKRITSRAKLIEYISKLKTCEIYMEACGSSNYWARTFQGYGHTVKLISPQYVKPYIQRNKNDYRDAQGIMEASFWTGTPYVTPKTVEQQDIQSLLRIRSNYIEIRTAVSNQLRGLMKEYGVFVAAGYQKLKQALPGIFDRTMENGLTPQMKELIEGQYDMLLVFDEKIDKLDIQIEAISKQQEICQRLQKIEGIGPITALAIIALVGNGQGFKNGRHFSAYLGLVPKQHSSGQKEKLLGISKRGDVYLRELLIHGGRSVVMHCSKKNDARSLWVNKIKDTGGMNKAAVAVANKNARIVMAMLLSGENYQKAA

SEQ ID NO: 217486 - protein, 394 aa, unidentified
MKLVGIDVGKNSHHFCVMDKETGEFNVAPSSFSNNKEGFDFLINSLKPYSKKSILIGMEDTGHYHVALLKFLLSNGYPVALINPKTTDLTRKMEGSITKNDKLDTITICDVLDTPERKKQYRITKVDRFDLYEQRQLTRHHHNLKEELNVYCNRLQKSIDLVFPEFNTLFSSKYSIVYMNLLKTFGSAEAIASTDIRTIRKCFEIKGKGGRISLTPEKLKECAKNSIGISSEVETIQIKHLVSQITLIKEQIAEIDKKIEEFSITNNSPILSIPGISHFSGTSILAELGDIGNYSKPSQIIKFAGVAPYHYESSQYNAQHTAITKKGSKYLRKTLYQIILPVINNNPVFKKYYRLKISQGKGHRCAQGHCIRKLLRIIYHLLETGQSFDPALLR

SEQ ID NO: 217487 - protein, 485 aa, unidentified
MSKKKVSGKPGPKKASSNRRSQKPRAWQVVHPRAAGIDVGAAEHYVAVPPDCAQAPGQNVRQFRAFSEDLDALVEWLKACRVDTAAMEATGVYWIGLFQKLESAGIHVILADARALKHVPGRKSDVQDCQWIQQLHSYGLLRAAFQPDDPIARLRVLVRHRANLVSSGGEHLQHIQKAMVQMNIHLHRVVSHINGETGLRILRAIVAGERDPEELVLLRDKQITVSTVAEMKAALVGHWREECLLVLKQSLQAWDFYQERIQECDLEIEKLLQTMPAAAPAPEPPKEKKADPLASDAPKKKRPQSRKRNDPQRDLRPELARICGLDLCAAHGLGLLTVLVILSEIGLDMSKWRSAKAFSSWLGLCPNNKISGGRVLSSRTRKVPHRAAAAFRMAALGLAESDCWLGIFHRRKRSHLGPAAANTATAHKLAVVVYHLLKNKEAYVERDAEKYQARLYQNQVKYVKKKAKALGMKLVPINPEETLAE

SEQ ID NO: 217488 - protein, 346 aa, unidentified
MDVEYAGRRYVGIDLHRHRSVIVQMSPEGERLGAPVRIDNDPFELARQVASWGEHPEVVLEATYGWYWAADVLAEAGAEVHLAHPLGIKGFAYRRVKNDVRDASDLADLLRMGRLPEAWIAPPEVRELREAVRHRCKLVALRSGLKAQVHAVLAKQGVRVPMSDLFGVAGTQLLDELPLDAPFHARVLSLRRLIDAYTFEIDVLAKRTAGQLTRHPGFQAVQTIPGVGPVLGAVFVAEIGDVHRFARAEELTCWAGLTPKHHESDKHVHRGRITKQGSRLVRWAAIESVQILPKTSAIGRIRDRVGDRRGRNIGVVAAARRQLEFVFYALRDHRVRALQGTRPVAA

SEQ ID NO: 217489 - protein, 362 aa, unidentified
MSKHVAVLAKKRSTRKVLVGATTIGIDLGDQWSHYCMLDEAGEVLEEARFRTTEGGVGKRFEDMERARIAMEAGTHSIWISEQLKEYGHEVIVANAELHAISRNDRKSDRTDAEKLARYARLDPRVLRPITHRTVEQQQALTVIRARDVLVRLRTAAVNAVRGLAKPCGHRLPASSTCSFPARCAGLLPEGLTAALEPLLEQIASMNAQIKLYDRAILKMATVTYPETQALTQVHGVGSLTAVTYVLTLGSKERFERSRYVGCYLGLRPKRSQSGDRDPQLSITKAGNEYLRRLLTECANFILGRFGKDSALRRWGLHLAERGGKNARKKAVVAVARKLAVLLHRLWVTKQPYVPLYEAQAA

SEQ ID NO: 217490 - protein, 398 aa, unidentified
MLSASIENHSRRLRHEPMVMWGEFVPALGAAKPVVRAGTPRIVVFIPNSRQGNGIGRSARIQGWSHPVIQLKPPLSPDLCCVGIDVAKHKFDVRIDNAGKSFVVANTPAARGKLVQRLGQLPMACVVVESSGGYERSLLFDLMDAGLPVAHVNPRVVRDYANGHNQLAKNDPIDAWTLACYGRERQPRLMTQDDKLRHMLEDLNRCRRQLLGQITALKNQVQTAIHPTSIQVLQSSIQLLEGQLEIVDKDVQAEIDKLPAMKRRQELLLGVPGVGPITSRTLVIELPELGRITRRQAAALVGVAPYDDDSGTVQGPRVIKGGRPHARCALYMAVLTGIVHNPVLKAHYQHLTGRGKAPKVAMVACMRKLLTHLNALLSKNPSEPSGSNPPIRGGGEKE

SEQ ID NO: 217491 - protein, 334 aa, unidentified
MEKITTVGIDLAKSVFSLHGVDGAGRVVLRRTVRRDQLLGVVAGLSPCLIGMEACSGAHEWGRRFQELGHTVRLVAPKFVAPYRKSGKNDGNDAEAICEAVTRPSMRFVPVKSAEQQALLALHRVRQGFVVERTATINRLRGLLCEFGVVLPLRSVTVRRQAAAAAENLPALARRAIGDLLEQLRVLDERIDGYDREIEAQARLCEPAQRLMKIRGIGPTTALAIVATVGNAREFKNGRQFAAWIGLTPSQHSTGGKPRLGHISKRGDAYLRNLLVQGARSVLNSASRHQDRMSRWILELQPRRGYYRTLVAIANKNARIAWALLAKNETLRAA

SEQ ID NO: 217492 - protein, 494 aa, unidentified
MSAQSINPEERLHHLEGHYADRVSAFRQRLARVGLDRVLIVLLDIGKNVHWAAASLASGWELVRPYRLPSTQTGLTQFVQMTDTLIAEHDPLLVLLGHEPTGVYHEPWARALMARYASQLHGQASPTFEYRFFNPYQVKLARLQTHLRHRKTDPRDLAAMLDLMLRGLGQPAFLPTGTELLIRQEIGFIRAQSRLLGHLERQLRQQLDRLWPGAVVNVGQFAKAHPGLPKPTPIIETRPLQRDRLRVLLTHCPNPYDLIAMSDQQILDLYRQHAGRAGPALFNTLHTWAKNAVLLPLEVSAPLSQQLQRLFRQYTAAETLVDEGRGRLVPLLPQTPARHLIAIPGLGEMDAAAYLAGLGSHHRFHRAAEVWAFFGFDPIADGSGDKPERVGHLSKHGDPAARDALYQMGFRVAQNYAPISITFLDAFDRGKSEIEATIHAAHRVNRLCFHLVQNDEPFENRSTPQLLGEKTRRWRDFKAEKRRRGSRRKRGRRR

SEQ ID NO: 217493 - protein, 338 aa, unidentified
MDYYAGIDLHSNNSYIAIIDNDNKRVFKKKVKNDLENVLHVLEPHRKEIKGIVVESTYNWYWLVDGLMEKSYKVHLANPSAIKQYEGLKHSDDVTDAFHLANLLRLDILPEGYIYPKKERPVRDLLRKRLQLVQQRTAQILNFENLLARNLGTRINLDEINKFTEEDVEDIFQQEHLILSGKASVATINFLGTRIQQIEKAVHKVAKLKSEYKLLMTVPGIGKILALTIMYEAGPMERFAKVGNYASYCRCVGSERISNGKQKGKGNRKNGNKHLSRAHVEAAHYAIRHYEYVKRYYQRKMAKTNIVVARKAIAHKLARACYYIIRDQKAFDPGKLFV

SEQ ID NO: 217494 - protein, 414 aa, unidentified
MDVVVERCAGLDVHRDSVVATVRVPGKGKSRRRRAQQTRGFGTTIRQLEQLANWLQGFGVTLVGMEATGIYWKPVFWVLERRFECWLLNAQHLHNVPGRKSDLIDSAWCCQLLEHGLVRPSFVPPPEIRRLRDLTRLRSTQMEERSRAIQRLEKVLQDAGIKLSSVASKTYSVSARAMLEALLGGVSDPAILAELAKGKLRAKIPQLQEALANRFELAHHGVLVAQLLAHIDALDETVANLDGRIIEATDPHAELITLLSTIPGVGRYIAEVLIAECGVDMTVFPNAEHLVSWAGICPGTNQSGGKRRSGKTRHGDRWLRTALSEAARAAARTKNTHLASHYWQIRGRRGEKKAIGATRHDILIAYYHITRDQVPFRELGPDWLARRHSVEHRTRRLVKQLEALGHAVTLEAAA

SEQ ID NO: 217495 - protein, 419 aa, unidentified
MQTQKKFAATIGLDWADAHHDLWLQPADGGQPEHIILEQQPEALHQWIAQIRARFKNQPVAIALETSRGPVLSALLAYDFITVFPINPKALSSYRDSFRVSGAKDDRSDALLLEQYLRHYMDQLKSLRPDTVLTRQLAGLVEKRRALVDLRTQLVNQLHAELKMYYPLAEIILDDLTVPLAAAFLKKWPTLEALQKAGAHKVRAFFYGHNCRSAKKLQARLDALASAVALTTDPALIVPASLTVQTLADLLGVLHGSIATLDQEIKTAMDAHPDAAIFRSFPGAGPALAPRLLVAFGTQRDRFQSAQEVQQLYGIAPVTKASGQSKVVYMRYRCPKFGRQSFHENAGQACKKEPWARAYYDHQRKSKKHHAAVRALAFKLMRIYFVCWRDRKTYDRNTYVSSLEKHGSPLAKAANKTRC

SEQ ID NO: 217496 - protein, 344 aa, unidentified
MDAKRSPCYWVGLDVGKKEFSAAIELSTSYQKFDIRALPCKKFNHTEKGVAEFLKWVDKTIHGLPFKVVMETTGHYSINLCKLLQTKRKGLECCIVNPYLISNYLKSLNLPQKTDNIDAQGIARFGMERQPEMTSLPTKEMEELQELSRHRDALVKAKVAFENRDESRSSESAQSLNRDFVKTIEEHIARTEKLMAKQARQIPWVKEQMELMMSIPGVGEITAIGLSVEIGDFKQYTLKGISAASGLSPRLRESGTSVKSAKISKRSPGRIRQLLYLSSNHAINKIPYLNVMYARLLAKGKTKLQVKCACMRVLIQIIRSVVVHERPYTEELSYQSLEKTIKTA

SEQ ID NO: 217497 - protein, 343 aa, unidentified
MQTITTIGLDIAKTVFQVHGVDAGGQVIVRRQLKRRYVVPFFQKLSPCLVGIEACASAHHWSRELQALGHTVRLMPPAYVKPYVKRQKNDATDAEAICEAVTRASMRFVPTKTPEQQSGLVLHRTRHLFIRQRTSVINAIRAHLAEFGIVAPVGRHGVEELLTVVADPSDKRVPDIARACLLALGDQLQSIKKQILEFDRLIRAWHRSNEMSMRLEAAPGVGPVLATALVAAVADPKSFRSGRNFSAWIGMVPKQHSSGGKNRLGNISKQGDRYLRGLFVAGALSVIRYAKVHGTKHRPWLTALLARRPTKVAAIALANKIARMVWAMMATGERYKEPVALAR

SEQ ID NO: 217498 - protein, 389 aa, unidentified
MKIFVGIDIAKLNHFAAAISSDGEIIIEPFKFTNDADGFQLLVSKLESFDKNSIIIGLESTAHYGDNLVRYLVTELYQVCVLNPIKTSAMRKNNIHKTKTDKVDTYIICKTLMMQESLRFVTFYDLDLMDLKALGRFRQKTIKQRTRLKIQLTSYVDEIFPELQYFFKSGLHQKSVYALLKEAPTPKEIASMHMTHLANLLKVNSHGHFTKEQAKELRVLAQKSVGANDSAISIQITQTIQQIELLDSQLEKIEAEMTDIMKFNDSVIMTIPGIGYINGGMILGEIGDIHRFSNPNKLLAFAGLDPTVYQSGNFQAKTTRMSKRGSRVLRYALVNAAWNVVRNNATFKAYYDAKRAEGRSHYNALGHCAGKLVRVIWKMLTDEVEFNLE

SEQ ID NO: 217499 - protein, 373 aa, unidentified
MNYNTVYVGMDVHKETFSLCCYTNEKEQAEYPQKVDGHYSKVLNYLEAMRFHYGDDAMFICGYEAGCLGFTLYHQLTSHNVKCIILAPTTMPKPSGKKKVKTDKRDAALIARCLAHHDYSPVHIPTDQDEQVKEYIRMRQDHKLALKKVKQQILAFCLRHNYRYDGTKNHWTQAHLKWLGGLKPEGLYREILTEYLSTYDQLTDKLERLDKRIEELASDEDYQEDVRHMSCFLGIKTQTALSTIVEVGDFKRFSSAQQFASYLGLTPGEDSSGGDQNRLGITKAGNSHIRTLLVEAAQSYTRGQAGHKSKLLKERQYGNPADIIAYADKANERLRRRYYHLVLSQGKKANVAKTAIARELACFIWGMMTGDIA

SEQ ID NO: 217500 - protein, 338 aa, unidentified
MQQQRQYVGVDLHRRRSVIVRMTPEGEKLDVVRIDNDALALSLELAKAGPDPEVVLEACYGWYWAADVLAECGGRVHLAHPLGNNWGHRRVKNDERDGTDLCDLLRLGRLAEAWIAPPEVRELRELVRYRAKLVALRAGLKAQVHAVLAKEGVRVPMSDLFGRAGQVLLDRCPLGEAYAIRVESLRHLIEVHDREIAMIEGHVNRRLVGHPGYRAVQAIPGVGPVLGAVFVAEIGDVSRFSRPDQLACWAGVTPRHRESDTTVRRGSITKQGSKLVRWAAIEAISRNRGGTFLQHHHDRIAKARNSRGIARVASARKLLHLVFYALRDGEVRCLADAG

SEQ ID NO: 217501 - protein, 325 aa, unidentified
MQESPILGIDIAKKKFDVYLLSDQKKCHKIFTNDRAGFLNLTNWCENQGFNYAHACLEATGFYGEALADFLYEYGYKVSVVNPSQIKAFGRSQLRRTKNDKIDCQLIAHFCKRHQPPLWHPLPAEQKKLREWYRCLQSLKEQKRQITNQLENLNLDEKVQSAWKCMKVSVEKQINILEKEIKDFVKQTASLNQSIKNLSQISGVGQLTAVGVLCEFPAVENFSNVRQYVAYAGLNTAHYHSGSSAQGRGRVSKIGSPRARKLLYMPAIVAKNHNPLFKEWAYRLKERGKPPKVIVVAIMRKLLHIFFGMLKTRQPFDPNLFTKNA

SEQ ID NO: 217502 - protein, 403 aa, unidentified
MNNVAGIDVSKGKSMVSVLRPFGEVVAKPFSIGHTGSELKELADYLKSLDGETRVVMEHTGRYYEPVARFLHEEGVFVSAVNPKLIKDYGNNTLRKVKTDKADARKIARYGLDNWAELRQHTPMDTIRMQLKTLNRQQSLYAKTKTMMKNNLIALLDQTYPGVNALFDSPVREDGSQKWVDFATAFWHVDCVRNMSLTAFAERYRKWCKRHGYNFSQSKAVEVHTGAQDLIAMLPKDALTKTMVRQAIDALNAVSASLERVKAEMQALAAQLPEYPVVMAMHGVGDSLGPQLMAELGDVARFTHRNAITAFAGVDPGADQSGTHEAKSTRVSKSGPPELRRALFLVMDCLLKTQPQDDPVYRFMDKKRAEGKPYLVYMTAGANKFLRIYYGRVKEYLASLEEN

SEQ ID NO: 217503 - protein, 364 aa, unidentified
MYDSMTTVAVGLDVHARSIRLAAVRADELLEERTLPYDEEAVARALRRWPAVRCCYEAGPTGFGLQRYLVERGVECQVVAPGLVPRRPGDRVKTDQRDARKLARLLAGGLLEPIHVPTRELEAARDLVRAREDARLDRMRDRHRLSKFCLRHGRLLPTSSWTIARRTWLSEQRFELVAQQQTFDTYVHTVDLVDRRIEALESAIRETAAQEPWQALVARLRCLRGIDTLTALALVAEIGDFGRFRSAQELMAFVGLVPSERSSGEQRRQGSITKVGNSHVRRLLVESAWHARRRPTVGYQLSRRQRGQDAIDVERAWRCQQRLYQRWQRMAARGKPPQKIVVACARELAGFVWAIATEQPLRNA

SEQ ID NO: 217504 - protein, 372 aa, unidentified
MKKSSTDSAPHSKTRPAASQKAIAKLTVGIDLGDQNSAYCTLDAVGDVLSEGTVRTTENGFAQQFQKMSPCRIALETGTHSPWVSRLLQKYGHDVVVANARQLRVIYDSDRKNDKVDARTLARLARVDKDLLHPIRHRSEKAQADLAMLRARDTVVQVRTKLMNCARGTVKSVGGRLPGASGECFAKRVREHVPEAIRDALLPVLDQVGHLAAQIREYDKRIEQTAKTEYPQTQLMRQIPGVGVITSMAFTLTIDDPHRFRKSRDVAAYLGLLPRQSDSGASKPQLSITKAGDHMVRRLLVGCAHYILGHWGPDSDLRRWGLSLMERGGKNVKKRAVVAVARKLAVLMHKLWVTGEVYEPLREPNQVKSAVA

SEQ ID NO: 217505 - protein, 406 aa, unidentified
MISVGIDVSKGKSTISIMKPKGEILAKPYDILHTMESINALVAKINAYDEEVRVVMEATGHYHLPVLMPLVEKGIFVCCVNSLRMKKYCSQSLRQGKTDKIDSKKIASYGLTYWHEMLPTKPTGDIYDEIRELSRQYYQFTSLVVKAKVNLSNLLDQTMPDIKKLLTDSKDNHKLTDFVKHYWHFENIQKMGNSRFTADYCKWAKKHGYHSNERKANDIFTLSQNSIPTLSNTLSTKITVLETVRVLQELEKSRDTILTHLKELAKTLPEYSIVFDMAGIGETLAPRIIAEIGDVRRFHNRNALIAYAGIDAPPYQSGNFNATERHISKRGNKYLRKTGYEIMQSLLRHKYPNDAVYLFIQKKRSEGKACKEAMIAGLNKFLRIYYARVSEVYDEVDNQLILGSNT

SEQ ID NO: 217506 - protein, 451 aa, unidentified
MDRPQEIEVAEEHEIVERVAAIDVAKATGMVCTRLPHASVRSRRVTKVWEVRATTRALTELADHLVAERVERVVLESTSDYWRPFLYVLEGAGLVVWLVNAKQVKNVPGRPKTDKLDSVWLAKLAERSMLNPSFVPEEQMRHVRDLARARFDLVGDRSRVKQRVEKLLEDALVKISSVLTDLHGVSGRAMLEALIRGERDPMVLAELAKGRARARLGLLAEACDGRFTEHHARLCRMLLDQADDLTRRIESVTALLDEAISALEAPSGEVMTAALDHETGELLPAPAAYASAMERISAIPGGGPETARAVIGEIGLDMAVFGAAQRLCSWAKTSPRTVQSGRKTKGAPIGKGNPYLKAALGQMATGAAKTDTFLGERYRRLIKRMPKQKALAAIERSILVIIFHLLSDPSATFTDLGSDFYAKRIDKRRRTDHLVHQLEALGHRVTLTPAA

SEQ ID NO: 217507 - protein, 400 aa, unidentified
MTEKVWAGIDVGKEHHHCVVINSEGQRLLSRRVFNNEPELGALIDEVVALVGDQVLWAIDLNHGAAALLIGLLVAREQPLTYLTGLAIHRASAGYRGEGKTDARDAFIIADQARLRRDISVLRPGDEIAVDLRILTTRRVDVVFDRTRQINRLRAQLLEISPAVERALTLTNKGPLVLLTGYQTPAAIRRAGVARLEAWLRKQGVRNAAALAQSAVQAARSQSVVLPGERLAAQMIARLAKGVIALDDEIAELDELIEARFRDHRHAEVIISLPGIGPRLGAEFLAATGGDMTAFTSADQLAGFAGLAPQPRDSGRIRGNLRRPKRYHRGLLRSMYLSAQISITTSPASRTFYQRKRAEGKSHKQAVLALARRRINVLWAMLRDHTTYHDSPPIPITTAA

SEQ ID NO: 217508 - protein, 403 aa, unidentified
MPDDRPGVIGGVDTHRDAHVAAAVDTAGRLLGVESFPATAAGYRQLVGWLHGWGELGCVGVEGTGSYGAGLARFLAGEGVRTVEVIRPGRRARRGHKSDPADAEAAARAVLSGEASGRPKSADGPVEAIRMLRATRRSAVKARTVAINQLKALLVTAPEQVATPLRALGTAGLVRACSRLRPDTGAGEAVAAAKRSLRCLARRHQALSAEIEQLEAETARLCADANPALMAVCGVGADTAAALLVAAGDNPARLRSEASFAALCGAGPIEASSGRTVRHRLNRGGDRQANNALWRIATVRLRCDDRTKAYAARRRAEGKNDREIIRCLKRYIAREVYRLLTDPPPVPDGADLRQQRQLQGATLDAAARALDTWPARISALERGMIHNRDLAERYQQHLAEITT

SEQ ID NO: 217509 - protein, 387 aa, unidentified
MIYVGIDIAKETHVAAAVDSDGVIIIEPFSFTNNHEGFKLLKSKLDTLDRSNLLIGLESTAHYAENVIFFLHSCGFDLAVINPVQTAAMRKTGIRKTKTDKVDSLLICKTLMVNSFRRYSENDIKTLKLKSLCRFRQNLKKSKARLKIQLTSYVDVIFPELQSFFKSGLHIRTCYELLKAYSSPDDITALHLTKLSNILSKASRGRFGKQDAQSLKSLAMSSVGVKNTYISIQITQTIAQIELIESQLAELETVIEAAVDELDSVIMTVPGIGKLNGAMILGEIGDIKRFSDSSKLLAYAGLDPVINQSGKFNAKRTRMSKRGSKLLRYALMNAAWNVSLNNDTFKRYYDSKIAQGNSHYSALGHTAHKLVRVLFKLLNDNIPFALV

SEQ ID NO: 217510 - protein, 334 aa, unidentified
MNFKNFIGIDVSKGTIDIGLLRENTANSIVSAKYGNDFNGLVNLEEFVKKQGLNMDETLFCMEHTGIYCRLLSHYLVENKYHVWLEMPVQIIRSLGIQRGKNDRIDAVRIAQYACLKKDKAVLWQPPREIVLQINDLLTLRDRLIESRKSLKQPIKEFVDAGFKDTAKLIEKMCCNTLKALDKEIEQIEKELDKIINKDSNLKKLFKLATSVPGIGKVTAFTLLYFTNEFKLYTNANQLACYCGVAPFEHTSGTSVKGKSRVSSFANKRLKKLLHMVAMSTISCDKQLSVYYQRKVSEGKNKMLVINSIRNKVLHRLCSVIKRGSPYQVEYQIA

SEQ ID NO: 217511 - protein, 429 aa, unidentified
MEEVGEQELHVERVAALDLGKAALEACVRVPHESRPGRRMQEVRGYPTTTSALLELADWLRCCRVTRVVMESTSDYWKGVYYLLEAEGFECWLVNAREVRNVPGRPKTDKADAVWLAKVAERGMCAPSLVHPAPIRQLRDLTRYRRSLVRDRTRERQRVEKLLEDAQIKLSSVISDIFGVSGRQILDALIAGQRNPRVLADLARGRMRRKTAILSEALRGFFTDHHAVILRMMLDNIDRLSEQITVLDARIEEAVAPFAHQVEQLTEIVGFGCTAAQELIAEIGVDMNRFPSDAHLVSWAKFCPATCESAGKKKNKNRPKGNPWLGATLGNVAATAARTDSFLGARYRRIAHRRGKQKAIVAVGNSVLVIAYHLLSDPTARFHDLGAEHFDSRVNKERRARHLATALQAATGQHIFIRDGKAVIAEPAA

SEQ ID NO: 217512 - protein, 344 aa, unidentified
MSITMIGLDTAKSVFQIHAVNETGKTEIRRKLSRNDLIPFFKKQELCTVVLEACGAAHHWARILTGLGHDVKLIAPEAVKPFVKKGKKNDAADAAALCAAASRPDMKFVPAKSLEQQGILALHSARSLLVKQQTMLANAMRGLATEFGLTVPKGIDKLEELTVLVDADEAFPVKARQAFTGLSDQCKSLTESIMTFEAEIVAHARHDETARRLATVPGIGPITASLIAATVGDIGMFKSARHFAAWLGLVPRQRSTGGKTRLGRITKTGNREIRKLLVLGATSMVYRAPQWKSAAGLWFRGVLERRPVRLATVALANKMARIAWALMTRKEVYQAKGRVAAATA

SEQ ID NO: 217513 - protein, 432 aa, unidentified
MRILHERCCGLDVHKASITACALVVDQGKTSEQIRRFGTMTEDLRELARWLSEKEIRHVAMESTGVYWKPVWNVLEAAGFQLLLANAHEVKIVPGRKTDQKDSQWIAELHQHGLLRNSFVPPRQIRDLRDLTRNRAILTQDHTSVCNRIQKVLEDANIKLGSVASDVFGASGRAMLQALMAGQNDAATLANLSKGIMRRKIPELQRALEGATTAHHRELMAGHWKRMQFLEQQIADIEKQIVEAIPLWSPVSPDNQRPWPTLQEAVTLWMEIPGVGWTSACSMAAELGTNMDQFPTSAHISSWAGLCPGNNESAGKRFSGKTRKGNVWIRRTLCEVAWAASHQKDTYFAAQFRRIALRRGKKRAVVAVAHSILVTAYQMLKHQSHYRELGVDFFDTINRDQVRKRLVQRLSKLGFEVTLISKDLEPDDTLTL

SEQ ID NO: 217514 - protein, 338 aa, unidentified
MNIVFLGIALAKNVFQLCGLNQAGKPVYTKRTGRKELLQTLANIPACLIGIEASTGAFYWQREFEKLGHKVKVISPQYVKPFVRGQKNDSNDAQAIAVALMQPTMQFVPPKSPEQQDIQALHRARQRIVNHRTATVCQIRGLLLDRGIPIGSAVSRSRRAIPLILEDAENGLSSRMRRIIAELYDLFNDLGRRIHFFDKEIETVFRQSEACQRIAKVKGIGPKTATAVVAAIGKGTEFKNGRHFAAWLGLVPRQHSSGDRQVLMNMTKKGDKHLRTLFIHGARAVVRVATNINDGHMNQWVNQLKERRGFNKTTVAVANKNARIIWSMLRNDTGYQVV

SEQ ID NO: 217515 - protein, 340 aa, unidentified
MGEVTTIGLDLAKHFFQVHGVDASCATVLRKQLRRGQVVAFFAALPRCVVGLEACATAHYWARELQAVGHEVRLMPAQYVKAYVKRNKNDAADAEAICEAVGRPSMRFVALKTAEQQAALLLHRGRERLVRQRTTLVNALRAHLAEFGVIAPQGLRNIGRLIAIVRDDSDTRLPDLARRVLEVLASQLEQLIAAVVAIEQQLTAWHRNNPVSQRLASIPGIGPIIATALAATVVEPIGFASGREFAAWLGLVPRQHSTGGKARLGGISKRGNRYLRRLVINGASANLLRSKTTNADPWVIGLRRRRPSLVVAVALANKTARIAWAVMRREESYRHRSAAA

SEQ ID NO: 217516 - protein, 345 aa, unidentified
MPIIGGLDIHRKQITFDYLDTATGEVRRGQIAPADREHLAAWLAGRFTGQNAHFAVEGCTGWRYVAEELAAAGTTPHVAEPADVAALRGRKRHAKTDKTDSRHLRQLLADGRLPECWIPPSHILECRALLETYHDLRAEHTAWTQRIHAALFHQGAPQLGGQRLRTGEGLAALQAIAAAQLSPAGQLQVAVALDKLAALDRHLDVLRRRLLEAARQLAGARELHARLYGVGPITAVALVCWLGGADRFSSARKAVRFAGLDVTVWSSDRKGPPGRLSRQGPAVLRWCVYEAGKTHARGSAPDHGYYASVKDRIDGKRAAISEARKIIRQAVHILAELGDGALAAA

SEQ ID NO: 217517 - protein, 467 aa, unidentified
MPRTLRRRTPHTRRAPLPKGRVPQLKQMHFHAAGIDVGATEHWVAVPADRDAPPVRRFGTFTADLYALAAWLTQCGIETVAMESTGVYWITLFEVLEERGFDVQLVNPQHLKQVPGRKTDVSDCRWLQELHTYGLLRGCFRPSDEVCVLRSYLRQRDSLITTAAQAVQHMQKALEQMNVKLTEVVSDITGETGMRIIRSIIAGEHDPQVLARHRDRRCKHDAETIAKALNGHWRQEHLFALTQAVAHDDFVQQQMGACDAQIAACVHAMLPSEELEEPPAPPGGRPRRHSKNAPAFNVWAYLYTLTGVDLTRIDGIDAVTALKVISEIGLDMTRWPSAKHFASWLGLCPGNKISGGKRLSSRSKPTANRVATALRVAAQSLARSHSALGAYYRRMRGRLGGPQAITATAYKLARLIYSLLRYGTEYVDAGQHVYEQQYRDRVLSNLQRKAHAFGYKLMRVEEAAAMP

SEQ ID NO: 217518 - protein, 338 aa, unidentified
MRVVGIDTHKASLAACLIDDVGLVVAEATFPNDPAGFVALLAWLREAGGVERIGLEGSAGYGAAAARFLLAAGEAALEVPPQLSHRERLRTRRAGKSDPGDALAIARVTLREADLPPVRLADASREIRLLVEARDDLVAEATRIRNRLHADLVVVVPGYGAAAANLVAAVHRTAAGRLLRRLPGVHAELARDRLARLERLSAEVRVLERRLEDLVADHPLRSLPGAGTLVTAKLIGEVGDVRRFRSADAFAMLAGVAPIPASSGQVSRMRLNRGGNRQINRALYSIAFAQVRTHPPAQAFMARKRAEGKSWREALRSLKRHLARIVFRLLSQATPVGA

SEQ ID NO: 217519 - protein, 454 aa, unidentified
MRPHVEEFDAEDNEEIVERVAAIDVAKASGTVCTRVPHASIPKRRVTRVWGVPATTNAILTLADELIAAGVERVVVESTSDYWRAFVYLFESAGLTTWLVNAHDVKQVPGRPKTDRVDAVWLAKLNERGMLRPSFIPPGEIRRLRDYTRLRSDLTEERSRHKQRVEKLLEDALIKLSTVATDIFGVSGRAMMDALIDGERDAVTLAKLAKGRLRPKHPELVQALNGRFDDHHAELARVLLDQVDSLTAKIDVLTSRIDDLIAKIPAAALPTTATPITDNPQDPASPSDPATPLPAIARLDEIPGVGLRAAQTIIAEIGLDMRQFPTANHLVSWAKLSPRTIQSGPKSRGGKTGKGNRYLKAVLGEVAVAAAKTDTFLGARYRRLVRRSGKQKALVAVARSILVVVWHLLNDPTARFNDLGSKYYDEHFNNDRKTRQLVQQLRALGHDVALTPAA

SEQ ID NO: 217520 - protein, 365 aa, unidentified
MPPVFIKSRPALNWTLHQEVGEMEGSQGSVVGVDTHKDSHSAALVDELGGLVASTDVGANQRGYVQLLEWARGRSSRRTWVVEGTGSYGAGLASFLARCGEVVYEGDRPQRRKRGAGGKSDQLDAIKVAREALAREHHAIPRRRGNREAIRVLLSTREGAVSASRQALNQLYALVVTAPEPIHEHLIRLKGEQLVTACLRLRSTAGDIETSVTTRALRQVARRIRSLQAEAADHEAQLESLVAEAVPALLSEPGVGAITAAQLLVSWSHAGRIRNENAFAAMAGVAPVPASSGRFVRHRLNRQGDRRLNRALHVVAVCRSSFHRPTKDYIARRTAEGKSTREIRRCLKRYLARRFFRLLQGLDNP

SEQ ID NO: 217521 - protein, 315 aa, unidentified
MTKQLPAVNVGADVGKSQLDLYLLERDRALTVPNEEQAIASLIRSLRRYRIERIVIEATGRLEQPFVRAALAQGLPVIVVSPLKIRRFAEAIGQLAKTDAIDARLIAQFAATVKPVARPPSDANAQAIKDLVVRRRQLITLRTMEKNRRQVMPQDLKSSIDRIIKTLDRELKRLEQLIDHAVDQHAPSRHKRELLTSMPSIGNSVATTLIGDLPELGSLNRREIASLTGVAPFNRDSGKLRGKRRIRGGRAHSRTALYLSAMVAIRFNPDIKRFYERLLAAGKHKKVALTACIRKIVTVLNAMIRDNSPWQPAMT

SEQ ID NO: 217522 - protein, 448 aa, unidentified
MNQIIRIGMDTSKHFFQLHGVDTAERPVLRRKLRRKEMAGFFAKLPPTEIGMEACGAAHYWGRVLRELGHTVKLIAPQHVKPYIKRNKNDGRDAEGICEAMSRPTMQFVPVKTEEQQAALMLVGMRERLVARRTQLSNAIRGYAAEFGLTAAKGLDKIEPLLAKIAADEALPVLARDLFAMHGREYVQLQAELKKIEARLMAWHRANTDSRRLAQIPGIGPVVATTLVMKAPDPRLFPSGRHFAAWIGLTPKDHSTAGKTRLGTITRAGDEMLRSVLVAGATAVNPAGAARPRPCIALAARTAGAQVVAEARSDSARQQDCSHRLEAVGDGGELSRGRQADRIGARRVKEIGGAAAFGLATSTGAGAARGDGRIDRSEVRDTPWDPLACKGRCDVWNSRRGKPSWPAVYDRINRPDIWMQAIRSDLQKNSCGTGAVHIWVPAFAGTTR

SEQ ID NO: 217523 - protein, 338 aa, unidentified
MELKRIAIDTSKHVFTIHGIDVNDRPVLRQELRRGRVETFIAKLPPTDVVLEACAGSHHWGRIFERLGHRASLIPPQYVKPFVKRGKNDRNDAEAISEAASRPTMRFVPVKGVEDQAAMLVVKHRQMLVAQRTQAINALRGHASEFGIVVAKGGQHVATLLTLLDENAAIPVVARAMFGEIGQHIADLDDKIAALDKQLLEQHKANPVSRLLAEIPGVGPITAITMALTVNPADFGSARHFAAWLGLTPREHSTGGKRRLGRISKAGNERLRQLLVVGATAVIRYARPGSKSASGWLLQLLDRKPPKVAAVALANKMARIIWAMMAHGEAYRRQPKAV

SEQ ID NO: 217524 - protein, 348 aa, unidentified
MTHFVGLDVSVKETAVCVVDEAGTVICEQKVPSEPDDIVTLLTSVGVDFGRIGIEAGPLSQWLVNGLAEAGLPVICVETRHMKSLLKAQQVNKSDRHDARGIAQMMRVGLFKPVHVKTLASQEQRMLLTARKLVQRKMLDVEGDLRGTLRNFGLKVGVISTGKFEVRINELVEGLPRLAAIVTPLLTIRRVMRQEFARLHKMLLDAVRHDPICGRLMTAPGVGAVVALTYRATIDQPQRFIHSRAVGAHVGLTPRRHQSGEIDYDGGISKSGDAMLRTILYEAAQVLLTQSRHWSWLKAWGTRVAQRRGMRRAIIAVARRLAVVLHRMWVDGTDFRWGSEPAATVAAA

SEQ ID NO: 217525 - protein, 342 aa, unidentified
MLRVNVRQRSATVKDAVRYDHFVAIDWSLKTMAIAHASRRDQIPRVFERPTDLKELKTYLGSLRGRTIITFEESGPAHWLYLELLDHADRILICDPFQNRLLFHGAKTDKIDARKLCELLCARLLKEVYHSDSALYELRLLASAYDDVVRSGIRLLNQKAALTLGHRDEGKSAAFIDVILRENIELYRRNKEQYERRFHDLAKHNKLVRWQREIDGIGTIGAVKIVACVVDARRFPTSGKYLSYCGLVKHEKLSGGRSYGRRKPRYSRVLKSVYKTAALAVLKGHNPIRSYYDVLLAQGVAEHNARHAVARYIARISYGMLKNGTRYDPDIIGRKDTNGKSV

SEQ ID NO: 217526 - protein, 344 aa, unidentified
MSNLDTCGIEVSAQELVLMLRRQGDLEPLRNFTNTPEGREMVVRYLRQAGRGVRVCMESTGLYGLDLALALSGQEGIEVMVANPRAVRHFANALMQRSKSDPLDAAVLEEFAARMPFQAWQRPSSAALALHALARRLRELVEIQTAEKNRQHAAGLSQTTPSAVRRDLARSLRAQERAIERLTRQARKLIAQDPQLAERFELLDSVPGIGQTSAVQLLGELAVLAPDLEARQWVAYAGLDPRQYTSGSSVHKKTRISKAGNKYLRHSLFMPALVAVQHDPYLGAFYQHLLAKGKLKMQALVAVMRKLLHALHAMFKNHQPYDGSKLFRLKADAPQEVTRALVAS

SEQ ID NO: 217527 - protein, 459 aa, unidentified
MEKAIGIDPDSKGYVCCLVEGAEGRTVGKAYSTICRDLDGLIRWVKSKGEVIVAIEGTNGFSRPVEQALRTENIVFYSLRPSDVCKFRKVVLGRNKNNEKDAESVARYALALRSQGKLQQFRRVFFPDESLRLLTRSYERKSKELTAEINRMWKTLRLASPDLYLALGGMNPEVEIADNVLQQKGILSLLEQKPDLYEWRNLSTEEFRAAMGGGNYRGRPKLIEELKKLSDSFSPTESGVSFLIKSSAQTILQLKSHLSEMKKMMSEITAENPAVRILQQIRGISVITSSTLVAEIIDIRRFANDDHLASYSGLGRSEHSSGDRSKTIPNPQFNHRLKDIFMTAAKNFVLFNPDAHLSGYFGYLVHKKGMKANEAYKRVARALVRIVFKMLGALVEEGSEEEERSESDMASGSDFRSDISHESNISLSAPIEDDIEEKRKIKREKIKIKHEEILLVEKK

SEQ ID NO: 217528 - protein, 344 aa, unidentified
MITIGIDPHKSSLTAVAVTPNGQTHPPIRLVVDKATPAALLTWAAQWPERQWAVEGATGLGRNIAQQLVTAGELVLDVPAKLAARARLLGSSSARKTDVADAISVAAVALHNRRLNRVQVEDHTTIMRLLTERREDLVAEHTRWINRLHVLLRDLHPGGAEVRLDTADASALLAKIRPVTAADRQRKQIARDVVRDLKRHEASIKELEKQLRAAVASSGTTLTQIQGIGFLTAAKILALTGNIKRFPNQEHYASYTGTAPIDVSSGEQETHRLSRRGNRQLNAAIHVAAITQARDPGPGRDHYRRKIAEHKTVKEARRSLKRRISNAIYRRILADQQRLQLQAA

SEQ ID NO: 217529 - protein, 331 aa, unidentified
MMSLPNRTNETPLTVGVDVSKATLEVGFSDRDVTLAPANDEAGHAALLAHLAALRAKGSEIGLIVLEATGGLELDVATALQLAGYAVVIINPRQARDFARSMGFLAKTDRIDARVLAHMGQTLLQRDDLRKLIKPLPDEGQRMLQALVTRRRQLLAMRIAEQQRASGPDRRMRRSLNIILKALDRELARLDKDMQAFIGEHHAKLAALLNEVKGVGKATISTLLAEVPELGELNGREVSALVGVAPINRDSGTMRGKRTIFGGRPSVRKVLFMAALVASRHNPVIKAFYQRLLAAGKPKKLALTACARKLLTILNAMARTRKPFNAALHLD

SEQ ID NO: 217530 - protein, 373 aa, unidentified
MNYSTLFVGMDVHKETFTLCCYDMEDDKVFHTQKVESDYMLVLKYLNAVRSSVGQDVQFLCGYEAGCIGYTLYRQLTRYGVNCVILAPTTMMKKAGKKTIKTDKRDAANIAKCLAYHTYSPVHIPTEQDEQVKEYLRMRDDHKLALKKVKQQILAFCLRHGFTYTGSKNHWTAAHIAWLKALKPEGLYGEILSEYLLTYQTLSDKLERLDARIEELAADPAYFKAVKKLCCFLGIKTHTALSTIVEVGDFQRFSSAERFSSYLGLVPGESSSGESQTRLGITKAGNCHVRTLLIETAQCFGRGQIGHKSIALKKRQEGNTPEVIAYADRANERLRRRYYKMVLSKSKRSNVAKTAIARELACFIWGMMTGNIA

SEQ ID NO: 217531 - protein, 459 aa, unidentified
MSRIKTGKKNCSRSQTDQAPPTSTPPQPRFVGVDLHKQIATFHTMAEDGKTLEQGRFDVNPEAILKFANEKLQAADSVAVEVTSNTWAFVRLIRSHVDKVVVSNPMKTKAIAEASVKTDKVDAKVLAHLLRCNYLPSVWTPTETIENSRALAARRTALVGQRTALRNRIHSVLARRLVVVPAGGPFTQAGLTWLQELSLDPVDRTLIDTDLRLLEGIAQEMQEIEHLIVKESYDDPDIRLLMTLPGLDFTIAQALKACLADISRFPNPDKAASYLGLTPRIKQSAGKCYHGSITKAGSSQTRWLLIQAAQSVGRTPGPLGAFFRKLEKKKNRNIAVVATARKLVTIAWHMLKNKEPYRYAVPRTTENKLGTLRVRATGEKRKGGSPKGPKPEPRFENSDSRRIPSLDEIYTREDVPGRRPLSEGEKRMIQEAGVENFVAELGQTRIVPRKKRVPASTAQ

SEQ ID NO: 217532 - protein, 355 aa, unidentified
MNQEKYIGMDVHDASISAAVKNAQGKLLMECVLESKAVTILEFIQGLRGTLALTFEEGTMAAWLHDLLKPHVSRLVVCDSRKNALLRDGSQNDRADARNLAELLRTNQVHAVYHGQHGTRALKELGRSYLTLTQDSTRVMNRIKSVYRSWAIPCAGTSVYSRRHRAEWLAQLVEPGVRMRAEHLYQQLDSLQPVRQAARRELLRESRKHAAVKLLRQIPAIGPIRSALLVALLQTPHRFRTKRQLWAYSGFAVQTYDSGEFRFVRGKLQRNRERITVRGLNRNHNHDVKNLLKGAAISALQRPGPLQDFYAALVEKGMRPSMARLTLARKIAAITLTMWKKGVSFDPKQLQRPAA

SEQ ID NO: 217533 - protein, 319 aa, unidentified
MGKSNIEFEQVIDRGCGLDVHRDTVVATVMGKGIKTETRTFGTTTSSLNELGIWLESLGVTNGAMESTGIYWKPVLHVLRTYPLDLIVVNARHIKNVPGRKTDKADSQWICKLLISGLLKGSFIPPENIQELRDLHRYKKKLIGTVASEKNRIIRVLEDANIKLSSVVSDTSGITASYLIKGLTEGRKDLEKLIAECYHRKLQASPGQIKEAINGRLTAHHAFILKSMQKHIASVEERIAEIDVEIEKYIKDFEKEIELLQTIPGVGKEGAIGIVAEIGVDMDVFPSEHHLASHSGMCPGNNESAGKKKVQEHDRGTNI

SEQ ID NO: 217534 - protein, 416 aa, unidentified
METLVERGCGLDVHQATVVACLLVVCQDGKVQKQLRTFATTTRELLSLRQWLGSEGCTHVAMASTGVYWKPIYAVLEGEELEIIVANAQPVKKVPGRKTDVKDAEWLAEWLCHGLLRSSFIPPVPIRELRDLTRYRRKLVEARWAERNRLLKLLESANIKLASVATDVFGVSGRRMLEALIEGTANLSEMAQLAKGKLRNKIPQLELALEGRLQEHHGFLLRLQQNRLDAMEADLAVLEQRIQQRLQPYASQVALLQEIPGVELTLATVIIAELGVDMTVFQSVSQMASWAGVCPGNNESAGKRKSSRIPKGNVYLKTALVEAANAAARAKGTYLRDKFYRLKARRGYKRAVVAIAHKILVSIYHMLSQNVSYNDLGDLYLDRLNAHPLTRNLVHRLERLGFQVTLTPQQNTAHAA

SEQ ID NO: 217535 - protein, 357 aa, unidentified
MLGMQFNHNIIPADYHVFGGLDVDKKHIVATFMDHQQAAKSTHMPYDADHLIHFVQKHFPNQKIAFAYEAGPTGYGLYDQLTKSGYPCLVAAPSMIPIAPGQRVKTNRLDSKRIAEMLRGGHLRSIHVPTPPYRQLRHLVQLRDTFVKQAVAHKCRIKALFLMEGLQFPSSRAPWTKSVLSQLAELPCDPTIRFKLDSLLAGLSFAQQQVLQTQKEIRRYCQHDPELSQCIQHLTTIPGIGRIVASHLLARIGDWRLIDNVRQLSSFLGLIPRENSTGDRIHRGSITHSGDGRLRTKLVQSAWISIYKDPEMTEFYNRIRQRHPVDQAARKAIVAVANKLTKRIYSVLKQQRPYVVR

SEQ ID NO: 217536 - protein, 338 aa, unidentified
MSFYLGLDVSDKTTHLCAVDADGQVCWRGVCATDPEAIAGAIERHCSPVTRVILETGSLSPFLYHGLIERGVPVVCICARHAKGVLSARTNKSDVHDAEGLAQLARTGWFKAVHIKGSATHLDRAHLKIREQLIKAHHAMAGQLRGLLKLFGLRLGKATTPGKRAERLEALLAMKPALRQVLAPLVASLAALEEQIAASSRSLKARAAADPVAARLMSVPGVGPITALTYLSSIEDPGRFVRGRNAGAYAGLVPRRYQSGERDTKGRISKAGDPMLRSALYEAANNLLARVKRPSALQAWGKALAATKGPKRARVAVARKLAILLHRLWQSGTSFQWA

SEQ ID NO: 217537 - protein, 389 aa, unidentified
MFYVGIDIAKFKHDCFICSDTGEIICENLTFKNNLEGFNQLLSTLNSLDDYESIRIGFESTGHYALNLKLFLEKAHYSFMEFNPVLLSKFIHSQTLRKTKSDAIDSASIARYLMTVEYKPSTIGFYHMYSLKSLTRLRSSLIRQRSFYLVKITNVLDHTFPEFKPFFNNKFSKTALYLLTYYGSASKIASMKHTSYDKLRRVSRGKFTIAKFFELKSLAINTVGVSNAIFDLELSSLLNLYQNLCSEIKLLEEQINELVSSLNCPTLTIPGIGSSSAAIIISEFGDISRFKSADSMLSFAGLEPAYYQSGESEYTGHMVKRGSSNLRYALMTVCIPLIKHNIVFAAYYNKKRLEGKSHRVALSHVAKKLIRIIYTLETRNITFDPEKIC

SEQ ID NO: 217538 - protein, 429 aa, unidentified
MQNESIPDARGPVFCGVDTHADSHWLCVLDWRGRKVLSRQFPADAAGYEALAGAIAAAGEPACVAMEGTSSYGAGLTRHLASLGMPVREALSPARTQRRRPGQGKCDEADAERAARAAMSGSRLGTPKSQDGWVDGVRCMLAARSGAVKARTSAINTARSLLTTAPEGLRSRFRGMAGPRLMEELPSVRAEGALGAALGALADLWAAARDAALDMERAIEASLEENCPALLAMYGCGPVSAAKLAVAAGDNPGRLRSEASFAAICGACPIPASSGKTVRHRLNRGGDRQANSALHEIARQRVMRDPETAEYAERARARGKSDREVMRCLKRYVAREAYRALMRPHEVRRPEDASGLVAARRAARVSQVRAASILGTSEKYISMLERGQRELKPIRRAYEAWVEAGLPLDWDRQAFEAERKMDSKKHLAK

SEQ ID NO: 217539 - protein, 428 aa, unidentified
MDQRARKLDIVRAEHTLVVGVDIAKHKHWARVMDGLNGIQVGNAFSFQNTREGFERLLGIVVRAQKATGATKVVVAMEPTGHYWKPLAWYLKKAGITVVLVNPYHVKRYKEFDDNSPSKNDRKDAWVIARLANEASFFEVYLPEGVYAELRGLTQARQQQRNKSNMALNQIRCLLDEYFPEYEDVFTDILGKASLYVLGHRPFPGDILAVSAEELAEELKLASNRRVGLKRALRLQEAARDSVGVTEGLEAARLRLKQLLEEARFWRARLAETESAMADALQRTGLAKYLLSVPGIGVVLAASFLGEIGDPGRYQDSRQIRKLAGLNVVEDSSGQKKGRTEISKRGRPGLRSVLYQMAMTMASKNIQFRALYRYFISRRENPLKPKQALIALGCKLVRVLWTLMKEKRLWDPDRVLGAWRAEQLALAA

SEQ ID NO: 217540 - protein, 341 aa, unidentified
MTVLDADGHLLESRKLGTGRWELLEYFGKVPKPAALAVEATFNWYYFLNVVEPLGVELHLVHPWKTRAIASARIKHDKLDSRVLAELLRTGFLAEAWIAPRAVRERRQLLRYRVHTVQWATRAKNGIHAILNRNGIRSPLRSPFGAQGRQFLEGVELTRPDRWEVDGQLARLDLLGGQLRELDGEIRKRTKAIPVAQALQEIPGIGPFIAWLLIAEIGDIRRFPTAKHLASYTGLVPSLYASGEHRWGGAITKQGSSVLRWGLVQAAHRAALSPRFQDYYQRHRQRHGAGKATVALARKLAVIAYYRWRQALKTAELPKVEQVRERSCAGAWSEDRPLTSD

SEQ ID NO: 217541 - protein, 316 aa, unidentified
MEKAGIYVGIDVSKDRLDIAVHSTNKRWSFTNDEKGIEQTVDCLKELSPAIVVLEATGGIELPVAASLGAAGVPVAIVNPRQARDFGKATGKLAKTDALDAKVLAHFAAAIHPAPQALPDATAQGFTAIVTRRRQLVEMLTAEKNRSRTALKPVRERIRMHISWLEQELDNSNRDLDQAIRESPIWREKDDLLKSVPGVGPVLSSTLLAQLPELGTLNRKQIAALVGVAPLNHDSGKLRGKRSVWGGRASVRAALYMATLVATRHNPVIKAFYNRLCATGKPKKVALTACMRKLLTILNAMVSNRTRWFPVCPANS

SEQ ID NO: 217542 - protein, 468 aa, unidentified
MLDQHKKVNKNDRTRSLRSFKTIEPNAAGIDLGSREHWVAGPPRDDDRPNVARFGTTTPELVRLADWLKEQGVKTVAMESTGVYWVPLFEILDSRGFKVVLANARQLRHVPGRKTDMIDCQWLQLLHACGLLRGSFRPSDDICRLRSLIRERNMMVSQRSDWVRRMQKGLDQMNVCVHHAVSDITGATGMAIIRAIVEGERDPQVLARLRDPRCRKTEEQIAEELTGNWRPEHLFNLSQSLRMYDQLCSVIDDYDREIITYISTLHPEEAKDIIVPPPVSMNKAKNIVKLGQESLRQALCRLCGFDLTTIDGIGVDTASILVSELGPRFAMFPDEKHFVSYLRLSPNLSISAGKKVPDKHKASTCTRIGSALRMAASTLRKSRSALGAYYRNVAWRKGASVAVFATARKLAQLVYRLVRYGQDYIDTGVQAYEERVNQRRLKFYSKTLKAMGYNVEPAASGKELPALC

SEQ ID NO: 217543 - protein, 408 aa, unidentified
MEILYSRCAGLDVHKETVMVCVLTPGAGAEPRKQVRQYQTTTAQLRQLAAWLQQCGVTHAAMEATGVYWKPVFNVLEPACELILVNARQVRQVPGRKTDKADCEWLASLLRHGLLQASFVPPRAVRELRDLCRMRASLVRECVQIGNRLRKVLEDANIKLDSVASDALGISGRDMIRALIEGEQDPAALAQLARGRLRSKKAALEEALEGQVREHHRFLMGQWMKLLRALEEQVAEVAREIERRMEGFAWAAELLMSVPGVDRTAACALIGEIGADMSRFPSSRHLASWAGLCPGNRQSAGHNRSGRSHRGNPWIKALAVQIAWAASRSKNTYCAALYRRLAPHRGKKRALIAVANSLLQAVWFILTRRQSYRDLGGDYFEQLHRERTTQSLVRRLERIGYRVALEPA

SEQ ID NO: 217544 - protein, 411 aa, unidentified
METVIERPGALDVHKQQVTACVRTPAARGRREQHIAEFKTTVQGLLALRDWLKAHGVTHVVMEASGVYWKPPWAILEDEFECLLVNARHVKQVPGRKTDVSDAAWLCQLLEAGLLNASFVPPKPIRTLRNLTRYRKAQIGERQREANRLHKILEDTGIKLDCVASDILGASGRAMLDALVAGTTDPTVLADLAKGKLRAKIPALREALEGRFDAEHAIVVGAILAHIDYLDEAIDGLSDAIEEQIRPFAPAVELLCTIPGVQRRTAEVIVAEIGADMSVFPTAGQLASWAGLCPGNDQSAGKRRSGRTRKGSKWLSIALTEAAQANTRSRDSYLSAQYRRLKVRRGHRRAIGAVKHSIIVAAWHMLTTGETYREAGSDYFTRLDPDKQTRRLVAQLERLGHAVTLTERAAA

SEQ ID NO: 217545 - protein, 326 aa, unidentified
MFYLGIDVSKAKFDCCLFLDDSSGKIKTKCFSNSNKGFHQLLSWLNRFGLVAEETRALMEATSVYHELLAQFLFDLKFQVCVANPARTRYFAHSISKLHKTDKIDSEVLARFAMTVDLHLWQPTPDNIRLLNALLDRRSSLANDLKREQNRLEKANSTLIVVPILKSIKTNIKSLTRQIQNLDTQIQNHIDQDHELKRDQKLLESIPAIAERTSLLMLVFLRAHSFEKASQAAAFVGLVPIHRQSGSSVLGKSRLSKAGSPKIRSGLYMAAIVATRYNPHIKELSERLLAKGKTKMVAIAAAMRKLIHLCYGVLKNQQPYQANYKA

SEQ ID NO: 217546 - protein, 339 aa, unidentified
MNRIVVGVDIAKRVFQLHWVEPQTGEIVALQLKREKFLEHFANRSSCLIGMEACGGSQHWARSLQKLGHEVRLLSGRMVKPFVGGNKNDAADARAIWTAMQQPGIKTVAVKSEEQQAVLALHRMREQLVKFRTAQINGLRGLLTEYGEVMPQGRAGIKRDIPGALGRLSDRLPAIVIETLREQYARLSELDEQVGQIERRLRQWQREDSATMRIAAIPGVGLLSATAAVATMGDAKAFKSGREFAAWLGLVPRQTGTGGRVRLLGISKRGDKYLRTLLIHGARSVLTHSKSPPEWVTELVKRRPKNVAVVAMSNKMARTIWALTAHERAYQSGYVSRPV

SEQ ID NO: 217547 - protein, 407 aa, unidentified
MDLLKTVFGIDVSSRKSNVCIMVNGQKVNDYAISNDMVGFNQLLGDLKQVTNPQIIFEATGVYSRRLQAFLDMHELRYVMMNPLEAKRKTKDDLHQNKTDKLDAFYLAKLQSEHPQRLAYVQSEEYQELMANNRIYEQASHDLITNRNRLHKAIQLTFPEIEHLMVNPRGKNYWSIVLRFPHPDILLETKEADIIDFLKGLSGIGKKRANDIAQSLIRLAKVACPAVKKNSAHIRGLKMAINNILNAEEECQTALQEMAKLAPKRDLEIHTSIPGIGENTALRIISELGDIRRFNNPSQLNAFVGVDPQVYESGNLTAHLSISKRGTAIGRKVLYLAINQIQSAKKVGNPCHIADYYEKRKRSSETASHKKAAIASIHKLLRTIFALIKNDQLYSYDVAKHNQRLLS

SEQ ID NO: 217548 - protein, 408 aa, unidentified
MNPLFVGIDVSSKNNVAYLMKPDGSKHSSFSVQNNLGGAKLLSERIVSALSSMRLSDVVIGLEATSIYGDNLVYALREDGGLGRFRRKIHVLNPKQVKKFKEAYPDLPKNDWVDAFVIADHLRFGRIAKEVYMDDYRYQALRTLTRARFDVIQNLTREKQRFANYLFLKCSGMAPDKGIQNTSATTIALMERFETVDNLANADLDDLTAFVAETGRGRFADPESTAKAVQAAARGSYRLPKTVNDTVNQAMAVSIASMRARKEQVKVLDKAIEQQFEIIPNTLTSIPGVGKVYSAGIIAEIGDIHRFASQASVAKFAGLVWTQHQSGEFEAEHSRMIKSGNRYLRYYLLEAANSVRRCDSEFRRYYDLKFKEVNKYQHKRALALTARKLVRLVFRLLKDNRLYIPPEG

SEQ ID NO: 217549 - protein, 314 aa, unidentified
MDREFKAVGIDVSKAHLDVAVMPGGEQWRVANSAKDHEVLVDRLKELGPDVIVLEATGGWETALMAALGASELPVVRMNPRRVREFAKAIGRLAKTDAIDATVLALFGQAVRPTPRPLKGAETQELEALVTRRRQLLEMLVQEKNRLSIAPKRIRKDIDGLIAELERRLQHLNQDLDKAVKASPLWRTNDELMQSVPGVGPVLTRSVLGGLVEIGILNRRQISALVGVAPFNRDSGEQKGRRVIWGGRREIRRALYMATFSAIRCNPVIAAYYQRLRAMGKKFKVAMVACMRKLLVILNAIMRDKTPWRSPQPA

SEQ ID NO: 217550 - protein, 389 aa, unidentified
MEARTVNNPPPAAPHDDAVRCVLAIELSKKSWIVAVNTPSSEKISRYTLEACDWKELLKLCERIRTRIARELKKDVELVSCYEAGYDGFWLHRLLEAHGIRNYVIDPASLQVDRRARRAKTDRVDVERLLRSLMAYLRGEPKVWSVVYVPSVAEEDDRRLHRERGRLINERIQHVNRIKGLLAIHGIYDYPPLRHDRMQRLERLRTADGRILSPRLKAEILRELQRLELVIGMIKTIEAERDAIASAKIETEHSSAKRIQDLAKIKCIGPEFATTLVGEVFYRSFDNRKQLASYVGLTPAHFQSGETCRDQGISKAGNAKARRVMIELAWLWLRHQPASPLSVWFHDRVGKLKGRIRRITIVAVARKLLIALWRYLETGLAPEAAILKV

SEQ ID NO: 217551 - protein, 406 aa, unidentified
MELTPIYKRVIGLDVHQAKISACAIAELPDGTLTVEQREFGGFKRDRRALADWARAFGPEVVVMESTGIYWKSPYAALEAVGITAWVVNARHVKTVPGRKTDVADAQWLATLARSGLLHASFIPPANIRHLRLIARQRQKLGGMLASEKNRLHKLLADAGIRLGVVVSDIHGQAGRAMVKALIEGKPMSEILDLAGRLRASRAELFEALQPEELSSSHRFVLTEIMAHIEELEERMVRFEHELLRGLTTWRPQLALLQTIPGIDLMGAAMLLVEISAEMDSFGSAEKLASWVGICPGNNESAGKRKSGKTRKGNAWVRRLLCEFAQAAARSRCALKDKFAALSIRKGHKKSIVALAHKMLRIVFSILKNNTPYHDKVVDYEALSVQRNAPRWIKMLVKHGFIPANA

SEQ ID NO: 217552 - protein, 388 aa, unidentified
MQIVADRAAAPTAIQTDLRAIFVSLELSRSTWLITSLSPGGGEKMSKHSVQAGDIAGLLRRFAQLKEKARARTGRDFPIITIQEAGLDGFWIHRVLQSEGIESHVVDPASIATSRRRRRAKTDKIDGETLVRTLLAYKRGEPRVCAMVKVPTPEEEDSRRLCRERKVLTAERVLHVNRIKGMLFCQGISGYEPLRRDRHERLEELRTGDGRPLPPHLKAQVNRELDRLELLLKQIKAVEAERDALLVAAHTPAAVPASMLLNIKGIGPEFAAVLWSEGLFRHFDNRRQVAAYAGLAPTPWQSGAVDREQGVSKAGNPRLRTTLIQLAWLWLRNQPHSALTLWFHERVNRNGGRLRKTTIVALARKLLVALWKYVTAGVVIEGAAMTTA

SEQ ID NO: 217553 - protein, 461 aa, unidentified
MAKRKQKSQIQVKQLDVLQQLNLNAAGLDIGASEIYACVPAGRDEQSVRVFETFTVDLYALADWLAACDIDTVAMESTGIYWIPIYEILEARGFNVHLVNARHLKNVPGKKTDVLDCQWIQQLHTYGLLRASFRPPDDICALRALVRHRDNLIRFRSAHIQHMQKALKLMNVQLTQVISDITGVTGLRIIRSIVAGERDPHVLARLRNSRCAKSEAEIAKALQGNYRLEHLFVLKQALAQYDFYQQQIQECDAELEALYASLASQEQDNQEAAPPKPKRSKPRKNQPHFDLATSLYHVVGIDLTAVDGIDALTAQTIISEIGLDMSKWPSVKHFASWLGLAPHNDKSGGKILRSRTKKTQNQANTAFRIAAQSLSRSQSASGAFYRRMRAKHGPAKANVATAHKLARIVYHMLKYRKAYVDPGEAHYEQQYRERTIRNLERRAAKLGLQLLPTAEEASVVS

SEQ ID NO: 217554 - protein, 351 aa, unidentified
MPRASTVHAVIAIGIDLGKNTLHMIGLDSSGAIVLREKVSRGRIASRLANLPPCLIGIEAGMATHYVARELTALGHDVKQVPATYAKPFRQGHKNDFRDAHAVAEAVQRPTTRFVPAKTDEQLDLQALHRVRSRLVSERTAVINQIRGFLLERGVIVRQGLRFLRQLLPDILAKRADVLSPRMVRIVTELAGDWRRLDERIETVTDEIEALAKSDDSCRRVMTVPGIGPIISSAMVAAIGNGVAFARGRDFSAWLGLVPKQMSTGDRTILGRISKRGNGYLRMLFMQAARVILLRPANWPKHGFGAWLARAAQRLHPNVLAAALANKLARIAWTVLAQERSYESRVKKAAA

SEQ ID NO: 217555 - protein, 402 aa, unidentified
MNAVGIDVSKGKSMVAIMRPFGEIVSTPFEIKHTTSDIHSLVELINSLEGESRIVMEHTGRYYEVLAHQLSEANLFVSAINPKLIKDFDNDSLRKVKSDKADAVKIARYALDKWQNLKQYSVMDELRNQLKTMNRQFGFYMKHKTAMKNNLIGILDQTYPGVNTYFDSPARSDGSQKWVDFASTYWHVDCVRKMSKNAFIDHYQNWCNRKKYNFSQSKAEEIYGKAKELVPVLPKDDITKLIIKQAVDQLNSASATVESLRTLMNETASKLPEYPVVMDMKGVGPSLGPQLMAEIGDVTRFTHKGAITAFAGVDPGVNESGTYEQKSVPTSKRGSSDLRKTLFQVMDVLIKTKPQDDPVYQFLDKKRAQGKPYYVYMTAGANKFLRIYYGRVKEYLASLPES

SEQ ID NO: 217556 - protein, 342 aa, unidentified
MAIVGGIDIHRAQLTFDYVDLDSGEVFRGRIAPADRAQLRQWLDRFIERTDVAFALEGCTGWRYVVEELHRAGITAHVAEPAETAARRGPKRRAKTDRSDAQLLRDLLLEGRIPESWIPPQPVLEARALVRLYKDLLDERTGWLQRVHASMFQMGVPDLDVSTMSAAGRDRITAAELSVATRTAVDVAMRQVDRLTAEMTMVREQIHAIGRRQPACRALQAAHYGIGPLTSVVIWAEMGDTRRFRSSDDAVRHAGLDVTVYSSDGRRSAGHLARQGPPMLRWALYEAAVYAGRPSSPDHAYFQQVKARLDGQLALLSMARKLARRCHHTLRNLDDQVLAPAA

SEQ ID NO: 217557 - protein, 355 aa, unidentified
MKETANQYVALDVHQATLVVSVREENGSVRMRATVPTEQKAIVDLLRGLSGRIHVAFEEGTQSQWLHDVIKPHAERVVVCNLRGQSETTNKSDRLDADRLSELLRLGSLKAVYHGASELTTVKELMRSYVNLVEDSTRVMLRIKALFRARAIKTPGAAVYSPAQRKEWLVKLENRGARARAASLYEELDVLQELRPKAKAAMIAEARRQSGWKTLLSIPFLGPIRVSTILAIIATPWRFRTKRQLWSYVGLAVVTRSSADEEFVDGKLRRRKRGPITRGLNRNHNPRLKEVFKGAANAAACTPGPLKEKYEKSVAGGVREEMARLTLARTITAIALRLWKKGELWDPSKLTMQGT

SEQ ID NO: 217558 - protein, 377 aa, unidentified
MKRIKFVGLDVHAETIAVAVAEQGGEVRPLGVIPNRVESIRKLVKKLGPVEQLRFCYEAGPTGYVVYWQLTALGTKCEVVAPTLVPVKSGERVKTDRRDALKLARNYRAGELTPVWVPDAAHEALRDLVRAREAAKKDQLRAKHRLGKFLLRHGRRPPTGVKPWTLNYLSWVKHEVHFEQLAQEATLLDYLHEVEHAEGRIARLDLAIEEAVKLTPPQMRAVIEALQALRGVAQVAAVTIVAELGEVSRFTGARQLMGYGGIVASEHTSGESSWRGGITKTGNAHLRRVVVEAAWAYRHRPSVGKSLQKRQEAVSEEIREIAWKAQHRLHTRYRKLMARGKEKEKVVTAIGRELLGFMWAIGVKAEAAQKKTERLAA

SEQ ID NO: 217559 - protein, 371 aa, unidentified
MSIVMGVDQHRAQVTAEWIDLSTGEISRARVSPADRVGVRRFLERFAGEQLEVALEATTGWRFLVEELRAVGAVVHLAEPAETAARRGPKRRAKTDRGDARHHRELLLAGRLPESWIPPDHILDLRAQVRLRHTLIEQHSEWQQRIQAVLYHHGCPQRRQLMKRDGRDWLASLALPAVACQQLTVSLQMTDALDVLLAPLTKELRDYARRQTGCRALVDRYYGIGELCAVTILAELGDCRRFQNSRDAVRYGGMDITVFQSDRRRAPGRLSRQGPPALRWALYEAAHAARRPGSPDRDYYVQAAERLGGNRACLALARKLLKRCYHTLRELGDDALAEPSAGSGAARRASSSSTSRAEGATNLERADALAA

SEQ ID NO: 217560 - protein, 350 aa, unidentified
MRRPKDTLIAGIDLHSNNLMIGVINQDGKRVAYRKLDCDLKQVVEFLEPFKPQLRSMAVESTFNWYWLVDGLRDRGYGIDLANPTKIQTYSGLKHVDDHDDAFHLAELQRLNILPKAHVYDPHLRPVRDLLRRRTNLVHQRTALLLSFKSLYARTTGQRLDLSDAKKMEPKAASKLYEHPANQLIAHVQLEHIQGLDRSVDRIEKAVLACAREIPLYEKLLTMPGVGRILGMTITMEVGEIGRFKTDGDFASYCRMVDAQRLSNDKKKGDNNQKCGNKYLSWAFVEAANFARRYDEPCRRWYDRKAAKTSKVVATKALGCKLAKAAWHVMARKCDYDPQRMFAGLTMKKN

SEQ ID NO: 217561 - protein, 345 aa, unidentified
MITIGVDPHKSSHTAVAVDETGQVLGERRVPADKATLRRLRRWAEHWPERTWAIEGANGLGHLLAQQLVAAGEIVVDVPAMLAARARQLDRGHGRKTDGIDAQTVAAVAQRRPDLRRVAPEDHAGVLRLLSDRRDELTAERRRVINRLHRLLRDLRPGGAPIALSAAMAARLLATIRPQSAADLERKAMARQLVADLRRLDRALANNRRRCAAAVAACGTSLTSVFGISEVLAAKILGHTGDIARFGTADRFASYTGTAPVSVSSGELTRHRLARSGNRSLNNALHLAARVQIMHSGPGQDHYTRKLAEHKSSTEALRSLKRQLAKVVYRHMVADHARRLEPFLT

SEQ ID NO: 217562 - protein, 351 aa, unidentified
MVVVIGVDVHKRSHTFVAVDEVGRQLGQLLAAATGAGHAQAVAWAASSFPGERTFGVEDCRSWTLRLERDLLDAGERVVRVPPKLMAAARRGARQPGKSDPIDALAVARAVLREPDLPVAGHDPVSWELKQLVGRRDQLVAERVQEINRLRMRLHQLDPAAEPPNGTLDQVGVQTAVGAWLAGRDGVDAEIARDILADVIALTVRIKAWTKRIKTAVRAAAPQLLDLPGVAELTAAKIVAETAGISRFRTEAAYAMHNGTAPIPASSGATSGKVRLNRGGNRQLNAALHRIAVSQVRHGGPGRDYYQRRLLLGDKKRHALRALKRQLSRVVFRLLHAPAAATESAPTAVAA

SEQ ID NO: 217563 - protein, 422 aa, unidentified
MTYLTDNAFTAYVAIDWADAKHDICVQAAGGQQREFDCISHQVDQIEQWAQSLHKRFGGTIAIALELSKGPVVYALQKYDFFVIFPVNPSMLAKYREAFTPSRAKDDPTDAEFILDLLVRHSERFTPLNPQSVEMRTLACLVEHRRNLVDDKTRITNRLRSTLKQYYPQMLEWFKHVDTVMVCDFITRWPTLKQLKRARKSTLEKFFHEHNMRFSHILDARLESIKAAKPLTLDAAVVTPYSLQALVLTDQLRGSLQAIRRYDDEIAELAPKHPDYDLFSALPGAGPSLAPRLLVAFGEQRDRFDSAAALQKYAGIAPVTERSGKKHWVHWRWQCSTFLRQTFVEWAAQTINKSFWAGAYYHQQRDKGCRHQAAIRALAFKWIRILYRCWQTRTLYNESVYLKALKRRGSPLLKSATTVQMT

SEQ ID NO: 217564 - protein, 429 aa, unidentified
MRSIALDVHRDFCEVAIKDESGLRLAGRVRTSPADLELFAQSLAADDQVALEATGPARAIARVLEPHVGRVVVANTRKLRAIAESKVKTDKLDASTLCELLAAGFLPAVWSPDEFTRALRRRLQRRAKLVRSRTRAKNECHAVLARNLKGRPPMTDVFGKAGRRWLASLELPADEHDTVEGCLREVDFLDSEVGLIERELAAEALSSPEIRRLMTVPGVSLVSAAAFVAAVGDIHRFPSPKKLVSYVGLDPRVRQSGEAPARHGRISKQGSAEARHMLCEAAWVLVRTPGPLRAFYERVRARRGAQIALVATARKLSVLFWHLLAREEDYAFERPSLTRRKLRALELKTKEAWRHGRYSGPRVHETKGDREREAEFAEQVETAYRRLVADWQPKPSRTGAGATRGRASPSHLLDEETAARQGSAPEPAL

SEQ ID NO: 217565 - protein, 347 aa, unidentified
MTQAQIYIYGIDLGKNWFHLVAMDRMGHVLTKQKLTRSQLKQFISTTPPCRVAFEACPGSQYWGHLFQQAGFEPKIIPAQFVKPYLKSNKNDFNDATAIAEAGSRGTMRCVPLKSHEQLALQATHRVRQRFIVERTATVNQMRALLLEYGLTVPVGRKVFERSLPTILEDAENGLPDFIRALVLRLRERWQQLDIQIDDMSLMLGQASSTSSLCQKISTVPGIGPIVSTALIAAIGNGSQFKKARDLSAWLGLVPRQYSTGGKSSLGGISKRGNSYLRQMVIQGAKALKIHMKRDKSSLGEWVARLEVGHHNHVILIALANKIMRICWKVLTSGRDYQPYPNTSSAV

SEQ ID NO: 217566 - protein, 460 aa, unidentified
MRRAGVEEIPDEEYERVLDRVCAIDVAKESGEVCVRVSRGGRRYSRVWTVKATTRAILELGDQLAREEIEKVTLESTSDYWRIFFYLLEACGLDVQLVTARDVKNVPGRPKTDKHDSVWLAKLTEEGLLRPSFVPPRETRVLRDYPRMRVDLVRDRTRHYQRLEKLLEDSLIKVSAVASTLTTVSVRDMVDALIRGERDPRKLAGLARGRMRHKHDALVEALTGQFDEHHAELAQILLGQIDALDIEIDRITARINQLIADLPAAQPPAADTDDGHTDRAHPGDDPTTQPQPDAGRPGLPAVQRLAQIPGISIEGAQVILAEVGTDMTRFPTAQHLVSWSKLCPRTIQSGATHKTGRTPKGNPYLKGILGQAAGAAARTDTFLGERYRRVVKRRGKGKALVAVARSTLTIVWHLLADPSTTFRDLGPDYYTSRIDKERKIRNHIRQIEALGYNVTLAPAA

SEQ ID NO: 217567 - protein, 389 aa, unidentified
MIYVGIDIAKLDHYASAIDSDGVVLIEPFKFRNDADGFYTLSSKLESLPPGDKVIIGLESTAHYGNNLVRYLVCRSYDVCILNPIQTATLRKNNIRKTKTDKVDTHIICRALMLQKSYRFVSFDDLDLMDLKSLGRFRQKAIKQRTRLKIQLKASLDQTFPELQYFFKSGLHQKGVYALLKEAPTAKDVASMHLTHLAHLLDVASHGHFKKEQAKELRVLARNSVGYPDSAIAIQIVHAVEQIELLDSQIAHVEAEMTDIMKVRDSVIMTIPGIGYINGGMILGEIGDIHRFSSPKQLLAFAGLDPTVYQSGQFQAKKTKMSKRGSKVLRYALVNAAHNVVKNNATFQAYYDAKMAQGRTHYNALGHCAGKLVRVIFKMLTDNVEFDLD

SEQ ID NO: 217568 - protein, 457 aa, unidentified
MSKRSRKTKSQSLKVPSLPQHLQHINLNAAGIDIGSERHMVAVPEGRDTVSVREFGAFTADLEALATWLKQCGVTTVAMESTGVYWIPLFELLERRGFEVKLVDARHVKNVSGRKSDVLDCQWLQQLHTYGLLAGAFRPSDEVCVLRSYLRQREMLTQAASMHIQHMQKALQQMNLLLHNVVSDITGVTGMKIIKAILAGERDPRVLARNRNERCQNTTVTIAKSLVGNYREEHLFALRQALDLYETYQAKIADCNQAIIKQVEKQPDISDDGPPTPEKQVQARDRLRDGVDVRNLLFKKSGVDLFAIPGLAADTLLTLASEVGFDMTPWKTEKHFASWLGLCPGTKISGGKVLNKKTKRNPNRATQAFRMAAASLYRNQTALGAFYRRIKSRAGGQQAVTATAHKIARIYYAMLTKGTSYVELGQQAYEQRYKERRIDHLKTQAKSLGFQLVPCAT

SEQ ID NO: 217569 - protein, 410 aa, unidentified
MELLHRRCCGLDVHKETVVASLRLVSNGKVTTEVRTFQTTTADLLRLSEWLSANECTHVAMEATGVYWKPVWHILDDGEFVLVLANAAHVKNVPGRKTDINDAMWLAELLAHGLIRASFVPDTQTQEMRNLLRTRKQLVREQSSHVLRVQKTLEDANIKLDSVLTDLMGKSGRAIIEALIAGETNPVKLANLASRRVKASPEELREALRGRVTKHHRFLLRLHLNQIDTLDAAMATVDAQVQANLGPFRTAVDLIVSIPGVKNLGAHVIVSEIGVDMSRFPSAAHLISWACICPRNDESAGKRRSNRVRQGSTWLKTTMVQCAWAAVKKKDSYLQAQFYRIKARRGPKKAIMAVVASILTAIYHMLKDGTMYKDLGRNHFDRHSTDQQKKRLIKRLADLGYAVEIKPLAA

SEQ ID NO: 217570 - protein, 330 aa, unidentified
MTHYIGIDVSKNKLDIACLKDTDKLKFKTKVFKNDYSDYAALINWLIANITDDLSNIHITVEATGVYHENIAYYLFDKGLNVSIINPAYIKSYAASLGSRNKTDKKDSMLLARYTYSAKPKLWTPPPAEARHLKSLLSRLDALQEDLQRELNRLEKTQATDTAPIVKASIEHMIASLQAAIVKLNGDIDDHIDHHHNLKQDQTLLQTIKGVGPVVSKQMVSLMHNKQFSQASQMAAFLGLVPKHSESGLFKGKSRLAKNGSSDIRAKLYMPALVAIKHNPDIKAQYERLLANGKCKMQAVCAAMRKLVHICFGVIKHQQSYQAKVELISA

SEQ ID NO: 217571 - protein, 371 aa, unidentified
MSKSIICGMDMHDNNLVCRVAMEKAEPVTKRHKNTENGRCQLLMNLKREAGLQGCDRIVVAYEASTHGFCMYDDCRDSGIECFILAPTKMRKSKKDRKHKDDDRDAQLILETLRGHVLAGNELPSIWIPDDATRVDRETVRARLDLGVKLTEVKTQVQTLLKGRRIRKPETAGKSWTKAFRMWLKTQCMEDNPWPALATLLRQIAVLESEIDILNKEIEKLSEKPRYKEAARALVEDIVGVGLLTAMVFLTEMGDLSRFSNRQKIGAFLGLVPSSNESGENNDRKGHITREGSARLRKVLCQASWSRVLNDPVESKVYNGIVRRNPKHKKVAVVAAMRRLGIRMWHVGLAAQQMACVFPACVTDTVKKIPA

SEQ ID NO: 217572 - protein, 358 aa, unidentified
MADKVTGAAVVGGVDTHKALHVAAVVDQNNKVLGTQYFATTRQGYRQMLAWMTSFGALKRIGVECTGTYGSGLLRYLQNAGLEVLEVTAPDQMERRKRGKSDTIDAECAAHAAFSGIRTVTPKTRNGMIESLRVLKTCRKTAISARRVALQIIHSNIISAPDELREQLRNMTRMQLIRTLGSWRPDASEYRNVTNVYRISLKSLARRYLELHDEIADLDVMIAAIVDELAPELIKRNAIGYESASQLLITAGDNLQRLRSESGFAALCGVSPVPVSSGKTSRYRLNRGGDRAANSALHIIAIGRLRTDDKTKEYVARRVAEGHTKMEAIRCLKRYISRKVYTLLRNQNKQVNSIPIMV

SEQ ID NO: 217573 - protein, 307 aa, unidentified
MSPTTSLYVGADVAQDTIAFCGPTAAIVNNTPAALCSYLGALPPAVHVVCEATGRHHYALQQACAAALCSLTVLNPAHARAYARSLGKLEKTDALDAAILRRFGQERRPAATPPPDSAQQTLRDLLMVRTALVEDIADHRRRDRLLVPVAQRELRATIRTLQTRQRAIERQLAAWLEAAPTAWQDRVQTLCLVVGVGVLSALQLTSYLPELGTCNRGQIAKLAGLAPLPWDSGALHGVRCIQQGRAPARRVLYQCAVVAARWNETLRPHYQQLRARGLPAKPAYVAIARKLLVYLNALLRPTDAPGH

SEQ ID NO: 217574 - protein, 421 aa, unidentified
MPTILCVGGDIHQDEVFLRATDKTDGQEVGQRLIVKNNRPGADQAIAHLVQLLTQHGYTHLEFGLEATGLFWLPFYVYLQQSPALTPFQPVWVCFNPKLVAKFKEGVTLSEIKDDDHDALAVAERLRFGHLPVSYVPSSEWLALRMLTRYRYRLSRQIAQEKLRALTRVFVKASEWHRGQPFSDVWGATSATLLTEFTTAEIAALSLTQLTDLVQEYGRKHFDDPQATARQVQRTLQNSFPVTPDLDAALTVVLQVAWTHIRDLEKLMRRLDREIAQRMERISNPLLSVQGLGPVITAGISAEIADIHRFPGDPQLAKFVGLVWRKHASGQFVAEETRLAKSGNVYLRYYLIEGANLMRQHNLEYQAYYRRKYDEVPKHQHKRALVLTARKLVRLVFALLTKNQTYVRPQAVQSEEAAPVQ

SEQ ID NO: 217575 - protein, 344 aa, unidentified
MSEVIIIGLDIAKYVFHVHGADERGRVIFSKRISRGKLLDFFAAQPNCTVALEACGGAHHWARQLTQLGHEVRLIPPAYVKPFVKRQKNDAIDAEAICEAAQRPSMRFVAVKSEQQQAAGLVFRTRDLLVRQRTQLINAIRGHLTEYGWIAPKGPSHVAMLADLLEEEEMASSLPEAARAMFRLMLDLLAGLNGKIADLDKEIARRAREDEVSRRLMTIPGIGPISATAIAALAPPAETFAKGRDFAAWLGLTPLQRSTGGKRKLGATSKMGERTLRRLLIIGSSTVVLQASKRGAPKGSWLDQMLARKPRMLVTVALANKMARIIWALLVKQENYRAPVAAKA

SEQ ID NO: 217576 - protein, 342 aa, unidentified
MNHYAGIDVSLEYSSVCIVDGSGKIVREAKVASEPEALIAWFGSLGLEPERIGLEAGPLSQWLYAGLKKAGLAAELLETRHVHDAFKAMPVKSDRNDARGIAQLMRLGWFRPVHCKSMEAQEVRVVLTARKLVQAKLRDVENGLRGLLHGFGLKVGKTSTTGFAGRVQELVSDHPSLEAVAAALLSVRAVLLREFKAFERQVRRMARSDGNARLLMSTPAVGPIVALTYASAIDDPTRFRSSKRVGAHFGLTPKKYQSGETDYTGRITKIGDASVRTALYEAAHIMLTKPVRGCSQLKSWAMRIAKRAGMSKAKVALARRLAVILHRMLATGTLFNAAAAAA

SEQ ID NO: 217577 - protein, 351 aa, unidentified
MKNLPVRIGMDTSKSVFQLHGVDHNEEVVVRRQFRRAEMIRYFERLPPALVAIESCGSSHHWARLLQSLGHEVKLIPPQYVKPYVKRGKNDATDAEALCEAVTRPSMRFVPVKSEERQAACMLMTVRERLVSVKSQLSNAFRSYAAEFGIIAPAGRQNINALIKRVIEDETLPELALDLFRFQAQEYAAVEPRLKEIEKKLMKWHRDDDISRRIATIPGVGPIGSTMLSMKAPPPETFKSGRDFAAWIGLTPRDHSTGGRQRHGGITKAGDSALRSTLIVGATALLRHIRKGHHKPTAWLAALLERKPPKLVAVALANKFARIAWRLMVSGGVYNRPPATPSPVLVSVPAS

SEQ ID NO: 217578 - protein, 459 aa, unidentified
MQDNIETQENRRRQLAGLPVIRRGVAGIDLGSEHHWVCAPTEDGAGREITDFGSTTSELVRMAKWLKDRKVESIAMESTGVYWIAPHEVLEAAGLEILLVDTRQLAQVPGRDKKTDPTDCEWIQRLHSCGLLRGSFRPPEQVCMLRTLVRDKANLVAESGDWLRRMQKSLDQMNVRVHRAVSDIDGVTGLAILRAIANGERDARQLAKLRDKRCRKTEEEIAEQLNGHWREDHLFSLKQALKMYDDIQQRIGDYEQEIIRQLGAMQRTEFREQAAPKPQNRQKAKTIRQRGQEPMREALYRMSGVDLTSIDAIGVETVEVVLSEYGPDLSRFPTEKQFVSHVKLAPYTPRSGGKPLKKKRRNTASTRVAAALRMAAVSLRNSATALGAYYRKVARSIAGDVAVFATARKLAILIYRLLRWGQPYVDEGEEAFEKRYHERRINTLKSKAKELGYALVQKA

SEQ ID NO: 217579 - protein, 425 aa, unidentified
MNSNTNEKINQVSENTLVIGIDIAKHKHFACAIDDRGRVLQKSFPILQSRIGFEGFYERLLALKSAHDKHEILIGFEPTGHYWMNLAAFLTNYGIPFVMVNPMHVNRSKELDDNLQTKNDQKDALVIARLMRDGRFSYPRILDGVEAELRNGATLRSKIQEDLNSLQNRLIRWLDRFFPEFPNVFKSFGKMAYAALEMTPLPSDIKGKTPEELLFLYRQVEGMKCPQLPKAKQLVEVAQNSIGLTEGLVMAKYEIATLLSQIKLMQAQLDELTLQLTELAKQLTDYDYLASVPGIGDVTVVDLLSEVGSLTQYEHPRQLIKLAGLTLRENSSGQQKGQKRISKRGRRKLRSLLFRVMMPLIQHNLAFKHLHEYYTTRTINPLRKKQSIVVLCGKLLKVLHALCNKKTMFNEHQMMSDFTNLQSAA

SEQ ID NO: 217580 - protein, 536 aa, unidentified
MEHEARPPADTVSTATHPLARRARKSSPQPAVNNCAAPKIKCSEKLLRSRYDCRDRIAPGGARSLPCDPARIKTSSPARPAASVPKSERTIAHEAPGIRLTYDSATMPSMKGKVMKEWQSITHYAGFDWARDHHAVVIVNQLGQIVADFELQHTQAGWQTFRDKTAAFPNLAISIETNQGAAVDQLLQFGYTVYPVNPVAAKAYRQRKAPSGAKTDHLDAWSLADALRLDGQGWRALQPTDPLTVQLRLLCLDEVTLICQRTQLINQLQQALVEYFPAAIEAFDDWTLPACWDFVIEFPTPELLVKAGKRRWEKFLHVHKLWRPATTDKRLKIFARADQFAGSAPITEAKSRLALSLCKLLRTLQQQLDEYRKQIEELFGRHPDHDLFGSLPGAKRVLAPRLLAAIGCDPNRYGNAAAVLQAFAGTAPICFQSGQRNQVKMRWACDTFLRHTVHLWADCFRHASSWGEVYYQNKRQDGMSHACALRCLGQRLLKIVFRMISDKKPYDADLHARNQQKHGSWILTLANKTPSAAAGE

SEQ ID NO: 217581 - protein, 387 aa, unidentified
MAQVNDLSRSLTAFDPISTLVVVVEMSKANWLVSGVVPGVERQPLKKLEPDATALLRLIERWRNEAVRAGRPISRVALAYEAGRDGFWLARWLIARGIEAHVIHSASVAVSRERKRAKTDRLDAAMLMRVFLGWLRGERGHCGMVAIPTMEEEDARRPSRERESLVDERSRITNRMKSALARLGIRGFKPHLRKAPERLAGLRTAEGTGLPANIIEEFRRDMARLALVREQISSIEKTRAERLERAPDTGPHAMVRLLARVIGIGIETADMLVQEILSRKLRDRRAVARYAGLTGSPDESGLKRREKGLAKAGNARVRRGLIQLAWRFLMFQKDSALAQWYRTRTEGPSGARKTTMIVALARKLLIALWRLVTTGEVPDGVELRPAA

SEQ ID NO: 217582 - protein, 317 aa, unidentified
MTKQDEYVGIDVSKKTLDVVTLHLGEHRTVRYDEEGIRSICEQLLVLRPKLIVMEATGGYERELAIALVLAGLPVAVVNPRQVRDFAKAMGMLAKTDKVDAGVLALFGERIKPEPRGVPEKEVRELDALITRRSQLKEMLTAEKNRMGVAPRAMRPSILEHVRWMESQVKELEAELDQVIQASPIWRAKEDLLMSVPGIANVTAQSLIAMLPELGHVTAKRASALVGIAPFARDSGPKKGKRSIWGGRASLRAALYMATLSAIRWNPVIRAHFKQLMARGKLFKVAMVACMRRLLTILDAMVRKNQRWTDVTLVHAP

SEQ ID NO: 217583 - protein, 346 aa, unidentified
MKIIGCDYHPSWQQICWLDTETGETEERKLEHASGEAERFYRELREPALIGMESTGNCQWFVELLAGLGHELWVGDALRIRASDVRQQKNDRRDAALILQLLLEGRFPKIWMPSSEEKDQRQLLIHRHKLVRIRAQVKNELQHLAMNRGVTKKRRLWSKAGERVLRALELAPWAARRREDLFRLKEMLNQQVDLLDQAVAEAAQKNEKARLLMTQPGVGPITSMAFVLTMGDVKRFQRGKQVASYLGLIPREHSSGGKQRLGSISKQGNRFMRMLLVEAAQVAVRCDPGMRSEYLHRCHRKAKGVAKVAAARKLAIRLYWMLRTNTGYPEVVRVESSSRVPLVSAS

SEQ ID NO: 217584 - protein, 418 aa, unidentified
MKSNKTEKIKTINQKTLIVALDIGKKVHYGYFRTPKNKDIKPFPIYNTGQSFKKFWKKLCRFKEEHMLDEVIIGFESTGPYAEPITNYLRKRPVNLVQVNPMHTKRVKDLTGNSPNKTDKKDPRVIADVISLGHSLTVIMPEGAAAQLRRLTHARERSIERRTAMNNQLQHLVFVIFPELVSIIKPSTKTGMYLIENFPDPESIVSIGIGVLCNIVRKISRGRFGIERAEKLYNAAKQSVGITEGKEGVILETSHLVSNIENENRYIKRLEEQMVEQLEQIPYSHSILSIKGIGHVTTAGLIGEVGDFNKFNTISEITKLAGLDLYEISSGRHKGQRRISKRGRPMMRKLLFFTAINMVKTNGIMYEKYKQMLDRGMLKMKALIAISRKILGLILAIVRDNTTYIENYIKQNHYKLAA

SEQ ID NO: 217585 - protein, 462 aa, unidentified
MPRRKLKTTTRPRQARLVYREDAPTLQVQNPHAAGIDVHTDNHVVCVGPGLVQTFGAYTADLQAIADYLRQAGVTTVALESTGVYWIPLFEHLQALGFECYLIEPGQLRGCGARPKTDVLDCQWMQRLHTYGLLKASFRPPESVRALRAYHRQRQMVIRHAAAHVQHMQKALEQMNVKLTEVLSDITGVTGLRIIRAILAGEHDPHPLAGLASPICAKSRDEFALALQGLWQPEHLFELRQAHDLFQTYQRLVDECDRQIKAELAGQPDRAGDKPGPGPRPRRSRKKNDLRFEATGPLFRALGVDLTEIEGIDVGTALVVLAEIGVDVSRFPTEKHFAAWLGLCPNTARSNRREKRQSPRQGASRLKQALRMCAQSVGRTQTPLGMFYRRIKSRIGGMGACTATAHKLARLVYRLLKYGRADVKQGMDEYAAKMHTNAERILRKKAAALGYELTPRAAGATT

SEQ ID NO: 217586 - protein, 423 aa, unidentified
MKTIIFPAQSNQSVAILAFDVSKNTLNMTTAIGGQRSDHEFPNRTPQIEKQLLIWKQRAQMAGYSQVLVVCEPTGCYHMTLLATAHRLGLKTAWVSGEAVFKMRAIETNDSGKTDLKDPHVIYTLASMGKILICRHYDETYALLRQWHALYEQADIEAVRTKYLLASQIKVLFPDYDFQKDFLYTRSGAALIEHYGANPQRIIKETKARFCLQMKQAVPRMRQTTLDRLYSQALSSVRNQQSPRLVDIQQWRFLQLWEDCQRHKTRKEEAKSQMESLYQELCLFDPSLPHQQQGVISTFYLARIVAETGPVSDFKTLRKFMRYAGLNLREKQSGTYRGKNKLSKKGRSLLRKVLSQAVLPLVKKTRLYGSYYHDKKAHGMSGTKAMTAVMRKFLKLIYGWYRSGGQFDQSRVFTCESQYKRAA

SEQ ID NO: 217587 - protein, 322 aa, unidentified
MSAFILGIDISKQRFEVALLVEGKIKNKSFHNTTEGFEALALWLRKLGIQLVDACLEATGNYGEDLAIFLHEAGHTVSIVNPARVKGFAQSELIRTKTDKIDAGIIARFALAMNPEPWIPPPPEIRSLRALVRRADSLVDMLTQEKNRLGTAHESVVPLIKEHMAFIDQEIEKVRNQIAELIDQDPNLKQKKKLLLSIPGIGKVTVAAILAELYDLEKFSHVRELVAFIGLAPKETISGSSIKGKPRLCKIGHARLRKTLYMPALVAIQYNPVIIRFYDRLKEKGKNGKVIVCAVMRKLVHIIFGILKSGKKFDPNYKPIFA

SEQ ID NO: 217588 - protein, 387 aa, unidentified
MILVGIDIAKDKHECFIRRLEGTVLHKPFSITNNIEGFEELYSKIISCDDNEVKVGLEATGHYSYNILGFLLSKELATFVLNPLQTSQFRKSLTLRKTKTDKVDAKTIADVLASNLSLTPYTHAAFQNEELKSLTRYRFEKVRQRSKLRQSLARLCNILFPELETAVSTLHLNCIYAMLLKYPSAKDIAKSRFDTFANLIESDSKGRLDKLKAKEIRNLARKSVGVYISAKAMELKHTITLIQVLDSDIEEIEQQIQTHVQDSPITTIPGISFKMAAMIQAEIGDFNRFSSPDKILAFAGLSPTTYQSGNFVSSKSRMDKRGSRYLRYALFISAQYVSMWCPVFKDYYQKKRSEGKHYFVALSHVAKKLIRIICHLKKTGEIFQNFS

SEQ ID NO: 217589 - protein, 404 aa, unidentified
MYNAVGIDVSKGKSTIAVLQPGGTVIRKPFDVSHTSQNLIELAHYLGSLEGSTKIVMECTGRYHEPMLKALYEAGLFVSVVNPHLIKNFGNNSLRRVKSDPADARRIARYTLDNWAELRQYSGMDNTRTQLKTLNSQFSFFMKQKVAAKANLIALLDNTYPGVNKLFDSPPREDGSEKWVDYAYSFWHVDCVRRIGLKTFTERYRAFCRKHHYIFQPDKPEKLFHASKELVAVFPKEKTYKLLIQQSIQQLNLASGHVERLRQEMNALASTLPEYSTVMGIYGVGKTYGPQLIAEIGDVSRFTHREALTAFAGVDPGVDESGQHKSKSNRASKVGSARLRKTLFQIMTTLLQNAPEDDPVYRFLDKKRAQGKPYYVYMTAGANKFLRIYYGKVKECLRNLEQAE

SEQ ID NO: 217590 - protein, 397 aa, unidentified
MKIHKYVGLDVHQDTTVVAVAEGDRSGEIRVYGKVSSDLLATEKALRKIRGETGVLHVAYEAGPTGFVLYRRLRQLEIDCIVVAPSKTPQPKGGRQKTNRRDALQLARLHRAGELTGIHVPDAVDESLRDLTRARSDASRDLKRAKQRLKSFLLRLGYHYTGKANWSEAHQRYLRELVLPLPALKAVLEEYLLAITQRTAQLTQLEELIAAQVPQWRMDPAVRALMCFRGFDLIAAAVLVAELNDVRRFAHPRGLMAYLGLVPSEASTGNTRRLGAITKAGNAQARWILVEAAQHASLPPKVSAPLALRQDGQPDAYRALAWKTQVRLHKRYWHLTRRGVMAAKVKVALARELAGFVWDLLRQVPLPVPPPAAAPAPVSRSATRRPRPAAHAHALVG

SEQ ID NO: 217591 - protein, 430 aa, unidentified
MNESVSEQPLSPKVAAFVGIDWADLKHDVVLRSVGDPTKSEHQIIKSEINALADWIAQMHERFEAKGKVLVCLEQSRRALIYQLMAYELFELYPINPSQLANYRRTFFSSGAKDDRPDADLLSELVMCHRDRLTAWKPDDQLTRELASLNEGRGNAVDRRTDLANEIKSQLKLYFPVALQLLDNDITTALAADLLVQWPTLAELQKVSPAKLRKFFYGHHSRQEKKILERLALIKEAKPLTTDLAILRPNALRVKLLAQQLKSLLPFIAEYERRIAEIFGSHPDRFLFDNLPGAGPALAPRLLTAFGTDRDRFEVAGDLLNLSGIGPVRIASGKKTGKNASVHCRRACPKFLRQSFHEFGECSIRYSPWAQACYQAQRGRGKGHHAAVRAVTFKWIRILFACWKQRTPYDPQRYFQALQTRGSDYAQTTA

SEQ ID NO: 217592 - protein, 425 aa, unidentified
MHERIEIGDRNEYIHPICCGLDVHKKSVFAAVFIYDNSDSPVKYYTAQFTTYPKDLKKMTDWIISKNCHDVCMESTGQYWHPIYDAAEEAGLHPLVSHPKYTKPLKGKKSDPADAKWIAKSYASGRVVASFIPSKEFRIMRSTIRYCQKIHNAMTGEKNRILNCLTGEGIKLDVVFSDVFGKTSRSIIDYMLNHPGEKFNVAPFIGKRCKTPIPVIQEAVAKASSVDISSLSKLKVAFSRLDRTVKDEAVLKQDVAERMKPYAHQLELIRTVPGFDRDPFTAMRVLAEIGPDMSVFPSARHLCSWAGVCPSHDSSAHKVKGRKISRAGKYLKPLLVNIARSVVRSKDHPEITSRFNRIKSRRGYMKAIIAICKMFLTAIWHILSKDEPYETDGYMTAKKPKKAKRVMTRTQLAEYLASQGITVVD

SEQ ID NO: 217593 - protein, 399 aa, unidentified
MDRNRTVAGLDIHKDSIYLCIMRHDETIIFENKYGVLTPDLRQMCNDMVERGVTEAAMESTAVYWVPVWNELCESMKLKLVNPYFIKQLPGRKSDVKDAQWIAECQLKNLIKGSFVPEPIVQDMRKLNRRIMDLNEDMTYNCNKLDAAMQRCGFRLSNYVNTIKSRSYQKVLVAIIGGTARPDELVKMVHGRTINKHGRDTIKAAVTGTFSETDITIFRQIKEVIDMIEQQIEECQKELTALCEQHFPEQFRRLQTMPGVKERAATAIIAETGVDMKMFATAACLVGWCGLKPRNDVSNGRYKSRKVTHGNRYLRQILIEIAWGASRTRNCFFSYFSYIQTTVKKKSKMKIQVAIARKILVAIWHMLSKEQDFIDIYLKRLEENRKMEEQLKSLESKMA

SEQ ID NO: 217594 - protein, 383 aa, unidentified
MRIVCGLDVHKDSVFVCILNEKGEKFEAKYGVLTPEQEELHQLLLTHEVKEVTMESTSIYWYPIWRILSDIECLKLVNPYFIKQLPGRKSDVRDAAWIAECTMKDLIRGSFVPDEIVQRMRQYNRRIFDLNKEKVYKLTKLDALLQRCNIRISNYVSSTDSKSYKDVVKLLSEGIVNAEKLTEAIHGRTVNRVGKEVITAALTGVVNEVDIDLIRQYREEILMDDKHLKECQEKLTEICRKEFPREFDNLQTIPGVKERSATSILSELGADMKMFITAAALVSWCGLKPRNEESAGKIKSRRITHDNKYIRKTMIECAWGASRTQNCFYSNFSYTQTVVRRKNAMKVKVAIARKMLVVIWHVLSDGVPYNDYKKPEAIAEGNS

SEQ ID NO: 217595 - protein, 401 aa, unidentified
MAALRDQAFIGLDIGKTHHWVCALDGEGKPLLSRKIANDETEIVALLTTASALAQQLVWAVDIIGAPSALILSLLSRAGQSVRYASGRIVSVMSRAYPGEGKTDAKDAYVIAETARIRGDLPVVDQDTDLVRNLAVLTGYRADLIADRVRMINRLRDLLTSVFPSLEREFDYSSHKGALVLLTGYASPDRIRRVGQTRLAGWLRHRKVRDYASIAARAVDAAKAQSTVLPGQDLATTIVAELAASILALDERLKTLDEQIEQTFKQHPQAMIIQSMPGFGPFLGAALLVGAGDLRAFPSVGHLAAAAGLVPVPNDSGRRTGNLHRPHRYSRPLRQVFYLSAQTSMTRAGPNRDYYLKKRAHGHTHSQAVISLARRRVDVLWSLLRDNRHWVTDPPRHAQAA

SEQ ID NO: 217596 - protein, 346 aa, unidentified
MEITTIGIDLAKEVFQVHGVDIHGKAVLRKQLRRSEMARFFANLDPCLIGMEACGSSPHWARKLSEFGHTVKLMSPQFVKPYVKTNKHDIADAEAICEAVSRPNMRFVPIKNVEQQAILSVHRARQGFVKARTAQANQIRGLLSEFGIVMPQGIQSIMKQIPEILEDGENELPGMMRTLLERLTENLKEMSRQVEELEKQIVLWHRENEASRRVAEIAGIGPITASAIVATVGRAKEFKNGRQLAAWMGLVPRQHSSGGKQNLLGISKRGDTYLRTLLIHGARAVIRFAENKAKPESWLRKLMTRCNKNVAAVALANKNARIVWALLANSQTYHPDYTPATIVAKM

SEQ ID NO: 217597 - protein, 318 aa, unidentified
MQTSVVFIGVDVGKFELQVAASDGEIVTGVLPNNRSNIVDWLKRLPAPSVIAMEATGGYQELLARTAHERGFEVYVPNPTHVHHYAISLGNRGKTDRLDAAVIAQYIAQHHKKLHRYEPISQELQEVRALQALRSTVVRVGTSLRLSAQRHGCVSSHQKKALASLTAWSEQLEREMIAKIKAQSDWAKTYGLLTGICDIGPITDVALTSLFSRIDFASSDAAVAFCGLDPRPNESGRKVGRRRLSKQGDKAVRTLLYNAASSAARTAQFKDYYAMLRARGLASTAALVIIARKLLRIAYGVWRTGQPFDPEKLRPTIA

SEQ ID NO: 217598 - protein, 440 aa, unidentified
MIDTNQNKEIEFAAFVGIDWADLKHAWALQIPGHLEVERGDLDHTPQAVEDWAAELGRRFGGRPIAVALEQSRGSLLFMLTKYAHLVLFPVHPTTLYDYRKGFRPSGAKSDPSDAGLLVDLLVRHREKLRRFNPDTEQTRTLQFLVEARRKFVSDKTRYSNRLTAYLKMYFPQVLGWFSEVTSPIAGDFLERWPSLQKVQKARPETLRKFFLQRHSCTLDNVDRRLEEIRSALPATHDVAVACSCSAAVLALVRIVRTVRDAILSYDQQIETLARQHPDFAIIDSLPGAGPALVPRLIAALGTQRDRYQSASELQSYSGIAPVLASSGKQHWVHWRWACPKFVRQTFHEWAAHSIGSSAWAKAYYEQQRAHGKPRNTVVRALAFKWIRILFRCWKEHKPYREDFYREALARHQQRASKRTPVQLQWKTCAGFSKITAITS

SEQ ID NO: 217599 - protein, 338 aa, unidentified
MTVVTVGIDLAKNVFAVHGVNAAGKAVLVKPLVRRAKLLELIATLPACLIGIEACTGAHYWAREFQKMGHTVRIMAPQLVSPYRMSGRHGKNDAADAAAICEAVTRPNMRFVPIKSVEQQGQLFVHRAHQGYVSERTALINRIRGLLSELGIVLPQAFKAFLSGGAQVLEDLPDYCNQVIGDLLNELYHIEEKIKNSEKLIQQLARDNSAAQLLMQFRGIGPITATAIVASIGNGHDFKNGRQFSAWLGLTPRQQSSGGKARLGRITKAGDSYLRTLLVLGARSVLLGAAKNDDPVSRWALQLKERRGYGRALVAIAAKNARMCWAMLHLRDEFRFPA

SEQ ID NO: 217600 - protein, 334 aa, unidentified
MQNVTLIGIDLGKHSFHVHAQDKNGNALLRKKFSHNQLTAFLSTCTASTVVMKSCAGAHFMARHISQFGHQVKLISPRFVRPFVKSNKNDFIDAEAICEAASRPSMRFVTPRTEDQQAVSAFHRVRDTLVRERVKTTNQMHAFLLEFGVSMPRGIEIIRRLAVVPEEHELPPYLARLLMRLHQHYACLTGQIKELEQELKIHIAGDDTAQRLLTIPGVGLITVSLLATKLGDGKSYASSRDFAASTGLVPRQYSRGGKSTLMGISKRGDKNLRRLLVQCARAFMQRLEHNQGRLAGWVKTQLSRRHSNVVACGLANKLARIAWSVTTHRTAFIQ

SEQ ID NO: 217601 - protein, 379 aa, unidentified
MSTPKPAPCEHTTAEGDLFVALELSDKAWRLSCGDGRHRPSQYTVAAGDEATLLARIERARERFGLASMAKVHSCYEAGRDGWWLHRRLRERGIDNVVVDSASIEVNRRARRAKTDRLDADKLLQLLLRYLHGEPRVWSVLREPTPEQEDQRRANRELQRLTRERTAHTNRIGSLLVLHNLRMRGQVGAGPWLRWWAAHREDLAPMLRDEIERELARLELVRSQIKTLEHQAARRVEAGEQPVTAQLMKLCSIGLRGAWYLDKELLGWRRFNNRREVAAAVGLVPTPYSSGDSHVELGINKQGSKRTRTLCIELAWSWLRYQPDSELTRWFNERYRVAGKRSRRVGIVALARRLLIALWRYVQFGEVPAGAHFKPQPTA

SEQ ID NO: 217602 - protein, 338 aa, unidentified
MALYCGIDLHSRDCWLAILNGGLEVVREAKISNDLEAILEFLEPYREDLEGIAVESTFNWYWLVDGLDEAGYQMHLVNTWAVKQWEGLKYSDDRHDARWLAHLLVLGILPEGYIYPKQERSVRDLLRRRAFLVRKRTSFLLAMRGAFECRTGLRTTSGEVKQWTASDVESYLDDPAEALGITCLLEPMKVLDGQIRIIEKKALTRARLRDEFAPLLSVWGIGKILALTVMYEVGEISRFRKVGNFASYCRLVKTARLSAGKRKGSGNPRNGNPYLSWAYSEAAHFAVRYHPRAKQYFQRKMSKTNGIVAIRALAHKLARASYYVMKDQVDFEPERVFG

SEQ ID NO: 217603 - protein, 342 aa, unidentified
MQVTTIGLDIAKNMFQVHGIDAAERVVVRKQVRRRQVLEFFKALPPCLVGMEACATAHYWARELTKLGHQVRLMPAKDVKAYVKRNKNDAADAEAICEAVRRPTMRFVQIKSTEQQGRLMLHRARDLLMRQRTQVINAMRAHLAELGIVAAQGRDGIKELLKIIASEEDARLPVDAHASLVVLAAGLQAVQTMIGSIEKRIMVQHRSNEASQRLETIPGIGVIGATAIAATVPDPKVFGSGRDFAAWIGLVPREDSTGGKQKLGPISKRGDRYLRRILVVGACAVLRYARHKPEKYPWLTKLLARKPFKVVAVALANKMARIAWALLAKGDTYRVPALAAAA

SEQ ID NO: 217604 - protein, 347 aa, unidentified
MLADQADHIIGVDTHRDSHSAAILATDTALVLGQTTVRADERGYQELLRYARKHAPDRRVWAVEGTGSYGAGLTAFLHAKGESVVEVDRPKRPAQRNRGKSDQLDAIQAAREALTRKHPAAPRMRGDREALRVLLATREGAMRSKRAAITTLKSLLISAPSQLREPLRGLSTNELINRAARLRTNPTHDNEQRATIIALRSSARRILTLRDEALELEREIQPIIQHLAPQLLTEKGVGAITAAQILNAYSHQGRIRSEAAFAALAGAAPLPASSGQTIRHRLNRGGDRQLNRALHTIVLCRMRDDPTTRAYTQRRKAQGRSTREIKRCLKRYTARHLYRLLQTPQPA

SEQ ID NO: 217605 - protein, 351 aa, unidentified
MMIIGVDYHPSLQAIAFFVEETGECGEQELNHSDGQAEKFYRDLKQRGIGVRVGMEATGYSRWFERLLAELGFEVWMGDPAEIKAKRVKKRKTDREDARLLLKLMLENNFPQVWVPGPENRDLRQLLWHRHRLVQMRTRIMNQLQALAMNEGYRWKKKLFSEQGRAQLEKLALAPWGSRRRQELLELLDRMNPTIEELTAAVEQEARKRPEALRLMTHPGVGPLTALAYVLIIGTPTRFQRGKQIGTYVGMIPCEESSARKQRLGHISKQGNSLLRFLLVEAAQAATRSHPDWRRRYMHLAMRRHKSIAKVAMGRRLAIRLYWMWRNGCEYSQSLEFGSYAGQLGTGHGAK

SEQ ID NO: 217606 - protein, 454 aa, unidentified
MEGIYAGVDWASEKHDVLVADAAGEKLLAATFAHDERGLRALCRALVRLRVQLVAVERPDGLLVERLLDAGLRVLALHPNQVAAARDRFRVSGGKSDGFDAFVLCELARTDHHRFRVLEPDSDATKALRALTRGREDLVGARTALVNQLRAELERFWPGPLGLFSALNSRISLAFVERYPSPPDARGLGEARLGAFLARERYSGRQKPAQLLAKLKAAPPGTVGERELAIRRGLVRGLVAMIKTLNAQITELEREIATAVREHPDGQIFTSLFKGAVITAAELLAEIGDCRGRYPVRDTLAGDAGQAAVAIESGKRKAACFRWGCNKRLRAALCALADSSRHHNPWAQDLYAAACQRGHDHPRALRTVGRAWCRIVWRCWQDRTPYDPARHRALQRHVNVTIPTSSGPVPDLAATQRMAGTTVTQRADRRASAQRFTASRRPLNAPLDPPIGEG

SEQ ID NO: 217607 - protein, 403 aa, unidentified
MNAVGIDVSKGKSMVAALRPFGEVAITPREIPHTYTDLERLGYDIIGLGEDTRVIMEATGRYHEPVAAALHEMGIYVCILNPIVIKQSGAGSVRKVKSDKKDALKIAKYGLDNWMKLREHTPMDAVRQQLKLFSRQYNLYMKTTVALQNNLIPLLDKTWPGANNLFDSPARDDGHQKWVDFTASFWHCDCVRRISLNAFTERYQKWCKRNGYNFSAVKTEDVYISSAGHFPTLLKNDNTKLLITSAAAELTSTRKVLMTIKAEVIRLAKLLPEWETVLSMYGVGEITAAQLMAELGDVRRFHNRGAIVAFAGIDPEVNESGSYQRESNPASKRGSPHLRKTLFQVVEAYLKKSPADEPVYQFLDKKRSEGKPYYVYMTAAANKFLRIYYARVKECLNELDPEA

SEQ ID NO: 217608 - protein, 352 aa, unidentified
MENTKIDFTGQTLYIGIDVHKTQWSLAVYWSGGKLKNTVTGSSPEEVNSFLRRNYPGAEYHSVYEAGFSGFSAHRRLNELGIKNIVINPADVPTNHKERITKNDRNDANKLAVNLMKGNLKAIYVLDRRAEAIRTLCRDRYTLTGDITREKNRIKTFLNFKGIKMADGDKWSCKFIARLKQMSFEYKQEKQVLSRHIEKLEDLLRKRREVEKEIEEAIKEGGNEALLNRLRKSVPGIGKITAYYLMCEIVEMKRFKNIETLSAFVGLIPIMKESGEKKKKSGITGRKNKYLRYYLIEAAWIAVRRDPAMSAYYMKLCKRMKKTRAIVSVARKLLNRVRHIWLKEEDYQEGIK

SEQ ID NO: 217609 - protein, 344 aa, unidentified
MKKSSVIGIDLAKRVIQVCKIDKHGELLSNKAISPSKLKELLAKSNPSIVAMEGCGSCHYWARLARKHGHDVRIIGPKKVKAFLQGHKTDANDALAIAIASTQLGMVISQIKEEEQQSLQTLEKSRKFLDKELTALNNHIRAYLYEYGITMNKGRKSLRETIAIVFDDLDTRLPQCLKNTLKLLWDRYQLTITQLKETEKHKAALVKQIEPCKRLMDLEGIGSVCASMLYTNIGDGREFKNGRQASVYIGLTPKQHSSGGKTYMMGIDKQGGNKDLRSALYQGALSVISRLPSEPRTLKEAWLLELVKRVGVKRACIALANKTVRTAWALLATGKSYEPVLLTR

SEQ ID NO: 217610 - protein, 355 aa, unidentified
MDSKKYIGMDVHKESISIAVMNGTGKIGMECVIETKASTILQFIDGLRGDVHVTFEEGTSAAWLYDLLKPHVTKLVVCDPRKNASMREGNQSDKIDARRLAELLRLNHLSPVYHGEHGLRSLKELVRSYLTITKDLGRIMTRVKAIYRSWAIPCTGKQVYAARHRAEWLGKIGEPGVRRRAEFYYQQLDALRTVRQEVRGELLAEAKKHQVWKRLCQIPSLGPIRAAVLLGILQTPHRFRTKRQLWTYSGLGIETHSSADHRSVDGQLQRVNKQSSIRGLNRNCNHDLKNLFKGAAIVASSKPGPFQEFYTALLTKGIRPEMARLTLARKIATIVLIVWKRGACFDAQHLKPQTA

SEQ ID NO: 217611 - protein, 350 aa, unidentified
MKIIGCDFHPRFQQIAFVDRETGEYGERRLNHPEEAEQFYRSLVGRPVRIGVEATGDFRWFRHLMEELGHEFLLGDATAIRAACPRRQKTDKRDARHILNLLVEDRFPVIWQPSAENDEMRQLLLHRCRLVRMRTRVQNQLDSVAKNEGLLSSRVWSAKRRSQIEALPLPGWYGHRRADLLGLLEELNKRIKPLDEAVCKAAEGNPEACLLMTHPGVGPIVSLAYVLTIGDWKRFPRGKQVGSYLGLIPTEESSGNMRRLGQVSKQGSVLVRWLLVEAAVHAQRHDPSWHRQYVRLSMNKHHGVAKVAIAHKLAVRLYWMLRSGDDYSKVMERSSHAGSPCSAVASGPRG

SEQ ID NO: 217612 - protein, 362 aa, unidentified
MAQVRSWVGLDVHRASVVAATMDRETGEMRMRRLPGSTEEVVAFCAGLAGPTRVAYEAGPTGFGLARALQAAGVQCVIAAPGKIERPSSDRVKTDERDAQRLLRLLMIDGLHAVRVPSIEEEALRDLVRAREDIRGDLMRARHRMSKLLLRHDVRFDGTAGAWTTHHRAWLAKVDLGERGAQVTLIDYQGAIDALIIRRDTLERTIGELVPDSPWADSIARLRCLRGIDTLSAVGLCAEIGDWTRFPRPAHLMSYLGLVPSEHSSGQTRRQGSITKTGSGHGRRLLVEASWHYRRAPAKGQALKRRQAGQPAHVIAISWAAQQRLHRTWQRLDTQRGKRRTIVAVAVARELAGFCWATANAD

SEQ ID NO: 217613 - protein, 363 aa, unidentified
MVESTTVTVGLDVHARSIRLAAVRADELLEERTLPYDEEAVERALRRWPAVRCCYEAGPTGFGLYRHLVGRGIECAVVAPGLVPQRSGDRVKTDPRDARKLARLLAGGLLESIHVPAPELEAARDLVRAREDARLDRMRDRQRLSKFCLRHGRLLPTSAWTVVRRKWLSEQRFEHAAEQITFDTYLHAVDLVDARIGKLEQAIRETAEQGPWRELVARLRCLRGIDTLTALALVAEIGDFSRFKCAEEFMAFVGLVPSEHSSGERRRQGSITKVGNSHVRRLLVESAWHARRRPKVGYELARRQRGQEAVVIERAWRCQQRLYQRWQRMAGRGKPQQKIVVACARELAGFVWAIATDQPLRTT

SEQ ID NO: 217614 - protein, 279 aa, unidentified
MKLTRVGADLAKHVFQVHGVDGAERAVWCKRLKRNRWIEEIEQNVEPGAEIGMEACGGAHHWARLLQSKGYRVRLIAPQFVKPYVKSNKTDANDAQAVCEAMSRPSMRFVAVKTIEQQDIQAVHRVRASLISERVAKANQLRGLAYEYGLVAPREIAALRRAVPAWLEDASNGLTVRFRALLSGLYADLQALDERVRELDKEIRAIGQENEAVGRVQQLRGIGPLIASALVALIGDARQFKNGRQVAVALSLTPRQHSSGSKERILGISKRGDSYVRTR

SEQ ID NO: 217615 - protein, 413 aa, unidentified
MKKVYSRCCGIDVHKKVICAYFKFGRKEEYREFGGTTRELREMAEWLKNGKCEMIAMESTGSYWKPVYNILEDSGLSAIVVNAQHMKNVPGRKTDASDAGWICDLLQNGLLMASYVPERQQRELRELMAYRGSLIKTQSAELNRLQKILEGANIKLSGTVANINGKTSRNLLDYVLSGRSIDLVQIEKMRAEHKIFRVKATDEQLVSDLEGSLTDTQRSLIKMVLKHIDELENSLKEIDDLIDKSMTEDQKSSAKLLETIPGIGEASSKAIIAVIGTNMERFPNASCLASWAGLCPGNNESAHKRLSGKTRKGNKLLRTTLTLCAHSVVKQKSTYFSAQYARISAHRGKKRAIIAVAHSMLIAIYHMLNEGTLFHDLGSNFYDQFNTEKKINSHLRRLKELGWTPELATINQA

SEQ ID NO: 217616 - protein, 287 aa, unidentified
MKITTVGIDLAKDVFQVHGVDAHGKAVLRKQLKRKDVVSFFANLEPCLIGMEACGSSHYWARKLAALGHTVRLMAPQFVKPYVKTNKSDRNDAEAICEAVARPNMRFVPVKTGEQQAVLSVHRARQGFVKARTAQANQIRGLLAEFGIVIAKGMGHIAKRLPEILEDGENGVPGMMRELLQRLGENLKEMDKQVGELERQIKLWHRDNEQSRKLEAIAGIGPITASAYVASVGDAKSFKNARQVAAWLGMVPRHEGTGGKVRPDQQARGCVSAHAPDPRGALRDSSV

SEQ ID NO: 217617 - protein, 567 aa, unidentified
MTGVMIGVDPHKGSHTAVAISADEYPLGRMQVRACPSQAEQLMAWARAWPARAWAVEGAAGLGHLLAQQLVAAGEYVVDVPPKLAARVRLLEAGDTNKNDPNDARSVAVAALRSKAPRPVIAEDHAAVLKVWAKRHRDLSRARNQAACRLHAVLCDLVPGGVADEITAAQAERILGQIRPWSAAAGARCELAAEFLADIRNLDAQRRATKNKLAAAVKASGTSLTTRVFGVGPVIAGTVIGDVRQVSRFPSRDHFAAYNGTAPVEVSSGNRKIYRLSLRGNRRLNHAIHMAAITQIRHKHSDGRAYYERKIAEGKTHKEALRCLKRRISDAIYAALLADAEQAAAACKGGPGGQPGNLSVSGAAGSHPECRLFGQATPGPHPTLRPAAELMATASSPAADPAQRATGRPAASSQLRVPQAGRAGVKMERPAGRTTLTPGRPAGHWPSEEAAGMRPPGHRAAPPMPGKAAGDSSRTTPVRKAARNRSPRNPAKPLDNKRVSICGGIGPGASAAARVQIRWFWAARSWPLMRASPLRAAVRSSAAKVSAWALTRKGCFQRRSPAFQRTV

SEQ ID NO: 217618 - protein, 411 aa, unidentified
MDTLYPRCAGIDVHKKTAVVCVRLADGSGKPRQQVRTFTTLTGDLLTLADWLAEQGVSHVAMESTGVYWKPVYHLLEGRFEVLLVNAQHIKQVPGRKTDVKDCSWIAELLQHGLLKASFVPPPAIRDLRDLTRQRTQLVGEKTAVANRIQKVLEDANIKLASVASDVLGASGRDMLEALCAGETDPGKLAQLARKRLREKIPQLRLALAGRMTDHHRFLLRLHLDHLNHLEKLIGQLGVRVEEVLAPFAGAAGRLMTIPGISQRVAEVVVAEIGTKMEQFPSAAHLASWAGLCPGNHQSAGKRKGGRTTKGDRWLRTILVQAAWAASRTKGTYFQAQYQQLARRRGRKRALVAVAHTLLVVIYHLLKDGTTYVELGPDHLGRQDPERLTQRLIKRLERLGHKVILEPRPAA

SEQ ID NO: 217619 - protein, 417 aa, unidentified
MKCAPIFLPDQPANGLTAGIDWARDDHALAIVDARGKQIYRDTVEHSDAGLRALLKLLANHGVGEVAIERPDGPVIDALLDGGLTVVVISPNQVKNLRGRYGSAGNKDDRFDAFVLADTLRTDRARLRPLTPDSPATVALRRACRARKDLVAHRVALANQLREHLRRVFPGAVGLFADIDSPISLSFLSRFDCQDRADWLSPKRLAAWLASVGYCGRTDPAVLHARLTDAPRGATGDHGTAESRVTQAYLAVLASLTDQIKALSIQIDEQLALHTDAHIFTSLPRAGRIRAARLLAEIGDCRARFPTPESLACLAGVAPSTRQSGKIRSVGFRWSCDKQLRDAVTDFAGDSRRANPWAADLYDRAIARGHDHPHAVRILARAWIYVIWHCWQDNTAYNPDQHGALQRLIQSRNHAAP

SEQ ID NO: 217620 - protein, 360 aa, unidentified
MSEIIRIGIDTSKSVFVLHGVDGTERPALRKKLRRRDLVGFLAKLKPTRIGIEACGAAHYWGRTFQALGHEAVLLPTQLVKPYIARNKNDGADAEGICEAMSRPRMRFVPIKTAEQQAAQMLIGLRDRLVRQRTQVSNAIRGYAAEFGLVAAKGLDKIEPLLARIADAPDLPDLAKELFALHSQEYVQLKVRLRQIEAKLMAWHRHNELSRRLAEIPAIGPIGACALAIKVTDPGAFRCGRDFAAWLGLTPKDHSTAGKQRLGAITRAGDEMLRSVLVVGATAVIQQARRGRGKATPWLIDLIKRKPPKLAAVALANKTARIAWKLMVSGERYDPHHQGRGRSNPPSPPAVSTAPGSRGA

SEQ ID NO: 217621 - protein, 425 aa, unidentified
MFSESQDDEQIIERVAALDIGKAEVVCCVRLPAPGPGKRRVQEVTTHTTMTRSLTELANRLVGLGVERVVMEATSDSWRPPFYLFEAHGLQPWLVNAKDVKHLPGRPKTDVLDAVWLCKVAERQMLRPSFVPPHEIRRLRDLTRYRVDLVGARNAEKNRVEKLLEDACIKLSVVASDIFGVSGRAMMAAMIAGERDPKVLADMARARMRTKIPLLEEAFTGYFDDHHRFLLARMLGRIDAIDADIDALDAEIEAYLVPFADAVDRLDEIPGIGPTAAAIIIAEIGLDMTRFPTPGHLASWAKFAPGIKSSAGKNKGNGSTGHGNRYLARVIGEAAVSAGRTNTFLGARYRRIARRRGKKKAIVAVGRSMLVAIWHVLSDPETRFVDLGADYYDRLVDTAAKKRHHIGQLEALGYRVTTEPAQPAA

SEQ ID NO: 217622 - protein, 377 aa, unidentified
MKKELYLGLDVHKDCILRATAEEGRRGEVRDVGAISNDLHAVEKWIAQLRKAYGKETQLRACYEAGPCGFGLARRLRQLGVECEVVAPSMTPTRSGDRVKTDKRDARKLARLLRAGELTAVYIPEPTDEAMRDLCRARTDAVDDRRRSRHRLKGFLLRHGYRYQGKSAWSAAHERYLRELVLPHPAMKVILEEYLQAIAAAGERIERCELGMRDLLEKWRLAPAVRALMAMKGFQTVAAMILVSELGEVHRFAHPRQVMAYLGLVPTENTSNDKRRQGRITKCGNAHARWLLVECAQHYATPPKVSQHLSRRQQGQPQEVRAISWRAQHRLHSRYTRLLGRRLQRNKAMVAIARELCGFIWELLRTQPCYQAQSTLI

SEQ ID NO: 217623 - protein, 421 aa, unidentified
MKKSERFVGFDCGEDTHSAVLLDPAGKFAKRYDVVNDRGEIQELLAGLMLDVGSEAHLVVVVESTRSYGRIVADVATGLGCELWQVNTIALNHFRDLEGQPRKNDEWDAYLGARMVFLRMGGCREAIEITEEERTLSRFTRTHSRMVEDRKRHIARLRAVLLELAPRVLHKSWEGPQPSSKAMLYLLERWPGLEGLERAQRRSIEKILRQCRYGSRATHVAKLLRQMARGISVAADERSAFTLELDLLVRQIRFCNESIAQMYAQITQRVERHPIGKKLLEMDGNGPVITAVLISELLPVTRTSTEAKSATYAGVTPLARKSGKSLDNDRLTQGVNKRVLHALYTSSVVAIKHNAVDRAYYNKKLRDYAGHPKPHVAAFIALSRQRHKLIHKLMTTDARYDKEILISTHLARLERNQTAAA

SEQ ID NO: 217624 - protein, 318 aa, unidentified
MYYIAFDVSKKVLCGFDGEKELAFDNKKGLKAFKSYLKKKYQDLNDLVIVFEATGVYSNYLKAFCADNNLKVYIINPKRSSNFSKAIGNRSKTDKIDTKQTIYEYRKIIGPKDIKVPKIDKVAQTLSAYLTSYKFTVKKRVSISNHLEALERNTSSLELVALLKGELKQTKKTEEKIKAKIEEYIKKDSQLNEDYKRQMTIPGVGKVSAICLLTLFNQYKDTNQAQITALVGLDPTKRESGTSVKGKMKISKNGDRMIRGTLYFPLLSAIRFNKKIKALYDRLLANHKPKQVALIAAMRKLILISHAIYKNKTVYSAV

SEQ ID NO: 217625 - protein, 331 aa, unidentified
MDPTRTTTTAAAQVFAGVDVSKDRLDVCLRWNGPESHEEEEAFVLAYDDSGIDALLSRLLEEHTVLVVLEATGGFERTVVGALAAAGLPVVVLNPRQVRDFARATGRLAKTDRIDASILARFAEAVRPTPKPLPDREIRALQAIVARRRQLLGMLAAESNRLSSAAKPVAKRIKAHIRWLEKELSRTERDLEAAIESSPALGENEALLRSVPGVGPVLARTLLAGVPELGTLTHKRVAALVGVAPLNRDSGTLRGHRSVWGGRADVRAALYMGALVAARRNPVVKEFYERLLAAGKPKKVALVACMRKLLSILNAVLKHRTPWRSPHYLSP

SEQ ID NO: 217626 - protein, 350 aa, unidentified
MLIIGCDYHPAFQQIAFVDTDTGELQERRLQHRGEAERFYRELAAKRMKVRVGMEASGHARWFERLLSELQFELWIGDAAEIRTKRVRKQKTDRQDAQLILQLMLEDRFPEIWVPSWENRDLRQLLWHRHRLVQARTRIMNQLQAVALNEGLRCTKRLWREAGREQLEAFRLARWASRRRKDLLELLDRLTPTIAELTRAIEQEVEKCPAAQRLQTHPGVGPLTALAFVLIIGRAERFQCGKQIASYLGLVPLEKSSGNQRRLGHITKQGSSLLRFLLVEAAQVTARSLPEWRSKYYHLTMRRGRKIAKVAMARKLSVRLYWMMRKEWDYGQLTKFGSYAGKPENRDGVK

SEQ ID NO: 217627 - protein, 341 aa, unidentified
MSEISMVGIDLAKSVFQVHGVTAAGSVALKRRLRRAEVLRFFGGMSPCLVGMEACASAHYWARELTKLGHEVRLLPPAYVKPYVKRGRKNDAIDAAAICEAMQRPGMLAVPIKTEEQQAVLALHRVRSLLMTQRTMLSNALRSHFAEFGITVAQGEVGFAKLVVLALDAEDRSLPQAAREALAMLATQWRETDAKISALDRAILVCHRADADSRRVASIPGIGPITASALVAAIGDPRRFETGRHFAAWLGLVPRQNSSGGKERLGRITKMGDRYLRSLLVVGATSVLRHRQKEQGTWLASLRARKSAREVTVALANKMARTAWAILAKGGVYRETAAQAA

SEQ ID NO: 217628 - protein, 354 aa, unidentified
MTSDPGQPAQTFASIGIDIGKDVFHIVGFDAQGKIFLRKKFKRLALESELAKLPPSIVGLEACLSAHFVSRTLRRLGHTPRIIPAIYVRPFAKGQKNDYNDAEAIAEAALRPNLRVVQEKTQDQLDLQALHRVRARLVSRRTATINQIRAFLIEHGIAVRTGANSLRRSLFAILENRADELSPRMSDLIVGLYEDWLWLDERIETLTDEIEQISHREANCRRLMSIPGVGPIISTAVVAAIGTGEAFERGRDFGAWLGLVPRQYSTGGKSILGRISKRGSRYLRTLFIQAANVILMRPQTWERFSFGAWLKAAQPRLHRNKLATALANKLARIAWSVLRNNIAFDAHRVEVVAI

SEQ ID NO: 217629 - protein, 394 aa, unidentified
MHKDTHCAVVIDCWMNKLGEINFENRPSRFPAFVEDVRKICGTKEIVFGLEDTRGFGRNLAAYLVGRKFEVKHVNPAYTSAVRLANPIIYKDDSYDAYCVARVLRDMVDTLQDAKHEDIFWTIRQIVKRRDLIVKSNVMNKNQLHSQLAYSYPSYRKFFAMIDSKSALCFWENYPSPEYIWNTTPEEIYQTIKHVHQALKIQRIHEIISMIERDGDTRKDYQPERDFIVRNIVKDIRHNKELIAEIDDELRKLIPLTGYKLHTMPGIDLVTEAQIISEIGDINRFPDSDKLARFMGLAPVQFSSAGKGKDQRCRNGNRALNAIFHFLAIQMVAVSASGKPRHPVFREYFEQKVKEGKNKPQALVCVARRLVRIIYGMMKTRTEYRPYEKVDDKN

SEQ ID NO: 217630 - protein, 351 aa, unidentified
MNKVTTLGIDLAKTVFQLHGVDVAGKVVWRREVRRAQLMKFVAQLEPCLIGIEACGGANYWARRFAEFGHQVKMMSPQFVKPYRKSDKNDRNDAEAICEAVTRPSMRFLAVKSVEQQEMLTMHRVREGLMKERVALINRIRGSLSEYGIVIAKDVSNLRRELPGILEDAENELTAVARQLFSELYEDLSAREQRIRQLEHSIRALGSQHDVVRRLQTVPGIGYLSATALYGTVGDAKHYRNGRQLAAWMGLVPRQSSSGGKQRLLGITKRGDKYLRKLLVHGARSITTRAERTPRPPDRWLNELRERRGKPRSYVAQANKTARIAWAIMAKGEVYRAPTTAALEASAAVAA

SEQ ID NO: 217631 - protein, 357 aa, unidentified
MSNKATKLDFRGQVFHIGIDVHKRNWRVTVLNNGLELKTFSMNPSPDDLRSYLQSNYPGGEYYTAYEAGFCGYWIHRKLESLGMKNLVVNPADIPVNFKETVRKTDTIDSRRLARALYSNLVHGNYIPSLEQQGFRSLCRLRKQLVKDQARVKNRIKSFLDFSGIKVLSQNEISHWSGLFLNYLSNLDLGNEHSNETLSRMLGQLMSLRNQIADLVKRLKTIVRQDEAILRVMNNLMTIPGVGFSCAIVLYSELMDINRFSSVDKLCSYVGLVPDLRSSGESEYTLGISKLQLQFLRAMLIECSWIAIRKDPALTAAFNTLSIRMKKQEAIIRIGKKLLTRIMYVWRNNEPYICSIV

SEQ ID NO: 217632 - protein, 420 aa, unidentified
MHALTDNPFTAYVGLDWADSKHDVCLQAAGGEQRELDCFPHQVEHIEGWANSVHQRFGGPIAVALELTKGPIVYALQKYDFFVLFPVNPSTLAKYREAFKPSRAKDDPTDAELVLDLLLRHPERFKALKPQSVEMRTLVSLVEQRRRPVNDKTRITNRLRNTLKQYYPQTLEWFDHIDTLLFCDFISRWPTLTQVKRARRTTLETFFHKHNMRFAHVLQARLRSIKAATPLTSDEAVITPHRLQALVLVDLLRVTLQAIMRFDDEIAELAPKHADYALFSSLPGAGPSLAPRLLVAFGEQRERFKNAAELQMYAGVAPVTERSGRKSWVHWRWQCPTFLRQTFVEWAAQTINKSFWAGTYYRQQRAKVCSYQAAVRSLAFKWIRILYRCWVTRTPYNESEYLMALERRGSSLLKQFTTPK

SEQ ID NO: 217633 - protein, 421 aa, unidentified
MLKIYRFNCAGLDVHKNLIVATIGITDKKTRVTEYIQKDFSSLNFDLYNLKNWLIEHECFDVCMESTGKYWIPVFNVLETEIKMNIVLVHPKYVKAIKGKKTDKKDSKWICNLFKHDLLKSSFIPPKDIRELRDLSRYRFKLICMRTSERNRYQNSMTVSNITLASVVSDPFGKTAKAIMNEVLSTEVIDEPKITKLIHGSCRNKDKIIESLKNSKIEPDQRFKMTEIQSHMNELDKHIEAVEVEIIKRASRYFDDFIHITEIDGIQLISAILIISEIGVDMTQFETDKQLCSWAGVSPANNESAGKKKSVRISKAGQYLKPVLIQCALAAIKNKNSYFGQKYMRIKKRRGHKKAIIAIARMMLVSIYHMILTGEKFNPSDYESFKNPKQRKEKNNYTVETALDFLKSQGFDVSSIQEIPK

SEQ ID NO: 217634 - protein, 339 aa, unidentified
MKINVLGIDVGKSALHVFGVGEQGRAVLRQRMTRRKLREFMVNLPPCLVGMEACGGAHYWARVFEGHGHQVRLMSPQFVTPYVKSNKNDFLDAEAICEAVTRPTMRFVPIKRVEQQDIQSLHRARELAISHRNAQASQLRGLLLEYGLVVPKGIGKLRQRLPEILEDAENGLSDATRSLLAALGEELVHLDGRVGEFDCQIAALSRGHEVCRRLMSIPGIGPLIATALLAAVGDASVFRSGRAMAAWLGMVPRQRTTGGRVVLLGISKRGDTYLRTLLIHGARAVLRVAHKRDDKRSRWVVALQGRRGPNVAAVALANKNVRTAWALLTRGTTFEAQAA

SEQ ID NO: 217635 - protein, 472 aa, unidentified
MIIFQNKCMSKIGYLGIDVSKGYSDFLILHCNKEVAEQPFRLYDIAEGQQQLGKIIDSLFRKGFEQIYCGVESTGGYENNWINYLQELGKTKSVQIARINPKGVKSLGEAGLTRTITDSVSAQNIAFYLIDFHHKIHYLQPSQTTKVYLDSRKHNSFIRMLKKQKNQLGNQLEKIVYQELSVLMCYCRHGFPLWLLLLLEKYPGVELMKKAGEKKLSKIKGISNEKAIALIKKISSLNNATSDHVSSIIKSTVRQILQLDESISEQKADLLGRFNNEEQIILLTSITGVGEQSAVEILIEIEDVNRFKAAKSLIAYFGTHPMWKQSGDGTWGNHMSKKGRSEIRGVLYMCCMTAIRYDEMFKSKYAAARAQGKNHYSAMGVVMNKMLRIIFGVLKNKTKYNIETDQKNQQNAKAKQKQKEQMQAEEKKEKQTKLERYNDTIQENLPISNRHAKRKRQSPKLQNEVCTGSSAP

SEQ ID NO: 217636 - protein, 405 aa, unidentified
MRHKAWIGMDLGKRFHQVAVIDAVKREIVSPFRVRRGREGVRTLQERLREVGVSDKEMVVTIEATGNYWNELVGMLRVAGCEVYLVHPKKAHDLRKFYRDHTKTDVTDAEALARMPLVDEKLKPVWSGTSTVQTLLRLCRLRWKYRCRIADLKRRISGFTEMVVPGIDRVMPVRYSKSARVFLRRYLAPSKARRLGKKRLVEILSKAAWGKFSDKKSDELWACIENAPDLGWDADDLLLEIKVQLDELEALEHQVERLDARIAELYCEVDPEQRLKRVAGLGEFLAAALTAHIGEVSRFPSSKHLVSYAGLVTRVKHTAGHTKGGQVITKAGSPFLRAWAYMGAACARQYDDELKRFYKRMRDRGKHYNLALCATAARLLERAYDILSENREEVIEDVDVRVAVG

SEQ ID NO: 217637 - protein, 434 aa, unidentified
MRGAFDMADFDKSKPYSSWVAIDVAKDYNAVMIERRDGTRKKFRMANSADDHDKLVAFIRELPQPARIGFEATGNYHRALGFRLVSEGFDTCLISSIAGARYREVMFNSWDKNDPKDSEVLLELLKKGIVQRHVEPLIAGHHDLQELSKTYYNVTLSRTRLQHSILNHYLPLYFPEMRKFWCSTRSEWWVNYLLRFPTPSCVRSLPFSDYVTVAWPLLGRKVAKQRKLEELYAVAQRSIGLPIASDSVACETFKLQLHRYLDLNAHRKALEERAHEILSQNPDYAVLTSIPGIGPITALTIFAEGGDLRRFGHHRQFLKYCGFDLAKNQSGSMRGLEQLSKRGNARLRLALWMAALNATTHKENSFREKFRRYIQTDPQDADLRRKALTAVAAKMARVVYGLIKSGKTYQGYFEQALPSGSIPLCRAVEAVRTS

SEQ ID NO: 217638 - protein, 347 aa, unidentified
MTIMVDTQRALTGGVDTHADVHVAAVIDPDGGLLGVKSFATNLAGYKLLSDWMGAFGEIGLVGVEGTGSYGAGLARHLHRVGLVVVEVDRPNRQERARAGKSDSLDAIEAARAALSGRALGVAKTRDGNVEAIRALMVARRSARESRTKAINQIRQLVYTAPDELRERFVDVPSWRIAEGVAILRVHADADPVRMATKSALGTLGRRAVSLGEEGKRLDVLIARLVDKVAPELVELVGLGPDTAALLLIAAGDNPSRLRSEATWAKLCGVAPLEASSGKVTRHRLNRGGDRQANHALWRIVITRMSCHAPTKVYVARRTAEGKSKREIMRVLKRYVAREVYHYLPRD

SEQ ID NO: 217639 - protein, 443 aa, unidentified
MGRRCIGLDVHREFAQIAVWEDGLVRQAGQIALCDEQLRMFADSLGPEDEVAVEATCNTHAIVRLIEPRVKRVVVSNPQKTRAIAEAKVKTDKVDAAVLAELLAADYLPSVWVADQDTQALRRQVSRRAHIVRQRTRLKNQVQAILHRNLIARCPAADLFGIKGRCWLANQPLPPDEQLAVEALTGQLDFHAQELRIIDAALGRVALGSAEVKRLMRIPGVDATVALSVVAAVGDFRRFRAPEQLVSYLGLNPRVKQSGGQPASHGRITKQGRAHARGMLVEAAWAASKTPGPLRAFYERIRGRRGMQIAVVATARKLAVLCWTMIERGEDYAFARPSLTDKKLRALELRAGMPSRRGQKGKAAAYSLKAVRRLEREIAEQGEHAYRQLVADWQARGPAKAKPSVAAANGTRLTRPSAGHAARQASIPEPALRSGVDHAHSQA

SEQ ID NO: 217640 - protein, 343 aa, unidentified
MQVVRIGLDLAKYVFAVHGVDARGKVVLRKTLRRDSVSCFFANLPPCLVGMEASNGAHYWARVLTDLGHRMRLISPQFVTPYVKSNKNDRNDAEAICEAVGRPSMRFVPPKSVEQLAVQAIHRIRRRLVSNRVKLVNQVRGLLAEHGIVIPRDITQFRRGLAQTIASCAGGLSELVRLLMRELQEELVELDRRVASYDRRIREIFRHSEPCQRLGKIEGIGPITATALIAAVGDRTCFKNGRQFAAWLGLVPKQRSSGGRARLFGISKRGDRYIRTLMIHGARAVLGRARGKQDPRSLWLGKLRQRRHPNIAAVALANKNARIVWAMLSGDTAYEPALSVKAA

SEQ ID NO: 217641 - protein, 416 aa, unidentified
MPLGLPEAVFFTGIDWAAEAHAVCVMNAAGKIVAEFTVEHSADGIAVLARRLAKFGDPADMPVAIERPAGRLVDLLLEAGHPVVPVKPNAIKAWRDGEVLSGAKSDAGDAAVIAEYLRLRYHRLTPAVPYSGETRALRTVVRSRDDLVDLRVAATNQLAALLDAHWPGAKAVFADVESPISLAFLARYPTPAAAAHLGEKRLAAFLVKHSYCGRRPAAQLLDRLRAAPAGTTDEALTEALRDAVLALAAVLTALNAAVKDLDRSTAAHLGEHPDGQIFTSLPRSGQINAAQVPAEWGDCRQAYERPDSVAALAAVTPVTKQSGKHRSVEFRWACSKRFRRAITIFAGNSRHASPWAATIYNHARAAGKDHPHAVRILARAWIRVIWRCWLDGIPYDPAKHRAAAALAEQTAGQFAA

SEQ ID NO: 217642 - protein, 338 aa, unidentified
MYYSGIDQHKQFSYFTTVNDEGIIIKQAELKNNEFDILNYFYTLGKNHIATVETTGGWYWMNDLLSNHGINLKLAHAKYVKAIAYAKVKTNKVDSHILAQLLRLNFIPEAYKISDNLRPLRDTLRARLRLSQKRTSCLNFMNRMLEKFNINSPSQLTEFYKLQYLQFDNQEQLLKQQMLTLEKSLYPSLIPNEDIQRLLWIPGIGKLNAFSILLEVGDINRFQSEKNFFSYCRLVPSARNSAGKSKQRSSKDGNKYLKLVFSDAAVHSLQYYPTIKKYHDSKLRKKKKQVAHAIIAKEIARIVYYVLKNKSAFNNHFKGIELEHKKSVQWPRTSSPDV

SEQ ID NO: 217643 - protein, 357 aa, unidentified
MLFLHLRYFEQYLRPGLPAACIHKVDSASIMEENTTLTYLGIDVSKAKLDCSLRLGEKYRSKVVVNSAPGFAQLVEWLNKQCAGQVHVCMEATSVYGEAAAMALSQAGYIVSMINPALIKAYAQSNGLRSKTDAVDARVLANFCHERRPRVWTPPSGNELALRALVQRHQALVEMQTQEKNRLGVARDAVSGSLQQHLAWLDEELKRIEEAIAKLMDDDPDLRNRRDLLDTVPGLGERTIAILLAYIGQMLRFETARQFVAFSGLSPRLHESGSSVRGKPRLSKVGHAALRRALYMPAMVTLYKTAWGKVFRERLAASGKAPKLIIGAMMRKLAQVAYGVLKSGKPFDPQLHGVCIG

SEQ ID NO: 217644 - protein, 424 aa, unidentified
MLSVSREERNNVSYRIAGIDVHKKMLAVVVSEAAEDQLQFQRRKFGALESDLRLLAAWLAELGVEEAIMESTAQYWKPVWQMLEGQCHLELAQAQSNRGPKGRKSDFKDAERLVRRFLADELTLSFVPDAEQALWRTQARTKVRWSRDRARLQNRMEALLEEMRIKLSSVVSDLLGVSARRMLRAIADGEKDPAQLAAMADPALRASRDALCNALRPVTTLDQRYRTILKQFLDQITFYDEHIRMLDKELSESLRPHSDSVERLAAVPGLGVDSAQQIIAEVGPKAATFPCAGALSSWVGTCPGEEESAGESSSDHSPKGNRSMRRILNQAANAAVKAKGTVFEAHYRRLKGRDPKQHNKAVWAVANRICRLVWKILHHGVSYEERGHRPSIRAVKKRAARLLRELKALGYRVQIDALPQTASS

SEQ ID NO: 217645 - protein, 416 aa, unidentified
METLVERGCGLDVHQATVVACLLVVCQDGKVQKQLRTFATTTRELLSLRQWLGSEGCTHVAMASTGVYWKPIYAVLEGEELEIIVANAQPVKKVPGRKTDVKDAEWLAEWLCHGLLRSSFIPPVPIRELRDLTRYRRKLVEARWAERNRLLKLLESANIKLASVATDVFGVSGRRMLEALIEGTANLSEMAQLAKGKLRNKIPQLELALEGRLQEHHGFLLRLQQNRLDAMEADLAVLEQRIQQRLQPYASQVALLQEIPGVELTLTTVIIAELGVDMTVFQSVSQMASWAGVCPGNNESAGKRKSSRIPKGNVYLKTALVEAANAAARAKGTYLRDKFYRLKARRGYKRAVVAIAHKILVSIYHMLSQNVSYNDLGDLYLDRLNAHPLTRNLVHRLERLGFQVTLTPQQNTAHAA

SEQ ID NO: 217646 - protein, 335 aa, unidentified
MEVVHARCAGMDISKRDAKVCVRIAGRGRTKTSTAVTTCSATSSAILRLADMLTQQKVTCVVMEATGAYWKPFYSLLAEAGLPVVLVNASQVRQIPGRKTDVADAVWLADLAAHGLVRGSFVPDLEITQVKDLVRARTILVRLRGEEVQRLEKLLESAALKLSSVISDLNGASGRRMIEALIAGERDPEVLAGLGHGLLKASRAELAEALTGRFSDHHGFLAKVHLDLIDSYNARIADLAARIETYFEPDRPTSAEGPSLHRARELLVTIPGISLIGAEQILAEIGTDMTVFASPGRLASWAGLAPGAHESAGKIRSTRCRSGNSYLKARWSSSP

SEQ ID NO: 217647 - protein, 304 aa, unidentified
MNGIGIDVSKRQLDVGTTDGEILQVSNSASGFAELDLWLRKQPASQIVLEATGGYEQSVLNFLHNAGHPVVRANALRARRLAQGLGQMAKTDRLDAYALAQMAALVKLPPYQPLKPWQQKMREFVRARRQTMEALTVARQQQEMVTDRELRRLLQANISRLQGIVGRLGKQIAEQVAQQPQLAVLKSMKGVGPGLQAILASYLPELGRISGKRIASLVGVAPMSHDSGTMRGKRSIHGGRAEIRQVLYMASMSAMRHEPRLRDFYQSLRARGKEGKVAIVAVMRKMLVILNARVRDAQGGSIPA

SEQ ID NO: 217648 - protein, 469 aa, unidentified
MKKHQSAKTKSKALKPIHDPQPDAAGIDIGANEIWVAVPPDRSQDSVKRFGAFTRDLQAIVQWLVDCGVRSAAMEATGVYWIPLYQLLADAGLKVCLVNARHVKNVPGRKSDVRDCQWLQYLHSVGLLMGSFRPPQAICAARSIYRYRQNLLSTAAQHLQHMQGALEQMNVKLHHVIDDLTGLTGQAIIEAILAGQRDPEQLAKLRDKRIKASKERIVKALEGDWRREHLFVLAAAWHSWKELQQQVQSCDQELLNYSRELEACTTVAKPTKVMRLTQLAAPNPVGPKGRKARKKTSKNEPQGPWREELLRFFGVDLTAIPGISVLSSLTLMTELGNDLSAFKTAHHFASWLCLCPDNQTSASKVLRRATRRSQNRVRQALRMAASSLHHNKSYLGDKYRRLRAKLGAPKAITAMAHQLARIIWTLITRRVDFDLSIFALQEQANEQHRLKRLSASARQMGYHLTPIAL

SEQ ID NO: 217649 - protein, 323 aa, unidentified
MCKVIGIDISKKSFDVGYQKKDEKFSVFKFENDVKGFNKFRKQINDGDLCVMEATGPYFLSLAQYLFEQGIKVSVVNPLQIKHFVRMRMVKTKTDKKDAMMIALYGQSEQPELWQPNEKYIIQLQQNHTAIEGLQKQSTMLNNQLEAFSHISGNDKTVARELSALLKTIKRKIEKLENRMIEIIKKHYGETFVSLKTIPGIGTKTAIILIAITNNFRKFDDIKKLSAYVGLAPRIFESGTSVKGKGHITKMGNKYLRKLLYLCTWSAKKYNEQCKLMYERLSEKGKPERVIKIAIANKLLRQAFAIGTNLSSYDEKYGKSLVF

SEQ ID NO: 217650 - protein, 346 aa, unidentified
MIIVGCDFHPTWQQIAVFDSETGEITEHKQIHGNGEAEQFYRRLPIASRIGIEACGNSQWFVDLLQRLGHEVWIGDAAQIRASYVRKQKTDRRDAAHILRLLIEGRFPRLWTPSAEERDLRQLLVHRHKLVAIRTRVKGGLQHLALNRGLQKKSKLWTAAGQKALRELPLDTWAACRREDLLGLLASLDKQISKLDAAVERAAEEHPQARLLVTQPGVGPITSLAFVLTLGDVSRFQRGKQVASYLGLIPRERSSGGKQRLGAINKQGNSLMRTLLVESAQSVTRLDPGFRKQYLHRCHRMAKGVAKVAAARRLAVRLFWMLRTNTEYPEIVRIESSPTLAVVSES

SEQ ID NO: 217651 - protein, 343 aa, unidentified
MYYIGLDVHKKTISYCVKDATGHVHREGKIGSTRRELDAWIQTLPQPRMMAMEATIFTGWIYDYLLPHVEKVKVAHPLMLRAIAASKKKNDRIDAGKIADCLRCDFLPECHMASTEIRDRRRTLRYRHLVVRQVVQMKNRISGLLMESGVSYDKQRLHKMGYFTELLSTNQEISDSIRPLLRLGREHILRGQRLDRALISSLEGDPLLSERLRRLRTIPGVGSITALTWALEIGDYTRFPSVKQAISYCGLCSAEKSSADKVMRMPISKQRNKHIQHVLVEAAKLAPRYSHELALLREKEIQRGNKNRATLAVARKLVAYMLAVDRRKQDFVPAEELAAKAVA

SEQ ID NO: 217652 - protein, 468 aa, unidentified
MPHEVNMPSPDKHSKRKNTKSSTTPASLPILQPMVAGIDVGSTQHWVCGPPRDGAPNVRVFGTTTADLNELADWLAAQGVKSVAMESTYIYWIPIFELLETRGLDVVLVNARTLHNVPGRKTDFSDCQWIQLLHSCGLLRGSFRPTDAITRLRALHRQMTNFVVERGRCTQWMQKALDQMNVQVHRAVSDLTGTTGMAIVRAIVAGDRNPENLAKHRDPRCRKSVEEIARYLTGNWREEHLFNLAAALQHYDSLQKTIASYEARLLEELTNLQPPERQHEPVPPHPNPAKEKTIRVRGAQETRATLWRFAGVDLTRIDGISTTTAQTVLTEVGPNLAAFPSEDHFVSWLRLCPRTPISGGKPLKKKKNGLGANRVAAALRMAATTVQRSKTALGAAYRRISRHKGAGVAVFATARQLARLIYRMLRFGQNYVDIGENAYEAQWQARRLVGLKESARSLGFTLQEIASG

SEQ ID NO: 217653 - protein, 348 aa, unidentified
MRFYTKQHLFYCGIDLHARTMYLCILDRDGEIVLHRNMKAAPEPFLKAIAPYREDLVVCVECIFTWYWLADLCAQAGIPFVLGHALYMKAIHGGKAKNDTIDAQKIAVLLRGGMLPQAYVYPANMRATRDLLRRRMYLTRKRAELLAHIQNTNSQYNLPEIGKKLADKANRAGVAERFPDPAVQKSMAVDLTLLGSYDPLLSDLELHIVKAAKQHDANTLYLLQTVPGIGKILSLVLLYEIHDIRRFPSVQDFLSYSRLVKCARESAGKRYGTAGAKMGNAYLKWAFSEAAVLFLRDNPAGQKYVTKLEKKHGQGKALTLLAQKLGRAVYDMLKRQQAFDMHKFLQAS

SEQ ID NO: 217654 - protein, 398 aa, unidentified
MTESSDYESVQVFIGVDVGKDTHHAVAINRSGKRLFDKALPNDENKLRSLISDLKQHGQILLVVDQPATIGALPVAVARSEGVLVGYLPGLAMRRIADLHAGEAKTDARDAAIISEAARTLPHALRTLKLADEQIAELSMLCGFDDDLAAQTTQASNRIRGLLTQIHPALERVLGPRLDHPAVLDLLQRYPSPEKLASLGEKKLAAQLCKLAPRLGKRLAADIAQALAEQTVVVPGTNAAAVVLPRLALQLITLRKQRDEVALEVEQRVLAHPLYPVLTSMPGVGVRTAARLLTEVACRAFASAAHLAAYAGLAPVTRRSGSSIRGEHPSRRGNKALKRALFLSAFAALRDPLSRAYYTRKMSQGKRHNQALIALARRRCDVLFAMMRDGTFYTPQAS

SEQ ID NO: 217655 - protein, 391 aa, unidentified
MIYVGIDVAKDKHDCFITNSNGEVLFKAFTISNNQDGFNVLYQRIESVMEDVTKVKVGLEATGHYNYNLLGYLIDKGLTTYVINPLHSNLYRKSLSLRLTKTDKVDAHTIAYMLMSDVNLKSYSDTSYHNEELKSLTRYRFDKVKERAKLKTSVSRLVCILFPELEKLVPTLHMASVYALLSEFPGAKHIAGAHLTRLTNLLSDASKGRYGKDTAITFREAARASIGSNMPAKSLELKHTIQLILELGSEIEEIENEIKIIMDEINSPILSIPGINYRMGAMIIAEIGDFSRFDSPDKILAYAGFSPSTYQSGQLDSAYSHMEKRGSKYLRYALYNAAKYVCHWDSTFAGYLAKKRAEGKHYNVAISHSVKKLVRVIYHLVKSNQQYIKVA

SEQ ID NO: 217656 - protein, 386 aa, unidentified
MPQLNDLSRSLVILEQDATLIAVIEMGQSSWLVAGIVPGVERSPLKKLAVDESALLKLLNRWREEAEKAGHRVERIAIAFEAGRDGFWLARWLRARDIEAHVIHASSVAVSREHRRAKTDRLDTELLKRAFLGWLRGERDHCKMVAIPTIGDEDAKRPNRERESLVGEQTRIVNRMKAALSRLGIRGFNPKLKKAAERLEDLRTPEEEPIPPNTLAELRRDMERRRLVRSQIRDIEDARLERIEQARGDGPHAMVRLLARVIGVGIETADMLVQEVLSRNLRDRRAVARYGGLTGSPDESGKKRREKGLARSGNARVRRGMIQLAWRFLMFQKDSALAHWFYARTKHAPQTRKTMIVALARKLLIALWRFVREGAIPEGIVLRPAL

SEQ ID NO: 217657 - protein, 455 aa, unidentified
MSDSSTGGAGGAGGTGGACVPFEQFTHFGGLDWAQSEHQLVVVDPAGKIVLSLRFANDAPGWTLFRREVAAFGRLAVAIETNCGPAVERLLEAGLTVYPMNPKAATRYRDRKAPSGAKDDALDAWSFADALRTDGHGWRALLGQDPLTAELRLPCRDEVKLIEQRTALVHQLKSALYEYYPAALDAFDDWTGGGGEGPWRFVVAFPTPEELVKAGKRKWEKFLHAHKLYRPQTADRRLASFAGAASFAGAAGFASPNPAVTRAKSLLAVTTAKQLSLLQSQLDEYRRRIVKLFGDHPDHDCFGSLPGAGAKLAPRLLSELGSNREVFRSAEALQNYAGTSPVTKQSGRSRVVAVRRACNKTLRATIHLWADLSRKSCVWAEAYYQNKRAAGMAHAAALRCLGHRWAKILWKMWQTGTPYDEALHLKNQAEHGSWVIKLGARARFNPLTPTTLNTA

SEQ ID NO: 217658 - protein, 343 aa, unidentified
MHITTIGLDLAKHWFQIHGIDAAGKVVVRRRLCRAEVVEFFRRQGPCLVGMEACATAHHWARELIALGHEVKLMPPAYVKAYVKRNKNDAADAEAICEAVTRPSMRFVPVKDVDQQSVLMMHRARNLLVRQRTMLVNALRAHLAEFGIIAPQGLRHIERLAGAIEEDSPALPELARSILRLVVAQLNDTQAKVRQIEAKLAKWHRSNRVSKLLATVPGVGIMGASAIAATVSDPNLFRSGREFAAWLGMTPRQNSSGGKERLGRTSKRGDKYIRCLLVAGAVAVLRHARNRATKNAEWVRALLTRRPAKVVAVALANRTARIAWAVMARGEAYRAREIAGQAV

SEQ ID NO: 217659 - protein, 453 aa, unidentified
MKKESVKKGVIKMGTGLPVFNHHAAGIDIGDTLHYVAISDGAGGHEVKTTSAFTCDLVEIVDYLKSNGITTVAMESTGVYWLPLYIMLEDAGIEPYLVNAKHVKNVTGRKKDDTDSIWIQKLHTCGLLQKSFQPDNEIRLLRSYTRQRKNLILLSSDSVRRMQKALELMNIKIHTVISDILGKSGIKMVKAIIAGERDPQILSTLCDPRIKASPEDIIKSLQGIWREEYLFMLEQALENYEFHQKQIKSCEEKIKQQLLNQVATIMDGDITDLEEQLKKKSKAKAKKNQFDFAVAPYLKIITGIDLCKIPGISDITALEFIAETGVDMRKWFGGKHFDAWLNLTPNTKITGGTIVSSKMMKKKNRAGQCLRQAASTLSTNKTPIGDYYRKMRARLGGKGAALATAHKLARIIYTMLLNQIEYNPGILMDNEEKIKLQKIKKLEKQLAQLKRAA

SEQ ID NO: 217660 - protein, 341 aa, unidentified
MTAIGIDTHKETLAACAVDGLGGALAERTFRNDPAGHRDLLAWAGAVAPGAVVGVEGSASFGAAAARFLLRAGLAVREVPPQLSSRERIRTRRAGKSDPGDALAIARVTAREADLPPVRVADRSLEISLLVEAREDLVTEMARVRNRLHADLRVLVPGYGERAANLVAVRHQRVAAGLLRRLTGVQAELARTRLARLRALADEERALAARIGAMVAGHPLLELPGAGALVTAKLLGEIGDIGRFRSADAFAALAGVAPIPASSGQTSRMRLNRGGNRQLNRAFHIIALAQARHHPPAKEYIERKRSEGKTHREALRALKRQLVRTVFRLLQEGAASARMAA

SEQ ID NO: 217661 - protein, 348 aa, unidentified
MTNILKQVLAADVAKNELVVAFGRMSQDTSIDIFAYKTFSNNQKGFKGLLAWVMKLAVKEVKVRFVMEATGVYHEKLAYYLTAQGHEVSIVLPNKISNYAKTLEIKTVTDKTASQAICQFGLERKLDIWEKPKEIFRTIKQLTRERDQLIAERTMIKNQLHAEKTEAYPNKDSILRMNKRIHLINQQEKEIRLAVTKVIKQDDELAAKIDKISSIPGVGKLTAAIVMGETNGFELIRSKKQLINYAGMNVKEKQSGTSVKGKPKMSKKGNRHLRKAMHLPALSAIRHDLRFKAVFVRLVSKHGIKMKAVVAVQKKILEMIYTLWKTDAEYDRNYLQKISQHTQVCINN

SEQ ID NO: 217662 - protein, 355 aa, unidentified
MDSTKYVGMDVHKDTISIAVMNSTGKVVMESVLETKALTILQFMQGLRGSLLVTFEEGTWAAWLYDLLKPHVTKVTVCNPRKNALLKSGNKSDRIDAQKLAELLRNGSLSAVYHGENGLRTLKELARSYLTVSKDLTRVMNRLKALYHSWGIACAGTQVYAPRHRLEWLSKITEVGVRGRAEFTYQQLDGLQALRQAVRRDFLAESRKHPATKRLREIPGIGPIRAALLVALLQTPDRFRTKRQLWAYSGLAIETHGSGQYCYLEGQLRRVKKPVALRGLNRNHHHDVKWIFKSAAVKASSPSGPLHQFHEALLAKGIKPSLARLTLARKIAAITLTVWKKGVRFDAEHLKLQAA

SEQ ID NO: 217663 - protein, 388 aa, unidentified
MIGEKYIGLDVHQATISVAVMDSKGKVVMESILETQAATILEFFAGLRGTLWVTFEEGTWAAWLYDLLKPHVAKLVVCNPRKNALLKHGNKSDKIDARKLADLLRLNDLEPVYHGETGVRMLRELARSYLTIVKDLSRVMNRLKALYRSWAIPCAGRDVYYTRHRSEWLGKIPEAGTRRRAEQLYQQLDMLQHLRQQARRELLAESRKHTITAKLRQIPSLGPIRSALAVALIQTPHRFRTKRQLWTYSGLGLETRDSGEYHYVQGQLRRRKKQVSIRGLNKDHNHDLKGLFKAAATRASVQPGPFQDFYQRSLAKGIKPTMARLTLAQADHGTPHAGTQDCSHYADSMEEGGKFRRCETEVASRLSVSGEEPLPSPAIFFWWWSVGS

SEQ ID NO: 217664 - protein, 381 aa, unidentified
MSTAATHHANGNTTEAILFVAFELSEKTWKLGFTTGHGQKPRERSMPARDHERVLDEIAQAKRRLGLPETAPVVSCYEAGREGFWLHRFLRAQGITNHVVDSSSIEVNRRRRRAKSDGLDVRKLLSMLMRYEQGERQVWQVVKVPSVEAEEQRHLHRDLETLKRERASTTTRIKGLLSTQGLQVTTLTKLPEQLEALRLWDGSPIPPSLRDRILRVYAHHTFLSQQIAEIEAERRAQLQTSSDASLDKIRQLMQLKGIGINGAWLLVMEFFGWRAFKNRREVGGLAGFTPTPYQSGESAREQGITKAGNRHVRWMITELAWSWLRFQPESALSVWFRERFGSGGKRLRRIGIVAVARKLLIALWRFLETGALPEGAVLKEG

SEQ ID NO: 217665 - protein, 356 aa, unidentified
MDMGQVVVGIDAHKRSHTLVAVDEVGRKLGERVVAATSEGHLHALEWASAWAQVRFAVEDCRHVTRRLEGDLLAAGCVVVRVPTQLMAQARRARRQPGKSDPIDALAVARASLREPDLPAARLDGPAREVKLLSDYRRNLVTERTILSNRLRWHLHELDPALQVPSRGLRRYRVLDELAARLQAFDGVVARIAAELVARCHDLTVQINALERELRDLIVVLAPSLLAVPGCGVLSAAVIVGETAGARRFRSKAAFARFTGTAPVPVWSGDTRGRVRLNRGGNRRINCALHMIAVTQARGIGRGQDYIAKAQARGKTRTEALRLLRRQLSDTVFTALLADEDANASHADRQPLPQAA

SEQ ID NO: 217666 - protein, 420 aa, unidentified
MKPSLEAEFTAFIGIDWADSKHDICLQAADSAQREFDRFAHRVDRIEQWACAMRQRFGGRIAVALELSKGPLVYALQKYDFFVLFPINPSMLAKYREAFKPSRAKDDPTDAQLALELLLRHRDRLNPLQPQTAQMRMLLYLVEQRRRLVADKTRFTNRLGHALKQYFPQALDWFDQTDTPLFCDFLTRWPTLAQVKRARKASLEAFFQAHNVRFAKLVEERISAIKTATALTEDLAVVTAYQLQALVLVDQLRVTLQAIARFDAQIATIAPTLPDYALFRALPGAGPSLAPRLLVAFGEQRERFAGAGELQKYSGVAPVTERSGNKHWVHWRWQCPTFLRQTFVEWAAQTINKSFWAGAYYRRQRDQGSSHQSALRALAFKWLRILYRCWQTRTPYDESTYLNALKRRGSPLLKAIGATT

SEQ ID NO: 217667 - protein, 379 aa, unidentified
MKFPGATRRIGQPMSLPRPVRVNGNMIFKGHKLTIGVDLGDRWSNCCVLDEAGEVLLEQKLPTTPEAMKQTFEKIPRSLMALERGTHSPWSSRLLRELGHEVLVAHAQKVNLISKSTRKDDRHDARTLARLARIDPELLGPVRHRSAKAQIHLTVIRARAELVSARTALVNAARGLVKSYGERLPKCGTEQVSRELAAELSAELREVLEPLLKEIESLNERIKEYDARMEKIAKESYPQVTLLKQVKGVGTQIALTYVLTLDDPHRFAKSREVGCFLGLKPGRRDSGESQPQMHISKEGDRYLRTMLVQGAHYILGPFGEDSDLRRWGLRLAERGGKNAKKRAVVAVARKLAVLLHRLWVSGEVYEPLRNSHKAMRAVA

SEQ ID NO: 217668 - protein, 450 aa, unidentified
MLERYAGVDWASEKHDVLVQDAGGEQVLAATFAHDERGLRALCDTLVRLGVVLVAIERPDGLLIERLLDGGLRVIAIHPNQVAAARPRFRASGGKSDRFDAFVLCELARTDHHRFKVLVADSDDTKALRALSRAREDLVQTRVALANQLRAELERFWPGGAQVFADVDSPIGLAFLASYPSPLDARGLGEKRLAAFLARHAYCGRQQPAALLAKLTSAPVGRAGDAETEARRAIVLALVAALRPIVSKISELTSEIAHRVRAHPDGDVFLSLFRDPKSVVCAAALLAEIGDCRARYPSAETLAADAGMSPVAVESGKRKVACFRRGCDHRLRNAVATLADATRHWHPWAADRYATARARGHDHQRAIRTLGRAWIRVLWRCWQDSVAYDPNRHRGLQDHIAVTILDESRPRLDLTATQRMAGAAVTQRAARRDEREALDGQPTSATALEG

SEQ ID NO: 217669 - protein, 443 aa, unidentified
MSRKKRTHLRGERGQAFADKIRGIPLDRILCVSLDIHKYFHVVMIHNALGEMVTPTFEIDIFQTGFDQLCRAVDEALARTQAQVVLLGMEPSSHYFENLARHLLARPQPVTLINSFAVKKNRDQQMMQREKDDEIDTAAIGDLLRRGEGTPYQPARGVYLELQQLDRVRLGKVKMRTMLQNQILGHLDRIFPGLVIIGEAARTRYTPVFTTDFWKCQTLQHLIRVCPDPRQLVGMSAQELIKAFHAQQYRLGRLAAAKLITYAKKVLLPDAALITIRCELLKHDLALLEEVERHIAKLEERLCALLIQTPYQVLTKLKGLTAVQVASLAAAMGDPAHYTYGAQVFRRAGLVAGRDDSGVRQRKGQGKHVTKVGDVYLRRALLSALSTLILHQPTLRAYYTQLKKSKPAGVARVATARRAMGILWATLRDQRPATLILKRGATL

SEQ ID NO: 217670 - protein, 400 aa, unidentified
MLSIGIDVSKGKSTVCGMKPGGEIVYAPFEVQHTREGMLELVSLLRSSCEEVRAVLESTGSYHCPVVAALLENGIFVSVVNSLRMKRFCSQSIRKVKTDRIDAMQIALYGLAYWQELQPTKLPEDTYRELQLLARQYYQMTSLLIKAKVDFNAICDQVLPGMQELMSDHAGRHKLSDFVLRYRHTTHILEMGETRFRKDYCKWAEKKGYRNCERMAALIFATAQNGIPVLPNAPSTQIVITEAIRVLHTVEASRDAILTQMQALAKTLPEYSLVREMPCIGDTLAPRLIAEIGDVRRFHSKRALIAYAGIDAPPYQSGKFCANNRHISKRGNRYLRKTGYEVMQSYVMHKPANDPIFTFIEKKRGEGKSGKLAMVAGLNKFLRVYYGKVTELYRSLPAIE

SEQ ID NO: 217671 - protein, 357 aa, unidentified
MESQEVKYVGVDCGKKSIEVVRINSENSLERRQFSTTESGINNLLQWLTLNDIVGLEAGSQSFRSRISILNKGEQVIVLNPGNLATIYQSLKKTDKEDSLKIARLIQRHPIEELPTVPIPNDEEEDNRRLCSEHENWTKQLTQGKNRLHSLFTQAGLTQITKKHLRTKVSREASVTLLSDRYKKEAERILKVLDLVELNLKLIEEEIQEALKKNKAYVQTIMSMPGIGMITSLAIMSYMGDCKRFSSAKQAAYYAGLVPRVDISGDTVRYGRIINRGCHSIRRVIVQAAWSLVRCQHGGKVKEFYQRLYLKKGAKKSIIATSRKMIEVLYVMIRTGKLFDSMPENILNRKLTQYGLM

SEQ ID NO: 217672 - protein, 339 aa, unidentified
MELYAGMDLHSRNTLVGVIDSSFKRVFEKRVPNDLSLIVDKLEPFGDRLAGIVVESTYNWYWLVAGLMDRGYRVHLANPSAIKQYEGLKHTDDRHDAFWLAHLLALGILPEGYIYPKEDRPVRDLLRKRSFLVKHRTAHILSLQSMLEREKAYKLRGNEIKSLSPEDIGRIFSEEHLVLSAQANRASIEFFGHHINRIEKAVRKRVKLRKSFEYLLTVPGIGDILALTIMLEVGDIARFPRVGNFFSYARCVSSQRLSAGKKKGQGNRKNGNRYLAWALVEASHHARRYNERLRSYYQRKCGKRNQAVATKAVCNKLARACYYIIRDQVAFREEALFCS

SEQ ID NO: 217673 - protein, 347 aa, unidentified
MRTILAVDLGKYNSVLCWYQSDTRSAAFRTVATTPEDLRRELTRQPVSPVVFEACSQAGWVHDLCEELRLPVLVASTTGAGWQWRHVKRKTDRDDALKLARLAAVGELEAVPVPPRAVRQWKSLIGLRKRLVSERVRGQNRIRGLLVCQGLPAPAGAKAWTALGLDGIGQLARPLADCGADDLWRGELHLLLERVRFLDIQTRAAEAKLDALAAGDSRVSLLTTVPGVGVRTAEVIAVHLPDARRFRSAAEVSAYAGLVPRQYQSGQTDRRGRITRRGPKLLRAALVECAWCSLRYNPWARATWLRLQGNGLSKKKAIVALARKLLVRCWAILRTGRPWRAPTPSVA

SEQ ID NO: 217674 - protein, 369 aa, unidentified
MNENITWVGLDAHKRSISVAMLLPERRQALEWEVPNEPSAVKRLARKLEREAPGEVRCCYEAGPCGYALQRQLLDADVICEVVAPSLIPVKPGEHIKTDQRDARKLAELLRAGLLTEVRPPSKDEEAARDLCRCREDAVEDLARCRHRVLKMVLRRGLVFGVGKKAWTRAHREWLRSIRFERAADQVVFEDYLLAITQVEERIKALDERIEVLGAEAPFRAPVGWLRCFRGIDTITAMTLVAELHDFRRFGSPRELMAYLGLVPSEHSSSDKTRRGSITKAGNSHVRRVLVESAWHYRHPPAIGETLRRRRHGQPPRAIAIADKAQQRLCRRFRRLIERGKPNHKAVIAVARELAGFVWSALTELSRAA

SEQ ID NO: 217675 - protein, 374 aa, unidentified
MPRYSTAFGMDVHLRSTTVCALDAETGEAVTRRFRGNPWGEVAEWMSGFPGPSLAAYESGYLGFAPQRELSGLGVDCVVAAVSKVPRSAADLSSKNDRNDAARMAKAILSHDISPVWVPSPEIEGLRDLAGAHDAATARLAAAKQRLLAFLARRGYAYGGTTPAGNPRRYWTYDFLRWLDKVRPADDGGIRALAALRSEVEAAAETRDDLLAEYRAAVAAGPLSAEVEALQSIKGCGFALAAAFASEVGDFSRFRSGRQVTSYFGLAPKQRSSADSVRLGGISGTTGDALVRRLAVEGSWSYVQASHQPKLMPKGSGVPLEVRMHGRKGSERLLRRREEMLARGMPQAKANAATAAELVRWLWALGAMCREATE

SEQ ID NO: 217676 - protein, 456 aa, unidentified
MPRKTKSKKTTATLPVLHPDAAGVDIGATEIYVAVPPDRDPESVRSFQTFTEDLMALADWLLRCRILTVAMESTGVYWIPLMQILEARGVEVFLVNARYAKNVPGRRTDVSDCQWLQYLHSVGLLRASFRPAPEVCAVRSLLRHRDGLVELASHHVQHMQKALDQMNLQLHHVISDITGTTGLAILDAVVAGERDVNKLAHLRDPRIRATKETIAKSLVGDYRPEHLFTLRQSVNLYRTYQKEIAECESEIQRFLKLLETKVDPVAEPLPPAKDSVKKCTVMPPVRALALREESYRVLGVDLTTIPGMSVLHVQAVVAEVGPDLSKFRSASAFSSWMGLCPDNDVSGGKILWTGTRKVKNRLAATLRMAAQSLKRSQSALGEFYRRMRSKLGAPKAITAAAHKLARIIYHMLKTRESYDEGVFARLEIRYRQRVENRLKAQAHALGFTLIPAPSHT

SEQ ID NO: 217677 - protein, 344 aa, unidentified
MDYFVGLDVSLRSVAVCVIDVDGRAVLERSVACEIEEIAACLAGFASEDLRIGFEAGAMSQFLFFGLRGSGFKVVCMEARQVNAALSAMRNKTDKTDARGIAQVLRSGWFNPVHMKSREAHAIRALLSSRKAVQRKCIDLANEIRGLFRIFGHRLPARVDQASFDERVRPIIEADPDLSHALLPLLDARTVLFDTYRELDRRVKRAASHDEICLRFMAIPGVGPIAALTFKAAVDNPSRFTSSRTVAAHFGLTPRRYQSGEMDNPGRISKAGDPDVRSALYAAANAMMMRSVAGSEIKSWGLRLMRRKGRRRAVVAVARKLAVIMHRMWADGSEFRQRSLEGAE

SEQ ID NO: 217678 - protein, 355 aa, unidentified
MSSEKYIGMDVHQATISVAVMDSTGKVIMESVLETKASTILEFLGGLRGTLSVTFEEGTWAAWLYDLLKPHVAHVLACNPRKNAALNQGNRNDKIDARELANRLRLNDLKPVYHGENGIRMLRELARSYLTIVKDLSRVMNRLKALYRSWAIPCAGRDVYYTRHRRQWLEKIREAGPRHRAEHLYLQLDMLQHLRQQARRELLAESRKHSITTKLRKIPALGPIRSALAVALIQTPHRFRSKRQLWKYCGLALETRISGEYVYVQGERRRSKKQLSIRGLNKDHNHDLKGLFKGAATRASVIPGPFREFYQRSLAKGIKPTMVRLTLARKIAAITLTLWKKGENFNVEKLKSQAA

SEQ ID NO: 217679 - protein, 347 aa, unidentified
MNYIGVDCHISTLDFAVVDGKGNIKKKACVNTGVKEFMEFVRSIPAPRKIYIEEGELANWLLETSRRFGEQLIITDPRENKWISKAKQKNDPIDATKLAQLARGGYIKEIYHPVNDRRRFKELVFAYHDTVKSQTRIKNKIKACFRREGIICRGETVYSETYRAEWKEKLPKNNIVYLIIDELWIQLDQLQSTKEKIKINIRTCARKYPELKRFMMVPGVGLIHASTISAIIETPHRFANKKKVWMYAGIGLTERGSGDKVYSRHLTREFNRPLKNAIKKATEAAIHGNDNPFMRQYLRLTIEQGVPSHKAKLTVARSLLSALYIIWKKGEEYDPDIDKKRDKGSKK

SEQ ID NO: 217680 - protein, 413 aa, unidentified
MSQMLVGIDVSLRSHHVQFMTETGESIASFSIPNNRDGADTLMKRMLETVRRKQNRRVQIGMEATSNLGWHLAHYLQDQLEGYEPEIEANIYVLNARKVARFKKGYDSLPKNDRVDAWVIADHLRFGRLPYVMKDSIHYEALQRLTRTRYHLMHNVTRDKTYFLNQVFLKFSGIRQDNPFSNTFGATCLAVIQELEPEQIVQMSIEELIDFLQDKGKNRFENPEETAEFLQKLARSSFRLHKTLQDPVNIALSATLSVIQHMEAEIKKLDKAIAKLMRGIPETLSSIKGIGPVYAAGIIAEIGDIARFPNHNALAKYAGLVWTQYQSGEFEAEDTKRLRTGNKYLRYYLVQAADKVRKHDAEYKAFYQTKYDEVTKHQHKRALVLTARKLVRLVHTLLRTKQLYTPRERRGLE

SEQ ID NO: 217681 - protein, 349 aa, unidentified
MSEKLYAAVAVIGIDIGKNSFHVVGLDQRGAIVLRQKWSRRQVETRLANIPPCLIGMEACVGAHHLSRKLTSLGHAAWLMPAKYVRPYSRGQKNDFRDAEAIAEAVQRPTMKFVATKTAEQLDLQALHRVRERLVSQRTGIINQIRAFLLERGVAVRQGLRFLRAELPRILATPCGVLSPRMVRVIEDLAGDWRRLDERIEGLSSEIEVVARRDAGCERLMSVPGIGPIISSAMVAAIGSGDAFTKGRDFAAWLGLVPKQISTGDRTILGKISKRGNRYLRVLFVQAAWVVLIKPKSWQRHGLKPWLEAAKKRLHHNVLAIALANKLARIAWSVLAHGRTFEASRIQVA

SEQ ID NO: 217682 - protein, 424 aa, unidentified
MNNTQNRKIAQVTDKTLIVGVDIGGEKHFARAIVARGFEVSKKPFPFMNTEDGFDSFVSWAYNLADSHKLTKIMVAMEPTGHYWFTFVAFLKKYDVQVVLVAPQHVKHSKEMDDNTQEKDDRKDPIVIARLVPEGRYLIPYIPEDVYAELRAAFNRRCELVEEQVQIVNRMTRWFDIYFPEYRKVYGRIDAKTGIIILKKAPLPADILCIGVDGIRQIWKDAKIRGYGSKKAKQLFAAAEHSVGMEGCTSVRWNLWQLLEEYELVEKQLNDILQLIEGCLYQIPGADKLLKVPGAGLVTVAGFLSEVGDIKRFSDPKQIQKLAGLAVVENSSGKRKGLPGISKRGRSRLRWVLFQLARSMVMFNPEMKAYHQYYTTRKDNPLKKLQSLIAIAARIARIFYGMLKNGTEYDPTMVMKDFNKAVMA

SEQ ID NO: 217683 - protein, 341 aa, unidentified
MVGVDTHRDEHTLAVVEARTGAVVAQGRVASTRSGYAHALGFARCHADAARVWAVEGTGHYGAGLARHLSERGETVLEVGRSPRSERRLHGKDDELDAVRAARAALTSEPLPRPRVGERREALRLLLVARRSAVDVRREALGQLRSVIVTAPEHLRDELRELPVQRLLEHCSHLRRTRSATPGELAARLVLRPLARRIQAASGEAEELEREIRAHVQALAPQLLDEPGVGPIVAAQLLAAWSHPGRVRSEAAFARLAGVAPLPASSGQTSRHLLSRGGDRQLNRALHTVVLHRRQHDPATKDYIAKRIAEGKSRREATRLLKRYLARHLYRLLQDQEPLIA

SEQ ID NO: 217684 - protein, 404 aa, unidentified
MIFVGDDWAEDHHDVYLMDADGARLASRRLPEGLTGIGALHELIADHVGEPSQVVIGIETDRGLWVQALGVSGYQVLAVNPLAVARYRERHQVSGAKSDAGDAKVPADLVRTDRHNHRGLAGDSPEAEAIKVLARAHQNLIWARTRHTNMLRSALREYYPAALNAFDDLHDRDALAVLSRAPTPAEGTRLSLSKIRSALKHAGRQRNIDARAHEIAVALRTEQLAAPATVTAAFAATTRATVGIIGELNRQITDLETQLATHFETHPDADIYLSLPGLGVILGARVLGEFGDDPNRYTTAKSRKNYAGTSPLTVASGKKCAVLARRVRNRRLYDAIDHWALGAINHSTGARAFYDQHRAAGDLHHQALRALGNRLVGILHGCLRHHTTYNEHTAWAHRQTAQAA

SEQ ID NO: 217685 - protein, 394 aa, unidentified
MFNPPQVRLMRAVCGLDVYKDSVYLCILNDDGELIEKVFGVLTFQLQQMRDLLLTHHVDEVFMESTSVYWIPIWRILANHFLLRLVNPYFIKQLPGHKSDVADAQWIAECTMKNLVSGSFVPPEDIQQLRQYDRRIFDLDEEIVRKLSKLDAVMQRCNIRLSNYVSNVDCKSYKDVVRKISEGVTDPEVLIEEFHGRIIKHHGRETILASLTGVISQAEIDVLRQLREELDLAEEHKQECLERMLKKCQEKYPDELRRLQTIPGVKERTATSLIAEIGTDMSKFETANHLAAWSGLRPRNDESNKKFKSRRITHGNVYLRKNIIQCAWAASRTKSCFFSRFSYHQTQVRKKNKMKVIVAVARKLLVAVWLVIYDETDYVDFQQKQDRQVSATNG

SEQ ID NO: 217686 - protein, 360 aa, unidentified
MELHVGLDAALESTKVCIVDEAGSKVLETSVASDPASICLALKEHVADIARIGIEACSIGIWLARELLAEGLPVTVVEARHMRSALSAMRNKTDRNDAHGIAQMMRMGWFRAVHVKSMETQRLGTFLANRRLLKRKLIDIQNHIRGALRAHGLKVGTVAAGRFDARVRELIEGSDYMLQTMIESMLEVRSAVASSFAKLHKILLMIVKHDEVCRRFMTVPGVGPVAALSFKVTIDDPHRFRRSRIVGAHLGLTPRKYQSGTSVDWGGRISKMGDSSARAALCEAAASLILRVQRYCALKAWALKIAKRSTTKCAIVAVARKLAMILHRMWISGEDFDWRAGAKITSKRKLDPQTGLVLAY

SEQ ID NO: 217687 - protein, 404 aa, unidentified
MWYAGIDWANDHHDALVIDETGRQVGTLRVDHSPQGMSKLNTFLEQIIGQESKEQMACIIETTHGLLIAHLLEAGWAVYPVNPRTVDRRRAASGAKTDTIDAYLLAKTGRADLADLHRLTPDSQQITELKLLTRDQDALIRMQTRLVNQLTACLKAYYPVALELFTKLQQKSTLLFLQTYPTPQAAMAASAEQIKEVLRRAKHSNPIPVAAEIVERLHQPHLQADVITTRTKSRLMLVLVSQLLPLIEQIAQYDKEIATLFLTHEDHESFASLPRAGKRLAPRLLAEIGDDRERYQDASSLQALGGTSPVLFQSGMYSKAHRRLGCIKPLRNALHQFAWQTTQSEPWAKQYYQRKRAEGKSHTVAVRALANVWVRIIFALWVNHTCYETAIFEAAQRHHVRKVA

SEQ ID NO: 217688 - protein, 417 aa, unidentified
MNNLTNEFAAYVGIDWADQKHDICLSPTPDSTPEYDQIDSTPEALNEWLRGLHRRFSEGKIAVCLEQSRGPLMYQLMRYDFLVLYPVNPKALARYREAFNVSGAKDDKPDANLLRELVCVHRDNLTPWTPDDEVSRALAMLSESRRKAVNERTKITNRLTAALKEYFPQAFKLTSTNLYDRISLDFLEKWPTLEDVKSARDTTIRAFYTSHRSRSAKRIEERLQLIRSAIPLTTDKAILMDSVITVRMLVQQLKSLNQSISEYDQALEDMFDQHPDKDIFESFPGAGDVLKPRLAGALGTNRAKFATASDIQEYSGIAPVTRRSGNSTIVQRRRACPTFLLQTFHEYASHSRFKSVWAKAYYELQRSRGKGHHMAIRSLAFKWLRIIHRCWRDRVAYDEAKYLQSLVKNQSPLLQFI

SEQ ID NO: 217689 - protein, 377 aa, unidentified
MKIAIGIDVHKEKCTACALYAGTDEPRKKNLDFLDKFNTDFRRFPSDAAGMVGLMNRLQGQESYILIENSTKSHDVYWMLTNLGFRVTVAHAADLYRITRSKTKNDDNDAAELAGYMRRRLMGEIEFAVAHMPSREVLVQRELCRFDLNDRNDLSALKRQIRSHLLIRGMKLSCNYSDITSVLALRELKATGDHILLLDAAKAESIKARKSQTEKMIRYRMEGNRMFNIVWSIPGFGILSAAYVTCMADDMTRFVDGRAFAASTGITPKLDESADRPKNCGISRRGDPELRRLLCQATFVHINHADSFISEKYKRLKANGKHHNEALVACANSMARMIWAMVTQDRKYSADPTVMAVTRYLADSDEIEDEMEAAQTE

SEQ ID NO: 217690 - protein, 313 aa, unidentified
MFNRRLPNDLGQIRAALEPHQEELAGVVIESTYNWYWLVDGLMDTSYRVHLAHPAAIKKYEGLKHSGDFADAAYLAQLLRLGLLAEGYIYPREERGARDLARKRRQLVRYRTAQILSIEGILMRQTGARMKGEAVKRLTAEQVDAFAFAPDVALAVEANRAVSQALGQQIEALERRLKQRVSLRPEYRLLKTVPGIGDTLATTIMLETGSIGRFAQVGNFSSYCRCVDSLRESNGKKKGEGNTRNGNQYLAWAFVEAANFALRYCPQAKSFYDRKKSKTNRVLALKALAHKLARACYHLLREQKPFNVHLCFG

SEQ ID NO: 217691 - protein, 345 aa, unidentified
MEPMYYIGLDVHKQKISYCVKEGGGKVFAEGWIAATRFDLDRWMKTLPQPWSAALEATMFSGWIYDHLKPHAAALKVAHPLMLRAIAAAKKKNDRIDANKICDCLRCDFLPECYMAPTAMRERRRTLRYRSLLVRQMVQMKIKISTLLMEAGISYNKSKLHKAGYFRELLANNPDINESLRSLLRQCREMVVRLSKMETALIHSLQQDPLLAERVERLMSIPAIGPITALTWALEIGEVQRISSIKKAISYCGLCGDEQSSGNSAQRTPLSKQRNKHLQTTLIEAAKMAPRYSPTLAMLYDREKQKSNANRATLAVARKLVAYLMAVDRGQTHFLVIDQETRTAA

SEQ ID NO: 217692 - protein, 409 aa, unidentified
MDTKVAGIDVHKKVLMVVVRAHGATEKDWEAGRFATTTQQLRRLATWLRERNVEEAVMESTAQYWKPVWYELEPYFVLHLAQAYSNKARRGRKHDFEDARRLVRRFLADELVLSLVPAPEQRLWRTLTRMKVQLTEDRSRIHNQLECLLEEMRIKLSSVVSDLLGVSGYRILRALAKGETDPIRLAELADRRLQCSQQQPIEALSGQPQPIHLQLLTLYLDRYQVLAEQAAKLNQMTAEALKAHQDAVTRLAEVPGFGADSAQQVIAEVGPQAGTFPSAAHLASWVGVCPGQKQSAEQNYSSHAAKGNRFLRRILNQAAHAAVRKKGSHFQLLFQRLLPRLSYKGAIWAVAHRLCRLVWKVLHERIRYIEQGREPNPITQRQRALRLVRKLRNLGYEVILPPKPVEQGT

SEQ ID NO: 217693 - protein, 414 aa, unidentified
MTENYEIAAGLDIHKKFIVATILSTQELKIQQRFERTMQGLLALKSWIIEHKCQVVACESTNNFWYHIYDSLCDHTTVIVGNAHDMKVMNHKKTDKIDSEIIATLALKGMINPSRVVPRHQRDFRNIVRMRHFLVRKRTDLKNRIHNIFDNEMFHLSNVLTDVFGKSGRKIMDGIIQGTPADEIMMSIKGQVRIKKGGDIRQLLEQNLSVYALMQLRHSLEVLRVLDAEINYLTKVSSEFAREHYPREYKILLTVPGVGEIATFTLLAEIGDFNDFSSADKLASWLGIVPKVYQSADHNSRRSITKRGSRLARWILIQVAHAAAKRQVSVFYDFYESKKDIIGKGKAAVALARKIITIIWHLITNDELYEDKYARPKKIPKIPTVKIPLSFTIEEAIKLFKEASQILKAPDPGL

SEQ ID NO: 217694 - protein, 375 aa, unidentified
MNKCHSNTELSSHEGTRCQFNGGTGAIKFAEGRIRPVCGLGIDVHQDFYVVVEQVGGSNPKPPQRFQKAAFLHWAAKLRRGGAEVHAVYEACGFGFSLQRQLSALSIHCYVACAQKLDEHNKRVKTDGLDAKALCLKLDRFVQGNRDALARVRVPTEKEEQLRALHRQREQLVKVRKQLEAQGRSLWVNHGFEPVKSWWKPRTFAALDVPQWMRELLQNSQPILLGLQEKIAALTIQLQSAAAPNQPCGLGLMTSVIIDREIGDWNRFNNRRQIASYTGLCPGEYSSGNTRLQSCVTKHGNPRLRAALVELAWRLVRFQPNYKPILKWKRLLGKGALATGAARKKAIVAVARQLAVDLWRIKTGRLRAEELGLIN

SEQ ID NO: 217695 - protein, 334 aa, unidentified
MDVVYSHVCGLDVHKKTVVACIITPDEKEIRTFSTMTDDLLQMVDWIKSKGCTHAAMESTGSYWKPVYNLLETEEIQTLVVNAQHIKHVPGRKTDVKDAEWIASLLRHGLLQGSFIPPRDQRELRELIRYRRSLIEERAREVNRIQKVLEGANIKLSSVASDILGKSARAMIEALIAGNEDPEALSELALRRLKNKKEDLRRALKGLIGPHQRLMLQTQLRHVDELDALIGQLDEEIKRRMLPFEEDLERLDTIPGVARRTAEQIIAETGTDMSRFPSAAHLCSWAGLAPGNNESAGKRKSGRTTKGNPKLRRKMDQLDLFSYFPSKRLNGPNC

SEQ ID NO: 217696 - protein, 475 aa, unidentified
MSILPSFPDGQVSPRWIGLDLHSTEIQAQALLADGTALPSTRFCERKCNIELLCAELTAQDAVAMEATFNAFTVARRLQPSDARIVISDPRKTRAIAEAKIKTDKIDARVLADLLRADYLPTVWLPDPATQQLRHLLSDRQSDVTRRTEIKNRIHAVLQRELLKGNRLLTSKDGEQLLELLVSDHSPLQPEERTRLKLLRRELAHLDELIAAHEKALASFIVGDAQLHANLNRLMTIPGVSLVVGAGLLSAIGDVTRFKSGKQLASYFGLVPSTYQSGNSKAFHGPITKQGRKLARWLLLEAAEHTIKAPGPLRAFYLRLKKKRNHNVAKTAVARKMTEIIWHLLTKEEDYLYQIPRLTQEKQSRVKYLATGEKAKGGLKKGEPRSEFYGTGLKGRAVKTEVARQAATKAEEKYAAVVTARAAGQQTHSPEGDCLIESDFALDPLRPRAADWETEIARLHAKALSRAPKKKIKRT

SEQ ID NO: 217697 - protein, 347 aa, unidentified
MKRIVKQVVGIDVAQKELVVCLGRMYDNWTPELYASKTFANTAKGFGALTGWVKKLTEESSSVRYVMEATGVYHESLAYFLEGEEFEVSIVLPNKISNYFRTLEVKTVTDKTASEAITRFGLERRLDKWKRPSEIFRKLKQKTRERDQLVGESTFVKNQLHAEQTEAYPSKESMVRMKTRINLLNKQIMQIKEEINVLVKGDKEVKKSIDLISSIPGIGTLTAVTVLAETNGFELIRNKRQLTSYAGLDVKEKLSGTSVKGKPRISKQGNRHLRKAMHMPALAAIRYNERFKVLFTRLVSRHGIKMKAAVAVQRKLLEMIYTIYKTETAFNKDYLKEEVYAQLPDLT

SEQ ID NO: 217698 - protein, 342 aa, unidentified
MNHYAGIDVSLECSSVCVVDANGKILREAKVASEPEALLAWFGSLGFGLERVGLEAGPLSQWLFAAMKAAGLAVELLETRHVRKAFEAMPVKSDRNDARGVAQLMRLGWFRPVHCKSLTAQETRAILTARKLVQSKLRDVENSLRGILRGFGLKVGKTTELKFAGRIGELVAGHPHLQGIADALLSVREVLRKEFAAFEKQTRKLARSDSRTRLLMSTPAIGPIVSLTYASAIDDPARFRSSKQVGAHFGMTPKKHQSGETDYTGRISKIGDGSVRTALYEAAHIMLTKPLKGCSALKSWAMRIAGRAGMSKAKVALARRLAVILHRMLANGTSFNAAAAAA

SEQ ID NO: 217699 - protein, 367 aa, unidentified
MTYTLKAAPAASAIELKSEKTAKAKRILLGVDVHLRGYQAAGKVDDGVIGVVDTFRSEVELLLHVEKQRPRAEQVVVVYEAGPLGYTLYRKLTAAGVLCYVCAPDSGEQRKKRRKNNKIDARSLTSKLFNYLNGDQNALQLARVPTEAQEQLRMASRQHDQLVEERKRLGAKGNAMLLSQGFGSWSNWWRPKAWADLSSKLPPWLLERLKVWVDVLKVLDEKISQAKAAFARSCNGPRPKGVGALSQMQLQSEVLDWSLYSNRRKIACLAGMVPSEWSTGDKERRGSITKVGVPALRRIIVEMVWRIIFFQPQYKPVQKWLEVLRGPNPAMKKKAVIAIGRQLMVDLWRLQTGRVTAQELNLIMVTD

SEQ ID NO: 217700 - protein, 345 aa, unidentified
MQHTTIAVDVAKSVFEVAVSQRPGKVSSRQRLTRPRFARFLRQQEPATVVMEACGMAHHWGREAQASGHTVRLLPPRDVRPYVRGNKTDRSDASGLLEANRNEAIRPVPVKSVEQHALAGLHRMRSAWMATRTARLNTIRGLLRELGLMIPAGARQVVPRVWDLISEADSRLPEPLRVVLAEAAREVAELEGRIGEVEAQIEGLAKQSPLVRRLRTIPGVGLLTATAIVASIGDLRRFPSARHFASALGLTPREYSSGHVRRLGRITKRGDPYLRMLLIHGARSVLHHAKRSPAPDRLRSWALERERLRGHNKAAVAVANKLARICWAVAVREDDYHSRSATDAE

SEQ ID NO: 217701 - protein, 343 aa, unidentified
MKLSRVGIDLAKNVYQLHGVDRSGKTVWKRRLKRHQWFKVLLDTVGPECEIGMEACAGAHHWGRELQSRGYTVKLIPPQFVKPYVKSNKSDAKDAEAICEAMSRPNMRFVTVKRVEQQDIQATHRIRAELMTQRTAKANQIRGLVAEYGLVAPKHLSSLRAAIPCWLEDAENGLTGDFRTLLQGVWTDLLQLDDRVGEMDRTIKRLADNNEDCVRLQQLRGVGPMVSTAMIATVGDARQYPKSRQMAAAIGITPKQHSSGDRDRLLGISKRGDVYLRTLMIHGARAVVARAKHKDDRLSRWVTNIANKKHPNVAAVALANKTARMAWAMLRHETDYDPDFAIR

SEQ ID NO: 217702 - protein, 460 aa, unidentified
MNRKRSKSRVDRTMPMMHPNAAAIDVGATLHMAAVRADRATEPVRSFGTFTTDLHRLVDWFTECGVETVVMESTSVYWIPIFELLDARGFTVFLVNARDAKHVPGRKTDVSDAQWLQRLHSYGLLRASFRPKGQIAELRAYVRQRERLLEYAASHIQHMQKALTEMNLQLHHVVADITGSTGLRIIRAILAGERDPEVLACLRHYSCHSSAETIAKALTGSYRTEHLFALEQALALYDAYHEKASACDVRIEAVLKELCIHRGRGIGSVAPAPRRRHRTDQANALAFDVRAALFALLGKDITTIDGLGPYLSLKLVAECGDDLSAWPSAKHFTSWLGLAPSNKVSGGKMLSSRTRRSGGRAAALLRLAAVTVGRTDTALGAFYRRLSSRIGKAKAVTATARKVAVLFYNAVRHGMEYVDPGASSYETRYRTRVVNNLHRRAKAFGFVLQPLEPKAGAVVS

SEQ ID NO: 217703 - protein, 315 aa, unidentified
MNPSITSFVGIDVAKNSLDLHLHPRDLRLSTTNDPEGYSRILEFLPEPTTCLIVMEATGGYHKSVAESLLTAGHYVAVVNPRQVRSFAIALGRLAKTDAIDAAVLSRFAEQARPRTMSLPPENQARIVELVTRRRQLIELRTAENNRLESIRVKEVRKSIEAILKALKQQIAAIEKKIAELLKSDDQWNDRADLLLSVPGIGPTTIASLLADLPELGQLNRQEIAALAGLAPYNRDSGRHRGKRSIHGGRGTVRVALYMATLTAMRCNDRIKPFAERLKNQGKPFRVVITACMRKLLIILNTMVKNNTHWNPKNA

SEQ ID NO: 217704 - protein, 346 aa, unidentified
MVIIGCDFHPSWQQVAWLDTESGETAERRLIHAAGEAEPFYRQWQAPALIGMESTGNCQWLIDLLNELGHEVWIGDAAQIRATMVRQQKTDRRDAAHLLELLVEGRFPRIWVPSSGERDQRQLLIHRYKLVTLRARVKNELQHLALNQGVQKKRKLWSEAGQKLLRELPLKPWASRRREDLLKVLNMLDKQIKPLDEAAKEAAEKSEMARLLMTQPGVGPITSLAFVLTIGDVKRFARGKQVASYLGLIPREYSSGGRQRLGSISKQGNRFLRMLLVEAAQGAVRYDPGFRQEYLHRCHQKAKGVAKVAAARKLAIRLYWMLRTHTPYPEVVRIESSPRVPLVGRS

SEQ ID NO: 217705 - protein, 339 aa, unidentified
MREVSTIGVDLAKRVFQVHGVDAAGETVVRRVLRRARVLAYFAQLPPCLIGMEACATAYYWARELGKLGHRVKLIPPAYAKAYVRRNKNDAADAAAICEAVSRPSMRFVEIKSEAQQAAAGIHKVRDMLMKQRTMLINALRGLMAEFGIVVGAGTRHVGELTAILADPEEHRIPALLKDGLRRMAEMLRALERQLEGIDKQIMDWGRGNAACRHLITAPGYGPILSSAMAAIVVNPAAFRSGRDFSASLGLVPRQDGTGGKVKLGPISKRGNGYLRRLLVNGAMSVLNSKRAKQDPWLVKLLANKERKVAAVALANKMARIGWALMTRQEDFRATSAAA

SEQ ID NO: 217706 - protein, 394 aa, unidentified
MKLIGIDIGKNKHFFCIMDKDSGEIVSQPASFSNDKEGFDFLLQKIKSYPKNSVLIGMEDTGHYHFALLKYLLDLQYTVALINPKTTDFNRKMQGGITKNDKLDTINICDVLDTPERKKQYRITKVNKFDLYEQKLLTRQHHNLKEELNVYKNRLQKSIDIVFPEFNSLFKSKYGTVYMNILKTFGSAENIANTDIRTIRKCFEIDGRGNRISLTPERLKERARSSIGISSLAEVIQIKHLSAQIELIEKQLSEIDKKIEEFSIQNNSPILSIPGISHFSGTSILAELGDISNYSKPSQIIKFAGVAPLHYESSQFNAQHTAITKKGSKYLRKTLYQIILPVIRHNPVFNKYYQLKISQGKGHRCAQGHCVRKLLRIIYHLLKTNQQFDPQLLR

SEQ ID NO: 217707 - protein, 323 aa, unidentified
MTRIICGVDISSISLDVRIGRDGATGSFPNTAAGIQALYAFCQIHQVELVAMEATGGYEKPAFTQISAQGLPVAILNPRAVRHFADSMGRLEKTDALDAAMIAWFAEVKNSQPTYLPSASQQQLRALVTRLQQLTAIRTAQRNQCRLVTDPFVQTSFREILLLLAKQMEELERRIHGLIFADPLWQRLDPVFRSIKGVADRTIARLMAEMPEIGSISNKTISKLAGVAPLARDSGKHQGKRAVRGGRASVREILFIVASVVGRYEPDFIQFQQRLTSAGKPRKVIRIALAHKLLVRLNAKAREVRQQLELAQACNPGQECVTI

SEQ ID NO: 217708 - protein, 441 aa, unidentified
MPDSLPIAEPEPEWAAFAAIDWADQKHAWRLVPAGSAVHEQGQLENTPEAVDLWATSLYVRFGGRPIAICLEQSRGPLVYMLSKYAHLVMFPVHSTTAARYRQVFSPSGAKDDPRDAASLLDLLLHHRSQLRRWQPDTVETRQLQRLVEQRRLMVNEKTRQSNRLTACLKMYFPQILRWFDDLSTPLVGALLERWPSLQELQRAHPGTLKKFFLEHHSRSHQLIQERIQSIYQAVPATGDQAVLQGEAAATHGFLTLLKTLRENIAVLDQQIEQLVASHPDHALFASLPGAGPVMVPRLIVAFGTRRERYDTAFQMQCYSGIAPVKEASGKSEWVHFRRSCPKFLRQTFHEFAFLSTRSSGWAKAYYDRQRDQEQSHPAAVRALAYKWIRIIFRCWKERKLYDEQIYLQSLQKRRSPLGDSFTALGWKPVAGFQKLSENPS

SEQ ID NO: 217709 - protein, 299 aa, unidentified
MDIALRPGASSSHTHDESAIARVVEQLRALSPTLIVLEATGGMEVPLTSALATAGLPVVVVNPRQVRDFAKASGRLAKTDALDAQVLAQFAEVMRPQPRPLPDADTRALAAVLTRRRQLVEMLTAEKNRLLSASSPIRKRVRVHIAWLERELEHTNTELSEAIRHSLVWREKDELRQSVPGVGPVLTSTLLASLPELGTLTNKQIAALVGVAPLNRDSGTLRGRRTVWGGRAQVRAVLYMGAIVAARFNPVIRVFYQRLQRAGKAKKVALTACMRKLLTMLNAMMKHRTPWREVEAHHA

SEQ ID NO: 217710 - protein, 352 aa, unidentified
MFKCLSKLNFKSFFTMKDFYFIGIDVSKKHLDCCLLFNSSVVRQDVISNHQKSIENYLSILCSEENIDIEQIVICAEYTGLYIYPLVIACQNNSYKLWLEDPTQIKYSSGLQRGKNDAIDAKRIALYASRYIDRIKIYKKPSVGIESIKLLSAELNMLCVDKAKYQAQISDQKEYMPNDMYKIKSKRLTLLIKELDKAINEIENEIENIVKNDVLLSRQMELLLSIEGVGKKTSLKMILETQAFTKFTDSRKFCCHAGVAPFSYVSGSSQHSKNKVSQRANKSIKTLLHLAALSAIQKKNSELRVYYERKIADGKNKMSVLNAIRAKLIYRIFAVIKNDQSYDLNHISQYTN

SEQ ID NO: 217711 - protein, 338 aa, unidentified
MVVIGIDPHKGSHTAVAIDEDEHKLDEVLVRADKRQLERLLAWAEAFEKRSWAVESANGLGALLSQQLVGTGEEVFDVPPTLSSRVRVLGTGKSQKNDPNDALSVAVAALRSSRLRLVVAEDHVAVLRLLWNRHKNLTSLHTQAVCRLHALLAVIVPGGMRRRLSADQASAVLAGIRPRTTAEGARKSQARDLVGDVRRLDAQMKASKRTIAEAVAAVPTTLGELSGVGPIATAIILAHSGDIRRFPDADAYASYNATAPIEASSGPRKRHRLNPRGNRQLNHAMHIIAFSQLSHAGPGRDYFERKIAEGKTQKEAVRALKRQISNAVYRQMMRDAQR

SEQ ID NO: 217712 - protein, 446 aa, unidentified
MDIEGGGVTVGLDAAVVANHHVIIRRPSVGGPGEVVANFVAAPTLAGMETLSKRLAPYAPVMAVAEPTSMTWLPLSIALERAGCSLALVGNRHSARLRSALAGKNKSDPIDADMLSRAGEFFSLQPARIPCPDELALKRVCQRRGKLIVDTNRSLRRIISLARWAFPDVWNAFAGSRPTALAVLTRWPDLAQLARARTSSVSDVVAAHTRDVGNVDERAAHIRAAARAWAEFWEGHVDLDALAWETAELLDDYAAAQARLERATDVAQRRWEQLWGDDPLLLSVPGMGPITAPTVRAFLADARHFDDAKQAQSFVGLNPSNWSSGQMEAPSRAITKEGPGVLRLAFYQAGNVARTVDPQLADFYRRLMVERGHCHTQASCAVARKLVGRTWATLTSGSCYQLRDLDGQPITRRHAREQAATLAVPDDVRRRARARSAATHRARLTR

SEQ ID NO: 217713 - protein, 348 aa, unidentified
MQIIGCDLHARQQTLAMLDTTTGEMVNLTLMHEGNGVREFYSQLPRPVLVGIEATGSMQWFLNLMDELGIECQVGHPATIRAAEPRKQKHDRRDADLILKLLAEQRFPAIWLPSKELLDLRALLLHRHQWVRIRTRIQNALQAIALANGLRRGPSLWSCDGQAKIAFLPLLPHASYRRSALQVMYRKMEEEIENLTQQVAEQAGQRSGARLLMTHPGVGPVTALATEVFLGDPKRFADGKALASYVGIIPREYSSGERQRLGGVTKQGSPLLRFLWYEAGAHAVRHDPELKRFYLRKLIHKGLGKARVAVARKLGIRLWIMLRDEIDYQEFCRRGQMQQSGAACGGDA

SEQ ID NO: 217714 - protein, 342 aa, unidentified
MQTKVQNFIGIDISKETFDLALIKNCNKNDITSTGFDNTITGFKKMKKLLIKEFNIDLKKTIFCLEYTGIYSMAIAKFLVMEGCSVWMENPSQIKYSLGLQRGKNDKVDAKRIATYAYKNREDARLWELPKDVLYQIKSMLALRERLMDSKNAILHPIKELMSIGEKQAAENLKKVCKKSIDSMEKDIEQIEKKLDGLIEVDEEISRLYNLALSVPGIGKFTALFLLYHTNEFKMYKNAKQLATYSGVAPFEHTSGTSVKGKTRVSHMANKTLKRLLTMGAISTIAHNGEMKKYFDRKVKEGKNKMLVINAVRNKIIHRLAAVIKRGTPYQKWTTPVVITVN

SEQ ID NO: 217715 - protein, 323 aa, unidentified
MVNLEKKVVGIDVSSKFLTVSFKNEKDQEMVYNVSNLKTGINGFLKKLKTEEYKIVVEATGSYSSKILHYASSLGFDVYQISPLTIKKYAEVKNIISKTDDEDAKLIRDFGEKMEMSLYKPKKENLEYLDQELNLWQDLEQEKARFSLKLKSLRQKARLNENVIKHYESLIKGIEKNIEKLLKRLPKLEDEELKDNKKLLKSISGIGEKTSLLLLVATNHFKDFGHPKSVSKYFGVAPRMYHSGNKKITIGKCRTTKGHIRSILYICSWSAVKSNAQCKALYERILEKGKCKKLALMAVCNKLLRQAFGIIKSKQEYQPDFAK

SEQ ID NO: 217716 - protein, 410 aa, unidentified
MNNALFVGIDVSSKQNVAYIMKPDGDKHSSFSVPNNRPGAEALVDRIVEVLQKLFIPKVVIGMESTSVYGDNLMYFLRETGKLSGFEKKLHMLNPKQVKKFKDSYSDLPKNDFVDAFIIADHLRFGRINKEVYMSDYRFEALKALTRARHQTVQSLTREKQRFLNQLFMKFSGFTQENIFSNKFGAAASAILEEFESVDELAYMDPNELAAFIQKHGKGRFENVDEIVSVLQKAAKNSYRPPTVIADSVNQILAISMSTIRLLQGQIKEYDKAIEKQFSTIPNTLTSVKGIGPVYAAGIIAEVGDISRFPSQASLAKYAGLTWTQNQSGGFEAEDTKLIKSGNHHLRYYFCEAANSLRKCDPEFRRFYNLKFREVTKHQHRRALALTARKLVRLVYALLKTNRLYIPPEE

SEQ ID NO: 217717 - protein, 415 aa, unidentified
MTDQITIPQKRFIGLDVHKHYLIALGVDAELNIVLPAQRVELFRLEAWMKKTLTKQDAVALEMTTNTWEIYDELSPCAHSVTVVHPPHVALITRSQVMNDKMAASILARLLAKGLLVSIWVPPVEVRELRALVAQRSKMTRLATQAKNRLHAILQRHHIVPPEGNLFHADQTEWWCALPVGKLEKINLQSDLDTLRFAETQLTRLASTMNELAVKDERVTRLIHLPGFGAVVALTVLAAIGEIARFEDAKHLVGYAGLGARIHDSGLTTRTGRITKAGRRDLRAALVEAAQVAANSHPHWKAELARLEPRLGRNKAIIAIARKLLVAVWFVLSKQTTDRFAQPEMVARKLMQFAYKVGKHNRPVNQSAAQFIRQQMDALQIGADLSAIPWGTKNRSIPLPPSALLENKMSDVPNT

SEQ ID NO: 217718 - protein, 411 aa, unidentified
MDTLYARCAGIDVHKTNVVVCVRCDHRPGKVFEEVRTFSTMTRDLLALADWLAGHGVTHVAMESTGVYWKPVFNILEGVVQVLLVNAEHIKQVPGRKTDVKDCQWIAQLLQHGLLKASFVPPAPIRELRDLTRQRTQLIQERSAAANRVQKVLEDANIKLASVATDVLGASGWDMLEALIAGETDPAKLADLARKRLREKIPALQGALQGRVTEHHRFLLRMHLDHIRHLEELISRMSVRIEEALVPFAPAQEQLQTIPGISQRTAETVLAEIGPHMEQFPSAGHLASWAGMCSGNNQSAGKRRSGRIVKGNRWLKRILVQAAWATSHTKGTYLAAQYRRLAKRRGRKRALVAVGHTLLVIIYHVLKRGTTYAELGADFLDRLEPARLTRQLVKRLEALGHKVTLEPGQAA

SEQ ID NO: 217719 - protein, 336 aa, unidentified
MQKTFDSIIYLGVDIGKTTHAWTLVDHRGHILEEGEVTNKPTTLATFAKGLLKRFPTLLVGCEATGSYYERLALAFSEAGVKVRVINPALTSTKALRSSMRLTKTDKQDARGIARKLQEKQGEIGTVFSWNSAERRLQAMARHLQFLKKQRASLKVRVKDLQSRPFETLDVNTSIFDKEISRLERELEKETSRLYERAMEILTAIRGVGEKSAAMLLAETMCLKRFPTSKAFAAFLGLDPTLKQSGTSVNGKSRMSKAGSPHLRARLTWNAKLLVQWNDTFRTLFENALSRGKAPGVAYGIVARKFATIVHQCITNREAFNSEKVGLGTSAKCLTL

SEQ ID NO: 217720 - protein, 416 aa, unidentified
MKLFVGIDVSSEKLDVCFLTDDNQLSILSEISVANDIEGASFIRETILEFNDSYHFDQIVIGMESTSMYSFHPSMFFHEDEKLKKLNTLVTIENPFRVKQFSRMFDENKTDRNDALRIADFLRIQRFTTSPIKEEKYMALQCLTRTRYQLIKQLIRTKQHFLENLTYKCNTLAREMRDESTSLFSATLISLMTEDFTLDELAELPLEAFCDLLQEKGKGRFKQPEKIAKAIQRAITMSYRLGALAQESINVVLSVLVREIRALEKNIKELDKAIEQVIVVIPEYQCLTSIPGVGKVYAAGLIAEIGQIERFEDQTKLAKYAGLSWKVNQSGNYQSQNTPLTKQGNRYFRYYLVEAANSVKNYLPEYKAFYQSKYKEVPKHQHKRALVLTARKFTRLVDTLLRKHQLYTPPRSVIEK

SEQ ID NO: 217721 - protein, 334 aa, unidentified
MALELLAIDLGKRAFHIYGIDTDGVILSRKVSRAKLAEVVGDLEPTAIAMEACASAHYWARCWLAAGREVRLINPRFVKPFVKGSKNDAVDAEAIFEAAMRPTMRFVPVKSTDQQDLQSLHRARDRLICQRTALINHTRGLLAEYGVVLPQGPWRFMAQAPTAIADADLSDLARAIFGELMDQLDDLDRRIQKLDAMIVTLCRTNETCRRLAKLPGVGPIIATAIVGSVNDGRQFRSGREMAAWIGLVPRQYTTGGKPRLGGIGRRANHYLRRQLIHGARAIVSRSAKHDDRQSTWLKALVARRGFNRTIVALANKTARIAWVLLSRNEEYAAP

SEQ ID NO: 217722 - protein, 384 aa, unidentified
MAPPSHESQDNHKMGWLPPSPDGIAMCQDVVLKEPRNGEDGEMKDIMIGVDLAKTVFQLHGASMTGQLKYRQKLTRPRFRKFMADQPPSMVVMEACGSAHYWAREMVRLGHDVKLIAPQYVRPFVKRQKNDAADAEAIVIAAQRPEMRFVAPKSQDQQARAVLFRARERLVHQRTELVNALRAVLYEFGHVIPKGIGNIKRIDAILEEPNCDLPTLVCDECRDLVKQIAEQTIRIDAKTKTAKEMAAAADTTRRLQTMPGVGPLTALAVEAFAPAMKNFKRGRDFAAWLGLVPRQHSSGGKERLGRVSKAGQADIRRLLIIGAMSRLNWMGRKTIPEGSWLARMLARKPRMLVAVALANKMARGIWAMLTKNENYRDPAQAVAA

SEQ ID NO: 217723 - protein, 449 aa, unidentified
MHGAHIGGQRAAAFFKLVADLDPRRVLLVGIDVAKATWFVVVSDLTGAVVADGVRLVADRAGLAELERVIAELRCRLAAELVVVGIEAAGHQHQSLTAHLADRDGLHVRLLNPGAVAAIRKQQGNRRRKTDWLDAAAVCELLARGEGTLVHLDASMAASLRPLWSGRKDLVDTRSRLRQQAGALVDCLWPGFSAADKQAGVSPVLCDLFKTKAGRVIAGLLGEGWTPARFTAAPTTQLQAIFAARGCRLTRPLASRLRARAADALPAHPAATAGKAAALAGMLGVLDGIDAEVERLEAQMAPLLAATEGAKLTQIRGVGVVTASGFVAFVGRTDRWAEWSKVWRAAGLDPARSQSGAKDARLGISREGSAWGRRALLDLAAAVCRQPGRWGDGFRARTTQGRKPAKVALVATGNSIGRTCFALMRSGADFDPAWETKRTRSSKVGDQAA

SEQ ID NO: 217724 - protein, 503 aa, unidentified
MHPRPGLTIIPLDGSLQADYRKNNATQRQPLTGLTMSPGRPTEGVPDRGREADWPSNTVSHYAPRGRIGAYRIPDSSFPGHVGGGDMTYVLDIHKDSVLVYRAGEDGKEECLRLKANREVMKEFLEGLPEDSTVVMESCYAWEYIYDMAVENGLNAVVADTGALYTSGKPQKKNDLEDCRRLARLYKIGELPTIFVFDERTRKLRDLLRARRFTTEKITAYRNHTHFVTDRLGLRFPSAELFGAHPANPAELSIDHNSQVQLASIQRILATLEDEEKRLDGEIIRQLVPTEQIKLILTIPGVGMIIAAGIYLEIGTISRFARKENLTAYAGVVPQLDESGGTTKDRRLRTRCNRNLRWAAVEAARHAIQCDKDLREYYLRRIHVPEAQATRPQKSKAVVATARHLLEVIWCMLSRGEAYRGSQGIPTKKMQKIRRMEKPYPVPAISEIADGVASTLERPANLRWSPEGEWEGGWEKNIVDQAIEEVECRTQSKTAITPASIFL

SEQ ID NO: 217725 - protein, 354 aa, unidentified
MPRKTTSLEAVTTIGIDIGKNTFHLIGLDKMGAIVLRQKLSRGQVDTRLANMPPCLIGMEACVGAHHLSRKLKAFGHDARLMPARYVRPYSRGQKNDFRDAEAIAEAVLRPTMKFVAIKTVEQLDLQALHRVRERLVCQRTGVINQIRAFLLERGIAVRQGLRALRTEMPIVLAMTDKLSPRMIRMIEDLCTDWRHLDARIATVSNEIKTLSEQDDGAKRLMTVPGIGPIISTATVAAIGSGDVFSKGRDFGAWLGLVPRQMSTGGRTVLGPISKRGNRYLRMLFVQAARAVLLRPQSWEKYGLRSWIEAAARRLNRFKLAIALANKIARVAWGVLHGGRNFEVRSMRTAPQAA

SEQ ID NO: 217726 - protein, 392 aa, unidentified
MIIVGIDVASEKHDCFMLQKETGLVFRASSVTIGNTEEGYKKLHADIQSFCGATGDSDVRIGLESTGIYHTNIITFLIAQNYKVMMINPILTNMARKAAKVHSAKNDNLDAKTICRYLVDHPDEFSPYTPTLYHTSVLKSIARKRYFITEDLRKAKMAVNNIVQLIFPEFKKLFSNIYGESALAILKEYPSVKKLAKARVSRLAALIHGRCKCTAEQLIDAAKHSIGLSDDWYTFELEDAIAELEHIQKRIAAFDAQIKRYVDEICPNILTIPGVGYVTAGLILGEIGDISRFRSADALVSFSGLDLTVYQSGKYKALHVSPSKKGSVYLRYALFQVSRVIWQCNSTFRDYYGKKQAEGKHHYVILGHIQKKLARVIFSVLKNNSAFQERPA

SEQ ID NO: 217727 - protein, 343 aa, unidentified
MYYIGLDVHKRTISYCVKDAAGQVHQEGKIGSTRRELDAWIKTLPQPRTIAMEATIFTGWIYDHLLPHAEKVKVAHPLMLRAIAAAKKKNDRIDAGKIADCLRCDFLPECHMVSTEIRDRRRTLRYRNLVLKQMVQMKNRVSGLLMETGVSYNKQRLHKLGYFTELMSGNEEVDESIRPLLKLSRETIVRSQRLDYALVSSLERDPLLGERLERLRTIPGVGPITALTWALEIGDVSRFQSVKQAISYCGLCSAERSSADKLVRMPISKQRNKHIQQTLVEAAKLAPRYSPELALVYERERQRGNRNRATLAVARKMVAYMLAVERRKQNFVLKGEFSGTAAA

SEQ ID NO: 217728 - protein, 413 aa, unidentified
MEMMVERVCGLDVHRDEVSACARTPSEKRSGARVSTQARFTTNGSGLTGLVSWLADLGVSLVAMEATGIYWRPVFYALEDAGIDTVLVNAAHIKNVPGRKTDTADAAWICQLAEHGLLRASFVPEPGIRVLRELCRYRKSLIQERGRVIQRLEKICQDASVKLTSVTSVVLSKTGRSIIEALIAGERDPVVLADLARGRLRPKIAAIEDALAHRWQAHHSTVARAGLAHLDALDAQIAIVSAEIVIASEPFKWAIDLLRTIPGVELRSAETIISEIGVDMGMFPTAGHLASWAGMCPGNNESAGKHGPGFTRPGAQWLRQGLNEVAHAVARTKNNHLSERHRRIRARRGPKRAAVATGHAVLVAVWHILDRQVPFHNLGTDYNDRRRDPTIETRRLVARLEHLGHNVTITPAA

SEQ ID NO: 217729 - protein, 352 aa, unidentified
MEFVGIDWAYRRAAWCAMGKAGEIRDEGFVPADEDGLAKLVLALGPRVSACVEMMSGAVWVRDRLQAAGWEVEVADARKVKAVAPLACKTDKVDARVLAELCRRDLVPAVWVPSLSDRELRERLNRRAHLIRLRTAAKNRVFGALSQWGLRIPLRVLRAGDAMALLERRGLPEVWRRSVAEALAVIDILDARIAPLEAELRPLVRADERVQLLTTVPGIGDHLALMIAAEIGDIARFATPRKLIGYAGLAPKVKQSGQSSRTGALSKAGSRSLRWAAIEAAQCAWRPTNPWNRLYLDVKGRTGKSNPAKSAVARKVLIAAWHVLARHEPFKPSRPRGGADPVPASSHFHLAA

SEQ ID NO: 217730 - protein, 350 aa, unidentified
MMVIVGIDAHKRTHTAVAIDEAGRKLGEKRTTSTTTEANLELLRWADAFGKERRFAVEDCRHLSRRLEADMLAAGEELVRVPPKLMAHARDAARTYGKSDPIDALAVARAAWREPSPPRACLDGPSRDLRLLVDHREDLVRERTSQVNRLRWHLHELDPSWDPAPRSLVRFKHLDALGARLDGLGGTVAWVARDLVARIRELTVAANELERRIVEQVSRLAPALLGLAGVGGLTAAKIVAEVADVRRFHPKDAFARHNGTAPLPVWSGNLVRHRLSRTGNRQLNAAIHRIAVTQMRIHDGAKLYLGRRIAMGNTKTEAIRALKRQLSDVVYRTLMTDAVSTQVARFGEAA

SEQ ID NO: 217731 - protein, 370 aa, unidentified
MEEGIKFFVGLDVHKDTIAVAVAETGRAPARLVGSIAHDVNQLLKRLARYGEPAQVHVVYEAGPTGYGLQRALARRGYQAQVIAPSLIPKRAGSRVKTDRRDSLRLAELSPAGELRAVWIPDPADEAIRDLARAREDAVNARTQVRQQLKGFLLRHDVRYAGRTSWSKTYYRWLATLNFGETGVQTAFTAYWQAVSAADERVGRLTTALVGSIAGWRFASIVAALQALRGIDQINAIGLVAEIGDIGRFAHPRQLMSYLGLVPTEASTGERVVRGSITKTGNAHARRLLTEAAWNYRFRPRIGMRAQRRAEDLPQAIRDVAWKAQLRLSGRFRRLHTRGVHLNKVCTAVARELAGFVWAVARARSELPQS

SEQ ID NO: 217732 - protein, 438 aa, unidentified
MSNKVIFNLDELFISVGIDVGADFSWMSIALPNQQFVGKPYKILHNSIDSLTTAVSKIKEAEELYSLESRIFLESTGIYHYPLFCYLRDKGFNCSVINPIITKNSTNINIRKVHNDRFDSKKAALVGLKPDLKVSLMPSDLALNCRNLCREYYDLMDNRSAYVNKLQGELRMAFPQYLGIFSKVTINTSLTLLETYTSPSAFLEADKQEIIDIIKSTARFGLTYAQNKYNAIIQAATDANQFGYIIDSNIKRIRLYISFIRKYDEELNSILESLHELVDAHEDADFVKQIHLIETFKGAGFLSAVSIMGEIGDFSAFSKPKQLFAYFGLDPAVKQSGKFEGTKVQMSKRGSAIARCVIHTLTLQSISISRNGEAKNPVLREYYLQKCDSKPKLVAMGAVSHKVCNMIFAILRDNKPFKIIAPQEHIKQYNAAKCDIAA

SEQ ID NO: 217733 - protein, 354 aa, unidentified
MPVYIGVDFHARTQTVCWCDTADGVIHQRTLDHERDDVRAFYAQFPAPALVGLESSGYALWFHQLLAERNHQVLVGDAFQIRQFARRRQKNDRRDAELLLDLLLRGDFPAVHVPPPASREVLGLLRYRHRLVRMRTMLRNGLQAVALNHQLRLGPRLFRTRGLVQLAALPLQGAAAVQRQHSLELLDALQKKILEVEEILEARAAADPRVIRLRTHPGVGRLTALGVVHTLEPVTRFDRARRVAAYCGLDPKEHSSGERQRFGHISKQGNRLLRFLLVEAAHRAVQTGQDEPLRRFYLRLVMKKSTAIAAVAVARKLVLRLYRMLREQIDYDEFRRRGRDARRAREYASPARSG

SEQ ID NO: 217734 - protein, 351 aa, unidentified
MKYYISTTEFNCGIDLHAREMYVCVMDRQGNKLVHTNIQGNDFAYFLKRVAPYRHSLTVVCECTFNWYWLADACFAAKLPFVLGHALYLKHIHGGKNKNDRIDSEKLAHLLRSNLIPPSYVYPSARRPIRALLRQRMSYVWQRAALLTHVSMNQTAEGLTPAAKGGHNRDVWMERILAQYENPLHHLAVTCEMDVIRAYDLQIEKLEDEIIRQAKQHEDRDYHLLNTVPGIGRVLAMTMLFELDAIERFPTVKNFLSYARLVKGSVASAGKVKGLTGGKMGNAYLRWAFGEAAVICKRNHPLLTPYAERLVAKRGKFKGNAILAAKLARAVYFMLQKGTAFDAEKLIATSL

SEQ ID NO: 217735 - protein, 341 aa, unidentified
MSIITIGIDLAKNVFAVHGVDHNGKPVLLRPKVPRAELLSLISQVPPCLIGMEACSGAHHWARLFRPFGHTVKLIAPKFVTPYRMSGKRGKNDAADAAAICEAVTRPNMRFVPVKEEHQQIVLTLHRTRQGFVEERPALYNRLRGLISEFGIVLPQKVVCLRREIGAHLEDLPGYSNRCIGDLLAHADRLDALIADYDRAIAQAAREDARSKCLMQLPGIGPTTASALLASLGDGHEFGNGRQVAAWIGLVPGQYSSGGKSRLGRITKAGDRYLRSLLVMGARAILAGLGDKQDRFSRWARSLVERRGYWRAVVAIAAKNARLAWAVLKYGEDFRLHAAVA

SEQ ID NO: 217736 - protein, 448 aa, unidentified
MRTRKPARAKKMKLPKDLQHINPHAAGIDVGSRSHFVAVPEGSCEQPVREFTSFTDDLHRMADWLLACEVTTVAMESTGIYWIPVFEILESRGLEVRLVNARHVKNVPGRKSDVLDCQWLQRLHSYGLLEGAFRPTEQVCTLRAYVRQRMNLVRYAAAHIQHMQKALSQMNLQLANVVADITGVTGMRIIKAVLAGERNPLVLARLRDRRCKSSESTIARSLHGNFRPEHLFSLKQAVDLYEFYQGQIAECDRQILDQLASFDGADASGNGPPESVDEALQRMAGVDLTQIDGIDTNSALKIIAEIGTDMNRWRSAKHFASWLGLCPGTKISGGKVLNARSKPVANRAAATLRMAAFALFNAKSALGAYLRRQRARLGAPKAITATAHKLARLVYSMLKHGTAYVDEGQKRYEERYRTRVVQNLKRKAKELGFALVEAVEKQPKLETT

SEQ ID NO: 217737 - protein, 404 aa, unidentified
MFYLGIDVALNTHRLVMLDANGERVSSGISFQNNTADFEKVLNKLKELSINPDNSIAGLEATGNNWENLYCFLTGNNFKTILLNPHQTNKFREALRKKAKTDDIDAFVIAGLLRSNEFASSYVPEDKIQTLRELTKLRYEFIKDHKNYQRQVLSLLNIIFPEYRKTALKHPFTISSTAVFKAFSTAKHLSVAKPKHIEKIVRSIKGNNFNIKEIENLISIAKTSVYSGRCQESRALTLNMLLTQVESFGNSIQQLDEQINQIFSPSSNDNTFPGSNLLTIPGVGPKTLAAILSCTGESGQAFSTGVKLIGHIGFFPQIYESGETKRANKLSNKGPAYLRHALYMASVACLKHNLQLRNLYHTKISQGKKPKQALICVAKKLAHLCLSMLHSGQDYNPARVFSYV

SEQ ID NO: 217738 - protein, 402 aa, unidentified
MNTTSMNIRPQLERAAGLDIHQNKITVCFYIRDTLEEVRDFGTFTCDLEQIREALQKHQIKDVIMESTGVYWIALCSVLTAAGIKVNVVNPRFVKNMPKEKTDNKDAKWLCKLLVNGLVRNSFVASEEQRAFRDVCRQRTKYSQHITQTTNRLLKNLERRNIKLRSVVSSMHTKSGMDIIHAIAHGETDIEKMLLLCRGKLKKKRDEMRKALQGVITQHDRDMLKTLLKDITHYKEQIADIEERIRCHTDKVNTTLFQNLGQIKGVGKQTTEIILAEVGDNVNAFNTSDKLTAWVGLAPGNKESAGKSRYTGTRQGNVYLRTAMIQAAWGAVRTKNSCWRVLFAHLIKRMHAKKAIVVIARKLIKVIYKVIKGVLEYKEYGAEYYIEKLLQRKGLQPRPIKN

SEQ ID NO: 217739 - protein, 427 aa, unidentified
MNFTQNEKLNQVSENSIVIGVDIASELHYARAFDWRGVELGKVFKFENNVEGFRRFNGWINYLREQTKKDAILIGAEPTGHYWFGLAAYLKEQSIKLVLVNPFHVKRSKELDDNHPGKTDSKDPKTIAKLVIEGRYNEPYIPEGVYADLRIATSCRLRIVKELNGVKNRIHRWIKIYFPEYTKVFGSFEAVSSMMILETAPLPVDIIALGAEGINKLWRDKKLRAVGIKRANCLHEAGKNTIGCTEGSASARLEIQLLLEDYRNRINQYESVMKVIEDLCMQIPEVEKLLNIKGVGVVIVAGFVSEIGDIRRFHSPKQIQKLAGLALKETSSGKCKGQTSISKRGRSRLRAVLFQAVMPLVAKNAEFAEIHRYYTTRIKNPLKKKQSLIALSCKLIRVFYAILSKGIAYDSTKLISDIHRPKEMIAA

SEQ ID NO: 217740 - protein, 407 aa, unidentified
MEVVYRCCCGIDVHKKIIVACLDQGGEQSLREFGTTTSEIKSLATWLTESGCEMIAMESTGVFWKPLYNLFELMDLNAIIVNAAHMKALPGRKTDVKDAEWIADLLRHGLLKASYIPGREQRELREITRYRKSLTEERCREVNRLQKILEGANIKLDSVVKDITGKSARKLLQRIIDDDIPDSEEVSKLVHGRMRPKLDQIVASIEGITTPLQRKLLAQIIDHIDDLNRRISELDKLVQEYMTEYVAAIEAIDEIPGIARRSAEVILAEIGTDMSRFPSAAHLCSWAGVCPGNYQSAGRRKHGKTTKGNKALKTILTQCAKSAKTVKSSYFSVQYQRIAARRGKNRATLAVAHSMLIAIYHILKNKTAFHDLGSDYYDAFNRDRKINSYLKRLKSLGWEPDAIPSSA

SEQ ID NO: 217741 - protein, 415 aa, unidentified
MTQTFKCLSGIDWASDSYEVCVVDADGSVLGKKEVEHSGDGIQQCIDWLLQMAGGDASSIAVAIEVPHGAMVESLIENNVAVFAINPKQMDRFRDRYTVAGAKDDALDAFVMADSLRTDQACFHRVELDEPAIIRLRELSRMEQDLQTDSNRLANQLWEQLRRYYPQMLKLSPAANEVWLWDLLESAPLPGGTLKLAKVKAILQGHRIRRVTAEQVLEQLRQPALRLAPGAAEAASEHVQMLLPRLRLLQQQREATARRIRQILDALCTAPPEGQGREHRDAEILLSLPGIGPVVAATMLAEASQPLRDRDYQALRNYAGAAPVTRRSGKRKAIMMRYACNEPLRNALYHWSRCSMQKDARAKQHYAELRQRGHSHGRALRGLADRNLAMLISMLKSGTLYDPARRGSAALAQAS

SEQ ID NO: 217742 - protein, 341 aa, unidentified
MGEVNTIGLDLAKTVFQAHGADASGGVVFRKKLRREQLLAFFAGQPRCLVAMEACASAHYWAREIGALGHETRLIPPAYVKPFVKRQKNDMADAEAICEAAQRPTMRFVKPKSAEAQGATVVFRTRDLLVRQRTQLINALRGHLAEFGFIVRQGVGHVGKLIDLVGDLSTELPAEARPVLAVIADSLQSIRERISVLDREIAMRAKADPVAKRLMTIPGVGPVVATALVALSPEANTFRRGRDFAAWLGLTPKQHSSGGKERLGRTSKMGERSLRRLLILGASSAAKNAGRAGSRASPWLVGMLARKPRMLVTVALANKMARIVWALMAHGGTYRAPAEAV

SEQ ID NO: 217743 - protein, 445 aa, unidentified
MAVRRRVQTLEVAHPNAAGVDIGSASHFVAIPPDRDGEVVREFRSFTQDLEALVQWLKDSGVDVVAMEATGVYWIPLYELLEARGFSVHLVNARHVKNVSGRKSDVLDCQWLQQLMSYGLLSAAFRPKEEICVLRSVTRQLDMLTKYQSQHVQHMHKALTQMNVQLDNVISDVAGETGQKIIRAILAGERDPLTLARLRNTRIRASEEDIVKSLQGNWREEHLFALKQALSLYDAYGRAIAECEQQLALVLGRLARHEVPQAPPNRRGRPRNMARFDLRRALHCACGVDLTRVDGIDVATALKVIAEVGPELSRFKTSKHFCSWLGLCPGTKISGGKVISGASKRTANRLAQALRLAASSLRTSQSALGAYYRRLCGRLDKPKAIRAAAHKLARLVYTLMTKGEQYVDQGQNYYEERHRQRVLHHLNRKAVAMGFKLVALESIPS

SEQ ID NO: 217744 - protein, 339 aa, unidentified
MYPFYLGIDLHLKRTYMVLMDAKGEIINKGRISNQEITKYLQEKVPQETYAVLEATRNWPFMYDLLHEHVDKVDLVHAKGVRAIANAAVKTDQIDASVLAHLARMNYIPKAYAASKEMRDLRQLLRHREWMVNQRSKAKNRIHAVLAAYNLISPVTDLFGVAGREYLHEVMEEDLRPSARQVVKDHLAMIDHLTERIRSIEKNISLNERQNHIVNILKSMPGVGRLIALILLAEIGDISRFHSPKALCSWAGLTPKVHSSDAVVQHGHITKEGSRYLRTAMVQAATTACRVSPKWYRVHEHMALRCGRRAARVAVARRLLTVIYYMWKKDQPYQENYGQ

SEQ ID NO: 217745 - protein, 459 aa, unidentified
MPYRIAGIDVHKRKLAVVVADVEVEEEYQFERRWYGSNPEQLQLLSDWLLEQAVEEVVMESTSQYWKPLWGVLERYWKPICEKREDAGHMSGSLHLAQALSNRGRRGRKKDFRDAERLVKRLVSQELILSFVPDAEQRLWRTLTRTKYQRTRDKVRLQNQLEALLEESHIKLSSLVSDLLGASARRMLKALAEGETDPAALAALADRHLRATPAQLRDALGACTELSPVYRRLVRLALDDLQLIEQQIARLDQEIASLLREHQDAVQRLAEVPGLGVDSAQQIIAEVGAKAATFASAKNLVSWVGACPGEDESAGVNRSKRSPKGNRQMRRILNQAANAAVKHKGSIFEIVYRRFVPRLGHNKTIGAIAHRLCQLIWIILHRSVRYEERGPAVSEKSKRQRTSRKPWLPSRTLRKSGMRSTIFDPVNLVGCKSPHHQLPGQVVSISDACGGNEACSART

SEQ ID NO: 217746 - protein, 343 aa, unidentified
MQTITTIGLDIAKSVFQVHGVDAEGNVVIRRQLKRRYVLAFFEKLPPCLVGIEACASAHHWSRELRALGHTVRLMPPAYVKPYVKRHKNDATDAEAICEAVTRPNMRFVPTKTEEQQSCLTLHRARHLFIRQQTSVINAIRAHLAEFGIVAPVGRNGVEQLLGVAADASDKRLPEVARACVAALGAQLQTLKTQILQFDRMITAWHRSSEVSRRLDDIPGVGPALATALVASVADPQAFRSGRDFSAWIGLVPKQNSSGGKDKLGSISKRGDRYLRSLFTTGALAVIRYAKIHGTKHRPWLTALLARRPTKVAAIALANKIARMAWAMMATGERYKEPVALAA

SEQ ID NO: 217747 - protein, 358 aa, unidentified
MRIIGCDLHARQQTLAILDTTTGEIVNLTLTHEGNNVREFYCKLPRPVRVGIEAGGSMQWFLNLADELGIECQVGHPASVRAAEPRKQKHDRRDADLILKLMVENRFPSIWLPSKELLDLRALLLHRHQWVRMRTRVQNALQAIALANGLRRGPSLWNQAGQDQLASLPLAPHTAHRRSELQALYAKFAMEIEKLNQRVEKQAGVRPTAVRLMTHPGVGPITALATDVFLGDATRFADGKALASYVGIIPREYSSGGRQRLGGLTKQGNPLLRFLWCEAAIHAVRKDPELKRFYCRKLFQKGLGKARVAAARKLGIRLWILLRDQIDYNEFCRRGQRRQKYGGACAGMPERVMAPNSR

SEQ ID NO: 217748 - protein, 344 aa, unidentified
MQATTIGLDLAKNVFQVHGEDAHGKVVVRKRLTRGQVLRWFANTPVARVGIEAYGGAHYWARELIGLGHDVRILPPQYVKPFVKTNKSDAADAEAICRAVGSTRMPTVAVASPAQQDMQALHRVRQRLMANRTALGNQTRGLLLEYGIAVPKGMARLREGVRLVLERPSASLSATFLALLQEQYSELLDWDRKIAHYTARIERAVEADPAARRLRAVPGIGALTASALLTKAGAGAYGNGRHFAAALGLVPRHEGTGGKLRLLGISKRGDRYLRCLLIHGARAVVSQMKDKQDPLRCWLRRLVERRGHNKAVVALANKNARIAWALIAGAQEYAPQRACAQPMP

SEQ ID NO: 217749 - protein, 361 aa, unidentified
MTTMADRQRPVTGGVDTHKDAHVAVVVDEVGRVLGTESFPVNAKGYASLLAWMAARGALVKVGVEGTGSYGAGLARYLAAHGVAVTEVNRPNRQARRRKGKSGPVDAEGAARSALNGEASGAPKSRDGAVEALRALRVARRGAVKARTQATNQLRDLVVSAPEALRARLVHLSTAKRVELAAQFRPGSLLCPVEATKAAMRSLAQRHQGLSAEVARLDDALGDIVAEVAPDGFLAKTGVGTQVATILLGTAGDNPGRLGSEGCFAALCGSSPVDASSGKQKRHRLNQGGDRQANSALWRIVFTRMTCDPRTKAYVERRTAEGKTTKEIMRCLKRYVAREVYKSIVAGGRGAEPPVPLAVVA

SEQ ID NO: 217750 - protein, 359 aa, unidentified
MLYLGIDQHARQITISLRNEDGDVIQARQVSTRPEKINEFFGKLTRERLRDGESFVSVVEVSGFGDWLIDMLYHYRCDKVILIQPDDRKKQKTDRRDAAALSELLWVNRGRLLHGKPVKGLRQVDIASKVDQENRRLTVLRRDARRERTRIINKIKYVLRRHNLMWHLPTKTFPTVDAVNWLKKLSLPKIDRLEMDYLLVDLERIEQRVKELEEVIDQRCASSKEAVLLTSMPGVGRFTAIALACRVGRVERFPRSHSLANFWGLTPGCRNSGDNNKRLGSITKAGSSMARWLLAQVAYQALRQDKRLREWFKRIKRRRGASIARVAVMRKLATVIWHMLNSGKTYGQCRQLSTDQAQK

SEQ ID NO: 217751 - protein, 330 aa, unidentified
MQITTIGLDIAKNVFQVHGIDAAEKVVVRRQLRRGQVMRFFEALAPCLIGLEACASAHHWARELMKLGHEVRLMPAKDVRAYVKRNKNDAADAEAICEAVRRPTIRFVQVKSAAQQGQLMQHRTRDLLMRQRTQIINALRAHLAELGQGREGVKELLAIIADKRDEALPLDAQASLLVLAAQLQALQTLIGSIEKRIVAQHRANADSKRLETIPGIGVVGATAIAATVTDPKVFRCGRDFAAWIGLVPREGSTGGKRKLGPISKQGDRYLRRILVVGAHSVLRRAKLHPEKYPWLTRLLARRPFRVVAIALANKMARIVQPLHQLPLRAN

SEQ ID NO: 217752 - protein, 359 aa, unidentified
MTTTAVTTAAGPILAIDLGKYKCVACVYRATTEHTFQTMDTSRAEVARLIGRTRPAVVVIEACSLSGWVYDLCGELGVPCRVANTAAEAWKYKHTKRKTDRDDALRLAQLFALGQLPEVVVPAKATREWRALIAHRQALVTQRVAAQNRIRSILVGQGLPAPRGAKAWSATGLAGIGQFARPLAECGPEDLWHGALDLALTAYRQAEELVAVAEAKLDAIGKADARVRLLDSMPGLGPRTAEAIVAHLDDPRRFRSGKQVAAYGGLVPRQYQSGEDDRRGRITKRGPAVLRKLLVQCAWAMIRYNPWAQAVYVRLSRGKARKKQAVVALARKILVRCWAMLRDGVPWQTDSAATVVAAS

SEQ ID NO: 217753 - protein, 344 aa, unidentified
MDHFAGLDVSVKETSVCIVDDTGKIVREVKVASEPEALLSVLKNPAYYFKRIGLEAGPLSQWLYSALAEAELPVVCVETRHMRAVLKAQINKTDRNDARGIAQMMRVGLYRPVHVKTLRSQKLRLLLTHRKLLLSKAIDIENDLRSTLRNFGLKVGMVGTVKFEARIKELVENLPDLAVLVEPLLLVRRVLREQIEILHRRLLTIVRDDEVCRRLMTVPGVGPVVALTYRATVDVPARFRKSRSVGAVFGLTCSKYQSGEIDRSGRISRCGDEMMRVMLYEAAQVMLTRTNKWSWLKAWAMKIARHRGMKKAIVALARRLAVILHRIWVDGTEFRWTREQAVAA

SEQ ID NO: 217754 - protein, 410 aa, unidentified
MRIIGMDIHRVAAEAVALLDGKLVKLGRIPLLRESLEDFARKELTHDDHVVVEATGNAAAVVEVLAPHVDRVVIANPKQVRLIAHAKIKTDAIDAAVLAKLYATGFLPEVWVPDEATLALRRQVARRTQLIRQRVRLKNLIQSILHAHLIPPCPHVNLTGISGRKWIADQRLPDDERAAVHRHLAQIDLIEGSVKEVEADIARATLSDPVIRRLMTLPGVDMTVASGVAAAIGDVRRFGDPTKLVGYLGLNPSTRQSGEGPAYHGRITKQGRGQARGMLVEAAWAAARSPGPLRAFFQRVAAKRGKPIAVVATARKLAMIIWHMLTKGEDYIWVRPALLARKFRSTELKAGLPPEHAKRGAAYDYNIPEKRAAERVRVEKAEKAYADFTARWRSKPRARSRSEKITPAPS

SEQ ID NO: 217755 - protein, 343 aa, unidentified
MTRYIGIDLHTNSFTVCILDGEKEKIQTLALQQGGLEQFISQLQASDEVAVEATGNSAWFREQLLPHVARVAIIAPWQFEVIRRSTKKTDKHDARAIAFFLSKDMLPEARLKRKTQTELASAVATRDQLVKLRVSLLNKAHGLFNRHGIKIKKETITSKIGFERAVASHKWEPLEQVELEVIAAQLDAIRVSDLRLKKEITAVAKTLPGYENLVSIKGIGPLSAAIFLCTIGDIEEFAKSGNLAAYFGITPRVSQSNDSQRVGRITKRGNKIARTTLVQCTLIAKRYSPYLQKFYQHIKATRGAGKAIIATARKLLNTIFYTLKNNWVFEDFSNFTILTCNQS

SEQ ID NO: 217756 - protein, 345 aa, unidentified
MVILGADLHKRWHTVVAVSETGRKLGEKTIPATPDGHLELRRWVAQFPERRWALEDCRHLSRRLEADLLRSGEAVVRVPPKLMAGVRRSVREPGKSDPIDAFAVARAALREPDLPVATLDGPERELRLLVDHREDLVAERTRHMQRLRWHLLDLGIEEPGPRSLDRAAVLADLESRLAGRSEPAARLARDLVTRVRDLTAVIRPLEREIEALVAALAPTLLALPGCGSLTAAKIVGEAAGISRFRSKEAFARHNGSAPVPVWSGNVTRFRLSRGGNRQLNLALHRIAITQMRIDERGRAYLEHRRSAGDTKTEAIRALRRRISDEVFRRLRADEAARVTPLAAAA

SEQ ID NO: 217757 - protein, 410 aa, unidentified
MPLFCGIDWATEHHDVAVVDDDGRVVARGRVSNDAAGFAQLLTLLAEAGDSAAHPIPVGIETDRGLLVAALRETGRVIYPINPLAASRYRARYAVSGAKSDATDAVLLANIVRTDPGAHRPLPADTELAQAIRVLARAQQDAVWARQQIGNQIHDLLKDFYPAALRAFAELPEGGLARRDARTILAAAPTPAQAAKLTPARLRRLLINAGRKRYLDRDTDRLREIFADTYLHQLPQVEVAMGIQLTALLGQFDAACTAAADLAEAATAHFEQHPDAKIITSFPGLGNLTGARVLAEIGDDRARFADARGLKAYAGAAPITRASGKKTVVLHRHIKNRRLAAVGPIWALGSLRASPGARRHFDARRATGDWNHQAQRNLFNKFLGQLHHCLQTRRLYNEHQAFPPPLELAA

SEQ ID NO: 217758 - protein, 355 aa, unidentified
MNDAKYIGMDVHTATISAAVRDSSGNLVMEATLETKAETILEFVDGLRGSLRVSFEEGTCASWLHDLLKPHVSEVLVCDSRKNALLRVGNKNDREDARKLSELLFLNELHPVYHGETGIRTLKELARSYLTITRDLTRVMNRLKAIYRGWGIACAGQRVYAPRYRAEWLAKITEPGVRRRAEIYYQQFDALAALRQEVRRELLAESRKHPAVRLLRQIPSIGPIRAALLIALMQTPHRFRTKRQLWAYGGLALRTYDSGEYRFVGGQLKRSKKAVTIRGLNKNHNHDLKNIFKGAATRAAATAGPLQNFYEARIASGMKPPMARLTLARKIAAITLLVWKKGVCFDAEQLKQQAA

SEQ ID NO: 217759 - protein, 414 aa, unidentified
MEVLVTRCAGLDVHKKTVVACALVGAADAVVEPEVATFGTMTADLERLAGWLAERGVADVVMEATGVYWKPVHNVLERHGGFRLVVGNAEHSKAVPGRKTDVKDAVWLARLLRHGLVRPSFIPDREQRELRELTRYRTALIRERASEINRLQKTLEAANIKLAAVISDVTGVSGQKILDALVNGEEDPGTLVGLADARIQKKRAALEQALVGQLSPTLTFVVKHQLRHLHELDDLIAACDAGVEERMRPFADAIARLDEIPGVGTRTAQVIVAELGVDMTRFPSHRHAAAWAGMCPGNNASGGKRRRAKTRKGSPWLKAALAEAAWAAGRCKGGYLPEQFRRLAARRGRKRAIVAVGHSILVIAYHLLKDGSRYTDLGPEHSDRRDADRVKKRSIQRLEALGYKVSLTDTKEAA

SEQ ID NO: 217760 - protein, 398 aa, unidentified
MLSIGIDVSKGKSTVCGMKPGGEIVYTPFEVQHTREGMSELVSLLRGSGEEVRVVLESTGSYHCPVVAALLENGIFVSVVNSLRMKRFCSQSIRRVKTDRIDAMQIALYGLAYWQELQPTRLPENTYRELQLLARQYYQMTSLLIKAKVDFNALCDQVLPGMQELMSDHAGRHKLSDFVLRYHHTAHILKMGETRFRKDYCKWAEKKGYRNHERMAALIFATAQNGIPVLPDAPSTQIVITEAIRVLHTVEASRDAILTQMQALAKTLPEYSLVREMPCIGDTLAPRLIAEIGDVRRFHSKRALIAYAGIDAPPYQSGKFSANNRHISKRGNRYLRKTGYEVMQSYVMHKPANDPIFTFIEKKRSEGKSGKLAMVAGLNKFLRVYYGKVTELYRSLPQ

SEQ ID NO: 217761 - protein, 322 aa, unidentified
MPGSILGIDIAKQKLDVALLIDGKIKNKSVKNNPEGFEALSLWLRKLGIQKVHACLEATGNYGEDLAIYLHDAGHMVSIVNPARIKGFAQSELIRTKNDRIDAGIIARFCQAMRPDAWIPPSLKIRSLRALVRRIDSLNDMLTQEKNRLGTAHESVIPMIKEHIAYLEKEIDRVRDQIADLIDNDPDLRKKKDLLDSIPGIGKATIAALLAELDPLDKFSHVRELVAFIGLAPRETLSGSSIKGKPRLCKTGNARLRKALYMPALTSIQYNPLMTAFYARLKERGKNGKVIVCAIMRKLVHVVFGVLKSGKKFDPNYKPVCP

SEQ ID NO: 217762 - protein, 365 aa, unidentified
MSVANQRPEAPTAIRTDLGAIFVSLELSHSKWLITSLQPGSEKMSKHVVAAGNVAGLLDRFAELRRKGEARTGRCYPIIVIQEAGLDGFWIHRVLQAEGIESHVVDAASIATSRRRRRAKTDGIDGEALVRALLAYKRGEPRVCAMVRAPTPEEEDRRRISRERKTLTNERISHVNRVKGLLFAQGVSGYEPLRRDRRKRLEELMTGDGLEQIKAVEAERDAMLAAEQLTSPAPTMLLNLKGIGPEFAVVLWSEGLSRHFDNRRQVAAYAGLAPTPWQSGSVDYDQGISKAGNPRLRTTLIQTAWLWLRHQPRSALTLWFKDRVKQNSGRLKKTTIIALARKLLVALWKYVNAGVVIEGAVMKTA

SEQ ID NO: 217763 - protein, 315 aa, unidentified
MYLGIDVSKRTLDCCLISDSLFFERKFDNGQDGFQKLKEWLQEHEADETLHCCCEATGKYYQAAAEFLAESYTVSVENPRKIKGYGTAKLQRSKTDRLDARLIAGYCRDMKPRPWQQPDQAQTKLKELNQYRQRLKRQKAAEQTKIQTVPEYLVQLVKAHIEHLQDQIRLVNGQIKQFYQDHPIHKQNRRRLQTITGVGEAAADALLAVLAAHQRFKSAKQLTAYLGLDPKTHQSGTSVNGRERISKVGSVHIRTALYMPAMQAYRSSTFAAFVNRLKTNGKRPKQIIVALMRKLAVIAYHLIKTGSDFEEKRYL

SEQ ID NO: 217764 - protein, 371 aa, unidentified
MNHVTSIGLDVHARSVTAVALDSITGEVRSQKFGYSPAEIAGWILQLDSPKAVYESGVTGFHLVRELREMGVDCIVGAVSKMHKPASDRRKKNDRNDAEFLARQLMAHNIVEVFVPDVETEGARNLSRALEDIRDDLTRAKHRLTHLLIRWGYIWNEFNEDGKRRGSWTHAHWEWIRGIELPDAAARESLDYYISEVRHIESQKKAIEKRVAQCASRPRWRDRVEALRCMKGIETVTAFALTVEAGVFSRFDSARAFASWLGLVPSEHSSGERASRGGITKAGNSHLRKLLVEASWHYARATKERKRSLYDESVPASISNHAAVGVKRLVERRRHLSCELRKRPVVANVATARELACWIWALGRMSEGALA

SEQ ID NO: 217765 - protein, 471 aa, unidentified
MSKGSSGTTGGDRRRNSRRERLRGMLPRDGAVIGIDLADEKQAFAVIDHDVRVLARKTVRVKAFRLGPALDWAVEQARAKGFTSVTVACEPTGPRWLQVQMLCAERGLPLVCIQPLVSHIAREQQDYTSHKTDEADCVMIARLAAELHCYVPEQLDETWAHLRHLGRRRAQLITQQSASMHRVRDFLSVAWPTVIETCAQPLLSKTWLAALEVVTSRCGGQPAGLAAMGEEAFTAVVRGAVAGWGGQRAWGTISGRIFATLTDTEGVVACSRRGLLRRCAGELGDLRRVRAQLRAVEAEMVAVLAELGLSRLGDIPGLTAAGAAAILAETGDPRRYDNSSSLVKHAGLSPSENASGAFHGEARISRRGRPGLRLTVWRAVWPMLRFNPVMAAKYQAMTTAAAPAAPAGAGSPQAPAADAAARARRAKARVACAASLLRWIYSLVAHGTSWDPEVAAGRKDHQTAPSYREAA

SEQ ID NO: 217766 - protein, 388 aa, unidentified
MQTAADHPEAPTAIRHDLGAIFISLELSRSTWLITSLSPGGGEKMSKHSVRGGNVAGLLERFAQLQEKARARTGRTFPIIVIQEAGLDGFWIHRVLQNEGIESHVVDPASVATSRRRRRAKTDRIDGEALLRTLLAYKRGEPRVCAMVKAPTPEEEDRRRLCRERKVLTNERVQHVNRIKGLLFGQGVSGYEPLRRNRRQQLNELRTGDGRPLPKHLKTQISRELDRLELLLEQIKAVETERDALLAAQKVALPGPAAMLLDFNGIGPEFTAVLWSEGLFRHFDNRRQVASYAGLAPTPWQSGSVDHEQGVSKAGNPRLRTTLIQLAWLWLRHQPQSALALWFKERVARNGGRHKKTTVVALARKLLVALWKYVTADVVIEGAVMKTA

SEQ ID NO: 217767 - protein, 367 aa, unidentified
METKVNPINFLYVGVDVHKDQHTAVATNCFGQTLLEKEINNSKEQFEGLVENIKRVAGAKNLKIVFGLEDTSAYGQRLALHLCQNFPVKVVSPVLVVRERKKLTHPEKSDSQDALGVARALIQRIGTLPDFSISETNQTAKALKDLVTDREFLVKEQTRIKNQLHRLLHRAYNSGYRLKFKNPFAVRALQYWLKYPVPAGLNGDHLLKSQIKRKIRRLKDIKKEVAEIEGEMRMLLDQTDQKLDTLNGCGLVLASSILAEIKDIDRFHSSSALAKYGGFCPKEKSSGKSIKHIKTKSGNRRLNKAVHRIALAQIGKQGNIYSKEYFKKKIAEGKNKAQAMCCLKRRIIAIVFAMLKHKAAYDYAARC

SEQ ID NO: 217768 - protein, 394 aa, unidentified
MFLVGIDIGKHKHSFCIIDKETGESIVKPKFFDNNKVGFEELLSSFKGLPKKDILIGMEDTGHYHFTLLKFLLDKKYQVALINPVTTDLTRKLSGSHTKTDKLDTLTICDILTSNQRTKPYRISKVDRFDLYEQKQLTREHHNLKEQSNVLKNRLQKSIDIVFPEFNSLFKSMYGVVYMNILKEFGSADALAHSDIRTIRKCFDFKGRGKRIELTAKELKNAAINSIGFPSIAEVVQIKHLVNQIELVEEQIEELDKKIEEFSIANNSPILSIPGISHFSGTSILAELGDIHNYSKPSQIIKFAGVAPLTYESSQFMAKHTAITKKGSTYLRKTLYQIILPVINNNKVFKDYYNLKLSQGKGYRCAQGHCVRKLLRVIFQLLSTNTQFDPALLV

SEQ ID NO: 217769 - protein, 419 aa, unidentified
MSFKIIKNNCCGLDVHKTWIFACIGITDSNNRTEYKQARFSSFTKGLNELCDWLAKYNCKDVCMESTGKYWIPVFNILEQHNLWVTLSHPKYTKPMKGNKTDRKDAKWICDLYMCGMVKPSFIPSADIRELRDLVRYRYKLTCMITGEKNRAQNCLTVSNLKLDEVFSDVFGKSSRSITEQILQHPGEAFDVAHFVHGRCKTPIEEIQAAVDGAISKEQAVKLRQCLDHIDELNKHISEIEQEILRLSDKYETALNLIRTVPGFDKNPLTAVQVLSEIGGDMSVFPTAKHLVSWAGCCPRNDQSNQKIKSTRISRAGSYFKPILVQVANALIKSKKHPEFTTRYKRIKARRGHKKAIIAICRMILTAIWHILTDLNPYTTEGFLESRPVNDSKILTTSQALNLLKQRGYVIKDDIVSVP

SEQ ID NO: 217770 - protein, 412 aa, unidentified
MDIVHERAAGMDISKHDAKVCVRVPGNRAGTYTSTVTTWGSTTGQILELRDFLEREHVTTVVMEATSDYWKPFFYLFEETLPVILVNAKAARNIPGRKTDVSDAAWLAQLAAHGLLRASFVPPEPIRDLRDLTRARSIATRDRTREIQRLEKFLEGSGIKLSSVVSDLTGVSSRAMLEALINGERDPEVLAGLAKGTLRSRIPALVDALTGRFKEHHAFMARLHLDQIDAQSRIIDALTDRIEAAMAPFRAAREFLATIPGVSLKVADVIIAETGADMTVFETPGRLASWVGVCPGSNESAGRIKSAHILPGNKYLKAALGTAALSASRSKNTYLAAKYQRVRFRRGAMIAIVALEHSILNAAWHLLAQGECYDDPGATYFTRLDPVKARDNAINKLNSLGYNVTLSPATAA

SEQ ID NO: 217771 - protein, 377 aa, unidentified
MEQATRFVGLDVHKETIVVAVTSAGEVGKATHHGTMPNTPAALENLVRRLRTAGSGALKFCYEAGPCGYGVHRTLTRLGEDCMVVAPSMIPRRSGDRQKNDKRDAAALAVLHRGGLLTAVWVPDTAHEAMRDLVRARQAAVRAVRAARQQLSAFLLRHERIFPSDGRPWTKTHRSWLADQRFDQPAQQIVLEESIEAVRLAEQRRDRVDGYLRAQIPSWSLFTLVRNLCALRGVDVIVGAGLAAAIGDPSRFATAPDFMAYLGLVPSEHSSGQRRRVGAITKAGDIHARTMLIEAAHSYRLPARIARRKLKAVDAVPDAVREIAWKAQTRLCQRYRQMMARDKLKQVVVTAVARELAGFVWAIACTTSDPSAHRSIS

SEQ ID NO: 217772 - protein, 364 aa, unidentified
MQKISTLRRSGKNIFRGQLTIGLDLGDRFSAYCILSEAGEIALEHKLATTPEAMKQVFASMPRCRMAMETGTHSPWVSRLLAELGHEVIVGHAQKVRLITKSRRKDDRLDARTLARLARIDPELLSPVKHRSAQAQLHLAEIRARATLVNARTALVNAARGLVKSYGERVHKCDTRQFRRETSGLSTGLREALEPLLSQIESLNESIQKYDRRIEKMAKETYPETLLLKQVKGVGDLIATTYVLTLEDTHRFRKSRDVGCFVGLQPGRRNSGESEPQMRISKEGDEYLRTLLVQGAHYILGPFGEDSDLRRWGQKLSARGGKNAKKRAVVAVARKLAVLLHRLWVSGEVYEPLRNSQKAMSPAA

SEQ ID NO: 217773 - protein, 484 aa, unidentified
MSQPKKHSQKPAERTSTAGKGKRGRKRKGMCLEDRPILEPNAAGIDIGAREIFVAVPPDRDQHPVRVFTTFTEDLEKMAQWLVSCGITTAAMESTGVYWIPPCDVLEQHGVKPCVVDARGMKNVPGRRTDWHECQWLQFLHSVGLLRAAFRPDGEVCAVRSLMRHRSDLVQMTSQHVQHMPKALTQMNVQIHHVISDITGVTGLAVVDAILNGQHDPLELAKLRDPHIQASEETIRKSLVGNWRPEHLFTLKQSRQMCGHYQEQIVACDAEIEKLLVRFQPRVDPKEKPMPPDRKKKQRGRKKKNANPQTGFDVRTESYKLFGVDLTQIPGLMLMVLTLFSELGRDMSRWKTAGDFVSWLALCPDNDISGGQVLWRGRRRVHNRAGDLFRMAAYSLHHDKSPLGDYLRRMKSKLGPAGATVATAHKIAIIFYTMVKKQVEYDDKLWAQRDAEREKRFAAKLKRQAQQLGYKLVPIEEKTCRVTG

SEQ ID NO: 217774 - protein, 369 aa, unidentified
MADRITYVGLDVHKESIVVAVASGDLRGEVREYGRIANTPTALDRLLRKLGGDGVSLRFCYEAGPCGYGIQRHVSAQGHECVVVAPSLIPRRTGDRIKTDRRDAASLAKLHRAGELTAVWVPDAWHEAMRDLVRARLDAVHSLRRARQQLSGFLLRQGRHYGRPAWTKLHRRWLAGLNFEQAVHHIVLEDYIAAVEAAETRRDRLTTQIEAMLPDWTLAPVVSALQTMRGMALVNAATLIAELGDLSRFANPRQLMAYLGLVPSEHSSGASVKRGGITKTGNGAARRLLIEAAWSYRFPARISRELLLRQENQPKPIRDIAWKGQVRLCARYRKLARTGKPANVVTTAIARELAGFVWAIARRVTVTRG

SEQ ID NO: 217775 - protein, 418 aa, unidentified
MEIVVERVAGLDVHKASVTACVRVPADDGQRVEEVATFATTVPSLLGLADWLEAHDVTQVAMEATGVYWKPVWAILEDRFDCILVNARHVKQVPGRKTDVTDAQWLCRLAETGLLRASLVPPRPIRALRNLTRYRKASIRDRQREAGRLHKLLEDTGIKLDCVASDLLGKSGRAMLAALIDGTTDPDMLADLALGKLRLKLPALREALHGRFDHHHAIIIGRILAHIDYLDEAIAELSTEIEAQIAPLAPSVDALCTIPGVQRRTAEVIIAETGGDMRAFPTAKHLASWAGICPGNDESAGKRRSGKTRKGSKWLRANLIEAATAASRTKDTYLQAQYQRLRARRGHARAVTAVAHSMLVAAWHILTTGEVYRDPGSDYFIKRDPERTTRRLVAQLEKLGHAVTLEPATSTAASAIAT

SEQ ID NO: 217776 - protein, 326 aa, unidentified
MQGKESSEQEPKTKSNVGIDVSKNWLDVHVLPGGDTRRVANSREGVRKLKRWLSGFDLALVVIEATGKWHRPLHRSLHASAIPVALVDPFRVRMFAKAQGTFAKTDRLDARVLAQFAAVMAPQVRPPAPEAMQELAELVQAREAAVAEETALKNQLSAATGGFLKRQLARRLNRIAKDIADLAREIRGRIEAEEGLSRRYAILTSIIGFGPIVAASLIAWLTELGTCSRRQIAMLAGLAPVADDSGERRGVRVVWGGRPAVRRMLYLAAISAARHDPSMKVFFSRLTADGKPAKAAIIAVARKLVVLANTLISENRLYLRQPPNYA

SEQ ID NO: 217777 - protein, 364 aa, unidentified
MLRVAHFVDAVVGGDTHVDTTSLCVVSPVGAVLAEITIDNDEDGYAQAVTWVLQSVPSERFLVGLEGTRSYGAGLCRALQAVGIRVVEVERPSRGERGRRGKSDTGDAVLAANKVLAMPPDRVPAPRAGDGVREALRLLTVDREQMTTQRTRLVNQLYADLLTGNAEQHAQRKKDLTSGTLRKLAGARGRSGRPIDEQARLVVLRRKAQDIVRLDQQIRENERQLNTILDEVAPQLLEQVGVGPVVAAQLIVSYSHHGRCRSEAAFAALAGVSPIEASSGRITRHRLNRGGDRRLNRALHVVAVTRVKHDPRTRAYIQRRSKDLTDREIRRMLKRYITRDLYGVLRTIDALHPKRTTSTVTPAA

SEQ ID NO: 217778 - protein, 416 aa, unidentified
MDVMHPRCAGIDCSKKDAKVCIRIQGHDRQATSAAVTTWGATTSQILTLREHLVAANVTCVVIESTSDYWKPFYYLLDLLDDGLDVVLVNAASVRNLPGRKTDVSDAAWLADLGAHGLVKSSFVPPAPIRALRDLTRTRTVITRERTREVQRLEKLLEDAGIKLSAVASDITGVSGRAMLAALIAGQRDPAVLAELAQRRMRSKIPALTEALTGRFDDHHAFMARLFLDRIDAHTADIGRLDERIGEAMEPFRPARDLLMSIPGFSRIVAEVFIAETGGDMSVFPTAGHLASWAGVSPGSNESAGRVKSTKTRPGNRYLKGVLGITALSAARSKDTYFAAKYKRIVTRRGPMRAIVAIEHAMIIAAHNMLTNGDFYRDPGADYYTSHQPARTKARAINQLESLGDRVTLQPLTKSA

SEQ ID NO: 217779 - protein, 350 aa, unidentified
MTNITTIGIDIAKRIFQFHGVDKNGKAVLKKKLMRDQVLTFIANLPKCLVGMEACGGTKLLAREISKLGHEVKLMAPQFVKPYVKTNKNDQADAEAICEAVSRPNMRFVPIKSIEQQDILSIHRVRARLVKNRTALANEIRGLLHEFGMIIPQGINKITSKLTEVLDSGKLSPISQQTFSDLKEEFIENDKKIKCLESRLKIMASELDKYQQIIAIPGIGLITSTALIASIGNGSCFENGRQLSAWLGLVPRQASSGGKEKLLGISKRGDIYLRTLLIQGARAVLNTKLRFTTESQKAKKDYSKFTQWMFNLYDRSGHNKTVVAVANKLARVVFAVLSSGNDYVENKVCS

SEQ ID NO: 217780 - protein, 412 aa, unidentified
MTVFCGIDWAEAHHDVALVDQDGTLLAKRRISDDAAGYRLLLDLLAEYGDSADEPIPVAIETSRGLLVAVLRTGKRKIFAINPLAAARYRDRHGVSRKKSDPGDALVLANILRTDMHAHRPLPDDSDLAKAVAVLARAQQDAVWSRQQIGNQIRSLLREYYPVALDAFLGKQGGLARPEARAVLAAAPTPRTAVRLTLPQVRAALKRAGRVRGIDVEAERIKTALRAGQAHQPPLVEDAMGAQLLALIGQLDAACRAVDDLAEAVEASFLQHPDAEIMLSFPGMGVQLGARVLAETGDDRERFTDARALKAYAGSAPITRASGKKRFVGRRFIKNNRLANAGHQWAFAALKASPGADAHYRRRREHGDWHAQAQRHLFNRMIGQLYHCLQTRQPFSEQHAFTSSSADLAVAA

SEQ ID NO: 217781 - protein, 338 aa, unidentified
MKKFFIGIDFAKTKFDVVVLSCDDLLSKGEHSQFCNTKDGVKQFEKWLRQMYGTSVITDSVICGENTGVYSLLAAKILSKDGYTVCLESALRIKRSLGISRGKNDKKDARDIAEYAARHHDKLVVYQAPSQTTEALKTLFTQRRLMVKQKSDLQRRNKELTALYKDNPLLKKMLDSDKRIINVIDKEIEKIEAQMKSIIGSDPEVNKVYNILTSMKDIALVNAVALIVYTHNFKRFDYDARRICSYWGIAPFANQSGTSINGKPHVSHFADHYLKSLLSQAVLCAIRYCPDIRKYAQRLMAKGKHISIVHNNCKNKMIHILVAMVKNGTYYGDTQKKS

SEQ ID NO: 217782 - protein, 410 aa, unidentified
MKMAGIDVHKKVWMVVVVDASVPEEKPVRRRFVTLPSELQRFRIWLQEQGVEEAVMESTAQYWRSVWLELEPHMSLHLAQAFSNRAPRGRKHDFKDAERLVRRLMADELILSFVPKGEQRIWRSLTRMKVQLTRDRVRLQNQMECLLEEMRIKLSIVVSNLLGASGLRILHALAQGETDPKRLAELGDERLHCTQEQLVDALTGRVQPMHRGMLALQLQRLQLIDQQMTQLNSMIAQAMKSHQDAVIRLAEVPGLGVDSAQQIIAEVGAQASTFSSAAELTAWVGTCPGKEESAEQNHSSRSAKGNKYLRRVLNQAAHAAVAKKGSYFQGVFRRLMPRLGYKSAIWAIAHRLCRVVWKILHEGVRYIEQGREVGPREKKQRAQMLARALRKLGYEVTITPINQLAPKPAI

SEQ ID NO: 217783 - protein, 426 aa, unidentified
MVDDEYRIYVGIDWATEAHQACVLDYTGRVLAERSFAHTGEAVAAFAQWLHGVAGGDPGQAAIAIEVPRGAVVETLVEHGFHLYAINPKQLDRFRDRHSVAGAKDDRRDAFVLSDSLRTDRARFRRIRLDHPLVIQLRELSRVDEDLAREVNRLTNRLREQLHRFYVQALKLCPSADEPWLWALLERAPSPAAGSRLQRKTIERLLRQHRIRRLNPQDVLAALRAPALWVAPGVVEAATEHIGLLLPRLRLVHTQRQRCGARLDALLEKLAAVEGDEGQQRERRDVEILRSLPGVGRVVAATVLAEASGPLAERDYHALRTHAGIAPVTKQSGKRRTVVMRHACNGRLRYALYHWARVAVTCDPASKTYYAALRQRGHSYARALRSVADRLLRILVAMLKSESLFDSTHPRRSPHPAAAPETPCAA

SEQ ID NO: 217784 - protein, 420 aa, unidentified
MESPQVSFKQVVSRGCGLDVHKKTVVATIDGEGIKKQTQEFGTVTSSLKELRDWLLENGITHVVMESTGVFWKPVYNVLEPTNMTVWIVNAAHVKYVPGHKTDKKDSAWLCKLLLAGLLKPSYIPAKEQRELRDLTRYRTTLIQSNASNKNRIIRILEDANIKLSSVLSSTNGAVGTKLIDKLCDGKEITMKDVEDVYHKKLEASKEEIFGACQGFVTAHHVYMLQIIRQEIADTGRTIESLNNRIKEVLSPYENALELLKKVPGISSKSVEDLVAEIGLDMGVFPTEKHLASWAGMSPGNNESAGKKKSGRTTQGNKHVKAVLTEIAWAATRTKNTFYHARYHKLAARRGKKRALIAVGHSILKSVYHILSDKCEYKELGAGYLISRTEAKRKAYLKSELSKLGYAVELKELPPIEKVG

SEQ ID NO: 217785 - protein, 338 aa, unidentified
MKLYGAIDLHSNNNVTVLIDEQDQVIYQKRLPNELPVIVQQLSGYQAALQGIVVESTYNWYWLVDGLMDSGHRVHLANTAAIQQYEGLKYTDDNSDARWLAHILRLGVLPQGYIYPKEERAVRDLLRKRSQLVHQRTANLLSIQNLVTRNTGRSISANRIKGLDAPEVDELLPDGDLALAVKANLSVMSSADEQTQILERTVRDRVKLRAEFTFLKTVPGIGQILALTIMLETGDIRRFPSVGNFASYCRCVGSQKISNGKRKGSGNTKNGNKYLAWAFVEAANFAIRFNPRIKKFYQRKKAKSHGVLAIKAVAHKLCRACYYIIKDRVPFDIAKAFG

SEQ ID NO: 217786 - protein, 355 aa, unidentified
MNSVRYIGLDVHRDTISAAVLDSEGKLLMQSVLATRAAALLDFLHGIKGSLHITFEEGTHSAWLWDLLVRRVAKLVVCNPRKNALLKSGNKGDAIDARKLAELLRAGLLSPVYHGEQSGLEVQHLARSYTMLTEDTTRVMGRLKAVFRSRAIACTGNKPYGKRHRERYVAQLGRGSLRRRAECLYQELDALQPLRRQAKQELIAECRKHPASRWLQSVPFLGPIRAALLIGRVQTPHRFRSKRQFWAYCGLALETRDSAEYRVVNGQVERRHKPALVRGLNWNHNHELKNLFKGAATTASACQGVLREFYLGLLAKGMRPEMARLTLARKIAAITLKIWKKGELFNAEHLKPQAA

SEQ ID NO: 217787 - protein, 346 aa, unidentified
MKILALDLGKYKTVGCAYESESGAHQFKRGFTSPAGLTRMVQEVKPDRVVIEICSIAGWVCDLLWELGIEVQVANTSDDAWRWRKVKQKDDRRDALKAARLSAVNQIREVYIPALAVRQWRALITYRQQLIRRRTKIKNHIRDLLLREGQILARGSSCWSEVGIEPLAAQARSFSECGPAELWRGELQLELEQLREVQRQVVTVTAQLDKIGAGDTRVKLLRTVPGVGPRLAEAIVALLDQPQRFRKASQVSGYIGMVPKALDSGETERRGHITRQGSRVVRSLLVEVAWAGLRHNAWVRQTYQRLSGGKKARKKIAIVAVGRKLLVRCWAMLRDNRAWDWQPQIT

SEQ ID NO: 217788 - protein, 403 aa, unidentified
MNKLKRVCGLDVHKDIIFACVKKEKYQSEVKQFSTTTQGLSELSHWIQGEQVKKVAMESTGIYWMPVWRALESDFKLLLVNPYFIKQMPGRKSDVQDAQWIATLLDKELLKGSVVPDKTIRVLRDYMRRYAQLQGQMTRCLQQIEKQLSRCNIKIASLSSTIGSKTVIDIVASICKGQYQPEQLLKLVHGRIRNKHGEKVKQALEGIIDEHDIFLLRQIYADYIHIHDQCEALVGQAQKVADEYYQQEIELLQTIPGIKKLSAIIIFAEIGGKINLFETAQNLTGWCGLRPKNDESAGKIKSRSITKGNKYLRRILVQTGWAASRTKNCYLKTKFEQLSIRKSSKKALIAIARKQLVIIWNVLSKNESYAEPQIVLSPEQIERKQKYYQGKLETLFKTIEKAG

SEQ ID NO: 217789 - protein, 412 aa, unidentified
MDVTYPCCAGLDVHKETVAGCALWVDPHGKRQKEIATFGTTTRQLLALADWLSQRKITHVAMESTGVYWKPIFNILEGTFTVLLVNARHIKQVPGRKTDIKDCEWIGDLLQHGLLKASFVPDRPQRDLRDLTRHRAQLVGEQTRVINRMQKILEDANIKLASVASNALGVSGRAMIQSLIRDDQTPEQMADLARGKLRRKTAQLGEALQGHVTEHHRFMLIELWGHLEYLEKAIAKFESRIEERTRPFAQEIARLDEIPGVDRITAQAILAEIGNDMSRFPTADHLASWAGVCPGNNESAGKRKSGKTTPGNRWLQRCLSQAAWASSHTKDTYLSAQFRQIARRRGKKRAIIAVARTILISAYYLLRDAVPYEELGGDYFDRINPERIRQYHVRRLQKLGFVVTLQEAAPAA

SEQ ID NO: 217790 - protein, 402 aa, unidentified
MRFFVGIDWASRTHAVCIVDQTGRVRWQGAVPHTAEGLTELIGRLRRFRGRGGLRIALERPSGLLVDTLVDAGFEVVPIHPNALKATRPRYSAAGGKSDPGDAFILADLLRTDGHRLATLRPASDETRALRALVRGRDDLVAQRLALANQLRALLERFWPGAAAIFAEVDSPIALAFLARYPTPHSAARLGERRLTQFLGQHAYCGRRPVAELLVRLRTAPTSHVGEAETEASGDVVRALVAVLTPLVGQLQQLSAATTAALAQHPDGRLVQSLPRSGAVNAAQILAELGDDRARFPTDEQFAAEGGLAPVTHASGRHHAVVFRWACNKRLRRALTTFADNSRHASRWAALVYQRARARGCRHPHAIRILARAWARILWRCWQDRTPYDVTRHRAAQALAAA

SEQ ID NO: 217791 - protein, 338 aa, unidentified
MKYKRIAIDTSKHVFTLHGVDEHERPMLQRNLKRAEMEAFFGKLAATEVVMEACGGAHHWARLLSQLGHRSRLIPAHYVKPFVKRAKNDRADAAAINDAASRPDMPTVPIKSADQQANSMILKHRELLIGQRTAAINALRGHAAEFGIIAAKGTAQIEALLAKLQDEATVPAVAKAMFVQMGEHIAALDQRIEVLEQELRALHKTDPMSQLLAAVPGIGPITAITLSLSIEPAHFASGRHFAAWLGLTPKEHSTGGKPRLGKISKAGNERLRTLLVVGAMAVIRHAKPGRKTSSTWLLQLLGRKPRKLAAVALANKMARIVWAMMARGEAYRHSPVAA

SEQ ID NO: 217792 - protein, 366 aa, unidentified
MSEWWDLLGFGRVTIGASIWSSRRSWCRSYAGFDVHRDQITFDLVDRLSAEVRTGRLVPATRAGLCRWLGSVDASRLVVASEATTGWRFVVEELERAGARAVLAEPADTRALRGPKRRAKTDRADARHLRELLERDAVPESWIPPEHVQELRTLVRLRQSLVGERHVWLQRVHAQLFHQGAPPARRPLLGPTGAAARALLSPAGRQLRETAERVCQAVDGEIAGLDQQLAVWAHRHPACRALQRLFGVGPITAVALYAEIGDARRLSSSRQLVRLAGLDVTVSESADKRSPGRLSRQGAPILRWAAYEAALSACRRGSPDHGEYLLLRARLGHGRATLTIARKLLRRCYHLLVAVGDDLLQPLPEP

SEQ ID NO: 217793 - protein, 372 aa, unidentified
MTRRTRTGSRHAGGNVAGADPHRKTVSVTVLDERGGVLGTKHFNVSGVGHRAMWEWIQSFGPVSRFGIENATGIGRHTAMFLIERGVDVRDVCPTRTAEQARRRQQGKSDELDATRIARETLADPNLPTAFKRAGGDRGPDPVHEQILLWHKARRSLVKSRTHLLNEADHLLIELPLELRAELPRTSDVRRLLHALQQLDTAAYSDPVTRLRLRFLAEQTARIDALDREERAVARELTALVNLSGSTLAELRGIATRSAAELLVEVGDPRRFTEAGFARFNGSAPLPCSSGEGAGEPVRHRFNPHGNRRVNCVLHHMALTQLRCDPRARQLYDHARQRGHTKPEAMRVLKRRLSDVVYRRMIRDLEGAAQAA

SEQ ID NO: 217794 - protein, 376 aa, unidentified
MRTVALDLGSRKTAFCEVAEGRVLQRGSVTTVESLKSLLGPEMPPSKVAIEACREAWHVHDVLSSWGNEVVLVDTTRSRRLGIGQHGRKTDRIDAEVLALALERGGIPVAHVLSPHRRELRRWLNVRRALVESRAQLVTTARGLARERGRNLPRCTTRRFADNVASENLDAELAELLSPLLTLLSSITIELKTVEDKLATLSATEPIVELLATTPGVGPIVAASFVSVIDDANRFHSAHHVESYLGLVPSEDSSGGKRKIGSISKKGNSYLRALLVQSAWSILRSPVVTPLRLWADAVAERRGKKVAVVALARRLVGILWAIWRDGSVYDANLVARASSKGTRRNAQSLEFRAEALGRSGTKLHKRRLNSSEVTVS

SEQ ID NO: 217795 - protein, 359 aa, unidentified
MSSISPPGPLSKIIIGVDTHKHVHVAVAIDDDGQRLGDLRVPVDSLGYQELDRWAQSFGRVLAYGIEGTGSYGANLTSYLRRQGRKVVEVNRGDRRARRANGKSDTLDAELAARSIIAGTSTAVPKSADGTVEMIRKIKVARDIACKNRTSAIISLKTVIVNTPQELKEQLDSLGDKALIQKCSGFRPGTVDDPISAAKHTLRALARRWEFLNAEVKDHDAVIAKLTTSLSPTLCDGFGIGPDTAAEILIVFGDNPDRVRSEAAFAKLCGVAPIPASSGMTTRHRLAWNGHRQANAALYRTAIVRMQHHQPTKDYVAKRTAEGLSKRDIIRCLKRFIAREIYGRVMADFRARTALSAAA

SEQ ID NO: 217796 - protein, 338 aa, unidentified
MTILFLGIDLAKNVFALHGVDERGKPVLVRPAVRRDQLLEAVVKLPPCTIGMEACSGAHHWARRFQEFGHTARLMAPNFVVPYRMSGRRGKNDAADAAAICEALQRQAMRFVPVKPTQAQSRLAVHTARQGWVCARTAVINRLRGVLSEFGIVLPLKAATVRSRAGEQLDTVPGWVQTVCRDLLAELQRLDERVAAYDEHIRLMAQADDRARALMVMPGIGPTTASALLASIGYGHDFANGRQLAAWMGLAPGQYSSGGKNRLGRITKAGDAYLRTLFIMGARAVLAAAANKHDRLSRWATALAEHRGYWKAVVAIAAKNARMAWAMLAKGEEFKPMA

SEQ ID NO: 217797 - protein, 420 aa, unidentified
MARQDVKDEVIHLRSAGVDLGKRFLLACTRTPSPKRPGSWSLETERFGTTQAEIRRLLAWLVEARVEVVVMEATSDYWRSVYYMLQPHLNLMLVNPAHLKGIRGRKTDPSDAAFLARAGASGMAMGSFVPDREIRELRDLTRSRTEIVRAAGREAQRLEKELEDTGMKLTSVLSNVVGATGRAILEALIAGERDPERLADLACGKARNKIPALIEALDGEFTPHHAFMVRHYLDEIDHLNSAITIFDMRIASLLAEHQQDLDNLDTIPGIGRLAAEIIIAETGGDMGQFASAQHLASWIGVCPGQNESAGVSRSGRTRPGNSNLKRLLGIAAMAAIRNKDSYLAAFFRRISARRGGKRALVAVMHKLAIAIWHVLHDHTPYRDLGADYFAKRDPERAMRRMTKEANSLGLTIRFEPIAAA

SEQ ID NO: 217798 - protein, 366 aa, unidentified
MEKYKFVGLDVHKATIAVAVAEANGGEVRYVGEIANTPEAVVKLVRQLKKEGATPSFCYEAGPCGYVLYRQLKGMGLECLVVAPSLIPTKAGDRVKTDRRDSLNLARLYRAGELTAVWVPDGAQEALRDLTRAREDMKHAEKQIKQRLLAFLLRHGKSYGGETNWTKMHFRWFETVKFEHPVQQIVFQEYVDTVKAMVKRVEGFDGQIGTSAAESVFWPVIQALMALRGISLLAATIIVAEIGDLRRFASAPQLMAYLGVVPSEYSSGATKTRGAITKTGNGHVRRILVEAAWTYRHPARKTEYLQRRAKHAPDNIQEIAWDAQKRLCGRYRLLETKGKLKQKVCTAIARELAGFIWAIGQALPQQ

SEQ ID NO: 217799 - protein, 370 aa, unidentified
MKKSITIVGLDVHKNSIDIATAETSGDQEVRYYGTIGGDMASLDKAIRKLKSRNRELRFVYEAGPCGYEIYRHLTKQAIQCVVIAPSMTPRKSGNRIKNDRRDALSLARLERAGELTQVHVPLPDDEAMRDLTRGREDSVKALRTARQRLGAFLLRHGYRYPKKNTWGASHMRWLSDIAMPHPAQQFTLQEYIHAVMECAERVSRFTDQIQKLLPEWRMAPVVASLQSLRGVAQIVAVTFVAEIGDIGRFAKPRELMAYLGLIPSEKSTGDSIKRGSITKTGNGHVRSALVEAAHAYSFPARVSRILLKRQDGLPKEIKDIAWKAQVRLCGRYRRLMAKGKLKNKVITAIARELAGFMWAIAREVQIQGA

SEQ ID NO: 217800 - protein, 320 aa, unidentified
MEAVLGIDIAKHKCATALLTADGKVYHKTCANTLAGFAELGAWLHRRRVTRVHACLEATGTYGEAMAAWLYDVGHVVSVVNPAVIHAYAGTQLARSKTDRIDAELIARFTATQQPRPWAPPAPEIRQLQALVRRLEALHGMRTQEANRLAAGGIIDEVRASIDAVLASLDAQIAHVQQLIRDHLDQHPGLRAQRDLLTSIPGIGDATAAVLLAELFDKPYRSARQAAAFAGLVPRLIESGTLRGRSRLSKIGPGRLRKALYFPAVTALRWNPTIRAVHARLHAAGKSPMVIIGAAMRKLIHLAYGVLKTGRAYQPRCAHP

SEQ ID NO: 217801 - protein, 456 aa, unidentified
MTRRKHSRPARDIAPVHPHAAAVDIGATLHVAAVRPGCDPEPVRTFGTFTTDLHRLADWFEQCGVETVAMESTGVYWIPLYEILDQRGFEVVVVNARDAKNVPGRKTDVSDAAWLQRLHEYGLLRASFRPKGAIATLRSYLRQRERLLEGAAAHIQHMQKALTEMNLQLHHVVADVTGVTGLRILRALVAGERDPDTLAAYSDPRCKAPAETLRAALVGNYREEHVFALAQALELYDIYQAKVAACDQRIEAVLERLKAANPPPAAALPPARPRRRQANEPGFAVREALHAILGADPTQIDGIGPSLALTLVGECGTDLSAWPSAKHFTSWLSLAPHNKISGGKVLSARTRRSGSRAAALLRLAAVAVGRTATALGAFYRRLAARVGKAKAVTATARKIGVLFYNMLRHGMDYADPGASAYEARYRQRVLSNLRRRAKSLGYVLQKADPASAVAVS

SEQ ID NO: 217802 - protein, 404 aa, unidentified
MTVYLERGYNRKEYQWVYKQYQNIYSKEIFMIYVGIDVAKDKHDCFITNSDGEVLFKSFTIPNNREGFETLFQKVQSVSDDLTKVKVGLEATGHYSYNLLGFLLDKGLPTYVINPLHTNLYRKSLSLRKTKTDKVDAHTIASMIMSDVNLKSYSDTSYHNEELKSLTRYRFDKVQERAKLKTSVSRLICILFPELEKLVATIHMASVYALLSEFPSAHAVASAHLTRLTNLLSESSHGRYGKDTAVMFREAARNSIGSNMPAKSLELKHTIKLIQELTSEIDEIETEIKSIMDEVNSPILSIPGINYRMGAMIIAEIGDFSRFDSPDKILAYAGMSPSTYQSGQLDNCYSHMEKRGSRYLRYALYNATKYVCHWDESHAVFKVQIYLKCISAIHSKYFIFRLDF

SEQ ID NO: 217803 - protein, 389 aa, unidentified
MYLIGIDISKYKHDCFIATETGEIIKDTFSFPNNQQGFLVFLNVLKKLDPSQTKRIGLEATGHYGRNLKVFCDKHGYTYMEFNPFLVKKFATSLTLRKTKTDKVDSRLLSMILLSVEYKVYPVKSYHIEDIKSLTRYYKTLTKKRSKELVNLTNILDYIFPEFKPFFGNKFSKTALFILETYQTPEKISNMNSKSHEKLLGISRGRFSYAKFIKLKLLSRETIGSSSSVLNTQLQSSLRVYSVLDQEIRTIYNHLLELSKIIDSPVFSIKGIGPISALSIISEYGNFTSFDSPSKMLSFAGLEPSVIQSGTLEKAGKMVKRGSGYLRETIMNVAPFFYMYNPTIYNYYQKKRSEGKTHRVALTHVAKKLIRIMFHLVKKNEDFDEYKLK

SEQ ID NO: 217804 - protein, 417 aa, unidentified
MQYVPVPLPDQPPNGLTCGIDWARDDHAVDVLDAAGRPVHRGIVDHSAAGLKDLIAVLRRLGVEEAAIERPDGPVVEALLAAGVTVVVISPNQIKNLRSRYGSAGNKDDRFDAFVLADTLRTDRARLRPLIPDSPATTALRALCRARKDLVIHRVRVANQLRAHLNGVYPGPVGLFEDLDSAISLKFLTRFDCQDRAEWLTPTRLGAWLKSVGYKGRTDPAVLHARLSAAPRGLTGPEATVYIGITHALVATLTGLVAQIGHLSTQIADQLSTHSDAQIFTSLPRSGTIRAARLLAEIGDCRARFPTPEALACLAGVAPSTRQSGKMRSVGFRWACDKQLRDAVCDFANDSRRANPWAADLYARARARGHDHPHATRILARAWLHVIWRCWQTNTPYEPARHRALQALREPQHEPST

SEQ ID NO: 217805 - protein, 391 aa, unidentified
MSMYFVGIDISKYKHDCCIISAVDQQIVSKFTITNDKDGFEQLLISLNSLSNPEDIKIGFESTAHYALNLELFLENANHSFMEVNPVLIKEYKKSTTLRRTKTDSVDCESIARWLMTVEYKPHSKGFYHSYSLKSLTRLRDRLIRQRSFYLVKITNVLDHTFPEFKPFFNERLSKTAIYLLENYGSAEKMAHMNSASYDKLRCASRGKFSIQQFLHLKELAANTVGVNNSIFDIELNSLLTLYNSLCKEIKNLEAEITRLIEEVHPHYMSIPGIGPISAAVIYAEYGDISNFSNPSQMLAFAGIEPGINDSGTESHGGRMVKHGSSQLRYVLLNACLPLIRFDLTFATYYAKKRAEGKKHRVAITHVAKKLIRVIYALERQDVDFNAQKIR

SEQ ID NO: 217806 - protein, 370 aa, unidentified
MLDTTTFIGLDVHARSIKAVSLDVMTGEVRAATFGYDAGAVAEWVRSVDPRARCVYESGVTGFDLQKRLSGLGVGCVVGAVSKMIKPSADRRRKNDRNDAEFLARMLSVGNVVEVWVPDDECEAARDLTRALEDARDDLSRSKQRLSKFLLRHGLVFDERTPTGRRKGNWTRAHWSRIESIRLAERADNDVLAYYVDAVRRAAEEKARLEGLVEAEARKPRWRKRVDSLRCLKGVDTASAADLVFEAGEFSRFGNARSFAAWVGLTPSEHSSGESDRRGAITKAGNKHLRKTLVEAAWHYLTCSGRPKDLAKGQAPDRGARRHAAKGVRRLVERREALLARGVHGNKANVATARELACWVWAVGLMAEEA

SEQ ID NO: 217807 - protein, 312 aa, unidentified
MTQICAAGVDVGRDFFDVGLAPSGQVFRTPNGQKGIEAVVSRLRREGASRVILESIGGYAARLVRALADAGFEVGVIDPKRIRALRIAEGKRAKTDALDARLIARFALIMQDAARPVPSPKAFEIRALSTRRRQLVEMIAMEKVRLKQTLDEPIAKSARFVIATLTEERERIETQLREALLAQENGKACAELLQSIPGVGPAISMTLMADLPELGQIDRKAVASLAGLAPHPNQSGTRTGQAHIHGGRPCVRAALYMAAVSATRTDKGFKREYLAMRNAGKPAKVAFVAIARRIAVAANAIIKTGQPWQKPA

SEQ ID NO: 217808 - protein, 436 aa, unidentified
MFVGHRFRTDPDELDTLWARLPKDAERIEVVMEPTRNAWVALAAWFRRHGATVVMVPPEQSADLRDYYNKHTKTDRLDSKVLARLPLLHPEGLHREDSLGPGDELKRAVKIRSGLVHRRTACMARLDALLEILGPAWIAALGSDMTLTALRFLARYANPVQVKRLGKARLAAFFRRSSRQAWADERADAVIEAAATTLRLWGADGGELDFDALAADVAAEARLALTLTDEINGFDKRIGALYDKADPAGIVRSVPGAGRVCAPQILGRLGDPTRFANLAAVRSFAGLVPAADSSGQADGHRGPTKAGDSCLREALFIAADHARKVDPTLAVRYQRLMLAGKHHDSAVCTLAAVLLTRIAACLRAGTHYLLRDTDGRVITEAQGRAIVAERYTVPPEVRAARRKVTPHRHPRRNERNERAKTGVATRSKASPVPQPA

SEQ ID NO: 217809 - protein, 388 aa, unidentified
MRKIGLDLGARHIAYCEVVDGKVVDRATAKSLSELASRLGPETEPALVAFEACREGWFVHDKLLEWGHDPRMLDTTRVRQMGVGQHGRKNDPIDAEAIGMALDAGRIAEAHVLSPARRQLRNQLSVRGALVETRAQYVTTIRGLARAAGVLLPTCDTENFVRKLDGLSMDDETRALIAPLVAMLRTLETQLQLAEHTLAELAEKEPILQLLATVPGVGLVVAATFVSVIDEAKRFKNAHSVGAYLGLVPSESTTGGPDKRRLGSITKQGNRMARAMLIQAAWTIFRLRDPNDPLKRWVEHIAKTRHKRVAVVGLARKLAGVLWAMWRDGTHYDAKGHAEQAARGVRISAHQQLVRAQVLQRGAAKLRRPLATQQSAKPCKKSSLRRAV

SEQ ID NO: 217810 - protein, 434 aa, unidentified
MSSLRQFFMGGNTLNIVYPICCGVDVHKRFFVATLITTEGIEPKYKKRRFSTFNNDILKFKAWLLENGCRDVCMESTGKYWIPVSNLLEDSINVTVANPKWVKTIKGNKDDDKDSKWIGDLFRIGLVPGSFIPSKDIRILREFTRYRFKLVSCKSSEKNRYQNVFTVCNVALDAVVSDMFGKSASSITDYIVNSDTFDPEHCVSLLQRSLKKKADEVLESIDGFQMTAPQKTRAKMVKEHYDYLLEHIRKIDVAIDELVKPYESAVNLFCTVPGVGRRLAITIISEIGTDMSQFGSSKRLCCWAGLTPGNNASAGKKKSVRITRAGVYLKPALVEAAHAAVQDKKNPYYAIKYERILKRRGKKRAIIAIARMILTAVYNMLTTGEVWNPSDLDQIDMPTELKEKEIQNSLRRAAKLLVAHGLLSPDMIPLLQAS

SEQ ID NO: 217811 - protein, 417 aa, unidentified
MEELPFRVFVGVDWGDELHQVCSVLGGKPQQRRFEHSGKGIAALVSWLMELCERQPATVAIAIERPHGVLIDALLEHGFAVFSINPKQLDRFRDRFSVAGAKDDSRDALVLASSLRTDPQAFRRVEPEDPLIIQLREISRAHRNLERDHRRLCNQLRDQLNRFFPQVLELSNAADEPWVWSLLERFPSPEKVRHAHQSSLERILREHRISRVTALEALEILKSPPLPVAEGVVEAATQHIALLLPRLCLVNDQRRQCGQHMDRLVKKLGETEDAQPGTKREHRDVEILLSQPGVGGIVAATVLAEAHQPLVQRNYHVLRTCGGIAPVTRQSGKTRNVTMRYACNHRLRQAFHWWGNAVCQCDPKAHALYLEHRRMNHSHARALRAVMDRRLNILMACLRSGHLYERDHAPKKGLDNT

SEQ ID NO: 217812 - protein, 409 aa, unidentified
METVHQRCAGIDIGKRSLTACVITTGTRGEPAKETRTFRTLTRDLLALADWLDAAGVTAVAMEATGSYWKPIWNLLEDRFELLLANAAHLKAVPGRKTDVRDAEWIADLFRHGLLRASFIPPRPERELRELVRYRTTLVRERASEINRLAKVLEGANIKLGSVSTNIGGVSGRAILTALTEGMSDPEALAELAKGRLRNKHEVLVEALAGSVGSHQRFLLATQLRHLADLDTLIESLDAEIKERLRGADELIERLVTIPGVGRRSAEVILSEIGADMTRFGSARRLASWAGMCPGNHESAGVQHGGQTRKGSPWLRTALVNSARSASRTKTYLGAQYHRLAARRGAKRAFMAVGHTILGIVYELLTTGQSFRDLGTTYFDQRDAERIRRRLTHRLEALGYTVTLAPHAA

SEQ ID NO: 217813 - protein, 362 aa, unidentified
MTTEEKQRTLFVGIDVHKDTHTAVGISPFGEKMFELTVGNYQKDFDDLAKEVRAVGERSLLSPFIGLEDCSGYGERIASALYTDGFPVVHVPPILVDRLRKRQTHPEKSDSLDALGVAKVMMHDTDSLPVYSISERTAVAKFLKELSLDREYLAVERSRLRNQLHLLLHRIYNTEYASYFKDPFALKALRHWVRVQPQCDPFLLRSMKRKVKRMLELHTEIKDLEKDMQSVIEEAGYTLPTASGCGVVLAATMIGEIGDIARFRSPASLAKYAGCAPRECSSGKKTRYRKTKSGNRRLNCTFHRMALSQISPTGNDAARAYFKKKVSEGKTKSQALVCLRRHMVTVVYMMLKHGTEYRYPQA

SEQ ID NO: 217814 - protein, 336 aa, unidentified
METKFIHFAGVDVSKQKIDVSVIVNNQRSQILHNSFEQSKKGFAGLKKWLVQVTGKQTRRLLICVENTGLYDDALMYYLSDNELAVSLENAANIKRSVRDSRGKTDKLDSRNIALYALTHCDELRLWERPRKQVALLQQMLSERSRLVSALKMLKQAHTEQQVFSWSGRVQSKSYQWGIKGLQKDIEQVEKDTWELIKSDKELLQMFMLIISIPSVGKITAYHFICYTNEFKQVKNGKQLASYCGVVPFERSSGSSIKYKARLPHQANKILKTLLHLCAVTSIRMKGAFAAYYKRKIEEGKNGLIAINGIRNKLALTIAAVIRNNEPYKENYIYKP

SEQ ID NO: 217815 - protein, 433 aa, unidentified
MHREFAQIAVWEDGLVRQAGQVSLTAEALRAFADSLGPEDEVAIEATCNTHAIVRLIEPRVKRVVVSNPQKTRAIAEAKVKTDKVDAEVLCQLLAADYLPSVWVADLQTQALRRQVARRAHIVRQRTRLKNQVQSILHRNLVPRCPAADLFGIKGRVWLGRQPLPPDEELAVGALLRQLDFHAQELRIIDAELGRIALESGEVKRLMTIPGVDATIALSIVAAVGEFRRFRSPERLVSYLGLNPRVKQSGGQPASHGRITKQGRAHARGMLVEAAWVAVKTPGPLRAFFERVRSRRGMQIAVVATARKLACLCWTMIERGEDYAFARPSLTEKKLRKLELRAGMPSHRGRKGKSAAYNLKEVRRRERELAEQAERSYRQLVADWQANAPAKKSGVAAANGTRLQRPSEGQAARQASVPEPALRSGVDHAHAQA

SEQ ID NO: 217816 - protein, 426 aa, unidentified
MSNSETSTEEYAALIGMDWAAEKHDVWLVDTATGESRHRVVAHTPEALAEWLGELQSQYPGQRVAVCLEQSRGALMYALMGQAFLVLYPINPVTLARYREAFAPSRAKDDPSDARLLAEILRLHRDKLSVWKPDDEQTRTLTLLNEERRKLVDWRTKLILRLQAALKLYFPQALEWVGSSLGTPLACDWLLKWPTLEAIQKAKPQTLRAFYYAHNCRQTDQVEGHLKAIAIAKPLTQDAAVITAYRLTVQTLAKQLRTLQASIAEYDRQIAHLFRQHPDAFIFDSLPGAGPTLAPRLLSAFGTERDRHPEAKDMQTYAGIAPVIERSGKQCWTHWRWNCPKFLRQSFHEFAKNSIPYSAWAKAYYEIQRKRGKGHNAAVRSLAFKWIRILHRCWKDRKPYDEALYLQTLKQRGSELVNFLQLPQEA

SEQ ID NO: 217817 - protein, 411 aa, unidentified
MSLEVMYERCAGIDVHQRFLVVCLMLVEGGKRRQEIRTFRHETADLLALRAWLLQERCTHIGMESTGVYWMPVYRRLEGFFELIVANAQHIKAVPGRKTDVQDAEWIASLLQHGLFNPSFVPDQEQQDLRDLTRLRVSLVRERTRLVNRVHKVLEEAGMKLATVLSDIMGLSGRAILQALCEGESDPERLAKRVHPSVHASQEQIVAALTGEMREHYRFLLRELLTLIAVQDRSIEHLEKEIERHLHPFEEQITRCEKINGVSRHVLDVLMAEVGTNLERFPDAEHLSSWAGVCPGQKESAGKRLSGKCKKGNRYVREVLVQAAHGVRRSRTYLGERYRRLKKRRGSKRAALAIGHDILVIYYQMMKTGQDYQEKGEAFFQQRDRRKVERQLVRRLEHMGYQLTRPSQPVA

SEQ ID NO: 217818 - protein, 345 aa, unidentified
MTNIVKQVAGIDVAQKELVVSLGRMNQLIEPDIYAFKTFANKPSGFAALEVWVKKHTEQQVAVRFVMEATGVYHEKLAYYLSDQGHKVSIVLPNKISNYAKTLEIKTVTDKTASLAICQFGLEKKVDLWQQPKKIFRDLKQLTRERDQVVAERTVAKNQLHAENAEAFPNERSIARLNQRIRLFNSQEKEIKADIAEIVQQDKELVEKIDKVSTIPGVGKLTTVIVIAETNGFNLIKSKKQIESYAGFDVKEKQSGTSVKGKPKISKRGNRHLRKAMYMPALSAISHDERFKAIFVRLVSKHGIKMKAAVAVQRKLLGLMYILWESNTKYDENYLQKVNENNKAA

SEQ ID NO: 217819 - protein, 445 aa, unidentified
MLPIIYKQVAGLDVHKKTVVATRMRVTTEDRGVSETRTFGTTTPDLLELHDWLCEWPCSHVALESTGDYWKPVYNVLEGTFKIVVVNANHVKHVPGRKTDVKDSEWLAELMMHGLLKASFVPARPQRALRMLTRYRTTLVQERARVVNRVHKLLEEANIKLGSVATNIQGVSARAMLAEIAAGQTDATQLADLARGRMRSKIPELEKALTGLVQPHHCFLLSRQLTHIEFLDEQIEELSAEIARQVEAMSSRSAPTGEEGNAETGTEPPITEETKRPLTWNEAVALLDTIPGVDQRTAEVILAEIGLDMSQFPTAKHLATWAGLAPGNHQSGGKRYSGRTPKGNRPLCSIMVQGGWAAVRTQDSFLNARYHRLAARRGKKRAIVAIAHSMLVSAWYMLTYRQPYHELGGGYFDQRQKETKVNYLVRRLEKLTGGSVVLEFQPTPA

SEQ ID NO: 217820 - protein, 341 aa, unidentified
MQITTIGLDIAKNVFQVHGIDAAEKVVVRKQLRRAQVMKFFAALPPCLVGMEACATAHYWARELTRLGHQVRLMPAKDVKAYVKRNKNDAADAEAICEAVRRPTMRFVGVKSAEQQGRLMQHRTRDLLMRQRTQTINALRAHMAELGIVAAQGREGLKQLLEIIADKADERLPIDARASLIVLAAQLQALQTMIGTIERRIIAQHRANEASKRVATIPGIGFLGASAITATVTDPNAFRSGRDFAAWIGLVPRQDSTGGKQKLGPISKQGDRYLRRILVVGAHSVLWLAKKNPEKYPWLTQLLARRPFKVVAIALANKMARVAWVLLARGGTYRTPQLAAA

SEQ ID NO: 217821 - protein, 413 aa, unidentified
MDVLHPKCCGLDVHKNSISACILVQVAGRVQKHQRRFGAMTQDLQELANWLRQFEVAQVAMESSGVYWKPVWNILEGQFTVVLANAQHIKNVPGRKTDQKDAEWIAQLLQHGLLRPSYVPCEVIRDLRDLTRMRASLSQEASRISSRVQKVLEDANVKLASVATNTLGKSGRAMLEEIIAGQNDPEYLASLALGHLRAKTPQLRLALEGKIRPHHRFLLRRLLDQLCFVEHEIVLLDERLEDIGRERPELSQAVARWDTIPGIDRVAGWTLLAEVGHTMAQFPTAEQLASWACLCPGNHESAGKRLGGTTRKGSPWLRRMACQCAWAAARTKNTYLSAQFRRVAARRGSKRAIIAVAHSLIIIGYYLQKSQRNYEDLGGDYFDRIDSDGLKRYFIRRLEKLGHKVTLVPIKAA

SEQ ID NO: 217822 - protein, 427 aa, unidentified
MVGDQHSGGTSFVAIDIGKAFHAVLVEFPDGAHQRFRMANSAEDYGRLVAFLRTLPGTVRVALEPTGNFHRTLAFHLISAGISVVSVSSVAGARYREAMFNSRDKNDPKDATVILQLLKHGLVQHYHEPLLAGHHNLQELAKTYRQVTLARKRLADSLLNHYLPLYFPEIARYWESTRVEWFVAFLSRFPTPRAVQALSLPEFIQAAWPLIGRKVNKRAKLEELYELAQSSIALPVAVNSPAIDTFRLQLAHFARLAELRRELEAQAHRLLKDRPDYQCLCSLPGVASVLAMVILAEGGDLRRFRHHRQFLKYCGLDLAKCQSGQFRGREMLSKRGNALLRMAFWMAAQRAVRMSENSFRDKYERYMKQDPGNADVRRKALTAVAAKMARVAYALVKRLEPYRGYHEQALPSGSIPLNRAVGALATP

SEQ ID NO: 217823 - protein, 366 aa, unidentified
MPRPAKKAPAQKTHSENPMNNVHYIGFDVHKKSISYCVKTAAGEIVEEGTIPAQRNVLRAWAAARRQPWRGALEATLFSGWIYDTLKAYSGGLEMAHPAKMKAISSGKKKSDTIDARTIADLLRCNLLPACYVAPARIRELRRLLRYRSLVVSEAVRMKNKMAGLLMETGAEYVKEKLHGKKYFATLLEELEEVPESVIDLLRLSRGALEMFESTQRRLIQELLADAELRERVERLRSIPAVGEITALTWALEIGDPERFGSAGEAMSYCGLTAALKSSAGKQQRGPISKQRNHWLQTTLIEAAKLAPRWNPQLAALHARESERGHRNRATLAVARKLVSYLLAVDKSGLPFQVRSPSREPTQKAA

SEQ ID NO: 217824 - protein, 394 aa, unidentified
MRFVGIDVAAEQHVVAVVDETGAVGLKPTPFTEDAAGYEALFDRLGDPAETLVAMEATGHYWKNLFAALVVRGFAVALLNPLRTHRFAGEDLQRTRTDAIDALGIARFAAQKRPPATRLPDRATEELRELVRFRDRLVQDLGDRVRQLHRLVDLGFPEFTRYVRDLASELATAILRDYPTAAAFVGVSPRRLAGLRYDGRHKVGDELAHALLAAAARSVGRHHGEAYRIQVRYTCEDLDVLRRRLRELEGDIERLLRDHEVGSLLTTIDGIGPQTAARLVATFGDFSRFRSGAAVAAYVGVIPALRQSGKRTPVRAPLTPIGDAQLRAKLWMPVLTAVQRHAWLRAYYQGLIARGKLPKVALVAAMRKLLHAVYSVAPHRRPFVPCPVGEGARP

SEQ ID NO: 217825 - protein, 391 aa, unidentified
MRRRLWDTIKSMHSYVHKRRPTLKKKINTTQRSELARAPRRQRSPIVGVDVSDKNSHYCVLGPEGEIAAEGTLRTTPAGFSAQFPRAIRCRIVLEVGTHSPWINRLLHSLGHEVIVANAGRVRMIYDNDNKNDRVDARTLARLARVDAGLLHPIRHRSAEAQADLAVLHARDSLVSLRTKLVNTVRSMVKSFGSRLLSSSPEYFPRKVRTHIPASLQPALFPLLDQMEMLTSQIHAYDKQVEQLTRTRYPKTQVIQQIRGVGALTSLAFVLTIDDPHRFQKSRDVGSYLGLRPRRDDSGQSRPQLSITKAGNQFLRRLLVNCAQYTLGHFGMDSDLRRWGQALMARGGKNAKKRAVVAVARKLAVLMHSLWVNGEVYEPLRRPVHAQEAAA

SEQ ID NO: 217826 - protein, 366 aa, unidentified
MKDSITVVGLDVHKNSIQIVTADTDGAMEVRHFGRIGGTMDALDRAVRKLVSRGSTLRFVYEAGPCGYEIYRHLTGKGFSCKVVAPSKTPKKSGDRIKNDRRDAETLARLERAGELTSIYVPREEDEAMRDLTRAREDAVKALKTARHQLNAFLLRYGQRYPGKASWTSHMRWLSDIALPHPSQQIVLQESITTVTVCTERTARLTDQIMKLLPEWRMFPVVKALQALRGVAPIVAATTIAEIGDMSRFENPRQLMAYLGLVPSEDSSGESTHRGSITKTGNGHVRRALVEAAHAYGFPARVSRHLLKRQEGLPQPVLAIAWKAQVRLCGKFRRLMARGKLKTKIVTAIARELSGFMWAIAREVEV

SEQ ID NO: 217827 - protein, 338 aa, unidentified
MYYTGIDLHKKTSYLTTIDENGKIIAKGNMHNVEEAILDYFAKLERETKIVIESMGSWYWLYDLLTGNGFDVVISNPSKTKAIASAKIKNDKVDSHMLAQLLRADLIPTVYVSSLETRKLKELLRHRARLIRDTTRMKNRIHMLLMKNNCHIRVSDLFGVQGLRYLKKISLPEHHQEQLETYLSFYEELMAKVLELTKRVYSIAKGHPMAKLLMTIPGIGPIIAMSIVAEVEDISRFRSYRNLASYAGLVPSLDASAGKQRTGRITKQGSPYLRTAMIEAAQVVARLKKCRLNVFFRKRIVRSGYQKAIVATAHKMLQIVFYVLKQQTPYIEEYPACA

SEQ ID NO: 217828 - protein, 435 aa, unidentified
MHRDFAQVAIWQDGLVRQAGQIAMNAEALAVFADSLAPTDEVALEATGNTNAIVRALRGRVARVVVGNPQKTRAIAEAKVKTDKVDAEILAQLLAADYLPAVWVADEATQVRRRQVARRAHIVRQRTRLKNQVQAVLHRNLIPRCPAADLFGIKGRAWLAEQPLPADERQAVSALLRQLDFHGQELKLIDQELARIALRCQDTKRLMTIPGVDVTVAMSITAAVGDFSRFPSPNKLVSYLGLNPRIKQSGGQPASHGRITKQGRAHARGMLVEAAWVAVKTPGPLRAFYARVRARRGMQIAVVATARKLTVLCWHMITRGEDYAFARPSLTAKKLRALELQAGMSPRRGQKGRAAGYSLKQVRAREKQMAEQAERAYRQLVADWRAKAPATKSVGVAAANGARLSRPSNGATAARQASAPEPALRSGVDHAHTRG

SEQ ID NO: 217829 - protein, 355 aa, unidentified
MNSRKYIGMDVHKESISIAVMNGAGKIVMECVIETKASMILQLIDGLRGELQVTFEEGTWAAWLYDLLKPHVAKLVVCDPRKNASMREGNQSDKIDARRLAELLRLNHLSSVYHGEHGLRSLKELVRSYLTITKDLGRVMSRVKAIYRSWAIPCTGKQVYAPRHRAEWLGKINEPGVRRRAEFYYQQLDALRILRQQVRKDLLAESKKHKAWKRLRQIPSIGPIRAAILLGILQTPHRFRTKRQLWAYSGLGIETHSSADHRSVGGHLERVKKQISIRGLNRNCNHDLKNLFKGAAIVALSKPGPFQEFYTALLAKGIRPEMARLTLARKIATIVLMVWKTGVCFDAQHLKPQTA

SEQ ID NO: 217830 - protein, 321 aa, unidentified
METATAYVGIDVAKGRLDIAVYSSDQQWTFANSDAGIGQAVSCLQELNPALIVLEATGGIEVPLVAALAVARLPVVVANPRQVRDFARATGRLAKTDTLDARVLAHFAAVVRPAPRPLLDAHTQEMAAILTRRRQLVEMLTAEGNRLSAARSKAVRRRISAHITWLEKELANVDDDLDSSIRESPVWREKDNLLQSVPGVGPVLSTTLLAHLPELGSLNRRQIAALVGVAPFNRDSGNFRGKRAVWGGRSAIRAALYMATLVATRYNPIIRAFYHRLCAAGKPKKVSLTACMRKLLTILNAMLKHRTPWHYAGIQTFGPCS

SEQ ID NO: 217831 - protein, 400 aa, unidentified
MNKRKAQVWAGVDAGKGHHWAAVVDETGATLWSKKIGNDETAILTALGEILDLADEVHWAVDISGTASALLLALLAAHGQQAVYVPGRTVNRMSGAYRGEAKTDARDAYVIAETARHRSDFAVIDVPAQLAADLALLTAHRTDLVADRVRMINRLRDVLTGVFPALERAFDYSSQKGALVLLTGYQTPLAIRRRGRARLTAWLANRSVRGADAVAATALEAAQAQQTSLPGEDVAAQIVADLATQILALDDRLKRIDKQIREMFRRHPQTEIIESLPGMGPILGAEFIVAAGDLSAYTDAGHLASAAGLVPVPRDSGRRTSNLHRPKRYSRRLRRVFYMSAQTSIIREGPNRDFYLKKRGEGYKHVQAVIALARRRASVLWALLRDNRVFTSELPVTQAA

SEQ ID NO: 217832 - protein, 325 aa, unidentified
MKRIFVAGDISKEKIDFCIYDGESFLASKVVKNSKSELSTFLKQVDTIFTDGKKENVYNECVFAFEYTGVYNNIVLKLLEKYNFKVALLYPGSIKAVVNFDRAKNDTIDAQKIAEFAYRFYDKLNFYSPLSNEMQELKALITERSALVKVKSQLISKKDDQNKFLPSNISMFLKKNNEKIEKELDEAINNIEVRILKVIKSDEKLKENFEIAISVPGIGPATAAVLIACTNNFNRFKNAKQLGCYSGVVPFQRSSGAYKGKNKVSPKANKQLKTLLHLGAVSVLNSKNIFGEFYNRKTGEGKNKMSVINSVRNKILKTVFCMCNK

SEQ ID NO: 217833 - protein, 404 aa, unidentified
MWYVGLDWADTHHDVDVLDEAGKRVGARRFAHSHAGLNELKQFVLSIAAQPEHLACIVETNHGLLISFLLEAGIPVYPVNPKTANQLRKAAGAKTDQIDAHLLAKIGRLELAELRRLEPDSATVQELKTLTRDQDALIQTQTRLVNQLTACLKEYYPAALHLFAKLQQRSTLVFLQAYPTPQAAQAASLDEITATLRAGKHTNPTRAAPKIFEELHRPQLVASEVIVRAKSRLMLSLVKQLVVVIQEIAGYDAAIRPLFLRHPDQEIWSSLPRAGKRLAPRLLAEWGEDRNRYADATSVQTLAGTAPVPFQSGNYAKAHKRFACVKPLRNVLHQFAWQSTRQEAWALAYYQRKRAEGKTHSMAVRALANVWVRIIYRMWVNKTSYQTATFEAAKRAHASRPHAA

SEQ ID NO: 217834 - protein, 417 aa, unidentified
MNSPPETNPIQRYIGIDIHKYYVMIGGQNRHQEWTLRPRQVQMARFRSWAEKNLKPEDEVVVEATSNVWDIYDIVVPLVRKTVVANAYKVRQIAEARVKTDKEDIRRLITLLIADIVPEVWVPPQHVRELRSLISFRWRLSKQITMSKNRLHSVVQRFNLNAPEGGLLTDKNKSWWDRQEFSDLTGFQVERDLEIVEHLEGQKEAIDQKLAELSNTEPWASEVVYLMQIPGFGLIFTMVILSAIGDISRFARPRELVGYAGLGAGVHASGEKYQEKSITKAGRKELRWALVEAAWVAVRSDPYWKAQFIRLKKRMHVNKAIVAIARRLLVSIWYILTKREPYRHFDEETIAYKMLIWSWAMDEKSRDGMTPQQFAKYGLLRLGVGQDLERIVRGGAPRRLAPTEEILALKPELAPPR

SEQ ID NO: 217835 - protein, 389 aa, unidentified
MKIYVGIDIAKLNHFAAAISSDGEIIIEPFKFTNDADGFQLLVSKLESFDKNSLIIGLESTAHYGDNLVRYLVTELYQVCVLNPIKTCQMRKNNVRKTKTDKVDTYVIAKTLMMQDNLRFVSFFDLDMMDLKALGRFRQKTIKQRTRLKIQLTTYVDQVFPEIQYFFKSGLHQHAVYALLKEAPSPKEIASMHMTHLANLLKVNSHGHFTKEQAKELRVLAQKSVGANDSAISIQITQTIQQIELLDSQLEKIEAEMTDIMKFNDSVIMTIPGIGYINGGMILGEIGDIHRFSNPNKLLAFAGLDPSVYQSGNFQAKTTRMSKRGSRVLRYALVNAAWNVVRNNTTFKAYYDAKRAEGRSHYNALGHCSGKLVRVIWKMLTDNVEFNLK

SEQ ID NO: 217836 - protein, 426 aa, unidentified
MNPSPTVTKIKYVGLDVHAETIAVAIADSSGAVRAYGTVPAHSHSVDRLVKKLAEDGTEVRYVYEAGPTGFWLCRHLRGKGIPCEVIAPSLIPQKASDRVKTDRRDALNLARLFRSGELTSVRVPDEADEAIRDLVRTRLATVEDLRRCRQRIKGYMLRYGRRYDGKSSWNPRHLNYLSLQKFDHPAQQIAFEELLNAIKDPADRIERLDAAIETQVKSWKREPLVRALMCFRGLALLNATTLVCELGDLTRFDSPGPLMSFVGLVPTEDSSGKRRRQGAVTKSGNSAARRALVEAAWQYRLPARVTTHIRQRQHDQPKAVTDIAWKAQQRLCGRYRSLIKGGKKSVVAVTAVARELVGFIWAVAIHIEGAQSHQATPTAPGRAPRGEDRPAARLCSKSSDAADPATKRIYVLKPFKPTQARKART

SEQ ID NO: 217837 - protein, 478 aa, unidentified
MSRKKTQQQKVRGGQGPVPAKRKRNKRPDPWGQSDRPVFEPNAAGIDIGAREIFVAVPADRDEHPVRKCETFTGDLHQMAEWLVSCGITTAAMESTGVYWIPVYDVLEQHGIQPCLVNPRNMKNVPGKRTDFHECQWIQHLHSLGLLHAAFRPDAEVCAVRSLMRHRNDLVMMASEHIQHMQKALTQMNVQFQHVISDLTGLTGLAVLDAILAGERNPEVLAKLRDPRIQASEETIRKSLEGNWRAEHILALKQRLSLYRSHRDLIDECDREIEKLVAAFEPRVDPDEKPLPEDRKQKQRKRKKKSGSADFNLRAEAYKLFGVDLTQIPGLMTLVFLLFSEVGRDMSRWPTAAHFVSWLGLCPDNDISGGKVLWRGTRRTKNRAGTLFRLAAHSLHPNQTPMGDYLRRMKAKLGPAAATTATAHKIAIIFYTMVSKQVEYDASLWANRDQMREKRLEARLQKQAAQRGYKLVPLESAA

SEQ ID NO: 217838 - protein, 425 aa, unidentified
MKATHETSTTQTEKLWDVAFDVSKQTLDWGAETPDGRVCRGQLANTVAAITATLDELALQARTLGCTRVRVICEPTGGYEKRLLAVARHRGCATALVSGEAVHQLRVVESNDTGKSDRKDPRTMLLLARWRKLLTDRVLTDEWLLLREYNARYDRLERDSARCKNRIHKLLVRLFGELSFTNAWLFESAAARAVVELYGFNAVAILAAGEKSFRTRLRRRGVYRSTIRRLWTDAGASVVPGADAAWLELLADDLRELFAELARLQTRLQTTRESMIGLTDRLRARGQLHLEAHPRLISPFMLARILAETGPLRDFACIQKLWRYGGLNLRPYQSGQMQGQDKQSKRGRARLRHVLTQAVLKRVVRGELYGDYYHGKLAAGKTGGIAMTAVARKFLKLLWGLERSGRAFDEARVFASAPAPVAAAA

SEQ ID NO: 217839 - protein, 287 aa, unidentified
MTFFLGCDVSKAKLDMSLVDERGVEQWHDQLPNEPVGIAAFLLTVTGAYPDDKIVGVAEATGILHLPFADTCYDLGVTCFVYNPIKTNQQIRASIRGKKTDRTDATMIARVGLMGENRPYVPDQYKAVKYYARGQQKLGETASSLKRYETHLTTVLENELTTAATEMLTGIQTALKEARQRFVADTLALAPAELTAQLRSIPGIGPYVAACLIGEIQDMQRFDSAKALIAYAGLDPKIRQSGHSLNHTGRLSKRGSPHLRRALFIAANVAGNTIRTSGAPTKRNEMK

SEQ ID NO: 217840 - protein, 361 aa, unidentified
MNTVIRVGIDLAKYLIQVHAVDAAGKVVTKRALKREKFLLWCADLPAGCLIAMEACSGAHHWSRKLIERGFDARIIPGSSVAPYRIQGRSGKNDANDAAAVCEAASRPHMNFVPAKTLAQQGMLCVHRLREGLKEERTSCINRIRGLLAEFGVVLPQSPEVLRRHLSDILEDASNDIAGVARLVLERAQEHWRELDAHIKWWDQRIADHQKIDDQVQRAADLMGVGVITASGIVATVGDFRQFRNGSQFAAWLGLTPKQHSSGGKTSLGSITKRGSVYLRTLLIQGAKAIALTRQYDNPIFLWVQQLRERIGWQKAVVALANKNARILWAVMTREKRYDAHHISTIPLPAPTTGSTLVTVM

SEQ ID NO: 217841 - protein, 357 aa, unidentified
MRRYRLAVDKRKPQRTSQIFIGIDVHKIQWHITIRTEDVELFSGSIPGTWEALKKLLDRYADCQKQAVYEAGYFGFRLYDHLMDYGVDCVVTPPSLVPQEYGNHVKTDRRDSRKLAHLLAKGLLKRVWVPSPEQRYERQVIRRRKQLVADRVRTQNRIKAELCFYSIELPAPTGQWSKAYVGSLQHLRFDNRWMQESFARLLEEYEFLTQQIERQTKLLRELAETDQYEERVKILRSTPGIGLISSMEYLLELQDLKRFQRGNRLAAYVGLTPSQYSSGEKLRMGRITAIGKNDLRGTLVEVAWRLIAKDPAMREKYERIKARAGSKRAIIAIARITLLRTRRMLLDRQPYVVGLAA

SEQ ID NO: 217842 - protein, 404 aa, unidentified
MKFCGIDWANDHHDALSIDEQGHQLGSIRVAHSPDGLSQLDSYLDRIAGPEGKEQLACIIETTHGLLIAHLLEQGWAVYPVNPRTVERRRAPSGAKTDIIDAYLLAKTGRADFVDLRRLNPDSEQIQELKTLTRDQDGLVQMQTRLVNQLTACLKAYYPLALELFGKLQQPSTLKFLRAYPTLQAARLASVEDLAALLKQARYPGAKQAAQQMATQLQQPCLQANAVTTRTKSRLMLALIDQLEPLLKQIADYDKEIERLFLMHEDHELFQSLPGAGERLAPRMLAELGDDRDRYASAGSLQALAGTSPVLFQSGTYQKAHRRLGCIKPWRNTLQQFAWQSTHQETWAKEYYQRKRTEGKSHTVAVRALANVWARILYAVWKTKEPYQTTTFEQARQAHALRVA

SEQ ID NO: 217843 - protein, 411 aa, unidentified
MDAVRMTCAGLDVHQQTVVACILTGAIESKPKALIQTFGTTTKELLTLQDWLAEHECCEVAMESTGVLWKPVWNILESTCQLVLANPQHIKNLPGRKTDVRDAQWIAQLHRCGLIEPSMVAPREIRELRDKTRYRRKLVQQTTSEKNRVHKILQDANIKLTTYMSDLFGISGRALLEKLIDGEALEEEIVRELVKTTLKSKVSQLMDALNGKILKHHREMIKYHMEHLKFLEEQTGRLEENIQALVMSYQEEVKLLDSIPGIDEIAATTLIAEISPDAVDRFSCDAKLASWVGVCPGNNESAGIRKKARSRKGNKHAKGILCQAAWANLKSKNHIGDYFRRIRKRRGEQKAAVATAHLILRIAYAILRDRVDYVNVEKEFFRVPTEQTANRLTKQLEQLGYQVELKPTGTL

SEQ ID NO: 217844 - protein, 406 aa, unidentified
MNYLGIDVSKSTSRYVFLDSDGEKLAKSFTLQNHQQDFTKLLERLKELNLSADNLLIGIEATGIWWENLYCFLTENKFKVIVLNPHQTNKFREALRIKAKTDDLDAYVIAGLLRSQEYASSFIPEESIQILREITKLRFQLLKDRQDYERQASALLGLLFPEYPQTALKNPFTVSSMAILKMFPTAKHLAEAKPKNIEKIVRSIQGNNFNIDEIQSLIDTARKSIYSGRAKHDRGLNLNILLTQIETLQHAIAQLDQRMNDILSPSDSDDANSFPGANLLTIPGVGPKTLAAILSAVGSNGQAFAEGKHLIGYVGFFPRIYESGETRRDNKISTRGPKYLRWALYMAAVACLKHNREFKALYNRKISQGKSAKQALIYVAKKLAHLCLSMLKSGESYNPARVFMPV

SEQ ID NO: 217845 - protein, 341 aa, unidentified
MKQFIRIGVDLAKNYFQVHALANEGGPAVTRKLKRSKLHEFFAQIEPCLIGMEACGSAHYWARELETMGHEVLLMPPAYTKPYVKRGKNDAVDAEAICEAASRPGMRFVPIKSAEQQATLMLHKTRELLVKQQTMSVNALRSHLSEFGIVVAKGIGRVDELLELAESDTTLPEVARAAVKILAQHLEGLDKSIDDLEKQIGRAHAQSEMSRLLDQVPGVGKIIASVISASVPDPSVFKSGRDFAAWLGLTPRQNSSGGKQTLGGITKQGNRYIRKSLVLGATSLLHVLGKRKGALRDWIVALLAKKPARLVTVALANKLARIVWAMMKTGECFRAEMFAKA

SEQ ID NO: 217846 - protein, 428 aa, unidentified
MKYNTQNAKIASITEKTLIIGIDIGSETHFARAFDWRNYEYTKKAFEFSNSEEGFQSFKAWMEELMTKHGKTAVIPGMEPTGHYWFALGKFLQDNGMRPVHVNPHHVKKSKELDDNNPNKNARKDPKTIAGLVNEGRFSYPYIPIGVYAEIRNLSNLRFQAQEELTRAKNRLVRWFSIYFPEYKDVYRDVKAVSGRMVLQVAPLPEDIRKLGVEGVNRIWRDAKLRGAGMKRAKTLVTAAEHSVGSKESPEAARIELKMLLHDMDVYASRVEELLCLLDAKLNEIPYIDKLLEIKGIGKITVSGFIAEVGDIRRFDDPKQLQKLAGYAIVANESGKYKGESRISYRGRKRLRYVLFEAALSLVARNPEFRKIYEYYRTRENNPLKKMQSLVAVACKVIRVFYVMLTKGVDYDPEKMMRDIRRPELQAA

SEQ ID NO: 217847 - protein, 346 aa, unidentified
MSIDACSGVVVGVDTHRDSHAAAVCDARGRVLSQWQVPATPAGYAELLAWAAGAAGGQQLTWAVEGTRHYGLGLVRHLAGAGQAVAEIDGARHLGKRRAGKSDPIDAIRAARELLARPVPAQVRADGDREALRLLMCDRDNAVQSAKTARTVLTSLIVTAPAQLREELRHLPARRRVQACAALACPEGADRPARVAYQTLIRLGQRIAGLAAVAAELEEQITEIVEDLAPGLVAAEPGLGVLSAAQILLSWSHAGRIRSEAAFAMLSGTAPVPVSSGRTDRYRLNRLGDRQLNRALHVIAVNRMRHHPPTLAYVQRRRAEGKTDKEIRRCIKRYLARHLYRVLNSA

SEQ ID NO: 217848 - protein, 360 aa, unidentified
MKLDAALDTSATTTAICVVNSRDGAIVLETTVPTDPKAIFRALEPFLPRLHLVGHEATGWSAWLQRELEARGVPMVLLETHHTARMLEAQRNKTDKNDARGLAQIVRSGWFKPVHAKSDASNRMKLLLAHRRTLKRKLMDIENEIRQSLKMFGLMVGRRVQRASFETRVTALVADDPLLGSTTACMLRCWATLWTEYKRLHTLLVQVVGRDELCRRFCGIPGVGPVAALTFKAAIDDPARFAKSKIVGAHFGLTPKREQSGTSVDHDGHISRRGDGEVRTALYEAANAMMTRSQKHCAVKAWGLRLAAKRGHKRALVAVARKLAVIMHRMWLDGSEFRFSASDQPAGKERNPAPAAPACA

SEQ ID NO: 217849 - protein, 311 aa, unidentified
MDLIYIGVDVAKAWLDIYHPARGAKRIDNTPPSVRAFARAAAREGVWVIFEASGGYDRVLRDGLEAARVSFSRVNPRQARDFVRAMGVIGKTDRVDARMLATFGQRLQPPQTPPGSPTRQALLAQITRRRQLVEMRKQEVTRLQQTTDHDARSDIKGLILLLERRIEKVEARIAEIIQSSPELAEANRQLQSVPGVGTIVAATLMAELPEIGTTDRRKIAALAGLAPIARDSGQRNGKRVIGGGRPTVRTVLYLAALHASRHTAMFRAFRQKLQDAGKPVKAALTATARKLLSMLNSMIAAGTCFTEVQPA

SEQ ID NO: 217850 - protein, 339 aa, unidentified
MELYAGLDLHSRNTYIGIMDKEFKRIFGKRVSNDLPLIIKTLEPFQDQLKGIVVESTFNWYWLIDGLMDVGYHCIHLANPSAMKQYEGIKHTDDQHDAFFLAQMLILGILPQGYIYPKKDRPVRDLARKRLFLVRHKTSHILSLQSLISRCCGQRVSANEIRKFTVDDLQLLLAEQHIVLSAQANLETIVFLKQQIQRLEKAIQKKVKLNKAFRQLLTVPGIGFILAMTIMLEVGDIGRFPEVGNFASYCRCVSSKRLSDGKSKGHGNRKNGNRYLSWAFTEAAHLSRRYNVLFRSYYNRKLAQANTSLATKALSNKLARICYYIMRDQVPFRGNLLSQ

SEQ ID NO: 217851 - protein, 465 aa, unidentified
MTKRHQSQVRRNSGSKVSCSLTLLNPDAAGIDVGASEHYVAVPPERDEQAVRRFGAFTEDLHKLAQWLLQCGVRTVAMESTGVYWIPLYQILEDYGFVVKLVNARHVKHVPGRKSDVQDCQWLQQLESFGLLAGSFRPEAKICVLRSYMRQRQMLIGNASRHIQQMQKALTQMNLKLHQVLSDLSGQTGMRIVRAILRGERDRLKLAALKDPRVKSSVGTIAKSLEGDYRAEHLFALRQAVELYDYYQQKIAECDQAILKELQSLETRAAPGSVPPTPRKGKRRSRHNPIPFDSRAELYRIMGVDLTSIDGLNEATVQLILSELGLDLCQKWPSEAQFCSWLGLCPNNEISGGKVLRRGTRKVINRVANALRMCAESLLNSKSALGAYARRMRAKRDSKIAISATAHKLARLIYRTLKYGQEYSDIGQAQYEAKYRTNAIKSLQKRARQLGVQLVDLHPTSVVVP

SEQ ID NO: 217852 - protein, 374 aa, unidentified
MSIVMGVDQHRAQITAEWIDLDSGEIGRARVSPADRAGVRRFLGRFDGQQLEVALEATTGWRFFVEELHAVGAVVHLAEPAETAARRGNKQRAKTDRADARHHRELLMAGRLPESWIPPDHILDLRARVRLRHTLIEQHSEWQQRIQAVLYHHGCPQRRKLMQGDGRDWLSAQPLPETAREQITVALAMIDALERQIAPLDAQLRPYARRQTGCRALIDAYYGVGELVAVTILAELGDCRRFSNSRDAVRYGGMDITVYQSDRHRAPGHLSRQGPPALRWALYEAAQHARFPNSPDREYYLQTAERLGGNRACLALARKLLKRCYHTLRELGEDALAPPTDERPSSAAARRASSAGTPKTDRPVTREPTDALAA

SEQ ID NO: 217853 - protein, 455 aa, unidentified
MVRAEVREIDADGEAELVERVAAVDVAKASGMVCTRVPHASVAGRRVTRAWEVRTTTNAILALAEELAREGIERVVVESTSDYWRPFVYLLEARGLSVWLVNAREVKQVPGRAKTDTLDSVWLAKLNERGMLRPSFVPPAEIRRLRDYTRLRADLVEDRSRQIQRLEKLLEDALIKLSTVATDILGVSGRAMIDALIAGERDPQLLAELARGRMRVKRAALVEALTGRFDDHHAELASMLLDQIDALSAKTAALTLRIDELIAEIPAARAPVVRPGAGPGGHLDDPAAAPLSVVARLDEIAGVGVRAAQVIVAEVGLDMAQFPTAGHLVSWTKLSPRTIQSGPRSRSGKTGKGNPYLKGVLGEAAAAAAKTDTFLGERYRRLVRRRGKLKALVAVARSILVIVWHLLADPAARYHDLGSDFYANRINKNRKTRQLVRQLEALGHHVTLEPLDMAA

SEQ ID NO: 217854 - protein, 340 aa, unidentified
MRLYTGIDLHSSNSYLAIIDENGKRVFKRKIPNDPEQILSALAPYKDAINGIVIESTYNWYCLADGLMTEGYKVHLANPTEIKQYKGLKYSDDQHDAFWLAEMLRLGILPEGYIYPKEDRPIRDLLRKRSHLVKLRTSLIISLQNIICRNNGFRLKTNDVKALNTDRVAPFLEQNEDLALAGKISKESIDFLTRQIKAVENVVEERMELREPYKKLLTMQGVGKTLGLTIMLETGPISRFAQVGNYCSYCRKVSTKWISNDKKKGKGNKKSGNKYLAWAFSEAAEIARRYYPEARAFYQRKMQKTNAMIAHQALSHKLARAAYYIMRDGVSFMPEKIFRS

SEQ ID NO: 217855 - protein, 353 aa, unidentified
MERIYIGVDFHARQQTICYLKIETGELVFCELGHENKEQVRAFYAAFPSQVIVGLEASGYSPWFERMLEELGCEVWLGHATEIRRRARWRQKNDRRDAELILDLMLHEEFPRLHRPAVQSREVMRMLRYRQKLIKMRTMSKNSLQALALQSGLARRSRLFTREGKHELSIALMSPAMQWQRDHWWQLLQSLNEQLQETMGWLKTHAQGDVKVARLRTHPGIGLLTALCLLHTLQPVDRFRNTRKVAAYGGFDPLERSSAERKCFLGISKAGSRILRHLVVEAANVAVRSDEDLKRFYKRLAERRGRPKAKVAVARKLLIRAYIMLRDEIDYAEFRHRAVAARLAREITKASSA

SEQ ID NO: 217856 - protein, 397 aa, unidentified
MGRAAEVGCPVVQINDLSRSLAAFDPISTLVVVVEMSKASWLVSGVVPGVERQPLKKLEPDATALLRLIERWRNEAVRAGRPIRRIALAYEAGRDGFWLARWLIARGIEAHVIHSASVAVSRERKRAKTDRLDAAMLMRVFLGWLRGERGHCGMVAIPTMEEEDARRPNRERESLVNERSRIVNRMKSALARLGIRGFKPHLRKAPERLAGLRTAEGTGLPANIIEEFRRDMARLALVREQISSIEKTRAERLERAPDTGPHAMVRLLARVIGIGIETADMLVREILSRNLRDRRALARYAGLTGSPDESGLKSREKGLAKAGNARVRRGLIQLAWRFLMFQKDSALAQWYRTRTEGPSGARKTTMIVALARKLLIALWRLVTTGEVPDGVELRPAA

SEQ ID NO: 217857 - protein, 379 aa, unidentified
MRHVCGLDVHKDSVFVCILNEKGVVFQEKFGVLTPELERMVGVIMEHGVTEVGMESTSVYWMTVWRVIDPYVEQKLVNPYFIRQLPGKKSDVKDAEWIATCILKGLVRGSYVPEERIQRLRQYDRRIFDLNDDIVHKLTRLDAALQRCNIRLSNYVSTTDCKSYGDVVDAIARGETSPDALLRCVHGRIVNRHGADVIRSALTGVVTPVDVDVIRQLREEIELARRHRDECQRRMDGLCSEWFPEQYANLQTIPGVKARSATAIIAELGTDMSSFEDAAHLVSWAGLRPRNDESAARIKARGITHGNKYLRKTLIECAWGASRTRGCFYSHFSHHQTVVRRKSRMKVQVATARKMLSAIWFILHDGVAYRDFEGDANAA

SEQ ID NO: 217858 - protein, 347 aa, unidentified
MNTGTITAVGIDVSKHKSTVAARRPGGEVVLLPFDVEHTAEGLKKLITKLRELDGEIRIVMEHTGMYWRPIAMTLKEAGFYVSVVNAILIHNFSDNSIRKVKTDRADAMKIANYGLTFWIDLQEYAGEDENRQLLKIQSRLYERTATTAGMLRNGLISLLDQTFPGANKLFRDESRNSRGHVKWIDFVLRFWHKECVAALSLATFTDTFQKWCKRTGYKFSASDAERIHAIARNAVATLPKNDSTKHKGALVAYAGVDASPYQSGSFDSKSRHVSKRGSPHLRRVLFVIMSMTLIRANTANPVFCFMDKKRAEGKHFYVYTVAGSAKFLRIYYAKVKEYLNALEETA

SEQ ID NO: 217859 - protein, 313 aa, unidentified
MAKFSNHPSGHKALIAHLLRGGRRVRVCLEASGNYTLDLALTLQAHRQVEITVINPRRARRFAESLGQRSKTDPVDARVLCEYAARMPWVAWQPPSSVALHLRAVARAIADLGVIHTQQNNRAHASAASPALPVLVVKEMQRHQKYLEQRITRLRREALRIIAGDSELDRRFRLMLTTTGIAETSALQILGELAVLPDMLDARQWVAFSGLDPRLFKSGKSVEKRPRISRGGSRHLRRALYMPALVALRRDPYLRCFYQNLLARGQARLQAVVAVMRKLLHALFAMFRTNQPYDGSKLCCAVEMAGHATAARA

SEQ ID NO: 217860 - protein, 352 aa, unidentified
MEHFIGCDVHTRYQVVAWIEAETGEIRKQRLEHGGEEVRKFYAAFPPGTVVGIEATFPVLWFERVLAELGHELWVGDAARIRASEVRRQKTDPRDAGHLLDLLRTGRFPRIWVPSVEERDLRQLLVHRMKLVRARTQVKNQLQALAISQGVCRKRKLWSAQGRKELESLALLPWAARRRQELLAWLDRLDAQVGELDRAVEEAGREREEVALLRTHPGVGGVVALAFVLTVGPVERFPNSRKLVSYLGLNPREHSSGGRQRLGAISKQGNTLMRWLLVEAAQTAARFDPELRRTYQRLKMRRSSGVAKVAVARRLAVRLFWMLRTRHHYAQPVRMSGSPSRGVVPPRAGSSV

SEQ ID NO: 217861 - protein, 417 aa, unidentified
MTEEFTWFVGVDWASQSHQVCLVDAHGEGLVERAVAHGGAGIAELCDWLLARTAARAEAIAVAIEVPHGPVVEALLERGFRVHAINPKQLDRFRDRFTVAGAKDDRRDARVLANSLRTDRHAFRVLSADDPVIVELREWSRMVDDLQQERSRLANRVREQLWRYYPQMLEIAEDCAADWFLDLWRQAPTPAKAARLRQTTLERFVKTHRIRRWQAPELARVLKQKPLLVASGVAEAAAAHIHAVAARIRLVNQQLKTAYRKLDQLCDRLVLPEENAPGQHCEQHDVAILRSMPGLGRIILAVLLAEAWQPLGRRDYHALRCLSGVAPITRRSGKTCLVVRRYACNKRLENALYHWARVAVQHDEPSRRRYAALRGRGHSHGRALRTVADRLLAVTCTLLQHHTLFDPAHQAREAVAA

SEQ ID NO: 217862 - protein, 413 aa, unidentified
MDVLHPRCCGLDVHKSSISACILLREAGRVQKHQRRFGAMTQELQELAEWLRQFGVSQVAMESSGVYWKPVWNILEGQFTVVLANAQHIKNVPGRKTDQKDAEWIAQLLQYGLLRPSYVPCEIIRDLRDLTRMRASLSQEASRISNRIQKVLEDANVKLASVATNVLGKSGRAMLEDIISGEDDPEHLASLALGHLRVKIPQLRLALEGKVRSHHRFLLRRLVDQIQFVEHEIALLDERLEEIAQQRPELSQAVARWDTIPGIDRVAAWALLAEIGDNMAQFPTAEHLASWAALCPGNHESAGKRLRGTTRQGSPWLCRMACQCAWAAARTKNTYLSSQFRRLAARRGKKRAIIAVAHTIIVIGYHLQKNQSNYEDLGGNYFDRIHSDGLKRYLVKRLQQLGHKVTLEPMEAA

SEQ ID NO: 217863 - protein, 412 aa, unidentified
MEILYAICCGLDVHKDTLTACLRRREADGPVTKALRTFGTTTAELLRLLDWLGAAACTHVAMESTGVYWKPVFNILEGHVAELLVVNAQHIKALPGRKKDTLDAEWIAQLLQHGLLRGSFIPPAPVRALRECTRYRKQLIRARADEANRIQKLLEAANLKLGSVASDILGVSGRAMLAALVRGEMEATALAGLAQGRLRQKRPQLVAALTGQITPVQRQLLGVQLAHVEFLDRTIATLDAQIATLLAPYQAEAARLRSITGIDQRIAEVVLAELGADMTVFPSDRHCASWAGLCPGHDESAGKRRSGKTRKGSQWLRAALIEAAWATSHTKGYLGAQYRRLARRRGRKKALVAVAHSILVIAYHTLKDGTTYRDLGHDYFDQRDTARLQRRLIARLEALGLRVTVEPLAQAA

SEQ ID NO: 217864 - protein, 349 aa, unidentified
MDFYAGLDVSLEATNICVVDGDGKVIREAKLDTDPDAIELFLAEWGIHLKRVGLEAFSYSAWLFTALAEKGLPVTCIETRHAKAALNAMLNKTDRNDAKGIAQMMRTGWFRAVHVKSEGAQTLRALLVGRKALLGKVLDMENMIRGLLRPFGLKVGEISVGRFDARVREIMAGKKDLEAIVTPLLDARGAMRLQLAKLQRLALAAARSDNCVRRMMTVPGVGALVALTFRATVDDPARFKKSTNVGAHFGLTPRRYQSGQTDRIGSISKCGDELTRAMLYEAAIAILTRISKNFKLRLWGLRLARKKGLKRAATAVARALAVLLHKIWIDGTTFRFGAGGKRGRVAAAM

SEQ ID NO: 217865 - protein, 306 aa, unidentified
MQSIIGVDISKDTLNAYRLLDDKHLQVSNDKPGHSALMRWIGQTDTSLIVFEATGAYHRQLEARLAAADLPYTKVNPRQARRFAEVTGRLAKTDRVDAVVLAKMGAVLGLERQEPPSADMSELRELLAARRALMKDKVAVKTRLQTTTQTLLKQQIGARLRQIEAQVIQVDTAMRSKVRQSEALSAKFDILVSIPGIAEITAVSMITEMPELGTLDGKKAASLAGLAPVSQQSGKWRGKERIQGGRTFLRRAIYMPALVAVRRNAQLRTKYTQLIESGKPPKLALTAIMRRIVGSRPSTWWNFRCS

SEQ ID NO: 217866 - protein, 362 aa, unidentified
MSDGMSSVAQNAARVMPERYAGAIVAGLDVHLRQITFDCLDSSTGEVTRGRIAATPAAVEEWVGQFPGREVHAAMEACTGWLFVARALERAGAVAHLAETVETRALRGRNRRAKTDRQDALWLRELLAEGRLPESWIAPEHIRQWRSRLHLRKALIDERTQWLLRIRSTLYHHGLSPGAPGEISGPMGREFLARLPLALDASERVVIALRMIDMLDAQVRELERELRKIARHQAGCQALMTQFGVGELIALVTLTELGDVRRMSSSRKAVRFAGIDIGVHRSDQTSRVGKLTRQGSPTLRWALYEAAQSATRLQSPDYADYHALKARGLTHTRASLTIARKIARRSYHLLHALGPAAIEPVA

SEQ ID NO: 217867 - protein, 348 aa, unidentified
MLIIGCDYHPGFQQIAFVDQETGECGERRLSHREEAEQFYRALLGQKVRVGMEASGHARWFERLLNELQFELWIGDAAEIRSKRVRKQKTDRQDAQLLLRLLIEDRFPRIWVPDAENRDLRQLLWHRHRLVQMRTRVMNQLHVVALNEGLRRKKALWRAAGRQELESIALAPWASRRRQDLLDLLDRLTPKIQQLTGALEEEVEKRPVTRRLTTHPGVGPLTALAFELVIGTPERFHCGKQIASYVGLVPTEESSGDRRRLGHISKQGNVLLRFLLVEAAQVTVRSQPEWRSKFFHLAMRRGRKIAKVAMARKLAVHLYWMWRQGHDYGQLQKLGSHAGEPGNPDGGQ

SEQ ID NO: 217868 - protein, 340 aa, unidentified
MNATTYGLDIAKRVFQLYWVDTQTGEIANRKFGRDDLITFLAQRPAGRIALEACGSAHWWARKIRALGHEVVLLHAQFIRPFVQTNKTDAADARAIWTAVQQPGMRTVAAKTEDQQVMLSLHRMRSLLVKFRTMQINQLRGLLYEFGVTFRAGRVAGLDEIRERMAELEDTLPRSIVLNLLEQLRRINLFEEDINQLEKRIGAWQKQEAACRAISEVPGIGRLTATALVATIGDAKAFKSGREFAAFLGLVPRQNGTGGKIRLGSISRRGDPYLRTLLIHGARSVLCHTKVPTAWQKAIQARRPANVAAVALANKMARTAWAILAHQTPYEAHHVSHRPA

SEQ ID NO: 217869 - protein, 404 aa, unidentified
MKGPIVSIDVSKGKSDYQAFKEMNVKYTGSRSIKHTKEGFDEIVSLVREMEKKLETEVCVVYEATGVYHRVLKKVLEDNNIKQFIINPLLSAKTRKNDSLRSPKTDKLDPKSIAKTYYSHSLHNSHKPETIYHELRELSRYYEDILVHLRKDKVAFRAQLDVVFPGYDTLYDDLYGPVALAVIEKYPHPEMLQKKKINTVSKVIQSKTCHRQAMSDTMADKAIEYSKTIYSGCDKDDIEVLILQRFIKKLKEDMAEAERTIGEMIKLAQELPDFSIIKSIPGIGDNLAARIIAELGDMTRFKKKNELVAFAGLDPRINESGQNDGDHMHITKKGNKRLRCLLYLAVTCSIRLKRDDNSIKDFYIKKKQQSNPMCSKAAKTACASKLVRIIYSMCKTGELYQYNK

SEQ ID NO: 217870 - protein, 359 aa, unidentified
MKIVGCDFHPSYQQIAVLDTETGEVVEKKLMHAHGEAEKFYGELERPALIGMEATGNALWFELLLQKFGHQLWIGDAAKIRASYVRKQKTDKRDAGHILTLLTEQRFPRLWLADSHQRDIRQLLIHRHNLVGVRTRLKTELQHLALNQGVQKKRQLWNEKGRVLLSTLALEGWTRQRREDLLQLLAVVEPQIAQLDKAVEQAARASSQAVLLMSQPGVGPITALAFTVTIGEVARFPRSKQVASYLGLIPAEHSSGSKRRLGSISKQGNVFLRTLLVEAAQSAVRHDPDFRKEYQHRCHHKAKGVAKVAAARKLAVRLYWMLKSNKPYPEVLLIEGSPRHPVAAKAKAVQLNGHPRISH

SEQ ID NO: 217871 - protein, 351 aa, unidentified
MEEYIAFDSHKHYTWVEHEQVATGRVRQYRLQHAPGAIRRVLAGCEPGTPVALEATANWYWIVDEIEQAGLRPQLVHPRKAKLMMGLINKTDKLDAHGMNRLQRNGTLPTVWIPPGRLREFRELTRTRVVLVAQRTRWKNRLTATLAKYGAPSSEYSDPYGKGAREELDSRIERLPEQTRWAARQMLAQLDTLSEQILQFEGRLKELVEVTPEMQRLMTLPGVGVILAATIALEIGEIERFPSAEHLASYAGTTPRVHASGDRVRYGRTRPDVNRYLKWAFAEAGNSVAVNHTRCPARHVSQLYLRLRLRKGHGKAIGAVARHLAEAAFHVLSRQQPYQDPTVRPGRTREV

SEQ ID NO: 217872 - protein, 328 aa, unidentified
MHIASIGIDLGKTTFHLVALGERSKVLLRKKFSRAQLLAYTATLPHSLIGLEACAGAHFMGGRLREQGHQVRLIPAQFVKPYRKSNKNDFLDAEAIAEAVTKQNMRFAQLKTQEQLDWQAMHRVRDRLVQRRTALINEIRRFLLDRGIIFAAQPIHLRKNLPGVIEDAEQSLSPRLRWLLNRMWQEWKQIDTEVQAITEEIERISKDDARCQQLRQIPGFGPLISTATVAAIGNGAAFRRGRNFAAWVGVVPRQHSTGGKQKLYGISKRGNVYLRRMLIHGARRDASCCRSLEHSFSTWAAQPGASAEAERVPCYRFVTEAIFCWPEV

SEQ ID NO: 217873 - protein, 412 aa, unidentified
MNPVIGLDVSKGESQIQAFLDKGKPYRMSFSIKHDLKGLGNFLEFLHEVEQAANGNRPTVVLESTGHYHYPVIQFLEEQKYVYIIVNPLISHRAKSSSLRKVKTDAVDAYHLCELFYKEDLEPYKKRGVQLLNLRNLTRQQESIAEISAKTKIQLHSLLDQVFPEYRGVFGDLYSKVSLLTLLAFPTSEAVLSASERDLSERIRSLCKSRSDLWAQERAKKLKEAALRNPFQNNLYQSNIFNLEMLVNLVLQYQEHLSKIATEIDALAKEIEEYHILQSIPGIGEKIAATIISEIGEIDRFNDAKKLVAFAGVDPSVYSSGKFTASVNRITKRGSCRLRHALYMAVQSGIRDSRKKKTTDEIIARNKRLREFYDKKREEGKPFRVAVIACVNKLLHWIYALLKSRTPFQDIG

SEQ ID NO: 217874 - protein, 336 aa, unidentified
MVVGVDTHKATHSAALLNELGVVQGGLEVAASAAGYRQLLDWARSTSAARVWVVEGTGSYGAGLAKYLSEQDEVVYEGDHPKRSWRGPAGKSDQLDAIWVAKEALSGRRRSQPRARGERELLRVLLTARNGAIEAEKQGLNQLYALVVSAPEPLRKRLGRLRAEALVKACLRLRAHGDQETAVTAVTLRSLARRVSALATEAATYERQISKLVAARAPELLALKGVGPLSAAQFLISWSHAGRLRDHNAFAKLAGVAPLPASSGRVQRHRLNRLGDRQLNRALHLVAITRSRCDAQTQAYIARRTSEGKSSREIRRCLKRYLARRVFKLLERLDMT

SEQ ID NO: 217875 - protein, 360 aa, unidentified
MVMKDDANVCAIVGGVDTHKDLHVAAVVDERDRVLETRSFATTRQGYRQMLAWMRSFGDLQRIGVESTGSYGAGLLRFMQQAGVTVLEVTAPDRQDRWKCGKNDDLDAQNAAHAAFAGNRTVTPRSRDGMIEALRVLVACRKTAVMARRIALQMIQNTIVAAPDGLRDLLRDMTRMQLVRTLAAWRPDLTSYREIEAAYRIALKSLARRYLELHDEIADLDTMIAAIVDELAPNLVTRNSIGHTGAAQLLLTAGGNPDRMQSEASFAALCGVSPVPASSGKTARHRLNRGGDRAANSALHIIAIGRLRTDQKTKDYVARRVAEGHSKLDAIRAIKRYLAREVFALIMQRQKEINATRIAA

SEQ ID NO: 217876 - protein, 321 aa, unidentified
MEDTIVGIDVAKKKFDVALLRGEKTVSGVFKNTPEGFTMLQRWLDRHGVDRVHACIEATGVYGEDLAASLHSAGHVVSVVNPARIKGFAQSELSRTKTDKVDAALIARFCRAMQPDPWQPPVPEVKQLQALVRRLDELQGMLTQERNRFATADDIVKPSIADVITVLEQRIEQVRRLIRDHIDRDPDLRNKRDLLESIPGIGPATSAMVLAEFGDVTRFHDARCMASFCGLTPRHRQSGTSVRGKSMLSKTGSSRIRKALFMPALSAIKYNPVIAAFRARLLANGKPRMVIVGAIMRKLVHIIYGVLKTGRRFDPAIAATA

SEQ ID NO: 217877 - protein, 335 aa, unidentified
MKKIHVGIDISKEKCNLCYRSGLEIVREEECPNDVKGLKKAFKAALKVLGASFEDALVCAEYTGRYIYPLTVACQELSIFLWMDDPTRIKNSMGLTRGKNDAIDAARIAEYAFRYSDKAVRYAIPDAALVSMKSLLADREFLLIDRKRYQSQLTDQKKYMAPGDFKHKNSRWKKVIKSIDEQIAAIDAEIEALIEADPVLTRQKDLLVSIDGVGERIAINMIAVTGGFTRFQNARQFCSFAGLTPYKYDSGTSVRSKAKISKRANQTMKALLHMSAVNVATRMKSGEYKDYYERKLKEGKHVMCIINVLRAKLVHRMFSVIKRDTEYTKEYKPAC

SEQ ID NO: 217878 - protein, 408 aa, unidentified
MKTLHRRCAGLDVHKKEVVACLRLVVRGKATYEVRRFPTTTPGLLGLSDWLELAGCTHVAMEATGVYWKPVWHMLEGRFQQILANAAHIKGVPGRKSDMNDATWIADLLAHGLIRASFVPPQPIQELRDLTRTRKQLTREIVQHTQRIQAVLEEANVKLSSVITDILGASGRRILKAIIAGETDPAKLSELGSPRLAATKSELSDALLGRIRLHHQFLIGQHLKTIEQLEETITAFDARIEAALEPFRDVIERLKEVPGLSEISAQILIAEIGTDMRQFPTAGHLLSWAGLIPRLDESAGKRRSTRVRKGAPWLKPVLVQCAWAAARKKNSYFQAQFLRLKARRGPKKAAVAVAASMLTTVYHMLADGTYYQDLGPDHFARRNPARAAAKLANRIRNLGFQVEIRPAA

SEQ ID NO: 217879 - protein, 340 aa, unidentified
MEKRYIGIDLHRNRFTCCLRLENERTYLTEWELEDLARFVKKLRPSDEVAVEITSNTRLFHDAVAPHVKRVVVVDTHQFRVISQSVKKTDPNDARLLSLYLSKGLLPEVRMKDKEHGQLASLTQTRDTLVKLRTALKNKVNNILSARGLNLAKEALSSEKKLAEVLELPFDEIVRIELRVIIEQIRSLNKSIAELEKTIGEEGSKLEGHKGLSSIKGIGKITGAILLSVIGDVNDFADEGRLASYFGIVPRVSNSNETERLGRIHKHGTKLGRTALVQSALIAAKYSPYLKRFYEQVKARRGAGKAIIALAHKFLGIIYRTLKNQWVFDDFPNFVLAEAS

SEQ ID NO: 217880 - protein, 357 aa, unidentified
MDGFKSLLQTIQDCSQKSDKIKVGLEATGHYSYNILGFLLDNDLPVYVMNPLHTNLYRKSLSLRKTKTDRVDAKTIATMLLSDVDLKSYTDTAYHNEELKSLTRYRFDKVQERAKLKQSVSRLVTILFPELEQLVSSIHGTSIYALLSEYPGAKQISEAHLTRLANILVKTSRGHYRKDKATHIRDAARISIGSVMPAKSLELKHTIKLIQELTSEINEIEDAIRKIMDELKPPILSIPGMGFHSAAMILAEVGDFSNFNSPDKVLAYAGCSPSTYQSGKLTNCYAHMEKRGSRYLRYALYTATKYVCYWNPVFTEYLTKKQAEGKHYNVALSHATKKLVRLIYALQKSGKAYLAVT

SEQ ID NO: 217881 - protein, 338 aa, unidentified
MKKYSGIDLHSNNNVVVVIVEADRVVYRRRLPNDLGKVLEGLEPYREELVGVVVESTYNWYWLVDGLQAAGYKVHLANPAAMKRYDGLKHSGDDTDAVQLAHLLRLGILPSGYIYPAEERALRDLGRRRLQLVRHRTMHVLAVENVQARQTGARMSGARVKRLSAQEVQALGLPEDVTLGLQANVAVIGTLNEQIAKLERHLLERLKPQPEYALLSTAPGIGRILGSIILLETGSIERFAAVGNFCSYARCVDSAHLSNGKKKGEGNVRNGNKYLAWAFIEAANMARRWCPEARRFHERKRAKANAIVATKALAHKLARACYHMLKTGEPFDMKRCFG

SEQ ID NO: 217882 - protein, 351 aa, unidentified
MKKILRQVCATDVAQKELVVTLGRLFDDLTVELYSRKTFPNTKKGFLALLEWVRKLSNDQTVVRFVMEATGVYHESLAYFLDSEGCEVSIILPNKISNYMRTLDVKTITDKTASDAIARFGLERNVQRWRRPNPVFKKLRQLTRERDQVIQIRSMTKNQLHAEQAEAEPNEGSLVRIKKHIAFLNKQVKELNAEIKTLSSQDEKVKRSMKVICSITGVGLITAATALGETNGFDLIRNKRQITSYAGYDVVDKQSGTSVKGKTRISKKGNKYLRKAMHMPALSAISHDERFKAIYARLVSKHGIKMKAAVAVQRKLLEMIYTVYKTNTPYDKNYLRRKDHTNQPQESRAVI

SEQ ID NO: 217883 - protein, 356 aa, unidentified
MNKRSKLNFSGQPIYIGLDVHKKSWSVSIFTQHGEYKTFSQVPEAETLSQYLHHHFPGAQYRSVYEAGYCGFWIHDQLKDQGIDNIVVNPADIPTQDKERRRKRDRVDCRKLARGLRGDEIQGIYTPARWKLEDRSLIRTRLSMGRKQARCKNQIKSMLLFYGVTIPERREMGHWSRPFIRWIEGIRMERASGELALQIHVEELCHMRQIIAKLNRAILALARTEPYRSWVSLLKTIPGIGTLTAMILLTELYEITRFPSVDELCSYVGLIPDTRSTGEKEHVGGMTRRHHPELRWLLIEASWMAVRKDPAMMEAYQEHCKRMRKTKAIIKIARKLLNRIRYVLKNQAEYLTGVIE

SEQ ID NO: 217884 - protein, 397 aa, unidentified
MIAVGIDVSKSKSTVAILNGDGSIRAKPFDVHHVADELQALVDYIKRTSEPPTILMEPTSHYHYPLLKAFTEAELPVCLINPYQMKKYGDTELRKAKTDKRDSLRIAQYALEKSYSLIPYTPQDQKYEDLRFLSRQYSQRISTITVAKVQLLSLLDETMPGITTILPLKSRDPDNCVLLRFIKRFKSFDVIRKMGKTRFLDSYQVLVKKTKDRFAGSKGLAIYELVLSSVTTRGENPLSAMTQDQCVDLVSTSQKAADEINLQMRIIAETMPEYKVLRSMAGVGDRLGPIILGEIGDIRRFHSGKALNAYAGNDAPPYQSGQFESRNRHISKRGNPALRKACFEVMQALKLTKPQDDPVYLFLLKKEQEGKPYNVAKMAAVNKFLRIYYARAMELYK

SEQ ID NO: 217885 - protein, 450 aa, unidentified
MRKAGLPPPKEKPPVKIEMMHPHQIILSEEVSVDKNDDSRLEEFRQLKRDIRGSTRHLVVGMDIAKERHHAFFGTPAGKVLLHRLVFDNTRDGFEKLCFQADILKTQHGLAHVVFGMEPSSDYHKPLGEYLIEHGHGVVLVAGTAVKKNRELLDNRWDKHDTKDAANVADLVTQGKCLFYEFPSLSLRELRSLLSLKRRLKKSEQGYKVRIRNHLIAQYFPEMDAYFNYAEGLVRCLDPKKLAGLHLQEFARMVSLGNAHQMSRLEEIHTKAAVSIGCAAHPSVAFEASLLLDGLKSLHLMILETDRRIAEVCKKFPEYPCLLSIPGFGPDISAKVLGALGNPHRFENHRQVLKMAGLDLSADRSGKRTDVTPVISKKGKADLRYGLYQAALIASTRNTQFMTYFTNKLKGREREKGIGTKMRVKLSAKMLVIAWTLMKKKEMFDPGCLG

SEQ ID NO: 217886 - protein, 387 aa, unidentified
MVPMFDAHRPAAAFDHDSTLVLALETSGKAWDLGAVVPGVNRRPKKRFEPRAVAAIMAQIDKLKDDALRAGRAVARVVLTYEAGRDGFWLARYLTGLGIEVHIMQPSSVAVERKGRRAKTDKLDLDMLLGAFLCWLRGEPRACTMVRVPSLAEEDGRLPGRSRADLVKDRLAVENRIGNLLCLHGIVDFRPRLKKAAEKLEKLRSFAGDALPPKMMDELRRLMALHRLLGEQIAAIEAARDQVVTVPDPGREERMIQLLVQICGLGIETATVLVREVLCRPFKDRRALAGFVGITGTPFQSGGTDRDQGISKAGRPRVRGVLQQLAWRWPRHQPESALSKWFAERTGGVKGRLRNVMAVALARKLLVALWRYVETGVVPEGVRLAAA

SEQ ID NO: 217887 - protein, 400 aa, unidentified
MISVGIDVSKGKSTVCILKPYGEIVSKPFNITHTHKDLSELSSMLFRLNDEVKIVMEATGIYHLPVLTYLQEKGFFVSVINPYLMKSYRNESLRKAKTDKIDSRIIANYGIDHWFKMKEFQTSGEIYEELKLLGQQYQHYMKLHLLSLAELTHLLDLTMPGIKNLLASWNETNRKDKRSDFVERFWHYDVITSMSEQEFTEEYILWAKEKKYVPSQEKAKVIYTLAQESIPTLPSETSSVKMLVTEAVRVLKEVDATLGLILSRMQEIAKTLPEYSVVREMGGVGNTLAPKLIAEIGDVRRFRNGKALVAFAGIDPPPYESGQFVGCNRKISKRGSASLRKVGYETMRSLKMRSRPEDPVYRYVVKKESEGKSKKSAKIAGLNKFLRIYYARVTELYKNI

SEQ ID NO: 217888 - protein, 334 aa, unidentified
MLYAAIDIHKHAFQAAVLDPEGGEVVEARFSADRESLGRWAEEWQGRVVAVAIEATTGWRWVWRELSVRGFDVRLAEPVQARALLGRRRTAKTDRLDARWLARLLAKEMLPQSWIPPEEIQRLRDRTRLRKTLAEDQRRWGQRLHAFLLHEGWPCPKSRLLTPAGMRWTAALKLSEHGRLQVDSLLAIIAALEVQLDTVDSELRRFARTDERCQALQSIYGIGPILACHLLAEIGEACRFRRAKQITRLAGLDPVVDESGETRRRGHLAKAGSPQLRWALVEAAVHANRRNAPDLELYQAVRDRRDTTVARLSVARKIGKRAYHVLRELELAAA

SEQ ID NO: 217889 - protein, 332 aa, unidentified
MENIALIGIDLGKNSFHIHCQDHRGKAVYRKKFTRPKLIEFLATCPATTIAMEACGGSHFMARKLEELGHFPKLISPQFVRPFVKSNKNDFVDAEAICEAASRPSMRFVQPRTESQQAMRALHRVRESLVQDKVKTTNQMHAFLLEFGISVPRGAAVISRLSTLLEDSSLPLYLSQLLLKLQQHYHYLVEQIKDLESQLKRKLDEDEVGQRLLSIPCVGTLTASTISTEIGDGKQYASSRDFAAATGLVPRQYSTGGRTTLLGISKRATKDPNFVGSVCRYSYKTGTPVWQVGRLGQELLCRKSNFVVTCALANKLARIAWALTARQQTYEA

SEQ ID NO: 217890 - protein, 375 aa, unidentified
MSRIIYIGMDVHSQSFSLCAFEPSFNSKGKYFAETKVAAEPINIKKYVERLRKSIGNNCRFVTGYEAGSLGFSLYNALVSMDIECVILAPSTMLCPKGGKRIKTDRRDARNIAERLAYGGYSPVHVPSEQDVAVRDYIRMRDDHAAMLKALKHQICSLCLRNGFCYTATKWSAAHLKYLRDISLSPLNRECLDEYLATLEQLQGKINAFDARIEEMSHMEEYDVRSMRMSCFLGITRNRAISILSETGDFGRFRSPASFAAYLGLVPGEKSSGADTKRTGITKAGNVHIRKELIEAAQSICRGRVGHKGKALAERQNGNPTDAVAYADKCNERLRRRYYKMINSGKNRNVAVTAIARELACFVCGMMQEYIHGAA

SEQ ID NO: 217891 - protein, 311 aa, unidentified
MVMVVRNYIGCDISKDSLDFFDSSSGRHSRIANQAAAIAAHVEGLNCGRDFVVMEATGLHDRLLRHALAAARIGFSRLNPRHVHHHGKAGRQRAKTDRQDAALLAGYGRAHEPAADPAPNENRERLQELIRRRDQLVDARADNRKQLKAAVAPDVMADIQATIEFLDGRIDHLEALIKSTLAEADHATAADYDILVSAPGVSFVTATTLIAMLPELGSRSPKTIAALAGLAPFDRQSGKKTFKSQIQGGRQRVRRALYMAALSASRYCPQLARFYASVATRSGAKKLALIAVARKLLVRLNAMIRDQKRYA

SEQ ID NO: 217892 - protein, 326 aa, unidentified
MDYIIGCDAHKHYSQFAVLEEDHTRCKQVRVEHERGAIREFLSEYPEGTPVALESIGNWYWIVEEIEQAGCQALLAHPAKAKAMMGNVNKTDKLDARGLAMLLRNGTLPTVWIAPSEVRDERELPRTQMALCKIRVALKNRVHATLAKYNLSLPTESDIFAPKWSSQLNQVIEQLPVETKNCLQQEMQLLKTVPGVGDILAIVIGTEIGLIERFASAEQLASYAGTVPAVKSSGGKVRYGHTPKESNHYLKWAFVEAANGPAQYHKHPHWQHRHVTRLYERVRLRKGHSVAVGAVARHLAEATFWILNKKEPYREPTRQKVLPRQA

SEQ ID NO: 217893 - protein, 418 aa, unidentified
MNEEGDTRGSRRYVALDIHKKYCVIGGVDREGRVVLHAVRVEHADLEGWLKKNLRASDHVVFESTTNAWHVYDLLEPLVERVVVANPAKVKQIANARVKTDVRDTFILARLLAANLVPDVWVPPAHVREMRQLLSQRRQLVETHTQILNRMHSVAHRHHLKHERGKRFNEKNTVWQRDKRLSKVEQFQLELEMENRGYMEKQISRIGKEVAKMSHKNPWAQDMTYLMQLPGFGVITAMTILAAIGEVKRFESAKKLASYSGLTGGVDQSGTHLVHKGITKEGRKELRWALVEVAQRAVKSDPRWTHKFQELHKRMHRNQAIVAIARQLLELVWYVLTRRQPYRHFSQERIAYKYLTWAWQMDEAARDGLTRQQFARDYMMRLGIGHDLTRIALNPKYPRKLASETELLALRPDLNHIE

SEQ ID NO: 217894 - protein, 342 aa, unidentified
MDIDILGIDLAKRVFQLHGADRSGRALHRSKVTRDGFVEAVRSLRPRVVAMEACSSAHHWAGRCFRAMGIEVRLISPQYVSPFVKTNKNDRNDAQAIVEAASRPTMNFVTVKSVEQQDMQAVHRVRELLVHQRTALINQARGLLGERGVTMAQSPEAFKRAVPKVLSSCEGEVTSICQAMVLELTEQIQALEDRIKRTEAWINSFMKRSALCKRIAVVSGVGPITATAMVAAVGEAKEFRNGRHLSAWIGLVPRQYSSGGKSQLKGISKRGDTYLRTLLIHGARTVLRYAVAKTDAQSRWLQDLIARRGYNRAAVALANKNARVIQALLSSDTPYRPSAMAR

SEQ ID NO: 217895 - protein, 315 aa, unidentified
MSTQVPSAVCYVGVDIAKSTLAVHLLDQAWSSANTAAGHAELIERFRTFDHPAHVICEATGGYERALVTALHQAGVAVTVVNPRQVRDFARAGGWLAKTDRIDASLLSHYGEKFQPAPAPLPTPSQAALAAVVQARQDLVGLLAAEAGRRELTILPILMTLAAARRRQLEKQLAKLDAWLAAHVAADPVLAAKAGRLETVTGIGAVSAYTLLALMPELGAVHDHQAAALVGVAPFNHDSGQHRGQRHIAGGRPAVRRVLYMAAVSASQHNPILTDFYQRLRRNGKPPKLALTAVMRKLVVLLNRLLKNPHFALLT

SEQ ID NO: 217896 - protein, 331 aa, unidentified
MKIKETVGIDISKLTFDVRIHSNQTFKVFENSTKGFKMMTYWVYKNSSFLKDEIMFIFEHTGLYSHELSVFLTEQNIGYALVPGLEIKRSLGISRGKDDKIDATKIALYGYRLRDEIVLYNLPSQDLMTLKSLLSLRDRLVKQRAGYKSSMKEQKRVFLIKDHKILFEIQERMIISFSKQIQKIEKEMENIVKNNGQLKHLYKLIISINGVGPQTALFLITYTNAFTKFKDARKFASFCGIAPFPNSSGTSIRGTTKVSHLANKKIKSLLDLCAKSAIQYNPEMKVYYHKRIEKGKNKMSTINIIRNKIVSRVFAVVKRQTPYVNTMKFAA

SEQ ID NO: 217897 - protein, 457 aa, unidentified
MPRPRRRSLQPAAPPLVNPHAAGIDIGATTIYVCVPLERDSAPIRHFGTFTEDLHALATWLEGCGVTSVAMESTGVYWIPLYQILEARGLEVCLVNARHVKHVPGRKTDVQDCQWLQYLHSVGLLRASFRPPEAVCAVRSLLRHRDTLVQLAATHTQHMQKALNQMNLQLHHVLSDLTGVTGLAILDAILAGERDPQVLATHRDPRVKAAPETLAKALVGDYRVEHLFTLRQALESYRHYQRLLGECDAQIAALLAGFASEVDPGAPPLPPARTKTQRHAPRFDLRGELYRILGVDLTAVPGLATLPLTLFAELGRDLRKFPSGKDFASWLGLCPDNRISGGKVLSVKTRQVIHRVANALRMAAQSLQRSRSALGAYYRRMRARLGAPKAITATAHKLARILYHLLTTRQPYEETRVATAEAQYHRRSESRLRAHARALGFQLVPLTAEATSMPPTV

SEQ ID NO: 217898 - protein, 441 aa, unidentified
MPEEIPDADHELVMERVCAIDVAKASGVVCVRTRREHRRVSKVWDLESTTGAVSDLAGQLMELGVEKVTVESTSDYWRIWYYLLEAAGLDVQLVNARDVKNVPGRPKTDKLDAVWLAKLTEKGLLRPSFVPPAPIRQLRDYTRLRVDLTRERSRYWQRLEKLLEDALIKLSSVASTLNTLSARDMIEALIAGERDPRRLADLARGRMQTKRSALIKALDGRFDDHHAELARMLLDQIDTLSAQIGTLTARIDHLLAEDDPDDADGGGSVADQVAAASTRPGAVERLTEIPGIGQTGAQIILAEIGLDMTQFPTAGHLVSWAKLCPRTVQSGPVTRGGKTGKGNPYLKGALGEAAAAAAKTDTFLGERYRRIVKRRGKLKALVAVARSILVIVWHLLTDPFARFCDLGSDYHNNLINTERRIRNHIAQLTAMGYHVTLEPAA

SEQ ID NO: 217899 - protein, 415 aa, unidentified
MKEEKEKVKQYYLGVDWSDEFHQVWVSDPEGKKVMEKKVLENVEGLAEFGRWLDESRAKGIELWAAIEKPAGRIVDFLLDHGVVVYPVNPKALDRVRDRFRMSQSKSDSFDAYVLAEFLRTDHVHLRALEPSSEQAQELKLLTRDHHRLGRHKTRILNLLGRTLKEYYPRPLEVFGDLESKIALDFLTKYPTPQALSNLNRREWNRFAKREHHLAEARCKELWENLNKPQLKVPEHVVRAKAQLLTVLVVQLKTLIQAVESYSERVKSFFGSMPAADLVQSLPGGKSGTILPMLWAELGDAKSRWESFKHLQAEAGAVPVTKSSGKSSYVQFRFSCNKHMRYAAYWFAFVSLNRCEWANKYYRDKRARGKSHHQALRALGAKWLKIIFVMWRDHKPYDENYHLANITRQQMRQAA

SEQ ID NO: 217900 - protein, 343 aa, unidentified
MDYYVGLDVSLKQTSICVVNQAGSIVHEGVADSDPEAIASFVRSKAPGTVRIGIETGPTTTWLWTELKRLGLPVICIDARHAKAVLKMQINKSDRNDAAGIARIMQTGWFKEVRVKDLDSHAVKALLASRALLVKIKRDLENQIRGLLKNLGLVIGRAKFNVFAVRAEELIEDRPELVAAVRPLLDARKAIERQVGDLDRKVHKLARHDVQVRRFMTVPGVGPITALCFKATIDDPTRFRRSRSVGAYVGLTTRRHASGEVDWSGRISKCGDAMLRMYLFEAAGVLLTRVPKWSGLKAWGAKLTKRNGLRKAKVAVARKLAVILHRMWIDGTEFNWSTKKAAA

SEQ ID NO: 217901 - protein, 354 aa, unidentified
MSQKLNAAIAVIGIDIGKNSFHIVGHDHRGAIVLRQKWSRGQVEARLANLPPCLIGMEACVGAHHLSRKLQMLGHDARLMPAKYVRPYSKGQKNDFRDAEAIAEAVQRPTMKFVATKTADQLDLQALHRVRDRLVGQRTGVINQIRAFLLARGIAVRQGLRSLRSELPGILATRTDVLSPRMLRIIEGLAGDWRRLDERIEGLSSEIETLARQDKACERLMTVPGIGPIISSAMVAAIGTGDVFSKGRDFGAWLGLVPKQISTGDRTILGKISRRGNRYLRSLFVQAAWVVLVKVKCWERYGLKSWIEAAKKRLHHNVLAIALANKLARIAWAVLNKGRAFECVKAEETASRPA

SEQ ID NO: 217902 - protein, 397 aa, unidentified
MIAVGIDISKTKSTVAVIDSDGTVLASPFTMAHTQPEMEAFVSYLKGLGEPTTILMEYTGHYHYPVLKKLQDEGFPVCIVNPYQMKKYGDVEIHKAKTDKKDALRIAAYALEKSYKLVPYSSMEQKYEDLKFLSRQYNQRISYVAKLKVQLIALLDQTMPGITRILPLNSRNPEKCALLLFIKRFKSFDEIQRIGKARFLASYDVLAKKASERSASSKGLSIYELAVDSITTRGEDPYIWLSQNQCVDLLSATQNAADEIISQMRNIAETIPEYKVLRAMHGVGDRLGPIILAEIGDVHRFHSGKALNSYAGNDAPPYQSGQFESRNRHISKRGSSTLRKACYEVMQALKLTKPQDDPVYLFMLKKEQEGKPFNIAKMAGVNKFLRIYYARTMELYK

SEQ ID NO: 217903 - protein, 431 aa, unidentified
MTKTYILKTPTQTVPAERSAVETYLAPPPPSKGKIIGLDCHPDTFTAALFVGQTPHDARKIGSQENLSLEALLKWAVAELTPQDIILMEAGGNSFEVCKRLSALGLKACVLESCHVGKHAKTYADNDKMAAARIALVYLAGNAPCVWVPDEQSRERRELLHAYRKAVGDHTAATNSIKSYLNGRGIRLGKHSLDDKTTSPWILDQADWSVLQKNILAEHLANITESKERRKRLYRLIAAEIAVDPTMMRCMKVLGVGIVSAFALLAVIGDIGRFHSPEKLVAYIGLNPGQRQSGKGKDIRLGVGRRGRGDIRHLLIQGAHAIMRSGRNTPLGQWGWKLFARKGNRNVAVAAIARKLLVQVWHLLHGNPPLALESDTSFRVKLQKLAVALGTTLRTGIGLGKSLEDSIKTLLARCQPHPEPSASRCETPQPA

SEQ ID NO: 217904 - protein, 357 aa, unidentified
MDQVSTIGLDTAKRIFQVHGVDEAGAVVLRRQLRRSEVLKFFAKLPRCVVGMEACGGAHYWGREIAALGHEVRLMPPTRVKPPAFAGAGSTSNGRKSDKVDAAACCEAVTRPSMRFVPLKTVEQQAALMMHRARQLLVEQRTRLGNAIRGHMSEIGIIAAKGGAGLGALVAFIGNPEDQHLPAVVRTILVPLVEQWRSAGAQIAELDRQILAWHRNNADSQRLETIPQYGPILSSAMAATIGDAARFDNGRACAAWIGLVPTQNSSGGRERSGGISKTGDRYLRQLLVIAATGMVRRARAHPEDHPWFAGLLERMPPKKAAVALANKLARIGWAVLRHQTPYRARRPTAVAPALEAA

SEQ ID NO: 217905 - protein, 323 aa, unidentified
MPSVIGIDIAKRTFDIATQQPNGKYRTKAKLLNKVAGSEALQQWLLKHANAQAWIVMEATGAYHEALATWFHDKGYQVCVLNPAQVAYYARSQLQRVKTDKVDAKLIAEYGERHQSDLRAWQPEPPAVRRLKALVRRLEDLQEIQQMERNRLDLADASVQASIYSVLHHVERQIGETLRAIRDHIDDDPDLRNKRDLLTSIDGIGERSAALLLAELGDPLRFASSRAITAYAGLNPRLQESGSYKGQTRISRTGSSRLRAGLYMPAVCSLTHNPAISALRERLSAKGKSGKQIVCAAMRKLLHIAYGVLKSGQRFDPQLALAR

SEQ ID NO: 217906 - protein, 421 aa, unidentified
MKTSLSKNGVGQLEKLQTACADISKASFTWAIEGRNEGIVPQKNQAVREWIRVQLEDAKSHGYTGLRIVCESTSGYHKRLLRIARAEGCETALLSAEQVKAMQVVESNDTGKADWKDPRTMLLLVKLGKTLTDRQLTGEWAALRELNVDYEHVERRSTQVKNRIHGMLLQLFPDLSFKKDWLFESDSTRAVLAVYGFDPYAIVAAGQASVRRTLRKQGVLPKTIERIFRDAQQSILQPTEALWREIKAEQLKDAYADLSLAQERREKLRSKMISLLEALQAKGEVKLKPQKGLIGPFLLARILAETGPLNDFENLSKLLRYAGMNLRPNQSGQHRGKERQAKRGRARLRAVLAQAVLKLVVRTELYGPYYHGKKAAGMPGAVAMTAVARKFLKLLFGLNRSGQAFDPARVFKCHNEYAKAA

SEQ ID NO: 217907 - protein, 455 aa, unidentified
MARRRKQEKNVYSLPVIRPETAGIDIGATQIYVAIAPDRDPEPVRMLGTFTRDLRAIADWLRATGVKSVAMESTGVYWIPLYQYLESCGFEVVLVNAHHIKNVPGRKTDVRDAAWIQLLHSVGLLSGSFRPAVEICAIRALVRHRQNLVEWSSQAILWMQKALTQMNLQLHNVIDDITGASGMRILRAVVKGERDREVLASLCDKGIRASREVIINSLEGDYRSEFLFILEQTLQQYEDLQKRIGACEAEAARLMDELPEKVDLKEKPLPAARIRVKRRASQPAAVPNLREKQYRVLGVDLTTAPCLHTTTVEVFLSEVGPDLSKFKNASHFANWMGLPPNNRVTGGKRLSSKRRKVKSRMATALRVAAQSAARSENAIGDVYRRMKSRIGPEQAITATAHKLARIIYHMVTTGEAYDESVFAKAQQKFRRNQESKLRANAKRLGFKLIPLEEAA

SEQ ID NO: 217908 - protein, 327 aa, unidentified
MTLGEFFRQCIGIDISKNKFTACLYMYDRASDVGCCTKSIDFDNTKSGFNQMVKWSRKEAVKGYPLTYLMEPTGVYYERLAYHLHKIGQTVYVVLPNKARKFCESEGVKTKTDAIDARCLALMGCASRKLKPWVPPAAIYRELRQMTRFHADLCVIRRSVANRMEALDHMEGVSKTVRKHCEKLIEEIDTLTEKNDKDIMKKAAEDKELLERVKRIATARGLGVTTIVCVIAETEGFHLIENRKQLTSYAGLDVKAKQSGKEDPKHRISKEGNAHIRAALYMPALVAVRHNRQIREAYGRICQKHPKEKMIGVAAAMRRLLMLIYTL

SEQ ID NO: 217909 - protein, 316 aa, unidentified
MTTTPVFVGIDVSKDRLDVALRPPADGWAVANEEPGIATLVERVRGLSPTLIVLEATGGLEAPLTGALAAAGLPVVVVNPRQVRDFAKATGTLAKTDALDARILAQFAEVIRPALRPLPDAATQALSALLARRRQLIGMRTAEQNRLGPAPPPVRKGIRAHIAWLERQLARTDDDLAQAIRESPVWREKDDLLRSAPGVGPVLATTLVANLPELGTLSRQQVAALVGVAPLNRDSGTLRGRRRVWGGRAQVRTALYMAALTATRYNPVIRAFYARLCAAGKAKKVALTACMRKLLTILNSMVKHRTRWQEHVASTP

SEQ ID NO: 217910 - protein, 372 aa, unidentified
MKKNSTCPASGKRRRKAGAIPVAIGMDLGDKSSRYCLLDEDGEIVKEDSVGTTKKAMLRLFGSMPRCRIAIEVGTHSPWVSRLLRSLGFEVTVANSRSVPLISASSQKSDRRDAQMLARLVRVDTELLQPIRHRGEQAQTDLMRIKVRAALLDARTRLVNAARGLTKAAGERLPSCDADAMGEKQAAGLPVELQAGLRPLLQQVESLTEKIKACDAELKQIATEKYPETELLQQIKGVGPLIALTFVLTVEDPERFRKSRDVGCYVGLRPKRSESGEQQPQLGITKEGDIYLRKMLVQGAHYILGYHGPDTDLRRWGLKLAQRGGKNAKKRAIVAVARKLGILLHRLWVSGEVYEPLRNSNARQAAAQRAAA

SEQ ID NO: 217911 - protein, 422 aa, unidentified
MKKIQTKKLKFVNDKTLIATVDIGKGLNMGYARCPDHSVVKPFEFANNRAGFDKFWDCLEKARDSKNLDSIIVGFESTGAYGEPLQHFLKNKPVRLVQVNPMHTKRVKELQGNSPNKTDRKDPKVIADIIELGHSLTVVIPEGAAAELRRLTLARERANKRCTALYNQLQDLIFISFPEFSQVIKDVKTKTARYLLQTYPDPQDIIDLGLESLGAVIKRVSRGKMKLAKAKDLFEAARTSAGITEGRFSVALEIQATLEAIASSDDFVVRLEEEMSRHLEDIPYSHLLLSMKGIGRVTVAGLIGEIGDFNSFDTQRELLKHAGFDLFEISSGKLRGSRRISKRGRPLLRKLLFFAALNTVRKGGVMHAHYQRHLKKGMKKIKALVAIARKLLGIIFALVRTKHEYQEDYQKIQAAATIPMAA

SEQ ID NO: 217912 - protein, 414 aa, unidentified
MRIVYQHVAGLDVHKKVIAAAILVVGAEGRWYQETKSFGTMTADLLKLSDWLLEHGVTHVAMESTGEYWKPVFNILENNFEVFVVNAQHISKVPGRKTDQTDAEWLAELMQCGLLKPSFIPPAGQRELRELTRHRSNFVRERVNLVNRVQKVLESANIKLASVATDVMGVSGRAMLEALVAGNVSPEDMAELAKGRMRHKRDQLSRALEGRVKPHHQFILAELLAQIDSLDETIARFDRQIEEACRPFEQAVDLLDTIPGVGRQTAEVIVSEIGVDMGRFPSDAHLAAWAGVAPGNHESAGKRRSGKTRKGNQALRAALNQAAHAAAHTGNTYLSAQYHRLAVRRGKKRAIGAVAHSILVIAYHLIQRKESYRELGGDYFDKRRPEATAQRLLKRLETLGYQVSIQQTPAPASV

SEQ ID NO: 217913 - protein, 390 aa, unidentified
MSYFVGIDIAKNKHDCFIATGDGEVVRNSFTFPNNDEGFRTLKATLDQLNHSQKIKIGLEATGHYGKNLKQFLTSIGYEYSELNPYLVKKFIQSITLRRTKTDKVDAQMIAKFIQLEASKPTTPLSYNTMELRTLVRNHDKLVRSRSEEFVKITNSLDRIFPELKRFLNDRLGEFALYLLEHFTTPEKISRLTKSQIQKLHNVGRRVTVNRITMLKELASKTVGHPSSADELVIRQSIRMVRAINESIDAYESQIKAIMKEINSPLLTIPGIGVMTAACLHAEYGDFRRFSSPAKLLSFAGLECSKNQSGQSDYRGRMVKHGSAHLRYVLMNAAISVKNHCPAFSAYFQKKYSEERKNYRVALNHVVRKFLRVAFKLVTLNESYSLELSI

SEQ ID NO: 217914 - protein, 330 aa, unidentified
MDRTSVGIDVSKETFVIAVAPTGAQWTSETTPAAVDILVARLVQLQPAIIVVEATGGYERAVVAHCAAASLPIAVVNPRQVRAFAQAVGRSAKTDGIDAAVLAEFGARIHPPTRGIADAETRALAALVVRRRQLIEMIVMERQRLAQAPPTGKITRDLRNHIRWLERRVEDVDEEIGTAIQASPVWRVHEDLLRSVPGIGPTTARTLLAELPELGRLERRTIAALVGVAPFNCDSGQHRGQRHIWGGRASVRATLYMAALSAIRCNPILAAFYQRLRAAGKPGKVALVATMRKLLTILNTMMKHQRPWNPKAASTPASPSRSARAAAVLA

SEQ ID NO: 217915 - protein, 414 aa, unidentified
MHSMTDPPVNVTGGVDTHADIHVAAAVCSTSHRLLDTESFPATPAGYVKLLAWLLSFGLLDAVGIEGTGTYGAGLARFLTAEGVQLVEVDRPDRAARRLHGKSDPVDAEAAARAVLSGRATGTPKTRDGIIEAIRVHQVVYRSAVKDRTAATNQFHSLLVSAPADIREDLTRMPLKQRFERARRWRDRTGDDLTARATRQALRELALRIGFLDDQAQRVEAELDVLTDQAAPALRDLVGVGVHTAARLLVAAGDNPRRIATEAAFAHLCGVSPILASSGKTNRHRLNRGGDRSANHALWRIALVRRTRDERTRAYVERRTAEGLSDRDITRCLKRYIAREVHRAITRPLPLAPRGVELRRLRTEAGLPLRIVAAQFDIPIPRLSRIERGLTRDPDLQTRIHTWLTEPDITQIAA

SEQ ID NO: 217916 - protein, 344 aa, unidentified
MYFIGVDHHKQVSVMTVLDEDGQERKNGRVPNLRRYVEQFLEGCRPFTAVLEAGRSSYVMADLLRELGGEVKIANALQVKAIAHARIKTDKRDSRTLAHLLRANLIPEVYQRGEWNRRAQRVMRMRAYWVCKQTEVKNKVRALLAQQREEVGLEVEKRESGLFSSKGLEFLAKLPLESKEKEVLEDLLQGYKEIQAHIKKSDGMVDALYGEMEEASRIDTVPGFAKTLSVLVAVEIADVKRFSRAADLHSYAGVIPSTYSSGERTYHGPITKQGSRWLRWAALEAVYPAIKKDLVLRTLYSRLARRKGPNVAKIAVARRLLTIIYRILTEKREYIPGLMKQTAA

SEQ ID NO: 217917 - protein, 315 aa, unidentified
MDHNKAVYGVDVSKRNLVAAGYDEPTPVVVANLPESIAPWLAQLPRGATVAMEATGTYHQVLAHLAHTAGMQVYVLNPQTLKHYAAAIGQRGKTDGCDARMIARYVVHEQAKLRRWLPPAPAANRLSQLLERRHTVVSTRQTLAQSLAVPMLKAPRQSLLANVDRILRRLDILIRHEIARLPGMAALYERLKSIVGIGPVVAAQLVAVFSTLNFAKTDSFIAYTGLDPRAEDSGDHRGRRRLSKRGPPLLRCLLYNAGMAAANSRLFKPVYKQLRARGLQTTEAIVILARKIARIAFALYKSGHCFDAQKHLKTA

SEQ ID NO: 217918 - protein, 341 aa, unidentified
MVTIGADFHLRSTTMTVLKTDGSLMMRKKIDNNPDELLEFIRNCPGPKQFAMESCYSWPAMHDLIQDDVDEFILLHAKKLHSIVSSQAKCDKNDSDEIARLTHSGYIPRAWAADSDARQFRTLLRTRVGLSAAVTKIKNRIQAVVNSRIFYSQRPNNFKDMFCKRGRAWLSAVNFPIHERFLINSLLHQIDYLENLKAQFDRQIESITINNEQFKLLSTVPAMNGKIISCIVLAETDNINRFRNSDAFVAYSGVIPRDHSSGAKNRKGHLRTDCNQFLKWALIQAVIPAIRKDRALRKDYQAIKERVNASAARIAIARKLARIIYHVLKEQRPYYINTDRG

SEQ ID NO: 217919 - protein, 387 aa, unidentified
MQSVTSATAVATTVRAKDITLFASLELSKSKWVVTINSPGSEKFSKHVIEGGDGACLLDLLSRSRAKAEQRYGVGVKATVIQEAGLDGFWIHRLLLADGIESHVVDPASIAVARRHRRAKTDAIDGETLLRTLMAWARGERRVCSMVRAPSPEDEDRRRLTRERGTLLKERIQHTNRIKGLLGGQGVRDYNPLRRDRFERLEALRTGDGRELPAMLKAEIRRELDRIALATTQLAAVERARDALIRTDAEEPNNPAALLLKLKGLGPEFASLLWLESLFRSFGNRRQVAAYGGLAPSPWQSGGVERDQGISKSGNRRLRKTMIELAWFWLRHQPDSALSRWFQVRVGAAKGRIRRIAIVALARKLLVALWRYVTQGVVPEGAVLKAA

SEQ ID NO: 217920 - protein, 339 aa, unidentified
MENNNNPYYKHYLSIDWSQQDVSIARMRAGSNQPETKMFPSDIKKIKEYLKGLQGKKILTIEETTGSHWLYVELLESVDKILICDPYRNSLLKEGAKNDKIDARKLCLLLRSGLLKEVYHTSNEDYKIRKLASAYIALVKSGVRIKNQNSALYRGEGLKYKKDKIKKGEEILSFVEEQQKRAIKLYEEEKKKYEEVFKELKKKNEVIKMLCQVSGIKETSGVKIYSVVIDARRFENKYKYWAMCGLVKHDRESGGKNYGKKNPRYSRILKNVYKSAALAAIGGNNDIREYYEVLLQKGYPIAEAKNQIARYIAKVTYAVMKNKKPYKAYQWRELNKQKS

SEQ ID NO: 217921 - protein, 329 aa, unidentified
MSDVIFVGVDVSLETLDLAWKDSGPDPVYLGKFENTPVGRRKLLNRIKKLGPAVHVCLEPTSCYHLSLAYLLHEAPGIRVSLVNPRAVKDYGRSLMRRAKTDAGDAALLALYGSASQPRVWEPPSERVLQLRTISRRIEDVTNRRTALACRMHSARRGGAPKAVLSDIKQELQQIKQRLAKLQEAAKQLIRGDKLLSQRFRLLKSVPGIAEILGIRLLAEISVLPEGLSKRQWVAMAGLDPVVLESGKKQGPRRISKQGNARVRKALFIAALVATRRCAPFKAYYEHVQVNAKCPKLPALCAVMRKLLQAIWGIFQTDTHFNPELFYAG

SEQ ID NO: 217922 - protein, 298 aa, unidentified
MEKIGVVGGRGQEGLPAKRPPDGTPVWMAMDISRSKAVYCLRWDGSEQRRLSTPLGIAHVRALLEHYRSCQVHVAYEACGFGYELAWWLQEQGIARMVIAPSRVERVPGLQVKTDRVDVGKLARKLEKGDLKAIYIPSRTVHEQRQIGRTYAQCLKERKRAQVRIRSLMQEQGRLGPLPAAGWKVYSAWLGAQNLPQSVRLCVQAHEQLRALADQQAQRMKAELYKLARGAEYRPLVKALSAQSGVGWQSAIRLVLELGDIDRFRTTDALPHYLGLTPSQYSSGELEESLSSAFGCAA

SEQ ID NO: 217923 - protein, 340 aa, unidentified
MSLVLQPLLPFPDSCQGMSPHQQGRGTKMTEHCYGGIDVSKDRLDVMVLPDRKSFSVDNNAAGYSDLVKRLRGLSIAAIGIEPSGGYERAVIRALLAADLSVRRINPNKLRQFGRARGVLAKNDRLDARLIAEYVAIMPTRVAQRDPATEQLAEVVTMRRQLCDEHVAVENQTAQLEDAMLRRLNKRRLARLAADILLLDRRMAQIVVSNANLTRRYELLTSMQGVGPTLAFTLVALLPELGQMSRKQIAALVGLAPYDFDSGRLKRHRCIYGGRLPVRNVLYMAALSACRYNPALKVFHHRLAATNKKPKVIIVAVMRKMITTLNAMLRDNVAWQPRAA

SEQ ID NO: 217924 - protein, 369 aa, unidentified
MNHTTSIGLDVHARSIAAAALDPLTGEVVTKTFAYSPGEVASWALGFDSPKAVYESGVTGFHLCRELNALGLECAVGASSKMQRPPADVKRKNDLSDAQFLARLLATHNVTEVFVPDAETEAARDLVRAHADARADLTRARQRLNLFLMRHGHVFCEKGPTGAPVGSWTKAHWAWIRQISFPDEADEEALAFYIAQVRHMEGQKRELEKFIRAHAREPRWRGRVNALRCLKGIEEITAFALVAEAGVFSRFDSARAFSTWAGLVPSEHSSGPRRRTGGITKTGNSNVRRLLVEASWHYARAPAARKPAPSPDVPLRIENHAAKAVKRLVARRREMSARGKRPSVANCATARELACWCWAIGRMAEGADA

SEQ ID NO: 217925 - protein, 346 aa, unidentified
MIIVGCDYHPSWQQVAVFDTSTGEIGQRKLVNSNGEAEQFYRSLPVPSLIGIESCGNSQWFLDLLERLGHQIWVGDAAQIRASYVRKQKTDKRDAEHILKLLIEGRFPQLWVPDAETRNLRQLLIHRHRLVQIRTRVKNGLQHLAMNRGMQKKRRLWSAAGQKAFGELKLAGWYACRREDLQQLRVLLEEQIKKLDAAVEQVAWSQEQARLLMTHPGVGPITALAFVLTVGDVSRFHRGKHMASYLGLIPKERSSGGKQRLGSISKQGNTFVRTLLVEAAQTAVRLDDGLRKQYQHRCHSKPKGVAKVAAARKLAVRLYWMLRTNTKYPEIVHNESSSGCPMAGAS

SEQ ID NO: 217926 - protein, 416 aa, unidentified
MEIEHTHCAGLDVHKKTVVAAIIVPDGKNGLLKEVRTFGTMTADLLGLSDWLLSFGVTHVAMESTGEYWKPIHNILEENFEVLLVNARHIKQVPGRKTDVMDAEWIADLLRHGLLRGSFIPPVGQRELRELTRHRTNFVRERATVVNRIQKTLESANIKLASVASNVMGVSGRAMVEGIITGTAGATEMAELAKGRLREKREQLDKALEGHVKPHHRFVLSELLRQVDNLDESIARFDAEIEKHCRPFEEAVELLDTIPGVARRIAEVIISEIGSDMNRFPTANHLAAWAGVAPGNNESAGKRYSGTTRHGNRALTVALVQAAHAAARSRKTYLSAQYHRLAGRRGKKRAIVAVAHSILIICYHIIQRKEPYRELGGEYFDQRRPEATAKRLLKRLQHLGYDVSHIEQPVVLSVAA

SEQ ID NO: 217927 - protein, 361 aa, unidentified
MRIIGCDLHARQQSLAMLDTTTGEVVNLTLKHEGNEVREFYSQLPRPVLVGIEATGSMHWFLNLMEELGIECRVGHPATIRAAEPRKQKHDRRDAELILKLVAENRFPAIWLPTKELLDLRALLLHRYQWVRIRTRIQNALQAIALANGLRRGPGLWSYDGQAKIAFLPLLPHASYRRSMLQEMYKKMKEEIENLTQRVAEQAELRSGARRLMTHPGVGPITALATDVFLGDPKRFADGKALASYVGIIPREYSSGGHQRLGGVTKQGSPLLRFLWCEAGAHAVRRDPELKRFYRRKLLQKGLGKARVAVARKLGIRLWIMLRDEIDYQEFCRRGQKQQSGAACAGMPETGYGANRHRPVD

SEQ ID NO: 217928 - protein, 453 aa, unidentified
MSKITPDTKKKKKSAAKRVRPVTRPDAAGVDLGALVHYVAVPPDRDTEPVQSFGTQTADLHKLADWLVSCRIKTVAMEATGVYWVPLFQILEDRGLEVCLVNAQHAKNVPGRKTDVQDCQWLQYLHSVGLLNASFRPPADICAVRALVRHGESLVQSGCEHLLRVQKALDQMNVQVHHAVSDITGQTGLAILDAILQGERDPKKLAQLRDPRCKKSQAEIAAALHGDWRPEQLFTLRQSLAAWRYHQTLIAECDAELKKQLATLAAQTDRAAPPKAKPNQRCDETLRQHRFQKFGVDLTSADGMNTQTALVLLSEVGADVSKFATAEHFASWLCLCPDNRRSGGRQLSVATRSGANRLATALRLAARSLHRSPTPLGDWYRRLKAKLGSGGAITATAHKLARILWAMIKHRQPFDPARLGNPELRRHRKENALRRAAKQLGYFLQPIHAESVS

SEQ ID NO: 217929 - protein, 476 aa, unidentified
MKAKHHSARSRSSKPLVGGERPLRPSGQMPVIHPHAAGIDVGATSHWVCVPEDAVAEAESPVREFGAFTKDLDELVEWLLQCGVKTVAMESTSVYWIPLFQKLEAAGLEVLLVNARHVRHVPGRKSDCQDCQWLQRLHSYGLFNGSFRPSDDICQLRTLMRHRDNLTRACGAEVQHMQQALNQMNIHLHHAVSDLNGETGLRILDAILAGERDPAVLAQLRDPRIKASEETIRKSLEGNWRAEHILALKQRLSLYRTYRDQISDCDKEIEKLLAAFTPRVDPNDRPMPEDRKQKQRKRKKKSGNPDFNLRAEAYKLFGVDLTQIPGLMTLVFMLFSEVGRDMSRWPTAAHFVSWLGLCPDNDISGGKVLWRGARRTKNRAGTLFRLAAHALHRDQTPMGDYLRRMKAKLGPAAATTATAHKIAIIFYTMVNKQVEYDASLWAHRDHMREKRLEARLHKQAAQRGYRLVPMEEKPAA

SEQ ID NO: 217930 - protein, 332 aa, unidentified
MSVYVGIDVHRKRSQVAVINQDGEVLANRNVPNGVEPILRVIGDLPSGTPAAFEAAFGWGWLVELLEDYGFEPHLVHPLQCKAIASARLKNDKVDAAILAQLLRADLLPEAWIASPDVRQLRALLRHRIQLVRLRTLLRNRIHAVLADHGHDRPSGYWSGPGRSWLASLDLPAVSAEVVQDALALIDALESVIDRLDGEIRGHARSDPRVKVLTALPGVGPFTALVLLAEIGDITRFGSARKLAAWAGLTPTVRGSDRTVRHGHISKQGSVWVRWILCEAAQTAKRSPQFAASYQAIARRRGKKIATTAIARKLLTRAYHLLTDASGDGAPS

SEQ ID NO: 217931 - protein, 355 aa, unidentified
MNSEKYIGLDVHQATISVAVLDSTGKLVMESILETKAATILEFFAGLRGTLSVTFEEGTWAAWLYDLLKPHVAKLVVCNPRKNALLKDGNKSDRIDAHKLAELLYLNKLSSVYHGETGVRMLRELARSYLTIVKDLTRVMCRLKAVYRSWAIPCAGRDVYYTRHRAEWLGKIKEAGVRRRAERLYQQLDMLQYLRQQARRELLAESRKHAITVKLRQIPALGPIRSALAVALIQTPHRFRTKRQLWAYSGLALETRTSAEYCYVKGGLRRSKKQISIRGLNKDHNHDLKGLFKGAATRASVLPGPFQDFYQRSLAKGIKPTMARLTLARKIAAITLTLWKKGENFDADKLKSQAA

SEQ ID NO: 217932 - protein, 431 aa, unidentified
MPSKKHNSSTVSVVHGICCGLDVHKKTIAACLLWSDASSAEQYEVMEFETFTDDLFRLKEWLLERECPVVAMESTGPYWTPIHNVLEGFFQVILVNARHMRNVPGRKTDVSDSRWLAGLLRHGLLKAAFIPPKYQRQWRDLTRLRNKYQQTAGHFKRRVHQLFQKANIKIDSVLSDLFGLTGRNLMKLLISKETVPNLDEVEQCLRGSLKSKRTELYRAIQGFFEKHHRDLLALMLDTIEKLESQVVDLDHRIVQAMSAHQDKIDRLDEIPGVSDVSGPAVLAEVGPTLEAFPNADALASWCGICSGNNQSGGKRFSGKSRVRKNRLKTIMIEIAWPAIKKKGSYYRAKYYALRARLGPKKAIVAVAHRILKAIYHVIKYDTPFKDLGEAYLLEKNKDAKIRYLKRQAALLGFELVPGPQGPAQREQPIFP

SEQ ID NO: 217933 - protein, 358 aa, unidentified
MHSITPQDAAIIEVAGGVDTHSDTHTAAVIDQVGRVLGTEQFPADTAGYAALLDWMRSFGQLVGVGVEGTGAYGAGLARLLHRQEVLVIEVDRPDRKTRRFQGKSDPIDAVQAAKTALAGERTGVPKQRDGRIEALRNLRVARRSAVDQRADAQRRIKTLIVTAPDDLRERLRSLGVKDLITTCANLRPDRTGAASPATAVKIALRSLARRHQQLTAEIADLDELLEPLVAAINPGLVAANGVGTDVAGQLLVTTGDNHDRLRSEAAFAMLCGAAPIPASSGKTSRHRLNRGGDRQANKALYRVVICRLRWDPRTRAYMERRTKDGLSKKEIIRCLKRYVARELYQLITTPNDLELAA

SEQ ID NO: 217934 - protein, 394 aa, unidentified
MIYVGIDVSKDKHDCIILNSNGKVVFDVFTIQNNIDGFEDLLFKIKATEKYPDKVKVGLEATGHYSCNILGFLKNKGLSTIVINPLYTSLSRKSISLRKTKTDKVDARTIACMIMSDVNLKPYSDTLYLNEDLKSLTRYRFNKVAQRAKLKISVSRLVNILFPELEKLVSTLHGKAVYELLSEFPSAQHIASANLKHLTNLLHTASKGRFQRASAEEIRQAARKSIGSYLPAKSLELKHTIKLIRELNSEITEIEAEIKKIMDVIDSPIISIPGIGQNLGAVILAEIGDFSRFESPDKILAFAGCSPSTYQSGQLYSSHAKMEKRGSRYLRWALLNAAAYVCKWEPTFATYLAKKLAEGKHYYVALSHAAKKLVRVLYHLETTGKTYQPTSILS

SEQ ID NO: 217935 - protein, 412 aa, unidentified
MEGETVIAGVDTHKDVHVLCLLDGLGRKIWSGSFRADPEGYDRLAEAIGDPGSCAVVGVEGTASYGAGLTRRLVELGYNVVEVLRPKRDKARPGEGKSDPLDAERAARKAASGRGCSVPKSQDGWVEAVRQLYVARRLAVATSTSCVACAKSMLTTAPGALRERFRGRERPKDLMPLLARGRKAGDALEESVLASLRSVAAVWKEARSQVESCDERIRALLEANAPALLGVEGCGTTTAAALVVAAGDNPGRLKGEAAFSMLCGVSPIPASSGKTERHRLNRGGNRQANWALYEIAIKRMAYDERTKRYVARRTSEGKSRREAIRCLKRYIAREVYRVLMDPNPDGAAPEGPELAKMRKAMRVTQKQAAEGLGLSAATLGHLEHGRRRSTKLERRYYELLCELKGALPQTAS

SEQ ID NO: 217936 - protein, 344 aa, unidentified
MDHFAGLDVSVKETSVCIVDDTGRIVKEVKVSSEPEALLKVLGNPIYRFKRIGLEAGPLSQWLFSGLAEAGLPVVCVETRHMQAVLKAQINKTDRNDARGIAQMMRVGLYRSVHVKTLRSQKLRMLLTHRKLLQSKAIDIENDLRGTLRNFGLKVGMVGIVRFEARIHELVENQPDLAVLVEPLLIVRRALREQIVILHRRLLAIVRDDEVCRRLMTIPGVGPVVSLTYRATVDVPARFRKSKSVGAVFGLTCSRYQSGEVDWSGRISRCGDEMMRVMLYEAAQSMMHSKKWSWLKAWAMQIARRRGMKKAIVALARRLAVIMHRIWVDGTEFRWTREQAAAAA

SEQ ID NO: 217937 - protein, 354 aa, unidentified
MPSKVTKPYTSAQPKLMSIGLDIGKDVFHIVGFDHNGKVVLRRKFRRLELDAVFEKLPRCVVGMEACLSAHFVSRRLRALGFEPRIIPAIYVKPFLKGQKNDYNDAEAIAEAALRPNLKLVKEKTQEQLDLQACHRVRSRLVSRRTATINQIRAFLIEHGIAIRTGANSLRRSLPEILLQRADELSPRMRVLIEELHGDWLRLDARIEALNEEIEEISRQEKSCQNLMTIPGVGPLISTATVAAIGNGEAFERGRDFGAWLGLVPRQYSTGGKPILGRISKRGSKYLRTLFIQAANVILMRPQNWPRYSFGAWLVTAATRLHRNKLATALANKLARIAWSVLRYNERFDDAQTV

SEQ ID NO: 217938 - protein, 351 aa, unidentified
MMLIGVDYHPSFQTIAFLIEETGEYEERELNHSDGQAEKFYRDLKQRGICVRVGMEATGHSRWFERLLAELGFELWIGDPAEIKAKRVKKQKFDREDARLLLRLLRENNFPQIWVPDAENRDLRQLLWHRHRLVQMRTRIMNQLHALAMNEGFCWKKKLFSEKGRAQLEKLALAPWAGRRRQGLLELLDRMNPTIEELTAAVEREARKRPEAMRLMTHPGVGPLTALAYVLIIGTPTRFQRGKQIGTYVGMIPCEESSARKQRLGHISKQGNSLLRFLLVEAAQAAARVNPHWRRRYMHLAMRRHKSIAKVAMGRRLAVRLYWMWRNGCEYSPSLEFGSYAGQLGLGNGVK

SEQ ID NO: 217939 - protein, 353 aa, unidentified
MDSKKYIGMDVHKESISIAVRNAAGKIVMECVIETKASVILDFIHGLRGELHVTFEEGTWATWLYDLLKPHVTKLVVCDPRKNSRQGNKNDRIDARELADRLYMNKLSSVYHGGAGVRTLKELARSYLTISKDLARVMTRVKAIYRSWGIPCAGKQVYAPRHRAEWLAKITEVGVLRRAQFYYQQLDALRSLRHEVRRELLAESKKHKATKLLCQIPSIGPIRAALLIALIQTPHRFRTKRPLWKYSGFAIETHSSADYRNVKGQLERTKKQISVRGLNRDCNHDLKNLFKSAATIASVKPGPFQEFYAALVAKGMRPEMARLTLARKIAAIVLIVWKKGVSFDAQHLKSQTA

SEQ ID NO: 217940 - protein, 318 aa, unidentified
MKNVETYAGVDVSKETLDIAVHPRQQFKSFRNNEMGINGAVTYLRSLSPSLVVMEATGGLETSLAAALSASGIPVAVVNPRQVRHYAKSVGKLAKTDKIDAQIMADFAVAVHPEPRPLADSQTQELKDILTRRSQLNEMITAEKNRLQRTRKPVSDNIKAHITWLEQELDKMDSNLNNFIQKSPIWREKDNLLQSIPGVGPVLSSTLLAELPELGTLNRKQIAALVGVAPLNRDSGKFRGKRSVWGGRAKVRAALYMAALVATRYNAAIHCFYKRLIAAGKAKKAAITACMRKLLTIMNAMMKHQTPWYYHLNQAVIS

SEQ ID NO: 217941 - protein, 415 aa, unidentified
MEVLFSRCCGLDVHKSSITACVRIQEVGGKPRKIVRRFGAMTADLRSLANWLIEEGVTHVAMESTGVYWKPVWNILEGQFTLVLANAQHVKNVPGRKTDTKDSEWLAELLQHGLLAGSFVPPRLIRDLRDLTRTRAVLTQESSRIASRIQKVLEDANIKLASVASDTLGKSGQAMLVALIAGEDNPEQLADLALGSLRGKIPQLRRALEGLTREHHRFLLKRLLVQWRFVESETELIDQRLEQIGKQEAPIAEAVARWDTVPGVDRIAAWGLVAEMGIDMEQFPSAKHAASWGGVCPGNHESAGKRLGGRTRKGNPWLRRILGQSAWAAARTKNTYVAVQFRRLAAKRGRKRAIVAVGHSLLVIGYHLLRKQSGYQDLGAGYFDRLNAEGLKRYLVKRLESLGQKVTLEPRESVA

SEQ ID NO: 217942 - protein, 454 aa, unidentified
MTVPKPARLRVEHLPTVFPNAAGLDIGSAEIVAALPPDRAATVVRAFTTFTADLRELVTWLLHHQIDTVAMESTGVYWIPIYEMLEAAGLRVFLVNARHFKIVPGRKSDYNDAQWLQKLHALGLLTGSFRPDDEMCVLRSLLRHRAQLIEHRSPHILHMQKALKLMNLQLPEVLADVTGVTGLAILRAIVAGERRGAVLAQLRRPGCHHTEQDIIQALTGTWREEHLFVLAQSLDLYDFYSRKITECDARLDQQFSSMRPRFDLVGPAPAPPKSRTKKNSNSKNQPGYNVRAHLVRILGLDLVDIIGVSESLAQTILSEIGTDLSRFPTSKHFCSWLGLAPHNDISGGKVLRSRILKVHNRAGQALRQAAQSCARSHSLFGAFYRARAARSSAAEAAVATAHKIARVIYHMLTHHEAFNPESIQAFDQRRQQREVKYLQKKAKSLGFILQPATA

SEQ ID NO: 217943 - protein, 328 aa, unidentified
MKLQHIIGADLSKESIDLASHQLQTHLKIENSINGFRQMIKWLKDQDISYTKVMIVMEHTGLYSYHMEKFLHQHQIRFTKVSALAIKRSFGLVRGKTDKVDAERIARYGFEKKDILVAAVKPNETLERLQMLHSSRDRLVRHRASLKCAVKEYQNVLKDCDIIIQTDLALIKNFTKQIKKIEAKISELIRKEQAVNQNFQLLKTIKGVGEVVATAAIIKTGNFTRFDTARKFACYCGTAPFEHSSGKSIRRKTRISHLADKEMKTLLDQSAKSAIQYDKELKSFYERRIAIGKSKKSTINIVRNKILYRMFAVIHRQTPFIENYLQTA

SEQ ID NO: 217944 - protein, 324 aa, unidentified
MTENKMAKVYVGIDVSKAHLDVSVGPDPASWQVENNLAGIGELVQKLSAVRPVLIVLEATGGYEMAAAGALALAELAVAVVNPRQVRDFAKSLGRLAKTDRIDAQVLARFAEAVKPEPRALADAQTQQLQAILGRRRQLIEMLVAEENRLHLVHKDVLVNLKDHIAWLQQSLDDLDKDLRNLLKNSPIWREKDDLLRSAPGVGPVLSTTLLAELPELGTLNRKKIAALVGVAPYNCDSGKMHGKRAIWGGRASIRSVLYMATLSATRCNPVIRTFYARLIQAGKEAKVALVACMRKLLTILNAMMHNRKHWESALAVTKTRAAA

SEQ ID NO: 217945 - protein, 324 aa, unidentified
MSIANSFAVLGLDVSKAKLDGALRLPNGKYKTKTIPNTPAGFQELQTWLGKQSIAPVRVCLEATGIYWEAVAECLADTGFPVAVVNPAQIKAHRVALGTRTKTDAVDARLIADFGYRHEFVPWQPPPQAERELRARVLRLDALQRMRIQEGNRLAVAPAMVRASLEAHLAWLDAEIEALIRAIRHRIKADPDLRQKARLLDAISGLGERTIAVLLAFSVTPDRFQCARQVAGYAGLNPRRHDSGSLQRPARLSKVSHAFLRKALYMPALVALYKTAWGKVFGARLASAGKPPMVIIGAMMRKLLQMAFGVLRSAQPFNPALHGA

SEQ ID NO: 217946 - protein, 341 aa, unidentified
MGEISMIGLDLAKSVFQAHGVDASGTEVFKKKLRREQVLAFFAGIKPCVVAMEACSSAHFWAREIAEFGHDTKLIPAAYVKPFVKRQKNDAADAEAICEAAGRPTMRFVAGKSEAQQAGSVVFRARSMLVRQRTQIINALRGHLAEFGIVVAKGPAHVARLLAIIEDDAKLPATLRPPLQSMAATLRALEVEISKLDSEIAARAKSDGDARRLMTIPGIGPIIATAILAIAPPAVAFENGRHFAAWLGLAPRQHSTGGKERLGRITKAGDKTLRCLLIVGASAVLRHTARNPPPAGSWLARMLAGKPRMLIATALANKMARIVWALLRNGTTYQASGATPA

SEQ ID NO: 217947 - protein, 339 aa, unidentified
MDSMAVGVDIAKNVFQVHYVDQASGEIVNKAIKRAKFLEHFANRERCVIGMEACGGAHHWARALKRMGHEVRLMPAEFVKAFNIRNKNDAADARAIWLAVQQPGKPIAVKTEMQQAMLALHRMREQLVKFRTMQINGLRGLLTEYGEVMSRGRAALDKEIPAALGRIAERLPAALIETLREQWIGLARLDEQIAEIERRMREWKKEDRAVQAISEIPGVGLLTATAAVAMMGDPKAFRSGREFAAWAGLVPKQTGSGGKVNLHGISKRGDTYLRTLLIHGARSVLTHAREPGPWVEQIKKRRPMNVVIVALANKMARTIWAVLAHERPYRKSYVSVKPA

SEQ ID NO: 217948 - protein, 328 aa, unidentified
MKVQHIIGADLSKESIDLFFHRLQTHLKIENSSTGFRHMLKWLRDQKAHPSQIMIVMEHTGLYSYQIEVFLHEHNISFTKVSALAIKRSLGLVRGKNDKIDAQRIARYGFEKRDVLVATSKPIRVIERLKMLHSTRDRLVRHRASLICAIRQYECIVKSSDLIIKSHFDLVKNFDKQIDKIEAEISTLITKDQTVNQNFQLLKTIKAVGKVTATAAIIKTGNFMQFTTARKFACYCGIAPFEHSSGKSIRGRTRISHLADKEMKTLLHQSAKCAIQYDKELKTFYERRIAMGKSKKSTINVVRNKILYRMFAVIKRQTPFIENHLQTA

SEQ ID NO: 217949 - protein, 400 aa, unidentified
MISVGIDVSKEKSTVCILKPYGEIVSKPFEVYHVEQELSELATMLLRLNDEVRIIMEATGIYHLPVLSYFKEKGFFVAVINPFEMKEYRCQGLRRVKTDKQDAIAISHYGIDHWYRLKEYEAQENIYTELKLLGRQYCHYMRMRVESVLELTHLLDYTMPGIKTLLQGWNEKNGKDKLGDFAEEYWHYDNITKKSEKQFIDSYLKWAKKKGYHQNQDKAIKIYALAKEGIPTVSSNTPSTKMLVQEAVRVLREVDHTLMTILTQMRSLAKSLPEYPIVRAMGGVGDVLAPKLIAEIGDVRRFHSGKALIAYAGIDAPPYQSGRLVGTERKISKRGSSNLRKIGYEVMRSLKTHKAPEDAAVYEFILKKEREGKSKRAAKIAGLNKFLRIYYARVMEVYQK

SEQ ID NO: 217950 - protein, 350 aa, unidentified
MTIVETRAGICAITGGVDTHADVHVAAALDPVGGLLGVREFPVSPAGYACLLAWLGGFGTVALVGIEGTGSYGAGLARYVAAAGIRVVEVDRSDRQDRRRQGKSDPLDAVSAARAAQSGRARGAPKGRDGAVEAIRALMVAKRSAMGERTRTINQARALILTGPDDLRARFAKHTAAALVTGIAALRPRPGDVAGYATRVALRELGRRAVFLDGQLERLDELIVPMVTARAPGLLALYGVGPNTAALLLIAAGDHPERLRSEAAWAHLCAAAPIPASSGKVTRHRLNPGGDRQANHALWRIAFTRMGSDEATRAYVERRTEEGKSKAEIIRCLKRYVAREVYPHLRPAAG

SEQ ID NO: 217951 - protein, 340 aa, unidentified
MGYYVGLDVSLKSTHICVLDGERRVVWRGVSDTQVAMIAERLARWSKQIVLVGLETGSLTPWLYHGLSDLGLPMVCMDARRASDALKARAEKTDKADARALAEMLASGWYSAVHVKSLESHQLKALLGARDQLVRVKRQLYGQVRGLLRPFGIKISQRVGAKSFDEAVRMACNKEDVLYIAVGALLDTLANVAGQIAVLDKQVRTLAQKRKACWHLMSVPGVGPITALAFTAAIEDPHRFGSNRDVGAYLGLTPKRYQLGERDVSLSISRQGDEMVRHYLYEAANCLLTTVTGASALKSWGLKMVKRCGAKRARTAVARKLAVLLLRLWKQESHFEVQSA

SEQ ID NO: 217952 - protein, 408 aa, unidentified
MEEAVVEPLRFVALDVHKHYVMVGAVDARHTIVLTPRRVGLPDFPDWARAHLTATAAVVLEATANAWHLYDVLAPLTAAVTVAHAGAIKAIAQARVKTDARDTIHLARLLAARMIPSVWVPPHAVRELRGLVAHRRRLVSQQTQARNRLHAVLQRHQIVPPAGKLFSREQRSWWASLALAPVERLRVRQDLALLATFEPLIAEADGELGRLSTSAPFADQVPYLVQLTGIGVLAAMTTLAAVGDISRFPTPKKLVDYAGLGASVHDSGQTQRGGRITKQGRRELRGGMVEAAWVAVEHHPKWKAEFARLSARLGAQKAIVAVARKLLVGVWHVLTKREADRHGDTQAIARKLYTWVSRCGATPGHHRPLRLLVRREFDRLGLDAPEVMVGYGRNRHPLAPPGVSASAT

SEQ ID NO: 217953 - protein, 365 aa, unidentified
MEHDITAYVGLDVHKDSIAVAAAAPGRAAPRFVGTTGPQLAELTKALSHLGLPSQLHVAYEAGPCGYTLARALIERGYRCEVIAVAKTPRKPGERIKTDRRDALTLARYLRAGELTPVTIPDPRDEALRDLSRAREDAVRARLKARQQLKAMLLRHGYRYGGKTSWTQAHERYLAQLTFEHPAQNIAYAEYRAAVRDANDRVERLTVALREQAEGWRFGPVVRALMTLKGIDFVAAVTLVAELGDLSRFAHPKELMSYLGLVPSEYSTGESRVQGKITKTGNGHARRLLVEAAWHHRPRYTIGATMRARWDLAPAAARLRGDEGNRRLHHRWVGFIERRKRSTTADVAIARELAGWCWSLAVMQT

SEQ ID NO: 217954 - protein, 313 aa, unidentified
MQTVLDIGVDVAKDAVVVACARQSFAAHSVPNTVVGLRAWLRGLPAGSRIGMEATGGFHQRLADLAHAMGSVVYVLNPRDVRYYARAVGVRGKTDPVDAALIARYIAHEQARLHPYQPLSAQQRNLDRLLKRRAKLVALKTALRLSLQDAPELRAQLKAAVRHFDLLLKAIESQIAALMQQLFPKQLARLQTILGVGPLVGAGLAQALSRLPFANVQAFIAFTGLDPRPQDSGRHKGRRRLSKRGPPELRRLLFNAAMSAAKTRLWKPLYEHYRNRGWSSTATLVILARKIARIAYALWHGPSDFDPTRLATT

SEQ ID NO: 217955 - protein, 416 aa, unidentified
MVQGVLDPSAVASTAAGGVFVGIDWGNSHHQLCVVGDVGRLVEQGQFAHDVAGIGELVDRLRRHASITGIAIERSDGLLVEVLQQRGHRLFCVSPKLSARARERYRVAPTKSDAFDAFVLADSLRHEHRHWRPLAVPSPLLAELRALTRDRERLIFNQRDVENQLRAIVLTFHPAVLQLFSSLDRDITLAFLRDYPTPEQAGRVGAARMAAFCARHGYSGRTRPELLVERLRTNLLSASAGTTAGKAFTAGLFVDQLELLNTQVRVITKRIRELLATHPDAAIFLSFPGMGDVTAAIMLAEMGEDRARFPTADVLLAETGTAPVTRSSGRSRTVRFRYAANKRMRHAIDWWTFVAVRENAWAHEAYQQARDRGQLHNRALRGVGARWTRILWRCWTDGTTYDPSRHLKNQLAAVTA

SEQ ID NO: 217956 - protein, 385 aa, unidentified
MQKLNDLSRSPSPLDPDGTLIAVIELSLSSWLVAGIVPGVERQPLKKLAVDQSALLKLLHRWREEAAKAGHRIKRIAVAFEAGRDGFWLARWLRARDIEAHVIHASSVAVSREHRRAKTDRLDTELLKRSFLGWLRGERDHCKMVAIPTTQDEDAKRPNREHESLVGEQSRIVNRMKAALIRLGIRGFNPKLKKAAERLDGLRTPEGEPIPPNTLAELRRDMVRRRLVSDQIRQIEDARLERLKQAPSDGPHAMVRLLARVIGVGVETADMLVQEVLSRSMRDRRAVARYAGLTGSPDESGRKRREKGLARSGNARVRRGMIQLAWRFLMFQKESTLAQWFRARTESAPGTRKTMIVALARKLLIALWRLVREGVVPDGVVLRPA

SEQ ID NO: 217957 - protein, 351 aa, unidentified
MMIIGVDYHPSFQTIAFLMEETGECGEQELNHSEGQAEKFYRDLKQQGISVRVGMEATGYSRWFERLLAELGFEVWIGDPAEIKTKRVKKHKTDREDARLMRKLLLENRFPRIWVPDPENRDLRQLLWHRHRLVQMRTRIMNQLQALAMNEGYRWKKKLFSEQGRAQLEKLTLAPWASRRRQELLELLDRMNPTIEELTAAVEREARKRPAVQRLMTHPGVGPLTALAFVLIIGTWERFPRGKQIGNYVGMIPSEDSSAGKQRLGHISKQGNSLLRFLLVEAAQAAARVHPDWRRRYVHLAMRRHKSIAKVAMGRRLAVRLYWMWRNGCEYSQSLEFGSYAGQLGLRHGVK

SEQ ID NO: 217958 - protein, 403 aa, unidentified
MERVVIGVDPHKLSATIEVVDDRERKLGSGRFTTDRAGYAAMLRYAKAWPQRAWAVEGANGVGRPLAQRLLESGEHVVDVPAKLAARVRLFDTGHNRKTDAHDAHSIAMVAVRTRGLRVLQLDGDLEALRMLVDRREALSRRRVQTVDRLQALLAELLPGQAKKDITTGQAKRLLASVRPRDIAGKTRRRIAAEELVELIAVEAKMKKATAELKAIVLARGSHLMDLHGVGPVVAARILADVGDVARFADRNRFASWSGTAPLDASSGEHSRHRLSRAGDRRVNHMIHIAAISQIRLDTDGRAYYSRKRAEGKRPLEAIRCLKRRISDAIYRQLVADAAAAQQQPEKAGPGGQCGASQEASAAGSNPRTGTSDRPLPGPAPATLRPSVTARKRSTATDLVAAG

SEQ ID NO: 217959 - protein, 369 aa, unidentified
MKDDIRVCREMTNSVSNEFSLFPKSTLGIDLGDRFCHCCALDYRGEVVERFRFEATKAGLAKAFENRPPCRVVLEVGTHSPWVSRALGALGHEVIVANAREVQSITKSDRKNDANDAEQLARLGRADPKLLHPIAHRQEDTQRDRALLTVRDKFVQVRASLIVQARGIAKALGERLPKSTTPAMAKRVREEGFANLFPGMSSLLEVVELLSEQIRELDNEIERVSKERYPETELVRQVKGVGPITSLAYVLTIEDPARFARSRSVGVYLGMRPRQRDSGDRNPHLSINKAGDPYLRNLLVECAQYILSRGPDSDLRRFGERIVERGGPGARQRAVVAIARKLAVLLHSLWRTAEVYDPLRQAQVTEATA

SEQ ID NO: 217960 - protein, 342 aa, unidentified
MNNKKVTKQVVATDIGMENFYACYKIQYDDKSTVIKGTKLFSNSPSGINEFYLWCKKRNKTLGAEPIFVMEATGVYYEELAYFLYHKKEKVSVQLAQKIKYFAKSCNLKTKTDKVDAKIIAEFGIEKNLTGTDLWTAPSKDFKMIRDLAREHTSLKKAQTVSKSQLHALKHAHSSYDNVIKLKEQQIGFYEKQIKSVEKEINTLVWSDISLYSRIKKIETIKGLGFITIIKVLTETNGFLLFKSIRQLVSYAGLDVIEKESGKYKGKTKISKKGNARIRSALYMPAMSAAQHNRTLKVFYNRINESRTIKKQGLIAVMRKLLILIYTLWKKEEEYIENYQMT

SEQ ID NO: 217961 - protein, 404 aa, unidentified
MELSAVYRCVAALDVHQAKLTVCVLSENDQGEVVTAIREFGGFKRDRREMAAWVASFQPELVVMESTGIYWKSPYAALEWHDLKLAVVNARHVKQVPGRKTDINDAQWLAILARSGLLRGGFVPPRQFREYRLLARQLQKLTGIASGERNRLHKLLTDAGIRLSVVISDLSGKSAKAMIKGLLAGETPEQLLVYADPRLKASPDDLREALEGDLSDSHRFVIHELMAHLDELNARILRFRQALLSHLSPYQAILQNLQTLPGVDELSAAMILVEIGDDMAAFGSPAKLASWAGVCPGQNESAGKRKSARARKGNPYLRRILCEAAHAASRTRCSLQDKFKGLLIRRGRKRAIFAIAHKLLKTMFLLIQRGEYYRDAQTDYEALTVQRNAPRWIKKLIQYGYIAA

SEQ ID NO: 217962 - protein, 349 aa, unidentified
MNAATYAVDTAKNVMQLHWVEIETGEIHRKKLSRAKFLEFFAQMQPTRVAMEACGGSHHWARTLTAMGHAVELLPAGQVRAFVRGNKDDAADARAIWVAAGHGDIRRVPIKSTEQQAILSLHRTRSHWVSIRTATINSLRGLLYEFGIFLPQGRHSALQMLAEQRADIDAKLPALMVRLLNEQLRSLREIDHNVDVMDKEIAAVQQSVEAAKTLRAVPGLGVLGATALAAVLGDGHAWRNGREFAASLGLCPGHTGTGGKVRIGGISRRGDPYLRTLLIAGARAVVARKNCSAWVQALLSRRPTNVAVVALANKLARTAWALIAHHRNYDMQWMSTAPACMPNAEPART

SEQ ID NO: 217963 - protein, 352 aa, unidentified
MYTLGIDLHKKSSVWVLIDDKYTELWKESVVCHPKYISIALKKIPVPPNEVKVAIEPVAGWRWVTKQLEEEGFKVHIAHPRKIQLIAQSKKKNDTEDARTLAKLLNSGYFPEAHRSPDSIYDLRLLLRERTYLIKLRTSAKSQLHGIATTQGLHLIKGMNPLHKKGKEGIMSSQNFVLKELHQLIEDLDKRIIPFDQELSKEVKKYPIADILTTVPGLGILTALTIIAEVDDFSRFKTAKNLTSFAGLVPRQRSSGEIVRHGGITREGSKPLRTALVELAMRIRETNAPELFAFVKRLTPICGAKKARVALGRKILAILWKMVTTNTPYKPNIILSSSSATNVSNLDTGTGA

SEQ ID NO: 217964 - protein, 406 aa, unidentified
MRFYIGLDWADAEHAVWVEDENATKIVGRIVPHTAEGLSEWGRWLDERRAEGIELWAAIEKPEGRIVDFLLDHGVLVFPVNPKALDRARDRFRISGAKSDPFDARVLATFLRTDHGHLAPLRPSSEAAQELKGLTRDHARQVRQQTRLLNQLTATLKAYYPRALEVCDDLKSQWARAFLREYSTPAALAALTARQWQRWTREHRLGAERTAKLWAILQGPQLPVPAHVVRVNARLVGALLAQLEATVTAVEAYREAITDFFASMPAAEWATSLPGGRSGTTVPQLYAELGDAAGRWQTFRHLQGHAGSVPVTDRSGKQVSVQFRFACNMHLRQAVHQFAFQSLGKSEWARAYYDRGRKRGHSHHHAVRALAAKWLKIIFVLWTRQVAYDETYHLATMARQHLRQTA

SEQ ID NO: 217965 - protein, 321 aa, unidentified
MQKDLLYCAIDVSKDKLDVDAAALALPAQLGNDHAGFRQLIKAAKKYPGAVQFVFEATGPYHLGLALALWEAQIPLSILNPARVRHFAKAQGKAKTDPLDTQVIGDFARSFRPQPTPAPDPVRRELTELLQRRDGLISSRAAEQNRLSQCRHKIIKGQIGRMMAQLAEQIDQIDGLMKKLVNSSEELKAKVKALCQVKGVGHLTAVTLLITLPELGTLGRNRIVRLVGLAPLNDDSGTQKNKRYIQGGRARPRCALYMPALSASRHNPVLKEVYERLLKAGKLKKVALTALMRKLLICLNALLRKLADQHPSPQGLCLAKP

SEQ ID NO: 217966 - protein, 341 aa, unidentified
MNYYAGIDVSLECSSVCVVDASGKVVREDVAASEPKALIAWFGSLGFEVTRIGLEAGPLSQWLYAALRDAGFAVELLETRHVRDAFKAMPVKTDRKDARGIAQLMRLGWFRPVHCKSIAAQETRAILNARKLVQSKLHDVEMSMRGTLRGFGLKVGRTTPNRFAARINELVDGHPTLQVIATSLLAVHAVLLREFKGFEKRVRMMARDNEPARLLMSTPGVGALVALTYASAIDDPGRFKSSKQAGAHFGMTPKKYQSGETDITGRISKIGDKGVRTALYEAAHIILTKPVKGSGLKSWAARLAKRVGMNKAKVALARKLAVIMHRMLVDRTPFNPAAAAA

SEQ ID NO: 217967 - protein, 334 aa, unidentified
MNNVSLIGIDLGKNSFHVHCQDATGRALNRKKFTRTKLFEFLANSPSTTVVMEACAGAHYMARKISELGHTPKLISPQFVRPFVKSNKNDFVDAEAICEAASRPSMRFVAPRTESQQEILALHRVRESLVRDKVKTTNQMHAFLLEFGISMPKGLAMLRRQSVVLAENNLPPYLEKLLMKLQSHYLYLVEQIHDIEHELELAAKQDDTTQRLMSIPSVGPITASILMANLGNGQQYKRSRDFAAATGLVPKQFSTGGRPTLLGISKRGNKNLRRLLVQCARVFILHLEHQSGYLAEWVKNQLSKKHSCVVACALANKLARIAWAITTKQSTYMA

SEQ ID NO: 217968 - protein, 338 aa, unidentified
MKKFIGIDLHSNNSVVVVSDEEDRAIFQKRMANDLKLIEATLAPHRDETVGVVVESTYNWYWLVDGLMDAGYRVHLAHASAIKKYEGLKYSGDVADAAYLAHLLRLGLLAEGYIYPREERGARDLARKRLQLVRYRTAQILSIEGILMRQMGARMKSESVKGLTPEQVEKFGFAPDVALAVEATRAVSQTLGQQIEALEKRLRERVSLRGEFKLLKTAPGIGETLATTIMLETGTIARFAQVGNFSSYCRCVDSLRESNGKKKGQGNAKNGNKYLAWAFVEAANFAVRYCPQAKSFYERKKRRTNRIVATKALAHKLARACYHMLRDHKPFDVNRCFA

SEQ ID NO: 217969 - protein, 372 aa, unidentified
MTGYGEAFVAFDTSKEKNAVAIAVGNRDGEVRYLGEIDNTPEATRKLVDKLVGKYAKLHFCYEAGPTGYGLHRQLTGFGHASMVVAPSLIPKRAGDRVKTNRRDAVTLAKLLRAGELTAVWVPDAIHEAIRDLSRARETAVEDLRRKRQLVTAFLLRHGRTYPGKTTCGGRHTRWLAEQAFEHPAQRTVLQEGVNAVRDAGERLERLEAALAEIVPTWSMAPVVAAYQAMRGVNFITAVTFVAEVGDVRRFDTPCQLMSYLGLVPSERSTGNTVRRGAITKTGNRRARRVLVEGAWTYRYGARIGRRLLDRMGDLPEAVRTIAWKAQTRLCGRYRKLNAAGKRSTVIATAIAREMAAFLWAIAREVSPAPVA

SEQ ID NO: 217970 - protein, 369 aa, unidentified
MGNRSMFVGLDVHKETIDVSIAEGDRGGEVRHYGVIASDLEPLDKIVRALRAPDRSLHFVYEAGPCGFGIHRHLTKHGEDCVVVSPSMIPKRSGDRVKTDRRDSQMLARLHRAGELRAIYVPTDADEAMRDLVRAREDAVVVGTQAKYRLKAFLLRQGRRYPGREGWTLPYRRWLTDLSFPSAPQHIALQEYREAIDETERRIDRLTEQLRQLAPVWRWAPVVAALQALRGVSFITAVALAAELGDLTRFGHPRELMAYLGLVPSEHSSGPTVRRGAITKAGNPHVRRLLAEAAWAYQGIPRIGRQHAYRQEALPKVVCDIAWKAQLRLTGRFRRLVARGKAKPKVATAIARELAGFIWAIAREVSPTP

SEQ ID NO: 217971 - protein, 486 aa, unidentified
MGKRTVKGRPQGATKQPATHLPPRKRRQRGRPVLSDSLQVTSEHAAGIDIHQREHWVAVPPGSAPPPPKDHPANLPAHVRRFGTNTADLEELADWLLACGVTTIAMESTGIYHIALFELLERRGFEVYLVDPRQTKHVPGRAKSDVLDCQWIQRLHSYGLLAAAFRPADQIVVLRSYLRQRQMLIGYGGQHIQHMQKALEQMNVKLGVVVSDITGVTGMAIIKAILAGERDPLKLAKLRNDKCKHTEAEIARALYGTWRAEHLFELKQAVALYEFYQERLRECDRQLEAHLRTFEDKSGGEILPARLRQYKHPVNDPRFDVRPLLHQMSGVDLTVLEGIDDSTALTILSEIGTDMSKFPTEKHFTSWLGLSPQHQGSAGRIRSRHVRRGANRAARAFRLAGQGCHHAKNALGAFYRRIQSRSGGGKAVVATARKIATRVYRLLKYGLDYVRQDMAAYEEAYRLKLIKGLARKAQELGYRLEPATTP

SEQ ID NO: 217972 - protein, 338 aa, unidentified
MKTNEKLYTNYVGIDISKKTIDVSVLKKGQKNLHYHQFGNEPDGYKDMEKWLNKQPGFNYSKSLFCMEHTGIYTRQLQKYLLDQGTHVWIESSLQIKKSLGLSRGKNDKIDSKRIAEYACRFADKANLECVYAKNMQKLKDLLSSRDRLNKALQSILVSVKELTKIDAEQGKSLKLLNLPAINGIRQSIKEVEQSMEEVIMSDDRLKEIFLLSTSIPGVGAILTMKLLVYTHAFTKFETTRQLACYCGVAPFEHRSGTSIRGKTGVSKFANMDLKCTLHLAAISSIQHNPELKKYYERKVKEGKSKMSTINAVRNKLLNRIVAVVKRGTPYVKFNLAA

SEQ ID NO: 217973 - protein, 430 aa, unidentified
MKSNTQNTKIEAITETTLVLGIDVGSETHYARAFDYRGIEYSKKPLKFSNDEAGFVTFKAWILDIKEKHGKDKVVPGMEPTGHYWFNLGKFLQDNEMKPVLVNPHHVKKSKELDDNNPTKNDRKDPKVIAGLVREGRYMIPYLPEGVYADLRTASNMRFQLQAELTRIQNRISRWFNIYFPEYKTVYGQPDAKSGMLILKVAPLPEDILTLGIDGVNQIWRDAKVRAVGKARAKTLIEAAEHSVGSKEGEISARMEIRMLLEDYESRNTRLQEVVALIEELVKKIPMAEKLLEIKGVGIKTVSGFLAEVGDISRFNNPKELQKLAGLALVENSSGKHKGETTISRRGRKRLRYLLFEVAMSLVSKNPEFRELHSYYTTRKLKPLKKMQSLMAVAAKLLRVFFAMLTKGVDYDPQKLVGDIKRPAVYLQVA

SEQ ID NO: 217974 - protein, 337 aa, unidentified
MKYCGIDLHSNNSVIVVIDDEDRVVARKRLPNELARIVEFVASWRDELAGVVVESTYNWYWLVDGLQAAGFEAPLANTAAIRQYDGLKHSGDEADARHLAHLLRLGILPTGTILPRDERAVRDLARKRMQLVRGRTTHILAIENIMARQFGGRMTSNQIKRLSADDIDRMPIAADVGLAMNANLAVIGALDAQIEVLERRLRERVKPRPEYAFLTSVPGIGQALSTTILLETGPIDRFASVGNYASYARCVDSVHTSNRKKKGEGNVKNGNKYLAWAFVEAANFARRYCPEAKRFHERKKAKTNNIVATKALAHKLARACYHILREGRPFDVTRCFA

SEQ ID NO: 217975 - protein, 413 aa, unidentified
MRVMIERCCGLDVHQETVVACLLIGAPGVRPTKEVRTFRTMTRELEALRDWLKAAGVTHVGMESTGVYWRPVYAVLEGLFELIVGNARHIRNVPGRKTDVKDAEWIADLVRHGLIAKSFVPARPLRELRELLRYRRKLVESQSAERNRLLKLLETANIKLASVASDVFGVSGRAMLKTLSEGNATAEEIAGLAKGQLRRKHDELVLALEGRVEEHHRFLLAIQLHRLEAAEHDIEALDARIAERLEPYRTQHALLMQIPGVDWVVAAVLIAEIGIDMSVFLSAYHLASWAGVCPGNHESAGRQTSGRARKGNVHLRTILVGAATSASRTKGSYLKDKYHRLKARRGALRAALAIAHKILVAAYHMLAKGLAYRDLGEAYLDQLHQTRTAANLKRRLERLGYTVTLQLKEAAAA

SEQ ID NO: 217976 - protein, 475 aa, unidentified
MKKRVYSATDIMHVDCHKILEPRRFGEEAVVVVGVDVGKLDMRAVLRWADGTFERPWAVANPGQIGVLVERIGHLAQSCRPVRVAMESTGTYGDALRQALADAGVEAHLVSGKRAHDYAEVFDGVPSQHDGKDAAVVAELCALGKSLAWPWPAPDEQVGELMFLVDQLEAATREKTVWVLRLEAMLARHWPEASRVLKPGGGTMLRALAHYGGPAALAADLQAAATLQRWGTRWLDADKVKRVVASARSTAGVRQGATDLARVQWCATKALDAHREAGRCQAKLKRLGAAHPAIAAQGAVIGVPTACVLWRHLGDPRRYHCAAAYRKAMGLNLKERSSGKYQGKIKITKRGPGACRRWLHLAALRQIRDDRDVRRWYTRQCGGSGKGKGKRQDNGKGGSSSSSSSSSSSSSSSSSPSGRLRVVTALVRKLALAMWVVGAGRGTFEVERLLGLPPRRRSGKTEAGRKGGVAVAATR

SEQ ID NO: 217977 - protein, 446 aa, unidentified
MPLDCCERARGSVSWQRSLRTDAVRRWSPHGGRRDVMEVLFDRVAGLDVGKESVTVCLRTPGPRGGRRSETRTFQTMFGSLRVMRDWLVEAGVTIAAMESTSTYWKPPFYCLEEVMVVWLLNAAHMKAVPGRKSDVRDAEWIAQLLEHGLLAPSFVPPPQIRRLRMLTRYRMQLMGDRSREMVRLELMLEDASIKLSSVVSSLKTVSARAMLTAMINGESDPLRLADMAKGRMRRKIPDLAQALTGTFEAHHAQLARSMLRRLELVEQALAELDAVIAEACRPWQHHIELLQTIPGVGETVAQVIVAETGADMSRFPTAAHLSAWAGLAPAMHESAGRQTPAGKRHGNKWLTAMLVEAAGSVGRMHGRNYLAAQHARLMKRRGMGRAQVAVAHSMLVAAYWMLKRDEPYHDLGADWHRRRSDEAHTRRLVAQLEHLGHTVIIDPAA

SEQ ID NO: 217978 - protein, 372 aa, unidentified
MEKIADAEGFASVDGVVLGVDTHLDEHVAVVLDRLGRRLGELAVPTTTRGYERLLRWVESFGPVGCVGIEGTSSYGAGLARHLKAAGVSVVEVERPKRRHRRRTGKSDPKDAEAAARAVLAGEALGEPKSADGKVEMIRTLRSARQSAVKARTQAANQLQALLVTAPEVLRHRLRELPTKELVATCARLRPGDDLDNIETATRFALRSVARRHEALSEEIAQLDAQLDRLVAEVAPALISLPAIGTHHAATLLVVAGDNPQRLRSEASFASLCGVSPIEASSGKVVRHRLNRGGNRDANRALHMICVVRMGSDSRTRKYVARRTAEGKNKWEIMRCLKRYIAREVYRILISSTTTEPPLINAVSRVLEADIA

SEQ ID NO: 217979 - protein, 403 aa, unidentified
MKTIIGIDWSEKKHCVHAYNETGAQLLRLEVATTADGFRELTCQISQLNPEPANCLVAIETAHNLLVDYLHDQGYTLYILAPSMVRSNRGRQGGSGAKDDDRDAQLLAEILRTDRGQLIPWQPDGPLVRQMRTLLTWVDQLTKSIVRQRNRLRANLLRFYPQALNAFGNLQTQFCLRFLAAFPSPASLEMLGYERFTAFCRQAGYYEYDRYPHIWHALSMEGFQQQDNPLFGQQVAWQAEGLLAMLLHKRRLIAQVQALFQQHPDAFIFASLPGAGDLLAPKLLVIFGDHRQRYPTRSWLPAIAGTAPVTVASGKSRFVKFRRACNHDYRQTAQQFAQSSIRKSAWAATYYYRASDRGLSKSHAYRCLANRWLHIIWSLWQSREAYDEAYHLSQVAKHRRKPD

SEQ ID NO: 217980 - protein, 348 aa, unidentified
MEHFVGLDVSVKATSVCVVDDGGKVILEQKVLTEPADIIALLTSLDVSFCRIGIEAGPLSQWLVNVLTAADLPVICVETRHMKALLTAQQINKTDRNDARGIAQMMRVGLFKPVHVKTLVAQKQRMLLTSRKLLQRKLLDLECELRGTLRNFGLKVGVVSGFRYEVRVRELVAGFPGLAAIAEPLLSVRRVMRQQFAVLHKMLLDVVRGDPVCRRLMTAPGVGAVVALTYRATVDQPQRFVHSRAVGAHVGLTPKRYQSGETDYDGGVSKCGDALLRTMLYEAAHSLLIHSRKWSWLKAWGVRVAQRRGMRRAIVAVARRLAVVLHRMWVDGSEFRWSKDSTAVPAIA

SEQ ID NO: 217981 - protein, 435 aa, unidentified
MELTHTHCAGLDVHKRTVVACCLTPGPHGELCSETRTFGTMTADLLTLADWLTGRAVTHVAMESPGEFWKPVYNLLEGAFTVLVVNAQHIRNVPGRKTDVKDAQWIADLLRHGLVRGSFIPPLPQRDLRDLTRQRTNLVQERATVTRRLQKVLEWANLKLAAVVTDVTGVSARQMLAAIIAGEGEVSTLAELAKGRLRSKRAELERALTGRVRDHHRFLLAQHLAHLDFLEEELALFDAQIVAHLQTAGPTPAAAPSPGAEGTALPPLGWEDAVALLDTIPGVGRGVAELIIAEIGTDMRRFPSSAHLASWAKLCPGNHESAGKRSSGATGHGNRWLRTGLVQAAHAAVRVQGTTLAATYRRLVARRGVKQAIIAIAHRLVTAIYYILLHHEPYRAPSPAVVDERRKAVLVHRMQRRIEQLGFAVTLQPVAAPAA

SEQ ID NO: 217982 - protein, 336 aa, unidentified
MYSGIDLHSNNSVVAVIDDADRVVAQKRLPNDITKIVGFLARWQDQLAGVVVESTYNWYWLIDGLQDAGMRVHLANTAAIKQYEGLKHSGDETDAQHLAHLLRLGILPTGTILPREHRVVRDLARKRMQLVQSCTTHVLAVENIMARQLGGRMTSNQIKRLTDDTIDSLPLAADVGLAIKANVAVIATLQSQIEVLEKRLQERVKPRPQYGLLTSVPGIGQTLATVIFLETGPIDRFADVGNFASYARCVDSVHTSNRKKKGEGNVKNGNKYLAWAFVEAANFARRFCPEAKRFHERKKARTNNIVATKALAHKLARACYHILKEGKPFDVTRCFA

SEQ ID NO: 217983 - protein, 344 aa, unidentified
MTIVEDPCVITGGVDTHADTHVAAALDSLGGLLGVREFPATAAGYADLLGWLGGFGTVALVGVEGTGSYGAGLARHLAAAGIRVVEVDRADRQDRHRQGKSDPLDAVSAARAALSGRAAGVPKGRDGAVEAIRALMVAKRSARAERTQAINQARALILTGPDELRARFAGKRAAALAEAVAALRPRPGDAADYSLRVALRELGRRVEFLDAQIGRLDDLIIPLVTARAPGLLSLYGIGPDTAALLLIAAGDRPERLRSEAAWAHMCAGAPIPASSGKTRRHRLNRGGNREANHALWRIVITRMSAHPATRAYLERRTAEGLSKKEIIRCLKRYVAREVYPYVRG

SEQ ID NO: 217984 - protein, 345 aa, unidentified
MELHTIGIDLGKTVFHLVGLNPRGEVVVRKKYSRAQLLRFTANRQVHLIGMEACGGAHFLGRALREQGHEVRLIPAQYVKPFVKTNKSDFIDAEAIAEAVGRPTMRFVPIKSDDQLDLQSLHRVRERWVMRRTAVINQIRGLLLERGTTVPKGRRHLEAALPEILEDAAGKLSATLHLLLAQLKLELDQLATRLEEAEALIQLTAQESEACRRLDAIPGIGPVTATALIAAIGNGAAFSKGREFAAWLGLVPREHSTGGRQKLLGISKRGNAYLRRLFVQGARAVLQQRGKQSTGLSAWLGQLAVRAHRNVVCVALANKLARIAWAVLATGQAYRPPAITAVAAA

SEQ ID NO: 217985 - protein, 420 aa, unidentified
MTTNTVNYAALVALDWGDQEHAFALQAGGQKQTGVICAAPESFHAWLGQLGQRFDHQPVALAIEAGRNAVVHALAAYPWLTVYPVHPATSERFRKAFTPSGAKSDLPDAEVLLTILDQHRGQLRAMNMDTPETRALGALTEIRRSAVDHRTQLGNELRSTLKLYFPQALELCGEDLWTDIALDFLERWPELALLQRVRPATLQSFYTAHNSRRQTVIAGRVALIQEARPLTLDRAVIEPAIAHVRLLTAMLRPLQKHLREIETKIDEAFAAHPEASLFAGLPGAGPAFAPRLLVAFGTDRSRYPEATNLQKYVGVAPVTERSGRQLWIHWRWNAPKFLRQTFVEWAGQTVPRSAWAKAYYLQQRRAGKAHQTILRALAFKWIRILWRCWQDRTPYDESRYIAALARQNSPLIKILQTTAA

SEQ ID NO: 217986 - protein, 353 aa, unidentified
MEITTIGLDIAKRVFQAHGVDASGKAVLRRKLQRAEVLAFFAGLPPCLVGIEACATAHYWAREIKALGHEVRLMPPSYVKPYVKRGKTDAADAEAICEAVTRPTMRFVPIKTAEQQAVLMLHRTRDLLVRQRTMLINSLRGHVEPRGSPDMAELGVIAPQGLSRVSDLVAALLGEDDVKLPVSARQALGSLASELEALGERVNGVEVAILAWHKNNEASRRLATIPGVGPITTSAIVATITDPSQFRSGRQLAAWIGLVPKQNSSGGKTRQVGISKQGDRYLRRLLVLGATAVIRHARTRTTVEAAWLKSLLERRPVRLASVAQANKTARIIWALLARGGIYGAPSSAQADAA

SEQ ID NO: 217987 - protein, 383 aa, unidentified
MSMTSASILYLGLDVHKDSVVCAVQDEVGPAPRQVDTVPYDLGRVKRYLDRLARDGAQLRCVYEASGAGYVLQRAIERWGYHCDICAPSLTPRRPGHQRKHNRYDATELARYYRNGELVLIAIPTEAEERTRDLVRCRATVQREVHRTRQWVLKFCRRRGLRYAPVGSKASHWTRAHRAWLEARRIDPTLAAEDQTVLGEYLTLMQYTEQRRDALDQQLGAMVLAPALAAAVETLAAFRGLDFHAALVLGSEVRDWRRFARATQLMAYLGLVPREHSSETERRGSITKAGNSYCRHVLVQAAWAYRHPPRVGRALHARQAGVDARVTGLAWKAQHRLHKLYKHVAAKRGGPIAVVAVARELVGFLWAAMTLPQAAVTTQSRAA

SEQ ID NO: 217988 - protein, 318 aa, unidentified
MNMNKTLPEAFVGVDVSKDFLDVYLHPVGKHFTVNNTERGLKSLMKKLLSYEINQVVCESSGGYEHLLLDRVEKAGYTLWHVDPKRIKSFIESEGVKFKTDKNDAKMIALFASQKHCTYQRVLLSDDQKALRELIDRKADLTKMLADEKRRFRHPRHRRFKTLIKKHIRFLERQIQDIDDQVEELIEKNDELDAKAKIIESVPGVGKASAAALLATMPELGMLGDKQAGALLGVAPYTHQSGQWIGKAFIRGGRSAARDALYMASLTASRFNAKLSIFYQRLIAAGKKPKVALIAVMRKLIVIINAMIKNDSEWDSDA

SEQ ID NO: 217989 - protein, 404 aa, unidentified
MARFYIGIDWADDHHDVHVTDDTGEMLDGFKVPHSYDGLEDLKMRLGNFSSNPGDILVAVESHQGLLIYALLEVGYLVYPINPKAMDRYRDRYRMSSSKSDPKDAMVLANILRTDLHLYRPLPMETTDDTRLRQLTRAHKSLIQQKAKLLNQLTIQLKSYYPVVLQLFCQLDQEVTLAFLERYPTPEKAAATSLEDLCSFFKGQRYTRPSKVNLIHGLLHRPALRAPKNLEEIHQTIVLSFVAVLRSLLLEIGKLAKEIGEEFKQNQAHEIFSSLPAGEITAARLNAELGSDGSRYASRAYVQTAAGTAPATRRSGKTLVILFRWQCNKHLRAAFQDLARQSVKRCLWARRYFANQIRLGHKSSRAYRALANRWAAIIWKMLQEQEPFNQARLEKRVPLVKTIT

SEQ ID NO: 217990 - protein, 351 aa, unidentified
MKYYKTTTKYNCGIDLHTRQMYICVMDRDGNILVHRNIRNNDFAFFLKLVEPYKDDLTVTCESCFVCFWLADACEDAGIKFVLAHAYYVRSIAMNKHKNDRMDSQELAECLRTNRIPPAYVCPRDLRPVRKLLRRRNKYVKNRAELTGHSTCEVMAAGNQPLTISTNSKERWREGVRSSFDNPVDSFTTEAELFIIESYDEIILKMEQRIEKHARDFRQQDYRLLRTAPGIGKILALTILYETIDIKRFLTVKDFISYCRLVAGTNESGGKDFGGKGRKMGNPYLKWAFMQAAILAKRSDPKINTYYQRLERKKGKHTANAIVAAKIARAVYFMLDRKTGFCVDQLIKGRR

SEQ ID NO: 217991 - protein, 371 aa, unidentified
MIVIGADTHKSSHTLAAVEAATGRVVASKTVDARREGMLAAWRWAHALDGERVWAIEDCRHVSGRLERCLIGQGERLVRVPPKLMGQSRRGERRPGKSDVIDAVAVARAALREGIESLPTAFLDAAAMEIRLLADHRDDLVAERTRHQNRLRWHLVELDSAFEATLPARSLDTHVWLDRIARRLAAMGQTARVRVARDELRRIRELTRSERALERELRGVIAAQRPDLLAEQGCGTITAATLIGRTAGAHRFPTDGHYARQAGAAPIPVSSGRRDRVRLNRGGDRQLNCALHRIAVTRARTCPQTRAYLHRKLAEGKTKPEAYRCLKRHLARRFWRLLRDGATAPTNQIPTTPTRRPTIDVNAPIPVACLT

SEQ ID NO: 217992 - protein, 353 aa, unidentified
MTIVADTYTYVVGVDTHAATHHYAVIETRTGAVLADAEFPTHTKALLRAADWIARRTGEHTDGDLARVLISIEGTRSYGAQLAMLLAQSGYRVVDAPSPKRERGSAKNDQIDAVIAARGSLHKHTDQLADARAGQTSATLQVLLTARNAMTNERTRAINALNALLRVHDLGIDARRKVDRTTIASITRWRTRKNDTALHTIARAEAIRLATRILALDEEAKSNEAALLQIVKTTAPTLLDLTGVGPVNAAIVLTAWSHPGRIRNEASFAKLAGVCPLEISSGRRHEHRLNRTGDRQLNRALHSIAKTRMQFDPTTRDYVARRTAQSLTKPRIRRCLKRYIARELYRHLAQATT

SEQ ID NO: 217993 - protein, 346 aa, unidentified
MQSYVGLDVSLRQTAVCVVDQAGKIMREGMIDSDPDTICNFIRTAAPNLARIGLETGATSTWLWTELKKRGLPVICIDARHAKAALKMQINKSDRNDAAGIARIMQTGWYKEVRVKDLDSHAVRALLASRALLVELKRDLENQIRGLLKNFGLVIGRSKMNTFTTRATELIDGRPELAAAIEPLLKARDALAGQIDGLDRNVLRLARSEPQVRRFMTVPGVGPITALCYLATIDDPARFKKSRSVGAYVGLTTRRYASGETDRTGRISKCGDGMLRSYLYEAANVLLTRVAKWSALKAWGMRIAKRRSMNKARVAVARKLAVILHRMWIDGTEFCWSKEENGMQPS

SEQ ID NO: 217994 - protein, 439 aa, unidentified
MTTSSLPVLDPTAAAIDVGSEQLHVSVAGGRPKVFGTTTGQLHELRDWLKTQGVRSVAMEVTGIYWLCPYEVLEQAGLQVVVVNGKYVKNLPGRKTDMSDCQWQATLHAHGLLKPGFVPPAHIRRLQDYLRVRTDHITMAGSHEQHMQKALDRMNLKIHDVISDLTGLSGLKMVDAIVKGERNPVALLALCDPQVQKNKAGQLRAALEGTWKEEHLFALRQAYELWQFYQQKIAECDQAIAKVLQEISGPEDPAKPAPLATKRGGVNAPQIGGLHSLLWRLCGHKDLTTLPGVADYVLLQLLAEVGTDLGKNWQTEKHFTAWLGLAPGSRQSGKRRGNQKRGRNRAGRLFCVIARSVGRSVDKALGGFYRRLKGRRGGLVANLALARKLAELFWRLMVHGFSYVEQGLNKYEEKVAQTEQRLLQKLAGKYNMVLQPKAA

SEQ ID NO: 217995 - protein, 317 aa, unidentified
MSNNSIICAGIDIGKRRLDVAVCGAKASLEVDNTSAGHEKLVTWLQRHKVERVGVEATGGYEQEVVRALRREGFPVVVFQPIQVRAYARFRLKLAKNDKIDASLIAACVASVDNVRAAPDPRFEAFAAAQTLIDQLTDDIVLYKTRLETARDEFSRAFWKGEIAGRKAQLRGVLKTLRTDMRAHTDIAAKLDLITSVEGIAEKTAIAVLIRMPEIGTLSREQVAALAGLAPYDDDSGRRAGSRHIQGGRTRLRSSLYAAAPPAAFFWNPQLITFYKRLRANGKTHKMALVACARKLLIFINTVVARATPWQPKPAAI

SEQ ID NO: 217996 - protein, 405 aa, unidentified
MKVFHQRCCGLDVHKKSITACSITPEGKEVRTFGTMTDDILELADWIESKGCKIVAMESTGVYWKPIYNLLELREIEVMVVNAQHIKNVPGRKTDVKDAEWIANLLQHGLLKSSYIPEREQRELRELTRYRRSLIEERAREVNRIQKILEGANIKLSSVASDVMGVSGRSMLAAIINGVDDPKLLSQLAKGKLKNKRDQLERALRGLIGPHQKMILSTQLSHIDFLDRQITMLDSEVAERMRPFEDDLELLDAITGIGRRTAEAFIAETGTDMSRFPTDAHISSWAGVAPGNNESAGKRKSGRARKGNKNLRKILIEAARAASRSKNTYLSAQYHRIAARRGSNRACVAVGHSILIIAYHILKDRTPYYELGANHYEKINEQATVKRAVKKLESLGFKVTLEGVA

SEQ ID NO: 217997 - protein, 339 aa, unidentified
MSTINQFFIGIDVSKLHFDAALMAVTNYQKQGIITCRFDNTASGLKAFGKWLKDHGVITEHTLLVMENTGIYHRLLWQFCGKQGIPVHIGNAAQIKWSLGITRGKDDITDSIRLCKYACKEADALKAAPALNPALIRLKDLQTSRTRLLSQLNSNLMYLRELKNLSEKTDQKLLEQAYKTAIEGIRKSIKAIEAQIKTIVNENADLKKNYVLLLSVPGIGHITAVYLLCCTCNFAAKPSGKQLACYAGLAPFAKRSGTSLKGKPKVHKMANKELKKLLHMGARSVIQHNPELRQYYERKINEGKHDLSVVNAIKNKIVLRVVAVVNNQRPYVDKTKIAA

SEQ ID NO: 217998 - protein, 343 aa, unidentified
MQVTTIGLDLAKHWFQVHGVDASGAVAVRKKLRRSEVLAFFHSLPPCLVGIEACATAHYWARELIALGHEVKLMPPAYVKAYVKRNKNDAADAEAICEAVGRPSMRFVPVKDTEQQSVLLLHRARNLLVRQRTMLVNALRAHMAEFGMIAPQGLRHVELLTRIVAHEQERLPELARQILQLIVDQLHETMARVRAIELRLTQWHRQSQVSRLLATVPGVGIMGASAIAATVADPSLFRSGREFAAWLGMTPRQNSSGGKERLGRTSKRGDKYIRSLLIAGAVAVLRHARNRPTRDGVWVRALLDRKPTKVAAVALANKTARIIWAVMMRGDGYRAKQVLGQPA

SEQ ID NO: 217999 - protein, 374 aa, unidentified
MVLVGRATRCGEAPVKVQRTSVGLDVHARSVVGCGLDGETGEVFQRRLCPDHREVLEWIKGLPAPVAVTYEAGPTGFGLARFLLAAGIMCLVAAPSKLQRPAGDRVKTDARDAAHLARLLHLGQITEVTIPTVVQEAARDLARARDDCRTDLMGARHRVSKLLLRQGIVYYGGQAWTGKHELWLRGQRFDNPALSMAFEAALDAMVACVHRRDRLDAAITVMADESEFTPVVRGLGCLRGISTLTAFGLAVEIGDWHRLTGRSIGAYLGLVPCEYSSGESRVQGGLTKTGNGHARRLLVEAAWHHRPHYRPSRDLRRRWEAAPAAAQERAHAANHRLHTRWAGFDQRKKRPVIANAAIARELAGWCWSLAVMHD

SEQ ID NO: 218000 - protein, 356 aa, unidentified
MSYDVKYIGMDVHKEAIVIAVQNESGKLVMESVIETKASSILQFLHGLRGELHVTWEEGTWAAWLYDLLQPHVQHIVVCNPRRNALLKEGSKSDKVDAGKLADLLRTGMLRPVYHGENGLRTLRELGRSYQTISKDLMRVMNRLKALYRGWGIPCAGTQVYAARAREQWLSKLPQAGVRRRAELLYQQLDGLQALRREVRPEFLAESRKHKAAKLLRQIPCIGPIRAARLIGLMQTPHRFRSKRQLWAYSGLGVETHDSAQYRFVSGQVQRSKKPQQVRGLNRNHNHEMKEIFKSAATRASCGKGAFRDFYAGLLAKGMKPEMARLTLARKIAAITLTLWKKEGRFDAEQLKTQAA

SEQ ID NO: 218001 - protein, 403 aa, unidentified
MNAVGIDVSKGKSMVAALRPFGEIVTKPFEVHHTSSDIHQLIDHLNAFEGDTRIIMEHTGRYYEPMARWLADAGFFVSTINPKLIKDYGNNTLRKVKTDKADAVKIARYALDNWQDLRQYTSMDIIRNQLKTMNRQFGFYMKQKTSYKNNLISLLDQTYPGINDLFDSPARSDGSQKWVDFVSSFWHVDCVRNLGLTTFTDRYQKWCKRHGYNFQPEKPAQIYSFSKELIAVFRKDPVTKLLVKQAVEQLNTVSFTVEQLRLEMNHLSAQLPEYQVVMDMKGVGPSLGPQLIAEIGDLSRFSHREALTAYAGVDPGTNQSGAYEAHSVRTSKRGSPQLRKTLFQVMDVLIKSAPSDDAVYRFMDKKRSEGKPYYVYMTAGANKFLRIYYGRVKEYLATLPKPE

SEQ ID NO: 218002 - protein, 346 aa, unidentified
MNQIIRIGMDTSKHIFQLHGVDSAERPVLRRKLRRSEMSMFFAELPPTIIGMEACAASHYWARKLRELGHEVKLIAPQHVKAYVKRNKNDGRDAEALCEAMSRPTMQFVPVKTEEQQAALMLMGVRQQLIARRTQLGNAIRGYAAEFGLITAKGIDKIEPLLARIARDKSLPELAREMFVIQGRDYARLQVELKTIEARLMAWHRANATSRRLAQIPGVGPICATALVMKAPDPHAFPSGRHFAAWMGLTPKDHSTAGKTRIGKITRAGDEMLRSVLVAGATAVIQQAKKGRGHPAPWLVDLLARKSPKLAAVALANKTARIAWKLLTTGESYNGARMPNASAVAA

SEQ ID NO: 218003 - protein, 357 aa, unidentified
MLSSNVKYIGLDVHKEAIAIAVVNGAGKLVMESIVETKSSTVLDFLHGLRGELHVTLEEGTWATWLYDVLKPHVREIVVCNPRRNALLKEGSKSDKIDARKLAELLRAGLLRAVYHGENGLQTLRELARCYLTISKDLKRVKNRLKALYHSWGICCAGKQVYAVRHREQWLSKIAQVGVHRRAELFYQQLDGLLVLRHAVYGELLAESRKHQAVKILRQVPSIGPLRSALLLALMQTPHRFRSKRQLWTYSGLAVVTHDSAQHRYVDGQLQRSKKPQQIRGLNQNHNHAMKEIFKGAALNASRCVGPLQDFYARLLAKGMKPDMARLTLARKIAAITLALWKKGGSFDAEHLKSQAA

SEQ ID NO: 218004 - protein, 308 aa, unidentified
MNATHITYVGLDIAKDSLLLHLQGRLHPLPHSPAGLRRLVRLLQATGQPLQVVCEATGGYEQPVLRTLHSAAIPVSVVQPARVRQFAKAAGLLAKTDTIDAQLLSRFGQTLQPRPTPPPTAQQEQLRQLCRARTDLVQEIQTVRNQALGYQEPLLRRLVAQRLRLLRRQCQQIEQAIARLLQDHPPLQQQHQRLCQVPGVGSTTAAVLLAELPELGQLNRRQIAALVGVAPYPKDSGSHQGRRHIRAGRPAVRKALYMAALSASRANPVLRARYQHLRAQNKPAKVALVALMRHLVIHLNSCLKNLAS

SEQ ID NO: 218005 - protein, 403 aa, unidentified
MNAVGIDVSKGKSMVAALQPGGKLLARPFEVLHTKSGIKELISFAHTLGGDTRIVMEHTGRYYEPLLQRLAASDLFVTAVNPKLIKDFGNNTLRKVKTDKADAKKIARYALDNWADLRQHTSMDTTRAQLKTLNRQFAFYMKQKTACKNNLIALIDQVYPGANTYFESPARADGSQKWVDYVCTFWHVDYVCAMRLSAFTERYRKWCHRHGYNFQPDKPRLLMEKAKDLIAMLPMDKTTKMLVQTSIAQLNVLSKTVEALRTQMIALAEQLPEYPVVIDMNGVGPTLASQLIAEIGDITRFPRRGSLTAFAGVDPGAKQSGTMQLKSNKTSKAGSPHLRRALFQIVSGLLMRSPDDAVYNFMDKKRSEGKPYYVYMTAGANKFLRIYYGRVNEYLANLSKEQE

SEQ ID NO: 218006 - protein, 343 aa, unidentified
MKLSRVGVDLAKNVYQLHGVDRHGKMVWKRRLRRSRWLQALLDKTDPGCEIGMEACTGAHHWARELQARGYTVRLIAPQFVKPYVKSNKNDANDAEAICEAMGRPHMRFVTVKSVEQQDIQATHRVRTELKDHRNAKANQIRGLVAEYGLVAPQTLLALRRAIPEWLEDAENGLTDNFRCLLHGLWDDLFTLDDRLKELDKEIEKLARSNEVTQRLQQLRGVGPLVATALVATVGTGEQFSKGRQMAAALGLTPRQSSSGDKRRLFGISKRGDVYLRTLLIHGARAVVSQAKHRHDPLSRWATNIAKRRHPNVAAVALANKTARMAWAMLQNDTDYDPALAVG

SEQ ID NO: 218007 - protein, 327 aa, unidentified
MKDAAGRVHQEGKIGSTRRELNCWIRTLPQPRTIAMEATIFTGWIYDHLLPHAEKVKVAHPLMLRAIAAAKKKNDKIDAVKIADCLRCDFLPECHMASTEIRNRRRTLRYRNLLIKQMVQMKNRVSGLLMETGVSYNKQRLHKVGYFAELMSTNEEVNESIRPLLKLGREMICRTQKLDYALVSSLERDPLLKERLRRLRTVPGVGPITALTWALEIGDVTRFTSIKQAISYCGLCGDEKSSADKIMRMPISKQRNKHIQRVLIEAAKLAVRESHELSVIRARELEKGNSNRATLAVARKTVCYMLAVERRNQDFVPAEKFSRTAAA

SEQ ID NO: 218008 - protein, 361 aa, unidentified
MDGSKDQPKMTAGLDLGDKYSYLCLIDQQSGEVIEEGRLRTTPEALRQRFSSEHSLRIAIEAGTHSPWVSRVLEECGHEVLVANARKLRLIYANKRKTDEIDAENLARLARLDPRLLYPLKHRGEDSQAHLAIIRSRQALVGCRTQLVNHVRGAVKSFGGRLPKCPARSFHKNAAERIPQVLWPALRPILETIASLTERIRDYERQLETISREHYPETELLRQVEGIGGLTALTFVLTLEDPYRFEKSRAVGAYLGLVPATDQSGDRDPQKHISKEGDEMLRKLLVGSAHYILGPFGSDSDLRRHGEKIASRGGKNAKKRAVVAVARKLSVLLHRLWVSGEIYDPLYNTHRRQEQKEEEAA

SEQ ID NO: 218009 - protein, 351 aa, unidentified
MHSDRHYVVGVDTHRDEHVLAVVVAPAGAVVARRAVAANARGYAQALRFADSYASGTRVWAVEGAGHYGAALARFLGGRGETVLEAGRSPRGERRLQRKDDGLDAIRAARAALGNDELGSPRAGQRREALRLLLVARRSAVDVRREALVQLRSVIVTSPDRLRDELCKLPVQRLLDRCSRLRRSKTATPDELAVRLVLRTLARRIEAATVEAAELEREILAHVRTLAPQLLDEPGVGPIVAAQLLVTWSHHGRVRSEAAFARLAGLAPVPASSGQTTRHRLSRGGDRQLNRALHTVILHRRQHDPRRRTTSPAASPKARVDATPPECSSATSPATSTGYCKTRNHLWLDKS

SEQ ID NO: 218010 - protein, 338 aa, unidentified
MELYAGIDLHSNNSVVTVLDEQDRTVFAKRLANDLTAIIAALRSCAGTVRGVAVESTYNWYWLVDGLQDAGFTVHLVNTAAVKQYDGLKHGGDFSDARHLAHLLRLGILPTGYIYPREQRAVRDLLRKRSQLVRQRSTQILSIGNLVARNLGTHAGGNEIKRWQREHVDAMPLLDEQKQALMANLAVMRCLDSQIDALERSILAKAKLREDYQALKTVSGIGEVLALTIALETGEVGRFDSPGHFASYARTVDSRRESNGKKKGEGNAKCGNKHLAWAFIEAAHFAVRYDAAIKRWYQKKCANGLAVVAIKAVAHKLARACWHVMKDGKAFEVTRAFG

SEQ ID NO: 218011 - protein, 379 aa, unidentified
MTTTIDTRDVCCVALELSKKIWVCAFAAPGDGKVIVHKFKAGDVDRLIGLLNSSRAKAEQQLGRTLEIVLCYEVGYDGFWLARLLIARGIRTVVFDPASFLMPRRGRRAKTDRLDAEGMTRTLRAWLGGDKEVARDVQIPSVEQEDAKRIERERKYLVEERIGIVGRIKGLLALHGIWLTGKRIGKGLRERLDTLKTGDGRPLAPFLRRDIERMLRHYDFVSEQIEEVVADRKAALADKRGHFPQAEKVQRLATLGGVGETSATVLVAEVYHRSFETRRHVASFIGLAPSPYKSGDVDRDRGISKAGTKLARQTLVELAWFWLRYQPRSKLALWWHERFADKGMRGRKVGIVALARKLAIALWRFVEEGVIPEGATLKV

SEQ ID NO: 218012 - protein, 349 aa, unidentified
MGQIQNAIDGLYAQYPGALVVVDQVRNIGSLALSRARLAGMPRAYLPGLAAHGASRLFAGDAKTDERDAMVIAKTALGIPDALLPVADRPPEIEAARSLAAQRDFLTCENTRSKNRLRSILLESCPEFEAHADLSDPATLKLMAAVGGPWSISEASPQAVGALTRGCGRAKVAALVESVGSSSRPHPAAVACEDRAVRLLARRISENAAEIESLTSEISALLSADETYRCLLTVPGIGPRTASELVISIDIADFPSHDRLASYCGLAPRNRRSGTSISSVSASRQGNKRLKNLLVFSCNCLARSRNRWGGYYARCRDRGMPHGKALKAVARKRLKVIYAIMRDKVPYSA

SEQ ID NO: 218013 - protein, 408 aa, unidentified
MQVTFGIDVSKSTSTVCELIGESKNELTITNNRPGFIQLLHELTAFSKHPQIIFEATGVYSRRLQAFLEDYGYEYVVINPLKAKKEMNMGLRYNKTDKTDAYHLALIQRLYRHPVNQSESQTYKQLNALSRFYDQLTSDLVIAKNRLHQALQSTFPEIENLFSSARGKNYWQIVVRYPHCDLVRREDKKQLINWLMSLKGIAFKHALRTADKLIELAYQAYQVVSCSSIEVEQVQYYAHRLLNLSDQRENLIARMVKLAKSLPNHDLENLESIPGFAQTTAVRVLAELGDLRRFSNPNKINAFIGIDPGRYQSGEMDSNLSITKHGNAVARKLLYRAIGQIDNAAKTNPCHIADYYESKKLSSQTKGFKKIAIASIHKLIRTIYALIINDQLYDYNVATHNQKDFSCN

SEQ ID NO: 218014 - protein, 344 aa, unidentified
MESMYYIGLDVHKRKISYCVKDGGGRLHAEGMISATRLDLDHWMKTLPQPWSAAMEATMFSGWIYDHRKPHAAALKVAHPLMLRAIAAAKRKNDRIDASKICDCLRCDFLPECYMASTAIRERRRTLRYRYLLVRQMVQMKIKISSLLMEAGVSYNKQRLHKAGYFRELLASNPDIDASLRSLLGQCRETVVRLGKIAGAMIRSLRHDHLLSERVERLMSIPGVGPITALTWALEIGDVQRFSSIKKAISYCGLCGAEKSTGNTVQRTPLSKQRNKHLQTTLIEAAKMAPRYSPTLSLLYDREKQRGNSNRATLTVARKLVAYLVAVDRGQTHFLVADREVCAA

SEQ ID NO: 218015 - protein, 368 aa, unidentified
MFEQAHYKVGCDAHKRYSVFAVCDGKGKVLDRVRVNHERGAIQGFLSQFPSGTPVALETVGNWYWIVDEIEVAGCVALLAHAGKAKAMMGHTHKTDKLDAEGLATLLHNGTLPTVWIPPGDLRDERELPRTRMALSKVRTMLKNRMHSTLAKYALSLDTESDIFSHKWRPQLLDLLRRLPGETQRCIHQELELLDQVQEQIHRLEARILERVQKTPTIQLIRSVPGPAEILSIVIDREVGSIDRFPSPKNFCGYAGTVPKVKGSGGKYHYGRMIKQANNYLKWAFIEAANVVVRQRQHPNWRNKHVVKLYERTRRRKGHAVAVGAVARYLAEATYWVLKKGEPYREPVPRRPVAAKSPISLRQGQTRA

SEQ ID NO: 218016 - protein, 346 aa, unidentified
MSYSTTVGVDLAKNVIQISVVSGRGKELCNRSLTRKKFAEFLCKQKPSLVAFESCATSHYWARAAKRHGHEARIIPAKAVAPFRQGHKTDSNDALAVAEAARRPKIKEAPMKTVEQQGLQAIHRSRELLIQECTALSNHLRGLLMEFGIVIPKGFASLMKAVPEILEDGENELPDLYRPTLHRMYTRLLELREDIEAMTKEVARLARAHPICSKLMALEGIGPIGALLLYATMGSGAAFSSGREFAAYLGLAPKQYSSGGKTNIVGLSKKIGNSRLRSVLILGARAYTYKLKEPKSSKDKWLKAIIDRNGESRAAIALANKNVRTAWAMVTQGTEYQRREQLPMAA

SEQ ID NO: 218017 - protein, 412 aa, unidentified
MKTVHTKRTGQAGRPWVGADRGVARVVPSLLPKSSNSCQGYPSPHLSQGRASLEQIKSIKEDCLLEAPLIFVGIDVSKAQLDVAIRPSAQSLSVTNDRAGIKSLIKHLKKLRPQLVVLEATGGLERQVLSALIAGEIPVVMANPRHIRDFAKSIGQLAKTDRIDASVIAHYAEAVRPKPRPLPDEASLELRALSARRRQVLDMIVAEKNRLATASKVVKKRITAHIAYLEQELNDADQDLDRFIEKNAAWKQNQQILCSTPSIGPVSSPTLLVELPELGALDRKKISALVGVAPFPRDSGTLKGRRTIWGGRASVRSALFMATVVATRFNPVIRDFYKRLKAKGKPSKVCLVACMHKLLTILNAMIKNKIRWSENLLTRPLDMKHSCYISGHRLRSARSCTGEFIPSADCGF

SEQ ID NO: 218018 - protein, 430 aa, unidentified
MEVIYPKACGVDVHKSFIVAVICDSTSVKPQYLRKRFSTFNNSLINFRNWLLANDCHNVCMESTGKYYVPVYNALEGHISNVVVPNPKWVACIKGEKDDNKDAKWIADLFKLGIVRSSFIPEKDIRILRELTRYLYKLTNMRTSEKNRFTNALTVGNCKLDMVFSDIFGKTSSAIINTILSQNEYNDKDILKNIDKHCKSSNEDILNSISGISWEDTQKQRMKVIQEHIDYLDKAIKAVREIIDSIIAPYESAITLLCSIPGIDRKSAITIISEIGTDMSQFSSHYRLASWAGLAPGCNESAGKKKSVKISRAGVYLKPALVEIAHCAVKDKNNPYYANKFNVLSKRRGKKRAYIAIARKILVAIYHMLSTGEFFNPSDASKVKTSDKDKIKFTKNNFMQSTKQLLSLGLTVDELQTFITSKISDLTPVV

SEQ ID NO: 218019 - protein, 370 aa, unidentified
MPFRIRRESPNSCLGHFVPRRGEPVSARTGLQQQGRRKLLDPTTTTTTTAPRLFAGVDVSKDRLDVCLRWSEPESREREEAFSVPYDDSGLDALLSRLLQEPTVLVILEATGGFERTVVGALAAAGLPVVVINPRQVRDFARATGRLAKTDRIDAAILARFAEAVRPAPKPLPDREIRALQAIVARRRQLLGMLAAENNRLSSAPKPVAKRIKAHTRWLEKELCRTERDLEAAIENSPALGEDEALLRSVPGVGPVLARTLLAGVPELGTLTHKRVAALVGVAPLNRDSGTLRGHRSVWGGRADVRAVLYMGALVAARRNPVVKEFYERLLAAGKPKKVALVACMRKLLSILNAILKHRTPWRPPHYLSP

SEQ ID NO: 218020 - protein, 391 aa, unidentified
MTKPKTKTVNDFSRCLDPLDMDATLIAVIEMSQSSWLVAGIVPGVERQPLKKLAIDEHALLGLLNRWRAEAEKNGHRITRIAVAFEAGHDGFWLARWLTAREVEAHVIHASSVAVTREHRRAKTDRLDTELLKRGFLGWLRGERGHCKMVAVPTLSEEDAKRPSRERETLVGEASRIITRIKSAFVRLGIRSFNPKLKAAAARLETLRTPEGEPIPPNTLAALKRDLERHRIVKKQIRELEQTRLENLAQAPATGPNVMVLLLARVIGIGVETADMLVREVLSRTMRDRRAVARYAGLTGSPDESGAKRREKGLARSGNARVRHGMIQLAWRFLLFQKDSALAQWYRQRTANAPSTRKPLIVTLARKLLKGLWRFARDGVVPEGVRLRPAA

SEQ ID NO: 218021 - protein, 414 aa, unidentified
MALPESAYYVGIDWGSAEHAVCVLAESGRVKTEFTITHTATGFAELARRLARLGDAEAVPVAIERPDGRLVDLLLEAGHPVVPVKSNAIKAWRDAEVLSGAKSDPGDAMVIAEYLRLRHHKLSAARPFTGRTKALRTVVRTRDDVVRLRVMATNMLSALLDAFWPGAKTLFADVESPIALDFLTHYPTPASAAALGEKRMAAFCAKHSYSGRRSPADLVRRLRSAPAGVTGESETEAGRDAVIALVTVLRTLGTVKKALDRSAGAHLGQHPDGRIFASLPRAGQVNAAQILAEWGDSRTAYDSPDAIAAFAGVAPVTKASGRMRGVSYRWACNKRLRRAVTTFADNSRHESAWAADIYQRARGRGLDHPHAVRVLARAWIRVIHRCWLNHEPYQPDRHGGLQRLTTPQPLAQAV

SEQ ID NO: 218022 - protein, 324 aa, unidentified
MSLNTPNLLGIDVAKAKLDCALLCAGKFRSKVIENTPNGFKTLQAWLDKYAPQQTLHVCMEATSTYWEAVALMLTAAGHTVSVVNPALVKAHGQSCGLRTKTDAVDARLLADFCREKRPPVWQPPSANELALRALVQRHQALVEMQTQEKNRLETAREVVGGSLREHLDWLDGELFRIERAIAKQIDDDPDLRGKRDLLDSIPGLGERSIATLLAYLGQAPRFDNARQFVAFAGLCPRLYESGSSVRGKPRMSKVGHAFLRRALYMPAMVTLYRTAWGRLYRERLAANGKAPKLIIGAMMRKLAQVAFGVLQSGKPFNSELHAA

SEQ ID NO: 218023 - protein, 425 aa, unidentified
MKTYILRDPNPVEPQKPTRTPRTRPVQSIAAPKPASGPVLFIGLDVHNDSIAVSLAPSDSSEVRRYGIIGGEHDDVLRLLKKLAAAHPGVALKCCYEAGPRGYPLCRCLRQHGAECLIVAPSKVPRQPGDRVKTDRRDADQLARLSRAGELTGIYVPDAQDEAVRDLIRARYQVQKPQHRARQQLKMFLLRQNIRYAGTKPWTQKHLHFLATVRLPFAEQQFVFQELVHVITAAGERLERYEKEIASVVETWRWWPVVKALMSLRGVALLTGATLVAELGDLQRFATAPQLMSYLGLCPSEHTSGTTRQQGGITKLGNGIARKAMIEAAWNNSRAPRVSRTVLARQEGLPKAVTEVSWNAQTRLHQRYKHLTGVGKKKSQVAAAALGRELAGFVWAIGRLVEPRPVKVEAQPAALYLRLCPAWQT

SEQ ID NO: 218024 - protein, 422 aa, unidentified
MTLLTGKDSTVLVTVGVDTHLDEHVAVALDHLGRHLGALSMPTTEAGYAKFLRWAKGIGELERVGIEGSGSFGAGLSRFLNKNGVEVLEVGRPKRRDQHRSGKSDPIDAELAARAVLSGTDIGETKGTEGRVEMIRVLRAARRSAVKARAQAANQLKAMLITAPEGLRAELCKLSTAKLVRKAASFRPGDAPGDVAAATKFALRSIAHRYLDLSAEIRELDGRLKRLVTETAPGLVAVHGIGVDTAATLLVAVGEDPNRLRSESAFAHMCGVAPIPASSGKVVRYRLNRRGNRDANRTLHVVAAERMSRDERTREYVVKRTSGQVQARDHAVSQAIHRPRGLPNPHPDRSSNGVVFVPLTSIGASIKYDWHGANRQAGADFRAPARWPGGFRRRRRSGCPVPFAAFLEPVRSSLEVGTEHQD

SEQ ID NO: 218025 - protein, 309 aa, unidentified
MDIVVGIDVSKDRLDVAVAPSGLTFEVANTQDGIDDLVSRLQPIAADVVALEATGGFETAAVAGLSAAGLAVVVVNPAQVRAYAHAIGRRAKTDAIDAAVIAAFVIATKPELRPLRDAETQALSALVARRRQIVQMIVAEENRAKMVLAKEAQKSIKRLLSALRRELESLDRDLDDHIRKSPVWRVRETLLTSVPGVGPATARTLLAEMPELGSLDRRQIASLAGLAPWTRQSGTWKGKSFIGGGRGKVRAVLFMAALVASHHNPVLKAFRDRLVAAGKPRIVAIVATMRKLLTILNAIIRDAKPWQNA

SEQ ID NO: 218026 - protein, 350 aa, unidentified
MEYIAFDSHKRYTFASVSEHTGNVLSSGRINHSRGAITEFLSAWKPGTEVAVETIGNWYWIVDEIEAAGMVPRLVHARRAKLMLGSVNKTDKLDCFGLNRLQRTGTLPTVWIPPGEIRDLRDLPRTRMVLTRQRGRLKNRVHATLAKYGITTEGATDAFGKRGRQELETKLPLLPPHSRFCVERLLEQLDEVQAQIELLEDRMKETFRTSQELELLQTLPGVGFILAVVILLEIGEVSRFPAASRLASYSGTTPRVHASGDKIRYGRMRKDVNRYLKWAFGEAANVICLNHRRSAVRHVSRLYLRIRQRKGHQKAVGAVARHLSEATYWILKKGEPYREPRWHTVSSTKG

SEQ ID NO: 218027 - protein, 325 aa, unidentified
MIQNEEKVESRIILGADVAKASIVVKQLRDGHPVCAGVKTIPNNAADITKALINLGQIDLIVCEVTGGYERQLLEAATKLSIPIHRADGARVKAFITSHGVRAKTDAIDAYGLALYGQDRFHSLQRWTPPDPKREELQSLVKHRQALMDQRTMATNRSKAPNSYHIADFLNAEISFINTQIDKIEQQIADLMKSDATIKAQEKRLRAIKGIGPVSAHTLIAMLPELGHATRKQIACLAGLAPHPAQSGNSFKKYPMTGGRDLIRRTLFMAALTASRCHPDLKHFYQNLLNNKKPKKLALAAVARKLVTIANAVLKPVHISHAQLT

SEQ ID NO: 218028 - protein, 422 aa, unidentified
MLEESLDDQQIIERVAALDIGKAELVCCVRLPGPGGSRRRLQEVITYSTMTPSLQVMAERLLDLGVTRVVMEATSDYWKPPFYLLEAHGLQTWLVNAKDVKHLPGRPKTDRLDAVWLCKVAERQMIRPSFVPPPPIRRLRDLTRYRAALVSDCTGEKNRVEKLLEDAQIKLSVVASDIFGVSGRDMMAALIAGQRDPKVLAQLARSRMRVKIPQLEEAFVGRFGEHHRFLLAKMLQRVDAISADIAEVDARIDAEIAPFADTVARLDQIPGVGVTAARVIIAEVGLDMSRFPTSSHLTSWAKFAPGIKESAGRKKGRGSTGHGNRYLASALGEAAVGSARTDTFLGERYRRLARRRGSKKAMVAVGRSILVIVWQLLSDPNAHFHDLGPDFYANRLGADRTKRNHIRQLEALGYKVTLEPAA

SEQ ID NO: 218029 - protein, 369 aa, unidentified
MKSIAHVGMDVHKESISVYALPEQGNEAIFEQRVVNDSLRVKKLFSKWSRSYDLRCCYEASGAGYVVQRWLSQIGVSCEVVAPSLIPRRPGDRIKTDRRDARKLARLYRAGELTPIRVPSEEDESLRSLVRCRETFAREARQSQQYILKFLRLRGIVWDGKSNWTKKHWEWLERLEFEGYDEIVWREYLNLAYYKLSRLSDLDTEIEKAAFSDGLKEQVSLLRCLRGIDTHSAMVILTEIGDFRRFSTPGQLMSYVGLVPSENSSGDIERRGRITKCGNARCRRVLVESAWKYAARPALGRALKLRQSGQPVEVIRQSWNAQHRLYKKFHSVAHRKERCKAAVAVARELVGFIWAIMTQQEAGTYAKAA

SEQ ID NO: 218030 - protein, 345 aa, unidentified
MIIGCDFHPSWQQIAWLDTETGETGEQRLVHAGGDAERFYRQLAVPALIGMEATGNSHWLVDLLSELGHELWVGDAGQIRASYVRQQKTDKRDAAHLLKLLVEGRFPRIWMPSSEVRDLRQLLLHRYKLVIIRARVKNELQHLCLNKGVQRKHKLWTKAGQQVLRELPLKPWARRRRDDLLGLMAMLDQQIEPLDQAVKEEAQRDKMALLLQTQPGVGPITALAYVLTMGDIRRFPRGKQVASYLGLIPREHSSGGRQHLGAISKQGNRMLRMLLVEAAQTAVRLDPQFRKEYLHRCHQKPKAVAKVAAARKLAVRLYWMLRTQQGYPEVVRIESSPRVGLVGEN

SEQ ID NO: 218031 - protein, 395 aa, unidentified
MSAEGEAIRSNDYRKDTTVKAPSTRPAAVLGLDVGKSSHWACLIDRDGEVLDSAPVRNREAELDALFASAPAGTLVVVDQFRNIGSLAVRRARAAGLGVAYLPGLAASRAAGLFAGEAKTDERDAAVIARTALGVPDSLSGVPGRGEALEAARALSSQRDHVVACATRDKNRLRAVLLESCPALEAAVDLSDRRWLELLAGFGGAWGIARSGAGGPRAEAAGEAAAASTAPPPALVEAENRQVRFLAARISEALDEAGALEAETAALLEGDETYACLLTVPGIGPRTAAQLAVSVDIGRFPDHDHLASYCGIAPRVRSSGTSVRSVRASRRGDARLKSLLVFSCNSLVRSSGRYGEYYRACRARGMGHGRALKAVARKRLRAIYAVMRDRVPYRE

SEQ ID NO: 218032 - protein, 389 aa, unidentified
MSKLFCGIDVAKFEHVASIYDPSTGEMILDSLHFDNNDKGFKTLLSSLSKLNKRCEILIGFESTGHYHQVLFNFLTSKKYKCFLINPYMTSKFRSISLRDAMNDDIDSRAIAKFLSFEYKSLIDQEFLSSELKELVNQRHFLIIESSKMKIKLKSYLDRTFPELESIVDINTAAIRAILKEYPTANSISEARIDKLKNLAKKASKGKYSLSKVEAVKEAAKTSIGIHSLSIGLNIIQCIETLDLKERQIDRIEKEIKEHPTVLDSPLHQLIGINDIEIGYIMSAIISITRFSSPEKIVAYAGLDPKVRQSGTWKANTTRMSKRGNKLLRYALIWTAFNMTRRPGPMKNYFALKKSQGKSHYNALGHCATKLCRYIFWILNHPDSNFEYQ

SEQ ID NO: 218033 - protein, 344 aa, unidentified
MTTIQHKETAHEAKPDLFAGIDVGAEELILVIRKNGKPFDPQKFANTPADRDRLVKKLVKLPGIIVCLEATGVYHFDLSLALHDADVLLMVVNPKASHNFAKVLMKNSKTDAVDANTLAEYAARMDFVAWTRPSDETIALRSFARRINALTGQKAAAKNHLHALNATSETPKAVLKDAKLAITQLEKRIDRLTAEALVLIGKHPKLKRILALLTGIKGVGETSAIALMGELLLLPPDLTHREWVKFAGLDPRAFDSGKSVHKKTRISKAGNRHIRAALYFPALSAKQHDKHVKAYFQHLMDNGKTPLQGVCAVMRKLLHAIHGMLKKDESFDNTRFYAIPESTG

SEQ ID NO: 218034 - protein, 410 aa, unidentified
MAYKVAGIDVHKKVLMVVVWDVSDRESEPQRRRFGTTTSELRQLSTWLREQGVQEAVMESTAQYWRPVWYELEPHMRLQLAQAFSNRAPRGRKHDFRDAERLIRRLVAGELTLSFVPEPEQRTWRTITRMKVQLSEDKSRLHSQLECLLEEMRIKLSSVISDLLGVSGYRILRALAGGETDPKKLAALGDDRLQCSEKQLIDALTGNPQPVHLQLLALYLDRHQMLVGQIAKLDGMIAQALKPHQEAVARLAVVPGLGADSAQQVIAEVGAEAGTFPSAAHLSAWVGTCPGRDESGEENHSSRSAKGNKYLRRVLNQAAHAAVKKKGSHFQAVFRRLLPRLGYKAAIWAVAHRLCRLVWKILHEGVTYVERGSEPDPSTKRRRAQKLVKTLRKLGYEVDLKPITAACAAA

SEQ ID NO: 218035 - protein, 319 aa, unidentified
MGQPVQHVIGIDVAKFSLDISGAGPLPAFTVNNAQPGFDFLVQKLDEINVSLILMEATGGLESGVAYYLQTKGYDVVVINPRQARDFARSMGYLAKTDRIDASVLAQLAQVIDRSPERARFVKPLPEITRQELTAIVVRRRQLNQMLVAERNRLYPSHPGSRESIGIIIDVLERELKRITQQMNQYVKAHFRHQADLLASVKGVGEATIATLLAELPELGKLTRREISALTGVAPFNRDSGKMRGKRTTFGGRGTVRATLYMAALTATRFNPIIKEFYLHLLSGGKAKKLALVACTRKLITILNAIVRDNQQWNTSFNK

SEQ ID NO: 218036 - protein, 388 aa, unidentified
MQSMNHDAGRVVIGGVDAHADSHHAAVIDDRGALLGSTSFAVSARGYVDLLAWLRSFGELDRVGVESTGSYAAGLTRHLLAESVEVLEVNQPHPHTRRLRGKSDAIDAELAARHALSRAHLVSPKQTTGIVESIRQLRVARESAIKSRSAAMVQLRDLVFTAPSDLREQLATRKSLTAKAALCRRLRPDTASIDQPISAAKFSLRSLARRIALLDDEIAELDAHLQPLVATAAPRTTALLGISTGHAGQMLVTGGQNIDRLKGEAAFAAICGASPIPACSGKRGRYRLNPGGDRQANRALHLIAVCRLRYCPRTRDYAARRTTEAKTQKEIMRCLKRYIARELYRNLKADLADLGAHHRPPARRQTLATSITCGAGFTGRRQRLASTP

SEQ ID NO: 218037 - protein, 436 aa, unidentified
MGNYAGVDWAAEKHDVVVQDEAGEELFAGSFAHDEQGLRSLCRTLVRLKVQLVAIERPDGLLVERLLDAGLRLLALHPNQVAAARPRFRAAGGKSDRFDAFVLCELARTDHHRFRVLEPDSDQTKALRALTRAREDLVRTKVALTHQLRAELERFWPGPIGLFKDLDSLISLAFLERYPSPLDAKSLGEKRLAAFLAHAGYSGRKPAGELLAKLRAAPENRAGQAELNTRRRVVAALVSTLKPLVAQIKELEREIAVAIREHPDGAIFLSLFKHPRSVITAAELLAEIGDCRGRYPTRDTLAADAGQAAVAIESGKRKKAAFRWACNKRLRDAFCTLADSTRHHNPWAQALYADARTRHEHSRAIRTVGRAWCRVVWQCWQNRTPYDPARHRRLQQHVLVTIPETSGPRPDTAATQRMLGDAVTRRAARKGRARSA

SEQ ID NO: 218038 - protein, 340 aa, unidentified
MPIVGGLDIHRKQITFDYLDTVTGQVQRGQVSPADRAHLRAWLARFAGREDVAFAVEGCTGWRYVAEELAAAGVTAHLAEPADTAFARGRKRHAKTDKTDCRHLRMLLAEGRLPECWIPPGRILECRALLETYHDLRREHTAWVQRIHAVLFHQGAPALGGGTLRGEQGLAALREVSAAGQLQVATALEVLEALEARLHELRHQLLDAARHLAGAKVLAERLYGVGPFAALALTCWLAGKDRFSSSRQAVRFAGLDVTVYSSDRKGPPGRLSRQGPPVLRWALYEAGKTHARASAPDHAYYAAVKDRCNGKRAALSEARKLLRQAHHILAELGDDALSAA

SEQ ID NO: 218039 - protein, 291 aa, unidentified
MEGKGVVGIDVSKAQLDVAFRPRGKRLVVANASRGITRLVTMLKNMAPRCVLLEATGGYELKLVERLSAGGLPVVVVNARQVREFARATGRLAKTDAIDAEILAHFAEAIEPEQRVMPDAQTRKLRAFLSRRRQLLMMIVAEGNRSIHAIDVVRRGIVQIVKCLKKQLAAVDRELEAFIRETPAWNAKAKLLRSVPGVGAVATATLLAELPELGRLDRRKVAALVGVAPFNRDSGALRGKRVIWGGRSPVGATLYMCTLRAITSNPNHPRLLSTPPCGREAFQSRNSSLHS

SEQ ID NO: 218040 - protein, 260 aa, unidentified
MENIALIGIDLGKNSFHIHCQDRRGKAVYRKKFTRPKLIEFLATCPATTIAMEACGGSHFMARKLEELGHSPKLISPQFVRPFVKSNKNDFVDAEAICEAASRPSMRFVQPRTESQQAMRALHRVRESLVQDKVKTTNQMHAFLLEFGISVPRGAAVISRLSTILEDNSLPLYLSQLLLKLQQHYHYLVEQIKDLESQLKRKLDEDEVGQRLLSIPCVGTLTASTISTEIGDGKQYASSRDFAAATGLVPRQGTVANSRW

SEQ ID NO: 218041 - protein, 351 aa, unidentified
MVHVGLDLSRTRLDVHVMDEAGAPLAVTTAVPDRDGLAVLADRVGGFGGPVYAAIESMNGARFVHDQLELAGWQVAIADAQKVKGLAPLACKTDKIDSWVLAELSRRDLVPAIWLPTPTVRAERKRARWRLHLVRHRTALKNRIHATLLAFGHPCPVSDLFGTGGRELLARLALPEPWAGDTAAALYLIDQLDEQIGECERALRKLGADHRYVPLLMTTPGIGWVLGYTIAAEIGDITRFASPTKLAGYTGLCPRVYQSGGKDHRGPLAKNGPKYLRWALIEAATHACRHPAYAAHYQRTKTRLGRQRGSKVARVEIARKLAEAIWHMLTKGEPFAPAGPTSASGCPTAHA

SEQ ID NO: 218042 - protein, 362 aa, unidentified
MSESIALVGLDVHRAQSVAAVLDPVTGELRVERLRGAADVVVPGFLQSLGRPVRAVYEAGPMGFALARAAIARGLDLRVIAPGSIPKAPGDRVKTDRRDATRLARLFAAGELSFVFVPSEEQERFRDLVRCIDDVRRDLMRARHRLSKFLLRRGEHFPGGRAWTTAHAQWLRTRSFDDVLSTAVLIDYSCAVDALVARRKALTCVLEEAVPHSSHALVIARLRCFRGIDTLTAAGLCAELSSFERFAKPTLLSGFLGIVPSEYTSDSKRVQGQITKAGSTHARRLLVEAAHHYRHRPAIGDTLAARQAGQDPRVIEIASRAQRRLYHRWTHLAAKRGKPTGNVAVAVARELAAFCWEAATLN

SEQ ID NO: 218043 - protein, 378 aa, unidentified
MNRIIKIGMDVHTTNYTLCIFEPSFEHDGTVHCITQVKPEIKKIIHVIEAFKKKHENEELNIVCGYEAGCLGYSLYHELKEKGVECVILAPTTMKTEKGGRKLKNDYRDAKMIAECLAYGGYSAVHVPTELDNSVKEFIRMRDDIKENLKRIKQQIIAFLTRNGKQFNGKNYWTKKHIDWINTISFSEPLLLDTLKEYMIEYNHLCDRVETLDKQIEEISVKEEYVEKVQQLQCLIGIKTHTALSLIVETSDFNRFKKGNMYSAYLGLIPGDDSSGGHENKLGITKAGNSHLRKLLVEAAQGYTRGKVGFKSKDLKARQEKCSSEVVAYADRANERLRRKYYRMILRGKKYNVAKTAIARELACFVWGIMTDHIDLCN

SEQ ID NO: 218044 - protein, 333 aa, unidentified
MEKKWFIGIDISKKTLDVVIYVPTKKHADETNYERFLNKEEGYKSLLCWLKKENMAKKRLVISMENTGIYSFDLCLFLEAASIDYCSFNPLHLKRSLGLVRGKNDRVDAERIAYFAYLHRDELSYSKLSGSSIIRLRDFAAERKRFVKQQAEYKGFLTDRKDCEMTSTIERAAHMVKILDEEIASVEEEMLQIINSDPSILRNYELLNSIKGIGTINAMNTIIHTNNFQAFETARQYACYLGIAPFEHSSGTSIKGKTRVYPTGAKLLKADLSQAANSAIVWDKEMKEYYERKRKEGKAYGVVLNAVKFKLVGRMFAVVKRGTPFVELMTYKK

SEQ ID NO: 218045 - protein, 383 aa, unidentified
MKSVCGLDVHKDSVYLCILSEFGELIEKVFGVLTYQLEEMRDLMLHHHVVEVSMESTSVYWIPIWRVLSPHFKLNLANPYFIKQLPGRKSDVKDAQWIAECTMKELIRGSFVPPEIIQQLRQYDRRIFDLNEEIIRKLSKLDAVLQRCNIRLSNYVSNVDSKSYKAVVRAISQGITAPEELVKRIHGRIINHHGIDVITASLKGVVSLAEIDMISQLRDELDMAEAHKEKCQARMLEICEREFPEELKRLQTIPGIKERAATSLIAEIGTDMNKFETANHLASWSGLKPRNDESNKKIKSRSITHGNVYLRKTIIECAWAASRTKDCFFSRFSYHQTQVRKKNKMKVLVAVARKMLIAVWHVLHDNTIYIDFTTDRKTSQTRG

SEQ ID NO: 218046 - protein, 346 aa, unidentified
MNSTTVAVDLAKNVFELAVADAEWRIVERHRLNRTRFARFFVHRAPCQVVMEACGSAHHWARRLVAEGHTVRLLPAHYVKPYVGRSKTDRADAAALIEAARSSQIRAVPIKTLEQQQLQSLHRLRSQWLSTRQRYLGTLRGILREFGIVIPLGPSVAKAQVGATLAAADSAIPEGLRPALAQMLQEIAPLEEKILSVERQLATLTRADERAQQLREIPGVGLLTSTALLSTVGDIQRFPSARHFACWLGLTPSERSSAERRRLGKISKQGDVYCRTLLVHGARSALLAAHRAQRAGKPLDRLRHWALNCERVRGHNKATVALANRLARIVWATWKYQRSFDGNWAA

SEQ ID NO: 218047 - protein, 343 aa, unidentified
MELYVGMDVSLKETSICVVDGKGEIVSEGTVISEPAAIAAFIKAKARNAVRIGLETGPTTTWLWHELRALGLPVICIDARHAKAALSMQINKSDRNDAVGLARIMQCGWYKEVQVKSLLCHEVRAVLNSRAQLVKIKRDLENQIRGLLKNLGLIIGKVGGNVFHRRAEELVGEHRLLQEAVRPLLGVREIVRREIAGLTRRLLAMARDNDESRRLMTVPGIGAINALAFCAAIDDPSRFRRSRNVGAYFGLTPRRHASGEVDWTGRISKCGDAMVRTYLFEAAGVLLTRVAQWCKLKAWGHRLWKRIGFKKAKIAVARKLAVILHRMWRDGTNFIWSSKEAAA

SEQ ID NO: 218048 - protein, 395 aa, unidentified
MNPLIYVGIDVAKQKHDCCILNAQGEVLQRIFTFTNDWSGFSKLQTAIQDAVTSQQDPSIKAGLEATGHYSENLLAFLRSIGIEPVVLNPLRVSLYRKALSLRKTKTDKVDAKCIAGLLMSDESNPVPPSYQTQELKVLTRHRLRLVSMRSKAKIQFSRLTDILFPELCTVCWSTTQKSMLALLKVLPGARKIAACRVDRLSAILTQASQGRYGRAKAETIKALAQQSIGRESEALSFELTQVIETIEFAQRKIDELDKVIHACVQTLQTPLISIPGISYCLASIILAEIGDISRFASPDKLLAFAGLEPSAYQSGNFTASRTPMTKRGSTYLRWALLQAARLVAMRCPEFKVYQARKRAQGKHYFVVLGHLAKKLVRVIFHILTTNECYRPQTA

SEQ ID NO: 218049 - protein, 406 aa, unidentified
MKPTYFLGIDAAKHKIRAALSDRSEHVLFEKDLSVRATGLRQLLAAIKRQVNAPEQLLVLIEATGLLHLNWSAALTKAGYAVAVINPLIARRLYTLQNSIRDNKSDPIDARGLCTIGLLHGEKLLIHYRFSLRPEQFTLQRAQSVRKALRSALTNLKKTYQSLMDLSFPELGGLLQLDGVGIRQLLIQAPTPAAIAGKRLFTLEKNWMVRPKAAALKALAADSMADPDLAAASAPALVALLRSIATLEARLRLLDQQIQQLARTNMDPQTKALIETIPGFGPVNAAKTLAWLPTEILHSGSNRKVAARLQAFMGNDPRLRQSGQWKGHTKMSKRGVEMLRTAFFQSAFSAAHNDPELRTYYQCKRAQGKTHEVALSHLMRILTRRLVAVLRSGKPYQSHYNLKNAA

SEQ ID NO: 218050 - protein, 428 aa, unidentified
MPADNLVDAAEDGVRITPVGKDVLVHLFAQKEGAYWAVLMEWTQPHYLKRPLKGQDGKLDHPKRGSEEGPVMKVTTIGIDLAKDVFGVHGDDGEGRVAFRKRVVRNRLLEFLSQLPPCLVGLEACSSAHYWARKIERLGHRVRLMSPRFVKPYRKSDKNDANDAEAICEAVTRPSMRFVPIKSEAQHEVQALHRVREQLLKSRTALVNQVRGLLAEHGIVAPQGIARARRLLLEILADPQRHGLSGLFRETLQEMAERLRFLDQHMAAYDDRIERVFKQDERCKRLAKIEGVGPLVATAVVAAVGNASEFKNGRELSAWLGLVPRQHSSGNRSQLLGISKRGDRYLRTILIHGARAALRRADRKRDQRSRWAMRIKLARGYNKAAVALANKNARIIWALLTRGENYRPSAISVASPTADRISLTQVQT

SEQ ID NO: 218051 - protein, 452 aa, unidentified
MAKKAKKIKTEKGMRLKIVNPDSAGIDIADKEIQVCVPEDRDGENNRRFGSFTCDLHEICSWLRACRISTVAMEATGVYWLNLYLLLKDSGMDVVLANPLQVKNLMDTKTDEADAEWLMLMHSYGMVKPCFQPENITRKIRNLTRHRSNLLESSAIEIQHMQKAMEMMNIKLSTVISDITGKSGQAIIRSIVAGNHDPAALSLLADGRCRASKETIAKSLEGTWDDDVLFMLGQSLEAYDFYQAQVEACNGKIEMLLMEYAAGIDTEGAEFVRTKKNIAPKNALTFDMEKYAFDIWGVNVRAIPGMNVGSMLQLVGELGHDFTEKFDTCRKFCKWCNIVPNNKISGGKLLSSHLPKRKNPVGQIFRMCANAVKAEKTEMGNYFRRIKARSGSAQAIVATAHKIARIFYTMVKNRQEYNPRLIGCDEKELLLRKIERAKKALFKLDQRLAEAS

SEQ ID NO: 218052 - protein, 364 aa, unidentified
MDVHLRSTTVCALDAETGEAVTRRFRGNPWGEVAEWMSGFPGPSLAAYESGYLGFAPQRELSALGVDCVVAAVSKVPRSAADLSSKNDRNDAARMAKAILSHDVTPVWVPSPEIEGLRDLAAAHDAATARLAAAKQRLLAFLARRGYAYGGTTPAGNPRRYWTYGFLRWLDGIHPDDDGGIRTLAALRNEVEAADETREALLAEYRAAVAAGPLSAEVEALQSIKGCGFALAAAFASEVGDFSRFRSGRQVTAYFGLAPKQRSSADSVRLGGISGAGNALVRKLAVEGSWCYAQAGHQPKLMPKGSGVPLEIRMHGRKGSERLLRRREEMLERGMPQAKANAATAAELVRWLWALGTMCREAGE

SEQ ID NO: 218053 - protein, 410 aa, unidentified
MLRIVYPICCGIDVHKNFIVACIASTDDKGVTSYRSSRFPTFTNGLRKLSDWLYSNYCTNVCMESTGKYWIPVYNILEDTCQVTLAHPKYVKAIRGKKTDKKDARWIADLFKHDLVAASFMPPFRIRQLRDLMRYRFKLTSFASSEKNRIQNCLTVSNIQLANVVSDTFGKSSMKIIDCLLENPDDKDFDFATLLHGSMLHKTDDIRLAMDGILTHEQQQKMNIILCHYNEVKKCKVNLESLILSLSEPYASKCSLVSTVPGIKNPFSVIAIISEIGADMSVFTTAKHLCSWAGLTPQNNESAGKKHSVRISRAGVYIKPLLVQCANAVVRSEKHPEIKGRYLSIRKRRGHKRAIIAIARMLLTAIYHILLKDEPYNSELYKKAEILPKTRNITVDQAVLLARRYGYSVA

SEQ ID NO: 218054 - protein, 415 aa, unidentified
MDAIYERCCGLDIHKRTVVACLIVPDSGRHSRKEIRTFGTMTDDLLALADWLAAQGVTHVAMESTGVFWKPLFNLLEDRFHLLLVNARDIKQVPGRKTDVKDCEWIADLLRHGLLRASFVPDRPQRELRELVRYRTTLVRERSAEVNRLQKTLEGANIKLASVASDPLGLSGREMLNALVDGSTDVASMAELARGKMRAKRGLLERALAGRMEAHQRFLLTEQLCHIDALDEGIERVSGEIAERMRPFAEALERLDTIPGIGQRMAEILVAEIGTDISRFPSAAHLASWAGMCPGNQESAGKRKTGRTRKGNVWLRAALIESAHSLGRGRGTYLAAQYRRLTARRGKKKAAVALGHSILVIVYHLLSRGEVYHDLGVQYFDEGRRERLERGLVQRLQNLGYKVTLEPTQPTTAAA

SEQ ID NO: 218055 - protein, 406 aa, unidentified
MRYYVGVDWADAADAVWVEDEQATKILSRSVAHAVEGFTEWGRWLDEQRAAGVELWAAIEKPDGRVVDLLLDHGVVVFAINPKASDRARDRFRASASKSDPFDARVLASFLRTDHHHLSPLRPSSEAAQELKGLTRDYARQVRQQTRLLNQLTATLKAYYPRALELSDDLKHEWVRAFLHDFPTPAAVAALTERQWSRWARGRRLSAERVGALGAALRAPQRPVPPHVERVHARRLGALLEQLDVTVRTVQVYREAITDFFARMPAATWATSLPGGRSGTTVPTLYAELGDAAGRWESFRHLQAHAGSVPVTDRSGKYAAVFFRVACNQHLRQASYQFAANSLAHSEWAKAYYDRCRTRGHRHHHAIRALAAKWLKILFVLWTRHPPYDETHHLATIARQQLRRAA

SEQ ID NO: 218056 - protein, 340 aa, unidentified
MQITTIGLDIAKNVFAVHGIDEAEKVVVRKQLRRGPVLAFFKALPPCLVGMEACATAHYWAREFTKLGHEVRLMPAKDVKAYVKRNKNDAADAEAICEAVRRPTMRFVRIKSAEQQGQLMQHRTRDLLMRQRTQVINALRAHLAELGIVAAQGDKGVKELLALVADKEDLPIDARASVIVLAAQLEATQTVIGAIEKRIKMQHRSNEASQRVETIPGIGVIGATAIAASVADPTVFRSGRDFAAWIGLVPRQDSTGGKQKLGPISKQGDRYLRRILVIGAVSVLRRAQENPGKYPWLTQLLARRPFKVVAVALANKMARMAWALLAHGGTYRAPELAEAA

SEQ ID NO: 218057 - protein, 415 aa, unidentified
MSLTDLPMSPRLAPTAGVDWATSNHVICVVDADGEPIDRATFVHTKAGIERLVARLARHGVHSVAIERPDGPVVDAISAAGLVIYVIPPAQIKALRRRYGSAGNKDDRFDAYVLADTLRTDRRRLTPLEQDSDATIALRQLCRARKDLVAYRIAVANQLRAHLSIALPAAVDLFAAIDSPISRKFLTRFTTQNALDWLTPARLAAWLKANRYSGRVDPCLLHQRIVEAARGATGVHGQTLAAITRAYVSTLATIMAQIDELEEQITTALNAHADKELFTTLPRGGTLRAARLIGEIGDARGRYPTAASLACLAGVAPSTRESGNHRVVSFRWAVDKQLRDAIYDFAGDSRRANPWAANLYNRARARGHDHPHAVRILGRAWIDIIWKCWTQRTPYDPAKHNALQLLLTQDQRTGG

SEQ ID NO: 218058 - protein, 407 aa, unidentified
MYYLGIDISKKSFTVSALDEEGEAITKFLTFPCTSKGFEKLVDKISSLKLKKSEVVIGIEATGNLWENLYSFLEGYKVIILNPYQTRKYHQVLSKKAKTDKVDSLVIAGLLRSKEALASYVPEEEVQVLRELVRLRHHLQKDKKNYLRKAYSLLNLVFPEYTDLVKSPFKKVSSMILKKYPTAIHMARARRTDLVKMARRIKGNNYSSELAEKLIQVAKESIYSGKASEVRGMALRIIIDEIQFLKNKIKDIENKIEEILSSDEPSSPQKRLLKISGVGPKTVAAFLGEVGGDVTRFSSANKLIGFIGWHPKISESGEKKNLHPKMSKKGPSALRASLYMAAVASLKHNPYLRSLYHRKISEGKESKQALICVGKKIISIMYSMLKYEADYDPQRIFFQLEKKRILI

SEQ ID NO: 218059 - protein, 353 aa, unidentified
MKYVGLDWAYRTAQWCALAPGGEIAGEGRIAADRDGLARLVLELGDEVTACLEMMSGALWVRDQLVDCGWQVEVADARKVKTVAPLAAKTDKVDARLLAELSRRELVPALWLPSLDERALRERLRRRMHLVRLRTSAKGRIFGLQTQWGVRVSLARLRRADGLTLLERAGVPEVWRRSVGECLALIDFLDARLELLDAELRPFAKADPRAALLDTIPGIAELLALTIAVEVGEISRFAGPEKLVSYGRLAPRVRQSGQARPRSGPLSKSGSRLLGWAAVEAAQQAWRESNPWHGLYLDVSARSGNRNSAKAAVARKILIAVWHMLSRNEPFNPAPRSTRGDSVPASSRLALAA

SEQ ID NO: 218060 - protein, 410 aa, unidentified
MNIAEIGLIVGLDWADCEHVCCLREPTAATGQVVRIGTAPEAFGPWLDSLRQQHDHGLIAVVLERPNGSVVEMIQDRAGFVVVAVNPATLHRFRQAFVPSGAKDDPGDAALLAELLVRHPEKMKHLLPADPQVRLLDTLTHQRRHLVEQRTKLIQQLTHLLKDYFPQALELAGSNLSAPLAVEFLRRWPELGSLKRSRWASVERFYRQHRCGRPAVLGQRRDLIAQAVPVSTDTSYLKLCRLQMETLVAQLVALTPLIERYDQEIAGTYAQVPGRAVIDSLPGAGPAMAPRLWVACAQAGAAPTAMDLAQISGIAPVQRQSGKSRQVCFRRARPHFLHQSWREFALHSIAGSFWAHHFYHSRAKAGQGRNAILRALAFKWTRIVARLWRDQLPYDETFYLAHLKTRPSAT

SEQ ID NO: 218061 - protein, 559 aa, unidentified
MAVLLIDCGMSTLKSLLPQAFAVSNIHPRPRKRLARCTLDCGFKTPESPALRGFVAGPRALATAALYLVIFSNGDISPQNTFKTGINALKSDDIISSCGQRISCFYLCSQVYCAQTGTSALWDVTYEPDVEAMDRFLLISQQVVTFSSTRNVRNLNMRGAYTMYIVGIDIAKRKHEAAVIDGEGAVIIKPFSFTNNCSGYNRLLAMLAKAKLPLDEVSFAMEATGHYWLALFTRLQKEGFRVQVINPVQTNSIRSFYIRQAKTDPRDALLIAEVIRFGHFSESTLHPENIYELRELCRGRHAIVSMQADVKRKAVALLDQVFPEYETAFTNMFSDTSMAILQTCPTPKELSEMPLEELCHLIEVSSHKRFRMAKARELQALARNSFDFAMVGDVFSTMIRLYAKHLDFLKQQVREMDRKIAEIMETLDTPITTITGIGPTLGAYILSEIGDISRFSSAAKLAAYAGIDPTMRQSGEYNGVRNRMSKRGSPYLRHAIWLAASSAVLHDPALKLYFQKKRDEGKPYMASVGHACRKMVSIIYAVMRDNKAYTPCIPNEISA

SEQ ID NO: 218062 - protein, 389 aa, unidentified
MPSVSERPEAPTAIQTHLAASFVSLELSRSIWLITSLSPGSGEKMSKHSVRAGDVAALLARFSELKRKASERTGKSFPIVVIQEAGLDGFWLHRVLQSEGVESHVVDPSSIATSRRRRRAKTDRIDGEALLRALLAYKRGEPRVCAMVKAPRPEEEDRRRLCRERKVLIAERVKHVNRVKGLLFSQGISGYEPLRRDRRQRLDELTTGDGRPLPVHLKTQIRRELDRLELLLDQIKEAEAERDALLAAPQPAAPAPAGRMLLEFKGIGAELAAVLWLEALFRHFDNRRQLASYAGLAPTPWQSGSVDHEQGVSKAGNPRLRTSLIQLAWLWLRHQPQSALTLWFKERVSGNGGHFKKSTIVALARKLLVALWKYVTAGVVIDGAVMKDA

SEQ ID NO: 218063 - protein, 367 aa, unidentified
MEKSSTVFAGMDVHQESIDITLAEPGGEVRRLGQIGGDRGSLRKMLRRQQSKGRKLVFVYEAGPCGFWIYREITALGHVCMVVSPSLIPRRAGDHVKTDRRDSERLASLARAGELEAIHVPDIRDEAIRDLVRGRDDAVIAQRRVRQQLKALLLRNDIRYVGRTSWTGAHRRWLSELKLPEPAQRIVFEEYVDAIVVATARIERLTRAIETEVAGWRFALGVGALQAMRGIQFVQAVTLIAELGDLTRFASARQLMGYLGLVPREDSSGEHRHQGSITKAGNSYARRALIEAAWAYRHPARVTRIIATRQTGIPKAVCDIAWRAQLRLSAKYRRMNARHVNHNKIVVALARELSGFVWAIGQSVKPQ

SEQ ID NO: 218064 - protein, 311 aa, unidentified
MSGFVGIDVSKTYLDLAVGKEGEVTRLGNEEKGISLMVTRLQEVQPDLIVVESTGGLERALITELFFAHLPVSLVNPGRVREFAKSIGQLAKTDKIDARLLAHFAQAVQPAKIILPNEQEQYLSALMTRRRQVIDMLIAEKNHLLSTPTRLRELVERNIDWLEKQLKELNVQIDDFVDHDPVFHTKNDILRTTPGVGPVLANILLSDLPELGRLNRKEIASLVGVAPFNRDSGMFRGKRRIKGGRANIRTVLYMATVAAIRWNPILKIFYNRLVAKGKVKKVALVACMRKFLTILNAMIRDMQPFHVALIS

SEQ ID NO: 218065 - protein, 377 aa, unidentified
MKKVRFLGLDVHAETITVAIAEPDGEVRSLGTIPNGEEAVRKLVKKWGPAEQLQACYEAGPTGYVLYWQLTGLGVKCEVVAPTLVPVKVGDRVKTDRRDAMKLARSYRAGDLTAVWVPDAAHEALRDLVRARESAKQDQLRARHRLSKFLLRQGRRAPLGVRPWTLRYMQWVREQVQFEQPAQDYTRLDYLHEVEHANDRVRRLEEAIGEAVKLVPVTMREVIQALQALRGIAQISAVTIVSELGPISRFAGARQLMAYSGAVPSEESTGQRIRRGAITKTGNAHLRRVVIEAAWAYRHRPAIGATLHQRQQGVCEEVKEIAWKAQHRLHKRYRSLAAAGKNQPKVVTALGRELLGFIWAIGVHVERDASPQHQWAA

SEQ ID NO: 218066 - protein, 410 aa, unidentified
MDLVRAELPARTLVVAIDPGKAKHRVLLADGERGLIEEPVSLSTQREGIERLCEMIARADAPETVIAIEATGSLHLPWVSELERRLPGQTRLFAPSETQAARTQLGSRRFKDDDRDCAALASLARQGRGRPVQGGTFDALLDAVRHRRRLIAGRIVARQHLHHQLNTLCPGLSAPAGHGKALGLETPTGQAVLACAVDFAGRAPAPRSLIARAPGRLSRATAGLWAERWRGCLAPPPDAELRAERLSRDIRRWRALEADIEALEEQIAGLLAQTPGQVLRTLPGVAATRAAAFAAHALPIERFPTAERLYSYTGLAPARYESSTIRKARAISRQAPGERRDALMGIAWGLSQHCDPFKERNRELRARGMRPIEARVALARHACRLCHRMLQTQQPFDEERYARTRHRRGR

SEQ ID NO: 218067 - protein, 353 aa, unidentified
MEYFAGVDTHKETHAVAIVDGVGKELEVFSIPASSAGYVNAMELTAKYAGLIWGVEGTGSYGRPFADALVRAGHTVFEVPGKLTKHYRGREKTDERDARAIAEAVLREREKLPRHIEADAEEATRLLYERRDRNVREQTAKINRIRALALRLELALPGDLSSVRALDAVKKTLQKYRTFGYTDSQVVDELGDLLSDLRLISKRIAELERRMRPFVKRLVPKLLELRGCSVISAAGLVGHTGSTLNYTDAHAFAAHAGAAPVKCSSGKYDSVRVSTGGNRQLNRCLHNIANTQMRTLNHAGETYYKRKRSEGKTHREAMRCLKRRLATVVFRILREEESRRRPTLTSIPIRTAA

SEQ ID NO: 218068 - protein, 362 aa, unidentified
MDVMYACCCGLDVHKKTVAACLMTSTEGPEPLKEMRTFRTMTADLLALADWLQEKGCTHVAMESTGVYWRPVSNLLEGQFALLVVNAQHSKAVPGRKTDGKDAAWIAELLRHGLWRGSFIPSKPQRQLRELTRYRSTLVQEHARTLNRLQAVLEDANLKLASVVTDISGVSARAMLAAILAGERDVEALADFARGRLRAKRDQLKEALEGRVTAHHSFLLTEPLSRLEYLDEAVARVSTEIDQRFTADQEAIALLDTIPGVGPRAAEILIAEIGTDMSRFPSAKHLASWAGMCPGNHESGGKRLHGKTRKGSRWLRQILVEIAHVASKTKNTYLAAQYRRIAARRGKKRALMAVGHTVLTIV

SEQ ID NO: 218069 - protein, 313 aa, unidentified
MDHDSAFVGIDVSKNKLDSFVSTTGQVEQFFNTPEDIQRLAKHLKAQMPVLVVLEATGGYERLAAAELCAAGLPVVVVNPRQVRDFAKATGRLAKTDALDAQVIAEFAQAVKPEIREMPDEHARELADLLTRRRQLIDMIVAEESRLKQAVFKALRRDIKAHIVWLQKRLKSTDDDLHEAIKASPAWKANYDLLREVSGVGNVLALSLLSMVPELGKVNRKQVAALVGVAPFNCDSGQYKGRRRIWGGRAEVRSVLYMAVLSSKRHNPVIERFYNHLLAAGKTKKVALVACMRKLLTILNAMVRDQKHFAEVA

SEQ ID NO: 218070 - protein, 343 aa, unidentified
MKLSRVGVDLAKNVYQLHGVDRHGKAVWKRRLRRGQWLQALIDKVEPGCEIGMEACTGAHHWARELQSRGYTVKLIAPQFVKPYVKSNKNDANDAEAICEAMSRPHMRFVTVKSIEQQDIQATHRVRSELKAHRNAKANQIRGLVAEYGLVAPQTLLALRRAIPAWLEDAENGLTDYFRSLLHGLWDDLLTLEDRLKELDKEIEKIARSNEVAKRLQQLRGVGPIVATALVATVGDGAQYRKGRQMAAALGLTPRQYSSGDKHRLYGISKRGDAYLRTQMIHGARAVVSQAKHRDDPLSRWVTDIAKRRHPNVAAVALANKTARMVWAMLRNETDYDPTVSTC

SEQ ID NO: 218071 - protein, 323 aa, unidentified
MQGQKSPERSAEPGVYVGVDVCKDWLDVYLHPIGQKFRAANTPEGLKALKRRIADLPVELIVMEATGKFHRQAHRTLHAAGLAVAVVNPLRARLFAEAVGQLAKTDRLDARVLALMGQTLEPSALAPAPEALEALQELARARASAKAEQTALSNRRGASRTAFLKAELGRRLKVLAAHIERLDAEIERRIGADAALKRRYDIVLTIPGVGPVAAVALVIGLPELGACSGKAAALLAGLAPLACDSGEKAGERHIRGGRAFVRTGLYLAALAAARFNPQLRDDYQRLRDAGKKAKVAIAAIMRKLVVLANVLIKEDRPWRPIHA

SEQ ID NO: 218072 - protein, 412 aa, unidentified
MKDLLEISCGLDVHKEKIVACILTGPLGKPTRSEIREFSTLIPDMIALRNWIVSKNCHHVAMESTGIYWMPIYEILEDAFSGDITLLVVNARHMKNVPGKKTDMRDSEWISTLLRAGLLNGSFIPEKRIREFRDLNRYRKSVIRDITSQKNRIEKFLQSSGFRLSSFISDIFGASGRNIILHLVEHGQIDKTALDSCLKTKTRNRIDEILMSVNGTLSEHQKAFLRILMTHYDSLKKHLAEIETSLEEDMAPFALQVEQLNSIYGISTTASCAIIAEIGIDMKPFKTAEHICSWAGLCPGNNESAGKRKSTSVTKGNPYIKSMLCEIAWVITGKRNTYLSAWYWRIKQKKGAKKAIVALARKLLVIIYTMLKQGTVFDESCFETRRKHCEQKQLSRYIRELEKHGYHVEAQS

SEQ ID NO: 218073 - protein, 417 aa, unidentified
MIRKVMEVIHQSVGGLDVHKKMVMACRRRLLGDGQVESEVLEFGTTTLQLRSLSKWLSEWGCSHVAMESTGVLWIPVWNVLEGDFKLLLTNARQLKKVPGRKKDVTDAEWVGQLMQCGLLKGSFVPSREVRHWRTLTRQRMKLIDQRTGVVNRMHKILQQGNIKLSSVATDVMGVSGRAMIQAMIEGESDPETLASLAKGRLKSKREELVESLEGRLNQDDRWVMKELWEQMEYLEEEIARYDDQIKEKMSPYEETLERLMTIDLIERRSAENILAEIGPDMSFFPSDDNLVSWAGLCPGSEESAKKNRSGKTPKGDQWLRRALVEPAWGAARRKDGYLGAMYRGIAVRRGEKRAVIAVARTILQAAWHVLSKGEKYKERGGDYFDRINSEQTKNKLIRRLERLGYEVELKPKPATV

SEQ ID NO: 218074 - protein, 417 aa, unidentified
MKSARDTLPVEPANGLTCGIDWARDDHAVSVVDARGRQILRLTVEHSAAGLRQLRDTLARHRVEEVAIERPDGPMVDALLDAGITVVVISPNQLKNLRGRYGSAGNKDDRFDAFVLADTLRTDRARLRPLTPDSPATAALRATCRARKDLVTHRVAVANQLREHLKRVFPGVVGLFADLDSPISLKFLRRFDSQDRADWLSTKRLAAWLTSVGYCGRVDPAVLHARLVAAPRGATGDQGAAAAHITRALLATLDTLVEQIKALTEQITEQLDTHTDAHIFTSLPRSGTVRAARLLAEIGDCRARFPTPESLACLAGVAPSTRQSGKMRAVGFRWACDKQLRDAVCDFAGDSRRANPWAADLYNRALARGHDHPHAVRILARAWLYIIWRCWHDGVAYDPTKHRALQALVRTQQQPAA

SEQ ID NO: 218075 - protein, 424 aa, unidentified
MKSINQFAATVGWDWADRKHDLWLRPAEGSKGEHLQLAQTPEAIHQWVAKLRERFQGQPVAICLETSRGPVVSALQAYDFIVFFPVNPKALKNYRAAFSVSGAKDDRSDAQLLEEYVRLHRDKLRALEPDTVETRTLAGLVETRRNLVDERTRLVEQLHSVLKIYYPLAEDLLGEQMTKVMAADFLARWPDLESLKRADANTLRSFFFKHNSRSHKTIEERLSAIAQATPLTTDPAIILPSSLRVLALAAMLKPLHRMIAKLDQQIEKTMDQHPDAHLFRSLPGAGPCLAPRLLVAFGTDRTRFESATEVAQFYGIAPIVRQSGTTKTVHFRHRCPKFGRQTFHENAGCTLREELWTHCFHTQYKHKHDDRYHQACRSLAYKLIRIYFACWKHPQPYDPQRYLQALQKNGSPLHKMLQKLTQEM

SEQ ID NO: 218076 - protein, 415 aa, unidentified
MEGAEKARELERYIGLDIHKEYALVGGQNGRQEWVLPARRVGMEKFREWAGANLREGDAVVIETTTNVWDIYDVVAPLATRTVVAHARGVRQIAEARVKTDRKDIERLIRLLIADIVPEVWVPPVEVRELRGMISYRNRLVKTSTMVRNRLQSLAHRHNLLLPKGALTDTGWWAGQKLSALEQIQIRQELALLEELGKHKAEVDAELGRQSLGAVWGKQAVRLLQLSGFGVVITMTVLSAIGDIARFESAKKLVGYAGLGAGVHDSGKEHIEKRITKSGRKELRWALVEAAWRAIRISPYWKEQYEKYLKRMRKPQQAIVVIARKLLVTVWHVLTKEEKDEHVSEEDLAYKMLVLSWDMDESARLGLTCKQFAKYALLKLGVETDITRFVRKDVPRRVASNAETLARMAELGLSL

SEQ ID NO: 218077 - protein, 359 aa, unidentified
MRIIGCDLHSRQQTLAMLDTATGEVVERTLKHEGNNVREFYSSLSRPVRVGIEATGSMQWFINLMEELGIECLVGHPTEIRAAEPRKQKHDRRDANLLLSLLVEERFPAIWLPTKELLDLRALLRHRHQWVCLRVKIQNALQAIALANGLRRGSSLWTQAGQHAIASLPLSPHASYRRNELQAMYMKFETEIEKLNQRVEEQACGRAGARLLMTHPGVGPITALATDVFLGDPARFDDSKALASYVGMIPGEYSSGKRQRLGALTKQGNPLLRFLWSEAAIHAVRRDPELKHFYHRKLIQKGLGKARAAVARKLGIRMWIMLRDRIEYHEFCRRGQMQQISGGALAGMPGPRYGAKVTG

SEQ ID NO: 218078 - protein, 467 aa, unidentified
MKPKRYQSPGKPRVSPMLLERINPHVAGIDCGSAEHFVAVPPDRDPVPVRAFSTFTDGLIQLADWLTACRITSVAMEATGVYWIPLYELLETRGFEVLLVNARHFKNVPGRKSDVSDCEWLRDLLSVGLLRGSFRPTAGIVALRTYLRHRQTLVETASTFIQRMQKALVEMNVQLPLVVSDITGATGLRILRDIVAGQRAPQHLAQHRDPRCRATETELIAALTGHYQPDHLFVLQQNLEGFDVCQTQIARCDATIEGHLRTLTTPVPAPAAPLPPSRSRRQTPKNNDLPFDVRTPLFQLTGGVDLTQIDGIAGQTALKLISEIGTDMTRWPTAKHFTSWLTLAPNNKITGGRVISSRTRRSANRAAAALRMAAMSLGRTQTALGAFYRRLAARLDKPQAITATARKLAVLVYRALKGELVYRDPGADHYDAQQRSRALRRLRQRARVLGFELVNSTTGEVLVAGVS

SEQ ID NO: 218079 - protein, 453 aa, unidentified
MKEKSMSMKVVNPHAAGIDVGSRSHFVAIGQDDDQVREFGAYNEDLNSLAQWLLAYDVKTVAMESTGTYWQNLYTVLQGAGLEVILCNGKFTKNIKGKKTDVQDCQWIQKLHTLGLLSGSFLPDEASEQLRTYCRHRTNLLGLAASTTHKMQKYLQLLNLRLDIVVKDVTGLTGLSIINAICNGESNPEKLASLRNGNCKKSEKEIAKALQSNGRKDYLFTLKQEYRLYLSLQEKIKECDQEIEKMLQEQINGDEEKEQHFIEKKVHKRVNKNTPKNIDINLLAYQYYEGVDLLAIEGVSHATILTLMSEIGTGINKFSTAKEFSSWLRLSPNIKISGGRVLSSKVAKGSNRLKIALRNAANAIGNLKDTALSNFFRRIAFRKGRVSAISATARKLAVIIWNMLVKKVPYKPETDYEFLDQKRKRKVMEMKKLIHKFDITPDDLGLQLNINNL

SEQ ID NO: 218080 - protein, 433 aa, unidentified
MEQVHDRVAGLDVHRDVVAACVRVAGPRGGVATEKERFQTTTVALERLGGWLADRQVSLVAMEATGVYWKPVYYALESRFEVWLCNAHHVKNVPGRKTDMSDAEWLADVAAHGMIRPSFVPPPPIRELRELTRYRKTQTDARAAEIQRLEKVLQDAGVKLTSVASKVLTQSGRLMVEALIDGQRDPAELANLAKGKLRPKIPELTEALAGHFGAHHAVAARRILDHVDFLDATIAALTEQIDARTEPFQAAKQLLSSVPGFDRLVIDTVIAETGADMSRFPSPGHLAKWAGVCPGNHESAGKRRRVGITPGNSWLRRALIEAARAAARTRGSYFGAQYRQIAKRRGPNKAAVAVAHSLSDLIWHQLTTGECFHDLGDDYFQRRRDPERETRRLVAQLEQLGFHVALTPSRDPAAKPLKTDNTSGCGPRSQPGT

SEQ ID NO: 218081 - protein, 468 aa, unidentified
MKQQNIYRNNNQALKETLASFKPEQLLYLPIEIGKFNHKTSIVNFFGDVIVKHFEFPNKLHGLDFFLNKLKAAVDSTGAKKIFIGCESTGHYHLNLVHHLKQLNLPVEIINPRDSKKENPNKNAKTDPIDLNAIARVLIANKGGRQVVPEGVYYNLQRATRTRRKFIKRRTSSQNIITGLVDRIFPGLWDKDKTIFSNNWGKASLLLLERFPHPDKIIQLGQKRLASFFRKNNTKLGDETAAKVIAAAKDALTKPISELNMDIFALKSHIRCLHLYESTINELEQEIACLLIQTPGTYLLSVDGISDTFAAEFTAEVGDVNRFAYANQIISFAGTCPRIFQSAEYNAGGLPISGRGSKFLRSSLNQIALSLNAWCEPFHLYYTDKSIQKADKPGIARVATGNKFVKLAFALMKHEQLYRPKGIIPDNYYSVAFNKITRKLAKFDFSSINPNCNFLLKIKKQIEGDTKI

SEQ ID NO: 218082 - protein, 368 aa, unidentified
MNAAGIDVSSRKSTVAVLRPFGEVVRIPFEVSHSAEGLASLVQQLKAIEGETRVVMEHTGRYYEAVANVLHEAGFFVSAVNPLLIKEYGGNSLRKVKTDKADAVKIARYALDNWANLRDYTPMDRIRYDLKTLNRQFHLASKQKTATSNNLIALLEQSFSGVRKCFDSPVRRDGTQKWVDFAHDFWHADCVRKYSLAAFTERYRKWCKRHGYHFRQGTAQRVYDLAKSVVVLVPKSDLTKVLIQEAANQLTTISKSVETYRAEMDRLASLLPEYPVVMGMYGVGDSLGPQLMAEIGDVRRFERKQSLVAFAGVDPMPNQSGEKNVRSNKSSKRGSPYLRKALFNVMICYLQKAPADEPVFQFLDRKRA

SEQ ID NO: 218083 - protein, 389 aa, unidentified
MYFVGIDIAKYKHDCFITTETGNVILNDLTFSNTRDGFNELLSVLASLDHNQEIRIGFEATGHYALNLKLFLEETHYSFMEFNAVLLSKFNHSQTLRKTKTDAIDCASIARWLMTVEYKPYSNGFYHMYSLKSLTRLRDSLVRQRSFYLVKITNVLDHTFPEFKPFFNNKFSKTAFFILRKYTSAGRIASLNSRSYNDLHKISRGKFSLQKFIKLKELAKNTVGASNSIFESELTTLLSLHQNLDSEICKLESEIVSLVTVLKRPTMTIPGIGPLSAAIILSEYGDVRRFSGPAAMLSFAGLEPGCYQSGISSHTGHMVKRGSSILRYTLMNCCLPLILHNLTFAEFYHKKRLEGKPHRVALSHVAKKLIRVIYTLETNNISFDSAKLI

SEQ ID NO: 218084 - protein, 375 aa, unidentified
MNYNTVYVGMDVHKESFTLCCMTLEMEKAKYTMKTGADYKKILVYLDTMRGKFYGEDTHFICGYEAGCLGYTLYHQLTAANVECIILAPSTMSVEGGKGKKRIKTDKRDAENIAKCLAHRLYSPVHIPTDEELQIKEYVRMRDDHKHQLKSIKQQILSFCLRHNLKCDTSKSNWTIAHLKWLRSLQIEPLYKEILSEYLTTYDQLTDKIGRFDKRIEQLAQGDNYRENVEHLRCFIGIETHTALSIVAEVGDFKRFTDAGKFASYLGLTPGEDSSGDTRNRLGITKAGNRHLRRLLTEAAQCYARGSAGHKSKKLKARQSGNPTEVIAYADKANERLRRKYYKMVLNGKNRNTAKTAIARELACFVWGMMTNNIA

SEQ ID NO: 218085 - protein, 338 aa, unidentified
MKVYAGIDLHSSNNYLGIIDDNDKRLYGRRMSNDLNRVLIALEPFRDRLEGVVVESTYNWYWLVDGLQAHGYNVHLANPSAIKQYEGLKHTDDKWDSFWLAHMYRLNILPEGYIYPKAHRPIRDLLRRRLLFVRQRTSQILSLQSMVTRNLGFKISNNNIKKLKVKDAQGLFDSSNLAFMAGNSIATIEFLKKIIKGIESRVKSQVKLRKEFMLLQTIPGIGNILALTIMLEIGDINRCKKVGNYASYCRCVKSQRLSDGKKKGENNKKNGNKYLAWAYVEAANFAVRHNAKAQRFYQRKKAKTNGIVAIKALSNKISRASYYIMRDQVPFDEKMLFG

SEQ ID NO: 218086 - protein, 354 aa, unidentified
MKTYYVGMDVHRASIWIVVLNGAGKLVMQSVIETGAERVRGYLKQLRGKVYVTFEEGTQATWLHDIVRPLVTEVVVCDPRHNKLLQSGNKNDRVDAQKLAELLRNGALKAVYHGDHGMRTLKELVRNYDCLVSDSTRVMLRLKAIYRGRAISCAGHDIYRSDRRAQWLEKLREPGARQRASFLYAQLAALKPLRHEAKLVMVKEVRRQAAYPWLMSVPQLGSVSVAQLMAVVGTPHRFRTKRQFWPYVGLAVVTRSSADHEIVNGVLRRSRRPIATRGLNRNHNHLLKKVFKSAATSACHSGPFKAGYDARVAQGMDPSLARLTIARQLAAITLAVWKRGEKFNMQMMNQQLAA

SEQ ID NO: 218087 - protein, 358 aa, unidentified
MESKSKELDFQGQNIYAGIDAHLKNWRVTIMLEHTTYKTFSMDPDEEILHNYLHRNFPGGTYLSAYEAGFCGFSIHRKLEKKGIKNIVVNPADIPTTDKERKQKEDKRDSRKIARSLRNDELEAIYVPSKATEELRGLVRYRKTLVKEISRDKTRIKSFLHYHGIKIPQELDTASRYWSSNFSKWLETIRLTTDFGHIILSSTLDTVNHLRSNLLKINNELKEIAKSKVYSDTLRYLTSIPGIGLIVAMTIISELENIKRFKSLDKLCSFIGLVPTTKSSSDSERIGGVTPRSNKPLRSVLVESAWIAIRNDPALALAYSNLCKRMKPSKAIIRISKKLLSRIRYVLINETEYKYEII

SEQ ID NO: 218088 - protein, 430 aa, unidentified
MKSNTQNAKIEAITEKTLVLGIDVGSETHYARAFDYRGIEYSKKPFKFSNTEAGFVTFKEWILDLKERHEKDKVVSGMESTGHYWFNLGKFLQDNEMKPVLVNPHHVKKSKELDDNNPTKNDRKDPKVIAGLVREGRYMIPYLPDGVYADLRTASNIRFQLQAELTRIQNRISRWFNIYFPEYKTVYGKPDAKSGMLILKAAPLPEDILTLGIDGVNQIWRDAKLRAVGKARAKTLIEAAEHSVGSKEGAVSARMEIRMLLEKYKSRNTRLQEVMLLIEELVRKIPMAEKLLEIKGVGIRTVSGFLAEVGDISRFNNPKELQKLAGLALIENSSGKHKGETTISRRGRKRLRYLLFEVAMSLVAKNPEFRELHNYYTTIRQNPLKKMQSLMAIAAKLIRVFYAMLTKGVDYDPKKMVSDIKRPAVYLQAA

SEQ ID NO: 218089 - protein, 350 aa, unidentified
MIAINKDIIATIGVDLGKNTFHICAMNDKGTILLRERLTRAGLPKRLANIPPCRIGMEACAGSHHIGRQLTALGHDVRLMPAKYVKPFLKSHKNDYRDAEAIAEAVQRPTMRFVPFKSDEQLDLQALHRVRSRLVGQRTAVINQIRAFLLEHGVAVRQGPGALRLALPSILAQRTDVLSPRIIHLIEGLTGDWRRFDERIADVTREIEQLAKQDQYCKGLMGVPGVGPMTASAMVAAIGDGAAFSRGRDFAAWLGLVPKQISTGDRTILGGISRRGNRYLRTLFIQGARSVLQRSDGWEKKSFGRWLIAASKRLHKNVLAAALANKLARIAWAVLYNAREYDTALAPKVT

SEQ ID NO: 218090 - protein, 338 aa, unidentified
MELSVIGMDIAKNVFQLHCVDRQTGEIERIKLRRNEVLPYFARRTPALVAMEACGGAHWWARQLQQLGHTVRLLPAKAVRPFVLRNKTDAADARAIWTAVQQPEMKTVAIKTEYQQSILALHRMRAQLLKFRHMQTNAIRGLLLEFGHPLPESDLALRKAFPTVMATLDKQLPGILIETLREQWARVQSLDNEIALIEGRLKRALAETPTCQMISDIPGVGLMTATAAVATMGDPASFKTGREFAAWLGLVPRQTGTGGRIRQLGISKRGDAYLRTLLMHGARAIIARRTYSDWVAGLIARRPYSVVIAAIANKLARTIWAVLATGKRYDGAAFAAAI

SEQ ID NO: 218091 - protein, 432 aa, unidentified
MKHKLKQKQNQRITRITEKTLVVGADIAKKIHVARAVDFRGIELGKDCVFHNDQEGLTKLASWMKELGRIHEKTDIVFGIEPTGHYWFPLAAFLKEQGIQVVVVNPHHVNKSKELEDNSQTKSDYKDAKVIADLIRNGKYSEPNLPTKEYAELRILMNFREKIAVSLNQVKARITGWTDRYFPEYPKVFKDWEGKASLMTLRQFPTPGEIVTAGARGVLTHWKTEIKQGIGIKRAEQLHAAATVSIGLTEGVTAAKIELAALLEQYDLYGKQEENIMAGVLQILEKIPGTKQMLSIPGVGVLTVAGFLAEVGDLNNYDHGQQIIRLAGLNLTENSSGKRKGKTGISKRGRSRLRGILFRAMLPMVAKNEEFKALHKYYTTRNQNPLKKKQSIIALCGKLVRVLYALGTKQKAYNAIDVLGPIKQAQLAKHAA

SEQ ID NO: 218092 - protein, 393 aa, unidentified
MEIRYFCGIDVSKNSFSVAVKNGQFLIKNKSFSMDKEGFRGFEELILSYKDNLIAGMEATGIYHQNLFNFLKKRRYNSCVVDPYRVSKFFKFRSNKPTKTDRKDSKTISEFLEEEVKNNPSLLQEKQDERFNLRYLVREKERVTCQIVKTKTEIRRIVSLVFPELEAKTSIFSKEILDILYEFGSADRIRKLTFKEFINRAQVYIPNGKGRKVSMRKEEIYKLAKDSISFSYPAYEKLLKIKIKRLKNLMEERKEIEEIIKKEADKLFRREIEILTSIPGIAKESAIYFMAEVVDIKRFPNKAKLIGFCGLDPVIKQSGNYKGDFKISKRGNSHTRRIAFIMAGCVKRSCPQFREYYLKKRKEGKSYKEAVIATSTKLLRTIYSLLKENRLFK

SEQ ID NO: 218093 - protein, 354 aa, unidentified
MGTSGLYQLDVHKESISIAVRNSIGKIVMECVIETKASTILQFINGLCGDLRVTFEEGTWATWLYDLLKPHVTEVLVCNTRKNASRNGSKSDRIDARKLSEQLYMNNIKSVYHGEHGLRTLKELARSYLTISKDLTRVMNRLKAWYRSWGIPCAGKEVYAPRHRAEWLAKISEAGVRRRAEHYYQQLDVLRPLHQEARRDLLLEAKKHKPWKLLRLIPGIGPIRAAIVIAVMQTPHRFRTKRHLWTYSGLALETHDSAQYRVAEGQLERSRKPATVRGLNKDYNHDLKDIFKGSAMRASTAAGPMHDFYEALLAKGRKPTMARLTLARKIAAIALIVWKKEVRFDANYLKPQAA

SEQ ID NO: 218094 - protein, 353 aa, unidentified
MREQRSLMQIVGCDFHPSFQQVAILDVSTGEVRELKLLHATGEAERFYRELEPPVLIGMESTGNSLWFERLMERLGHELWVGDGAQIRASYVRRQKTDKRDAAHILQLLVEKRFPRIWVPSSQERDQRQLLLHRHRLVQMRTRVKTELQHLAMNQGLQQKRRLWSVRGRADLEKLPLDGWTGRRRLDLLKVLDMLEAQVADLDEAVGKVAFSNADARLLMTQPGVGPITALAFVVTIGDVARFKRGKQVASYLGLIPSEHSSGHKRRLGAISKQGNVFLRTMLVEAAQSAVRHDEEFKKEYAHRCHQKPTGVAKVAAARKLAVRLYWMLRTQTPFPQVVHNEGSPSHSLVGQG

SEQ ID NO: 218095 - protein, 426 aa, unidentified
MSNKLVAGIDISKAFSDICILSPENEIIVHTKINNDYEGMKSIDLTFKKLETDYNTQLVVIMEATAHYHQLLANFFRKLDYEIIVINPIQSNAIKNINIRKVKSDKTDAYNIALLYRLKNYSETETHADIIISIKKLCRQHKELTDEIVEHINRLTGFLDTSFPDFRKVFTDLQGKTALTILAEYPTVTAILDPELDKAKIINQIKTISHKSESYAIKKYDKLYQAARNSSKICISNLSTSILIQTTIAVIFSLQEALRAIDDEISRLSIVDEQFQINVKLLQTIPGIGEYTACVLLSEIGNIENFSKPKQLVAFFGLDPGVSQSGSYNRKNNKISKRGSPYVRTILHMLAKANVYSNRNREYPNPVMRDYFEKKIVDKPYKVVMCAVMRKMVQIIFAVLRDQKPFELRTPDDHQNMIRLNNKQAA

SEQ ID NO: 218096 - protein, 370 aa, unidentified
MKKNSSQKQNSGKSNPQREKEGFASYIGIDLGDKYCDVCVLDGQGEVHEQFRLRMKGPELEGYFTSIRRSRVAVEAGGQSRWVAEVIQRCGHEVYVSNTRKVAYIHQSDDKNDPGDAYKLAELVHFKPRLLHPIQHRSLEAQADLSWIRAREVLVESRTQLVNAVRGMSKAFGERLAKCSVESFTAKMAGQVPEAIRKAMAPLLETIDHLNEQIYYYDLMEAHMARERYPKYWLLEQVNGVGVHTALAFMLTIGDAERFAKSRQVGCFLGMRPKKQESGESKPQLGITKAGDVYLRKTLVNCAHYILGPHGKDSDLRRFGLRLCARGGKNAKKRAVVAVARKLAVLLHRLWVSGEVYEPLRNSKAREVAA

SEQ ID NO: 218097 - protein, 323 aa, unidentified
MQSTPVFVGVDVSKARLDAAATGSDETWSVSNTASGIAQLLKRLQELGPALVVMEATGGFEVPAAAALAAVEIPVVIVNPRQVRDFARSTGQLAKTDTIDAQMLALFGERIRPPVRALPTEEARALDAIVGRRRQIIDMITAEKNRLGFALPAVEKGIKKHVRWLERQLEGVDSDLDGLIRASPVWRAKSDLLRDVPGVGPNLARTLIAELPELGRLSNKEIAALVGVAPLARDSGIFRGKRMIWGGRASVRSALYMSILSATKWNPVVRVFYLRLRAQGKPPKVAMVACMRKLLTILNAMVRDGREWDPSIPLDQLRLQHSC

SEQ ID NO: 218098 - protein, 363 aa, unidentified
MKTANQNTNAQADGASVVSKPHQCIKLGLDVHADSIRVVRMIDGATPQPAQKMTPDEFPAWAVKQLALADKVCSCYEAGPLGYGLHRKLTAAGIENIVIRPLVLDEYRKRVKTDKTDALALAKRLDAYVRGNRKAFAVVRVPTEQEERERTLSRQREQLVREVRRVRGQGRSLMLFHGVRVKGVWWRWHWNRVTEKLPAWLVERLEVFRAVLQVLDQQIRKLTLTLEAQAPAARPRGLGPLGFEVIRREIGDWNRFANRRQIGSYTGLCSGVSSSGRSRKMLSINKCGNPRLRSSLVTLAWRLVQYQPRCLLIQKWKHILLNAQSASSARKRAIVAVARQLAVDLWRWQTGRVQPAQLGWQMG

SEQ ID NO: 218099 - protein, 430 aa, unidentified
MVLSETRGLWLSSIVRGGIGLHRRLQVDGEYDFTRRIFGSLPEALRSLAAWLLEQQVQEVVMESTAQYWKPVWGTLERYWKQICQTREGALATSGTLHLAQAQSNRGRRGRKKDFRDAERLVKRLVAHELVLSFVPDVEQRLWRTVVRTKYQLTRNRVQLQNRLEALLEETHIKLSSLVSDLLGASARRMLHAIADGETNRETLAALADRGLRATQEQLQDALGVCQELNPVYRRLIRMVLDEVASIDKRIEQLNQEMANLLRPHEDQVKRLAEVPGLGVDSAQQVIAEVGATAATFPSEKHLSSWVGACPGDEESAEVNYSRRSPQGNRHMRRILNQAANAAVKHKGSIFEILYRRYVPRLGHNQTIGIIAHKLCRLVWKILHRGIRYEERGPEVSKASKQKRTRKMIQALRRLGYRIEPSPSQSAITA

SEQ ID NO: 218100 - protein, 373 aa, unidentified
MPKYSTAFGMDVHLRSTTVCALDADTGEAVTRRFPGNPWGEIAGWMDGFPGPSLAAYESGYLGFAPQRELAGLGVECVVAAVSKIPRSAADSASKNDRNDAARMAKAILAHDISPVWVPSPEVEGIRDLAGAYDGATARLATAKQRLLAFLAKRGFTYGGTTPAGNPRKYWTYDFLRWLDKVRPEDDGGVRTLAALRNEVEAAAEARADLLSEYRAAVDASPIAAEVAALQSIKGCAFALAAAFSAEVGDFTRFRSGRQVTAYFGLAPSQRSSGDSVRLGGISGAGNALVRKLAVEGSWCYAAARHQPKLMPRDTGVPLEIRMHGRKGSERLLRRREEMLARGMPAAKANAATAAELVRWLWALGMMCRESAE

SEQ ID NO: 218101 - protein, 369 aa, unidentified
MAKSITFIGLDVHKDTIAVALAEAGLRGEVREHGKIPNAAAALKALAMKLASAGRELRFCYEAGPCGYGIQRQLAGMRHDCTVVAPSLIPRKPGERIKTDRRDAINLAKLHRAGELTPVWVPDQAHEAIRDLVRARQAAVRTLRQARQQLSGFLLRHGYHYHRPAWTQLHRRWLASLRFEQAVHHIVLEDCIAAVEAATARRDRLEAHIEAALPEWALAPVVQALQALRGVGLVAAATLLAELGDITRFTNPRQLMAYLGLVPSEHSSGRTRRQGGITKAGNGAARRMLIEAAWSYRFPARISREQLLRQERLAKPIRDIAWKAQERLCRRYRKLARAGKLPTVITAAIARELAGFIWAIARQPQSTPP

SEQ ID NO: 218102 - protein, 347 aa, unidentified
MDITTIGIDLAKLVFQVHAVNAHGKVVLKKQLKRNQMAEYFVNLKPCLIGMEACGSAHHWARKLQSYGHTVKLMPPQYVKPYVKTNKNDTADAEAICEAVARPNMHFVPIKTLEQQGILTIHRIRQGYVKARTAQANQIRGLLAEFGIEIPLGIGYITKRVPELIEDASNDLPGIVRIEIQELLEHFKHLEERVNDCEKKIVCWHRKDGTSKKLEAIPGIGPITASALVASIGDSKHFKNGRQVAAWIGLVPKQHSSGGKQTLLGISKRGDSYLRTLLIHGARAVIHHSVGKIKPTGTQSWVNQLAARKNKNIAAVALANKNARIVWALLNHDRDYQDNHKTLRVAA

SEQ ID NO: 218103 - protein, 417 aa, unidentified
MSMNPSASSQEEAPLKYICGIDVGSQSCAGCVYRLDKSLVVKPLAFANAKEGWNVLLDKLTQLDALPKQILIGMEATARYSENLYHALEQRGYRLCLLHPGQTHQFHERQGLRAKTDRLDAITIARVLLSGEARAGYIPDEQVATYRELVRLHSQLSEQVARYQNQIHALVVVLFPEFTQVFADPCLPSALSVLKVYPSAQAMAQAEEAALYALLRMHKHAHYGHPTAKKLLSLASTSVSSQRAEAGRSLSLRILCGQLEQTQKYLEELQVELEQLIANDPATKSLQQIPEFGTQTVAVLRAELGDVDRFARTDQAIAYAGLDVQIKESGLWKGKAKLSKRGSGLLRQMLYLAALRSLHLQGSAFGAYYQRLVARGLKKGSALMAVMRKMLAVTVHLLKHEQEDYDRSLVAVGNLAG

SEQ ID NO: 218104 - protein, 447 aa, unidentified
MTGYLEAAAAAAHHPPMQDAAPASWVAIDIAKDVHMVLAESARGRRQFRVANRLEDVHAFIQFLRELPTPVRIGFEPTGVYHRPLAFQLVSAGFDVVLIASLACARYREAMFTSWDKNDPKDTQVLLELLKQGVTMRYVDPLVAGWHDIQEVSKTYWHVTLARTRVQHSLLTHFLPLYWPEFARCWRTSRSEAFCQMLHAFPTPASITATDCDTFVKTAALPAGRKVNKRAWLSEIYELASRSIALPVPLDSPAVATFRLRLESFLALSAERHRLEHWANELLASNHDYQLLQTIPGIGPVFALTILAEAGDLRRFAHHRQFLKFCGLDLAKSQSGMSRGREQLSKRGNARLRCAFWFAGRIAVRLRESSIRDKYERYVAASPKSADQRRKAYTAIAAKMARITYAVVKTGRPYRSYFEYELPGGSIPLSRAVEAAPVVPDDGALTS

SEQ ID NO: 218105 - protein, 388 aa, unidentified
MHKPSEVFACCGIDVSAAQLVVALESIGGGWRQRSFPNRTRGHQALILWLQKDGTRVRVCLEATGLYSLDLALALHAASGIEVAVLNPKVVNRFAATLCRSKTDPADAQVLAEYARRMPFQPWHPPQAAALELRTITRHIAALTQQHTRQSNRLHAASASTTGSRWVRQDLKRSLRDLQRRVEKMRRAALALLEQDVELRPRFALLLSMPGIGEISALHLLGELALLAPGLTVRQWVAHSGLDPAHHESGTSVHKRSRISRAGNRYLRRALYMPALVAVRHPTCAPSTSPWWHATKPNCKLSSRSLASCCTPSSACFAGSRPTTARACCLTSNFLASPSLLEREVLLHFSREKTLDDQERIFKRSRAGTLDDCHTVTNAQKTSEDVPV

SEQ ID NO: 218106 - protein, 471 aa, unidentified
MVMTREPEEILDEPHEQIMERVCAIDVAKDSGKVCVRLPAESGSGRRVSKVWDVPARTKAVIELGDHLACQGIQKVTLESTSDYWRIWFYLLEARGLDVQLVNARDVKNVPGRPKTDKLDSVWLAKLTEKGLLRPSFVPPKQIRVLRDYTRLRVDLTAERTRHWQRLEKLLEDALIKISAVASRIDLRSVRDMVEALIAGQRSPRFLAGLARGRMKLKHADLVEALTGQFDEHHAELARMLLDQIDALTAQIDTLTARIDTLLAAILDGRNPDPDHPDPGPADPGSATANGPGAIAQPTPGQRSAVPSTADLVDILDEIPGVGPHIAQVIIAEIGLDMSRFRTAGHLVSWAKLCPRTIQSGAKSTSGKTGKGNRYLRAVLGDAAAGAGKTNTFLGERYRRIIKRRGKLKALVAVARSILVIIWQLLSHPGLRYHDLGADFHTRRIDTERRTRNHVRQLEALGYTVTLTAAA

SEQ ID NO: 218107 - protein, 354 aa, unidentified
MKQQAIQYLAFDVHRATTVASLRNEQGKVVMQATVPTEAKAILNLVKGAGPRVHVAFEEGTQAQWLHDLLVDHAEQVIVCNVRGRSETVNKNDQIDADALSELLRLGALRPVFHGAPEMLSLKELVRSYTCLVSDSTRVMLRIKAIFRARAIPTPGVSVYRLSQRKKWLAKLEGGARTRAASLLTQLDLLLELRPKAKAAMIAAARRQPGWKVLRSIPFLGPVRVAVILAILRTPFRFRTKRNLWPYAGLGVVTRSSADQEFKNGRLQRSRKAPLTRGLNRNHNPLLKAMLKGAAAAAVTKPGPFRDYYEASIKRGVKEELAKVTLARKIAAVVLRLWKKGELWDPAKLTMQAT

SEQ ID NO: 218108 - protein, 404 aa, unidentified
MWYAGIDWADDHHDVVVLDDSGRQIASRRVAHTAAGLADLTTTLSQICAAKPKDTLACIVETNRGLLITALLSAPFAVYPLNPKTIDRRRNAAGAKTDQIDAYLLAKTGRSDLADLRRLTPFSPVVHELKALTRDQDGLIQSQTRLVNQLTACLKAYYPIALDLFSKLHQPSTIAFLRAYPTPDAAQRKRVDDIVQTLKAAGHTRATQVAPQLWQALQQPQLQADPVTTRTKARLMLALLAQLQPVMEQIAAYDEQIERLFLRHADSALFASLPRAGKRLAPRLLAEIGDDRRRYSDAAGLQALAGTAPVLRKSGNYAKAHRRTACLKPLRNAMQHFAWQSTLEESWAMTYYQRKRAEGKSHSVAVRALANSWLRIIYALWRDCRPYRTDIFTAAQQQQRRKAA

SEQ ID NO: 218109 - protein, 397 aa, unidentified
MYENTFLGGVLMIYIGIDISKYKHDCFIATETEEHQFSFENSQSGFNELLGHFKPLVKQEMIIGLEATGHYGENLKSFLTLHGYSFMEINPFLVKKFSEAHSLRKTKTDKKDAHTISTYMRSVDYKAYHHQSYHISALKSLTRLRFKLISDRTKHYNMMTKVLDVIFPEYKPFMREQGYSETTLYILKHFSSSERIAKMNDVHFDKLRKLSMGRFNYPKFVKLKELAKSTIGVTQDHHLFKLKTSISYVEKLNRDIDETEKQINSLMDKYPTRIQTIKGIGTISAAVILCEYGDITLFSNPAEMLSYAGLDSTIKQSGTMSSTGKLVKRGSKYLRATLINVCMMVMIYNPVFYVYYTKKKQEGKHHRVAMVHLAKKLVRVIHHLETNHVDFDSSKLI

SEQ ID NO: 218110 - protein, 337 aa, unidentified
MVYFAGLDVSMEETHICVLDREGALIREGKTVTFTKAISVFLAGGPKCKGVVFETGRMAPMLFHGLVELGISVRCIESRQAYQALKSLAGHKTDRNDARGLTHLARTGFYKPTHVKSLSAHAVRLLIAARKKLVGQRVTIDNQIRGLVVVFGVRLPRTLSPAFKDAALAVSDGVPGLHAALCGLFAAREAILTAVAAIDVDIKKMTRKSKTCQRLMTVPGVGPITALAFAAAIDDPRRFGKSRDVGAYLGLVPKRHQSGEIDYSGGISKRGDVKVRTLLYEAANVMLTRCTAPLKLKSWALAIAARSTMRKARVALARRLAIILHAIMRDQTNFKAT

SEQ ID NO: 218111 - protein, 319 aa, unidentified
MNRIAVGIDISKNKFDAAFMTPNHKWQKKAFENSLAGFKVFLSWLEEKHVENCYTVMEATGRYGEDLANFLFVSGYKVSIVNPAQIKYYSRSLLRRTKTDKVDCQLIAEFSQRHELSDWQPLSPSLQSLKDQVRCLEAFKKDATQASNRLEHAKDHVVKKMLKEHLNHIQNQIDALTLVIQELVRNDPILSHKIELLMSIPGIAETTALKLLGELPDLSTFKCAKQLAAYAGLNPSIKTSGTSVKGKDKISKTGSRELRKILFFPAMTLMRHPSSLSSFIERMRIKGKKGKVIVTAVMRKILHIVFGVLKTQTTFQGAV

SEQ ID NO: 218112 - protein, 366 aa, unidentified
MNYIFVGCDSHDKTLVNKIALNREAAERRGFAATRAGRRRMVEYLKERSGKAGGAKVVVAYEASGSGFILCDELKAAEFECHVLAPTKIERSMKQRRNKNDDRDADRLLEILRGHYLAGNKIPSVWIPDLQTRDDREPVRGRQDLSQKQTTVKTQIQMLVKRHGIEKPDGMGSSWSKPYRRWLKALAEDAHQGWGKQKALGSLLRQLEFLESEIEQLDEAMAELAETPRWKPIVQAMRKEKGVGLMTALKYGTDIADFSRFRRGRQVGAYYGLVPSSHESGENGDRKGHITREGSPWGRQVLCQSAWSRVRHDEHEREVYRRLAVKNPKKKKIALVACMRRLAVRLWHVGLQAQLQMNARKPGGNE

SEQ ID NO: 218113 - protein, 370 aa, unidentified
MLNTTTFVGLDVHARSIKAVALDAMTGEVRSATFAYDAAAVAEWVGSLDPAAKCVYESGVTGFDLQKKLTALGVDCVVGAVSKMIKPSADRKRKNDRNDAEFLARMLSVGNVVEVCVPDDECEAARDLVRALDDAREDLKRCKQRLSKFLMRHGYAFSETTPTGRRKGNWTAAHWAWIRSIEFPEKADDEVLAYYIDAVRQAMENKKRLEKLVEAEASKPRWKKRVDSLRCLKGVDAMTAADIVFEAGEFSRFKNARSFAAWLGLTPSEHSSGESARQGGITKAGNKHLRRVLVEAAWHYISASPHPKDLAKGQAPDPAARRHAAKGIRRLVKRREEMLGRGVHKNKANVATARELACWCWAVGRMVENG

SEQ ID NO: 218114 - protein, 414 aa, unidentified
MDSGYKVAGIDVHKKMLAVVVTDIAVLGGYEFERRKFGAGDGELKALGDWLAEQGVREAVMESTAQYWRPVWLALEPVCPLHLAQAQSNKAPKGRKRDFSDAERLVKRHVAGELILSFVPDEEQRLWRTLTRSKHQLTRDRVRLRNQMETFLEDSRIKLSSHLSDLIGVSGRKMLRALAQGVTDAAQIAALAGGGIRATQQELGDALSAAAQLIPLRRQILKLFLERLDLIESQIETLDQSVAEQLRTHQDAVARLAEVPGLGADSAQQIIAEVGPQAAKFDSPGQLASWVGCCPGREESAEVSKSNRTPKGNRSMRRILCQAANAAVKAKGSVFQDMYRRLVPRLGHLKAIWAVAHKLCRIVWKVLHDGVKYEERGRKPDAQTIRRRIGKLLRQLRALGYPLQPPVEVLPNAA

SEQ ID NO: 218115 - protein, 370 aa, unidentified
MGQHSRAFVGIDTSKLRNAVAVAEEGRDGEVRYLGEIDTAEAATRKLVVKLAAKYRQLTFCYEAGPTGYGLHRLIGELGHDCIVAAPSLIPKKPGVRVKTNRRDAVGLAKLLRAGELTAVWVPDERHEAIRDLSRAREAARKDLRGKRQQVSSFMLRLGRHFPGKKTWGPAHMNWLMLQKLEHREQRIALEELLGAVRQESERVERLEQAIRDAVPEWSLAKVVTALQAMRGIDLVAAVTVLAQIGDLSRFQNPRELMGYLGLVPSESSTGDTVNRGSITKAGNGRVRRILIESAWSYRYPPRVSREKQMKVAAAPRTVREIAWKAQMRLCGRFRSLTRRGKQPNVIAAAIARELSAFIWAINREVMAGR

SEQ ID NO: 218116 - protein, 344 aa, unidentified
MDHFAGLDVSVKQTSICIVDDTGRIVKEVKVASEPEALLKVLGNPIYRFKRIGLEAGPLSQWLFSALAEAELPVVCVETRHMQAVLKAQINKTDRNDARGIAQMIRAGLYRPVHVKTLRSQKLRMLLTHRKLLQSKAIAIENDLRGTLRNFGLKVGMVGKVRFEARIQELVENFSDLAELVEPLLIVRRALREQIVILHRRLLAIVRDDEVCRRLMTTPGVGPVVALTYRATVDVPARFRKSKSVGAVFGLTCSRYQSGEIDWSGKISRCGDEMMRTMLYEAAQSMMHSKKWSWLKAWAMQIARRRGMKKAIVALARRLAVIMHRIWVDGTEFRWTREQAAAAA

SEQ ID NO: 218117 - protein, 447 aa, unidentified
MGKPSSTRRRRARLKVINPRSAGIDIGSRFHVVAVPQELDSDPVRKYSSFTQDLIALAEWLLAVGINTVAMESTGIYWVPLYEILVEKGIEVFLVNARHAKNVPGRKTDICDAQWLQQLHSYGLVRASFRPEHVITELRAYIRQRDQLVRYRSSHQQHMQKALMQMNLQLHHVVKDINGLTGRRIIDAILSGERDPEKLASLRDRRCKESEATIAAALQGNFQDEHLFALRVAVELYDVYSEKIKTCELAAQSTLTELAGPEYVAPGRQPGDWRVLGNGFSFNPKSLIESIAGHNLLCLPGLGPVTVLTLISECGLDMTRWPSAKHFVSWLGLSPQNRISGGKVLSSRTRQGTTRAGSAFWMAAVPLGRTNTALGAFQRRLAARVGKSKALIATARKLAILYYKTLRDGLEYQDPGANAYQEASRERQIRGLQRRASALGYELVASA

SEQ ID NO: 218118 - protein, 369 aa, unidentified
MIIAVGIDVHKKTSSAYSVYAGKGEEKEKHTKFLDEFNKEFRDFDSTPEKYQALMAFVRGHECYVLIENSTKTHEVYWIFRNGGMNVFVAHSTDLHRITKSVKKTDHHDSFELAGYMRRKLNGEAEFSESFIPSPEWMLKREMCRGVLAEKTYLANTKRRIRAHLLLHGITLRREFDDIASRTALAEMDLIKDPYLRMLVRFASDAKNRVSAAEKTIEQMFSGDKTCELIESITGFGHTSAAYMSSLIVDFGRFRSSSEFTASFGVVPRMRSSGESNPNCSTTHRGDDLMRKRLMDCTRAHVKHAKDSVVTSLYNRLVKNGKPKQEALVAASRKLLTVVWSVLKSGVPYSSDPESRKGAREMEKASEEN

SEQ ID NO: 218119 - protein, 350 aa, unidentified
MMKFYNRQHEFYCGIDLHANSMHVCVVDHNGQKHLHRNFNTKKPDRFLLALQPWQDRDLIIGCESTFNWYWLADLCHERDLAFLLGHALYLKAIHGGKTKSDRIDSEKLAMLLRGGNFPTAYVYPKDLRGTRDLLRRRSTIVRRRSATIVHVQIVNHQQNLPPFEKSISYKANRRGVADRFQGDSVQKMVGIDMEMIDFYDKQVQRLDLYLEQHAKVDNPDTFYRLQSIPGIGRILAMTMLYEIHDIRRFPTVGNFLSYARLVKGTNSSAGKQYKPTGGKIGNPHLKWAFSEAITLLKRECAAAKAFAERIENKHNKARANSLLAIKLGRAVYWMLNRKTTFDAKVFFDD

SEQ ID NO: 218120 - protein, 312 aa, unidentified
MEAKFVGIDVSKATLDVDCLPVSTPRQFSNDASGIAGLVEWLVGSGVERIVLEATGGYEVAVASALAAAGLPVVVVNPKRVRDFAKAQGILAKTDRLDARVLVLFAQQIAPPVRALPDAAQRDLAELLDRRHQLVVMRTQEQARLATVLAVARSDVKQHIAWLDKRIRKHEGVLLKRLRANEVWDAKVTLLDTVPGIGPVNLFTLVGRLPELGTLNRQQIAALVGVAPFNDDSGKRRGQRYIRGGRADVRCALYMATLAAKLWNPVIAQMYDRLIAKGKPFKVAMTACMRKLLTILNAILKSKKPWENRLAT

SEQ ID NO: 218121 - protein, 322 aa, unidentified
MEQFSFFTGIDVSKLWLDIAVFKPGYGIVYQTRVNNNTKEIRSFLKGLKKQLKAEITGNLFCMEHTGKYGHAFLNASILEQAKVWVELPIQIKRSQGLVRGKTDKWDAIRIAQYAYRFVDKAVFWMPANKIIQDIKELQVKRNRLVKAHSQLSQENKNDPLFKKPLLALKLGIEAIELKMEQLIEQNELANHQYELLKTVPGIGKQTAMALIIVTNGFTRLTDSRKLSCYSGLAPFPYQSGSSVKGRTKVSKMGDKKLKVLLNLSAWNAIRSITAFKDYFNRKVSEGKHKMSVINAVRNKLIALALAVIKRNSPFEKNYSFS

SEQ ID NO: 218122 - protein, 343 aa, unidentified
MQTVTTIGLDIAKSVFQVHGVDAVGQVVIRRQLKRRNVLAFFQKLPQCLVGIEACASSHYWSRELQALGHTVRLMPPAYVKPYVKRQKNDATDAEAICEAVTRANMRFVPTKTPEQQSGLVLHRTRHLFIRQQTSVINAIRAHLAEFGIVAPVGRKGVEELLHVVADPADNRVPTIARACLAALGVQLRRFKEQILEFDRLITAWHRSNEMSMRLDEAPGVGPVLATAVVATVADPKSFRSGRNFSAWIGLVPKQHSSGGKDRLGSISKQGDRYLRGLFVAGALAVIRYAKIHGSKHRPWLTALLTRRPTKVAAIALANKIARMVWAMMVKGERYKEPVALAA

SEQ ID NO: 218123 - protein, 343 aa, unidentified
MYVPYHFIGLDVHKRTVAFSEMRGDGKPIDSGTFSTRRTAVEAWARARTQPWIGTMEATLFTGHLYDVLTPFAVEIQVGHPARIKAISAAKHKNDAVDAKTLANLLRADLFPQCYMASTRVRELRRVLRYRNFVVRQSICMKNKTTGILMETGVEYDAKRVHHKKYFNELLDNLDEVPNSVRELLRITRTNMEMFQSAQKQLLNALMTLPELHERVERLMTIDGVGQVTALTWALEIDDPFRFSNLKQAHSYCGLCSGQKESAGKNKSGPLSKQRNAHLQTALIEAAKLAPRWNAQLARVHAASLAQDKNRNRASCAVARKLIAYLMAVDKSATPYEDRSSVK

SEQ ID NO: 218124 - protein, 365 aa, unidentified
MNTITIGVDLAKSMFSVCEVDGAGHVLARRDLKREAFGLWLAQVPVGTVVAMEACSGAHHWGRRCLEYGLQPRLMAAQFVTPFRKSRTAKNDHNDAEAIATAARQGNMRFVPVKTVDQQARLSWHRVREGYKAESLAIGNRLRGLLAEFGIVVATSDLALRRALAELDQHTTLPQELHELLRDLSAHWAQLRMAIDACDARIDAHARMDERCVRLRAIVGIGPISADAAVATLGSAKDFRNGRQLAAWLGLVPTQHSSGGHARLGTISCRGDAYLRTLLIQGARSSLQRAKVVSVEKSTPEQIWIRQLACRMPFGKVLVAIANKHARQLWAMLAHEETYDADAWLKHPMVQRPAGKHALTVAAMA

SEQ ID NO: 218125 - protein, 347 aa, unidentified
MFNNNVIAIDLAKTSFHACNLNKHNKLTTNKAFTRKKLQEWIIKQPKSTVAIEACGSAHYWARFVQEHGHTAMLLPPKLVTPFRKGHKTDKNDALAIAIAAKQPEIKTTAIKTVEQQGLQGIERMRQHHSDFITATGNMLRGLVYEFGIVIPKGKAALSREIPFILEDAENNIPDAFRHQFADMFSFYQKSEKAMAKVEKKLAQLIKQQKTCQSLINLEGVGPVNALGLALALGERGESFKNGREASACIGLTPQQYSTGGVVVLGGIGKKRGNKRLRSTLIQGALAVTKVLKNREPKNSKEAWLKALMERCGVRKAAVALANKNIRTAWAMLRYDKAYQKPSMLVA

SEQ ID NO: 218126 - protein, 407 aa, unidentified
MRPIYERCCGLDVHKKTVVACRLTPDGIQTRTFGTMTDDLILLREWLLDGGVTHVAMESTGVYWKPVFNLLENHGMELLVVNARHVKAVPGRKTDVRDAEWLAELLQHGLLKASFIPDRENRERRELVRYRRSLVEQRAHLVQRIQKLLEGANIKLGDVASDVMGVSGRAMLQALADGVDDPAAVAGMAKTALRNKIPELERALTGSVGHHQRFLLRSQFRLLESIEGEIASLDEEVTERMRPFQVALERLDEIPGIGRRAAEQILVETGTDMSRFPTSAHFASWARVCPGNNESAGKQQHSSIGGGNRWLRNALLEAAWTVSHSRKQTFFTSRYRRIAARRGKKRAAIAIAHSLLVAVYHVLKDGVVFQDLGPTHFERRNQEAIVRRSLHRLEALGYKVTVEAMPA

SEQ ID NO: 218127 - protein, 392 aa, unidentified
MAPTRTTHFMPTDDVIAVALELSNGSWKLALQDGKHQNPAIQTVSADNPARRLEQAIDVITKIRHKWAIDPAVRTVVLYEAGQDGFWIHRALSKLNGFEIYICDPSSIPVARHARRAKTDRLDAIRLVECLLAWLRGERGRMRVIHVPTADEEAQRHLVRDRGQMQKEVLQHQDRIRKLLRTVGCWQSVDSDIGKRLAQGQVRCHDGSALPAQLQHRLTRECERLALAEQQFATLEKNLIEQLPPVLQERVAHLRKLKAVGPVGAVRMVLELFWREFDNRRQVGACVGLVPQPYDSGDSRVDQGISKQGNRKVRSLSIELAWLWLRYQPNSAITKWYLRRVHGNEKNKRGKRIAIVAVARRLVIAFWRYLAQGEVPEGAILKKVKGTALSAA

SEQ ID NO: 218128 - protein, 345 aa, unidentified
MNKKIVKQVAGIDVAQKELVVCLGRMYDDWAPELYSHKTFPNHEKGFMALVLWVKKLAVEEVPVRFVMEATGVYHESLAYFLDEKGYESSIVLPNKISNYSRTLEVKTVTDKTASEAIARFGLERKLDPWKRPKKLFKNLRQLTRERDQVVQMRTMAKNQLHAEQAEAEPNPGSVTRIKQQIVFLNKQELQIKNELLVLSKQDSQVQQSVKLLCSITGVGSLTATTVLAETNGFELIRNKRQLTSYAGLDVKEKQSGTSVKGKAHISKRGNRYLRKAMHLPALTAIRHDDRFKAIFARLVSKHGIKMKAAVAVQRKLLEMMYIVYKTNIPYDKKYLQRNEEQQQK

SEQ ID NO: 218129 - protein, 379 aa, unidentified
MNKHIIFVGLDVHKETISVAIAEHQKEPRSLGKISNKPEAIYKLMRKLGPFKRLKVCYEAGPCGYVIYRQLSKLGIECVIVAPSMIPKKPGVRVKTDRKDATMLARLLRSNDLAPIWVPDESHEALRDLSRAVEAAQGDLMRARHRVRKLLLRQGIRKPEGMSSWTYRHREWLHTVKLPRANQQVVLREMLLAMEQARERRQRLEAELEQSVEFSPLADLIRAWQCLRGIKVISATRLAAELGDIHRFTNPCQLMGYVGLVPSESSSGPREKRGSVTKSGNAHVRHIMVQAAWHSRHPPSLSGELRRRQRGQSERVKAIAWKAQDRLHRRFRRLVGRGKPRQKAVVAVAREMLGFVWAIAQEIPVQEHNQQPFSLSQAA

SEQ ID NO: 218130 - protein, 387 aa, unidentified
MEVRMVNTPSADSNNEPVACYVAIELSKSGWLVGFLTPLSDKTGRYQVKAGDAQALLDLIERVHARVARQLNRPVEVMSCYEAGYDGFWLHRVLEAHGIHNHVLDPASLQVNRRARRAKTDRIDVDRMLRALIRYLRGEPEACSVAQVPRVEEEDAKRLHRERKRLVVERVQHVNRIKGLCAAQGIYNYAPLRPDRWSQLEKLRTGDGRSLPARLKSEIVRELKRLELVLEMIETVEAERDAIIKDPRSRHLNADKIKMLARLRAIGPEFATSLTGEVFYRKFANRRKLGRYVGLDGSPFRSGSVERDQGISKAGNPVARSMMVELAWTWLRYQPDSALSIWFRERVGNLKGRPRRIAIVAMARKLLVALWRYLETGVIPTGAVLKA

SEQ ID NO: 218131 - protein, 329 aa, unidentified
MSRMQGKVLPERSAEEPVYVGIDVCKAWLDVYLHPLATRLRVANSADGLKQLKRALTGRRVALVVMEATAKYHRRAHRVLAAAGYAVAVVNPLRARLFAASAGALAKTDRIDARLLALMGESLQPAPVSPPSPQLEELQELVRARQAASAEAAALANRCGAIAGAFLKAEYKRRIDAIKRHLARLDAEIERRIKEDPALQRRYRILLSIPGIGPLTAATLLVDLSELGACSAKAAGMLTGLAPIACDSGERTGQRHIRGGRANVRQILYMAAVTAIRCNPDLAAFYARLREAGKKPKLALTAVMRKLVVLANTLLHQDRTWQKIPPLRA

SEQ ID NO: 218132 - protein, 343 aa, unidentified
MAIVAGFDVHRRQITFDALDTETGEVYRGRIESSRAAVGSWVGRFPEQEIEVAVEACTGWLFVCEALAEAGASPHLAEPAETSARRGKKRHAKTDRADARHLRELLCQRRLPEAWLPPAHVCEWRTRTRLRKTLVDERTEWLQRIRATLFHHGVPVADVPERLLNQHGRAFLERVALPEAARERIAVALALIDALEAQLAPIERQLRRLARSQPGCQALMHQFGIGELTAPTILCELGDVSRLSSSRKAVRAAGLDIGVHRSDRRSRVGRLTKQGSSAARWALYEAAQSACRRTSPDHAAYLQLKARGLSHTRTSLTIARKLTRRCYHSLRELGPAALEPLTD

SEQ ID NO: 218133 - protein, 404 aa, unidentified
MTAVMIGVDPHKATHTAVVIGAAEEPLGELRVRASAGQAEKLVAWAADWPERTWAVEGAAGLGRLLAQQLVAAGERVLDVQPKLASRVRLLQAGDTNKNDPNDALSVAVAALRSKAARPVMAEDYPAVLKVWSKRHRDLARLRNQAACRLHAVLCDLVPGGHPKEISAAQAARILEQASPSGAVDQARAELAAEFLEDMRHLDAQLRGTRKKLAAAVRASGTTLTEVFGVGPVIAGTIIGDIADVSRFPGRDHFASYNGTAPVEVSSGNRKIHRLSLHGNRRINHAIHMAAITQLRHKHSEGRAYYEKKLAEGKTHKEALRSLKRKISDAIFARLQADARQAAAAAPKGPGGHPGNDSASSAAGSHPARQLFGQATPGPGTSLRPATPAGTPSKPVPRKTQATT

SEQ ID NO: 218134 - protein, 346 aa, unidentified
MGLDVSLDETHICVVDEGGRIIKEGRAFSEPKAIAKAIRHKGRRIEHVGLEAGSLSQWLHDGLVREGFSVSVMEARHVRGAFAAMRVKTDRHDARGIAQLVRLGWFKRAHVKSLDAQETRALLTARTFLVEKVTATENSLRAALRNLGLKMGGVTRRAWVARARELADGHEALESIVEAMLRVRALLLDELAKVDSQLAALAKSDPVTRLLMTMPGVGVIVALSFRSAVDDPSRFPRSRDVGAWLRLTPRRWQSGKTDIVSRIPKTGDARVRTMLFEAAASILGRVRIMSPLKAWGLRIAKRTCMKKAIVAVSRKLATILLAMWKSGTAYWTKSYPPASAKDFAVA

SEQ ID NO: 218135 - protein, 350 aa, unidentified
MTEAYDGRQVVGMDLHRRRSVLVRMTADGRRLETARITNSAAELRRAIAKAGQHPKVVLEATYGWYWAADELAAAGAEVHLAHPLGVKAFSYRRVKNDEKDAGDLADLLRMGRLPEAWIAPPEVRELRELTRYRIKLVRLRSSGKAQVHAVLAKLGIPVTCSDLFGAWGSAWLDGLALPQPYAGKVASLRELIGWLTTEIGLLDAVIADLLGSYRPYYAVRALPGLGPVLAAVAVAEIGDISRFPSPGHLCSWAGLTPRHRESDLKVARGHLTKQGSPILRWAMVEAVQHQPDGSPPRELKDRIVARRGAQARNIAKAAAARKLLTCVFYALRDGQVRSLSARSRADEAG

SEQ ID NO: 218136 - protein, 366 aa, unidentified
MKKVSIVRTEQSRNIWQQRLTIGLDLGDRKSWYCVVDEAGQIQLEQRVRTSAKGLQEVFGAMPRSRIALEIGTHSPWISRLLRELGHEVIVANARKVRLIGESRKKDDRLDAQTLARLARIDPELLYPVKHRSAQAQADLAVIRARAGLVRARTGLVNTARGLAKSYGERLRGCNVRNMDPEKAESLSPELQAALEPLLAAIESVSERIVEYNDRIEALAQQRYPQVELLKQIKGVGTLIALTFLLTLEDPHRFRKSRDVGGYLGLQPGRRKSGQSEPQMHISKEGDPYLRTLLVQGAQHILGPFGMDCDLRRWGLKLAERGGSNGKKRAIVATARKLAVLLHHLWVSGEVYEPLHNSARIVAAAA

SEQ ID NO: 218137 - protein, 427 aa, unidentified
MDVLLERCAGIDIGKNEVVACVRTPGPGGKGRMKRTRTFLSFTGDVEAMADWFAAEGVTDVVMEATGSYWKPVWYVLEERAFELKLVNAAHVKILPGRKSDVLDAEWLAELLEHGLLRGSFVPPPAIRELRDLTRYRKRLVQAHNSECQRIQKTLEDAGIKLDSVASDVLGVSGRLMLAALVAGERDPEVLAEMAKQRLRSKIPELRRALVGRFRDHHALLIGLCLEHIAHLEAAVAKLDERVDALFAANQSEAGVPFAQARDRLDTITGIGKRAAECIIAEIGVDMGRFPTAGHLASWAGMAPGNNITGAPLGQDHQGRRLAARHPFAVRLGRRPHPRHLPLGPVLAPGPADRQEEGGRRRRPLHPGHLLVPAHRRLRLRGSGRRLLRSASRPRPRPGPPRRTTPAPGLPGRPPQGRRVNHQGFSS

SEQ ID NO: 218138 - protein, 343 aa, unidentified
MDHFAGLDVSVKETSVCIVDDTGRIVREVKVASEPEALLQVLRNPIHRFKRIGLEAGPLSQWLFSALAEAGLPVICVETRHMRAVLQAQINKTDRNDARGMAQMMRAGLYRPVHVKTLRSQKLRMLLTHRKLLQSKAIAIDNDLRGTLRNFGLKVGIVGTVKFEARVKELVENLPDLAVLVQPLLMVRRVLREQFAILHRRLLAVVRNDEVCRRLMTVPGVGPVVALTYRATVDVPARFRNSKAVGAVFGLTPSRYQSGEINRTGAISKCGDEMMRVMLYEAAHIMLVRLAKWSWLKAWAVKIARHRGMKKAIVALARRLAVIMHRIWVDGTEFRWTHEVTVT

SEQ ID NO: 218139 - protein, 420 aa, unidentified
MHEERRWFVGIDWGSQEHVVSLCDGDGNKIGQRTFAHGGTGLTDMIAWLLKASGGESGKIHVAIETPHGPIVEALLERGFNVYSINPKQLDRFRDRFTVPGVKDDSLDSYVLADSLRTDMPLFRKLSVAEPLIVELREWSRIDEELKVERVRLANRLRDQLWRYYPQMLELGDLDADWMLELWEAAPTPQKAARASKAAIQRVLKKHRIRRFDAAQVLSELRKPALSVAQGTVEAATAHIRVAIERLRLVNRQLADAKLQLDQLCKKLAEPVAGDDGENVLGQRQEHRDATILDSLPGVGRVVLATMLAESPDALQRRDYHALRSMCGTAPVTRRSGKSCIVTRRRACNRRLRNAVFNWGAVAVQYDPISKAKYEALRARGHGHARALRSVVDRLLYVACTMLEKGTLFDPSLARKNAAA

SEQ ID NO: 218140 - protein, 341 aa, unidentified
MLYVGLDLSRKRLDWQALDPEGAVGAVPPDRDGLVRLADRLDERPVLAVIESMTGARFVHDQLEFAGWDVRIADAVKARGIAPLACKTDRIDCWVLAELARRELVPEVWLPDPAVRAERERARFRLHLVKHRSSLKNRVHAILFQHGVPNGHSDLFGVSGRRLLERLALPEPWASTVQASLALIDTLDEQISSCERELRALGADHPYIPLLMTCPGIGWVLAYTIASEIGEITRFATPRKLVGYTGLCPRVDQSGERDQRGPLRKNGPNYLRWALVEAAHTACRHPAYAPVRERMRERHGQKRGSKIAAIEIGRRLSEAIWHMLTNSQPFAPAGAAASLAT

SEQ ID NO: 218141 - protein, 375 aa, unidentified
MSNDSEAFVAFDTSKLRHAVAIAEGSREGEVRYLGEIDNSDAAVRGLVKKIAGKYRKVAFCYEAGPTGYGLYRLITDLGHDCLVVAPSLIPIKAGDRVKTNRRDALNLVKLLRAGELTRVWVPDERHEAIRDLTRARQTAAADLVRKRQQILSLMLRLGRIYTGKRHWTRAHMKWLASQKIEHLEQRMVLEEMLLAVRQAQERIARLEEAIRAAVPGWSLAELVHALMALRGVDFISATGFLAEVGDLLRFQSARQLMGFLGMVPSEHSTGGEIIRGSITKAGNRRARRILVECAWSYRYPARVGPDKLGKVMSTPRTVQEVAWKAQCRLTTRYRALLRRGKGKNVTVTAIARELSGFVWAIAHAVAEPSKRQAA

SEQ ID NO: 218142 - protein, 339 aa, unidentified
MKYTPVGVDIAKHVIQVHFIDEHTGEVIDKQLRRQDFLMFFCNREPCLIGIEACGGSQHWARELTKLGHKVRLLQARFVKAFVIGNKNDVMDARAIWMAVQQPCKEIAVKTEEQQSFLVLHRTRMQLVKFRTAQINSLHGMLLEFGETIHKGRAAMDREFPEALERLKERLPPYVISVLDNQFNKLNELDLQIDDIEKQLTSVARQNETCRRLLDIPGVGPLIATAAVAIMGEASAFKSGREFAAYVGLVPRQTGSGGKIRLPGISKRGDKYLRTLFIHGARAAALLTKEPGPWITELKKRRPASVAIVAMENKLARTVWAIAAHGRKYNKNHVSIRPY

SEQ ID NO: 218143 - protein, 372 aa, unidentified
MNYNTVYVGMDVHKESFTLCAYTIEEERGSYPRKTPADYKEVLKYLEFLRTVYGNNVNFVCGYEAGCLGYTLYHHLTDRNVNCVILAPTTMLEQRGRKRVKTDKRDAEIIGRCLAQHNYSPVHVPSASDEEVKEFLRMRSDHKQALKKVKQQILAFCLRHNYRYDKGSHWTIAHLQWLKALEPEALYKEILDEYMLTYTVLSDKIERLDERIEELASKDEYREAVKRLCCFIGIKTNIALSVLVEVGDFNRFATAEKFASYIGLVPGENSSGDDQTRLGITKAGNQHIRMLLTEAAQCYAKGNIGFKSKALKARQSGNPTQVIAYADKANERLRRRYYKMVLNKNKKANIAKTAIARELACFMWGMMTDRIA

SEQ ID NO: 218144 - protein, 419 aa, unidentified
MPSKKKNTSVVSVVHDICCGLDVHKKMIVACLVSSDAGDGERSEVMEFETFTEDLIKLRNWLLEKECPVVAMESTGPYWTPIHNILEGYFQVILVNPRHMKNVPGRKTDISDSRWLSGLLRYGLLKAAFIPPKYQRQWRDLTRMRKNYMETVGHFKRRVHKLFQEANIKIDSVLSDLFGSTGRNLMGLLVSKESSLTFFEVEDCLRGSLREKARELYRSVKGFFEEHHRILLTVLLNTIEKLEEQIEELELRIRQVLKTSEELIDRLKEIPGVGDVSAHSLLAELGTNLEAFPSAAALAAWCGICPGNNQSGGKRFSGRSRVRNHHLKTIMVEIAWPAVKKRGSYYKAKYYALKSRIGAKKAIIAVAHRILKAIYYIIKHGVGFKDLGEAYLLERSKASKIRYLSKQASLLGFELKPVI

SEQ ID NO: 218145 - protein, 441 aa, unidentified
MRNNEIFENNKEKTAAFLYIATGLASQHVPINFNFLKQIIMKVCGLDVHKDSIFCAIYNGKTYTEVKVYETFTNSILSMGNYLQSEGVKRVAMESTSTYWIPIWDILVEMGFELTLVNSNQTKQMPGRKGDEEDAQWISLLLHKGLLRGSMIPGPIIQELRVYSRKYTKLVQQQTQALVKMDRIMVISGIRISSCVSNLGNKSVMNIVNALIEGEINPDKLSSLVYANRENKRTGKLREALTGNLKDSHRRELKWAKQEYDLFEDQARECLAEMQRICEFHYPQELKLITTIPGISLISAMIIIAETGADMSVFENSGKLAGWAGLRPRNDESAGKYKSTATTKGNKYLRTILVQIAWAASRTKGSYFMEKFNRLALRKSRKKALVAIARKILVITWNLLNEKTPYNPNLIHIYDPVKVAAKIAYHEKEIEKAAKLLNKAV

SEQ ID NO: 218146 - protein, 414 aa, unidentified
MLKIVYPICCGMDVHKSFVVASIASTNEQGVTTYKIKRFSTFTGDLRRCATWLAKNNCKDVCMESTGKYWIPIYNILEPTCNIVLAHPKYVKSIRGKKTDKRDARWIADIFKHDLVAGSFIPPADIRQLRDLVRYRWKLTSFTTGEKNRAQNCLTVSNFKLDDVFSDVFGKAASAITARILENPTEKITDISGFRTKGMKATNEQVLAAVDGEMCEEQAEKLRIIRSHIDSLELCKLNLESLILSTAEKYLPQLNLVMTVPGIQSFAAIGIISEIGVDMSVFPTSKHLCSWAGLTPQNNESAGKKKTTRISRAGAYIKPLLVQCALCAIRAKRFPEVRNRYLALKKRRGHKKAIIAIARMLLTAIYNMLKKNEPYNPELYRSADRPPAHREVSVEEAVFILQRQGYLVTAPPTA

SEQ ID NO: 218147 - protein, 347 aa, unidentified
MRFYTNQHRYYCGIDLHARSMYLCILDQQGEIRLHRNIACAPELFLKAIAPYREDMAVAVECIFTWYWLADLCAKENIPFVLGHALYMKAIHGGKAKNDKIDAHKIAVLLRGGMLPMAYVYPPEMRATRDLLRRRMHLMRKRSELLAHIQNTNSQYNLPEIGKKIAYKANRQGVAERFDEPSVRKSMEMDLSLIDHYDKLLTEVELYITKTAKVDNVNAFHRLRSVPGVGKILALVILYEIHDIERFPRVQDFVSYARLVKCAKESAGKRHGTSGKKIGNVHLKWAFSEASVLFLRCNPAGQRYVERLSSKHGKAKALSILAHKLGRAVYYMLKREKAFDMNQFFGS

SEQ ID NO: 218148 - protein, 320 aa, unidentified
MPQNGRIVGLDVAKLKADGCIRSLQLRLSQPSTPEGRAAMVAWLRANEVATAVMEASGGYERSWAEALRAAGIAVRIVDPKRVRHFAKSAGCLAKNDAIDAAMIAWFAETFPDTFAQPHDPDREELDALVTARKALVELVTQIGNPGEHRQPRAVRRAYAAILRNVATQLARLEAAIAAKLAATARFTARAEIIESIPGLATQTAAGLIAWLPELGHIGNKAAAALLGAAPYDDDSGQHKGERHIKGGRQEIRNLLYMAAVGAATKHNPVLKAYYQRLRAKGKPAKVALIACMRKLIVILNTMLARGEKWDPSRGAATLA

SEQ ID NO: 218149 - protein, 427 aa, unidentified
MKYTQNEKIMQITEEMLVVGVDIASEVHYARAFNNRGIEVGKLIRFNNTAEGFIAFATWAEELKVKCNKKQVIVGMEPTGHYWFNFAQHLKDHSIKIVLVNPFHVKRSKELDDNNPTKNDRKDPKTIAMLVKDGRYMVPYIPEGIYSELRTAMETQWQIVKQLNTIRNRVKRWVSIYFPEFNTVFGDWEGKAALIALKEFPTPKKVLEKGVEGIVSYWKKEKIRAVGKRRAVELIEAAKKSIGVREGLAAASNELLTLLEDYEMRMKQYERTMALIEQLTLQIPGMEEILKIKGIGLTTAAGFIAEVGMISRFEHPKQIQKLAGLSLKENSSGKHKGKTTISKRGRRRLRALLFQGIMPIVATNEEFKELHRYYTTRDKNPLKKKQSLILLCCKLIRIFYALLTKRTPYDPQKMMSDIKRPILQEVA

SEQ ID NO: 218150 - protein, 433 aa, unidentified
MLKLNYMSTLFVGIDVSSKTNAVYAMDFEENKYISSSFGNNQPGADKLVNMIAECMHKHKNLDTVLIVLESTSVYSVHISSFLSTSEVLMPYKPYVFCVNPKATSNYRKSYIGMEKTDPTDAYLIADFGRVGRTKKLEPWRGGQFIALKRLTRHRMHLSECITREKTYMVSNLYLKFSELQLLEGDDKPFGSLYGATSSAVLTEFLSPQEIIDMPEEELLTFLAGKSRNRISDLSKTSELLRKAARDSYRLGKCMYEPLNVSLASSFNCIHAYQKEIKLIEQAIEKCINGMNPNALVILQSIPGIGPIWASGILSEIGDITVFHSSDALAKYAGLYWPKGDSGDFTSEDNKMSKAGSPYLRYYLGEAANSVRKHIPEYADFYARKYAEVTKHQHKRALALTSRKFVRLVFGLLAKNQLYTGEKLDAEYNIKSN

SEQ ID NO: 218151 - protein, 402 aa, unidentified
MSDVIALDVSKNHSYAVWYRNNKCLSEFNFQHNKVGFQRLKRIVDEAKGPTVYFEATGIYSRPVARFCQDNQFKYAQLNPLELHLHSENLRRIKTDKVDAHKMAHAVVEKEYRCTNTWSQNYRKLHELSRFYDQISDEIKLKCLRLYTSLDQTFPEEEQLFTNQVSKLALNVILLFSHPDLVQPFSRTRLKNKLMSQTDKRLSQAKGLKYAEKLLKFAKISYPAADVDSIQVQEVKYYCRQLIELTKEKDALVKQTEKLAQSLPVYKIYTSIPGIGPLTASHLLGELGDITRFDNANQLNAYIGIDLNRYQSGKYQRQDHINKRGNPHGRALVYIIVRNMIRQKAAANNHIVDYYYRLKKRPIPKRDKVAVVACMNRTLKCLYAMVTAGTEYVYAYADSRSL

SEQ ID NO: 218152 - protein, 336 aa, unidentified
MNHVAVDLGSKQSHVCERRPDGTVVRSVRVKTSSLPQLFAQMEPSRVVLEACSEAFTVARWAMEHRHEVTVVPSTLAPALGVGARGVKTDKRDAENLSMASCRMPRLPAVHVPSDFAGQLRQQLAARALLVQMRTRVTNHLRCFVRQAVLTLKSGEPETVAKRVREALLATPSGIPMHVEQLAQSHEAVCLQIRAADKELERVVARDAVCVRLMTVPGVGPVTAAVFRAAVDEAQRFPGPHSVESYLGLTPREHSSGESERRGGISKAGPRMVRAALVQAAWSAWNTAPDDPRVVWAKQLATRRPKQVAIVALSRKLAGILFALWRDESEYSPQHS

SEQ ID NO: 218153 - protein, 418 aa, unidentified
MKKHSKSLQRSEPSLKRTKARGPVQRDAKEVLAEVLGKLTGKLDARAVSTSAKENRKGNTVGPNRDRLTVGVDLGDRWSQYCILGLEGETLAEGQLRTTQEDVREFFQALTVARVVIEVGTHSAWVQDVITEWGHEVLVANPRLMEGSKRRKRKSDRIDANKLARLGRVDPQSLYPIRHRSREVRQDLVVLRARDALVSVRTELINTTRGLVKSMGTRLPRCSSPSFAEKVKDAIPVEVGEALLPLVQLTERVNDCIARYDQKIEELGQKKYGHTTLLRQVKGVGPITSLAYVLTLEDPQRFSSSREVGPYLGLVPKQEDSGDSQPQLGISKTGDRMLRRLLVGSSQYMLGAFGPDTDLRRYGLRLCERGGKNAKKRAVVAVARKLAVLLHHLWVTGDVYEPLHHTGAETRTAQATAA

SEQ ID NO: 218154 - protein, 326 aa, unidentified
MKMSAILGIDIAKDSFDVCLLQADRLQRAQFSNDRSGFKTLRSWLHKRKAKPLHACLEATGQYGDDLAEYLHAEQYTVSVVNPLAIKAYGQSRLQRNKSDRLDAELIARFCQSEQPAAWTPPAPEIKALRELVHQYDNLQVARQQVRNRLQSGLHSDIVRAQLTAQLSLIDQQVAELKAHIHDHIDQYPDLKQQAALLDSIPGIGALTSAKLLAVDPRRFQSARAFAAYAGLTPMNRTSGSSVRKRVRISKLGDADLRRACYMPAIAAMKHNPLTRALYQRLVASGHAKLAALAAVMHKLLRLAYGVLKSGVPFDANFANQLVQTA

SEQ ID NO: 218155 - protein, 330 aa, unidentified
MFNYIGIDVSKATLQVYIPITDENISIENSKKALISLYSKLKKYYKKEIKNLVIIFEPTGSYSALLKRFCFEKNIYAFIINPRQSANFAKALDNRSKSDIIDAKMLYKFHVMLSTSEISVPIVNAVQEELSEMLTYFKFIQKERISFSNHLEALDSKDGSIMIVKKLKQEIKYLRAEEDNMIVSMKKLLLTDSKMKQDFENITSIVGVGDRAAIALLHLFITYPEANRQEIVALCGLDAIENSSGTSIQRKTRISKKGSSLYRCMLFMPVLSAVQHNQYMKIFYERLKSNGKHSTVAQIAVMRKIILISHSLYKNNVKFNKEIYRKNIGI

SEQ ID NO: 218156 - protein, 440 aa, unidentified
MAETVNFDEVHERSAGIDIGAQKIFVSPDGQEVQSFDTFTSGYYSCIEYLQSKDIKNVAMEATGVYWMALYSMLEICGMKVCLVNPKETKQPKGRKTDVADCRWIQRLFSAGILRSSFIPEGTMMELRFLVRDRLDFVEMGSIYVNKMQKYLELMNIKLKEVISQIHGASGIRMIKAIIGGERNAQKLLLLSDDRIIKNKEEAVLKALEGNYNDTYIFMLDQNMKMWETHQNQLLVIDRQIEELLKKLCIGKQPVAAIGKTKRMRHHEPKVKDLHQKLIQIYGVNLSSISGFNDYTLLRLIGETGTDMSRFPTAKHFVSWCGLSPKNHQSGKMKKRVKGTPCNQSGQIFKLCAQSLMNSKFIAIGCFIRKLKAKKDAGTAIKAGARKLANAYYNALTKGTEYVEQGTRLYEEQIKQRELKTLQKLASKHNFQLIENQLAA

SEQ ID NO: 218157 - protein, 406 aa, unidentified
MRYLGIDWASDHHDIAVVNEAGEKLSAFRIGNDTAGLETFRDRVRALGVPKSEILISIETSRLLLVDFLLNEGFTVYPINPKAIDRYRDRYTASYAKSDAFDAELIAHALRTDRERFRALEPDSPLLRELRILVRDQKRLIWAQSRFLNQLGACLREYYPAALNLFGDLASPVALQFLKRYPRPEPLSAKKLEKFLRQCRHPRPEAKAQEIAQQLSQPQFFAEPFTVRARSRMMLTLVDHLLSLRAQIAEYQEAIDDLFAQHPDSGIFKSLPGSGEKTGPRLLSEIGDNRSRYSSADSLQCEAGTCPITRSSGKVRVVMMRQACRKSFRDAMHMFSFCSLTKSSWARALYDQQRAKGKNAHAALRAVSDKWLKIIHHLWKEKELYDENIYLAHRMRHQMKEAASAA

SEQ ID NO: 218158 - protein, 430 aa, unidentified
MKEMEKQIEAWIGIDWADQKHDVSLYEVSTRKQERYEIQHSPEALQEWFGQLRSRYRNGYVAVVLEQGRGALLNALMSCEFLVLYVINPKSLSSYREAFYGSGAKSDPVDAELMREMVQQNPSRFRAWRPDDVLTRSLRLLTEGRRNLVDQSTAVTNQLTALLKGYYPQVLPWVGELDTAWACDFLEQWPTLQSLQHSSRRQILRFYERHPRPSIDLELQLKEFQQAQALTQDSAVLEYSALMVQALIPQLRALVTSIADFDRKIAEVFRKHPDRSIFESFPGAGAALAPRLAAAFGTDRDRFQAATEMQELAGIAPVTEMSGTKHYVHWRYACPKFVRQSFQEFAEHSRRWCRWAKAYYQLQIQRGKTHNGAVRALAYKWIRILFRCWKERAPYRDEIYSQSLVKHQSPIAPMMVAVVDKRVRVAAPTT

SEQ ID NO: 218159 - protein, 402 aa, unidentified
MNAVGIDVSKGFSTIAIMRPFGEIVASPFEVNHTDSELGKLANLLKSLSGETRVIMECTGGYHLPIANTLHAVGLFVSAVHAKLVHDYGNNSIRNVKTDKAEAIKIANYGLSNWLELPKYIPQNDVRQMLKTYSRQYNKYNKIKTMLKNNLIALLDQTFPGINELFTSQAREKDGHEKWIDFAAYFWHCECVSSLSPKAFEERYRKWCKRSGYYCTSVSKIYAHACDNFGVVPKNETTKLLITQAIVQLNHIAESLAIIAAEMKKLAVSLPEFPVAVGFFGVGEILGSQIIAEIGDIRLFYRKQSLVAFAGMDAPPHQSGRFESSSNRISEKGSPHLRKTLFQVMSCVLQHAPANDPVYQFLDRKRAEGKHYYSYMTAGSAKFLRIYYARVKEYLANLDNAT

SEQ ID NO: 218160 - protein, 309 aa, unidentified
MNTQKNQNEINVGADTGKQQLDIYIHPLDVYFTVSNDEKGIADAVSEIRKYRPTRIVIEATGRLEHAFIMTCAKAKFPFVVANPAQVKKFAGAMGQVAKTDKLDARLIARYGATMKPSLSTSKPDDMRRVSDLLSRRQQLLVMQTMEKNRLQIMPKELLGSIKPMLTAIKNQLVKIDQQLMKLIENSPQYQHKNELLQSVPGVGPVVALSLISNMPELGCLTNKQAAALVGVAPINRDSGSFQGQRRIRGGRSQIRTVMYMAMMSAMQCNPVFKATYQRLLAAGKAKKIAIIACVRKMVVILNAMIRNG

SEQ ID NO: 218161 - protein, 349 aa, unidentified
MGIIGGLDVHRSQITFDWIDSDSGQRERGQLAPAHREHLRMWLEQFAGRQAAFALEGCTGWRYVVEELTRAGIEAHLAEPADTSTLRGPKRRAKTDQLDARHLRELLAAGRLPESWIPPAHVLEVRTLVRCYKALGDEHTAWLQRVHATLFHHGVPAQRNLLAPDRRERLERGSGLSPAARQLVAVALRMLDQLDAELDLLRAELTRVARRQPGCRALDELYGIGPVTAVAIWAELGDVGRFTSSRFAVRHTGLDVTVYSSDGKRTPGHLARQGPPVLRWALFEAATCAARASSPDHAYYLQVKQRLGGNRATLAVARKLARRCYHTLAALGDQAFAPPVDTQPVGQVA

SEQ ID NO: 218162 - protein, 369 aa, unidentified
MEKGTTYVALDDSKRKIVAGILRPDEVNPELREIANDPRQIRRLFERLKREGPVAACYEAGVSGYDLHRQIVALGVACEVIAPALTPRRPGQRIKTDRRDAAKLVRLFRADELTAIHVPDEAEEAVRDLVRCRDDIRRDVLRWRHRVLKLLARHGRAYLAGKTWSQAHWRWIREQRFALPPLQRAFEATVFALEQALARQAELDKELEAVAATAPYREPVGWLRCFRGIDTLSAIILVAEVIDFQRFRRPRELMAYLGLVPSEYSSGESQRRGALTKAGNSHARRVLVEAAWHYRHRPTIGRALASRSQGQPDEIVGQAWRAQQRLHRRYRHLVGHGKRTPVAVAAIARELVGFIWAAMTRHESRRQAA

SEQ ID NO: 218163 - protein, 374 aa, unidentified
MSNVRFIGLDVHAKTIAVAVAEPNGEVRSLGVIPNRPESIRKLVKKLGPPAQQRVCYEAGPTGYVVYWQMTALDVEVVAPSLVPVKPGDRVKTDRRDALKLARSYRAGDLTPVWVPDAEHEALRDLVRAREAAKKDQLRARHRLGKFLLRHGRRPPTTMNPWTQSHLTWVKTVHFAHAAQEATLLDYLHEVEHVADRIERLERAIDAAVKTAPERMRAVIEALQALRGIALVSAATIMSEVGELSRFTKPRQLMGYSGAVASEDTSGPRTRRGGITKAGNAHLRRIVVEAAWAYRHRPAVGPALRKRQATVAPEVKEIAWKAQHRLHARYRALTARGKCKQQVMTALGRELLGFIWAIGVHVEAGTGRATPIAA

SEQ ID NO: 218164 - protein, 344 aa, unidentified
MEHYAGLDVSLELTSVCIVDARGGIVCETKVASEPEVLIRFLQTQELEIGRVGLEAGPLSQWLHAGLTAAGFDPVLLETRHVKAALSAMTVKTDRRDARGIAQLLRLGWYRSVHAKSASAQEVRALLTARKLIQGKLLDIESGIRGVLRGFGLKVGPISRGRFEARILELVDGHATLEEVIGAMLAARAALEAEFKRLHRALLALVRDDPVCRQLMSVPGVGAIVAITFKSGVDDPARFRRSRDVGPHFGLTPRKYQSGELDVTGSISKVGDRMVRTALYEAASVMLTRTVRFSGLKAWAMAVARRRGTKKAKVALARKLGVILHRMWVDGTSFRWSNEETAIA

SEQ ID NO: 218165 - protein, 378 aa, unidentified
MNRIIKIGMDVHTTNYTLCIFEPSFEHDGTVHCITQVKPEVKNIIRVIETFKKKHENEELNIVCGYEAGCLGYSLYHELKEKGIECVILAPTTMKTEKGGRKLKNDYRDAKMIAECLAYGGYSAVHVPTELDNSVKEFIRMRDDIKENLKSIKQQIIAFLTRNGKQFDGKSFWTRKHIDWINTVSFSEPLLQDTLKEYMIEYNHLCDRVETLDKQIEEISVKEEYVEKVQQLQCLIGIKTHTALSLIVETSDFNRFKKGNMYSAYLGLIPGDDSSGGQENKLGITKAGNSHLRKLLVEAAQGYTRGKVGFKSKVLKSRQEKCSSEVVAYADRANERLRRKYYRMTLRGKRYNVAKTAIARELACFVWGIMTDHIDLCS

SEQ ID NO: 218166 - protein, 352 aa, unidentified
MPLRYIGIDVHTSSCTIAVMGPSGKRLRHWQVETDRKVLVEAIQSVSGPRYICFEEGTLSDWVYELLEPLAAELQVIQPLRTRGVKSDAHDAWAAADTMRLQPADVTRVFKSPGTFTALRKAVRTHGLIQRDMVRAKNRIHACYRARGVQGLCSSIYDPLQRDEWLKQLPPQQRRMTELLCVELDGLVETCHQAQLWMLEEAQRVPVVGLISTAPGISTIRASQIVATVVSPHRFRTSRQFWAYCGLGIVMRSSSDWAKDQGRWVRTNLTQTRGLNRNHQPLLKNVFKGAAMTISSSKMATHPLHQSYQRLLAAQTKPNLAQLTIARRVSAAVLAMWKNKESYDPMKQTIAA

SEQ ID NO: 218167 - protein, 321 aa, unidentified
MVLGIDIGKKKLACAVMLNGKYKTKTIANTPAGFEMLWSWLERFDSLPKHVCLEATGPYGEDVATFLYDQGLPVSIVNPARVKGFAQSEGLRTKTDKVDARLIANFCHSKKEKLQVWQPAPKEQRELRDLTRRLEALKQMRVQEKNRLEGNLSDLVVANLKKHIRFLEKQIAELEKKISDHIDRHPGLRQQCDLLISIPGVGETTSANLLSELSFDQFTSARQAAAFAGLTPSDRQSGTSVKGRPRLSKIGSNRLRKTLYMPAMTAMRYNPQLSQFAARLAHKGKAGKVIVAAVMRKLIHMAYGILKSGRPFDPDYAPQLA

SEQ ID NO: 218168 - protein, 360 aa, unidentified
MFSERTSVGLDVHARSVVACAVDTVTGELIRSRLTPEHADVLGWISRLSGPVAVAYEAGPTGFGLARELRAAGLRCEVLAPSKLQRPAGQRVKTDARDALHLARLLRLDEFTGVRVPGPAEEAARDLVRAREDVRGELMRARHRISKLLLRRAILYSGGKTWTGRHHAWLAAQRFESVPVQAAYDAAYEAVIMAEDRRVRLDQAIAVLARDPAWQPTVARLGCLRGIDTLTALGLAVEIGDWDRFTGSSIGAYLGLVPSESSSGESRSQGSITKTGNTHARRLLVEAAWHHLPAYRPGVTLRRRWDQAEPAARGRGHAGNQRLHQRWLAFTDRHKRPVVANVAIARELAGWCWSLATLPD

SEQ ID NO: 218169 - protein, 316 aa, unidentified
MNYQMNYIGIDMSKDTFHAALEEGKVCKFKNTKEGIEEFMTTIETIFPIQSTKIGVEATGAYHLLFAVTLTEHSWPVAVINPLESHKIISQGLRTVKTDKLDAEKIRQMVAMGKGYIFTDTAEVLALKALVVERQALVKMRKMTKQRITVHQLKEQATGLKLHDSLTSVLKVLSQEIKTMESAMAGYEIETQKLLRSIPGVGCATAAVLVAFIGDVNRFSTPEKLVAYIGLDSRVFQSGTSIKGKGYISKRGNSYLRQILFNAAFIARQYNPDLKAYHEKKMREGKHYFTALCAVERKLIHLIYAVWKRGTPYEAR

SEQ ID NO: 218170 - protein, 351 aa, unidentified
MSQNLNTAIAVIGIDIGKNSFHLVGHDHRGAIVLRQKWSRSQVETRLANLPPCLIGMEACVGAHHLSRKLQMLGHDARLMPAKYVRPYSKGQKNDFRDAEAIAEAVQRPTMKFVATKTADQLDLQALHRVRERLVGQRTGVINQIRAFLLERGIAVRQGLHSLRSELPGILATRTDVLSPRMLRIIEDLAGDWRRLDARIEGLSSEIETLARQDKACERLMTVPGIGPLISSAMVAAIGTGDVFSKGRDFGAWLGLVPKQISTGDRTILGKISRRGNRYLRALFVQAAWVVLVKVKCWERYGLKSWIEAAKKRLHHNVLAIALANKLARIAWAVLNKGRAFECAKTEETAS

SEQ ID NO: 218171 - protein, 325 aa, unidentified
MSITIGIDVSKLKFDVCILKSDGTKTHIEFDNKKTGFEKLYKCLKSQSDKHFALEATGIYGENLCAYLYMKKQSVFLLNPVQTARYFQCMMRRTKTDKCDAINIAMFLNHHKDELTPWKPRSKTFNTIKNLHHCLQDLNCDRKRVLGRIEACTYTDQDGRAQALKHYKKQKKFYDAQKEFVLKQLRLLVNDDLEVKAQYDLLISIPGIGEITVFGLIANLPDLTRFKCAKQLAAYAGLNPGVRESGSSVRGRGSISKTGSKNLRNVLYMPALVSKKCCKPMFKFADRLIGKGKKPKVAVVSVMHKMIRIIFAVLTKGQVFNEDMV

SEQ ID NO: 218172 - protein, 347 aa, unidentified
MQFYTRQHRHYCGVDLHARTMYVCVLDQAGNVLVSKDIASAPEPFLELIAPYREDLAVAAECMFTWYWLADLCAREGLVFVLGHALYMRAIHGGKAKNDRIDAHKIAALLRGGMMPQAYVYPQAMRATRDLMRRRNYLMRQRAELLAHITNTNHQYNLPALGVRPARPAERSGLAEHFAEVPVRKSVEVDLSLVEHYDRQLLPLERYLESNAQAQDPVALAIVRSVHGMGKVLGLSILYEIHDIGRFSRVQQFLSYCRLVKPTKESGGKILGHSGKKIGNAHLKWAFSEAAVCFLRANKPAQALRARLMAKHGKGKSLAIIAAKLARAVYFMLRRSEAFDAERFFAH

SEQ ID NO: 218173 - protein, 416 aa, unidentified
MPNETSSPIPPRAELAYVVGIDIGMESCMMCCLTMDKRQVIKPSKFSNEADGFEWLFEHLDRLKTAADQILIGLEATSRYGENLYHALLKRGYRLCLLHPGQIHAFAQQRGLRAKTDRLDAATIARALLSGEARFGYIPSDQVVTYRELTRLYQQLTGEVVRYKNEIHALLVVLFPEFTQVFADPSRPSALTVLKAYPSAQAMQEAEPKLLYQILREQCPGRYGRKTADKLIHLAKASVSGGVAIGARSSSMRILCDQLEHTQKNLELLQQEIERLLDSDPKARSVLAMSELGPMTVAVLRAELGDLDRFARMDQVVAYVGLDLQVKQSGKWKGQTKLSKRGSGHVRRILYLAALRSIRLPTSPFGIFYHRLVDRGLKKGMAVIAVMRKLLIVAAHLIQTQEDYDASKVGVQALRA

SEQ ID NO: 218174 - protein, 446 aa, unidentified
MKKFENMPIINTQAAGIDIGSKSHFVAVGQDPHKDVREFGVYSLDHENMIEYLHAHQITTIAMESTGSYWQTLFFALQEAGFEVLLVTGHQTKNIRAKTDVKDSVWIQKLHSLGLLRGCFLPDKHTSKMRHLYRHRISLIESASKMTNKMQKAMRMMNLRLDVAINDITGKTGVKIIEAILQGERDGTVLSQLADPRVRKSKQEIANALQGQWNQELLYELEDCYDIYKMLQEKLSVCDQKLEHLLEEFTQDIFFDEKTELKKKQTKGKNQPKFNISEMSYKYYGVDLLAIESISSSTVLTLICEVGYGIYKFKTAKQFASFLRLAPNNRVSGGKVISSRTPKGSNKLALALRNAANTIDRTKDGALTRFFKRVAYKKGRGAAITATARKMAVIIWNMITKKEPYQPMETAHYQQKIKEKTITAFKKKMKQLNITLNDIGNLNTIS

SEQ ID NO: 218175 - protein, 388 aa, unidentified
MTQAPGARPTPAVLDYERTLILAIELSNTSWVLAAQIPGLPGVKAKRSIEPTPEALMAAIASYRARAETAGRNVDRVVTVYEAGWSGFWLVRWLAKYGIETHVIQPSSVPVDRRARRAKSDGIDAELLLRTLLAWLRGEPRVCSMVPMPTEADEDARRRVRERAELVTERFGLVNRIRAILATLGAGEYNPLRRNRRQRLDELRTALGDSLPTHAHAKIARMLDRLELLLIQITELEQSRDAVLEDKTPDRAASMIQQLAKLRGVGVQTATVLVREGFVREFANGKALGSYAGLTATPYSSGGIEREQGIGKAGNARLRTVMVELAWLWQRYQPDSAQVSWFRERIRGTGRRMRKVMVVALARKLLIALWRFATLGVVPEGAVMKPAS

SEQ ID NO: 218176 - protein, 369 aa, unidentified
MQEIDAFVGLDVHKATIAVALAEPARGGEVRRLGEIANEPEAVARLVRRLRKRHGRPEIVYEAGPCGYGLYRQINDLGVSCRIVAPSLIPRAAGDRVKNDTRDAEKLARLLRAGELTFVWVPDPVHEAMRDLVRARHTAARDVRQARSHVQMFLLRQGARYEAKSWTMRHRVWLSDRRFDHPGQQIAFQSFLNRLEQAEARKTELEAQIGEICEVWSLGPVVRAIQALKGVGPVIAATLVAEVGDFSRFESPRKLMAYLGLVPGEHSSGRTVRPRGITKTGNSAARALLFEAAWSYRTTPKVGQWQQAHRPAVDQAFKDIAWKAQLRLYGRYRRLTARGKRNPVAITAVARELVGFIWDIARRTSPQLV

SEQ ID NO: 218177 - protein, 326 aa, unidentified
MQTMTTIGLDIAKSVFQVHGVDAGGQVIVRRQLKRRYVLTFFQKLSPCLVGIEACGSAHHWSRELQALGHTVRLMPPAYVKPYVKRQKNDATDAEAICEAATRANMRFVPTKTAEQQSGLVLHRARHLFVRQQTSVINAIRAHLAEFGIVAPVGRHGVEELLNVVTDPNDRRVPDIARACLSALGDQLQRIKEQILEFDRLIRAWHRSNEMSMRLEEAPGVGPVLATALVATVADPKSFRSGRNFSAWIGIVPKQHSSGGKNRLGNISKQGDRYLRCLFVAHFLSSVTPKSIAPNTDPGLRHCWRDGRPRLRLSRLPTKSREWSGP

SEQ ID NO: 218178 - protein, 392 aa, unidentified
MIYVGIDVAKSKHDCCILGMEGQILFDSFTFPNSKSGFQELTSSIQACLLNANEKEVRVGLEATGHYSTNLVAFLRNSGIEPVLFNPLSTNLFRKSQTLRKTKTDKVDARCIASMLRSANPAPHVSVSYHTDELKALTRSRYRLIGYRSKLKISLNRLLDIVFPELAGLVWSTNQKSVYALLLELPNTNAISHCRMDKLTRILHDSSKGKYDREKALLIRQAAMDSIGSNSPALALEIRQTIHLIQNVQVEVDQLEQVIENEVKSTNTPLLTIPGIGYTLASIILAEIGDIDRFDSPEQLLAFAGLEPSTHQSGNYSANHTPMVKRGSTYLRWAILQAARLVAMRDSTFKAYLKKKRHEGKHFLVALSHTGKKLVRVIFHMLKTNRVFVPQS

SEQ ID NO: 218179 - protein, 437 aa, unidentified
MSDQKSVEIRVSVDVGYRRHSVAIGLPSGEVLEEFEIAHRPEGFAEFFSRIEKHQKVRGCEVAVAMEGFNGCARPLDAMVRRRGYRLYNINNLKLARFKEIFPGAAKSDRIDARKGLELFQLSDHLPLAKEVLQEVKGTPRENEVLKRLTRRRRRLVDERVRVISNLQTDMQAVCAGLLEITKNAGNQWFLNFLVSAPTLSQLARLRPATLRKIPAVGRKYAGLIEDWQKRAHFSEEVEWVGEMIQEDAKRCLELDEKIKALRAKIKEVAKDSKIAKTLLSIPGFGTICTAELAGEIGTIERFSKEGSLALYIGMSTLDNSSGKYQGSKQPKHVNTRAKAAMMVALDRHRKYVPESQRYYEKKRSEGKKHNQAIRALGRHLSRIIYKMLTEEREYEMRPERGNTKTKVSPRSLIKRQIRKPKISAKGENHKIYQQST

SEQ ID NO: 218180 - protein, 397 aa, unidentified
MYIVGIDIAKRKHEAAVIDGEGAVIIKPFSFTNNCSGYNRLLAMLAKAKLPLDEVSFAMEATGHYWLALFTRLQKEGFRVQVINPVQTNSIRSFYIRQAKTDPRDALLIAEVIRFGHFSESTLHPENIYELRELCRGRHAIVSMQADVKRKVVALLDQVFPEYETAFTNMFSDTSMAILQTCPTPKELSEMPLEELCYLIEVSSRKRFRMAKAQELQELARNSFGFAMAGDVFSTMIRLYAKHLVFLKQQVREMDRKIAEIMETLDTPITTITGIGPTLGAYILSEIGDISRFSSAAKLAAYAGIDPTMRQSGEYNGVRNRMSKRGSPYLRHAIWLAASSAVLHDPALKLYFQKKRDEGKPYMASVGHACRKMVSIIYAVMRDNKAYTPCIPNEISA

SEQ ID NO: 218181 - protein, 358 aa, unidentified
MNDTLLQKLQQPKLYAGIDLHKKYAYITLMDQLGYIQHQGRFENKEKQLVPFLAEKNTAVPIEAIIESTYGWYWLGEELESAKIAYVLAHPKKVHDLVKGRKTDKKDSQALADLYRTNLLPEAYVPTSTERGFREILRFRYLLVRQKGMLQRRLRDILAKQNLECQYTDILCKSAKAWLREQKFPFPYAEEVETILNHCKYFEEDIEAYTKKVAEQSDDNPTAKLLESIPGIGDLLALLLAVEIGDISRFSNDRALASYAGLVPSVSSSGDKTHLGETSNKSNPYIRWALAEAVSHVVKKDPVYKAFYDKLESKKGKSKARMAIMHKLVRAIFVMLTKKEKFKIQQLPKENSDSRTQT

SEQ ID NO: 218182 - protein, 424 aa, unidentified
MEVIHERVAGLDVHKETVVACVRVMVGGRRPKRECRTFATTTEGLLNLLEWLTATRCSHVAMEATGVYWTPVWKILSDGDFELIVANAAHIKQVPGRKTDMNDATWIADLLACGLIRASFVPEEEIQELRSLMRTRKQLVREQTRHVQRLQKTLEEANVKLDSVVSDIMGVSGRRMIEAMIGGERNPQRLAALADRGLKASPKQLYDALHGRLREHHRFLLKLHLTQWDALDATIRDIDRQVDGQIERMDETTEDQQPPFRQLILRLCSIPGVSHLSATSILAEIGRDMRRFATAGHLVAWAGLCPGQNQSAGKSKSSRLRKGAPWLKTMLVQCAWAAKRRKDSYYMAQFQRLKARRGPQKAICAVAASILTAIYHMLRANAPHRDLGADYFDRRSPDAKARRLVRQLTKLGFAVNLQPLDNAA

SEQ ID NO: 218183 - protein, 391 aa, unidentified
MVCVGIDVAKDKHDCCILDSDGTIRADCITIPNNMDGFKQLLQTIRDCTKKSDKIKVGLEATGHYSYNILGFLLDNDLAVYVMNPLHTNLYRKSLSLRKTKTDRVDARTIATMLLSDVDLKSYTDTAYHNEELKSLTRYRFDKVRERAKLKQSVSRLVTILFPELEKLVPSLHIASVYALLSEYPSAKQISEIHLTKLTNLLATASKGRYGKDKAIQIRDAARTSIGSVMPAKFLELKHTIKLIRELTSEIDEIEVSIQKIMDELNPPILSIPGVGIQSAAMILAEIGDFSNFESPDKILAYAGCSPSTYQSGKLTNCYAHMEKRGSRYLRYALYNATKYVCHWNPVFAEYLAKKRAEGKHYNVALSHATKKLVRLIYALQKSGKAYLVAA

SEQ ID NO: 218184 - protein, 350 aa, unidentified
MFVGIDVHKHMHAAAVVDERGGEHGTLVFANRPEGYRRLIGWLAEHDAAHAVIGVESPGGYGRCLVGALATAGHEVLHVPAWRTHRERRRQGPGKTDPGDALAIADVVRRKHAELGPALQPELVRAIAVLELQRRRCVLDRTQAIQRLRADWTQVDPVAEAKVINCARATALRKLKRLTLGDGLIERVTASGIRQLARDIEALNARIAELESELAALLDEHGNPVADLLGAGNQIAAAVIAHAGDVRRFKDAAAFARYCGAAPIPCGSGQTAGRHRLHRGGNRQLNAALYRIAIVQQRHHPDAKAFLARKQREGKTLREARRALKRHLANVIYRRLHAWANTSPAMNLLT

SEQ ID NO: 218185 - protein, 341 aa, unidentified
MDYYAGIDVSLEQSSVCVVDAGGKILRETKVASEPEALIGWFTSLGTSLARIGLEAGPLSQWLFAAMKEAGLAVELIETRHVRNAFKTMPVKSDRNDARAIAELMRLGWFRPVHCKSMPAQETRAMLTARSLVKAKLRDIEMSLRGILRGFGLKVGETTSVRFSARVNELVAGHPSLEAIATALLAVHKVLLGELKGFEKRVRAIGRADARARLLMSAPGVGPVISLTYVSAIDDPARFKLSKNVGAHYGMTPKKYQSGQTDYTGRISKCGDKSVRTALYQAAHIILTRPVKGSALKSWAMRLAKRIGMQKAKVALARKLAVIMHRMLVEGKPFNFAARAA

SEQ ID NO: 218186 - protein, 476 aa, unidentified
MAIIDEQARVVGRARVSDDAAGFTQLLELLAEHAEGEACSIEIAIESDKGLFVAALVAAGSTVFPINPRAAARYRERYGQAGGKSDPGDAVLLANILRTDRHVHRPLPTDSELARAIKACARQHQEAIWARQQTMNRLRSLLRDYYPQALQAFPNLAHRAAASVLRAAPTPQAAQRLTPSRVMTLLKKAGRRNDEGLAEKISTALRASALRQPTPVEHAFGVAAVGLIDVITAMSNAIAALEAELATVFNRHQQAAVVTSLPGLGPVLGARVLGELGDDPHRFAGTAGLRSFAGTAPITRASGRSRVVTSRRICNRRLGDACHWWAFAALTKSAGARAHYDRRRAAGDTHNAALRNLANKLIAKLWHCLQNNTPYDEATAWANQTETMEGAAAGRLTRGGCLRADLGRLALPFSYVLVTWNLTAVRLVVPRCHHELRGPVDYVGDLGGEVAGAGPARAGGRVVADLGRSGSGASHD

SEQ ID NO: 218187 - protein, 315 aa, unidentified
MPHPATPSRFIGCDVGKAVIVVFDAMSGRSHSIANAPQALSDFAAGLEATCFVVCEATGGYENALLAALFAAGVPAHRADARKVKAFIRSFGTLGKTDAIDAKALARYGKDRCAELARWQARDRERLRLQALVLARRDMVRDRLAYANRRAAPGVEPTHAYLDAIVESFDGQIKALDADINALTAQCQHIAHAVKTLVAIKGVGAKTAAALIALMPELGSLPRRQAAALAGLAPHPKQSGETEAYRRTRGGRPEVKRVLFMAALSARKHNPNLKAFYERLVQAGKKSLVAITAIMRKLVVIANAKLRTANALQVS

SEQ ID NO: 218188 - protein, 399 aa, unidentified
MLNITAMGEEEALGVIIGMDPHKRSATIEVVDDRGVVMAKGRFGTDKVGYREMLAEGRRFADRVWAVEGCNGIGKHIAHRLVHDGETVLDVPPKLSAQVRVFATGNGRKTDPVDAHSVAMVALRTPNLVRVEVDDDLVVMGMLADRRDELGRARTQTINRLHRLLLELFPGGAKQFLSAQQARALIATIKPRDLPGKTRRRLAVELIGELERTDRKIKALKKELTALVTARGSTLLQLHGIGPSTAARLLADVGDIHRFAYRDRFASWNGTAPLDASSGNQQRHRLSRAGNHRINRALHIMAVVQLRNQTRGRAYYDARKAGGMPSMMAMRALKRRLSNVVYARMLADQNRRETAGPGGHSGTTLQSSATDLTPHIGSSDKPHPGPANHETRTSTLAAP

SEQ ID NO: 218189 - protein, 424 aa, unidentified
MHHRQVNHMKDWKDLTHYAGFDWAKDHHAVVIVDARGHIVADFEFAHSLEGWKGFVEKTSAWPQLGVAIETSQGAAVDQLLQREYRVYPVQPVAARSYCQRKAPSGTKTDHLDAWALADALRVDGQDWKLLQPLDPMTQQLRLLCRDEVSLIEQRTALVNQLQQALAEYYPTALEAFEDWTQAFTWEFVLAFPTPPALVGAGRRRWEKFLHTHKLWRSETAPKRLQLFAQADQFQASEPIIRAKSQLAVSLSKLLCTLGQQLKLYRQQIEALFQEHPDRALFGSLPGAKKVLAPRLLGVVGNDPDRYGSPEGLQCIAGTAPVSYQTGQINKVRIRWACDKFMRHTVHLWADCFRKKSAWGQVYYQNKRKEGMSHSCALRCLGQRLLKILFRILESKTPYDAELHARNQQKHGSWVLKLIEAPAA

SEQ ID NO: 218190 - protein, 390 aa, unidentified
MEARIVNNLLPAAPHHDAVGCLVAIELSKKSWIVAVNTPLADKISRHTLKPGDGKELLDLCERIRTRVTRETKRRVEIVSCYEAGYDGFWLHRLLEAHGIRNYVIDPASLQVDRRARRAKTDHVDVERLLRSLMAYLRGEPKVWSVVCVPSVAEEDDRRLNRERGRLINERIQHVNRIKGLLAIHGIYDYQPLRRDRMLRLERLRTAADGQTLPPRLKAEILRELQRLELILGMIKTIEAERDAIASPKTEVEHTNAKKIQDLAKIKSIGPEFATTLIGEVLYRSFDNRKQLASYVGLTPAHFQSGAMCRDQGISKAGNGKARTVMIELAWLWLRHQPDSPLSVWFRERVGKLKGRIRRITIVAVARKLLIALWRYLETGLVPKGAILKA

SEQ ID NO: 218191 - protein, 342 aa, unidentified
MPQVAIIGVDLAKRVFQLHGAAADGSVLFRKKLTRERFLSFLASQSPCVVAMEACATAHGWGREIERVGHMVRLIPPIYVKPFVKRQKNDAADAEAIVEAASRPTMRFVPVKSEAQQARAMLFRTRDLLVRQRTQLINALRGHLAEHGVVAAHGPAHVKRLADAIANDDSCLPIAVRELGELLLEQIAALNEKTRDLDKRLRDAAGRDGATKRLQTMPGVGPVTAVAVETFAPPMEVFRRGRDFAAWLGLVPIQRSTGGKPRLGKTSKMGQRDIRRLLITGAMSVVQAAGRSAPPENSWLAHMLDRKPRMLVALALANKMARGIWAMLTKGENYRDPVTTGA

SEQ ID NO: 218192 - protein, 376 aa, unidentified
MKKIMQHRRPRYLGLDVHRATIAVAIAEEEGAPTSYGTIANDPSAVRKLMARLGGQDVELRVAYEAGPTGYALHRQLAKLGVECMVVAPSLIPVRPGDKVKTDRRDALKLARLLRSGDLTSVWIPDREHEALRNLVRARADAKVDQLRAKHRLSKFLLRLGIEPPVGTRNWSERYFQWLRKVEFEHLADRVVFADYLAEVTAAGERIKRLEAALHQCAETSEQVALIRALQAFRGIGFVTAVTIVAEAGDLHRFRTAPQFMAYVGAVPSESSSGNAQHRGRITKTGNSLLRHAFGEAAHHARHAPRVGATLKQRQLEVPSPIVDLAWRAQLRLHYRYRHLGARIGTHKALTAVARELAGFVWGVSRVLDEQLAAAA

SEQ ID NO: 218193 - protein, 308 aa, unidentified
MTTMYTGLDIAKLNLQLELAGRPYDLPNTAPGQRRLVQLVTRQPGTHVVCEATGGYERDVVAALQAAKVPVSVLNPARVRHFARAQGQRAKTDAIDAAVLTAYGQALQPKPTAPRTEHEQHLTELVRRRVQLVEVLVAQRQQAEGLRLPAVRRQAQSLIRRLERDLEQMEEQLKALQQQTTELQARVQKLAAITGVGMITALSVLAELPELGTLNRQQAAALAGLAPHPRDSGQWRGQRRIGGGRAPVRRALYMAALVAARSNQVLKIFYQRLRAAGKPAKVALTAVMRKLVVLMNHTLKHPHFVPQN

SEQ ID NO: 218194 - protein, 364 aa, unidentified
MKKSTRNATGEHLKKSALVAIGIDLGDRISQYVALDDRGEQLFEGRVPTTAAAFQARFGSLGPTTVAIETSTHSPWVSRLLSQLGHRVVVANSRKLRLIYENRNKNDRIDAEYLARLVRLDPKLLAPVEHRSQTAQQHVAVLRAREVLVRTRSRAIGHVRGAVKSVGMRVPSCSAEAFVKRASPVIPPLLEPALRPLLKMLEQLNTQLATFDRQIERLAQDTYPEAKLLTQITGVGPLTAVAFISTIGDPGRFTHSRTVGAWLGLVPARRASGQSDPQQRITKEGDGYLRHLLINCSHYILGPFGPDCDLRRHGLAIAARGGKNAKKRAVVAVARKLAVLLHRLWRTGEVYEPLRNTMRRLTAA

SEQ ID NO: 218195 - protein, 405 aa, unidentified
MSVHQVASVTSSRIVVAVDVGKTSAMVSATDDARNRVFGPVGFAMTRSDLAATVARVSDVVAPSVRVKVGIEAAGHYHRPILDYAWPAGWEVLELNPAHVAEQRRVAGRRRVKTDAIDLEAITELVLAGRGQPAAARPRLLGEIGAWAAHRNRRVAVRSATKNQLLAQLDRAFPGLTKALPDVLATKIGRLIAAELADPARMRALGPTRLMRFARVRDVRLRRELADRLVLTAREALPVADAAVARRVLAADVALLADLDVQIAAAETELAALIPHSPFSTLTSVPGWGIVRVANYAAALGDPSRWPGPRQIYRAAGLSPMQYESAGKRRDGTISREGSVALRRALIDLGMGLWLQDRAAKAYAGALKSRGKRGGVIGCALANRATRIAYALVRDHTTYDPTRWS

SEQ ID NO: 218196 - protein, 337 aa, unidentified
MVEGTEGSHHKEGSTKMSKHSMVCAGIDTAKHKLDVALEGCPDTLQVGNTADGHVTLSAWLRQHRVERVGIEASGGYEQAVVAHLRRDGFVVVVFQPAQVRAYAKFLLQRAKNDKIDAGLIAACTAATKKIHAPPDPRLAPFAEHLTLIEQITDDIARLKNRRESCRDPRIGGFWKAEIARCGSLLRIELKALAAAIRQHRDLAERLELILSVDGVGLRTAVAILVRMPEIGRVTREQVASLAGLAPFDDDSAEHEGVRHIAGGRERLRGSLYAAALPAAMRWNPQLMALYQRLIAKGKPHKVALVACARKLLIFVNTVVERGTPWVAEPPAQLKSS

SEQ ID NO: 218197 - protein, 417 aa, unidentified
MKKNNKSPMKKEQKAKRAKAQRPVQREPKAVLAELLEKLSGKLELKATSASQREAGPRTELGPNLDRLTVGVDLGDQWSHYCILGLHGETLSEGQLQTREAEVAEFFQALPPARVVMEVGTHSAWVQEVIAGEGHEVVVANPRLMEGSKRRKRKNDRIDAKKLARLGRVDPQSLYPIRHRSREVRQDLVVLRAREALVAARTELINATRGLVKSMGTRLPKCSSPSFGEKVKDVIPEKVREALLPLVQLADALSDCIQSYDQKIEELGSEKYGHTKLLRQVKGVGPITALAYVLTLENPEHFAKSRDVGPYLGLVPKQEDSGESQPQLGISKAGDTMVRKLLVGSAHYILGPFGPDTDLRRYGLRLCERGGKNAKKRAAVAVARKLAVLLHRLWVSGEVYEPLGYASSRAIVQQAAA

SEQ ID NO: 218198 - protein, 341 aa, unidentified
MIGVDLAKEVIQVCIYTNQSVHSNKEMTHNDFLLWLFNTKPTVIIFEACGTSNYWKQKAIEAGHNARLISAKLVATVRQNQKTDKNDALAIVQAAHLPEISFIKGKSEEQQQLQSVLRLRELAIKQKTALSNQLKALLLEFNIRSSSRNGGLKGIIESTLEDAENGFSCEFRQALDIAWTQYAQLLESIKVYDECLESSVKEQNDCKHLLKLEGVGAVNAIKLYIALGCADLGTFSKGKDASACIGLTPLQYSSGGKTKLGSIGKHVKNSRLRSDLITGAMSAISQIVKRNAKTKKEEWIQELVARRGKKCAAVALANKTVRTAFAMLTQGTEYKAELLAA

SEQ ID NO: 218199 - protein, 318 aa, unidentified
MAQKGTLVGIDVAKGKVDVAIRSAAADASFTNSAEGRQQLLDWLTQHSVYKAVMEASGGYERSWAALLSDAGLEVVIVDPKRVRHFAKSAGRLAKNDPIDAQMIAWFGEVFGDTPGKPRDKARQELDQLVTARLGLVRLQTQVESWGEHDQPKVVQKIHQALLKAVAAQLSKLQAVITARLENTPQFTQRADIIQSVPGLGDAAVAGLIAFLPELGRVDRQAAAALLGAAPFDDDSGERRGQRHIKGGRRKLRNLLFMPILGAATQHNPVLKAHYQRLLARGKQPKVALMACLRKLIGILNTMLARSEKWDPTKHALA

SEQ ID NO: 218200 - protein, 427 aa, unidentified
MKEVPEQDLLIERVAALDLGKAALEACVRVPHESKAGRRMQEVRSYATTTADLLAMADWFRCWGVTRVVMESTSDYWKGAYFLLEAEGFECWLVNARDVKNVPGRPKTDKLDAVWLAKVAERGMCRPSLVHPEPIRQLRDLTRYRRALVQDRAREMQRVEKLLEDAQIKIGTVLTDIHGQSGRAMMEALIAGERDVCVMAQLAKGRARNKIRELEEALRGFFTGHHAMILRMMLDNIDRMAAQLTELDRKIETAVAPFAQQIGQLVEIPGLDQIAARELIGEIGVDMTRFPSPAHLASWAKFCPQVHESAGKKKSKSRGKGNPWLAGALGRIVFGFSRSDSFLGARYRRLAKRRGPQKAIIAAGNSLLTVVYHLLSDPNTRFHDLGSDYYTTRIDKDRQARNLARHLQALTGQKITIHDGQVILHTP

SEQ ID NO: 218201 - protein, 346 aa, unidentified
MQPVIGCDAHKRFSVFVSVDQQGKASRPVRVDHDRELYCSYLRSLPTGSEIALEATGHWYWIVDAMEEAGHHPHLANPFEAKRRMAKSNKTDALDAKGLAILLRCGTLPETWIPPGELRDQRELLRTRMALRDLRTSLKHRIHAGIDRYGLQADAISDLFGTKGRIYLASILKALPTETAHMIALQLNSIDQLEEKIAAIELRIAEQLKASPEMRLLRTIPGLGPILAPLVWLEIGDVERFPRAEHLASYAGLVPRIIASGGHIRHGGTCRNVNHYLKWAFVEAANCAIRIKAYRQSHIGLLYQRLYPTKGHGRAVVAVARHLAEASYWVLRKRQAYRAPQPRIAG

SEQ ID NO: 218202 - protein, 369 aa, unidentified
MKTKTTPSVVPTSPATVTPGGFTLGLDLGDRSHHVCVMDATGQIVREGSLLNTRPALAKLIAEFPRATIAIEAGTHSPWISRYLTELGATVLVANPRKLHAISRSERKCDRRDAQMLARLARVDPALLHPIQHGSAQAQHDLLGLKLRDALVRTRVNLINAIRFTLKSLGHSVRNPSSESFHKTVLADVPADCLPVIQPLLTVLAQVTEQIKGMERDLVQRSRKDYPATQRLQQIAGVGPLTALCFVLKIGDPQRFSRGRDVGAYLGLCPRRDQSGGTDKQLRISKCGDGLLRRLLVSAAHYILGPFGPPCALREHGLRLAGTGSAREKKRAVVAVARKLAVLLLSLWKHGTDYEPRVTASPVLVMTPA

SEQ ID NO: 218203 - protein, 358 aa, unidentified
MKYVGIDVHKKMCQAAILDEDGSLLDEIRFANTPEEIEEFSGKLTTFHDEVKAVVESTGNLWIQIHDRLEEHGFDVALSNPSKTRLIAEAKVKTDKVDARTLASLLRADMIPTCYVPGEELRSKRELLRHRLNLVKNRTEVKNRVHGLLDKHGLRMPGTTPFSKENISWLRGLSLGFMDDAILRSDLAVLDAVDAQVTLIEGKIAALAAEDRRVRLLMTMTGVGYFTAMLVMAEVGDVGRFRGDKEFASWMGLVPSVHQSGERIRMGGVSGPGNKRLRWALVECAQAAVRFDPRFSGLYERVSRRRGKGCAVVAVAHEMSRIMYFMLSRGEPYRGENRELTERKLKSMSKKAFNGLRN

SEQ ID NO: 218204 - protein, 339 aa, unidentified
MVKETSVCVVDDAGKVILEQKVLTEPADIIALLTSLGVSFGRIGIEAGPLSQWLVNALTAAELPVICVETRHMKALLTAQQINKTDRNDARGIAQMMRVGLFKPVHVKTLVAQEQRMLLTSRKLLQRKLLDLESDLRGTLRNFGLKVGTVSGSRYEARVRELVAGFPRLAAIAEPLLNVRRVMRQQFAVLHKMLLDTVRDDPVCRRLMTAPGVGAVVALTYRATVDQPQRFVHSRAVGAHVGLTPKRYQSGEVDYDGRVSKCGDALLRTMLYEAAHSLLIQSRKWSWLKAWGLRVAQRRGIRRAIVAVARRLAVVLHRMWVDGSEFRWSKDSAAVPAVA

SEQ ID NO: 218205 - protein, 422 aa, unidentified
MLTTTHDTEEIIERVAALDIGKAELMCCARVPDEDHPGRRLQEVQPYPTLTRSVLGLSDRLRCLGVTRVVMEATSDYWKPVFYLLEAAGFETWLVNAKDVKHLPGRPKTGKLDAVWLCKVAERQMLRPSFVPAPPIRQLRDLTRYRADLVAARTAEKQRVEKLLEDACIKVSSVVADIFGVSGRDMLAALAAGERNPKALAQLARRSMRAKITVLEEAFTGHFTGHHAFLLQTMLGRVDAISADIAALDDRIAAQAAPLADAIARLDEIPGISLASAYVILAEIGTDMTRFPTAGHLASWARVAPGITESAGKKKGKGSTGHGNAYLAAVLGNAAAGAAKTETYLGEKYRRIARRRGSKRAIVALGRSIPVIVWHLLSDPGARFHDLGPDYYATRLDSDRRKHTYIRQLQALGYKVSVEPTA

SEQ ID NO: 218206 - protein, 306 aa, unidentified
MSEVRTIGLDLAKNVFQVHGADETGAVVFRKQLRRGQVLKFFGGLPRCLVAMEACGSSHFWAREIGHLGHEVRMIPPAYVKPFLKRQKNDMADAEAICEAAQRPTMRFVAVKSEERQAAAVVLRTRDLLIRQRTQINALRGHLAEFGEVVPQGLSFASKLIAMIEDPQTALPETARTALRFLTASLSQLNDQIRVLDAQIVRRAREDETARRLMTVPGIGPLIATALVALAPSPETFKRGRDFAAWLGLVPRQHSTGGKQRLGSTTKMGDRSLRRLLIIGANSELVWRARPQGCNTRHVAGQDAGA

SEQ ID NO: 218207 - protein, 339 aa, unidentified
MKLYGGIDLHSTNSVVTLLDEQDHTVYEKRLPNDLAMILSELSAHERAVQGLVVESTFNWYWLVDGLMEAGYRVHLANTSAMQQYGGLKHSDDHSDARWLAHMLRLGILPEGYIYPKEGRAVRDLLRKRSHLVRQRTANLLSFQNLMWRNTAGSMSAGAIKRLDEAQVEELVSSHELALAMKSTLAVIRCLGEQVKILEAEVVSHVKREPAFKSLLTVPGIGQVLALTIMLEAGDMARFKTVGHFASYCRCVGTTRLSNGKKKGEGNRKNGNKYLGWAFVEGAQFARRYCPQVRRFHDRKKARTNAAVAIKSVAHKLARASYHVMRNHVAFDVSKAFAG

SEQ ID NO: 218208 - protein, 320 aa, unidentified
MRNAVGLDISKTTFDATAIIGGIEKSAKFDNDSKGFEQFKDWLDKMKCPDAHICMEATGNYYEGIADYIGSLYKVSVVNPLKISKYAESRFARTKTDKQDAKLIAEYCQTAKAQDLVIRKPIIDDGYKLKRLSALYAQLTADSTAQKNRLEAAKDTFVVKICQSNIRHLQKQIKAVKKELEKLTKQPALKAQTDRLATIPAIGRLTAVMLLNYLLGADFQTSNKFAAFAGLTPQIKDSGTSVRGKPSLTKYGNRRLRALLFMPAMVAYRIKAFPDFIARLEAKNKPKKVILAAIMRKLAVIAYHVHKKGEDYDPTRYKAA

SEQ ID NO: 218209 - protein, 345 aa, unidentified
MKLTTFGIDLAKNVFQVHGTDEHGKVLVKKQLRRDQMATFFVNLPPCLIGMEACGSAHHWARKLQAMGHTVRLMAPQFVKPYVKSNKNDAADAEAICEAVGRPNMRFVPIKNVEQQAVLALHRVRQGFVKARTAQANQIRGLLGEFGLIVPQGIGYITTRVPELIEDAENPLPGSFRQLVQRLLDHLKELDRQVKEIEAQIQAWHRNSELSMRLAQVPGIGPITASALVASVGDAKNFDDGRQLAAWLGLVPRQHSSGGKSNLLGMSKRGDSYLRTLLIHGARSVIYRAGQRAEPCSWINAVVQRRNKNVAAVALANKNARIVWALLAHDRCYEKGYRKAVVEAD

SEQ ID NO: 218210 - protein, 416 aa, unidentified
MRIVYARCCGLDVHKRTIAACVLLQEASGQVQQEIRRFGTMTRDLLELADWLQDRQVTHVAMESTGVYWKPVWNILEGQFALVLVNAQHIKAVPGRKTDTRDCQWIADLLQHGLLRGSFVPPTPIRQLRDLTRLRTSLRQDHTAVANRMQKILEDANIKLASVASDWLGVSGRAILTQLLAGEEDATKLADLSRRRLRAKLPQMQLALEGRLTDHHRGMLRVLWDQLEFLEAQLTKVDAQIQGHVQEYQEALALCITIPGIEEVAAANLLAEIGMNMEQFPSAQHLASWAGICPGNHESAGKRLSGKPHKGNTWLRRSLCQAAWAASHTKATYLSARFRRLAARKGKKRAIVAVAHSILIILYHVLKTKQPYRELGADYLDRINAAQLKRYFVKRLENLGLQVTVQYVEKAAAPPT

SEQ ID NO: 218211 - protein, 343 aa, unidentified
MQFFVGIDVSLESSSICVIDERGIIIKEGKVESDPQSVAKFIRHKGRKIEHVGLEAGQLSEWLFVGLSKEGFKVSVLESRHVRAAFAAMRVKTDRNDARGIAQLIRLGWFKSVHVKTLNARETRATLNARQFLVDKITAIENTIRSSLRNFGLKMGQVTRRGFAPRARELADGSSCLQLVTGSLLKVRETLLDELKKLDRKLIDAARADPVTQMLMTAPGVGTIVALTFRNAVDDPGRFAKVKSIGPWLGLTPRRYQSGETDRTGHVTKAGDLGTRTALYEAATTLLGRNGGWSTLKRWGLHIAARHGIKKARVAVARKLAVILLCMWQSNCPFRWSTQGAVA

SEQ ID NO: 218212 - protein, 339 aa, unidentified
MYYVGLDIHKAQSTICLLDPHGKRISTETIRGPWLKLFEKLKEIPKPFAVCFEASNGYGYIHENLLKLAKRVAVAHPGQLRLIFRSKHKNDRADAEKLAKLLFLDEVPPVHVPNGDVRAWRSLIEHRHRLVGERTRAKNALRALCRSHGITAPRNVWYSEGRSWLRELEWPTEMEALQRDIMLERIESINLMILRVERILRQKALSHIGVSILMTIPAVGIRTAEAIVAYIDEPGRFRKNKSIGNYFGLVPRQDASGSVNRLGHITRTGPSVVRKLLVESAWQGVRSSPRIRSYYERVMNKDPQRKKIAIVATAHYLLRVMLAMLTTGECWRDEEKEAA

SEQ ID NO: 218213 - protein, 334 aa, unidentified
MIILGLDPHPTTHTAVALDSRGVVLDSLNVKNDADGLHQLWLWSVQFEDHCWAIEGAGNRYVAPLLALLFARNQVVYHIHPSLTSQYRARRGKKKNDLVDAENVARVLLANPELPPYQLSTQRTRLQELSRTRDKLAQQRKANQMMLEALPDTTTASLSTALQAVLTSLEAALKELEHAMATLVAQVAPTLLTVQGIGVVLAGTVLAEMGDIQRFETVHHFASDCGAAPVERGSGKNTRWCVNVGGNRQLNRVLHLMALTRLRCDERTKTFVAKKEQEGKTKRAALRALKTHLARELYRTLQASHVGGPIPAPSKDLFPRRLDIPGSGRQALSL

SEQ ID NO: 218214 - protein, 340 aa, unidentified
MTFGTIGIDVGKNWFHLIGLDSRGVIVTRQRFNRAQLLRFMSKLPPCVVGMEASCGSHHLARELSGMGFDARLMSAKFVRPFLKGNKNDYLDAEAIAEAVQRPSMRFVPIKTVEQLDLQAIHRTRSGLISRRTGVINQIRSFLQDRGITVPQGPAVLARALPALMTAEEARLSDSIKQLIRMLREQWVSINQQVDELESELRSIVERDDACKRLASIPGIGAITASAIVAAIGDGRMFRSGRDFAAWLGLVPRQHSTGGRSTLLGISKRGNAYIRTLLVHGSRRMLRFFKDPDTAIGRWAVALKSRAHANVAAVALANKQARTAWALLTQGTFYQARPAV

SEQ ID NO: 218215 - protein, 351 aa, unidentified
MTCKKDVAVVRTIGIDTGKNTLHMIGLNEKGAIVLREKVSRNRIAARLVNIPPCLIGIEAGMATHYMSRDLLALGHEVKQVPPAYAKPFRQGHKNDFRDAHAVAEAVQRPSTRCVPIKTDDQLDLQALHRVRSRLIGDRTAVINQVRGFLLEHGIAVRQGPRSLRQQLPQILATRTDVLSSRMLRIIGDIVDDWRYLDDRIERVTDEIEGLARTDVNCGQLISVPGIGPIIASATVAAVGNGTAFAKGRDFAAWLGLVPKQMSTGDRTILGRITKRGNRYLRMLFVQGARAILLRPKSWAKHSFGPWLTAAARRLHRNILTIALANKLARIALTVLIQGRSYETRIASTAA

SEQ ID NO: 218216 - protein, 285 aa, unidentified
MKTPVFVGIDVSKAQLNLAVRPEGSRALPYDEAGIAQVVKHLQPLAPTLIVLEATGGLELPLTGALADAGLPVVGVNPRQVRDFAKAAGKLAKTDTLDAHILARFAEVMRPVPRPLLDEQSLALAAILARRRQLIAMVTAEKNRLSSARKAVRQSLRAHIAWLERDIEQTDVHLAQAIQNSPVWREQDDLLRSVPGVGPVVTTTVLAELPELGALSRKQIAALVGVAPLNRDSGTLRGKRTVWGGRAHVRAVRYMGALVATRYHVVIKAFSHRLPALPAKPKRWR

SEQ ID NO: 218217 - protein, 352 aa, unidentified
MEVLHPRCAGLDVHKDSVVACIRIPRGRKMAHQVETVGTTTQALRRLNDWLNKQKVTHVAMEATGVYWKPVWHVLEGSFDLVLANPTHIKNVPGRKTDVNDATRISDLLAHGLIRSSFVPPTGIQDMRALMRTRKQLVRERAQHLQRIHKTFEHANFKIASVISDATGVSGRRILEALIDGKTEPEELLAKTNKHLRASRSTLLEALRGRIRPSHRFLLQLHLGQIEALEQAITRIDGEVGVLMDPFRAKVEKLMTMPGISDVAAQVLVSEIGVDMSRFATAGHLLSWAGLCPRNDESAGKRRSTRVRQGAPWLKPTLVQAARSATRCKLGYLPTQFFRIKSRRGPKKCEFL

SEQ ID NO: 218218 - protein, 375 aa, unidentified
MYQHTFIGLDVHAVSVVGCAFNPDTGELVRMQMESDPAVVLDWIQHFEAPVKAVYESGPTGYVLARYLREAGIDCIVAASSKLLRAPGDRVKTDQRDARILAEMLALGQVTEVRVPTREQEDLRDLSRLRARTAKDLAQSRQQVNAVLLRHGIRYPKETKWTHEHILWLHRQRFDSEVLQFTVNAQVEQEELLAAHLKRIDQRIATTARECEYAAVIDALMCLRGISVTTGFGLAVEIGDWTRFTGANISSYLGLVPSEQSSGQSRHQGPITKAGSKYARKLLVEAAWMHQRPYARPGIRLMRQLELVAPATRIRALEGNHRLHHKWEVFQARKKRSVTANTAVARELVSWCWSLAAPLQDTKNVHGTGGSMSAA

SEQ ID NO: 218219 - protein, 343 aa, unidentified
MEKIATIGLDLAKSVFQVHGVAEDGRVVIRRALRRSQLLEFFRGVEPCLVGLEACASAHHWANVIGQFGHTVRMMPPAYVKAYVKRNKTDAADAEAICEAVTRPTMRFVPIKSPEDQAAGMVLKTRELFVRQRTQMANAMRAHMSELGIIAATGMASIAKLVAILRDDDDARLPSAARFALLEMAEQIEELTARIEALDTKIMTAVKADETARRLTSIPGVGPIIAATVRATIQDPAAFRTGRDLAAWIGITPRAHSSGGKERLGGISKRGNKQLRTLLIVGATSILKLARRGVKLPAWVLSLIARRPYKVAAVALANKMARTIWALLVKGGTYQAPAIMGRA

SEQ ID NO: 218220 - protein, 425 aa, unidentified
MNYKQNEKINQVKESTLVVGIDIGSTTQYARAFDWRGIELGKVFPFSNSREGFESFKAWMQHLQDKYKKLDAIVGIEPTGHYWFDLGAYLEDEGILLVMVNPYAVKQTKELDDNSQSKNDRKDPKVIAKLVTEGRYSAPYTPDGVYADLRIMVANRKRLIREMTQIKNRFARWFAIYFPEYTDVFGDYEAQSSMLLLKKVCTPEAIVELGDEKINQIWRDAKLRAVGMKRATTLCETAKRSIGLKKGSSAARYEMKLLLEDYEYKKAQLDAVMEEIEKLCRKIPESEQMLAIKGIGVITVAGFLAEVGDVRRFESPRQIQKLAGLSLRENSSGKHKGQTTISKRGRSKLRAVLFNAAIPLIAKNPEFKSLHEYYTTRANNPLKKKQSVIAISCKLIRVFYAILAKGVTYDAQKLISDIHRQPQVA

SEQ ID NO: 218221 - protein, 344 aa, unidentified
MEITTIGLDIAKRVFQAHGVDATGRAVLRRRLGRAEVLDFFRALRPCLVGIEACGTAHHWAREIRALGHEVRLIPAAYVKPYVKRGKTDAADAEAICEAVTRPTMRFVPVKTADQQAVLMLHRTRDLLVRQRTALVNALRGHLAEFGIVAPQGISRVAELLAVLLGEDEATLPPLARQALRGLAAELKALGKRVEEIEAAIVAWHKENEASRRLAAVPGIGPITASAIVATVGDVSNCASARHFAAWIGLVPKQNSTGGKPRQGGISKAGDHYLRRLLVLGATAVIRHTRIKAREGWLAELIERRPTMVAAVAQANKTARIVWALLARGESYRPQRGSPQHAGA

SEQ ID NO: 218222 - protein, 306 aa, unidentified
MPRKTTSLEAVATIGIDIGKNTFHLIGLDKIGAIVLRQKLSRGQVDARLANMPPCLIGMEACVGAHHLSRQLKALGHDARLMPARYVRPYSRGQKNDFGDAEAIAEAVLRPTMKFVAIKTVEQLDLQALHRVRERLVCQRTSVINQIRAFLLERGIAVRQGLRALRTEMPIVLAMTDKLSPRMIRMIEDLCTDWRHLDARIATVSNEIKTLSEQDDGAKRLMTVPGIGPIISTATVAAIGSGDVFSKGRDFGAWLGLVPRQMSTGGRTVLGPISKRGNRYLRMLFVQAARAVLLRPQSWEKYGLRS

SEQ ID NO: 218223 - protein, 410 aa, unidentified
MSHRVAGIDVHQKVLMVVVIDGQDTDWGVKRKRFGSVSSELRLLSEWLREQGVEEAVMESTAQYWKPVWYELERSMRLHLAQAFSNRAPKGRKHDFRDAERLVRRLLADELSLSLVPTGEQRSGRTMTRMKRQLTEDKSRLQAQIESLLEEMRIKLSSVVSDLLGVSRLRILTALAAGQTDARKLAGLRDERLRASQETLVDALSGHVHPYQQKLLDFYLKRYELIQQPIEKLNGMLGAAMQQHQQAVRRLAQVPGFGVNSAQQVIAEVGVQASTFASPAHLASWAGTCPGKEESAEQNHSSRCAKGNRYLRRVLNQAAQAAVKKQGSHFQMLFRRLLPKLGYKAAIWAVAHRLCRLVCKILQDQVDYIEQGSELNPKAKQQRARALLRRLQMLGYQVTISDLSPAQAKS

SEQ ID NO: 218224 - protein, 338 aa, unidentified
MKITTIGIDLAKNVFQVHGVDERGKVGLKKQLKRAQVLPFFANLMPCRIGMEACASAHFWARKLQALGHTVQLMAPQYVKPYVKSNKNDAADAEAICEAVGRPNMRFVAVKNAQQQAILAVHRARQGLVKARTAQANQIRGLLGEFGVVLPQGISHIAKRLPEILEDGENELPGSFRQLLARLSEQLQLLDRQVDELEGEILRWHRESEASRRLAQIPGIGPLGASALLAAVGDARTFANGRQVSAWMGMVPRQASSGGKATLLGMSKRGDSYLRTLLIHGARSVLQQVERHPERADPWLKQLLARRPKNVVAVALANKNARIAWALLAHERDYQAPA

SEQ ID NO: 218225 - protein, 347 aa, unidentified
MQITTVGLDLAKNVFQVHGIDDTGKVLVRRSLRRRQVLPFFGKLERCLVGMEACGTSHFWARELRALGHKVKLMPPAYVKPYVKRGKTDASDAEAIAEAVSRPTMRFVAIKSPEQQSVLALHRTRDLLVRQRTQLINMIRAQLAEFGIVLAKGVQHALKLVDRLVDGAAPDIPALACKIVIALAEQIRALQVRIGAFEADMKTWFHGNELARRLETIPGIGVITASALAASVTDPHRFTSARQFAASLGLTPKADSSGGRERVGRISKMGDRYLRRMLVSGMTSQLQSARRKPEAHPWVTGLLASKPDKLVAVAMANKAARIAWVVMTRGEVYRARHRVSDVGRMTT

SEQ ID NO: 218226 - protein, 359 aa, unidentified
MDAQEGAVRRIIGGVDTHKDLHVAAVVDEQDRVLGTQSFASTRQGYRQMLAWMRSFGEVQRVGVESTGSYGAGLLRFLQQAGVTVLEVTTPDRQDRRRRGKNDDFDAQNAAHAAFAGIRTVTPKSRDGMIEALRVLSACRKTAVTARRIALQMIQNTIVCAPESLREMLRRMTRMQLVRTLAAWRPDLTAYRDVEAAYRISLKSLARRYLELHDEIADLDAMIAAIVDELAPNLVARNSIGHVGAAQLLLTVGDNPQRLRSEAGFAALCGVSPVPASSGKTARHRLNRGGDRAANSALHIIAIGRLRTEARTQAYVAKRIGEGHSKLEAIRCLKRYIAREVFLLIKQRQREINQTRIAA

SEQ ID NO: 218227 - protein, 349 aa, unidentified
MYYVGVDYHKRYSVATVLDSAGEMVDRRRLDNRLEAFRELLEPYDKDEIEAVVEATRSWGIPVDMLEQLAGRVILANPGEVKLIAKGRIKTDKVDSLALAKLLRVGWVPEAYLRPRANREHQLILRVRCFFVQLRTRVKNRIHDLIDRQDEPIRETAANFSDLFGKKGMVWLKGLDLSHPCGTLLSRLLAAYDALDTQVRQSDRLVAELFAADDDCQRLAKTPGIGTFFAVLIKTEVGTIERFHSSARFCSYAGVVPSTESSGGKVWHGRIIKQSNRWLRWALVEAVIPATVADDGLRAHYEFYRRTKGSKVARVVTARRIGCIVYRVLKEKQPFYERPVTSHGYRQTG

SEQ ID NO: 218228 - protein, 456 aa, unidentified
MGIDIAVRAPHQASLTNEKGELLWSAHRFRTTAADLEKLWARLPSGHTPSDITIVMEPTRNAWVPLAAWFRRQGAQVVLVSAERSSDLRAYYAKHTKSDRLDSVLLARLPLLHPEGLHRERGIGPGDPLRRASKMHSTLVKRRTTSLARLDALLEILGPDWHAAFSADLSNKTPLQFLAAGYAEPHTVRRLGRARLTRFFYRHSRGAFGEAHADQILAAAHASLVLWGDELAFSDLAEDLAIEARLALALTAEIKELDERIAILVADRDPQGIITSAPGVGAITGAVILGRLGDASRFQSLAAVRSFSGLVPSLDSSGVSGRHGGPTKRGDHLLREALFISANQARRLDPTLAAKYHRLMIESGKHHNSALCHIATTLLTRVAACWRAQIPYQIRDVDGQAITRDEARAIIQARYTIPDKVRRSRVTTGTGRRRKESLRAPSTGPSNQHAKQSGAA

SEQ ID NO: 218229 - protein, 349 aa, unidentified
MGVLIGIDPHKSVNAAAAIDEQGELAGHETFPANRKGLRALERWAKRFPERRWAVEGAAGIGRPVAQRLAMAGEKVVDVPPKLSSKARLLSTGNARKNDRLDATFTAQAALQNERLAPVLSEDGDEAHVEVLRLLTERREDLVAERTRALNRLHVLLRDLLCDTVSKQLSADGASRLLRRVRPRDEPAITRKQLASAVVRDVRALDRRIADLDESIRQEVEASGTTLTEIFGVGPILAAKIVGIVGNVARFPSKAHFASYAGVAPIEASSGEVVRHRLSLAGNRSLNKVLHMIALCQARSDPRGGVYLRKKLAEGKSRREAMRCLKRRISDAVFKALLADSQLAQQTIS

SEQ ID NO: 218230 - protein, 345 aa, unidentified
MQSMYYIGLDVHKKTISYCVKDGSGIVHAEGTIPATRGDLDRWMKMLPQPWTAAMEATIFTGWIYDHLKPHAAALKVAHPLMLRAIAAAKKKNDRIDANKIADCLRCDFLPECYMASTEIRERRRTLRYRNLLVHQAVQLKNKISGLLMEAGVSYNKQKLHKVGYFKELLATNPDINEGLRPLLRLCRETLVRLQKTESALVRSLQRDSLLAERVQRLMTIPAVGPITALTWVLEVGDVKRFSSIKKAISYCGLCGAEKSSADTVKRTPISKQRNKHLQSVLVEAAKMAPRLSPELALIYDREKQKGNANRASLAVARKLVAYLVAIDRSQRDFLVVEKENCAAA

SEQ ID NO: 218231 - protein, 424 aa, unidentified
MQPQKSTACGIDIHKDFFVAAIMSRDGSTKIEKFDHTQEGLLLLKSWVLAEECSTVAMESTGNYWRPLYLTLEGYVELILSNAYVIKRIPGRKTDIIDAQWIAELALNGLLTPSRVFQKDVREIRELTRARERLVDQRTGCKAIVHDVFDAACIKLSSVITDIFGKSGRYLIHGLLQGKTIDELIEGIPSKRVQHKEKLLKNAIKSALSTSQVIVIEQNLRLIDQITEQVTQLDDEIIGRMKNREDDVQIAMSLPGIGMTAAVTILAELGDYHDFKSPDSLASWAGMVPSVYQSANKLRTGSITKHGSKHLRRILTEAAQAAARTKDTRFSAYFRRLKNRIGYQKAIIALARKILCILWHLLINREFYIDTQKTRPKNQSVSPKPVNPKSIERSIEILVKAGYCVQKSDILMNMRRFQGAADPP

SEQ ID NO: 218232 - protein, 347 aa, unidentified
MYKANRRDGLCERSLTMFPVGIDVSKNTLDLCILYDGIKGRIKTRNIQNNRHSVENILRWLRLQHCGPEDVHVVMEATGVYHERLATELHDAGFRVSLANPHRSREFARGMGIMTKTDKVDAYMLACYAFLKKPHHWEPPSPEIRYLAALLRRRDVLLGDALREENRLEKYLSTDTPADIISSCRRMAQLLREEVSNIERQIKAHIKASPVLRRDYTLLNSIKSVGPQLGMHMLVELRSHNFASAEQAAAFLGVVPIEKRSGTSVRSRPRMSKIGPPQLRARLYMSALCGKIYNKRMRNIYDEMCLRGKPKMVAIGALMRKLVHWCYGVLKTGTVFNDEGLKQVLST

SEQ ID NO: 218233 - protein, 370 aa, unidentified
MSQSSTLFVGMDVHKDTIAVAYVAQDHGAEVTYVGTIGTRQCDIDTLIRKMQSKAQHLIFIYEAGPCGYWLYRYLQKKGYDCWVVAPSLIPKKAGERVKTDRRDAVQLARLARSGDLTLVYVPKVDDEAIRDLTRAREDVISDLKDAKFRLKAFLLRQDIRYAGRANWGPAHLRWLAEVVCPTPAQQIVFQEYVRTVTEHTERLGRLENELREQVTTWRLHPVVDALQALRGVPFTVAVTMVAEMGDLTRFDHPSELMKFLGLVPSEYSSGQRRQQGGMTKTGNTHARRVLVEGAWAYRYPAKVSRHLQLRLENQPKVIQDISWKAQVRLCKRYQRLVAKGKHANVVTVAIARELVGFVWAIAKEVPLTL

SEQ ID NO: 218234 - protein, 327 aa, unidentified
MFFLGIDVSKAKLNCALVGAEGDKRKTKVVANTVAGIQALLGWCAKQGAQPEQLHVVLEPTGPYHEQAGTALHEAGATVSMINPAQARDFAGALAVRTKNDELDSYVLARYGQALRPPAWQPAPLHARQLRALLARHEALAKDLQRELNRQEKAQFGQSPEPVTGSIDKSVAFLTEQIKRLERAINDHIDRHPDLKEDRDLLTSIPAVGPQTGNALLSIMHNRHIESPQALAAYLGLVPVQRQSGTSLNGRPRLSKTGPARVRATLYMAAVVAVRHNPHIQALYARLLAAGKSKMAALGAAMRKLAHLCFGVLKNRTPYRSDYALPA

SEQ ID NO: 218235 - protein, 415 aa, unidentified
MALKIVYKICCGIDVHKNFVVACIAKTDKQGVTTYERHHFSTYTKGLKQLLKWLLDRNCKDVCMESTGKYWIPVYNVLEHDCSIVLAHPKYVKAIRGKKTDKKDAKWIADLFKHDLVAGSFMPPADIRQLRDLMRYRFKLTCFKSSEKNRYQNCLTVSNIQLGNVVSDTFGKSSQKIIAKILENPDDTSFDIGSLIHGSMKDKLPELELAIDGYITPEQAAKLKIIKEHFDNLEARKAELEELILALANPYQQEISIILTAPGFKNTFTAIGIISEIGTNMEAFPSAKHLCSWAGLTPTNNESAGKKKSVRVSKAGCYIKPLLVQCANAAIKSKKHPEIRDRYLRIKKRRGHKKAIIAIARMLLTALYHMLKNGENYNSDLYQKSDILPITREITVEQAILMAQFQGYRIKSATE

SEQ ID NO: 218236 - protein, 266 aa, unidentified
MMIIGCDFHPSWQQVSWLDTETGETGERKLVQASGDAERFYRQLAAPALIGMEATGNCHWLVDLLAELGHELWVGDAAQIRASCVRQQKTDRRDAEHIRILLQEGRFPRIWMPSSEVRDLRQLLLHRYKLVIIRARVKNELQHLCLNQGVQRKHKLWSQAGQKVLRELPLKPWATRRREDLLALLAMLDQQIDPLDRAVKEEAQRDKMALLLQTQPGVGAVTALSYVLTMGDVSRFARGKQVASYLGLIPREHSSGGRQKQSDTRY

SEQ ID NO: 218237 - protein, 399 aa, unidentified
MMYQQFCGIDVSKDSFDITLLNSNGEIKLQDKLLMNRDGFNTLLKYLSSYSKENLLVAMEATGIYHLPLLSFLLENSFKSVVINPILIKSFIGSTTLRKTKNDKKDATSIALFSLKSYQSLHLATTDAIENIRPLIREREVLSKEIARLKTEIKAILTQLFPELSKNTNIFTRSILNLLLKAPSRKAIRNLKKQRIQKILDDTSGNKVRISADEILSLAKNSIAISDKYLEKVLTSKIRRLIAIQDELSFLDEELQNSLEDTDINNDIEILQSIPGIGSVTSKNFMVEVSSIKKFKSVKQLCAFIGIDPSVKQSGTSINYRGKISKRGNANLRRTIWQMAIGAIRSCDKFNAYFTKKREEGKKFKQAVIAVANKLLRTIFVLLKNKTKFDENLASGVSK

SEQ ID NO: 218238 - protein, 308 aa, unidentified
MTLPAFRVGCDVAKAWLDFFEAATGKASRVPNDADAIAAFLNRLPREATVVFEATAPHDLGLRRALDRAGLRSLRVNPSRARDFARAAGFLAKTDVIDARMLARLPEALDMPEAPPFDPEREALAALNRRRDQLVETRAVERGRLADEHDKVLRKSLESHIAWLDRAILAIEAKIETQLAQPALAARAALLASIGGVGRVTIVTLLALLPELGQRSPKTIAAIAGLAPINRDSGTLRGQRHITGGRRRVRRALYMAALSAIRCVERFKQFYLAIKARSGHAKIAVVAVARKLLVTLNAIIRSGEPFRA

SEQ ID NO: 218239 - protein, 344 aa, unidentified
MTYPAFVLGIDLGKNWLHVVGMDRDGRVTLRKRLNRAQLGEFAGSVATCRVAMESCPGSQYWGRCFAAAGHEVRIIPAQFVKPYVKSNKNDYNDAEAIAEAGSRGTMRCVPLKNAEQLELQATHRVRQRVIVERSAVVNQMRALLLEHGIAIPIGRALLARRLPEILEDAENTLSVRLRALLQRLRSRWRSLDVEIAELTALLTEHAAESELCRRAITVPGVGPIVSTALVAAVNDAHAFARGRDMAAWLGLVPRQHATGGQTTLGRISKRGNAYLRQLFIQGAQALYTHMKREKSRLGQWLRDLEARAHRHVVVVALANKIVRICWKVLTSGQDYRPFPAQPA

SEQ ID NO: 218240 - protein, 331 aa, unidentified
MSNVIGIDVSKASLDCAYLRDADQKRAKRIGCFNQVRCFAALVAWAEARSGLPVQSLAFIIEPTHIYHEQLVQFLHNLGATVYLVNPGRVRKFAEGIGILSKNDLVDADLLTRYGLLARNLIAYAPVAQEVNDLRSLLNRLDVLERTLRSELNRQEKVGKTMVFHRLEQQSIARAVKRLKAEVKTFKRAIRECVKSTPSLQQSFNLLCTIPGVGAKTAWVMIVILGSRNFRSAPEVASFLGLNPIEKRSGKSQYRRPRLSKSGSGNYRQKLYFPAMVATRKNPDIQALYERLLAADKTKMCALGAAMRKLVHICYGVVKNQTPYKAQTIPS

SEQ ID NO: 218241 - protein, 416 aa, unidentified
MNSVGIDISKGRSTVAVMRPFGEVVISPFEVRHTDSELSELARQLKSLDGETRVVMEATGNYHAPVAKLLHDAGLYVSVVNAKLVHGYGNNDLRRVKTDRKDAVKLANYGLDRWLTLPRYVPEEGARLLLKNCYRQYRQYSKVQTVLKNNLISLLDTVFPNANRLFSSPIRGDGSEKWVDFVAEFWHCRCVSEKSEKAFTNKYQRWCRKHGYNFSEAKAHTIHAEACGHIDVIPKSETTKLLVEQAVAQLRATSAALAALKHEMQSLASMLPEYPVVMDLFGVGPTLGPQLMAEIGDVRRFERKQSLVAFAGIDPAPSESGDYCSRSNRTTKRGSPYLRRTLFNIIKVHLQRAPADEPVFQFMDKKRAEGKPYYVYMTAAGNKFLRRYYGKVMAYFSSLEDLPPVDMDSTGLHHTK

SEQ ID NO: 218242 - protein, 439 aa, unidentified
MHFSGEVEEREERLNKQKVVAWVGIDWADEGHEVWEYTVQTDSATCYAIKHTAESLQEWVNQLRIRHGGKPVAVVLEQARGGLIYALMNTGFMEIYPVNPESLAKFRKALYPSGAKSDPTDAELLGQMVRQNPGRFRAWVPGDEQTRSLQLLAEGRRKLVEDMTALTNQLTSVLKTYYPQALNWAGDLSSEQACSFLEKWPTLADLQKSRPFRIRNFYEKYGRPPREVLDERVTQMEKAQPLTADPAVVMAGKMMVNAVVAQIRPLRAAIEKYDVEIERIFRQHPDRAVFESFPGAGKVLAPRLLAAFGADRDRFEAALEVQQFSGIAPVTERSGKTIWVHRRLACPKFVLQTFHEFANQSRRFCVWSKLYYQQQRARGKQHNAAVRALAYKWIRILFRCWKDRRLYDDSRYEKSLIKRGASLAPLLNVLDCGNGVQEL

SEQ ID NO: 218243 - protein, 340 aa, unidentified
MSLYGGIDLHANNSVIVLLNEQDEVIYQKRLANDLPTILGQLAPYHTEIKGLVVESTYNWYWLVDGLMEEEYRVHLANPAAIQQYSGLKYTDDHSDARWLAHLLRLGVLPQGYIYPKAERPVRDLLRKRAHLVRQHTANVLSVQNILARNTGARFSGKRMQELTKQELTTLLADETQVLAVTSSLVVLDCLRHQIKRLEQSVHKHLQHTPSYEQLLTVQGIGPILAQTITLETGAISRFPSVGNYASYCRCVDSTKISNGKRKGMGNVKNGNPYLAWAYMEAAQFALRFQPEAQRFYQRKLAKSRNNTVLARKAVAHKLSRACYDLMRDLVPFEATRAFG

SEQ ID NO: 218244 - protein, 345 aa, unidentified
MKHYVGLDVSVKETSVCIVDEAGKVCRELKVPSHPEDLVDALKDSTWRIERIGLEAGPLSQWLFSGLAEAGLPAVCIETRHTKAFLKAQVNKSDRNDARGIAQMMRVNLFRPVHVKTLTSQKRRALLTARKILQEKAVAIENDIRGLLRNFGLKVGGVGLGKFDERIRELVEGMPELVEIMEPLLAARQKLREMFTKLHRKLLLIVRNDGVCRRLMTIPGVGPVVSLAFKSTIDVPARFKNSKAVGPSLGLTPVLNQSGESRRIGRVSLCGDNMMRALLYEAAQVMMTRVQKWSWLKAWAMNVAKRRGRQKAIVALARRLSVIMHRIWIDGSVFRWTNKATPAAA

SEQ ID NO: 218245 - protein, 353 aa, unidentified
MTFYIGVDLHPHQQTVAWCNTETGETQTRDLKHDPETVREFYSSLPEPAIVGIEASTRATWFENMLFETCHKLFVGNPVLIRKRATSRHKNDRRDAELILQLLLHDEFPKIWRRPIESNRILEMVRLRQSMVRQRTQVCNRLQAIAHDLGLPKGRVRGVAFQAILKAAPADETTSIRRSHLFSLVGTLNEHIQKLDKWLEAKAAEDNNVQLLLTQIGVGYLTALVTVHTLGDVSRFSRISKQVASFAGLDSMERSSAGRIRFGRVSKAGSPLLRYQLGVAAKMASRSDARLKSFYTRLAKKKPKAVARMAVSRKLLIKLSIMLRDKITAEEFDQRGRTVGNARGLQGSERTVV

SEQ ID NO: 218246 - protein, 386 aa, unidentified
MPQLNDLSRSLAILEQDATLIAVIEMGQSSWLVAGIVPGIERSPLKKLAVDESALLKLLHRWREEAEQAGHRIKRIAVAFEAGRDGFWLARWLRARGIEPHVIHASSVAVSREHRRAKTDRLDTELLKRAFLGWLRGERNHCKMVAIPTLAQEDAKRPNRERESLVGEQSRIVNRMKAALARLGIRGFNPKLKKAIERLDGLRTPEGEPIPPNTLAELKHDMERRRLVRSQIRDIEGTRLERLEQAPGDGPHVMVRLLARVIGVGVETADMLVQEVLSRNLRDRRAVARYGGLTGSPDESGKKRREKGLARSGNARVRRGMIQLAWRFLMFQKDSTLAHWFYARTKNAPQTRKTMIVALARKLLIALWRLVREGAIPQGVVLRPAL

SEQ ID NO: 218247 - protein, 370 aa, unidentified
MGNRSMFVGLDVHKETIDVSIAEGARNGEVRHYGVIASDLEPLDKVVRALRAPNCRLHFVYEAGPCGFGIYRHLRKRGEECVVVSPSMVPKRSGDRVKTDRRDSQTLARLHRAGELRAIYVPDDLDEAMRDLVRAREDAVMLGTQAKCRLKAFLLRQGRRYPGREGWTLPYRRWLTDLSFPTAAQHITLQEYRDTIDETERRIERVTEQLRHLAPSWRWAPVVAALQALRGVSFITAVALVAELGDLTRFGHPRELMAYLGLVPSEYSSGPSVRRGAITKAGNPHARRLLAEAAWAYQGIPRIGRQHAYRQEALPKVVCDIAWKAQLRLTTRFRRLVARGKAKPKVATAIARELTGFIWAIAQEVSPASP

SEQ ID NO: 218248 - protein, 426 aa, unidentified
MTAGIDISQSKLDICVKNHGGVLANADFSNDMAGAKFTLELLAKHGCLDVAMESTGPYWYGIFDYLTAHGVRAILVNPAKAKAHLLNKTDKLDSNVLATLHMINQLKPSYVPDHEIRRLRRLTRFRAWLMDVKTGIKNQVTATVSKYSSNLMPVFSDAFGVSGKRFLEMLTEGKGQDELIMELDGLQLSEEKRCRIMEAIGNAFKPNLDPWIIQFSSSMISEIESRIKTLDDAIAKAIDSIPRIKGYVNRLLTIKGVGLETAQAIAAEIADIRRFELSGSLVKYSGINPTVEQSGKMLKYGPLEKAGPPYLRRALYQAANTMAFLGPDNFRRHYDAVRARYGRRKGHGVGVVSTARKLTRLIWAMLTNETDFIDSPRLLTEMKRARLRKRVKRFDSNRENDDATFKHLLINLHKLDPEVMQMLADL

SEQ ID NO: 218249 - protein, 424 aa, unidentified
MKSASTTPSKEDSVALPEVAPNDITAGVDWARDDHAACIIDGRGRKIATIMVEHTSVGLRDLVAFLGRHGVSEVAIERPDGPVIDALLAAEMTVVVISPNQVKNLRGRYGLAGNKDDRFDAYVLADTLRTDRARLRALVPDTDATIALRRTCRARKDLVKHRVAAANQLRAHLRNVLPGVIGLFRDLDSDISLAFLTRFDTQDRVDWLTAKRLGHWLSTQSYSGRTDPTALHQRLQNAPRGATGSHAISQAAITASYVALLRTLIEQIKALSAQIDQQLATHTDAHIFTSLPRSGRVRAARLLAEIGDCRAKFPTPESLTCLAGVAPSTRQSGKLRTVGFRWACDKQLRDAVIDFAADSRHANPWAADLYTRARARGHDHAHAARILARAWLHIIWHCWQDQAPYDPQNHRALQRVLVQQRKAA

SEQ ID NO: 218250 - protein, 347 aa, unidentified
MNSVGIDLHRSRSHVAVLADDGTELLSRRIVNDPAIFLELLAEIDGESKIALEATYGWEWLADVLQDAGYELHLAHPLRTKAIASARVKTDAVDARTLAHLLRTELLPEAYIAPRELRELRDLLRHRVALTRMRSALKNRVGAILAKQGIQRPFSDMFGPAAMRFLAEVELRESPRRRLDSTLALIADFTREIDLTTREIEARAKEDPYVDVLCQIRGVGRYIAMLVIAEVGDVTRFRTARQLCSWAGMTPTVRSSDMRTRLGHISRQGSPALRWALVEAAQHASHGGGPLRQAFERISKRRGRQVAKVAVARKILTLCFYGLRDGEIRCLAPRAGARTLRTLAVTS

SEQ ID NO: 218251 - protein, 421 aa, unidentified
MESDYRIYVGIDWASVAHQACVLNHERRIVSERSFAHAGNAIVGFAQWLSGLTDDPGHVAIAIEIPRGAVVETLVERGFHVYAINPKQLDRFRDRYSMSGAKDDRRDAFVLADSLRTDQPCFRRVRLDDPRVIQLRELSRVDEDLQREGNQLANRLREQLHRFYVQALQLCPSADEPWLWTLLELAPSPSVARRLRPKRVERLLHAHRIRRLSAEEVVSALRAPALTVAPGVVEAATEHIALLLPRLRLVHRQRQRCGARIEALLDELQAAGEEDDKPGEHSDVAILRSLPGVGRIVAATIIAEACAALTERNYDALRAHAGIAPITKQSGKHRTVLMRYACNGRLRQALYHCARVAVMGDLPSKTYYTAQRGRGHTHGRALRAVADRLLRILVAMLTTRTLFDCSKARPPQVSNPSEKVA

SEQ ID NO: 218252 - protein, 390 aa, unidentified
MFYAGVDVAMDKHDCVVLDSGGNCVVEVFTFENSGNGFKILHKVLKSCSKKPENIKVGLEATGHYSDNLLAFLNSIGYAPVLFNPLHTNLFRKGQSLRKTKTDHVDAHTIATMLRTEDLKSYSQPSYHLNELKSLTRYRSTLVSDCSRRKISLVRLCQILFPELKNLVPSLHMSSVYTLLSELPSADKVAKCNLMHLTSLLSSASKGHYGRDKAIEIREQARSSIGIRSVVKELELQQTIELIRILQQQIEAVEEEINSLMDDIDSPITSIPGIANRMAAVIIAETNNFHDFERAEQVLAFAGLDPSVYQSGQLTSTHSKMVKRGSKYLRFAIFNATKYVCRWDPTFRAYLAKKRAEGKPYNVAVSHAAKKLTRVVFHLVKTNKEFIPQT

SEQ ID NO: 218253 - protein, 470 aa, unidentified
MAAVMIGVDPHKASHTAVAISAGEEPLGELRVRASVAQAERLLAWAAAWPQRTWAVEGAGGIGHLLAQQLLSAGQRVLDVPPKLGARVRLLAAGDVNKNDPSDARSVAVAALRSAGVREARPDDHAAVLKIWSKRYRDLGRTRTQVVCRLHAVLCELVPGGISKAITAGQAARILGSITPPDAVAAARCELAAVFLEDLRGIDARIRETRKKLAVAVQATGTSLTGLFGVGPVVAAVVIGDVRDVSRFPGRAHFAAYNGTAPIEVSSGQRKVYRLSRRGNRRLNHAIHMVAVTQIGHRHSEGRAYYDKKLAEGKTPKEALRSLKRQISNAIFACLQADARRAAARAKDPGGQQGNDCAACAAGLHPRHRLFGQATPGPGHHTTTAAGNPAPGPARARGRAGHSPAAAILPPAKPQVQAERPQRSEDERPGGAARRRPHSAERKARGQGSLRKPQRPKGTSHAAKNTGEAP

SEQ ID NO: 218254 - protein, 370 aa, unidentified
MKSIIYVGMDVHSTNYTLASFMFGNEQPFAVTQVDPDYKHILNYLKQVQKNYGGPCEFLCGYEAGCLGFTLYEQLKAHNVPCVILAPSKMPKVKNEIKTDKRDAMKIAKCLAYNDYSAVYVPTKEDHQVKEYIRMRDAHKTALKKVKQQILAFCLRNGFQFTAGKNYWTDKHMKWLRGLQMDEMLREILDEYLATYQASLDKLERFDKRIEELAAGTRYADKVKMLSCFIGIRTHTALSLIVETGDFRRFAKADQYASFLGLVPGEHSSACDKNYLGITKAGNSHLRRLLIESAQCLARGRVGYKSRVLKAKQYGNPAQVIAYADKANERLRRRFYHLTLKLKKKRNIAVAAVARELSCFIWGMMTERIS

SEQ ID NO: 218255 - protein, 361 aa, unidentified
MQSTTVIAFDQHAATTVAAVLLPGHRTPALHTLGSDSPTIVKFVERLRRQGPITSCYEAGPCGFALQRALSARGIPCDVIAPALIPRRPGDRVKTDRRDAGQLAVLYRAGALTAIHIPTDQEEAARDLLRCREDIRADLLRARHRLSKFLLRHGRRFTGTKRAWTRAHAAWLRTQTWPLSALEQTHTACLRAVDEAVARLRSVEQDLRTLVDLEPLRPRVRRLRCFRGIDDLTALTIAAELGDPRRFSSAPRTMAFVGLVPSEHSSGSRQARGAITKTGNAHLRRVLVEAAWHYRHRPFVGGALRRRQQGAPAAIIAHAWTAQQRLYRRYHRLAARGKPTPHVITAVARELTGFVWAALTQ

SEQ ID NO: 218256 - protein, 400 aa, unidentified
MNAVGIDVSKGKSTVAIMRPFGEVVAEPFEVLHTDTELRKLACFLEKLPGETKIVMEYTGNYWQPIANVLYDAGIFVSIVNALLIYKYGNNSIRKGKTDKLDAVKIANYCLDRWTVLERYTPVDQIRQTLKTCRRQYDQYIRLKVNLKNNLIALLDGTFPGLNILFKSAPRDMDGHEKWVDFAEKFWHRECICGNSEKAFTNQYKKWCAKAGYRFKEEKASSIYAHAVSQVNTLPMTDSIKCLVTLAVSQLNTIIETISVIQHEMLTLAAQLPEYPVVMRMFGVGPVLGPQLMAEIGDVRRFDRKQSLVAFAGVDAPPCQSGTFESKNRHISKRGSPRLRKTLFQVMSTIIQHAPTDDPVFQFLDRKRREGKHYYVYMTAAANKFLRIYYGTVMAYLKKL

SEQ ID NO: 218257 - protein, 343 aa, unidentified
MQTITTIGLDIAKSVFQVHGVDAAGQVVIRRQLKRRQVLAFFEKLSPCLVGIEACASSHHWSRELQALGHTVRLMPPAYVKPYVKRQKNDMADAEAICEAVTRANMRFVPTKTPEQQSCLMLHRTRHMFIRQQTAVINSIRAHLAEFGIVAPVGRKGVTELLHVFADPNDKRVPEVARACLAALGTQLRSLKEQILNFDRRILAWHRSDQTSKRLHCIPGVGPMLATALVASVADPSTFRSGRNFSAWIGLVPKQHSSGGRDRLGSISKQGDRYLRSLFVAGALAVIRYAKIHGTKHRPWLTALLARRPTKVAAIALANKIARMAWAMMAKGERYKQPVALAA

SEQ ID NO: 218258 - protein, 376 aa, unidentified
MFVGVNMSRTTSPTQETGMKILAIDLGKSKSVACVYSVETAESRFYKVGTSPGQLHELILKVRPDRIVIEVCSAAGWVADLVGTIGIELQVANTAAPAWRWSNTKRKTDRDDALRLAQLSALEQLPRVMIPKRDVRQWRALIRYRHHLVRRRTQLRNRIRALFDREGLTLPTGKQCWTNAGIAMLREWARSLDEAPDQELWRGELACELEILQMAELLIARVEAKLDGLAEANTACQLLQSIPGVGPRLAEIVVAVLDDASRFQKGKQVGSYAGLTPRQYQSGDCDRQGRTSHQGNPLLRSLLVEVSWVGLQYNPWMRAVYEQVRRGSPTRKKIAIVAVARRLLIRCWAMLRDGVPWRPPHTEPIPSRTCGVVGAH

SEQ ID NO: 218259 - protein, 356 aa, unidentified
MVEGSWVGLDVHARKVVAGVLDAKSGELRSLRAPTLPAETVKWLRRFPAPVRVAYEAGPTGYGLARACAGAGLACTVAAPSKIPRAAGDRVKTDRRDAERLARLLRLGELVAVRVPEPHEEAARDLVRAREDARGELMRARHRLSKLLLRHGLVYDASAWTCAHEAWLRRQQFASRPLALAFDESYGAVLQAKTRRDALDRAIAELAAEPPFSEIVGRLCCLRGVSTLTAVGLTVELGDWTRFRPQSLGPFLGLTPSEDSTGERRRLGAITKTGNTHARRLLVEAAWHQRRPLRASATLEKRRQGQPAAVRTRADQSARRLHQRWHALERRGKRRTVVAVAVARELAGHCWALATM

SEQ ID NO: 218260 - protein, 441 aa, unidentified
MMEANAAGLDVGAREMYVAIPLDRDTEPVRVFPTFTCDLEALADWLVERGITTAAMESTGVYWIPLYQILEDRGIRVCLVNARHMKNVPGRRTDWHECQWLQYLHAVGLLRAAFRPEAEVVAIRSVVRHRRRLVEAAGIHIRHVHKALTQMNLQIHHVINDITGVTGTAIIESILAGQRDAVELAKLRQKEIRADEETIRKSLEGDWRREHLFALRQSWELYGTYVRSIEACDQEICEMLGEHEPKIDPAKNPLPSDTKRRTKRKHPRTGDFRFDVRTEAYNQFGVDVTRIPGLEGIALVLYSEVGNDMSRWSSASRFASWTALCPDNDKSGGQVLWTGVRQLKNRAGQLFRQAANSLHRSQTQMGEYLRRMKAKLGAEAGITAAAHKIARIFYAVVKNQVEYDDTIWHQHDLQRQRRLESKVRRQARGLGFQLVPIQPVP

SEQ ID NO: 218261 - protein, 358 aa, unidentified
MQKYNISFKGQKIFIGIDVHKKNWDVAIAPEVGIVKRHTQKASAKELFDFLKKHYPDGDYLAVYESGFSGFATYYALKDVGINCIVIHAADVPTTQYEEVMKTDRVDSVKLVRSLKAGLLNGIYIREKENIDDRSVVRIRKIVQKQLCGYKARVKHMLHCNGVEIPKRFENPRTHWSQAFIKWLKDDVALLSSTRNSLDLLIRQVETIRMTLLEATRIMRKLSQLERYKSKFDLLMTVPGIGFTVSMCILTEVYDVKRFHNEKEFASYLGLIPTSHSSGEKVLHGEKTFRGNKQIGPMIIEAAWVAISRDAGLGSLYLRYKERMKPQEAIVRIARKLSNILFSILKNEMEYVPYRMGK

SEQ ID NO: 218262 - protein, 332 aa, unidentified
MMAQNDCVVVGIDVAKDKVDACIRSLSQRQTFPSTTEGRRALIRWLRKHKVGKAAMEASGGYERDWAKVLRGAGIEVRIVDPKRVRSFARSAGRLAKNDAIDAAMIAWFAETFTDAPGQTCDAARDKLVQIVRARQSLLDLQTSLQNRGEHAAPEVVEKMQARLLKTIAREVAELEAAIAALVKATPHLAELAEIIESVPGLGKITSAGLVAAMPELGQVSNNVAAALLGVAPYDDDSGQRRGDRHIKGGRRKVRNLFYMACLGAATRHNPMLKAFYDRLIAKGKEPKVALTACMRKLICILNTMIARRQKWDANRYKMSDPARLPPSACTA

SEQ ID NO: 218263 - protein, 346 aa, unidentified
MKITTIGIDLAKAVFQIHGVNEHGKVVVRRQLKRTEMSSYFANLEPCLIGMEACGSAHYWARKLEGYGHTVKLMAPQFVKPYVKTNKNDMADAEAICEAVGRPNMRFVAMKTVEQQAILSVHRARQGFVKARTAQGNQIRGLLSEFGIVIPQGIRSIMKQVPDILEDGENGLPGTMRNLIERLTENLKEMDRQAKELEAQIQLWHRENEASRKLAEIPGLGPITASAIVATVGDAREFKNGRQLAAWMGLVPKQNSSGGKQNLLGISKRGDTYLRTLMIHGARAVIRFAENKAEPESWLRKLIARRNKNVVAVALANKNARIVWALLAHDRTFRPDYTPAAVVAGR

SEQ ID NO: 218264 - protein, 338 aa, unidentified
MKITTIGLDIAKSVFHLVAVNKMGRLVKKKQLKRKQVLTYMATLEPCLIVMEACGGANYWAREFIALGHQGRLIAPQYVKAYVKGNKNDYNDAEAIVEAAQRPNMRFVPIKSVAQQDIQNFHRQRERIKKERTALVNQIRGLLAEYGVTLNTGVATVRRDLPGVLEDAENGLTALSRELFAELLEELRTLDQRFEQCERQIKSLNQGNEVCQRLDEVLGIGPITASAIYAAAGEGKDFVNGRHFSAWLGLVPGQHSSGGKSVLLGISKRGNAYLRMLFIHGARAVLRHSANKTDCFSRWAQALLARRGHNKACVAVANKMARMAWVIMAKGETYRVVM

SEQ ID NO: 218265 - protein, 398 aa, unidentified
MTESSDYESVQVFIGVDVGKDTHHAVAINRSGKRLFDKALPNDENKLRSLISDLKQHGQILLVVDQPATIGALPVAVARSEGVLVGYLPGLTMRRIADLHAGEAKTDARDAAIIAEAARTLPHALRTLKLADEQIAELSMLCGFDDDLAAQTTQASNRIRGLLTQIHPALERVLGPRLDHPAVLDLLQRYPSPEKLASLGENKLAAQLCKLAPRLGKRLAADIAQALAEQTVVVPGTNAAAVVLPRLALQLITLRKQRDEVALAVEQRVLAHPLYPVLTSMPGVGVRTAARLLTEVACRAFASAAHLAAYAGLAPVTRRSGSSIRGEHPSRRGNKALKRALFLSAFAALRDPLSRAYYTRKMSQGKRHNQALIALARRRCDVLFAMMRDGTFYTPQAS

SEQ ID NO: 218266 - protein, 341 aa, unidentified
MKPAMSVLGIDIAKRVFHAVGMDERGKIVLRKRLSRHDLMPFMAQLPPVLIGMEACGGAHYWARRFREHGHAVKLLAPQFVKPFVKSNKNDMRDAEAIAEAVTRPTMRFVPIKAIDQQDIQALHRVRERLISERTALINEVHGLLHEYGIVLPKGVAKFRHAVVEKLERDKDKLTALGQELFWKLLQEFVDLEQRITSYQEKLEGLATTHPECQRLMTIPGIGAITATALVAAVGDVGVFKNGRQFAAWLGLVPKQHSTGGQTRLLGISKRGDSYLRKLLIHGARATLRWVKRKTDGRNQWIQGLLERRGWNRTAVAVANKNARIVWALLSRGGVYGTNAS

SEQ ID NO: 218267 - protein, 371 aa, unidentified
MFESEQKTVVGVDGPTASCAKVRFLKSNERAALMMFKRIAIDTSKHVFTVHGVDEQERPVLRRELKRGQVEAFFSKLPGTEVVLEACGGSHHWGRVFQALGHQVRLIPPQYVKPFVKRSKNDRNDAEAISEAAARPSMRSVVVKTVDQQAKGIIVKHREMLVGQRTQALNALRGHAMEFGVVAAKGAAKVAPLLAVLAADAVIPAAAREMFERMGAHIEALESRIAGLDAELAAMHKAHPVSRLLAEIPGVGPMIAATMTLTMEPGNFASGRHFAAWLGLTPREHSTGGKQRMGKISKAGNERLRSLLVVGAMSVIRFAKPGSKSASPWLLQLLERKPRKLAAVALANKMARIIWAMTARGEAYRRQPVAG

SEQ ID NO: 218268 - protein, 384 aa, unidentified
MKVVCGLDVHKDSVFCCILCANGEKIQHKFGVLTEELVTLRDLMVSEGVEECAMESTSIYWIPIWRVLEGSVKLHLVNPYFIKQLPGKKSDVNDAEWIATCLSKELIASSFVPDDKIQRLRQYDRRIFDLNASISRNLVKLDQCIQRCNIRISNYISTTDSKGYRSIVKLISQGVTDAEVLVKELHGRTINRHGRETLVKALTGVVSETDIDIIKQLGEEIELQQRHKDEAQEKMTALCMEWFPQEVENLQTIPGVKERSATSIIAEIGTDMTHFQTPKKLVSWVGLRPRNEESAGKIKARGITHGNRFVRKTMIECSWGAARMKDSFFAEFSYRQCIERRKNKMKVQVAIARKILVAVWYVLSQGTQYIKPTDHYTAAHMTAV

SEQ ID NO: 218269 - protein, 350 aa, unidentified
MQTIYIGVDFHARQQTICYLTTDSGELLFHQLKHEDKALVRAFYAQFSGHVIVGLEASGYSPWFERMLEELGCEVWLGHATEIRRRARWRHKNDRRDAELILDLMVHNEFPRLYLPPLQSREVLRMLRYRQKLIKMRTIGKNSLQALALQSGLAKGPHLFTKAGLQELRSATMSPAMQWQREQWLQLLEPLNERLLETMRWLQQQSQADQRISRLRTHPGVGLLTALCLVHSLEPVSRFANTRKVTAYAGLDPVERSSAERQRFLGISKGGSRVLRFLLVEAAHTALRKEADLKRFYQRLAQRHGRPKAKVAVSRKLLIRAYIMLRDEIDYAEFQRRAVAARSAPPAHGL

SEQ ID NO: 218270 - protein, 386 aa, unidentified
MSRSSNILLRAINYDHTLVLAIELSNKSWVLAAQVPGLPQTKAQRTIEPNKTALLAAIDGYRARAAALGYAVERVITTYEAGWSGFWLARWLVAQGIEVHVVQPSSVPVDRRMRRAKSDGIDAELLLRTLLAWLRGEPRVCSMAPIPDEADEDARRGVRERTELLSERVGLTNRIGAVLATLGVGDYNPLLQSRRRRLAELRTGLGEPIPPNALAKIERLLARLELVLAQIAELERERDEVPAADAPDRAGKMIQQLTSLRGIGVQSATVLVREAFVRHFSNGKALGSYAGLTSTPYSSGGIDREQGIGKAGNRRLRTVMVELAWLWQRYQPGAAQVAWFRDRVGSTGRRIRKIMVVALARKLLIALWRFVIDGVMPEGAVIKPSI

SEQ ID NO: 218271 - protein, 340 aa, unidentified
MIVIGIDPHKASVTAAALSPTSDTLGHRRLASTAKTAAHLIAWAVDWPERLWAVEGAAGLGHGVAQQLVAAGENVVDVPAKLAARARLLGSGSARKTDLTDAVSVASVAVHNVKLSVVTAENHVVVLRLLSDRRDDIVSQRTRIMNRLQVLLRDLEPGGAPRQLSTVAAAAFLAGTRPLSPADLQRKSIARDLLDDLRRADRQLKAIAKTIAVEVAGSGTTLPEIQGIGEILAAKIIGHAGPVTRFESKSHFASYTGTAPVEASSGDVRRHRLNRAGNRQLNTALHTAAIVQAREGGPGRQHYDRKIAELKTPKEAQRSLKRQLANVVYRHLLDDHERHV

SEQ ID NO: 218272 - protein, 383 aa, unidentified
MRYIGVDLHKTNFVVCFLNQDESFRLETFPLSKAGISRFTSELSKDDAVAVEVTQNIYYFYDQIKTYVGRIVLVDTYRFAIIAASKKKTDKADAQALARFLKLDHLPEVPVPSEKVRQLRHLLQARETIVGMRTKLKNLGHAALTRNGIALSRSAFASGVARERLRKRDDLSAADRVILDSALRQIAELDKEIKQLEAEIVRLGKTLAGIKRLLQLHGLNLLSAISLLAEIGDIHLFETSKKLVAYSGLATSIRQSNQTTRQGHITKQGRKRLRTVAIRAVLSMVSRTNTPLMDFYSRKKREKGSGKAICATARKLLTIIFVMLKKRQFEIRIRLKPSPFSTVNSVSFLDMYKQLNRLQHSYKSSRPSDAGCVRSAKCFLTGH

SEQ ID NO: 218273 - protein, 322 aa, unidentified
MTPGGKFIGIDVAKRQLDVAERPSGARWSASNDEAGIAGLVARLWKSGPITLIVLEATGGYEIPVVAALTASGLPVVVVNARQVRDFARAVGQLAKTDAIDAAVLAHFAEAVRPAVRPLPDELTQALQGWLARRRQLLEMLLAEQQRLTMTTGAIRPQIQQHIEWLRRQLREVDTELRTLMRSSPVWREQEDLLRSVPGVGPVLATTLLADVPELGRLNRRQIAALIGVAPLNRDSGLQRGTRRIWGGRAPVRATLYMATVAAVRCNPVLKGFFDRLCAAGKPKKVALTACMRKLLTILNAIARERIAWKLHTHLTSITISC

SEQ ID NO: 218274 - protein, 467 aa, unidentified
MSEVRLGIDVACRADHRASLADERGEFIWSSWKFRTTTADLERLWVKIPDGASVTVILEPTRNAWVPLSAWLQARGATVILVPPEQSADLRDYYNKHTKTDRLDSRVLARLPMLHPEGLRGIDNLGPAQSLRRAVRHRFSLVKRRSAASLRLDALVELLGPGWADSLGSATASKTALVILEKYADPRVLKRLGRARLATLLIRSSAGLWREDKADELLAMASETLELWSGGGIDFAELAHDIASEVRVLRQLDDEIATADKRIAALYDEADPKGIVRSAPGLGPVLSAAILGNAGDFNRFANLAGVRSFTGLVPKVDQSGLVNGRKGITKAGDAGLRQALYMAAEHARHIDPTLAQRYHRLVMVEGKHHNSALCAVSAVLITRIASCWRKGELYELRNEYGEPITEAEGKVACADRFKIDPKVRAARRRNTPAKLLKNRAGRGRKESAQKVAPAFDPPDEKASENVA

SEQ ID NO: 218275 - protein, 410 aa, unidentified
METVVERPGALDVHKAQVTACVRVPGDGGSRVQHVVEFKTTVAGLLTLRDWLVAHRVTQVTMEATGVYWKPIWAILEDEFELLLVNARHVKQVPGRKTDVSDAAWLCQLAEAGLLRASFVPPKPIRTLRNLTRYRKTQIQERAREANRLHKALEDTGIKLDCVATNILGVSGRAMLEALINGTTDPEVLADLARGRLRAKIPALREALVGRFDRLHAVWIGAILNHIDFLDEQIAGLTEAIGEQIAPFGWAVELLCTIPGIQRRTAEVVIAEIGVDMSVFPTAKHLASWAGLCPGNDQSAGKRRSGTTRKGSKWLDWALEEAALAATRTNGTYLAAQYTRLRPRRGHKKALGAVKHSIICICWHMLSTGELYDDLGGDYFRKRDPEKAAKRLVAQLEALGHHVTLHEVAA

SEQ ID NO: 218276 - protein, 345 aa, unidentified
MASIQPLSRVGVDPHADTLAASGIDAVGVEVFHLEVPNTSEGIEKLVSHVNGASVLWAIEGTGTFGRALCDRLLAENRDVVEVPTRLTGRYRTRAGRNKTDRGDAVAIAQASLSDECCQVTHHRVVETLRVLVTQRESFVKTQTETANRVRARLRELDPQMAATTKPLRGPKAFQALTGLTYEPDGDPHRETLVAVIALDATNWLTRHQQIRDLEKRIAEILPDAGHALTQHDGIGLIGAATIIANTTDIDRFETEGHYASYCGTAPLDASSGRQTRHRLNRYGNRAINRVLHTAIVTQLAHHGEAHDYVTRRIQENKTKKEAIRAAARYLNRRVYRTLKQHPLT

SEQ ID NO: 218277 - protein, 430 aa, unidentified
MKSNTQNAKIEAITEKTLVLGIDVGSETHYARAFDYRGIEYSKKPFKFSNTEAGFATFKEWILDIKERHEKDKVVLGMEPTGHYWFNLGKFLQDNEMKPVLVNPHHVKKSKELDDNNPTKNDRKDPKVIAGLVREGRYMIPYLPDGVYADLRTASNIRFQLQAELTRIQNRISRWFNIYFPEYKTVYGKPDAKSGMLILKAAPLPEDILTLGIDGVNQIWRDAKLRAVGKARAKTLIEAAEHSVGSKEGAVSARMEIRMLLEDYESRSIRLQEVMTLIEGLVKQIPMAEKLLEIKGVGIRTVSGFLAEVGDISRFNNPKELQKLAGLALVENSSGKHKGETTISRRGRKRLRYLLFEVAMSLVAKNPEFRELHNYYTTRRLNPLKKMQSLMAIAAKLIRVFYVMLTKGVNYDPKKMVNDIKRPAVYLQTA

SEQ ID NO: 218278 - protein, 344 aa, unidentified
MVTFGVDAHKRTHTIVAVDDHGKPLGQTTIGTTSKDHLGLVRWAARFGAERRWAVEDCRHLSRRLERDLLGTGEEIVRVPPKLMAHVRDSARTYGKSDPIDALAVARAAQRETDLPVARLDGPERELRLLVDHRESLVAERTRLICRLRWHLHELDPAWEPKARSLDAQRTLADVLRRLSDQPGLVARLARELTHRCAELTTSIKALAVEIAELTQQLAPALLAIPGCGSLTAAKIVGESAGVDRFKSRDAYARYNGTAPLPVWSSNKARHRLSRTGNRQLNAALHRIALTQARWHPPAQALIERRRSGGNSGREAMRILKRRLSDAVFQALRTDQSEHLVLAA

SEQ ID NO: 218279 - protein, 321 aa, unidentified
MNKNKEFLGIDVSKDLLDVYDSTGKYYQFKNTLSGFTKLLRLTSESSHCFMEATGYYHLRLSYFLLENGVSVSVENPLKVKRFIQMKLSKVKTDKSDAKQIYEYGLSQNPKLWQGESKVQQECLQIVRLLSIYTKQSTQLKNKIHGESVLGIPSKIVMQSLNRELKRKRLEIENLENILEEKVKQEYTKEVMLLKTIPGIGKKTALMLLVFTDGFKRFSSGKELCSYAGITPTIRESGSSVKGRSRISKIGNTKLRNLLFLCSFNACKYNQSCKALYERIVAKGKSKKLALIAVCNKLLKQAFAIVKSGLPYDENFASKLA

SEQ ID NO: 218280 - protein, 328 aa, unidentified
MGGRQCVGIDVSASEITVAIEGQVGRTTLANDAAGHKQLVRQLTRGKGIARVCLEATGIYHLDLALALHRAPRVEVAVVNPAAVRDFGRALMQRSKTDGVDADVLLAYAERMPFVAWQPPAPEILDLRAIVRRMGALTLTRTQERNRLHAAGHCAELTEVIAWDIEAHLEHLAQSLERLEQQALALVRTHAELARRFERLVSVRGIGTTSALRILAELAVLPADMSARQWVAHAGLDPRQLESGTSLHKPARISKKGNRHLRAALYMPALVAAREEPHVRGFYQHRIARGLKPLQALVAIERKLLHAIHGMWLRDTNFDGPKFYVDAA

SEQ ID NO: 218281 - protein, 404 aa, unidentified
MEVTPTYAGIDWSWQHHALCIVDAAGRRVEEITVAHSKPGLAKVTTLLHRHGVERVGIERGDGPVVEHLIRDGLEVVVISARQVKSLRARYGSAGNKDDRFDAFVLADALRTDPYRWAVVRPDSDATVALRGLVRARQDLVGHRIAVHNQLLATLQHHFPGAIGLFHQLDIPISLAFLRRFPCEAKAAWLSPTRLAHWLHANGYCGRATAEELFTHLHQAATGHLSGATSEAGELIVLSLVDLLTSIRQRQSELETRIKEALLAHPDGPIMQSLPRSGVVRAATLLAEIGDCRARFPDAQSLAAAAGVAPSTRQSGKHCNVTYRRGCNKQLRAALIDWAQDTPRANTWAHDTYYRARQRGCRHPHAARIPAQAWTRILWRCWHDHTAYNPELHGRLNTLEAEAA

SEQ ID NO: 218282 - protein, 323 aa, unidentified
MQGKVSFQEDAMPVVYAGVDVSKEWLDVHLHPLGESRRFSNDKTGIRQLKRLLARHQPKSIVMEATGKFHRPAHRSLWLDGFAVAVVDPLRARMFARACGYLAKTDRLDARFLALLAESLRPPADTPPSPHVEALQELVNARSAAKCDITALQNRSKTATTALLRGELNRLVRRLEQHVERLDKEIERRVGEDPQLYRKAEILTSIPGIGRVTALALMAGMDELGSCSGKQAAMLAGLAPIANDSGARTGRRSIRAGRPAPRRALYMAALSACRYNPALARFADTLKAAGKPAKVILVAIMRKLLVLANCLLAHDRIWTPNPP

SEQ ID NO: 218283 - protein, 346 aa, unidentified
MKNKSISDIVYLGIDIGKNSFHIVGLNSSSKPVFRARMTRERLIDFFSRSPSMTIGMEACPGSNWLSRKAKAYGHLARIVPAQFVKPFVKSNKTDIVDAEAIAEAISRPTMRFVAPKTEAQLDLQALHRVRQRLVSHKTSVINQARAFLLEYGITIGTGATYFVRDMPDKLTDENNELTPAMRTVLNELWIEYKAIEERLLLLRKRIEHHASADDTATRLTSVPGIGKLTATAITAFAGNGNQFKSGRDLAAWLGLVPREHSTGGKQRLLGISKRGNPYLRKLLIHGARTCVLNLNRTKDRLGAWIDKMEARGIHRNKVIVALANKLARVVWAVLTHKSTFYLPQV

SEQ ID NO: 218284 - protein, 339 aa, unidentified
MKNTKYYIGLDVHKEKTSYCVRDKLGNILTEAEVATLYSELEPRLKPYLAASMIGLEASTSYYTLYQNFLKNGFHIKVANTIQLRQLITKNDKLDAQRLSEMLRLGTFPESYIPEEKIQHLRSLIQMRHALMQEKVRCNNRVQAFLDRNGVMMPMCKAFSKKWKHALMQHLGSGNVSTELRYEYDHYVYLEKTNEQADQEIIGYTKTYWNQEYQLLRSITGFGVLLPCYIIAFVHPIERFLSNRKLRRYAGVIPVSKESGNTTSRGRIPKTSSKALLRWALVQAANTIGKTNTTLGRYYRRKKNQKKNTGIAKIAVASTLVDIIYKVLTTKKPYISAAC

SEQ ID NO: 218285 - protein, 392 aa, unidentified
MNRLALGWDNHRKFSKVSLMEQTPEGEIRVVERARLEHCDKQAMRAWLAHLDPEIPVALEATFGWPWVADLLEELGHPVHLAHPPVIRALAKHEAKTDRCDGDRLGKFQLRGILPESYLAPPEVRQRRERTRYRMALSALRTAVKNRAQAVLHRHGILHDFSDLFGKAGRRFLDELALPEGSWQALYGSLQLLDSLTRLIDEVEQWMVANLEADDLVRLLMTIPGVGLILAHVIRAEIGEIERFPTARHLASYSGLAPVSDDTAGREGPRHCSSACNHVLRWALIEAVHGVQRTKGPRGFHLRQLYARLCGHGRPKGRKSSAKVAVAHQLCKTVYVVWSKHVPYTDTPPPRPGSRGARPEPKEPPTAKTTLRSNQPRHPMVRRRATAGQTRM

SEQ ID NO: 218286 - protein, 449 aa, unidentified
MKEPEELEDEAYEQVLERVCAVDVAKASGKVCTRVPHDARPGRRRTRVWDVDATTNAVLELAGHLVGEGIEKVTLESTSDYWRIWFYLLESAGLNVQLVNARDIKNAPGRPKTDKLDAVWQAKMTERGMLRPSFVPPLQIRQLRDYTRLRVDLTRERTRYWQRLEKLLEDALIKVSAVASSLDTRSTRDMLEALIAGERDPRVLAGLARGRMRSKNAALIQSLTGRFDGHHAELTRMLLNQIDALTSQIDTLTGRIDQMLAELPAAQGVDADGTTGPGAGHAADAAVLPAVDRLEQITGIGRSGAQAIIAEVGLDMSRFPTAGHLVSWAKLSPRTIQSGPVTRTGRTGKGNPYLKGVLGEAAATAARTDTFLGERYRRIVKRRGKLKALVAVARSILVIVWELLTDPAARYHDLGSDYYTVRTDKAHKARGHVRQLEALGYTVSLTAAA

SEQ ID NO: 218287 - protein, 640 aa, unidentified
MSQVCSSSNVVIGVGIDTARYGHHVSFLNPDRSTAFRGFRFPESRAGYQRLHDTLKQLADKHQNQVLFRIRIDAAGQYATNLETFIRSLPFNLVFSVGEPKRNQDYKNAHYPKSKSDPVDSAACARFAVVEQPPHVAPTPQQFLVIRDVVATLISQSRHTTRCTNQLHKLLARVFPELPLLANNINEAWVLSLLERYPTPARLAAARSATLCQISHVTPERAANLQQAARSTTGSFTGHFAEKLVIQAVQAVRDSLTREAQTLAWIELALEELPSGGHRHVISIPGIGPRTAAVLIAKIASIERFQTAAQLVSYFGIFPELNSSGVDKSGAPISRGQQRMSTRGCDFVRQMLWMAALSAIRANPPIKALYQRQIAAGKPASVALGHCMRKLLHQVFAIWKTDRPFDKCFQSRPRRTGHSPLPQAPVTQVPVTQTPIHPTPEESAVRDTPSKCQHDDRKQKAAAGRKGVEPQGKAVTATATLLRTRKLSAAAAPCNSKPAPPKDRPLQQPSPNGLVDYADLRQRVSIAQVLIELGRFDQFTGVGYQRRGPCPVRDHSGTQVGARHFSVNLERNVFRCLHPDCQVKGNALDLWAAVKKLPLYAAALDLAEALQIPLTKPSGEHAPDPHSNLQPPTDSNSQVS

SEQ ID NO: 218288 - protein, 323 aa, unidentified
MNKDIKYFGLDISYLVFDVTDSDGNYYQFKNNGSGFKKFAKLLDNQSHCVMEATGYYHYQLAYHLLELGIKVSVENPLSVKRFIQMKLSKIKTDKSDSKLICAYAEQVELKLWKGSSKEVQESLQLTRALSIYTKQRTMLKNKLHGESVLGSPSKVVVSSLKRSLKQLGKEMKTLENRLLVLVKQEHQDLFTRLKTIPGIGPKTAIMLVVLTGGFERFSSASELCSYAGLTPVIRQSGSSVKGRPRISKMGNQKLRNLLFMCSFTACKYNKACRDLYERIVAKGKSKKLALIAVCNKLLKQAFAIAKSGLIFDKEYKSTLVKN

SEQ ID NO: 218289 - protein, 355 aa, unidentified
MDSKKYIGMDVHKESISIAVRNAAGKIVMECVIETKASMVLQFIEGLRGDLQVTFEEGTSAAWLYDLLKPHVTKLVVCDPRKNASMREGNQNDKIDARRLAELLRLNHLHPVYHGEHGLRSLKELVRSYLTITKDLVRVMTRVKAIYRSWAIPCSGKQVYAPRHRAEWLGKITEPGVRRRAEFYYQQLDALRTVRQQVRRELLAEGKKHPAWKRLCQIPAIGPIRSAVLLGILQTPHRFRSKRQLWTYSGFGIKTESSADHRSVDGQLKRVKKQSSVRGLNRNCNHDLKNLFKGAAIVAASKPGPLQEFYSALLSKGLRPEMARLTLARKIATIVLIVWKRGVCFDAQHLKPQTA

SEQ ID NO: 218290 - protein, 372 aa, unidentified
MKIIYPRVCGIDVHKKFIVAVICISESVEPVYLKKRFSTFHNDLIRFRDWLIQNDCQNVCMESTGKYYIPVYNILESHISNIVVANPKWVRAVKGEKDDDKDAKWIADLFKLGIVKSSFIPQKDFRILRELTRYKYKLVNMRSSEKNRYQNALTSGNCKLDMVFTDVFGKSASNIIDLILSDNPYTDEDILSKVHKNCKASPDMILNSINGTDLTPVQKSRIELVNNHIKQLSSNIQRLDKLIDLMIEPYEDYISFLCQIPGVSRNSAITILSEIGVDMNHFTSTRRLTSWAGLTPSSNQSAGKKKSVRISRAGVYLKPCLVEVAHAAVKDTNHPYYANKFNKISKRRGKKRAYIAIARKILVAAYHMISAY

SEQ ID NO: 218291 - protein, 377 aa, unidentified
MSKIRFVGLDVHADTIAVAVAEPDGEVRSLGIVPNRPQSVRKLVAKLGPAQQLKACYEAGPTGYGLYWQLTELKVACEVVAPTLVPVKAGDRVKTDRRDATKLARSYRSGDLTPVWVPDAEHEALRDLVRAREDARQDQLRARHRLGKFLLRHGRRPPDAIKKSWTLKYMTWIKEQVHFEQEALEATLLDYVHEVEHMAERIQLLDKAIDEAIQKAPPVMRAVVEALQALRGVARITAVSVVAEAGTLSRFARPRPLMGYSGLVSSEYSSGNHVHRGAITKTGNAHLRRVIIESAWAYQYRPWLGGDLLKRQQGLDQDIKEIAWKAQWRLHKRYKRLAAAGKKKPQIVTAVGRELLGFIWAIAVRTEAKFQTQRQAA

SEQ ID NO: 218292 - protein, 354 aa, unidentified
MNSEKYIGLDVHQATISVAVMDSTGKLVMESILETKAATILEFFAGLRGTLSVTFEEGTWAAWLYDLLKPRVAKLVVCNPRKNALLKDGNKNDRIDARKLADLLRGNHLKPVYHGETGMRMLRELARSYLTIVKDLTRVMNRLKAVYRSWAIPCAGRDVYYTRHRAEWLGKIREAGVRRRAEQLYQQLDMLQHLRQQARRELLAESRKHSSTAKLRQIPFLGPVRSALSVALIQTPYRFRTKRQLWAYSGLALETRTSGEYRYVEGQVRRSKKLLIRGLNKDHNHDLKGLFKGAATMASVRPGPFQDFYQALLSKGMKPTMARLTLARKIAAITLTLWKKEENFDAKKLKSQAA

SEQ ID NO: 218293 - protein, 401 aa, unidentified
MKDRPGVSSLGSNNQKPKEGTMRKAILRLKSIVLDQVLTMAFELSDKNWKVIFSHGGKNRFYNVYPDESRTRVPEIVARAKKKFGLPEDCRVFSCYEAGRDGFWVHRFLVSLGIENLVIDPASIEVPRKHRRTKTDRVDAEKLVGLLIRHLRGEEKNVLKVVAVPSEKDEDEMRLHREREKCVSERTRLRNRIRSLLVTQGVRMGSWKEVNAAYIERVLKWNGEKLGPKLQDALKRNIARMEFVDAQIKELDQEIRKFVNDKDPCEAVKKMQKLHGLKGVGIQGARILVAEFFGWRTFDGGKQVGALAGLTGCPYASGEMEREQGISKSGNYRIRTLMVEMAWSWQRFQPHSRLSRWFKERFGQGRRHRRIGIVALARKLLVALWRYVEFGIVPEGAVVVR

SEQ ID NO: 218294 - protein, 362 aa, unidentified
MRGVTVQEKLYVGVDLHKTQFTICVINEEGDSFEAGTKFPMDKEGYIAFADKMKKLSRRHDGATVSIAVESTANARFFRDIMEAKGFEVTVVNTLRFKVVNLSTKKTDKNDAKTLAEFLARDILPKSHLCRPESESLRRVLKSRTLMVQDAVALKNQAHAVMLAYGYITQPAQFQSKSSRTKLLARLPAKVKEVIEIIFETLDLVESQTHVLERRLRRITIDNECVNLLMTIPVIGIVNACTIYAYTDDIDRFESYKNFSAYCGLVPWVQTSNESVYYGKITKRGPQELRTALVQCVVAMVRMPGKTADLGIMKQYHQLKDDKSSGKAIIATARKLSRIIYVMLKTMTPFDSAKLIKDDPKE

SEQ ID NO: 218295 - protein, 422 aa, unidentified
MNAKSNTAQPMLFIGIDWADKEHALHLISSASHEQSTETLPQDPEAISQWATQLGKRFPQHRLMVILEQSRGALFAALAEHSQLELYPLNPKQLSRYRDSLYPSGGKNDPMDARLLAMFLKEHCQQLRQWQPDNLITRQISQYSEIRRKLVDERKRLVSKMQSILKTYFPQALTLFQVSLHDARPLDLLKRWPSLQSLKRVRPETLRSFLKEHRMKNEDKQTEFVKTIRSATPLTKDKALIEANALYVQTLVQQIRDLNQAIEQFEQQLKELVKTHPDAELFQSLPGAGEALVPRLIAVMGSQRERYQNAAEIQCRVGIAPITIQSGKSLQVRKRIAYPKFLRQTFHEFAEQARLWSPWSKAFYQMKKEKGMKHQAIIRALAYKWIRIIYQLWKTKTRYDANQYHQRLKTTGSPIINFLEKS

SEQ ID NO: 218296 - protein, 371 aa, unidentified
MKKGTTRYLGLDVHKATVTVALAEDGSQPVVYGTIANDPSSVRKLVRQLGREAKLVVAYEAGPTGYALHRQLLELGAECTVVAPALIPRRPGDRVKTDTRDALTLARLLRSGDLTPVWVPGEEDEALRDLVRARFDAKADVLRAKHRLSKFLLRRGIQVPPGTKAWTARYQAWLNQLSFPQAAAQVVFDDYRATVRATEDRIRRLDTELRSCAQDSRQAALIAALQTLRGIGFLSAVTIAAESGDIRRFANAPRYMSFTGLSSSEYSSGQSHHRGAITHAGNAYLRHVLVQAAHNARHAPNCSRELQQRQAGLPSDLVALAWRAQLRLHQRYRHLVGRLGRPKAVTAVARELAGFVWAVGQRMAEQEVSPA

SEQ ID NO: 218297 - protein, 321 aa, unidentified
MYKYSEIFGVDISKDVFDVVNSKGDYYQFSNDLKGFKAFTKKLTKETLVVMEATGYYHYCLAQYLYEQGYLVSVVNPLSVKRFIQMKLSKIKTDKSDAKAICEYGSFNEIPLYTAKDESQAECLQLIRLMDIYLKQRTMMKNKIHGEKTLGIPSKSVYRSLNRSLKSIKKEISLLEDRLNLLVKDHQQKQLTLLKSIPGMGVKTALMLIIMTDGFNRFENSKQLCSYAGITPTIRHSGSSVRGKSRISKMGNQKMRNLLFLCSFSACKYNKGCKAIYERIVSKGKSKKLALIAVSNKLLKQAFAIAKSGLPYDENFVSVLK

SEQ ID NO: 218298 - protein, 343 aa, unidentified
MQTVSTIGLDIAKSVFQVHGVDANGLVVVRRQLKRRYVLAFFEKLAPCLVGIEACASSHYWSRQLQALGHNVRLMPPAYVKPYVKRQKNDMADAEAICEAVTRANMRFVPTKTPEQQSELVLHRTRHLFIRQQTSLINAIRGHLAEFGVTAPVGRKGIEELLRVIADPSDKRVPDVVRACLAALGSQLLSLKKQILDFDRMIMAWHRSNQTSQRLNCIPGVGPLLATALVASVADPKVFRSGRNFSAWIGLVPKQHSSGGRARLGSISKQGDRYLRGLFVAGALAVIRYAKLHGTKYRPWVAALLARRPTKVAAIALANKLARMAWAMMARGERYNYPAALRV

SEQ ID NO: 218299 - protein, 419 aa, unidentified
MAGSNDNGIVNVVHPICCGLDVHKEKISACLIFNGVLGETCTEVQEFGTFTDELIRLRDWLFKHNCPIVAMESTGIYWRPVHNVLEGYVEIILVNARHIKNVPGRKTDICDSKWLAGLLRHALLKGSFIPPKEVREWRDLTRLRRTYVETLGDYKRRTHKLFESANIKIDSVVSDLFGQTGRNLMRLLGQGSLPIRQEDMEPCLRGKLKAKREELYRSIQGFFTAHHGYLLHSLLKTIATLEGEIEAINDRLRQVMTTREPLLQMVMEVAGISEVSARAILSEVGPTMDPFRTSAALCSWAGLCPGNNESAGKRHSGKSPVRKHHLKTIMIEVAWAAVKVKGSYYREKYYRLKSRRGARKAIVGIAHRLLKAIYHIIKDGVHFKDLGEDFLNRTNGLQNKVRRLRNQAHQLGYALVAQI

SEQ ID NO: 218300 - protein, 386 aa, unidentified
MKTVAGLDVHKDSVYLCILRENGEKIERVFGVLTPQLDSMRDFMAENEVSEVAMESTSVYWIPIWRVLVDSFELKLVNPYFIKQLPGRKSDVKDAQWIAECVMKELIRGSFIPPPLIQQLRLYDRRIFELNAELGRKYSKIDAILQRCNIRLSNYVSNTDCKSYKNVVKRISEGVTSPQELLMLVHKRIINKHGEDTILAALTGVVSEAETDMLAQYVTESALLEDNKNKCIEKMREICNREFEEQMKNLQTIPGVSERSAQTILAEIGPDVNAFPSAKHLVSWCGFNPRNDESNKKIKSNKITHGNRFIRVASIQCAWAASRTKECYFSKFYAFHTQVRKKFKLKVVVAVARKVLVCIWHILKFNVSYKDFEPPKSVTKDCTQFA

SEQ ID NO: 218301 - protein, 362 aa, unidentified
MEQITRGVVVGEVVRVGVDLAKRVLQVHAVAAQGRIVARRALRRDAFLGWCAQLPPGCVVAMEISSSAHHWARKLLAMGFKPLLMSAQLVKPYRSEGATGKNDANDAAAICEAASRPTMRFVPVKSVEQQSMLCVHRLREGLKADRTACINRIRGLLAEFGLVFAQGPDALSSALADTLEDGANEMNALARRVIEHAQAQWRELDTHIAWCDERIAQHGKDNAAVRQAAQLMGIGPITASAVIATVDDFAQFRNGAQFGAWCGITPRQDSSGGKTKLGRITRRGDTYLRSLLVQGAKSAVMTAHKRGDPVSRWTLALRERSGWQVAAVALANKNARILWAVMTKGAQFDASHVSVKPCAAVA

SEQ ID NO: 218302 - protein, 436 aa, unidentified
MRGCRCYMIMGFTKPIEHFNLQRKKVITMNTLYVGIDVSSKSNVIYLMLPNGDKHSNFSVANSHEGSTQLVKRILSALTSHSLDTVLIGLEATSVYGDNLVYFLREDATLAPFNRKIHVLNPKQVKKFHDAYNDLPKNDYVDSFVIADCLRFGRINKEVYMGDYRYKALQNLTRARFFAVQNLVKEKQRFMNVLFKKYSTMTQEKVFSDTFSTTALAVYDEFESAEALANMDLHELTDFIIEKGKNRFPDPDAVAKAIQKAARSSYRLPKTVNDSVNQVLSISITSMKALESQIKEFDKAIKAQMELLPNVLISIPGIGPVYSAGIMAEIGDINRFNSQAALAKYAGLAWKQHQSGGFESEVTRLIPSGNRFLKYYLCEAAFSLVRCDKEYSDFYRLKYKEVNRCQHKRALALTARKFVRLVFRLLKDNRLYCPAK

SEQ ID NO: 218303 - protein, 350 aa, unidentified
MQLTTLGIDLAKNVFRVHGCDTNGKVVVSKSLTRRQQMFIARLPPCLVGMEACATAHYWAREIQKHGHEVRLMAPQYVRPYTRDAEAICEAVRRPTMRFVAVKSPAQQDVQALHRVRQQLVKEMTALSNQVRGLLAEYGLVIPRGIAALRPALLKIVAEQDNGLSGLMRELVLDLSERLDRTQQRVRWYNQRIVQLLHHDERCQRLAALPGVGPLTATAVVAAVGNARDFKSGRELAAYFGLVPRHRASGGRTVMLGISKRGDCYLRTLLVHGARAAIRNLERRRDPRSMCAGRLKARRGANIATVALANKNARVRWALLTRGGSIAPRPTQPRYRTAPKRRGGNQNQEL

SEQ ID NO: 218304 - protein, 392 aa, unidentified
MYIVGIDIGKNHHEASIVSPEGKQIGRSLRFATTHKGADSLMSFIFKNIGNSPCVFGMEATGHYWYPIYSFLKAKGYTIYVINPIQSDSLRKMYIRQTKNDSIDSFLIAEVIRFGQFGTTSMADENILAMRQLCRYRDSVISSRTEIKLRIGTIMEQIFPEYEKQFSSLWVSTSMGILEKYLTPENIENAPIDELFEIIKDKSHNRLTRAKAISIKEAAADTFGIKIAQDAFSFQLKQLIDRMNFLDKQIEALDCQILEYYEKFDCYLHTIPGIGMIAAATILAEIGDINRFKSSSALVAFAGIDPTVRQSGEFSSTHNHMSKRGSPYLRHAIFLAATTCSFHNSPLNAYYKKKREQGKHHLTATGAVARKLTTVIYAVLRDGKPYEPKKFC

SEQ ID NO: 218305 - protein, 356 aa, unidentified
MERIAFDSHKRYTLCSVEDERGKILKEQRIEHERGAIQTFLAGFAAGTPVAVETIGNWYWIIEEIEAAGLTPRLVHARKAKVMMGCLNKTDRLDVRGLNRLQRTGTLPTVWIPPGNLRDLRDLMRTRMSGVATRTRLKNRLQATLAKYALSIKGVSDIFGKKGRLLLKQQLKQLPPQTQFAAECQLRQLEHLEAEIQHLEQRMKEVFVETEEIRLLQTLPGIGPLLGTVLALEIGDVRRFATAEKLAAYAGTTPRVHASGGRIRYGHLRPDVNRYLKWAFSEAANSIAINHELWPQRHVSRRYRHLRQKKGHATAIGAVARHLAEASYWVLRKKESYRDPALTPRFAKGSPSAQVS

SEQ ID NO: 218306 - protein, 351 aa, unidentified
MHIGVDTHKVQHVLAALDDQGRRRGTHRSPNTPEGWADALAWARSLGDTRQWGIENSGSLGKGFAQALLGQGETAVCEVSPQRTAQYRRHGRSQDKTDDTDALAIARLLVAEGEQLPAVRRDDLSTELRLLSDHRDNLLVERTRLINQLHAQMLQIDPSYKEKSGPLTEARGVAYCRDLVVPDADRLVQTRLLIVHQLAAQILSLDGEVADLTSELDRRVRESRTPLLALRGVGTVVAARLIGELGTTPRIPSAGALAALSGISPVAVSSGGHGGYRLNRGGNRRLNRAIHIIALSQRRFEPRARAYYAKKRAEGKTGRAAMRCLKRRLVDVLYRTLSRDDDSDDAGACAA

SEQ ID NO: 218307 - protein, 415 aa, unidentified
MNDQKQWYAGVDWGSESHCVWLTDRDGRRLGERSFKHGGEGLAEMVGWLLKTSGAADASQVNVAIEVPHGPVVETLIERSFNVWALNPKQMDRFRDRYSVAGSKDDSRDAQVMASALRTDPHCFRQLAAGDPIVIELREWSRIAEDLTDERTALTNRLRQQLWRYFPAFLELDADLSAAWAIELWQAVPTPQVAKRVRKASIETILKRHRIRRLAADQVLEILRQRPLTVAAGTVEAARAHCATLIAKLRLINRQIADAHRQLDTLIAKVGASEDDSSGQNKQRDVVILASLPGIGRINLATLLAEASEALQRRDYHALRALTGAAPVTKRSGKSCTISRRYAHNPRLANALYHWARTATQHDTISRAKYAALRARGHTHGRALRSVADRLLNVACSMLRSGTIFNPSLPHQNAA

SEQ ID NO: 218308 - protein, 337 aa, unidentified
MVLIAVDPHKSSHTACAVDEQGIPLATLRVASAAQAELLAWGQRWPERSWAVEGARGLGQGLAQWLLAAGESVVDVPARLVRRVRELSGQHKTDHTDARAIAEAALRAQDLHAAYPDDKHTVLRLLSDRRDDLTQERTRTVNRLHRLLRELVAGGAPRQLSVRRAAALMVALQPRSSADQERLRQAGELLTEVESLERKLRDNLRRITAAVRASGTCLPALPGVGPVLAAKLLGHAGPISRFRSSAQFASYSGTAPREASSGEVVRHRLSRRGDRQLNMALHIAAVTQVRCTSTDGHRYYLRKRAEGKSAREALRCLKRQLAAVVYRCLVADAAGAH

SEQ ID NO: 218309 - protein, 341 aa, unidentified
MGQAHTIGLDIAKRVFQAHGADASGRVVFRKRLVRAKVLEFFAAQPPCTVAMEACAGAHHWARELGKLGHTVRLIPPAYVKPYVKRQKNDRADAEAICEAAQRPSMRFVPVKTEEQQANGVVFRARDLLVRQRTQCINALRGHLSEYGYVFPQGITHADAVIAHVEDPDSSVPESARAVLNVLVGTFQALEAQIQALDAEITQRAKADPVARRLMTIPGIGPIAATAITALVPAPEGFRAGRDFAAWLGLTPLQKSTGGKQRLGAISKMGERTIRRLLILGASAVVRWAGQRGTPAGSWLARMLARKPKMLVTVALANKTARIVWALLVKGGVYRAPAPAA

SEQ ID NO: 218310 - protein, 417 aa, unidentified
MNAVGIDVSKGKSTVAIYRPGDQVILSPRNFHHTQTGINSLIEIIKGLDGETKVCMEHTGRYYEPVATWLSDAGIFVSTINPLLIRAFGDDSLRAPKTDKADAKKIARYTLDRWAKLKQYGHMDETRNTLKTMNRQFGFYMDQKTAMKNNLIALQDQTFPGANTFFDSPARKDGSQKWVDFAHTYWHVDCVREKSLEAFTEHYQKWCKRKGYNFSADKAEKIYHKASDLIAVFPKDAYTKQLVRQAVAMLNLASETVETLREKMDQLASTLPEYPVVMAMNGVGPTLGPQLMAEIGDITRFEKRGSLTAFAGVDPGKNESGQYSQKSVKTSKKGSPHLRKTLFQIMDSLIQRSPEDDPVYAFMDKKRAQGKPYHVYMTAGANKFLRIYYGRVKEYISGISEDVKQPHQTSNGKEICS

SEQ ID NO: 218311 - protein, 398 aa, unidentified
MSLEPHAEPAAIRTHFGAIFVSLELSRSNWLVTSLIPGGGEKMSKHGVGAGDVAGLLARFSELRRKALARTGENYPIVVIQEAGLDAFWIHRVLEQEGIESHVVDAASIAVSRRRRRAKTDKIDGEALLRALLAFKRGEPRVCSMVRAPTPEEEDRRRICRERKVLIAERVRHVNRIKGLLFSQGIGDYRPLGRDRRRALEMLRTGDGRDIEPHLKKQIGRELDRLELLMEQIVAVEGDRDAMLSAAIEAEVAATPQNAPAPVRMLANVKSIGPEFAAVLWTEGLCRSFANRRQIAAYAGLAPTPWQSGSIDREQGVSKAGNPRLRTTMIQLAWLWLRHQPDSALARWFHERVNRNGGRQRKSTIVALARKLLVALWKYVTAGVVIEGAVMKTAAPAL

SEQ ID NO: 218312 - protein, 358 aa, unidentified
MYLVGIDIGKLKHSFCLLEKETGEILVEPVFFENSRDGFNVLLSSFKHLPQRDILIGMEDTGHYNLALLKFLLDRNYQVALINPVATDLTRKMQGGISKNDKLDTLTICDVLSSNQRVKSYRISKYSSFDLYEQKLLTREHHNLKEEENQLSNRLQKCIDVVFPEFNSLFKSKYGIVYMNILKEFGSADAIAHADIRTLRKCFDTGRGKHISLTAQELKEAARNSIGFPSSSEATQIKHLVARIELIKEQIAEIDKKIEEFSLQNNSPILSIPGISHFSGTSILAELGDIHNYSKPSQIIKFAGVAPLTYESSQFTAQHTAITKKGCKYLRKTLYQIITPVIQYNPVFRKFYLLIMVL

SEQ ID NO: 218313 - protein, 329 aa, unidentified
MQKNYIIGVDVSKDKLDIHCHSHYESLVVSNDEKGFQKLLKWILHEVSNELSSIGVVMEYTGIYTYRLEHFLHQAGIDYVKRPALDIKRSAGLKRGKTDKADARMISRYGWQRREELCAMKPLSNTQQNLQQLMAYRDKLVADRASYQARITEMKEQMGSQFNDCITCSTRHPIETLSDQIKIVTVSIEQVICSDKVICRNYQLLKSVTGIGFATAVHLLIVTENFNRFINARKFACYCGVAPFENSSGSSIRGKTKTSHLANKKLKSLFTMAAISAIQHEKDLKEKYHQKLQQGKAKMCALNIIRFKLIERIFAVIKRQSPYEIKLAA

SEQ ID NO: 218314 - protein, 400 aa, unidentified
MRAVFGIDVSKASSEVAILVNGEKVHGYTISNDAIGFSQLLGDLKTVHKPEIIFKATGVYSRRLQAFLDEHGYAYTRLNPLEAKKQLDSLRVRKTDQIDAEKLAQSQFVLNRNPTYVQEEVYQNLRDLSHFYQNLTEDIVRAKNRLHKVLQVTFPELENILSTPSGEQYWNLVIAFPCKDFVLDLSKDELSESIRQSTSKRISDKRVAYLAEKLIALANQSYCAVKKNSPMLEEVRYYTKELLRLSEQRQAVLDEMVELAQPLPEYDILLSIPGIAETTATSIIGELGDIRRFQSANQINAFIGIDLRHYESGNFLAKEHITKRGNPYARKILFKCIHNIASASHTNPCHIADFYEKRKRQSQTTSTKPHTIASIHRLIRTMYYLITHNKLYDYTSTQNR

SEQ ID NO: 218315 - protein, 347 aa, unidentified
MIIIGCDLHTRTQQIAMLDTETGEVVEKRVEHESGEARRFYEGLKEAALVGIESTGYTRWFAEMLAELGHELAVGEAGRIRAMEPRQQKHDRRDAEHILNLLVRGDFPKIWLPPPEERDVRVLLEHRHQLVQMRTRAQNGLQAIALSHGLRRRQRLWSKGGQEELKKIPLREGMGRRREDLMQLAGQLNRWIKELDQRIGEEVARRPEAQRLMTHPGVGPLTALGTVLVLGPVERFPDERHLTSYLGLIPREDSSGGRQRFGHLTKQGNRLLRWLLVEAAGVASRSDPCLRRVYRRLAFRKGAAVAKVAVARKLAIRLYIMLRDRIDYQEFCRRGSHAGMLGHVALV

SEQ ID NO: 218316 - protein, 461 aa, unidentified
MWATPPNHKTMPRPRKTKVQTIQPVINPHAAGADIGAREIYVALPTALTAEPVRSFLTFTDDLRALVAWLQAFGIKTVAMEATSVYWIPLAELLEEAKIEVCLVNPRHVKNVPGRKTDVMDCQWLQYLHSVGLLRGAFRPAAEVRGVRALWRQRDALVRHSSWHIQHVHKALDQMNLQVHHVLSDITGQTGTAIIEAILRGERDPAALAKNRDQRVKASEATLVKALTGDYREEHLFCLRQAFAGYQFLQTQISELDAELGRRLSELAPPAPIVPAEAPVAKPKSTGKAAPGFAAHELLARLHGVDLCAVPGVNVLTAQTLWSELGGDLSAFPTAKHFASWLGVCPDNRISGGKVLSARTRPTTNRVARALRMAAQALHHSQNELGDHYRRLRAKLGGAAAVTALANKLARILYVLITTRQPYRPDLHAATGELHRTRTLARLKAKAKDLGFQLVPTPASA

SEQ ID NO: 218317 - protein, 398 aa, unidentified
MIGFDAHPDSFTAAILSGPTPAAAVVEKMFNKVPMNRLLQWAKKNTLDSDIIVLEASGNSFHIARSLRSAGREASVLESRHIGKLKEAHANNDKISAIRIGKAYLAGTAKIVWIPDETTQERRDTFHTYSKAVKRSTQVTNRIKSYLSDHGVRLKSKTHILNQKESIMQACQWSPRERLIIEGMLMDLQNAQSQRAHWNHFMAQEVLHDPLLLSLTRLTGVREIVAYSIGAIIGDINRFASPKKLVAYIGLNPAFDKSGEGEWNGGIKGHGRRDLRSHLIEAAQSILQSNHDLGRWGKKLMARKGSRNLAVAAVARKLAVAIWYLMKGLWSTVEEVEAGMKLKIGKMIGKMGKEGLSLIGKARKEFKEEIEQNLKKGREYILDRARSSPLKSSLKEAS

SEQ ID NO: 218318 - protein, 400 aa, unidentified
MRVVFGIDVSKVSSEVAILVNGEKVHGYTMPNDAIGFSRLLGDLKTVHKPEIIFEATGVYSRRLQTFLEDNGYAYTRLNPLEVKKQLDSLRVRKTDQIDAEKLAQSQFVLNHKPTYVQEEVYQNLRDLSRFYQNLTEDIVRAKNRLHKALQVTFPELENILSTPSGEQYWNLVIAFPCKDFVLELSKNELSESIRQSTSKRISDKRVAYLAEKLIALANQSYCAVKKTSPMLEEVRYYTKELLRLSEQRQAVLDEMVELAQPLPEYDILRSIPGIAETTATSIIGELGDIRRFQSANQINAFIGIDLRHYESGNFIAKEHITKRGNPYARKILFKCIHNIASASHTNPCHIADFYEKRKRQSQTTSTKPHTIASIHRLIRTMYYLIMHNKLYDYASTQNR

SEQ ID NO: 218319 - protein, 417 aa, unidentified
MEPKLIVAGIDVHKKMLAVVVVDEDHPQQAREQRKFATNGSDLKHLAAWLDSHGVSLVVMESTALYWRPVWLALEGQYALHLAQAQSNAAPRGRKSDYVDALRLARRFLAAELRLSFVPDAEQRTWRCVSRNKHQKRQRRVQIQNQIEALLEECQIKLSSVITDLLGLTGYRILQALARGETDPAKLVELAAVNLKASKEQLAEAVSVPMQSQYRSVLALQLEELDLLDKHIGELSRQLGKALQSHQEAVLRLCEIPGVREDAAWQMMAELGPAATTFETAEQMASWIGVCPGREESAGKSNRNRSPKGNRTMRRVLNQVAWSAVRTKDSFFRELYHRLIPRLGVHKAIWAIAHRIAKVVWKVLHERVHYIERGPLALDPVAMKRRVTKLARQMRRLGYTIEVKPVAVATAGIELPV

SEQ ID NO: 218320 - protein, 348 aa, unidentified
MALTIVEDTRAVTGGVDTHADMHVAAALDPVGGLLGVGEFPATAAGYARLLGWLGGFGTVCLVGIEGTGSYGAGRARHVTAAGIRVVEVDRSDRQDRRRQGKSDPLDAVSAARAAQSGRARGEPKGPDGAVEAIRALMVAKRSARSERTQTINQARALIVTGPDDLRARFARHTAAGLVSELAALRPRPGATVGYATRIALRELGRRAEFLDGQLGRLDELIVPLVTARAPALLALHGVGPDTAALLLIAAGDHPHRLRSEAAWAHLCAVAPIPASSGKRTRHRLNPGGNREASHALWRIVITRMSSHAPTRAYVERRTKEGLSKKEIIRCLKRYAARQVYRHLRPAG

SEQ ID NO: 218321 - protein, 466 aa, unidentified
MTPHKDYCLDPRPPATPTLPQSPVLADALQVCHPHAAGIDIGEAEHWVAVPPGCDPQPVRRFGTCTVDLDALADWLIDCGVTTVAMESTGVYWIPLFELLEARGVQVLLIDPRQAKRAPGRPKTDRLDGQWLQRLHAYGLLAGAFRPEDQVCVLRSSLRHRQRLLTSAAHHIQHRHKALQQMNLKLPQVVSDLTGVTGMAILKAIIAGERDPVTLAKLRNPHCHHDEDDMAKALQGTWRAEHLFALQQAVALYDFSHQQLALCDQQIKSHLATFADQSEGKPLPPKARRHKKTNEPRFDARTPLYRLAGVDLTTIEGIEENTALIILSAIGTDMHRWPSVKHFCRWLGLCPQHQISGGKILSRRVRPGAHRVTVALRLAARSLHHSQSALGAFFRRMKARLGTPKAITATAHKLARLVYSLLQHGSAYVHQGLDAYEAQYRERKVTTMAKQAKALGYTLVPLPAQG

SEQ ID NO: 218322 - protein, 407 aa, unidentified
MKVYIGIDWSQNKHDLCFLNEAGAHLAQLIIPHTPAGFWKIDETRKKLGVPIDACQVGLETAHNILLDFLWDQGYSQVFVLHPKMVKGSRSRFRSSAARDDTSDALLIADILRTDHGHLRAWQPDTSLTRQIRSRIKFTQFLTTEIVRLTNRQRAVLLRYYPVVLDLFSSLNTLITQHFILEYPAPQAAARLSRDEFDNFLIRHRYPKKGLSPKILSQLQQPYPEAAAGVIEACYPEARSLARMLLEMISAKKKMLKELGQLFTQHPDHEVYASLPGTGAFLQPALLSKFGDDRARFPTADRVQALAGTSPVTISSGKRRRVQFRHSCDHEFRHIAQQWAKSSLRTSIWANAYYTSLRPHCESESHVFRCLANRWLAILWRLWQDGQPYDETYHLRQRTLRSQPRIF

SEQ ID NO: 218323 - protein, 370 aa, unidentified
MKFEVTKNQLTLKSRTMSKVKELNFDGKTIYCGLDVHKTNWKVNIGMDKMELGGFSQNPDPEELIRHLKKNYPGAEVKVVYEAGFCGFGIQRSLKALGIDCIVVNAADVPSSDKERKRKNDKRDARKLRRELSEGELKHGIYVPDIEMEQARTLVRERHRLVQDQSRCKSRIWHMLMFSGIQLGLEQKRWSAKLVKELETLDCPTSLKMALNLALEEYKQIRTIIKQATLAIRKMALEPPFAALQPYLQSIDGIGLITGMVIQTEIQDIKRFRTLDSLCDYAGYVPDISSTNDKDVIKGITHRRNEFLRETIIESSWILIRKDPAMLMKYQEYAKRMNSNKAIIRIGKHLLSRIRYVWNNKTQYVKGVVG

SEQ ID NO: 218324 - protein, 370 aa, unidentified
MDERIKFFVGLDVHKDTISIAACDASREPARFVGTVSSDVRQVFKALAKAGEPSEIHVVYEAGPTGYGLYRELCRRGYACEIVAPSLIPRRAGDRIKNDRRDCARLAELARAGELKAIWVPDEEHESIRDLCRAREDAVDARLKARQQLKAFLLRHDRRFPGKTSWNKSHTTWIAEQRFEHVGERVALAEYQLAVQAAEQRVERLTTVLSEAIKGWRFESVVAALRGLRGIDVVSAIGLVAEIGDINRFDSPRRLMGYLGLVPSEHSSGNSVRRGSITKTGNAHARRLLTEAAWNYRFPARMSSTLRERSEALPQAVREHAWKAQLRLNKRYSQLSSRGVHHNKVCVAVARELAGFVWAIARQASTSPLN

SEQ ID NO: 218325 - protein, 423 aa, unidentified
MHVSIAGGSPAVFGTVTSQLHALRDYLAEHQVRSVAMEATGVYWLPLYGVLEAAGMEVVMVDGRQTRNLPGRKTDMKDCQWGATLHAHGLLRAGFVPPANIRRLQDYLRLRGDHIAAAAGHVQHMQKALERMNIKLHEVISSLTGASGLAVIRAILAGERDPQVLLGLCDIRIRNVKAERVVESLRGDWAQEHLFALAQAVQSWDHYQGLIAACDRQIAVVLRQMTDAKAPPSAASTKTGKPRTRPGVNAPDIADLREILAHICGAKDLTTLPAHSEYSVLQLIGEVGTDLTKWRTEKHFTSWLGLAPGSAQSGKRKASVKRRRNRAGQIFCVMARALARSKHVALGGFYRRMAARRGGLVANKALARKLATLFWRVMVKGLDFVETGVAQYEAKVLETKHRILHRLARQLGQKIVPNPAAVV

SEQ ID NO: 218326 - protein, 398 aa, unidentified
MTESSDYESVQVFIGVDVGKDTHHAVAINRSGKRLFDKALPNDENKLRSLISDLKQHGQILLVVDQPATIGALPVAVARSEGVLVGYLPGLAMRRIADLHAGEAKTDARDAAIIAEAARTLPHALRTLKLADEQIAELSMLCGFDDDLAAQTTQASNRIRGLLTQIHPALERVLGPRLDHPAVLDLLQRYPSPEKLASLGEKKLAAQLCKLAPRLGKRLAADIAQALAEQTVAVPGTNAAAVVLPRLALQLITLRKQRDEVALAVEQRVLAHPLYPVLTSMPGVGVRTAARLLTEVACRAFASVAHLAAYAGLAPVTRRSGSSIRGEHPSRRGNKALKRALFLSAFAALRDPLSRAYYTRKMSQGKRHNQALIALARRRCDVLFAMMRDGTFYTPQAS

SEQ ID NO: 218327 - protein, 355 aa, unidentified
MQISKENTQISLKEQEFLPEIVYDHYFAIDWSQETVAIAHMRSNSRRPNVIEMKSDIRNLIKYFKQFQGKKILTIEETTSTHWLFVKLRGEFRRILICDPYRNALLSEGPKTDSIDASKLCLLLRAGLLREVFHTLEHDYWIRKLVMSYISLVRNGTRVLNQKSAIYRALGLRYKKEEFISDNKMINFVYDHLEDSIAQYREHKQNYEKLFSQLCRTDPVIGYLSNISGIGVINAVKTYAIVLDATRFIDKYHFWSYCGLVRHDKQSGGRSYGKRSGRYNGILKSVFKSAAMAAIGGNNDIRNYYDTLLSQGLSPDKASHAVSRYIATSCYAVMKYKQPYKPYNWRQVIETSKLN

SEQ ID NO: 218328 - protein, 400 aa, unidentified
MMTPDDIDVWVGLDVGKSAHHAHALDHDGNTLYDKPLKQDEKAIRTMLGKLSKHGRVLLVVDQPNTIGSLPLTVARNMGIAVAYLPGTAMRRTAQLLPGDAKTDRRDAHVIAWAALKLPETLRDAGPDDETLAALKLLAGHDEDLAHESTRHVNRLRSLLLQTHPAFERALKGERITRDATLALLERYGGPMGVKRAGIEDVKDWAKSNGLRAGRIIDDMFKAIGEQTVTVPGTLMAETIIPSIVHDIKTIRDRRREVGRQVEKLLEDHPLLTVLTSMPGIGVRTASNILLGIGGDIANFKSSAHLAAYAGISPVTGQSGTSIKGERPSRRGNKRLKNALWQTAFVASTKHPPSVAYYKRKREQGKHHNAAIICLARRRCDVIYSMLKNGTLYQEPALVA

SEQ ID NO: 218329 - protein, 419 aa, unidentified
MSFKILKFNCCGLDVHKTWIYACIGITDSNNRTEYKQARFSSFTKGLNELCDWLAKYNCKDVCMESTGKYWIPVFNILEQHNLWVTLSHPKYTKPMKGNKTDRKDAKWICDLYMCGMVKPSFIPPADIRELRDLVRYRYKLTCMITGEKNRAQNCLTVSNLKLDDVFSDVFGKSSRSITEQILQHPGEKFDVAPFVHGRCKTPIEEIQAAVDGAISKEQAVKLRQCLDHIDELNKHISELEQEILRLSDKYEAALNLIRTVPGFDKNPMTAVQMLSEIGGDMSVFPTAKHLVSWAGCCPRNDQSNQKIKSTRISRAGSYFKPVLVQVANALIKSKKHLEFTNRYKRIKARRGHKKAIIAICRMILTAIWHILSDLKPYTPEGFLESRPVKEEKVLSISQALNLLKQRGYIIKDEPLSVS

SEQ ID NO: 218330 - protein, 405 aa, unidentified
MSNDVFVGLDWAVHTHAVCIIDAAGAVLDRFEVTHDRDGLAELMRRLARHGQRLRIAIERPSGLIVDALVEAGHEVLPIHPNAVKASRPRYRSHGAKSDASDAYLLADLLRTDGHRWRALAQQSDSIRALRALVRSRDDLVAARVAAANQLTSTLQTFWPGAACIFADVTSPIALAFLRRYPSPDSARRLTEAQLQRFCKAQHYSGRRSAADLLTRLRAAATGRVGAQTEQAMADVVHAQVAVLVPMVTQIADLTRRIEQFMHSLPDGLLMMSFPRAGQVCAAQILAELGDVRERFPNADLLAAEAGAVPVTYQSGKTRSVAFRWACNHRLRQAITCLADNSRHANAWARSIYQAARGRGCDHTHAIRILARAWLRVIWRAWIDRKPYDPALHGSAVALTSAQGG

SEQ ID NO: 218331 - protein, 331 aa, unidentified
MSYFIGIDVSKEKLDCACLRNKEQKKARIMECSNNALGFKLLVEWSENTTSLSIKELSFLIEPTSIYHESLVAYLYALDATVFMANTGRVRKFAEGIGVLSKNDIIDANVLARYGLMATKLIAWKPVPKEIAELQSLINRLSTLEKELQREKNRQEKMNECHDAHPIEKRSIIKSIRRLEKEIKSFQIHIRNHVNETESIKKDFDLMVSIPGVGEKTAWIVLLILRSRNFQSASEVASYVGLNPIEKRSGKSEYRKPRLSKAGNSGWRKALYFPAMVAVRRNPDVQALYDRLLAAGKTKMCALGAAMRKLIHICFGVLKHQQPYQVQLQST

SEQ ID NO: 218332 - protein, 332 aa, unidentified
MFIIGCDLHTRYQVIAVLDTGTGEIVTRQLEHESGEAQRFYAGLGKPVLIGIEATGYTQWFERLLAELGHELWVGDPAEIRARAVRRQKTDTRDAEHLLDLLLTKRFPRVWVPTPEERDFRQLLKHRDKLVKMQTSVRNQLHFLAMSQGVCRRQRLWSGRGRQELEELSLGKWAGRRRQELLELLDGLGPRIEEMDKAVKAEVAGRPQAVRLMEQKGVGAVTALAFVLTVGPVQRFPSSRKLVSYLGLNPREDSSGGHQRLGHISKQGNEMMRWLLVEAGHTAAQFDPELRRQYQRLKFRRGGKVAKVAIARRLAVRLYWSLRCHATGSHVQ

SEQ ID NO: 218333 - protein, 408 aa, unidentified
MEQVIERCCGLDVHKQTVVACVRVPGPDGTRVQQVRTFGTTAAELLTLRDWLEAQAVTQVAMESTGIYWKPIFYVLEEAFTCVLANAAHIAQVPGRKTDVKDCAWIAQLLEHGLIRASFIPPPPVRELRDLTRYRKAVIQDRSRAANRLHKVLEDAGIKLASVATDVLGVSGRAMLTALVEGTTDPGVLADLARGTLRRKLPALRQALAGRFRPHHGFLVGQLLAHLDYLDEAIATLSTQIEAAITPFAAMVTRLDSIPGVSQRTAEVLIAEIGVDMRVFPTAGHLASWAGVCPGNNESAGKHRSGRPRPGNRWLRMTLIEAALAASRTSTALGARYRRVLRHRGHHKAVIAVAHVMLVIAYHLLSRETTYHELGADYFDRHQTDRLRRRAVQTLQRQGYRVTLEPAA

SEQ ID NO: 218334 - protein, 417 aa, unidentified
MSEYAALVAVDWADQQHAVCLLDPSTGEREQSIVKHTPAALQEWALSLRQRFAGQPIAVCLEQSRGPLIYALLQYDFFVLYPINPATLAKYRQAFSTARGKDDPTDADYLLDLLEHHRNRLRPWHPDDQKTRTLRLLVEQRRRLTGDRTRVSNRLTALLKGYFPQVLDWFEDIRTQLVCDFLERWPQLSLLQQARPATIDKFLRSHHSTSKPTNLRRLTEIKTALPLTTDAAVMTSSVINVKALVAQMKTVIAAISEYDRHLEALCQTHDDYHLFAALPGAGPVHAARLTAALGSDRSRWQSADELVTFAGIAPIIERSGKQFRIRWRYFCPKFFRQTFHEFAAQSIQDSFWARAYYSMQRAKGKDHHAAVRALAFKWIRVIWKCWHTRTPYNEVIYLESLRKKGSSLLKFAVDYQQ

SEQ ID NO: 218335 - protein, 340 aa, unidentified
MPLYGGIDLHANNSVVVLLNEQDQVVYQKRLPNDLPTILEVLAPHHAEIKGLVVESTYNWYWLVDGLMEAGYRVHLANPAAMQQYSGLKYSDDHSDARWLAHMLRLGILPEGYIYPKAARAVRDLLRKRAHWVRQHTANVLSVQNIMVRNTGARLSVKRIRELPKKELEGLLPEADQVLAITSSLAILDCLSQQIKALEKIVHQRLHHTPSYEQLLTVNGIGTILAQTITLETGDINRFPTVGNYASYCRCVDSNKISNGKRKGQGNVKNGNPYLGWAYMEAAQFALRFHPSAQRFYQRKLAKSNNNTTLARKAVAHKLSRACYYVMRDLVPFEATKAFG

SEQ ID NO: 218336 - protein, 353 aa, unidentified
MEQFIGCDAHKKFSVFVAVNEKGHAGEALRVVHDRQLYREFLTRLPAHSVIAVEASGSYSWLVDEMERSGHYPKLCNPLEAKRRMGLTHKTDKLDARGLAILLRNGTLPEVWIPPSELRDQRELLRLRIFLVRLRTRVKNRIHGTLARHNVQVPGADLFGVAARVQLGARLPELPVHCREAVEDELATLDFLETQIESAEHRLEAIMKVSVEADLLKTLPCVGPILSMVLMLEIGKVDRFPTAAHLASYAGLVPRVYSSGGHTRMGQVCGNVNRNLKWAFVEIGNLIVINQHRLAGTHAVRLYQRIKRAKNHQKAVVAVARHLAEAAWWVLTKQEVYREPHGPRQQALSSTHG

SEQ ID NO: 218337 - protein, 350 aa, unidentified
MNVNHYIGFDVHKKTVSFCVKIADGSIVEEGKLHATHQTLRQWAGKRQEAWRGAMEATLFSGWIYDTLRPFAAELQMGHPVLMKAIGASKKKNDKLDARKIADMVRCNLLPACYVAPVAIRELRRMLRYRNLVVAQSTRLKNKTSGLLMEVGAEYNKERLHGKQYFTELLDTVEEVPDSVKDLLRLNRGALEMFETTQQQLLARLRRDPLLARRVLLLKSIRGVGEVTALTWALEVGDPRRFSSVAHAVSYCGLTSALVSSADKQQRGPLSKQRNAHLQTVLVEAAKLAPRWNPQLEAVHARELERGNRNRATLAVARKLVAYLLAVDKSGQPFEIRSTPEAETEATKVA

SEQ ID NO: 218338 - protein, 331 aa, unidentified
MTTSATRNVRESMTEGTLFVAFELSEKTWKLGFTTGHGQKPRERSIPARDQERVLNEIAQAKRRFGLPETAPVGSCYEAGREGFWLHRFLLAHNITNHVVDSSAIEVSRRQRRAKSDGLDVRKLLSMLMRYHHGERHVWQVVKVPAGEAEDQRHLHRDVETLKQERASTTTRLKGLLSSQGIRLTSLTNLPDQLDTVRLWDGSPIPPGLRRRVLRVYAHHTFLSQQIAEVAAERHAQLQTSRDASLEKVRQLMQLKGIGINGAWLLVMEFFAWRGFKNRREVGGLAGFTPTPYQSGESAREQGITKSGNRHVRWMTTELAWSWVRFQPDST

SEQ ID NO: 218339 - protein, 387 aa, unidentified
MAVWLNRGEVPLVGSESRHADRCSPIHIERSEDPVMIIGIDPHKMSHTANAVDPATHTPAASLRINASLAGYRELMRWARRFPERRWAVENARGLGRHLAQWLVARGEHVVDVPSLATARVRELSRGSRRKTDVIDAAAAACVAALHGDATVVVAEDHTTVFALLEERRANLAAQRVRVANQLHAMLRDLTPGGAELAITARSAATLLRSIRPASPADRTRKELAWDLVRELRTVDASLADIEARMAEALDDHGTRLREIDGVGAVTAVRLIGRTGIASRFASEHAFATYAGVAPIEIASGEHGRHRLSRAGDRRLNSAIHLIAVTQVRMRNSRGRAYFDKKIAEGKTRNEAMRCLKRRLANHIWRMMTADERRAPATHPDDAEIAA

SEQ ID NO: 218340 - protein, 353 aa, unidentified
MDVHAGNIAVAAIRGDSEKLLSRWETPNTRKGLERLSERLGELGEIRCVYEAGPCGYELRRFLEAKGIRCDVAAPSLIPRKPGDRVKTDKKDAEKLARLHRMRELSTVHVPTPAQEAVRDLVRAREDAKEDLMRRRHRLSKFLLRQGRRYEGNKWTQKHWSWIHSQTFADRNSETVLGEYLVAIEQELERIKRLEERIEEESKSPELASTVGRLKTLRGVGTITAMTVVSELIDINRFASPRRLMAFIGLVPRERSSGGKERRGSITKTGNAHLRRVLVESAWHYQRVPWIPAKSIQIRRQGQPPEVVETARRAERRLHKKYARMIGRGKPKGVAAVAVARELAGFIWALGRC

SEQ ID NO: 218341 - protein, 350 aa, unidentified
MNIIGCDYHPGFQQIAFVDTETGDCGEQRLEHSEGAEKFYRDLAAQGKKVRVGMEASGHARWFERLLAELNFELWIGDATEIARKRERKQKTDRQDAQHILQLLMENRFPKIWVPSGENRDLRQLLWHRHRMVQMRTRMMNQLQAVALNEGLRCKKRLWRQHGREQLESFRLAPWASRRREDLLQLLGRLNPTISDLTQAIEQEVEKCPEARRLRTHPGVGALTALAFVLIIGRPERFQCGKQIAAYLGLVPLEDSSGNRRRLGHITKQGSSMLRFLLVEAAQVTARSIPEWRSKYFHLAMRRGRKIAKVAMARRLAIALYWMWRKGWDYEQLRKFGSHAGKLGTGHGVQ

SEQ ID NO: 218342 - protein, 339 aa, unidentified
MKYTPVGVDIAKHVIQIHFINEHTGEVVDKQLRRQDFLTFFGNREPCLIGMEACGGSQHWARELTKLGHKVRLLQARFVKAFVMGNKNDVMDARAIWMAVQQPGKEIAVKTEEQQSVLVLHRTRMQLVKFRTAQINALHGTLLEFGETIHKGRTAMEREFPEALERMKERLPPYLITVLENQYNRLNELDSLIEDIEKQLTSVARQNETCKRLLDIPGVGPLIATAAVATMGEASAFKSGREFAAYVGLVPKQTGSGGKVRLLGISKRGDTYLRTLFIHGARAVALVAKEPGPWITELKKRRPASVAIVAMANKLARTVWAITAHDRKYDRNHVSIRPY

SEQ ID NO: 218343 - protein, 405 aa, unidentified
MPYILALDVSMGHSYSVLYKDDTCLFEDEIEHTQRGFHALLEEIQHLPERPLIVFEATGIYSRPVEKFFQDHHFSYCLLNPLEAKKQMEENTLRSWKTDKSDAHRLAQTHLKNQRQPKEVQSNFYLEMRDLARFYQEIEKKITRLRMDLHNCLQLTFPELEQFFSNRLTPYALTLIRLFPHPDFVLASTRTKIKNKLINETREKISANRAEQKAYQIIHYAQCAYPAVEKDSIHCQKTIYYAELLQDLLEQKKALATQMIKKAEASPCFLLYQTFPGIGALTAALLLGELGDITRFKTHKQLNAFVGIDIRRYHSGKYTGQDRINKRGNPKARKIIFFTIRNMIRQQRAAPNHIVDYYYKLKKQPIPKKDKVATVACMNKLLKCMHAMVRAHTEYDYAYAVSVDH

SEQ ID NO: 218344 - protein, 318 aa, unidentified
MEAPLIFVGIDVCKAQLDVAIRPTAQTLSVTNDKAGIKALVKHLEKLQPNLVVLESTGGLERQVMLALIGAEISVVMANPRQIRDFAKSTGQLAKTDRIDAAVLAHYAEAIRPKPRPLPDQLTLELRALTARRRQIIDMIVAEKNHLVTASKVIKKRITAHITFLEQELDRADQDLDQFIGKNPTWKQNQDLLCSTPSIGPVSSRTLLAELPELGTIGRKQISALVGLAPFPRDSGTLKGRRTIWGGRASVRSALYMATLVATRFNPVIRDFYNRLKAKGKASKVALVASMRKLLTILNAMIKHKTRWSENFSQTTGL

SEQ ID NO: 218345 - protein, 391 aa, unidentified
MHVGIDAHKRNCTVCVIEDGAVKETFDFPTTREGVSMLMKRIPSEATVVIEASTTGKVISRMLMDKYEIHMVAPPERKRSIKTDRRDAERIVREDMLQYLRRCYIPSSSIEELRFLVMQQIQVGRKIGRVKNQVHALLERNMVHDLDGFSDIFGVQGLRRMVEVQLPTQDEVGLARYLEELKLLTTHHRDLETELARIAESEKDALLLMSIPGIDFFTALAIKSRIGDIARFPTKKHLCSYSAVVPGASNSGEYVSRHNRVKRGDMVLKYAFTCAVRGAVSAEKNSAVKRFYLRHSKKIGAQKAEVAAARKMACIVWKVLRTQQPYREEDKCLTARKMMRLSWKAKRQNSYPIDIRRLGEALVGDVAILQKYPVGFDEEFGADLPKGCGCS

SEQ ID NO: 218346 - protein, 411 aa, unidentified
MIKENFIYVGIDLHKETHTAVMIDCYNQKLGEITFPNRPADFPKLVAKVKKCNTDGKTIVLGLENAYGYGRALAVWLIDKGYLVKDVNTAISHRQAKHRGAMYRKSDSDDAEAIALATLNMLDKLPDACPNDAYWSLGQLVHRRDNIMKQRTRLVNQLHEQLCIAYPSYKQLFNDISRPTALYFWEHYPSRKYLKGKSVEDLRAELVPVSHNKCSTRTCEKILDAIAGDKVKNNAYQDARDMVTLSIVSDLQHYDKQLAEVDKMLEQMYKMLGCTLTTIPGVNVITAVKILAEIGDIKRFSNANKLAQFAGIAPLHLSSSGKGKDVATKQGNRRLQATIYFLAIQMVQVSSKGTPRNSVVRAYYEKRKAEGKTSQQALICISRRLISIIYGMLKHGTEYRMPVVESASENR

SEQ ID NO: 218347 - protein, 380 aa, unidentified
MYTTATHTSEYSPPAQILYLAFELSNSSWKLFFSTGLAQPPRQRSVAAANLPALLQEISLARKRFGLPNDAPVLSCYEAGRDAFWLHRFLAQHGVHNLVVDSSSIQVPRRARRTKTDRLDGFKLLSMLIRHASGDKEVWHVVHVPTPEQEDDRQLHRELETLKQERTRHICRIKAFLASCGLRIKLSSSFLQQLTLLRLWDGSPVPPALQARLRREWSRLQVVEDQIHQLEAQRAHLLRTSSSPSVQKARQLMRLKGIGEYSAWLYTMEFFAWRKFRNPKELGALAGLTPTPSQSGESSRELGLNKAGNRHIRAMAIEIAWNWLRFQPRSQLSCWYRNRFASGSSRVRRIGIVALARKVLIALWRYLELGLVPEGASLKA

SEQ ID NO: 218348 - protein, 408 aa, unidentified
MNAVGIDVSKGKSMVAALRPMGEVALLPQEFLHTEIGLEQMAYAIIALGEDTRVVMEATGRYHEPVAAALYEYGIYVCVLNPLFIKQSGGGSIRKVKTDKADAMKIAKYGLDNWVDLREYTPMDTVRQQLKLCSRQYNLYMKTVVSLQNNLISLADKTFPGVNELFSSPERADGHQKWVDFVMTFWHCDCVCRVSEKAFTERYQKWCKRKGYHFSAEKALDVYAGSCGHFTTLPKNDNTKLLITTAAQQLLAGKMTLAALRAEMTRLAKQLPEYDTVRAMYGVGETTAAQLMAEIGDVRRFPRRSSIVGFAGVDPAVDQSGKHEAKSTPTTKRGSPHLRKTLYQIVCTYLKRSPVDEPVYQFLDKKRSEGKPYFVYMTAVQNKFLRIYYARVKECLEAFDARQSLAQS

SEQ ID NO: 218349 - protein, 286 aa, unidentified
MDNHTQYSGFAGVDLAKKVMQIHFVTGDGEITDKQVKRAEFLDFFRNRTKCLIGMEACGASQDWARKLEAMGHEVHLMSPKAVKPFVSGQKNDYNDAIGIYKAMFNGVRRVPVKSTEIRDLQTLRRIRSQVTKDKVKEINHVRGLLAEYGIVMGKSITAFNKGISSALESLKERGDVSPLVAEELQTTVESIKTKIERQKRLDREIEQLARGCKNYENFLKTPGVGPFTAAMLCVLLCDPSIFANGRQFAAYIGLAPRSRGLRRQKLCHRHTVEIQLRQRIQGSTC

SEQ ID NO: 218350 - protein, 364 aa, unidentified
MNKCHSNTELSSHEETRCQFNGGKADIKLGIDVHQDFYVVVVQEGGANPKPPQRFQKQAFLRWAAKLKSEGAEVHAVYEACGFGFALQRNLSALGIHCYVVCPQKLDEQNRRVKTDGLDAKALCLKLDRFVQGNRSALALVRVPTEEEEQRRAIHRQREQLVKARKQLEAQGRSLMVNHGIEPVKNWWKPRTFAALQVPQWMKELLQNSQPILLGLQEKIAALTIQLQSAAAANQPRGLGLMTSVIIDREIGDWNRFNNRRQIASYTGLCPGEYSSGNTRLQSCVTKHGNPRLRAALVELAWRLVRFQPNYKPILKWKRLLGKGALATGAARKKAIVAVPRQLAVDLWRIKTGRLRAEELGLIN

SEQ ID NO: 218351 - protein, 354 aa, unidentified
MIIIGADYHPGFQQIAFVDTETGELQERRLEHREEAEKFYRDLAAQRMGVRVGMEASGHARWFERLLSELQFELWIGDAAEIRTKRVRKQKTDRQDAQLILQLLLEDRFPQIWVPSWENRDLRQLLWHRHRMVQARTRIMNQLQAVALNEGLRRKKGLWREAGRKQLESFALAPWANRRRRDLLELLDRLNPTIAELTQAIEQEVEKCPEAQRLRTHPGVGPLTALAFVLIIGRADRFQCGKQIASYLGLVPAEESSGERRRLGHISKQGNALLRFLLVEAAQVTVRSDQEWRSKYFHLAMRRGRKIAKVAMARRLAVRLYWMWRKRWDYEQLTKFGSHAGQPGTGDGVQLNTE

SEQ ID NO: 218352 - protein, 411 aa, unidentified
MNAVGIDVSKGKSTVAILRPFGEVVHLPFDVTHDYGSLERLADQIICLDGESRVLMEATGRYHESVAAVLHERGIYVSVLNPLAIHGYNSGGTVRKVKTDQKDSIKIAKFALDHWTDLREYTPVDAVRQQLKIFSRQYNLYMKSSVALQSNLISLSDKVFPGVNEMFTSPERADGHKKWVDFLTTFWHCECISRVSEAAFTERYRKWCKRMGYNFSEAKASDVYIDSLGHIVTLPKNNNTKLLIQTAAKELTAMNELLASVRTEMVRLAKELPEFETVHAMYGVGEATAAQLMAEIGDIRNYPRRSSLVAFAGVDPEVDQSGKKESKSNPSTKRGSPHLRRTLFQIMTVYIRLKPQDEAVYQFLDKKRAEGKPYYVYMTAGSNKFLRIYYARVKECMAKLEAPAETAEENG

SEQ ID NO: 218353 - protein, 392 aa, unidentified
MVVSVGIDVAKDKHDCFIHSSEGKVLADVFTISNNMDGFHTLLEKIQACTAPQDKIRVGLEATGHYSYNLLGFLLDNGLATYVLNPLRTNLYRKSLSLRKTKTDRVDARTIAAMLLSDAGLKPYTDTAYHNEELKSLTRYRFDKVKERAKLKTSVSRLVCILFPELEKLVPTLHMASVYALLEEFPGAKQVAGAHLTSLKSLLEKASKGRYKRDVALSIRDAARMSIGSRMPAKSLELQHTIRLIRELDAEIHEIEAEIETMMDEIRSPIMTIPGIGYRMGAMILAEAGDLSRFDSPDKLLAYAGMSPSTYQSGQLNNCYPHMEKRGSRYLRYALFNATKYVCLWDPAFAAYLAKKRAEGKHYNVAISHAAKKLVRLIFAMEKSRQPYRSAA

SEQ ID NO: 218354 - protein, 354 aa, unidentified
MKRTTKYVALDVHQATTSASVREESGRVIARSVLPTDGAAITEFVRGMRGAVHVALEEGTQAQWLHDLLAPLVDRVVVCDRRGTPRPGNKADQVDADQLSEQLRRGGLRAVYHGSADRATLKELTRTYRNLVEDATRVMLRLKALFRARGIPASGKHVYHPRARAQWLAQLQDPGARLRAETLYAELDVLRHLRPTAKAAMVTEARRDPAWSVLRTIPFFGSVRVALLLATMQTPWRFRTKRNLWAYAGLAVVTRSSADYALVAGQTVRRRRPPMTRGLNRNHNRVLKDVFKGAATAATARPGPLQAFYHSVIARGTREELARLTLTRKLAALTLRLWKKGERYDPTKLTTPAR

SEQ ID NO: 218355 - protein, 340 aa, unidentified
MQLYTGFDLHSSNSYVGIIDENGKRAFNRKLPNDPAIIVDTLRPFKNDITDIAVESTYNWYWLVDLLMAEGYRVHLANPSAIQKYTGLKYADDRHDAFWLAEMMRLGILPEGYIYPKEDRPIRDLLRKRSHLVRLRTSLIISLQNIVSRNNGIKLKVGDVKALKTDRVAPLLADNDDLALAGKVSKETIDFLTHKIKTIEHVVEGKVKLREPYDRLLDVPGIGKILALTIMLETGPISRFDKVGNFVSYCRKVSSKWVSNEKAKGKGNKKSGNKYLAWAFSEAAESARRLHDEPRAYYNRKMQRTNFMTAHNALAHKLARAAYYIMRDHVPFISEKLFVS

SEQ ID NO: 218356 - protein, 479 aa, unidentified
MQILVSRACGIDVHKDMLAVCVLVYGEGQEAEVRYKEFATHQKALTTLRNWLSSQKVTHVAMESTGVYWKPVWYALEKHFQLLLANPFQVKALPGKQTDKRDSHWLAELLAHGLIAGSFVPPEQTRAWRDLTRYRVKLSEEMNRIQNRIHKVLEDASIKLDTVVSHILGGTGRSIMEGIIEGKEDARQWAERAQGSWRGKRAQLELALHGRVSEHHRFMLKELLEDLRFVEEKILRLDKTLSGSVDWELVTRLCTIPGVDVITAWTLLAEWGSDMRVFPNSKKAASWAGLCPGNKESGGKRLSGRTRKGNRWLRRGLCQAAWGASRKKDCFLNAFFQRHKAKHGAQKAVIATAHRLLLIAYCILRDGTTYQERGGDFYDQLNAARTRQRLIERLRRLGVPVTISSPVPAVPSTATSQALEPAPPAQALASSPGNQPPASVPAIQRKRGRPCQCAARQIACIHRLPLAPTPVATPPVATL

SEQ ID NO: 218357 - protein, 405 aa, unidentified
MSFFVGIDWAARSHELCVLDEAGTTVERLGFPHSEQGLATALARLAKVAEPHELPVAIERPSGLLVERLLAAGHPVVPVHPNAFKAARPRWGAAGAKSDPGDAFCLADYLRTDGHRLRRLRQIDARTRELQTLSRMRDDHIEAKTAATNQLAALLETHWPGGKAIFARLDSTIALDFLERYPTPQSAARLGAARLAAFLRRSSYCGRRSPAELLERLRQAPKPTLALDQEIVAELVRAQVRLLRTLIATIADLDRALGAGLLAHQKAQTLAPLPRIGEINLAQIVAELGPVLDRAESVEHAAAEIGAAPVTKASGEHRAVCFRYACNTRARKALATFADNSRHSCPWAADVYQRARARGCRHPHAIRVLMRAWLRVIWACWHSNSPHQPTRHGAVKRLNFKGGLT

SEQ ID NO: 218358 - protein, 525 aa, unidentified
MPYRVRRPSRRTHRKSNPNKKRSLQKPNGVISRRVQKVGGERFAIVCVDPAKHRSEWMMADYFGNLLIEPRTLDHRGAFFKLAVEQIREAQQQHDIQDMIVVVERTGTYYLAPKRAFANAGFDTRVVHPFATKQYRMPADPGNKTDETDLYAQHRAAVAGFGLCEFELESPYRELQLRARHRRNLVEKAAALACQIREHLHLAMPGYANLFDRLFERPTALALAHHCDSPARLLKLGQEKLRKHLRKNNVRHQVRTIDKVLAWASQSVDAPIRDGPMHHAIWTDLHDLYTHFQRQISILEQHLAIDLVQTPYIRLLAIPGINVVSAADLAGEMGPMKRYANANAITGRAGLYPSRYQSDETDNDSGPIIRQANRRLRCALMRIADNLACHCSYYRGQAGMDEARGVDKRSSRVRIAKRFSRLALACVAGDEPMRHPCFQEPDSILEKLRKFHHQHLSSIERTLADLETAVGQLPCHTQDHEAKIVADILQQHANHRRGASAIGDLLPAVLARLGIDTTKERRDRS

SEQ ID NO: 218359 - protein, 378 aa, unidentified
MRFYNRVHRFYCGVDLHARTMYLCILDHGGAVVLHREVPAEPGAFLEAIAPFREGLVVACECLFCWYWLADLCQAENIAFVLGHALYMKAIHGGKAADDKIDSSKIAHLLRGGNLPIAYAYPKGLRETRDLLRRRMYLVHKRAEVVAHVVNANSQYNLPPFGKKLIYARNRQVLKIAQRFGDASVRKNIELDLALLDSLDELIGDVELYLDRTVKVDDADSFYRLRSIPGVGKILALVLFYEIHDIGRFASEGEFLSYARLVRPLKTSAGKVKGGGGAKIGNAHLKWAFSEAACLLARESGQAKRFLARKEKQHGKPKALGILAARLGRAVYHMLRQKRAFDAKRFWNGEPKVPPTPKGKSVMTPGRRRKGARCVLEA

SEQ ID NO: 218360 - protein, 275 aa, unidentified
MHGYRCDKEVGILGIDISKDHLVSSEGRVYENNKKGYEEILKVKLNTIVVEPTGAYSIKPCQYFKEKGIKILQVSPNILWKEKDLRGKKTDFYDAQKLINMANKAKEYNYNPLKELVTLYIFLKDLEVKYKNRVKRALFLVSDEEKISKEMLEEFSKGNFKIQLYNLEYTKIVLEEIEVLSKALLETSEKIKEVEKMIQLQSENHVLLTIPGIGKLSSGIIIGIVGDIKRFPNPESFVAYCGLDPIVERSGKATVSKGISKKGNKYLRSLFSSLR

SEQ ID NO: 218361 - protein, 315 aa, unidentified
MRDMPCFVGIDVATAQLDIALRPSGERWAVPNEASGVMTLVDRVQARHPTLMVLEATGGLERAVTSALAPAGLPVVVVNPRQVRDFARATGQLAKTDALDARALAHFADVIRPTPRPLPDAQTQELRALLGRRQPLIGMRTAEQNRLAGTNARLTKDIAAHMTWLNAAIATLDDDLETIRRASPLWRENDDLLQSAKGSGPVCARTLLLELPELGTLTRQQSAALVGVAPLHCDSGTLRGRRMIWGGRAHVRPVLYMGTLVATRFNPQIKVFYERLLAAGKVKKVALTACMHKLLTILNAMLKHRTPWQPQEVQS

SEQ ID NO: 218362 - protein, 422 aa, unidentified
MSKKRNKVCGIDVHKRFLVASILDNEGNCETKRFEQDLDELILLKNWILDSGCESVAMESTAEYWRPAYGILNPEINITIGNAYHMKGIPGKKTDVLDSQWIAELELNNLITPSRVFTGDLYELRTLTRARNKMVNNSTVFKNKILHQLDVCSIRLCTVLKDVFGKSGYALLKGIVERKTQDEIIKALPAKTRKIAPVFFEQIPEYIPDSAIFLIDSMLKIYDNLQVEIKRIEERIKFYLKDKENELRILMSVPGIGIVIGSNLLAEIGDIHDFPTADKLAKWAGLTPSVYQSANTNYTGPITKQGSKYLRWALIEAAHSAIRRPGKLNDYFNGLLPRKGYKKAIVAVARKILRIVWHLLINNELFEDGIPRVKTVKIPKFPEKIERVGIAKIIQLLSRGAEIIIQEEGKEIMRINGSSQPT

SEQ ID NO: 218363 - protein, 347 aa, unidentified
MAFIGVDLHTNSFTVCRLEADGSEHFETFTLSASALQTFCLSLDADDELAVEATGNTAWFCDEIRPCVGRIVVVNPRQFKVIRTSVKKTDRNDARALAFFLSRDMLPETRLKSTQESELASLTRTRDMLVKQRTMLLNGIHAMFVRHGMKLKKEGLSSRKRLRELDVSQFTPLEQIELAVQRDQALGLTEALSQLDKAIEDAASAMKGFEELTSIKGIGARSAAILLAGIGRVEDFPDADKLAAYVGIVPRVSNSNDTQHSGKITRRGNKLIRTTLVQCTLIAIRYSGYLNRHYQRIRERRGFGKAIIATARKLLSIICDTLKNGWVFEDFTEFKIKQNQHFAGQTS

SEQ ID NO: 218364 - protein, 352 aa, unidentified
MRTSQKTAGIITTIGIDLGKNTFHLVGFDRRGVIILQQKVSRGQLVRRLANIPRCLIGMEACSGSHHIGRQLQAAGHDVRLIPAQYVKPFLKGHKNDYRDAEAIAEAVQRPTMHFVAIKTPEQLDLLALHRVRSRLVGQRTGVINQIRGFLIERGITVRQGLMPLRKALPEILSSDTGVLSPRMVGLVTDLVQDWRRLDERIAAVSAEIEALAEQDESCQRLMTVPGVGPIISSAVVAAIGNGAGFKQGRDFGAWLGLVPKQESTGDRTILGKISKRGNKYLRTLFVQAAHVVLVRRPSAAMRGLWPWIEQASKRLHRNMLAIALANKLARIAWAVLARGRAYQPRTPVNAA

SEQ ID NO: 218365 - protein, 481 aa, unidentified
MACKPKPPNQPSNAGAKARKGKRRRRTGMCLEDRPILEPNAAGIDIGSREIFVAVPPDRDPNPVRVFPTFTENLQELAAWLLQCGMTTAAMESTGVYWIPLYDILEHHGIKPCLVNARHMKNVPGRTDWHECQWLQFLHSVGLLRSAFRPEAQVCAVRTLIRHRSELVQAASQHIQHMHKALTQMNLQIHHVISDITGATGLAILDAILEGQRDPVILAQFRDPRIKASEETIRKSLVGNWRREHLFTLKQSRELYRTYQQRIVACDQEIESLLTEFTPRVDPTKKPLPPDRKRNRAARKRRRKTGNPDATFDLRTEAYKLFGVDVTQIPGVETIALPLFSEIGRDLSMWPTSGHFASWLALCPDNDISGGRVLWRGMRKVNNQAGSLFRLAAYSLHHSLTPMGDYLRRMKSKIGPAAATTATAHKIAIVFYTIVKRQVEYDETIWATRDINRQKSLEAKLKRQAKQLGYELIPIGEKPAA

SEQ ID NO: 218366 - protein, 399 aa, unidentified
MSENAPLEIRVGVDVGCHSHNVAIGLSSGELLDEFDVSHNPEGFQLFFSRIEKQQLKYDCPVSVAMEGFNGYARPLDTLVRRRDYRLFNVNNMKLARFKEIFPGAAKTDRIDARKCLELFQLRDLLPLAKDALQEVAATPLENEILKRLTRRRRRLVNEKARILNNMQGDLQAVCPGLLEITGDAGNLWFLRFLTSADSLIKLGRLHRSTLLKIPGVGTKYAASIQSWQKRAHFSHETDLVGEMIQEDADRILELASKIHAIDAKIEEVASRSMIAQKISTIPGFGHVAKSELAAEIGTVDRFKDEAGLALYLGMAALDNSSGRQKGTKTPKHVNTRAKAVMMVAVDRHRKYIPESRNYYEKKRAEGKKHNQAVRALGRHLCRVIFKMLKEEKGYEIRK

SEQ ID NO: 218367 - protein, 422 aa, unidentified
MEQAYRYFVGIDWATEKHDVCVVDPEGRVVARREVRHNGDALRDLFDELMKLAEGRPEQVAVAIETPRGALVESMVERGLHVYAINPKQLDRFRDRHNVAGAKDDELDAYVLGDSIRTDRPCFRRVRMDDPLIVQLRELSRIADDLTVELGRLSNQLREQVHRLLPQLLAVCAAADESWLWDLLALVAGGAEPARIRPTQVERILKNHRIRRLNVDEVLALLRQQPPWTTPGTQLAARAHIRLLLPRLRVALEQSRDCDKQIKFLLEDLASRPLVEGEIREHRDVSILQSLPGAGKTVVATMLAEASQPLAERDYHALRAQGGIAPVTKSSGKRSKRHATVSMRYSCNGRLRDAFFYWARSAINEDDASRAYYAALRQRGHTFGRALRSVADRLLRVLIAMLESCTLFDPERAAKRLASVTP

SEQ ID NO: 218368 - protein, 318 aa, unidentified
MPTVLNVQHKACCGIDIHKKIVVACILKTDEFGEYTDCIRTFSTMTSDLESLRDWLKKEKVEKIAMESTGIYWIPVFNVLEKDFKIILSNARQIKNVPGRKSDPSDSRWMSKLLALGLVNGSFIPPKDIRELRQLTRYRTKLVSMRTSEKDRVHNILESCNIKLSCVATDIFGASGMAIMEALIAEESDPEELAQFAKGRLRNKIPDLVKSLNGKMSKHDIMVLKMVLDHLAFLNEQLAELDQMIVEKCKPYQQEIELLDTIPGIDITTAQAVVAEIGTDMSVFETPERLASWAGLSPGSNESAGKKKVHELDPETSI

SEQ ID NO: 218369 - protein, 372 aa, unidentified
MKEVITAYVGLDIHKDTVAVAVADEGRATPRFIGTIHPSPAELCKTLRRNRCTPHRSLLIYEAGPCGYGWARYLRKQGWRCEVIAPSRITRQAAEKRLKTDRRDAMLLARESRAGNLTPIVVPEERDEAIRDLCRTREDAMAARLKARQQLKAMLLRLGRVYHGKSSWTQAHERHLSTIHFEHAAQQIAFEEYRQSIKEAHERVERLAQALREQCEGWRMKPVVKALMCLRGVDFLAAVTLIAELGDLTRFAHPCSLMAYLGLVPSEFSSGNSRRQGSITRAGNKQARRILVESAWTYRFNPRVSRPLEVRQCGQPKVIRDIAWKAQLRLTYRFKKLNAGRKMTQNKCCVAVARELAGFIWDIARHVKITTA

SEQ ID NO: 218370 - protein, 328 aa, unidentified
MAKNPATEVQVFAGVDVSARELSVAVRSATMDREEVQTFSNNAAGHQALLGHLLQGKGRARVCLEASGNYSLDLALTLHAHRRMEVSVVNPRRARRFAESLGERSKTDPVDAHVLCQYAVRMPWEPWVPPSVLALHLRGLTRAIEALGVTQTQEKNRQHSLQASRALSPFVIRELQRHLEYLQLRITRLRREALRLIARDPELDRRFRLMLTTPGIGETSALQILGELAVLPATLDARQWVAFAGLDPVRFTSGTTVEKKPRISRGGSRHLRRALYMPALVAIRHEPHLRAFFQRLVAHGKAPLQAVVAVMRKLLHAFFAMFPSDHFV

SEQ ID NO: 218371 - protein, 418 aa, unidentified
MHPKMKYTYVGVDSHKDSHTAVFLDCFFEKLGEIQFENLPSKFAGFLDSAMLLQQDGTTLLFGLEDVSMYGRALAVFLTDNGQKVKHINALLVARERRNRNVTEKTDSVDAECAARVLLSKFSELPDADPQDKYWTLRALVVRRDFIVKSNIALKNNLRGLLAAQFPNYHKFFFHIDCDTSLAFFARYPSPSTLEGTSVEELTAFLQEASKKRVGERRARMILDSLECTRSAFQEIRDEVVRSTIRQIQWNLGELESLEESLVKILDLLGTTLASMTGIDVVCEAQILSCIGDIKRFPTSAKLAQYAGIAPVTYASGKTDKQFANRRGNRELNSLFYCLAVRVSTVNRGKVMNQFFNEYYQRKLSEGKTKAQALKCVQRRLVNIIWGMLTRGEKYVNPPIIDLPREEKDAIMVSKQEP

SEQ ID NO: 218372 - protein, 388 aa, unidentified
MIYTGIDISKYKHDCFIQSDFGEVVNAGFTFTNNAAGFEQLQKVLDEFGRDSIRIGFEATGHYGVNLKSFLEKKGYEFMEINPYLIKEYMKSDSLRLTYTDKICSQAIAEYLCEKAFSPHPMGFYDKFALKQLTRFRENLIKQRSRFMVQLTNILDCVFPEFKPFFDDSFSVTALYILGNYQSPEKIAKMNSLSYDKLRKVSRGHFSTLQFAQLKVLAKNTVGVWSDYYRVQLDTVLELFGQIDSKITDVETEIRQIFKPLNSPTASIRGVGEFSAAVIVAEYSDFKFFSNPNKMLAFAGLEPSRHQSGTADHKGKMVKRGSSHLRRTLMNCAPALIIHNPVFAEYYHKKRNEGKTHRVALNHIAKKLVRVIFALETKGVMFDADKLR

SEQ ID NO: 218373 - protein, 371 aa, unidentified
MYLREREVRLRTRANEGGSPRGSRSVKTVSELGAPPLRSIDNPNSRLGARSPHLQGRAMERSLFVGIDVAKDSLDVHVRPTDEAWQVPNDPAGQATLAQRLATMPPGLIVLEATGGYEIAVVGALARAGLAVVVANPRQIRAYARATGQLAKTDKLDARIIARFGEAVRPDVRPLPSEQTRVLDELVTRRRQLVEMLGAEKNRRRVARDRVLQQRLEAHISWLKRAVRELDRDLETTIRASALWRETDDLLRSVAGVGPVTIATMLAELPELGHLTRRKIAALVGVAPMNRDSGQFRGRRTIAGGRPAVRRVLYMATVAAIRRNRVIRAFYLRLRTNGHLPKVAVTAAMRKLLTILNAMVRDGRAWQEQVA

SEQ ID NO: 218374 - protein, 464 aa, unidentified
MKPYFLGGDASKGYCDFTLLDQKKNIVEENFQLDDCYEGHQALCGFLEKFFSRHESAIIYAGFESTGGYENNWYQLLWKLQDRFEIQVARVNPFGVKYHKKASLERIETDKISARKIAEYLLAYPEKVEYSKEDYFAGLRRHWKYIRMLKKQKSQLQTQLKAQLYVAQPQILPYCIDGISNWILLLLQKYPTAVRLAKARIKTLSQIPYLCEENAKLLVSEAKKSVASMQDSSMENIIKSAVEQILNLQKAITQQVKLMISTYDFPEIEILSSFIGISEYSAFGLLLEIGAIERYATVKKLVSFFGIHPVYRDSGDGTWGMHMSKKGRKEPRWILFNIAKSAIAHNEMIKQLYEKYLADGKLKMVALGIMMHKILRIVYGMLKHKKKYDPMVDMANRKRTALKKETTKTKPKPDKSRRYQDYDQKAPISRRQTKKRNNKEKKKEVINKNWEKGKFIGNKSNPRE

SEQ ID NO: 218375 - protein, 404 aa, unidentified
MEVVHERCCGVDVHKKTVVACVITPAGQQTRSFGTTTRELRALADWLAAEGVTHVAMESTGVFWKPVYNVLEGRGLILLVVNAQHVKAVPGRKTDVKDAAWIAELLRHGLLRGSHIPDRAQREQQELVRYRTRLIQERAQVVQRIQKVLEGANIKLSAVVADVVGVSGRAMLDALVAGTADAEALAALARGRLQAKRAALREALEGEVGLAQRVLLDSHLRHLDFLDTEIRRLSEEIAERLRPFDDALDRLDTIPGVGRRAAERILAEIGADISRFPTAGHLASWAGLCPGNHQSAGKRLSGRTRHGNSWLKAALVEAAWGAVHTHDSYLAALYHRLAARRGAKRAIVAVAHAILVIIYHLLRHGTSYRELGSNYFDERDRQATVRRAVRRLERLGYQVTPEVA

SEQ ID NO: 218376 - protein, 341 aa, unidentified
MTEVSIIGLDLAKNVFQAHGASASGAVVFRKKLRRDHVLAFFAAQPPCLVAMEACPGAHHWGREIGAFGHEVRLIAPAYVKPFVRRQKNDMADAEAICEAAQRPTMRFVAVKSEAKQAAAVIFRARDLLVGQRTQIINALRGHLAEYGLIAPQGPSHIEQLIAQVEDPACGVPEVARSCLQRLVGLLCGLQREIAALDREIAARAGHDDVARRLMTVPGIGPLIATAIEALAPAPETFRSGRDFAAWIGLTPVQKSSGGKERLGRTSRMGERTLRRLLIIAASGVVRWAKRKGVPEGSWLARMLARKPPMLVIVALANKNARVAWALITKGGLYRAPAVTL

SEQ ID NO: 218377 - protein, 417 aa, unidentified
MAEYAALIGIDWADTKHDISLIDLATGQHEASLLRHSSQTIDEWATALRARFHGQRIAVCLEQARGPLIYALMKYDFITLYPINPTTLAKYREAFSPSRHKDDVTDAAYLAELLAHHRDHLRAWQPDDEPTRTLRYLVEHRRRLVSDRTRLSNRMTSLLKGYFPQVLEWFPDIRTTLVCDFLLRWPSLDTLGRVRRETLVKFFRAHNSVRTETIEKRVEAIKQAVPLVTDRAVIAASVLMTRALAAQMKTTLSAIIAFDAEIEALCAVNQDFVLLKSLPGAGQNYAARLTVALGTDRARWQSADELACLSGIAPVIERSGKSCRVRWRYFCPKFLRQSFVEYAGASVQHSFWAKAYYEQQRAKGKGHQAAVRALAFKWIRIIYQCWKSRTAYNEVKYLEGLRKKGSSLLNYAANNPA

SEQ ID NO: 218378 - protein, 334 aa, unidentified
MIHVGVDLHQRFCYMTALDSRGKQLNAQAVPNETAALQAYFRQFKKPVRAVVEACSFWPAFRRAVGQQVELHLAHSQQVKAIAAAKLKNDRIDSATLAHLLRCDLLPEAWMADETTRELRLQVRTRATLVRQRTRLKNQVHAILHQHGLKHGVTDLFGKAGRNWLEQAPLSKKARRAVTTYLELIDGFTAHVRQQDQEVKEFVGTDPRAKWLMTIPGIGPYSAMLLLAEIGDIGRFADKGALSNYAGLVPWVRESADKRRSGGITRVGSPWLRWIMVEAAQVAVRTSVPVRQYFERLRKRKHRNVAIVAVARKLLVAVWAMLQHGECFDEARFR

SEQ ID NO: 218379 - protein, 377 aa, unidentified
MHSENIAAYVGLDVHKETLAVAIAAPERLGEVRYYGTINNEAQAVRRLFQKLQGLYGNILSCYEAGPCGFGLYHQLTAMNIKCQVIAPSRIPKSPTDRIKNDHRDAISLARLLRAGELTPVWIPDLTHEAMRDLIRARAAAKRDSRVARQRILSMLLRTDKHYAGKHWTGKHRTWLANQSFSQPSQQIAFQHYCQSLEQIEDRILQLDQEISRLLPEWSLCNLVCQLQALKGVGQLIAITLVAELGDFSRFSNPKQLMAFLGLVPGEYSSGNSIRPRGITKVGNSELRRLLYEAAWSYRTPAKVGAWLIYYRPDSVTQYSKDIAWKAQQRLCSRYRSLTAKGKKSQVAITAVACELTGFMWDIALAAQSSFSQQKQN

SEQ ID NO: 218380 - protein, 410 aa, unidentified
MEVQHPRCCGLDVHKATVVACVRLVIDGKTVKEIRTFATTTASLIALSEWLTETKCTRVAMEATGVYWKPVWHILSDQDFDLVLANAAHIKNVPGRKSDVKDADWISDLLAHGLIRPSFVPDGPTQEMRTLLRTRKQLVREKTSHILRIQKTLEDANIKLDSVITDVMGLSGRKMIEALIAGQKDPAKLARLADHRVKASQESLREALRGRVTKSHRFLLRLHLGQVDAIDAAIAEIDREVEAGIAPFRNAVDQVSAVPGIKSLAAQTILSEIGIDMSRFPSSAHLISWACICPRSDESAGKRRSTRIRKGSPWLKSTLVQCAWAATRTKGSYLQAQFYRIRARRGPKKAILAVAASILTAIYHMLKDGTLYQDLGPNHLNARNKERQKNRLIKRLEDLGYAVELLPQAS

SEQ ID NO: 218381 - protein, 395 aa, unidentified
MEFLKYGLGIDMAMEKFDACISIIDKQQHVMIRAQCSFNNNKKGFETFILWVTKNTKLPIPAVYLMEATGIYYEQLAWFLHNKKCSVSVVLPNKAKKYKEALGLKSKNDRIDAKGLAQMACEQNNTIWKPLSGNLYVLRLITRQIQSVSEQSTVLKNQLHALEYCMYRDKAIEKMYAGQIGLLQKNKKSLQLKVEQIVEKDEILKKKFKNIGKIKGLGLQNLAVIVAETNGFTAFENIAQLVSYAGYDVVENQSGKRSGKTKISKKGNNHIRRCLHFPAFNMITYDVAPFKNLYERVYEKSKIKMKAYTAVQKKLLAFIYILWKKDEAFDPNYQDKESGDEESAPSFASVPQEPLIACGNEEKKLNLIKQKITPAITRVTQDKHPSKYRRMPSFA

SEQ ID NO: 218382 - protein, 311 aa, unidentified
MYYIGIDVSKKDLSVFNGKDLKFANKEGLKSFKKYLKKRYNLQEIAIIFEPTGIYSFYLKEFCAVNSIKAYIVNPKQSHNFARALGIRPKTDKIDARILYQFHRLIDLKDIKIPKIDQQAKTLASSLTSYEFALKQRVALSNHLESLRDKKLISLLKKDLKRAQKLEDKIFNDIKEYTEQNQDLKEDYQRLLTISGVGDKTAIVLLTLFKTYQGTNRAQITALVGLDPTRRESGTSVRDRVKISKNGKGIYRKIPYLPTICATVHNQKIRVFYQRLLAHHKPKKLAIIASMRKIILIAHAMYRDKTEYVAV

SEQ ID NO: 218383 - protein, 378 aa, unidentified
MSDVISIAPADVRLWVSLDVHKFSIVAATLPPAGGKPEVCRIETTEKAIRRFVDRLGGPQGLAVCYEAGPGGFALWRLLTRLGVSCDVVAPSLVPVRAGDRVKTDRRDAKKLVSLHRAGLLRFVYPPTEELEGLRDLLRCRDDIRCARTAARHRVLKQLLRHGRIFRDGKTAWTKLHRAWLARQRFDDPLAQRALEQLLIHLDGIERQLDALDAELGQIASSERWASQVAILTRFRGISTLSALGLIAEIGDFARFGHPRELASWLGITPSEYSSGDQQHRGHITKAGNHHARRLLVEAAWHYRHPPRRPTSGPDPDERAWQAQIRLHHRYRHLTEHGKRTTVTNIAIARELVGFLWAAMTDQPLRDTHDPHHKEVAA

SEQ ID NO: 218384 - protein, 425 aa, unidentified
MQQSAPEDFGAYIGIDWADQTHFVSLRDANSQEVKRYKLEQKPEVLSQWVNELQQRFPGQRVAVALEQTRGALIYALMSYEFFVLFPVNPKALARYREAFNVGGAKDDPTDSDLLLELVTLHRSKLRAWRPDDELTRTITLLVQYRRDLVDMRTALTHRLGALLKLYFPQALQWAGELDTFQACDFLQRWPTLAKVQRTPAAKLRQFYVSHNCRTVAVIEKRLQQIPTAQPLTTDGAVITTSVTMVQAIINQLRPLMASIKELDKQIAELFAKHEDFELFSSFPGAGEVLAPRLLSALGADRDRFASAEEIQQLSGIAPVTERSGKTCWVHHRFACPKFLRQSFHEFAAQSIGQSPWARTYYKRRRERGNSHQAAVRSLAFRWIRIIYRCWQMRVPYSEQTYQQALRRRGSPIAKLIPLLVDQTS

SEQ ID NO: 218385 - protein, 406 aa, unidentified
MGRRRGYGTIVVFQQMMERPMQSNDLSRSLVAFDQDSTLVAVVELSLKSWLVAGLVPGLTRQPLKKLSADGEGLVSLLERWRAEAVKRGRRIERIAVAFEAGRDGFWLARFLRARGIEAYVIHPTSIPVPREHRRAKTDRLDTGLLMRAFLGWLRGEAKHCSMAAIPSLAEEDAKRPSRELDKLGAERTRITNKMKAALVRLGVRGFKPNLRKAAERLEALRTPEGLPVPANTLAELRRDLGRLTLIREQIKEIERARERRLKQAPEEGAHPMLLLLAKLKSIGVDTADRLVHEAFYRRLRDRRAVARYGGVTGAPDESGAKRREKGLAKAGNGRVRKAMLQLAWRWIMFQKESALTQWYQQRVAGAKGDVRKTMIIALARKLLIALWRYVTEGEVPAGAVLRPGA

SEQ ID NO: 218386 - protein, 368 aa, unidentified
MLARFHGIDKHKKYSTISMLNRKGKEVDFKERCYDLKEYIENLGPEDAVVIESSTGAFYWADQVESKGALCYVLDPHKFRIIKDSWNKTDKHDSRNTAKALWVYIVTGEFGIPTVYKPDVVIRELRKLFSQYQLLNRQIRMLKNNIQAIVADNGITLTKDEKNTLLLPKHGKEVLKKLELPHASEISIEGSLELLWRVEEEKERIRKEIILAGEPLKEAVKLLITIKGITPLTALAFLADVGDIGRFKKQKKMNAYLGLVPKVKDSGGKSKSGHINRESRKLTRTILTQSIYHVSNSSPSFRKFYEDLVERRGAGRARIALIRKICGAMRSMLLTGECYRWMDDILFTRKLKAYEKDLENMKMERKIA

SEQ ID NO: 218387 - protein, 316 aa, unidentified
MAMHVEARLIGADVAKAELVIRQSWSSDVVKLSNERKAIDRYLKTLAGPVCLAVEATNVFHVLLVERAHALGHSIYVIDGLRLKRYRESIGGRAKTDASDAALLLRYLTHEKSDLRAWTPPPAGYATVQRLLRRRAVLVQAPTTLRQSLQCLPELKTSTRAMLAKMAHLQHLIDQRVQKALLHQGWNADARRCEGIEGIGPVTAAALTLIFHRGAFKSADAYIAFIGMDVRVRESGTFSGRRKLTKKGDPELRRLLYMAAMTACRSSTWKPFYERAMARGLTRIQALVALGRKLARIAFALLKNQSNYRAKAHQMA

SEQ ID NO: 218388 - protein, 452 aa, unidentified
MPSSQPELSMINPNAAGIDLGADYHWVSVPEGRDSECVRRFGCFTADLYAMADWLKQCDIDTVVMEATGVYWIAVFQILETQGFEVKLVNARQVKTVPGRKSDVLDCQWLRQLHRYGLLAGSFRPDDQICVLRSYIRQRDTLIKSASTHIQRMQKALTQMNVQLHRVISDISGTTGLAIIRAIVSGERDLHKLAALKDRRIHASTDEIAAALNGDYRPELVFVLHQELQLYDVFQTQIAACDAEVEACLNQFADRIEVATNPLPAAKRRGKKQPGNAPRFDLRTHLYRISGVDFTHVDGFGVLTVLTLLSELGLDPSKFPSAKHFASWLGLCPGSRITGGKRKSSQTRQVANRVATALRMAAQTLVRSHSALGAFYRRMQAKLGAPKAITATAHKLARIFYHLWTSGGAFVDPGMETYEQQYQERMVKNLKKKAMALGFDLVAKPALPECVS

SEQ ID NO: 218389 - protein, 474 aa, unidentified
MGKGSGSGMTRGDRRRNARRERLRGLLPRDGAVIGIDLAEDKQAIAVIDHDVRVIARKTVRVKAFRLGEALDWAVGQARAKGFARVTVACEPTGPRWMQVQRLCAERALPLVCIQPLVSHIAREQQDYTAHKTDESDCVMIARLAGELHCYIPEELDETWAHLRHLGRRRAQLITAATASAQRIQDFLSVAWPAVMETCAQPLLSRTWLAAMQLVTERCGGQPARLAAMGEQAFTALVRGAVAGWGATKAWGPIAGRVFAALTDTEGVVPWSRRGLLRRVADELGDLQRIRAQLRAVEADMVAVLDELGLARLADIPALTAVGAAAILAETGDPRRYDSSSSLVKHAGMSPSDNASGAFLGDTHISRRGRPGLRLTVWRAVWPMLRFNPVMAAKYQAMTQACDAAEDQAAAGSRQASTAAAAARARRAKARVACAASLLRWIYVMVVHDTSWDPAAAAGGATGQHAARHPEQAA

SEQ ID NO: 218390 - protein, 426 aa, unidentified
MNCTQNYKIDQVTEQTLVVGIDIAKRTHYACFVDDRGRVLRKSFPIFQSKEGFRQLYEAIQEAMQAFGKPQVIVAVEPTGHYWLNLAYFLEEHGIPLVMVNPAHVCRSKELDDNLPTKHDAKDALVIARLAKDGRFLVPRLLHEIEADLRVGSTLKEKLRKEQTAVKNAIVRWTDRYFPEFWTVFRDLGKTALSVLEWTPLPADMAGRAVEELLEVYRQSEGLKCPQKAKIQALIDAAKDSIGVTEGTTMARFEIAALVRRYRQLEAEVAALDAELKALVQTTMEYQWLKTVDGLGDATIIDLLAEIGSFAHYRDPRQLVKLAGLTLKENSSGQRKGQKHISKRGRKRLRSVLFRAMIPLIRHNEAFRELHEYYTTRSVNPLTGKQSIVALCRKLLNVLFAICTKKQAFDAERMKQDVLSQVQRAA

SEQ ID NO: 218391 - protein, 353 aa, unidentified
MAHPTAPPVTIGVDTHLDVHVAHAADQLGRRVATVQVPTTPAGYQHLLAWARGLGQPVAWGVEGTGSYGAALARFLAANHQVVVEVNRPDRAARRRHGKSDPVDAQAAAKAVQAGDATVVPKAGTGQVEMIRCLRVARQTAMRARTQTINALKALLVTAPAELREQLRGMSVTRLVGAAADLEPGPITSPLAAAMLALCTLAGRHQALSAEITALTSELDRLTATAAPKLVALFGVGQDSAGALLVAAGDNPGRLRSDACFSMLCGSSPIQASSGKTTRHRLNRGGDRQANAALYRIVLVRLCHHQQTKDYMARRLTEGKSKKEIIRCLKRYVAREVFAVLHQMGQDAITAAA

SEQ ID NO: 218392 - protein, 350 aa, unidentified
MIIGVDYHPSFQTIAFLMEETGEYGEQELKHSDGEAERFYRDLKQRGIRVRVGMEATGYSRWFERLLAELGFEVWIGDPAMIKTKRVKKQKTDREDARLLLRLMREGSFPQTWVPTPENRDLRQLLWHRHRMVQMRTRIMNQLQALAMNEGKRWKSKLWSQQGRAELEKLALAPWASRRRRELLELFDRINPTIEELTAAVEQEAQKRPDALRLMTHPGVGPITALAFVLVIGTPERFRRGKQIGTYLGMIPSENSSAGKQRLGHISKQGNSLLRYLLTEAAQSAARFNPHWRRRYIHLAMRRHKSIAKVAMGRRMAVRLYWMWRNGCDYSPSLEFGSYAGQLGTRHGVE

SEQ ID NO: 218393 - protein, 342 aa, unidentified
MEEVTIIGVDLAKNVFQVHGATADGTVLFRKKLTRPQFARFMAEQLPCRVAIEACASAHHWAREMSRHGHEVRLIAPHYVKPFLKRQKNDAADAEAIVEAALRPTMRFVEPKTADQQARAVAFRTREQLVKQRTEAVNALRSHLYEFGHVAPEGIGYVPRLAKVVDDPDTGIPDLAREVCRMLLDQIAHLTDRIDALKARIAALSNEADLPRQLQTMPGVGPITALAVETFAPPMEQFRRGRDFAAWLGLVPKQHSTGGKQRLGKTSKMGQRDIRRLLVIGATAVIHWASRRGAPKGSWLARMLERKPIPVVAVALANKMARGIWAMLTRGESYRGPVLIGA

SEQ ID NO: 218394 - protein, 397 aa, unidentified
MKHSQTAEFAALIGIDWAHAKHDICLRAGPDQPPEHSVLPHSPEAIDAWVRALRQRFGKGPIAVALELDKGPLVYARQKYDGFVLFPVNPNLLAKYREAFTPSRAKDDPTDAELALELLIRHREALSCLTPQSAPMRALLQLVSDRRRLVHDKVRLSNRLTNTLKNYFPQALDWFQDKDTVVFCDFLSRWPTLKQAQRARKTTLQVFFREHNVRYPQVIEQRIAAIRSAMPLTNDAAILQPQALLVSALVAQLRPVRAAIEQFDSAIHDTASQLRDYALFRHLPGAGPVLAPRRLAAFGEDRDRYQSASQIQKYAGIAPVTERSGQKAWVHWRYRAPTVLRQTFVEWASETIPRSFWAKAYYPPQRDKGLAHPAAVRRARLQMDPHPLPLLAGAHAV

SEQ ID NO: 218395 - protein, 406 aa, unidentified
MFIGWDWATETHDVTVMDDTGKRIDRWELAHTEEGFTKTLARLRKHADPAGLPVAIETSRGLAVDRLLAAGHPVVPVHPNAFNAMRARWGASKAKTDAGDSMKLADYLRTDGHLLPRLEPTEQATLDLQALTRQRADHIEAKVAAVNQLAALLDEHWPGGKAVFADLDSDIAMAFLERYPTPGKAAKLTAGHLEAWCKRRGYSGKKPGSILIERLRSAPKAASRLGETVLEHLVRVQVQLVQGIRATIRTLDKAITEATQTHPYAALFATMPRIGKVSLGQVIGEIGPILERAQSCEQLIAEAGVVPVTRASGKSRTVSFRFATNRRARVALTTFADNSRHGSDWAAKIYNDARARKKRHPHAIRILARAWLRVMWACWRTGTCYDPAIHQANSKINTTAGAPLAA

SEQ ID NO: 218396 - protein, 442 aa, unidentified
MADRGSTTRGMVILLQGGAEVKEPEIRIVGFDCAEDEHVAVLLDEHGEFESRSRAMNRRDHVEAAVAQLMLEIGPNAQLVVVVESKRSHGRVVADVAKELGCEVWQVNTVALNHYRDLEGQPRKDDEWDAYLGARMVYLRMGGCRVVIETTEEERALSRLTRTYSRMTDDRKRQVARLRSVLLELAPETLHAEWQGPQPGSKATLYLLERWPGFEGLEKAQLRSIEKILHKCRYGSKAAHVAKLIRSMARRIDIAAEERPAFTLEISFLVRQIQACNESAGQVYAEISGRVKRHPVGQKLLEMHGIGPVIAGVLVSELLPVARTSTEAKCATYSGVTPLARKSGKSLDSDRLTQGVNKRVLQALYTSSVVAIKNSAVDRAYYQKKLRDYAGHPKPHVAAFIALSRQRHKVIHKLMTTDARYDKEILIGRHLERIEQVRAAAA

SEQ ID NO: 218397 - protein, 396 aa, unidentified
MYFVGIDIAKKTHQAAIICSDGKLIGKPFRFSNTIDGFNVFLEKLTAVNTDLSQFEIGMEATGHYWLNLYTWLSDKGFRLHVINPLQSDALRNLYIRKTKTDSVDAKIIADVIRIGQYSETQLADENIIALRDLNRQRFYLVDMAADLKRKIIAMMDRIFPEYQDFFSDMFGKTSVQIMKEYTSPEQILQIPTERLTQLLKKASRGRFTETKAKELKALASNSFAALLSSEMTTLLIRQMLEQLDLLEKQIADIEHIIAAQFTQFNTKLTTIPGIGTTLGATILSEIGDINRFDKPKQLIAYAGMDPSVKQSGNFVGTQSHMSKRGSPYLRRALWLAAVVAVNHDDLFKYLFQQKMNAGKTYAQAMGYICHKLLNTVFAILKTGEEYKQVYPPQIG

SEQ ID NO: 218398 - protein, 373 aa, unidentified
MEHNITIVGLDAHKNSIEIVTAETAGNQEVRHYGKIGGDMTSLDKAIRKIRSVRSNGEELRFVYEAGPCGYEIYRHLTKQGFQCVVVAPSMIPKKSGNRIKNDRRDAENLARLERAGELTKVYVPREEDEAMRDLTRAREDAVKAQRAARQLLGAFLLRHGHRYPGKQSWTPAYMRWLSDITMPHPAQQITLQEYIHTITEGTGRVTRLTDQIQKLLPEWHMAPVVKALQALRGVAPIVATTSVAEIGDMNRFERPKQLMTYLGLIPSEHSSGESIKRGGITKTGNGHVRRAIIEAAQAYSFPARVSRHILKRQEELPQSVREIAWKAQVRLCGRFRRLMARGKQRNKVVTAIARELAGFMWAIAKEVQVPGV

SEQ ID NO: 218399 - protein, 347 aa, unidentified
MKFYTQQHKFYCGIDLHARTLYVCILNQAGETVLHRNMKTDPALFLKVIAPYREDLVVAVECIFTWYWLADLCVQQGIPFVLGHALYMKAIHGGKAKNDKIDAHKIALLLRGGMMPQAYVYPAEMRATRDLLRRRMHLMHKRAELLSHIQNTNHQYNLPEISKKIAYKANREGVAERFVDTAVQKSIEVDLALIDHYDKLLSDIELYIVNTAKQHDVNAFYRLRSVPGIGKILALVILYEVQDIGRFPRVQDFVSYCRLVKCTKESAGKKYGTSGKKIGNAYLKWAFSEVAVLFLRNNPEGQKYLARLEKKLSHGKALTILAHRLARTVYHLLRREQAFDMNKFLNG

SEQ ID NO: 218400 - protein, 343 aa, unidentified
MRTITTVGLDIAKSVFQVHGINADGRVIIRRQLKRRYVLAFFQKLPPCLVGIEACASSHHWSRELKALGHTVRLMPPAYVKPYVKRQKNDAADAEAICEAVTRANMRFVATKTPEQQSCLMLHRTRHLFIRQQTAVINAIRAHLAEFGIVAPVGRKGVEELLNVVADPADKRVPDIARACIAALGAQLRRLKEQILEFDRMIRAWHRSNETSMRLDAIPGVGPALATALVASVADPRAFRSGRNFSAWIGLVPKQHSSGGKDRLGSISKQGDRYLRGLFVAGALAVIRYAKIHGTKHRPWLTALLARRPTKVAAIALANKIARMAWAMMARGERYKEPVALAA

SEQ ID NO: 218401 - protein, 342 aa, unidentified
MSEELYIGVDVSKKWLDLAYYDGVDVDWKQGHIRVDNNQTGFNQIGKWLKKLGMTVNRVLFCMEYTGLYCQELREWLEREGIVYGMVNPRKMHRFEPDLGSDERALDRIKTDEMDSFRIAMYCEKHSRKIKSQPSHLPAPAYFKLKRLLVERRQYVTCSALYKGQLHDCCAYDSDGSVMRKKETLKSLKEHIRHTEEEMLHVIAEDGAIKRNFDLLRSITGIGIVVATETIILTENFTAITNPRRYACYVGIAPAKRESGDSVRGGNHVSRKGFTQAKADLSVVSLHCINRDPNIKAYWQRKKAEGKHSGVVLNAIKFKIVLRMFAVIKRQKPFVEIDAFRK

SEQ ID NO: 218402 - protein, 428 aa, unidentified
MNSSSNYDPTQNTYAAFIAIDWADQKHTFSLQVAGQAKKETGTLEQKPEIIGPWVAKLRERFGARPIAVAVEQSRGALIHALLAYDFLVLYPIHPTTVAKFREAFKFSGAKSDPLDTDQILEILTKHLELLKPLKPDTEETRLLGRLVADRRKTVDLRTSHIQALLASLKEYFPQAIELVSGNLTSRLAGDLLKKWPTLESFQQAKPSTIKRFYYGHNIRSPEVIEAALKLAINAQPLTTDSAIIESSCRVSQMHSQMIQTLNPVIDAYDQRIEKVFHDHPEFPLFSQLPGAGPVMAPRLSAFFGTDRSRYSKAQNVQTFCGISPVTKSSGKTRVVYFRRACPQFQRQSFHEFARLSVASCQWARNYVDYYTAKGKKYNTVIRALAFKWIRILFRCWKDRTPYDDNKYMGILKKRGSIFATLHLEQKK

SEQ ID NO: 218403 - protein, 421 aa, unidentified
MNQLTDTEYTAYVGIDWAAAKHDICVQAADGERREFACISSQPEGIDAWAQGLYRRFGGPIAVALELSKGPIVSALQKYDFFVLYPINPSTLARYREAFTPSGAKDDPTDAELAVDLITRHPERFSPLKPQSVTMRKLIGLVEQRDKFLGDRGRLVNRLGHALKQYYPQVLEWFNEHHTVVFCDFLCQWPTLTQVKRARKASLERFFRSHHVNSAELIERRITAIKAAMPLTLDAAVIDPHRLQVEILIQQLRITIKALKRFDDEIAATAHKLPDYDLLFSPLPGAAKVLAPRLLAAFGEDRQRYPQAEALQKYSGIAPVTKRSGKTTWVHWRWQCPTFVRQTFIDWAAQTINKSAWAGAYYRQQRAKGCSYQVAVRALAFKWIRILHRCWQDRTPYDESKYLEALRRKGSPLLKYLAQAA

SEQ ID NO: 218404 - protein, 318 aa, unidentified
MITQKNQNEINVGVDTGKHQLDIYIRPLDIYFTVSNDEKGISEAIGTLKNHHPTRIVIEATGRLEQAFIMACAKAKLPFVIANPAHVKKFAGAIGQLAKTDQLDARLIAHYGDAIKPPLSELKPEMMRRMSDLLSRRRQLMALQTMEKNRLQIMPKALSGTIKPILTVLKNQLSKIDQQLLKLIESCPQYQAKNAILQSMPGVGNVVAFILLSNMPELGYLTNKQAAALVGVAPINRESGAYQGQRRIRGGRHQIRTVMYMAMMSAMQCNPVFKVTYERLLAAGKAKKTAIIACVRKMIVILNSMVRDGAFWNPEMAK

SEQ ID NO: 218405 - protein, 389 aa, unidentified
MKIYVGIDIAKLNHFAAAISSDGEIILEPFKFTNDADGFQLLISKLESFDKNSIIIGLESTAHYGDNLVRYLVAEFYQVCVLNPIKTCQMRKNNIRKTKTDKVDTYVIAKTLMMQDDLRFVSFYDLDMMDLKALGRFRQKTIKQRTRLKIQLTTYVDQVFPGIQYFFKSGLHQNAVYALLKEAPSPKEIASMHMTHLANLLKVNSHGHFTKEQAKELRVLAQKSVGANDSSISIQITQTIQQIELLDSQLEKIEAEMTDIMKFNDCVIMTIPGIGYINSGMILGEIGDIHRFSNPNKLLAFAGLDPSVYQSGNFQAKTTRMSKRGSRVLRYALVNAAWNVVRNNATFKAYYDAKRAEGRSHYNALGHCAGKLVRVIWKMLTDKVEFNLE

SEQ ID NO: 218406 - protein, 352 aa, unidentified
MPATAQTAIAVVGIDIGKNSFHIVGLDDRGAIALRQKWSRNQVEARFANMPPCLIGMEACVGAHHLSRKLNASGTMRGWMPARYVRPYSKGQKNDFRDAEAIAEAVQRPTMKFVATKTADQLDLQALHRVRERLVSQRTGIINQIRAFLLERGVAVRQGLRFLRIELPGILAAPSDALSPRMVHVLEDLAGDWRRLDERIEGLSNEIEAIAYQDAGCDRLISVPGIGPIISSAIVAAIGAGDVFSKGRDFAAWLGLVPRQISTGDRTILGKISKRGNRYLRVLFVQAAWVVLIKPKSWERHGLKSWIEAAKKRLHRNVLAIALANKLARIAWSVLAHGRHFEAIKLGGAIAQ

SEQ ID NO: 218407 - protein, 415 aa, unidentified
MALKIVYKICCGIDVHNSFVVACIASTNNQGVTTYKSHRFSTYTKGLKELLKWLLESNCKDVCMESTGKYWIPVYNILEKDCSIVLAHPKYVKAIRGKKTDKKDAKWIADLFKHDLVAGSFMPPADIRQLRDLMRYRYKLTCFMSSEKNRLQNCLTVSNIQLGNVVSDTFGKSSIRILDKILENPLDTSFDIKPLIHGSMKAKIPELELAIDGYISPSQAGKLKIIKKHFEDLESRKAELEKLILALASPYQQELDLILTAPSFKNIFSAIGIISEIGVNMEAFPSAKHLCSWAGLTPTNNESAGKKKSVRVSKAGCYIKPLLVQCANSVVKSEKHPEIRNRYLLLRKRRGHKKAIIAIARMLLTALYNMLNKKESYNAELYKKSDVIPAEREITVEQAILMAKFQGYRIKSATE

SEQ ID NO: 218408 - protein, 400 aa, unidentified
MKGFFTYEIIGIDIGKNKHFFCVMDQQTGEIISQPVSFSNDKEGFDFLVQEIKSYPKDSILIGMEDTGHYHFALLKYLLDLQYTVALINPKTTDFNRKMQGGITKNDKLDTINICDVLDTPERKKQYRITKVNSFDLYEQKQLTRHHHNLKEEENVYKNRLQKCIDIVFPEFNKLFNSKYGIVYMNILKMFGSAENIANTDIRTIRKCFEIEGRGNRISLTPERLKECAISSIGISSSAEVIQIKHLTAQIELIEEQLTEIDKKIEEFSIQNNSPILSIPGISHFSGTSILAELGDISNYSKPSQIIKFAGVAPLHYESSQFNAQHTAITKKGSKYLRKTLYQIILPVIRHNPVFNKYYQLKISQGKGHRCAQGHCVRKLLRIIYHLLKTNQQFDPQLLR

SEQ ID NO: 218409 - protein, 389 aa, unidentified
MFYLGIDIGKNTHVASLVDDKKKIIFKAFSFSNSIDGAESLILKLEAFKNELEVGMESTGHYWLSLYSYLVEKNFTVRLINPIQTDGWRQGIEIRKRKTDVIDSILIADLLRYGDFVETSLSNEDYLSLRNLSRFRSYLISSIGDLKRKTIALLDQVFPEYASSFSNIFGKTSKEILSNFSTPSDFEDINSDDLNTFLESVSKKNYASKKIDELSKKASSSFGINFCLDSFSLQIKMLIEQISFIQNQVSDVENEIEVLLEKLNSPITTIPGIGSVNAATILGEIGDIKRFSNPSKLVAYAGLDASISQSGEYESTYNHMSKRGSPYLRRALFQSALRAEFCDPVFSDYYQKKISEGKHHLVATNAVARKLCHTIFAVLTKDEPYQVQN

SEQ ID NO: 218410 - protein, 343 aa, unidentified
MTLIGCDLHARMQQVAVLDTGTGEIQEHQFPHHGDAVERFYAALPRPVTVAVESTGYSLWFHTLIRQLGHTLIVGDAAKIRAMVVRKTKTDRRDALHLLELLRHDRLPTIWVPDPATRDRRALLAHRMRLVRIRTTVKNGLHAIALSHRLVEGSKRLTKPRLAVLQGLSLAPYTARRRDESLELLHWLDEHIRQLDDQVAEAAAGDPAARRLLTHPGVGPVTALATIVVLGPVGRFPGSKEVASYVGLAPALHASANTHHLGQITKQGNPFLRLVLVQAASIAIRYDEDLHRLYMTLHRRRGHAKAKVAVARKLLIRLFIMLRDGIDYDEFRRRGRAAQPMPT

SEQ ID NO: 218411 - protein, 315 aa, unidentified
MTKHLLPVNVGVDVGKNQLDLYLLERDRALTVPNEEQAILVLVRSLSRYRVERIVVEATGRLEQPFVRAALAAGLPVIVVSPLKIRRFADVIGQLAKTDQIDARLIAQFAATVKPLPRPASDANAQAIKDLVVRRRQLTSLRTMEKNRRQVMPNDLKPSFDRILKALDRELKSLEQLINHAIDQHASSRHKRELLTSTPGIGNCVAATLIGDLPELGSLDRRQIASLTGVAPFNRDSGTLRGKRRIRGGRTHSRTALFLSAMVATRFNPDIKRFYQRLLTAGKHKKVALTACIRKIVTALNAMLRDNLPWRSAIA

SEQ ID NO: 218412 - protein, 424 aa, unidentified
MKVTYPTCCGVDVHKSFLVATIIKTTAGIEPSYQKKRFSTFNNSILDFKSWLLKNECHDVCMESTGKYWVPVFNLLEDQINVTIANPKWVKAVKGNKDDTKDSKWIGDLFRLGLVKGSYIPCKSIRILREYTRYRYKLVSCRSSEKNRYQNALTVCNIALDSVVSDIFGKSSSSIIDYLLEQSGTTINHEEIASKLLKRLKSKEDAVIESIEGYQMTDAQKYRMRLVRAHMDYITAEINDIDKQIESLISSDPDYDKAIRLLTTIPGVKRDSAITIISEIGIDMSQFCNSKRLCCWAGLTPSNNESAGKKKSVRITRAGVYLKPALVQCAHAAVKSDKSPYYKKKYESLVKRRGKKRAIIAIARMILTAIYQMLSTGEVWNPSDLYKIDMPAPLVEKQKAKAIKQAKKLLQKEGLLAPDEPLAS

SEQ ID NO: 218413 - protein, 316 aa, unidentified
MREAVFVGIDVAQDWLDVWLHPLGQHSRFANTLTGIGELEQLLISFKVEKIVVEATGGLEYLAAQHLQQAGLPVAVVNPHFTSAFRTMRGKYTKTDSLDAETMALFAQKMEPEVRPVPTAQNKEMKDLAARRRQLLSMIGAEQSRLTRVQNAVARRSIEAILSALRQEKKEIDQHLQASIQNDESSRQKYQLLTSIPSIGPAIAMTLITELPELGQLGKKQMTSLAGLAPHHRESGRMKGKSTIKGGRQPVKAALYMAALVSLRYNLTFRGFYDRLVKKGKAKKVALTACMRKILVVAHEIVKSQRPWQYDYQSQG

SEQ ID NO: 218414 - protein, 341 aa, unidentified
MNSIYYIGLDIHKKVIAYCIKRIDGVLVRQGMVAAERKALRKWLAELPGPWYGAMEATIFTGWVHDFLKPYAVDLKVAHPAMLKAITAAKKKNDRADAEKIADLLRVNLLPECHMMPEELRELRRVLRYRNMIVSTAVKMKNKMSGLLMEVGAVYDKKRLHGKKYFGALLERVEDVPDSVKGLLKLSRNSFEMFDDIQKQLVAALRQNRLIRERVERLMSIPGVGELTALTWVLEIGEVSRFTSSRQIISYCGLCSGQHESAGKEQRGPISKKRNKHLQTKLIEAAKIAPHWNEQLALLHDKELARGNRNRATLVVARKLVEFMLAVDRRQTDFELLKEAA

SEQ ID NO: 218415 - protein, 351 aa, unidentified
MIIIGVDYHPSDQYIAFVDTETGEYVERQLNHSDREAEKFYRELAARGVSVRVGMEATGYSRWFERLLAELGIEVWIGDAAEIKTKRVRKQKTDREDARLLLRLMRENNFPRIWVPSPENRDLRQLLWHRHRLVQMRTRIMNQLQAIAMNEGQRRKKKLWSEQGRAQLEKLPLATWASRRRKDLLELLDRMNPTIEELTRAIEQEAKKWPEVLRLMTHPGVGPLTALAFVLIIGTPERFKCGKQIGSYVGLIPCEDSSAGHQRLGHITKQGSSLLRFLLGEAAQAAARWDSDWRRRYIHLAMRRQRNIAKVAMARRLAVRMYWMWRNGWEYSEWVKFGSHAGQLGTRHGVN

SEQ ID NO: 218416 - protein, 413 aa, unidentified
MSVEHNHPLGREDGRPTAGIDWASTEHVVAVVGPDGVQRSVVTVTHTGAGLRRLVGFLHRAGVVEVGIERPDGPVVDALLAGGFTVFVIAPKQIKSLRGRYGSAGNKDDARDAYVLGDTVRTDHHRMRPLTIDSPATVTLRMTVRARQDLVHARVATTNQLRAHLAHTLPGAIGLFRDLDSAISLAFVSRFTTQTQADWLTPRRLEAWLRAHRYPHPARAADLHAHLLAAPRGTTGPEAAARARVTAALVATLTCLQTQIRALEDQIADQLATHPDAAVFTSLPKAGVVRAARLLAEIGDARGRFPTPEALVCLAGAAPSTRQSGKMKVVTFRWAVDKQLRGAVMDFAGDSHHANPWAADLYAKARLRGHDHPHATRILARAWLHIIWRCWQDGVPYDPTRHRALQALQPTPA

SEQ ID NO: 218417 - protein, 338 aa, unidentified
MKFKRIAIDTSKHVFTIHGVDEQERSILRRDLKRDQFEAFFRKLPGTEVVLEACGGSHHWARVLQGMGHQARLIPPQYVKPFLKRSKNDDKDAEAINEAAARPSMRSVAVKTVDQQAKGMIVKHREMLVGQRTQAINALRGHAMEFGVVAAKGTAKVAPLLAVLAVDMAIPAAARAMFVQMGAHIAALESRIAGLDAELLAMHKADPVSRLLAEIPGVGPMIATTMALTVEPENFASGRHFAAWLGLTPREHSTGGKQRLGKISKAGNERLRTLLVVGAMSVIRFAKPGSKSASPWLLQLLERKPRKLPAVALANKMARIIWAMMARGEAYRRQPIAA

SEQ ID NO: 218418 - protein, 371 aa, unidentified
MKQFSKFVGMDVHKATIAVSVADANGGEVRYVGEIANTPEATEKLVRQLRKGDAHLSFCYEAGPCGYGIQRQLSDLGWDCQVVAPSLIPRKAGERVKTDRRDSLMLARLHRAGERTAVWVPDDAQEGLRDLTRAREDMKHLQRQAKQRLCAFLLRYGKCYSGKSNWTQAHYRWLEEQQFRQSVQQIVFQEYVDTVKALSKRVDGLDTQLESAASESVFWPVIEGLMALRGVNLLSATTVVAEIGDLKRFASAPQLMAYLGLVPSEHSSGATKSRGAITKTGNAHVRRVLVEASWTHRHPARKTAHLQRRAERTSEAVQDIAWKAQKRLCARYRLMEGKGKLKVQACTAVARELTGFIWAIGQELPQPVPNR

SEQ ID NO: 218419 - protein, 320 aa, unidentified
MTILTSPTVLGIDVAKADVVAYREDFKAIQTITNDRDALGRWLKTLPANSSIALEATSTYHLDTAELAHEMGHRVYVVDAYRLSHYRESIGQRAKTDPCDARLLARYLSSEQERLRLWSPPPQAYKLLKSLLHRRAELINLRVSLTLSWSGEPLLKDELAQQLKSFKQAELVIQKLLHKVSKEAGITENIKRCKAIEGVGDLTATGLATAFMRGHFASGDAFIAFLGMDLRPKDSGKKAGPRHLSKKGDSELRRLAHNAAMAASRSPTWKPYYESYLARGLAKTQALVILARKLCRVAFALMKNQSEYQPNLRLQGFPAT

SEQ ID NO: 218420 - protein, 334 aa, unidentified
MQFSFYVGIDVSKNSLDLAIRDQRQVLFHISVENNEAGLDQFEAKCQDHGVDLTRSLLCCEHTGIYSQVLLTFATQRDMHLWLESSIRIKRSMGLQRGKSDKVDAIRIAEYAYRHADQAILWQPEREVLTRLKQLVAMRKRFITTKHALNVPIKEAGPFQDKKLQKELQKLNQKPVEALNKQIKEVEKKIRVLIKEDDTLAHLFEIVTSVDGVGEVVFWEIVTSTNEFKFFTCPRKFACYSGVAPFEHSSGISIRGKMRVSHLANKQMKKLLHMAAMSAVAAEGELADYYQRKVAQGKAKMAVLNAVRNKIIHRVFACVRDDRKYEKIYGYPLA

SEQ ID NO: 218421 - protein, 397 aa, unidentified
MIAVGIDVSKGKSTVAIISSYGEIIMKPTDFHHNNPSMQQLTSTLLNFDDEVRVVMEATGHYHQPILKALLEANLFVSVVNPYIIKKYADNDIRKGKTDKKDAMRIAWYALEKQHTLTSYSITEERYDTLKFLSRQYKQCVSMRVKGRVQLHNLLDEIMPGIQNIITSQTENPDNNFFYKFVMKYGSYDKIKAMSEGRFINSYVKLAYKSKARCPEAKALKVYEAAKRSITTRPFDTSTQIVLTEYISLLKQTEISCNTLMKQMQSIAYTMPEYRILLAMDGVGFRIAPILIAEIGDVRRFKNAKALNAYAGNDAPPYQSGQYESQNRHISKRGSSELRKACYEVMQSLKLHKKVDNPIYQYMLKKEAEGKPKDVAKMAGVNKFLRIYYARVMELYK

SEQ ID NO: 218422 - protein, 340 aa, unidentified
MEKVSTIGLDVAKHVFQVHGVDAQGAVVVRRKLRRDDVVAFFTSLPACLIGIEACATSHHWARVLTALGHEVRLMPASYVKPYVKRHKNDASDAEAICEAVTRPTMRFVPTKSEEQQSVLMLHRVRELLIRQRTMLVNALRGHLAELGIITRQGATGLSMLVALVEDEGHDLIPPLARSALLFLVQQLREVHEKVGELDRQIHIWHRSHELSRRLETIPGIGPITASAIVATVTDASLFKSGRQLAAWLGLVPRQNSSGGKDRLGLISKQGDPYIRRLLVVGAHAVLRFCRKAKAAPTRWAAELLAKKPYNVVAVALANKMARIVWALMTTGKRFADSPA

SEQ ID NO: 218423 - protein, 340 aa, unidentified
MNAMTYGLDIAKSVFQMYWVDPSSGEIHNRRFQRRELIEFLANCPAGKVALEACGGAHWWARKIQSLGHRPVLIHPRYVRAFVRTNKTDAADARAIWTAAQQPGMPVVPVKSEQQQALLSLHRIRDRLVQTRTGECNQLRGLLGEYGLYFAKGRKALLAELRTRRAEIEQGVPATLLRAIERQLMALRQLDEQIQLIERDITAWLQSEPAAQTVEAIPGIGAITATALVATMGSAQAFRSGRAFAASLGLVPTQSGTGGSVHLGHISKRGDPYLRRLLIHGARVVLTRSRHRPAWAEALLVRRPTNVVIVALANRMARAAWALLAHGRQYDPDYVSQRPA

SEQ ID NO: 218424 - protein, 425 aa, unidentified
MSESEVMRQEPQFAALVGIDWADQKHAWCLQAAGTTQRESGEVEHTPEAVEAWVGQLCQQFGNRPIAVAVEQVKGALVFMLSKYEPLHLFPVPPAMSANLREALYPSGAKDDPRDADLLVDLLLQHRNKLRRLSPDSEATRRVQHLVEERRNLVDEKTAQSNRLTNHLKMYFPQMLEWFEQLDTGLVCALLEQWPTLEELQKVPPARLRTFFRKHHCHHPELIERRTVGMQQAIPAIRDRAVIEAKSTVVKVSAQVIRSLVRGIADLDRKIEEAAAAHPDFFIFESLPGAGAVLAPRLLAAFGSQRERYANAEEVQAYSGIAPVTERSGKKKWIHFRWACPKFLRQSFHEWAGHSIAHSQWARRYYQQQRERGKGHHAAVRGLAFKWIRIVFRCWKDGVVYDESKYLAALTKRNSPLAAVAGTIL

SEQ ID NO: 218425 - protein, 349 aa, unidentified
MLADEVDFVVGVDTHRDQHVLSVVAAPTGAVVAQRSVAASGHGYAQALRFANEQAQGARVWAIEGAGHYGSGLARYLSGRRETVLEAGRGPRGERRLQGKDDGLDATRAARAALGNDELAVPRAGQRREALRLLLVARRGAVEVRRRALVQLRSVIVTAPNRLREELQALPERRLLERCSHFRRSSSLPVDELAAKLVLRTLARRIDAATAEATELEREILAHIRALAPQLLEEAGVGPIVAADVIVAWSHPGRVRSEAAFARLAGVAPVPASSGRTIRHRLSRGGDRQLNRALHTIVLQRRQHDATTQAYIARRVAEGKTRRDATRLLKRYLARHLYRLLQQTEPLMT

SEQ ID NO: 218426 - protein, 395 aa, unidentified
MFIVGIDIAKRSHEAIIIAEDGQVVRKAFSFRNNCTGYNLLLEQVRKLTLVKSQIVFAMESTAHYWLALYARLLKDGYAVMVLNPIQSHSLRELYIRKAKTDARDSLVIADLVRFGRCKASNVPQDKILALRELCRSRAYLVDMAADLKRKLIALLDRIFPEYESLFDSVFSKASIAVLSKYSTPQKVKNANLRKLTDILMESSNGHFGEWKAHQLKETACSSFGIDDSGGVYSTLLGMFLEQILSLTAQADSLEKQISVFFQEFNNPLTSIPGVGTVLAATILSEIGDITRFSSADKLLAYAGLDPSVKQSGEFKSNQNRMSKRGSPYLRRAIWLASTVAVHRDPMFQTYYEKKISEGLHYMNVIGHVSRKMTAVIFAVLRDGQPYQPILQSAG

SEQ ID NO: 218427 - protein, 372 aa, unidentified
MSKSSTLFVGMDVHKETIDVAIATNRLNGKVRHYGQIMNRIDAIDKLVTKLKREATTLKFVYEAGPCGFGLYRHLTRKKHLCDVVAPSLIPKKPGDRIKTDRRDAMRLAQLYRAGDLSPVYVPDVDDEAIRDLSRAREDAVLDQKAARQRLKSFLLRHGIRYEGLANWNEAHLRWLAELILSNPVQQIVFQEYVNTVTERTHRVEQLERMLREQARDWYFAPVVNALQAMRGVRFVNAVTLVAEIGDLTRFDSPRQLMCFLGLVPSQHSSGEHTRLGPITKSGNRHARRNLIEAAWAYRYQAKVSREIQIRQEHMPLKIREIAWKAQVRLCARYRKLIARGKNKNVVVVAIARELVAFMWDIAHHVHLKALH

SEQ ID NO: 218428 - protein, 370 aa, unidentified
MLYLAIDQHSKQITVSVRNAAGDTVLRRQVSTRPEKIKAFFQQLTEMDSKFMAILEVCGFNDWLIAELHKWKCQEIVLIHPEKPSKKKTDRRDARKLCDLLWLNRERLAARELVHGLRRVYMVSQQERENRQLTALRKNLGQRRTRTLNKIQCILNRHNLMWNYPTKTFQTQAGRRWLETLELPEIDRLEMDVLLQEWNIWDEQITRVDEKITERATQSNPGEVFNSTQILMTAPGVSHYSGLALASRIGPVERFPRPRSLANYFGLTPGCRNSGNTQDRLGSITKEGSKMARFLLGQLVLHFLKHDPKMRSWYRRIKTRRGSNIARVAVMRRITTIFWHMLKHREAYSIGGPPPRLRQQNPSTVRSDAA

SEQ ID NO: 218429 - protein, 349 aa, unidentified
MAIIGGFDVHRAQITFDYLDTETGEVTRGQIRPATRGVLQSWLGRFAGRDDVAFAVEGCTGWRFVVEELAAAEIRAHLAEPADTAAARGRKKRAKTDRADARLLRELLCQHRLPESWIPPAHVLEARTLVRLYVALMDERRAWRQRIHAQLFHQGVAPIAGSGLLTEAGRAATSRATLSPAGRQVVDTALAAIDQLTERVLPLRTQLHTIGRAQPGAHALTAQYGIGPLCAVIIWAELGDPRRFRNSDQAVRFAGLDVTVWSSDGKRAAGHLARQGPSALRWALFEAGKAAARSASPDHEYYVSVADRLGGKRPTLSVARKLIRRCYHTLRELGDAAWSVEGTASDKAA

SEQ ID NO: 218430 - protein, 478 aa, unidentified
MSQRKRSDKPNKPQRKGTPSREQTPVMTILNPNAAGIDVHSDMHMVCVPATSVVASHDPSGLPNNVRRFGANSCDLVTIADWLKECGVTTIAMESTGVYWIPLFELLQARGFEVWLVEPGQLSRCGARPKTDVLDVQWIQRLHAYGLLQPSFRPPESILALRAYHRQRQMQIRYAACHTQHMQKALEQMNVKLTEVVSDITGMTGQRIIAAILQGERNPHQLALLRDPKCKNSILTIAKALEGTWRPEHLFELQQAFDLYHFHHQQIAQCDQKIQEELANLPRRAGDKRLAPKPRRCGRKPNDLSFDACGPLFQALGIDLTEIDGIDVGTALVILAEIGVDVSRFPTEKHFASWLGVCPRQHESNQTKKKRGPRKGKNRVAIALRMSAQALGRTMSPLGLFYRRMKSRLGGKGAVTATAHKLACLVYRMLKYGKEYVQQSVQEYEQKIRNQIERALKRKAAALGYQLIRMPPAEPAGT

SEQ ID NO: 218431 - protein, 365 aa, unidentified
MAEVTRGAAARVGVDLSKRVFQVHAVDRSGRVVLAKALSLDRFFAWCAELPAGCLVAMEACGGAHHVARRLRLIGLDARLIAGHFVTPYRMAGKSGKNDANDAAAICEAAGRPHMRFVPVKTAEQQGQLSVHRLREGYKAERTALINRIRGVLAEFGLVFPQSPEALRRVLADVIEDADNELTGIARMVLQRAHLHWIDLELQMTWCEERIESHARSDARARQAAALQGIGPIGASALVASVGDFGQFTSAKQFGSWLGLTPSQNSTGGKASLGRITKRGDEYLRTLLIQGAKSAVMTAAKRDDRISQWLVRLKERAGWQKAVVALANKNARILWAVLTRGQQFNADHVPEAPLPRCDLSQRPTA

SEQ ID NO: 218432 - protein, 415 aa, unidentified
MSETSSPVPSESALAYVVGIDVGMDSCMMCCLTMEKRQVIKPSQFSNDAAGFEWLFQRLDQLKAPPAQILIGLEATSRYGENVYHVLMKRGYRMCLLHPGQIHAFAHQRGLRAKTDRLDAMTIARALLSGEARFGYVPSDQVVTYRELTRLHQQLTEEVVRYKNEIHALLVVLFPEFTQVFADPSRASALTVLKAYPSAQAMSQADPEQLYQVLREQCPGRYGRKTAGKLIELAKTSVSSGVAIGARSSSMRILADQLEHTQKNLGQLEKEIEHLVDSDQQTRSVLAISELGPMTVAVLRAELGDLDRFARMDQIVAYVGLDLHVKESGKWKGQTKLSKRGSGHVRRILYLAALRSIRRPDSPFGVFYQRLVDRGLKKGMAVIAVMRKLLIVVAHLIQTQEDYDASKVGVQATSA

SEQ ID NO: 218433 - protein, 339 aa, unidentified
MNEVTLIGIDLGKHSFHLHAQDATGRMVFRKKLSRQQLLRTLANVPSCRVVMEACAGSHWLARQLAGMGHEPRLISPQFVRPFVAGNKNDFGDAQAICEAACRPSMRFVSPRNEAQQTVSAMHRLRERLVRERTATVNQIHGFLLEFGISLPRGAALMSRLPTVLDHETLPPRLVALVVRLRAHVHYLEEQIRQVEQDLKASLREDDKSRRLLEIPGIGPITASALAVELGDARQFANARQFSASIGLVPRQYSTGGKPTLLGISKRGDRNLRRLLVQCARAVMQHTDSRTDAMSLWVKTLSTRRHSNVVACALANKLARIAWAVLARDTHYKARALTT

SEQ ID NO: 218434 - protein, 357 aa, unidentified
MKNPITEVASGCTVGLDLGDKRSMTCLMDSAGDIRQRVELTTCRTALERHFGPLPPSVVVLEVGTHSPWVSRLLTSLGHRVLVANPRRVRLIYQSQSKSDRLDAESLARLGRLDPRLLYPIQHRSQQRQLHLAHLRARDALVKARVSLVNHVRGSVKAVGGRLPKCSVRAFSNKVGAHLPEELAPALQGVLTLIDRMTEEIRQMERGLGEIARKKYPEVALVTQPKGVGLLSGLRYVLTLEDPGRVRRNRSVGAFIGATPGRDQSGSTDRQKRITKAGDPALRWTLMQCSHYILGRFGPDSDLKRYGLRLCARGGKSAKKRALVAVARRLSVLMLSLWKTGEVYEPLRHAQTEAVTA

SEQ ID NO: 218435 - protein, 401 aa, unidentified
MHGGYDAFLGLDVGKGEHYAVGLAPDGKRLHDAPLPNTEARLRVLFTKLARHGTLLVVVDQPASIGALPVAMARACGHRVAYLPGLAMRRIADLHPGTAKTDARDAYVIADAARTLPHTLRRVDAGDEALAELEVLVGFDDDLAGESTRVSNRIRGLITQIQPPLERVVGPKVAHPAVLELLSRCGGPAGLGKAGHAKLVEIVKARALRMDPRLVEQVLAALNEQTVVVPGTAAAETILPRLADSLHEVLRQRDQIADQVERMLDAHPLARVLTSMPGIGVRTGARILLDVGDATAFPTPGHLAAYAGLAPVTRRSGSSIRGDHPPKGGNKQLKRAFFLAAFASLAHPPSRSYYDRKRAEGKKHNAALICLARRRVDVLHAMLRDRACYRAPTAEPATQPA

SEQ ID NO: 218436 - protein, 366 aa, unidentified
MKKISTEQIFRDDILKKQKLTIGMDLGDHWSCYCVLDEAGNIILEQKVAMTPEAMKQTFSKIPPSLIALETGTHSPWVSRLLTELGYKVIVAHAQKVQLITKSNRKDDRHDARTLARLARIDPELLGPVRHRSAKAQIHLTVIRARAELVSARTALVNAARGLVKSYGQRLPKCGTQQVSRELAAGLHAELREVLEPLLQEVESLNERIQEYEVRMEKIAKESYPHVELLKQVKGVGTQIALTYVLTLDDPHRFPKSREVGCFLGLCPGRRDSGESQPQMRISKEGDRYLRTMLVQGAHYILGPFGADSDLRRWGLKLASRGGKNAKKRAVVAVARKLAVLLHRLWVSGEVYEPLRNSQKAMRTAA

SEQ ID NO: 218437 - protein, 329 aa, unidentified
MKYTGIDLHSNNSVISVIDETDKVVAEKRLPNDLAKILEFLEPHKADIAGVVVESTYNWYWLVDGLHEAGHIVHLANATAIKKYEGLKHSGDESDARHLAHLLRLGILPTGTILPPEHRDVRDLGRKRMQLVETRTAQILSIETMLARSTGKRLTSNQIKRLTVSDVPSLGLSECVTLALQAHVAIIEVLQQQIQDLEKRLQEKIGSVDAFKHLMTVPGIGVALATVIYLETGPIERFAKPGNYASYARCVGSEHTSNGKKKGQGNTKNGNKYLAWAFVEAAHFATRFCPPAKKFIWTPPVCQDLCRCAGVGRLQFYIRPVVQVDTCWP

SEQ ID NO: 218438 - protein, 345 aa, unidentified
MEQHAGIDVSLKLSSVCIVDTSGKIVRETKVASEPEALIAFFKGLSVPVTRIGLEAGPLSQWLHAGLVRAGFEAVLLETRHVKAALSAMSTKTDRNDARGIAQLMRMGWFRAVHAKSVGSREVRALLVARKQLLSKLMDLEASMRGILRGFGLKMGVVTRKGFEARVRELSAGQAMLERITNAMLDARAALWREFEQLHREMLRIVRDDEICRRLMSIPGVGPLVAVTFKSAIDNPGRIVKSKSVGALFGLVPKKYQSGERDFSGSITRTGDESVRTALYEAANVMLTRTTRFSSLKRWALEVAKRRGLKRARIALARKLGVVLHRIWVDGTTFRWTKPNPAIAG

SEQ ID NO: 218439 - protein, 415 aa, unidentified
MEIFYTRCCGLDVHKSTITACVRLHDGGGKLRKIVRRFGAMTNDLCAMASWLIEEGVTHVAMESTGVYWKPVWNILEGQFTLVLANAQHVKNVPGRKTDTKDSEWLAELLQHGLLAGSFVPPRLIRDLRDLTRTRARLTQESSRIASRIQKVLEDANIKLASVASDVLGKSGQAMLAALIAGQSDPGQLADLALGTLRGKIPQLRRALDGLIRDHHRFLLKRLLVQWRFVENETELIDQRLEQIGKEEPEIAEAVTRWDTVPGVDRIAAWGLVAEMGINMEQFPSAKHAASWGGVCPGNHESAGKRLGGRTRKGNPWLRRILGQSAWAAARTKNTYVAVQFRRLAAKRGRKRAVVAIGHSLLVTGYYLLRKRCMYQDLGADYFDRINAEGLKRYLVKRLESLGQKVTLEPRESAA

SEQ ID NO: 218440 - protein, 440 aa, unidentified
MSQEDRTRLEEFRQFRREVRGSKEYLLVGIDVAKDKHYAFFGTATGKTLLRRLVFENSIEGFRKLLAQAEAMKVQGGLTKVVFGMEPTGNYHKPLGEHLIRCGHGVVLVSGVAAHENRKTLDGRWDTNDTRDAANVADLVSQGKCLFYEFPVGPLQDLRNLLSLKRRFKRVEHGYRVRIRNHLLAKYFPELDRYYGQSESTALAVVRWCLAPSEIAGLEYKRFVEMVGSGRERLSQARRLRAIWELGVGSVGWEAGPAVEFEAQMMVEGLKRIREDMKRIEEKIQEVCSQFPEYEFLLSIPDFGPDVSSKVLGAIGDPFRFQNGRQVLKMAGFDLSAERSGKSSERAVPVISKRGKADLRYALYQAALIASSRNPDFIGYYTEKLRGREREPGIKIKMRVKLAAKLLLMAWTLMKKKEPFHPSYLRSAGQSFTAGAGRER

SEQ ID NO: 218441 - protein, 355 aa, unidentified
MVNHKQGLVYGGIDTHVDTHHVAVVDAHGRPLGDIQIPATTVGYRTAVRFLQSWPGLAVVGVECTGSYGAAVTREITTAGMTVREVNRPNRFDRRNRGKTDTFDAYSAAEAVLSGRATAAPKGADGLVESMRVLRTTRSSAVKERTATINQIKAMLIAGPADLRTRYQGLSNSKLTTALAASRPNRTPVTAAETTRYALRVLARRWLLLTEQILDLTTHLDRLLSEHAPDLMAVFGAGTDTIAQLLITAGGNPDRMRSESAFASLTGTCPIPASSGKTNRYRLNRAGDRQANSALYRIAIVRLRYDQATRDYVQRRMAEGKTKLEAIRCVKRYIARQTYPLICDTLQAPKQALIA

SEQ ID NO: 218442 - protein, 379 aa, unidentified
MKKTISTTMRNTATSAAQPQPAEDGVTSVTPRYHAVVGLDVGDRQSHYCVLDLEGSVVAEGAAKTTEASFRVRFEGKGRMRIALEAGTHSPWISRLLIALGHDVLVANPRKVRLIAESNGKHDRADARLLAQLAHVGPSLLSPIQSRSAQTQIDLAMIRAREVAVQTRTKIVNAVRGMVKSTGQRLPASPTLTFARKATAACPEALQPALRPLIRLVQTLTDDIAAYDRLVEEKARAYPETQAIQTIAGVGALTAVAFVLVLNNDRSRFTRSRDVGCYLGLKPKQRDSGRRSPQLGITKTGDPLMRRLATQGAQYILGPFGRDSALRRWGLSLASRGGKNAKKRAVVAVARKLVVLMHRIWITQEAYDPMRGVRVQPAA

SEQ ID NO: 218443 - protein, 402 aa, unidentified
MNSVGIDISKGRSTVAVMRPFGEVVISPFEVRHTDSELSELARQLKSLNGETRVVMEATGNYHAPVAKLLHDAGLYVSVINAKLVHGYGNNDLRRVKTDRKDAVKLANYGLDRWLTLPRYVPEEDTRLLLKNCYRQYRQYSKVQTVLKNNLISLLDTVFPNVNRLFSSPARADGSEKWVDFVAEFWHCGCICERSEKAFVSKYQKWCKKHGYNFGEEKACAIYAEASGHIGVTPKSETTKLLVEQAVAQLRATSTALAALKHEMQSLASQLPEYPVVMDMFGVGPTLGPQLIAEIGDVRRFYSKKALVAYAGLDAPPNDSGDVTGRHKSMSKIGASSLRRTLFLVMTVYLQNAPLDEPVYQFMDRKRAEGKPYRVYMMASANKFLRIYYATVKAYLELLERT

SEQ ID NO: 218444 - protein, 393 aa, unidentified
MPQTSPTDRVVISVDPHKASWTAAAVDTALQPLEVIRVAVSAQGYRRLRRFAQRWNNHSWAIEGAAGLGAPLTQLLHADGIEVTDVPAKLTARVRVLSTGHGRKTDEADAISVGIAALTAARLNTASVNAAITALRALVEHRDDLVKTRTQTVNRLHVLLTHLTPAGAPRGLTADRAADILRQIRPREPAAKTLRSLAVDLVAEIRALDRRITKAAVEITAAVESSGSTLTELSGIGTLNAAKILARVGTIQRFRSADAFASYTGTAPIAASSGDVTRHRLSRAGDRQLNCCLHTMAISQISRDTPGRTYYRRKRAAGMSHREALRCLKRRLSDAVYRQLVRDADTLKGAGPAGHTGATPTSCAAGSHPITSTSDKSLTGPAKPHPTTGDRTA

SEQ ID NO: 218445 - protein, 457 aa, unidentified
MATRRLSRRTRAMSPVHAHAAAIDIGATLHVAAVNPDCDPEPVRSFGTFTGDLHRIADWLQQCGVTTVAMESTGVYWIPIFEVLEQRGFAVVLVNARDAKHVPGRKTDVSDAEWLQRLHEYGLLRASFHPEARIAALRDFMRQRERLLDCAASHIQHMQKALTQMNLQLHHVVSDITGVTGMNIIRTFVAGERDPAALAALRDQRCKASDETIRRALVGNDREEHVFALTQALELYDAYQTKVADCDKRIASVLDRLQAECPPPAAPMPAPRHRTRQPNALGFPAREALHRIVGLDLTQIHGLGPYLALKLVSECGTDLSAWPSAKHFTSWLCLAPSNKISGGKVLSARTRRSSNRAAALLRLAAVTVGRTETALGAFYRRLSGRIGKAKAVTATARKIAVLFYNTLRHGLAYADPGASYYEERYKCRVLSNLRRRAKSLGYLLQVAGPTSAAEGVS

SEQ ID NO: 218446 - protein, 331 aa, unidentified
MTNASSAQASMTLPTLFVGVDMAQKSFVWAIHGQPQTHCASNDDSGFEQLLKALEGQRVGLLVLQATGGIERALATYLLQHGLPVAVVNPRAAREFARSMGHLAKTDAIDALALAHYAQTLAARADQSSVRYAPASEQVQQLQALVMRRAQLLNMRTAEKNRLGGSIRVLRQSILEVIRTLEQQIARIDKDIDGHVRQHFQEQAKRLEAIKGVGSTTSATMLAFMPELGTIKAGSAAKLAGLAPLNQDSGKARGKRHVWGGRAIVHSTLHMAMLSAVRYNPVIRAFYERLIAAGKPKKVALVACSHKLLRILNAMARTGEPWNEALHVKNA

SEQ ID NO: 218447 - protein, 346 aa, unidentified
MMIIGCDYHPSWQQICWMDTLTGETEEKKLEHASGEAERFYRALSGPAVIGMESTGNCQWFVEMATTAGHEVWIGDAAKIRASEVRQQKHDRRDAALILKLLREGRFPRIWTPSGEEKDLRQLLIHRHKLVRIRAQVKNELQHLAMNQGVSRKRKLWSKAGEKVLRELPLKPWASRRREDLFKVREMLNGQVELLDRAVVEVAEKNEKARLLMTQPGVGPITSMAFVLTMGDVKRFQRGKQVASYLGLIPREYSSGGHQRLGSISKQGNGFMRMLLVEAAQVAVRCDPQMRSEYLHRCHRKAKGVAKVAAARKLAIRLYWMLRTNRGYPEVVHVESSSRVPMVGAS

SEQ ID NO: 218448 - protein, 391 aa, unidentified
MVCVGIDVAKDKHDCCILDSDGMVRADCFTIPNNMDGFKQLLQTIRNCTQKSDKIKVGLEATGHYSYNILGFLLDNDLAVYVMNPLHTNLYRKSLSLRKTKTDRVDARTIATMLLSDVDLKSYTDTAYHNEELKSLTRYRFDKVRERAKLKQSVSRLVTILFPELEKLVPSLHIASVYALLSEYPGAKQISEIHLTKLTNLLATASKGRYGKDKAIQIRDAARTSIGSVMPAKFLELKHTIKLIRELTSEIDEIEVSIQKIMDELNPPILSIPGVGIQSAAMILAEIGDFSNFESPDKILAYAGCSPSTYQSGKLTNCYAHMEKRGSRYLRYALYNATKYVCHWNPVFAEYLAKKRAEGKHYNVALSHATKKLVRLIYALQKSGKAYLVAA

SEQ ID NO: 218449 - protein, 323 aa, unidentified
MKTSSYSYRTLIGIDVSKNKLDLAVSETGSRITIGNTKREIAKWISTLSHPRETLVVMEATGGYESQLVELLHEQGIALAVVNPRQVRDFAKGIGIDAKTDRIDASVLVRFAEVVRPAPQAAQSDEQAKLGALVERRRQLVDLINQEENRLQQTRDQDVRHSIQTVLKGLKSQLKTIDEQIKQAVASDKTNERKVEILSSVKGVGPVAVSTFIAELPELGELNRQQVAKLVGVAPLNDDSGKRTGKRSVRGGRGGLRRVLYMVTLVATRYNSAIKRFYTRLVAQGKPKKLALTAAMRKLLTILNTLVRTDQLWQDRSDTRVAS

SEQ ID NO: 218450 - protein, 472 aa, unidentified
MIAKAKPDLKAIPMLLNESMYIGVDIGKFKHVAGFVSTTLLQRHQRFESCPAFTFEQSRAGFQAFLDRVRAFVPLEHCFLLMEQTGHYHRALQQYLVEQDLPVYVIHIQRREAGMIKTDKRDALGLANQLYNQLELGVQVTDKLQVVHRAIPPTEAAAQLKGFMRHRYELVNEETQRRNKLTAICDEMFPEFTHIFRDPNRPIALDLREKFPTPQAIATASPIALREVRRRNHPSEAQLIQLQACAAQSIGTKNVARQRGLVLEQSLLIKELRLIQEHLERLDTEICQIVEHSREGQILLSIPPVSPLFAAAILSTLGHIANFPSAGHLKSYFGWAPKRAQTGVSFDRTNLTRGGSREMKKTMYLVAWQAIQTETEWATLYKRLIPRLCTYDERTQSYKGKGKVLGHIIGRLITLIYALLKQDDETLSHLPPGTKPPEPVLYDPEIHQQHRAGHYQPLKKKQPENRIVLIQP

SEQ ID NO: 218451 - protein, 358 aa, unidentified
MQTKTIEQKVSQKRAPVQAGVTVKFGLDVHAAQITVCRQIDGQVPQPAQKLGWSECMEWFDAHVQAGAVVHSCYEAGPCGYGLHRKLTQLGVTNHVVVPQRWDEQNKRVKTDARDARELCDRLDRYVRGNTTAFSIVRVPTPEQEQRRALGRQRDTLVRERQRCVVRGHGLMLAQGVRAPEDWWKPKVWEQFCQDLPEWLRPQLLVWQEAALRLEAEVEQWTHQVVTQAADQPIPKGVGALTHALLAGEVLDWQRFKNRRQVASYTGLCPSEHSSGERAHQGGITKHGNPRVRHHLVEAVWRLLQWQPDYPPLKKLRAATGKRTCKRLAVATARHLAIDLWRLNTNQCTAQKLGLKLA

SEQ ID NO: 218452 - protein, 339 aa, unidentified
MNIQRRWFAGVDWARESHHVRLTDEHGNDVGERIFTHGGAGLAEMASWLTTTCQADAPEIHVAIEVPHGPVVETLMERGFAVYAINPQQLDRFRDRFSVSGAKDDSRDARALASALRTDPQCFRHLTPVDPTVVELREWSRIADEIIAERNRLTNRMREQLWRYFPAFLKLDEDLGADWLLDFWELVPTPLKARRVREPTVAKLLKRNRIRRFDAAHVLAIAREEPVTVQAGTMEAATAHIATLVARLRLINRQLADAHRQIDALTARLVGGEESEPGQPVEQHDAAILRSLPGVGRIVLATLLAEAWEPLRRRDYHALRNLCGVAPVTRRSGKTSIVL

SEQ ID NO: 218453 - protein, 403 aa, unidentified
MEGPLISLDVSKGKSNYRFFENGTDRKGKKGVIRHDIQGFDSIRDEAEKMEKRLRIKPSVIFESTGVYSDVVEKYFTDKGFDVYVISPLLSASMRKEGVRPAKNDSLDTLSIAKVFYSKDDLRKCSENDKKAERLREMSYELDMMNRRIRPMKCQFLRLLDKVWPCLDEVSDYSSRFMLDFIIAFGHPENIKTVKGVLSVIRKSEMGTAGRKDKIAQDLFDYCHTHLSAVSKDSSYVELLKRMAIELKAMAKKKSELIDRMAEEARNKDEFVRLLTIPAVAKTTALKIMARVGDISRFRNAEALVAYCGLDPRVYQSGKMTGEHRTITKKGDCILRSTLFLAVKQMVMLYPDTKVARFVAAKAKNGLSYKQAVVAGSAKLARIIYSMLTHHENYVEFNADIVA

SEQ ID NO: 218454 - protein, 363 aa, unidentified
MDTNIQTGRDKLRVSFSGRQIFLGIDVHKKNWNISVFIDDIFFQNFHQEANSLLLLNYLSSHFPEARYLACYEAGFSGFSIQRELKSLGIDCIVVNPSDIPQTNKGILSKTDTSDSRRLGMALSRGLLTPIYIPDKLTESDRQLIRYRKKTLTDLQKKRKILKSAFHSMGIIIPKEYDKPYWTKKFIDWIRNLRPEEVSSQILISHVIDDVEFLRKRLLQINKDIRHLSSLERYKEVYSILISAPGIGIITAMTMLTEIGEIKRFNNFAKFNSFIGLCPSEFSSGENIRKGKMTPRANSALRPLLIEAAWIAIRTDPALALKFQELIKSRTKKRAIVVIARKLLSRIYHIWTNTRLYEKGLLR

SEQ ID NO: 218455 - protein, 412 aa, unidentified
MWPAKPEVPAEPPYGSFGEWAQTQRLLELGSDAWKLELMHVAVGQPTQEAYRTPMNSVGLDVHKTRCVACVKTHEGEIVEEFAFQNTPHGHEELITHLKAYPQIQVAIESTGNLWIPIYNRLEDEHIHTILTNPKKTRLIAEAKIKTDKLDARILADLLRANLLSASYVPPPQIREQRSIVRERARLGQLRTIIKNRIHTLLDKHSIKTPYTDIAGKHSLEWLTKLELPPGDRILLDVNLEQLNSLNHSIDRLTETIAISAITNPEVKLLMGFTGIDYYSAMLLINEIGPVARFASPKKLVSYAGLAPSIRQSGNHTMHGHITKEGNSHIRWILVEAAQHAARHDARLNQFYLRVMKRRGHNRAIVAVARKMLVTIYHVLNHQREYRGLRAELYTNKIRRLERITSSTLQTQ

SEQ ID NO: 218456 - protein, 444 aa, unidentified
MTQRTIGVDLAIRGEHVAQIFEDGRAIGRPLRFRHDPASLDSFVSRATAGLGDGDVVQAVMEPTGMSWFPVAHRLADAGVDVARVKGKRVRALRRYLSEHAKTDLADAHVLAAIPGFGGPRLDRVHIPVPRSHALQRLTKQRGRMQDAVASAKRRLLDLVRWASPTLERVLPDFRTRLALALLQRWVDPDAALAARRSVLVRFIASNASGNHPHCGPFDTLVDGLRQAARDARALHRHHVDFIELQAEIAIEVDVVLAHIKALAELERRIDALYAELQPDDVLRTIPGVGHHLAPVLLGVLHTAERFHSERHLRGFCGLFPRRADSGGAERPGQTITQGGNDRIKRALMLAADTARKIDPDLAEVYWRLMTTRGHHHKQALCAVANRLANRIYSVMRSGKPYVLRDDKGREISVAEAKALVAERYTVPEGIRASRRANRLAAPA

SEQ ID NO: 218457 - protein, 485 aa, unidentified
MAKHKMSTFERLKSGRLNRKQRRELERQVAAADPGLTIVHANAGGIDVGNESHYVAVPPDRDPNPVREFGCWTAALNQMAEWLKSCRIDTVAMQATGVYWIALYDVLEQHGIRVVLVNAQHTKNVPGRKTDVQECQWLMKLHTYGLLRDSFRLAQEMESVRTIWRLRDRHVKEAGRTVQHMQKALTKMNLQLANVISDINGVSGQEIIAAILKGERDPWKLADLKDYRVRASREEVARSLEGNWREDVLFELQQAVDSYHFAHRQMQACDRKLEDYLASLPARMLEIPAQPEGAQAATPKKNRKKAKKPTGNEPHLVLEAELKRICGVDLTSIDGINVMTALTIISEIGTDMSRFKDENHFASWLGLTPNKDVSGGKTVGRGKRKVKNRVAVALRTAATTLLRSNSYLGARYRNLRRKLPSLAAAVKAMGHHLAILIYRLLTKGEAWVDRGATQFERRRTEQELASLNFKAQAKGFKLIPITEAS

SEQ ID NO: 218458 - protein, 445 aa, unidentified
MQVVYTHCAGLDVHKKTVVACRNRPKGPKKIEQEVKTFGTSTPDLVELVEWLKEWECSNVAMESTGDYWKPIYNMMEEIFEVLLTNAQHVKHVPGRKTDVKDAEWLTDLLRNGLLRGSFIPPKAQRDLRDLTRYQTKVVQERARQVNRVQKLLEGANIKLASVASDIFGVSGRAMLEELIGGQTDPAVMAELAKGRLRKKMKELQKALTGRVEKHHRFMLAQLLSHIDYLDEKLGVLDQQIEQHLEKMGEPPLLRDEEVEDVTEWLIKQALAWPLDQPLPGLLAAALLTTIPGVDWKIAIIIVAELGADMSYFPSAKHAAAWSGLAPGNHQSGGKHYSGKTKPGNQALKSILSQAAWAASRTKDTYLSAQYQQLVRRRGKKRAIVAVAHSIIISAYHMLSRHEVYRDLGHNYFDERKKAAVVTHLTRRLRKLGYSVQLEPLVETA

SEQ ID NO: 218459 - protein, 315 aa, unidentified
MTNPPVCVGIDVSKQQLDIALRPGRRYSVPNTAAGVARILADLKTMSLTLVVLEATGGLELPLTSALALAGLPVVVVNPRQVRDFAKATGQLAKTDAIDAQVLARFAEVIRPAPRALPDAQTQALAALVTRRQQLIEMLTAETNRLASARPVIRKNLRAHIAWLERAVDQADTDLAEAVRQSPVWREKEAVLRSVPGIGPVLTTTVLANLPELGTLTHKQIAALVGVAPLNRDSGTLRGRRTVWGGRARVRTALYMPAIVAARFNPIIRGFYQRLCAAGKAKKVALVACMRKLLTIINAMLKHQTPWNPTVVHHA

SEQ ID NO: 218460 - protein, 340 aa, unidentified
MIGIDPHKASHTAVAIDGNEVVLDEVRVRSCVTQTTRLRDWAERFEERTWAVESAHGLGYLLAQQLVAAGENVIDVPPVRASRVRVLGSGRSQKNDPNDARSVAIAALRADDLVAVHADDHSRVLRLLSKRHRDLGRLKNKASCRLHALLLEMIPGGAGFRITAVTRINALIDDFEPVDAMGRQRQEIAHELATDIDRYNQLLDASKQRIETTVTASATSLTTICGVGPITAAMIIGQSGDIDRFSSKHHYASYNATAPIEASSGSKIRHRLNPRGNRQLNWAIHVIAISQLRHDSLGRAFYDRKMAEGKSSKEAIRALKRRLSDVIYRHLVADARPQHS

SEQ ID NO: 218461 - protein, 337 aa, unidentified
MMYSGIDLHSNNSVVAVIDDGDRVVAQKRLPNDIGKITGFLARWQDELAGVVVESTYNWYWLVDGLQDAGLHVHLANTAAIKQYEGLKHSGDETDAQHLAHLLRLGILPTGTILPREHRVVRDLARKRMQLVQSCTTHVLAVENIMARQLGGRMTSNQIKRLTADTIDSLPLAADVGLAIKANVAVIATLQSQIELLEKRLQERVKPRPQYALLTTVPGIGQTLATVIALETGPIDRFAEVGNFASYARCVDSVHTSNRKKKGEGNVKNGNKYLAWAFVEAANFARRFCPEAKRFHERKRAKTNNIVATKALAHKLARACYHILKEGKPFDVTRCFA

SEQ ID NO: 218462 - protein, 352 aa, unidentified
MTNATRWVGIDLHRRRSQIAIIDEQGELSLSRRVVNDRETFTELLGDPQGTHIALEATYGWEWLADLLEEAGYDVHLAHPLRTEAIAAARVKTDAVDAKTLAHLLRTGLLPEAYIAPPELRDLRELLRHRAVLTRMRTAVKNRVHALLARQGIRQEHSDLFGKGGQEFLAGLELPHGSRRRLNSLLSLIGDFDREITTTTREIDARAKTDERVKVLCQIRGVGRYTAMLVIAEVGDVTRFPTARHLCAWAGLAPTVRSSDGKARLGHISRQGSPALRWALTEAAQKIPTGGGPLRAMFERIAKRRGRKIAKVAVARQILTLCYYGLRDGEIRCLTNQPDIDDHDNQDLAEAA

SEQ ID NO: 218463 - protein, 427 aa, unidentified
MSYRIAGIDVHKKMLAVVVSDVEIESEYQFERRMFNSNPEQLRSLAAWLLEQEAEEVVMESTAQYWKPVWEALERYWKPICETRDGARRKSGTLHLAQALSNRGRPGRKRDFPDAERLVKRLVTRELTLSFVPDAEQRLWRTVTRKKYQLRCDRIRLQNQMESLLEEAHIKLSSLVSDLLGLSARRMLQAIAEGETNPATLAALADKRLRATPEQLCDALGACTELNAVYRRLLKMALEELRLIDEQIGRLDQEMASLLSANQDAVQRLAEVPGLGVDSAQQIIAEVGATAATFPSEKCLSSWVGACPGDDESAGVNYSHRSPKGNRHMRRLLNQAANAAARTKGSIFEIVYRRSVPRLGHNQAIGAIAHRQCRLIWLILHQGVRYEERGPAVTKRSKQLRTWKMIRQLRNLGYRIEPPNPQPSQAQ

SEQ ID NO: 218464 - protein, 328 aa, unidentified
MEWTVAIGVDTHRDAHVAVAVDRLGRRLGALEFAVDEGGFGELRRFAVSLGKPAFAVEGTGSYGASLARALLADGFAVFECERPQRRRRKDKNDLIDAELAARRLLTGEPLSLPRGGHEREQLRLLLVERRSAQHARQQALNQLKAAIVTLDPPLRTQLERRPPATLVRSTLLQRQQLAPLQRLAKRIVLLERELTEIDRELNELTRALCPQLLRQPGVGPVCAAQLLVSTADPHRIRSEPAFAALAGVSPIEASSGPSKRHRLNRSGDRQLNWALHMTALNRIRYHPETRSYYQRQLDRGKTKREAIRIIKRALARRLYRTLTTPTT

SEQ ID NO: 218465 - protein, 357 aa, unidentified
MVLGVDTHLDFHVAVVLDHLGRCLGESKVPTTVRGYRNLVRWAEGFGPVRCAGVEGTGSYGAGLTRHLKTAGIAVVGVERPKRRHLRRNGKSDPKDAEAAARAVLSGEAAGVPKSADGRVEMIRILRGARRSAVKARVQAANLLKAMLLTAPEGLRQRLSGLPTKELVTVAARFRPDAYPEDVKEATRLALRSVARRHQVLSEEIAALDVQLERLVAEAAPELVLLPGVGTNHAATLLVLAGDNPERLKSEASFASLCGVSPVEASSGKVVRHRLNRGGNRDANRALHMVCVVRMGSDRRTKRYLSRRTAEGKSKWEIMRCLKRYIAREIYRVLLSSTTAEPPPIKAPSCISEVDIA

SEQ ID NO: 218466 - protein, 326 aa, unidentified
MKNLFVGIDISNEKFDFCMLRREDHAIVKRDVVENTKSSILKWLKTMNINQTVFSMEHTGHYGALLIYLLSQENAEFYVINPLELKNSMGIQRGKTDAVDAYRISAYTITNKHKLSPYSIPTEALRKLKVLMTARERFVKIAVQLKNSLKANIIVSRTLDVKDLIREEKKQIQSITKAITNFEKQMLEIVRSNQDLQVSYERITRVIGVGPITAIKCIAETDNFSKFANGRKFSCHCGLAPFAYQSGSSVKGRTKTHYLRDKSLKSILFKAAGSAIQHDPQLKKYYNRKVKEGKHKLTALNAVANKLVLRIFAVANREEPFVKLSA

SEQ ID NO: 218467 - protein, 368 aa, unidentified
MKKSITFVGLDVHKNTIDVAIADDGRNSEVRFYGTIGGRLDDIDRLVKKLAISGKELHFVYEAGPCGYDIFRSLTKKGIDCAVCSPAHIPKNPASRIKTDRRDALMLARLHRAGELTYVYVPRVDDEAMRDLTRAREDAVKAQRVARQQLGGMLLRLGFRYSRSNWTKQHSRWLSDQKMPTPAQQVVFQEYINAIEEATKRVERLTKQIESLVSTWRMAPVVSALHALRGVSLIVASTMIAELGDLARFKNPKQLMAFLGLVPSEHSSGNKEVRGSITKTGNGHARRVLIEASQAYSHPARITRPLLKRQEEISQEVKDIAWKCQVRLCGRFRKLMMKGKNRNTVVTAIARELAAFMWAIAKQVPIAA

SEQ ID NO: 218468 - protein, 345 aa, unidentified
MPIVGGLDIHRKQITFDYLDTVTGEVRRGQIAPADRQHLRAWLARFAGRGDVAFAVEGCAGWRYVAQELAAAGIAAHLGEPADTAAARGRKRHAKTDKTDARHLRTLLAEGRLPECWIPPEHILEYRALLETYHDLRREHTAWVQRIHAVFFHQGAPPLNEDALRTEQGLAKLRAAAAAHLSPAGQLQVATALDMLAAAEARMHVLRKQLRETARHLTGAKVLAARLYGVGPVTGLALTCWLAGEGRFSSSRKAVRFTGLDITVHSSDRKGPPGRLSRQGPPVLRWAVYEAGKTHARSSAPDHGYYAAVKDRKNSKRAALSEARKIVRQACHILTELGDDALTAA

SEQ ID NO: 218469 - protein, 418 aa, unidentified
MKSMEITAVGIDVSKSKSTVAIRRPGGAIVARPFDISHSNHDLEKLVSILKTTGGDIRVVMEHTSNYWKPIALTLKEAGFYVSVVNAMLIHDFSDNSIRKLKTDRADSLKIANYALTFWNELPPFNDEDETRLVLREQSRMYERLASTATSLRNGLIALADQTFPSIDQAFGHAIKNADGHEKWVDFFSIYWHRDCVLRLSIEKFTESYRKWCLRRNYKFRTNTAHKLYALAQDAVPTLPKNNGTKALVLQACKSLNAVCEAKQSTQEEMNRLASLLPEYEVVMQMEGTGPITGPALMAEIGDVRRFKNKKALVAFAGIDAPPFQSGNFESRSRHVSKRGSPHLRRAVFLVANIILTLSHKDNSVFCFMDKKRAEGKHYYVYTIAGSAKFLRIYYARVTEYLRVQERPVAASCPNGNS

SEQ ID NO: 218470 - protein, 369 aa, unidentified
MNNYTTVVGLDVHKETVVAAVLLQGHKEVTEQVSIENHPKAIEKLVKRVTRQGPAEFVYEAGPCGYQIQRQIVGLGHHCAVIAPSLTPVRPGDRVKTDKRDAANLARFYRTGDLTEIRVPTCEEEAARDLPRAREDVLKDRLRARHRLSKFLLRQGRVYTGTKAWGTAYKAWLKPQKFEWLTLQQTFEANMRAHDEAEARLETLEQQTYDLAQQPAYRTAVSYFRALKGIDTLGALTLAVEVHDFRRFSKAGEFMSFTGLVGSEFSSGEKVRRGSITKAGNAHIRRILVEAAWCQRYPDVVSLVLAERRKGCPPEVVKIAKKAQTRLHRKYLRMTGKNKLHQVTVVAVARELAGFVWSIGQHIPAAVTA

SEQ ID NO: 218471 - protein, 340 aa, unidentified
MKNTKYYIGLDVHKERTTYVVRDRLGNILAEGETATLYQELSPRLKPYLNTVIIGLEASTSYYALYQTFLNHGYTVKVANTIQLRQLVTKNDKLDAQRLSEMLRLGTFPSSYIPDEKIQRMRSLIQIRHSLMEEKVRCNNRIQAFLDRNGVLMPSYRAFSKKWRYALLKYMGSGRVSIELRYEYDHYVFLEKKLEQVEQEIQGYARTHWATEYELLQSITGIGPVIACYAIAHILPIERFASNKKLRRYAGVVPTCKESAGKKSKGHIPKTSSRRLLRWALIQAANTIGKTDTTLGRYYRKKKKQKKNAGIAKVAVASSLIDIMYTVLTTKQPYTIKTTC

SEQ ID NO: 218472 - protein, 425 aa, unidentified
MTDKTMGDFAALVGIDWADRKHDICLQAGSDSKREFLVLEHRPEAIKDWANGLRVRFENRPVAVCLEQRKGPLIHALMKYEHLVLFPVNPQLLAGLRRAFAPSGAKDDPSDAELAVDILLQHRDRLRPWKPEDPRTRQIQTLVQARRRLVEQRVRTTNRLTANLKGYFPQALECFESLDSVMACDFLSRWPSLGEAKAARAPTLTRFFHQHGVRGAERIEARIAMLKSALPLTTDAGVLMPSLVATRTSVAELRSLIEGIASYEQVIARVFKAHPDAFIFSSLPGAGPTFAPRLLAAVGSDRERYESVDAMQQYLGIAPITERSGKSKWVHWRYACPTFLRQSIVEWAGMSMRYSYWAAAYYRQQREKGKKHHVAVRALAFKWLRILYRCWKARKPYDEAKYLFAFKQRNAPLLKYMNEPSESAG

SEQ ID NO: 218473 - protein, 338 aa, unidentified
MYYTGIDLHKKTSFLTTVNRDGKIITRANLTNDEELILDYFINLGEETKIVIESMASWYWLYDLLKGNGFDVVISNPIKTKAIASAKIKNDKLDSHMLAQLLRTDLVATVHVSSLETRKLKEILRHRQRLVRDATRMKNRIHILLTKNNYQPPFSDLFGVKGLKYLRQVNLPNYHKAQLETYLALYERLREEIDPLTTMIQNMAKENAMAKLLMTIPGIGPIVAMFIVAEIEDITRFPTYRNLASYAGLVPSLDASGTKERRGRITKQGSPYLRTALIEAAQVIPRMKSCRLNLFFRRRIVKSGYQKAVVATAHKILKYAFYVLKNQTPYREEYPVCA

SEQ ID NO: 218474 - protein, 405 aa, unidentified
MRYYLGVDWADQTHAVWVVDESGTKIAARAVSHTAEGLGEWGRELDEWRAQGIDLWAAIERPDGRVVDLLLDHGVVVYPVNPKALDRARDRFRQSGAKSDPFDARVLADFLRTDQAHLRALQPSSEAAQELKLLTEDCQRHIRQQTRLVNQLTATLKAYYPRALEVAEVTSALAREFLPAYPTPEALTALTERQWQRWARAHRLPEARAGELWAVLRQPQLPVPAHVVRAKARLMQTLMEQLRPVVAAVAQYRKAIDDFFASMPAAQWARTLPIGKHGITAPTLWARLGDAPGRWESFRHLQAHAGTVPVTKRSGKQQRVVQFRFACDKALRYVVDQVAYLSLLSSAWARPYYDQQRARGHSHRQALRALGAKWLKIIFIMWQRQVPYDEQYHLATMTRQQLGRR

SEQ ID NO: 218475 - protein, 306 aa, unidentified
MASSVLGVDVAKQKIEVALLVTDKVKNKSFKNSPEGFEALALWLRKCGVERVQACLEATGNYREDLAIFLHEAGHTVSIVNPARIKGFAQSELIRTKTDKMDAGIIARFCLAMKPELWVPPSPEIRSLRALVRRADSLIDMLTQEKNRLGTAHESVLPLIQEHIDYLDKEIEKVRDQIADLIDQNPDLKRKKDLLASIPGIGQATIAVILAELNDLGKFKHVRELVAFIGLAPKETLSGSSIKGKPRLCKMGHVRLKKTLYMPALVSIRYNTLMIAFYQRLREKARMERLLSVRLCKSWFTLSLES

SEQ ID NO: 218476 - protein, 347 aa, unidentified
MKVLIGVDPHKTSLAVAAVDEATGELLERASVPQDHAGLRSLERWAKRFPERSWAMENAGGLGRHLAGRLVAAGESVVDVPPKLSARVRVLSRGNARKNDGLDALATALAASRNGRLAAVDPETASEVLSLLSERREDLVAERTRALNRLHGLLRVLVPGGVAGKLSARRAARILRGIRPRGGASDRLRRRLASEVLRDVRTLDRKIADLDGRIEAEVEASGTTLTQIFGVGAILAARIIGTVGNVARFPTKAHFASYAGTAPVEASSGDVVRHRLSLAGNRKLNYALHMVATSQARSDARGGEYYRKKVAEGKSRKEALRCLKRRVSDAVFKSLVADSQAPSRSAA

SEQ ID NO: 218477 - protein, 394 aa, unidentified
MIYAGVDIAKTDHVIGAVDERGAEMCRPMPFKNTEAGLERAVAWLEGLAGSPSDVVVGMEATGHYWMACYSFLVARGYSVAVINPMQVKAVRKLKKLDKVKNDRIDAWLIAETLRIGQYDETRLATDEMASLRSLSRYLQSLRGMAAELKTQCVCLMDAHFPEYAGIFSDMFGAGSRAVLSKSPLPFELARRRADSLARDIAEASRRGGKSAGYAARIKAAARSSIGVRLGQEAASFQVKSLIRQIEFADSECAKVEARVRALLDEVEPLVLTIPGVSYATGAQIVSEIGDVSRFRNASALVSYAGLNSSVSQSGQFDSGGGPITKHGSPYLRRALWLAANRARQYDPGLRAFYDKKRAEGKPHRVAVTAVARKLCHIVFAVMRDQVPYDPGRE

SEQ ID NO: 218478 - protein, 387 aa, unidentified
MEVRIENTPSARTNNDPVHCFVAIELSKSSWVVGFQTPLSKQTSRYQVKACDAEPLLELIERIRTRVAREVGRPVEVTSCYEAGYDGFWLHRVLEAHGIHNHVLDPASLQVSRRARRPKTDRIDADRMVRALIRHLRGEPEACSVVRVPSPEQEDARRLHRERRRLITERVGHVNRIKGLCATQGIYNYEPLRSDRLERLDKLRTGDGRALPARLKTEIVREIKRLEVVLEMISTVEAERDAILKDKKSTHLNADKIKMLAKLKAIGAEFSTTLVGEVFYREFANRRQLGSYVGLASSPFCSGSLDRDQGISKAGNSKARAMMIELAWTWLRYQPDSALSRWFQARVGNLKGRPRRIAIVAMARKLLVALWRYLQTGVIPTGAELKA

SEQ ID NO: 218479 - protein, 339 aa, unidentified
MSVYAGLDTSLDAVAICVIAETGEMLWQGKVLGDPDAVTAALQRWRDDLVRVGLEAGATSEWIGGHLVDEGFPVVCLESRHVKAARGAMTVKTDRNDAQGIAQIVRTGWFKAVHLKSAAGQRLRTLTAARKAAVRAVTANEQVILGLLRPLGLKIGAVTRVRFEARVRQLVGADRLLLGIFEALLQMHRCLRENLADLHRLVLRAVRVDPICRRLMTMPGIGPVTALTYRATIDDPKRFRRSRSVGAYLGLTPRRYQSGEVDRVGRITKVGDSETRTALFEAANVILRPTTRWSSMKAWAMKIANRQGARRAKVALARRMAVTLHRMWVDEQDFRWSAA

SEQ ID NO: 218480 - protein, 352 aa, unidentified
MSNQAGFPNLTIGLDLGDKVSRACELDGVGRAVKAAAVATTPDAIERYFGGRAPCRVVLEVSTHSPWVSRQLESLGHEAVVANTAEIFSRRRRKRKNDKLDAEFLARQGRADVKLLYPIRHRGVEAQQDLAVLRARDQLVQTRTQLISHVRGAVKSLGARISKCDADVFAKRAAAQLPESLRPALAPLVETIGVLTRQIHAMDREVDRMQERYPEAAHLQQPKGVGPLTALAYVLTVEDPRRFKRSRDAGPFFGLVSRLDESGDSAPQLRITKAGDALVRRYLVSAAHYILGPFGPSCDLRRHGEAIAARGGKNASKRAAVAVARKLAVLLHHLWVTQAGYDPNWLESRRAA

SEQ ID NO: 218481 - protein, 363 aa, unidentified
MRFYNRPHQYYCGIDLHVKTMYICILDAGGQVLVHRNVKSTPEAFLEVVAPYREELVVAAECMFTWYWLADVCATEGIAFVLGHALAMKAIHGGKAKNDKIDSHKIAVLLRGGMLPQAYVYPAAMRSTRDLLRRRLHLVRKRGQLLAHIQNTRAQYNLPAFEKRLAYPGNRDGVVAFEKRLAYPGNRDGVVEHFPDPSVRKSIEVDVALIDQYDALVTDLELTIVREAKRHDADAFHRLRSVPGIGKVLALTILYEIHDITRFDRVQEFASYARLIKCTHESAGKKLGTGGAKMGNVHLKWAFSEAAVTFLRHTTDGKKILARLEKKHGKGKALSILAHKIGRAVYYMLSRGTVFSMEKFLAA

SEQ ID NO: 218482 - protein, 343 aa, unidentified
MECYVGLDVSLKQTSICVVNERGSVVREGVVDSVPEAIAGFVRSKAPGAVRIGLETGPTATWLWTELARLDLPVICIDARHAKAVLKMQVNKNDRNDAAGIARIMQTGWFKEVRVKDLDSHAVKALLASRALLVKIKRDLENQVRGLLKNLGLVIGHGTFNVFALRAKELIADRPELTSAVSPLLTARTAIEQQIGELDRQVLKLSRQDAQARRFMTVPGVGPITALCFKATIDDPARFRRSRSVGAYIGLTTRRHASGELDWSGRISKCGDAMLRMYLFEAAGVLLTRVPKWSALKAWGMRLTKRNGLRKAKVAVARKLAVILHRMWIDGTEFNWSNKEIAA

SEQ ID NO: 218483 - protein, 317 aa, unidentified
MAAHLSFVGIDISKDRLDVWLESARRFERVTNDAAGWAALVALLEQHGSRAGTVVAFEATGGYEHGVRRALLEAGFDIRRLNPLRVRLYARSLGRNAKNDRIDARVIARYAAAAETHPETLDAAREDLAELVSHRQRLVTERVAVSNHARMLRNKALVAQDHKRLALLERQIAEADALILKALGASPDLMAKATLLKTLKGVKEVTAATLVALLPELGRLNRRQIAALVGLAPFDHDSGKYAGTRSIAGGRAAVRTALYMAARAAALSKSPLADHYKRLIAAGKTPKVATVALMRKMIVILNAMLRDGQPWSCANAH

SEQ ID NO: 218484 - protein, 348 aa, unidentified
MNKKIVKQVAGIDVAQKELVVCLGRMYDDWAPELYSHKTFPNHEKGFMALVLWVKKLAVEEVPVRFVMEATGVYHESLAYFLEEKGYESSIVLPNKISNYSRTLEVKTVTDKTASEAIARFGLERKLDPWKRPKKLFKNLRQLTRERDQVVQMRTMAKNQLHAEQAEAEPNPGSVTRIKQQIVFLNKQELQIKKELLVLSKQDSQVQQSVKLLCSITGVGSLTATTVLAETNGFELIRNKRQLTSYAGLDVKEKQSGTSVKGKAHISKRGNRYLRKAMHLPALTAIRHDDRFKAIFARLVSKHGIKMKAAVAVQRKLLEMMYIVYKTNIPYDKKYLQRNEEQQQIING

SEQ ID NO: 218485 - protein, 313 aa, unidentified
MKEEKTFIGIDVSKEKLDVGVRPQVDFMTFANTEDGISLMTDFVKSKQPELIVLEATGGLEMAALRSLVVARLPAVCVNPRQVRDFAKAMGVLAKTDKIDAHVIARFADSVRPEIRPLKTEETERLDAFNTRRSQIIIMLTAEKNRLTTASKWTKKDIEKSIKGLEKALAKINLEVETLIKKSPHWRHRDKILQSVPSIGPVMSLTILADLPEIGTMNRRQIAALVGVAPLNRDSGKYKGRRAIWGGRARIRSVLYMCAVSGICHNPKIKAFYNRLISSGKKHKVAITACMRKLMIILNTMIKNDTCWNESGC

SEQ ID NO: 218486 - protein, 347 aa, unidentified
MRFYTRQHRFYCGVDLHARSMYVCVLDQEGSVLVSKDIATAPEPFLELIAPYREDLAVAAECMFTWYWLADLCAREGLVFVLGHALYMRAIHGGKAKNDRIDAHKIAALLRGGMLPQAYVYPQAMRATRDLMRRRNYLMRQRAELLSHITNTNHQYNLPALGVRPARPAERSGLAEHFTEVSVRKSIEVDLSVIGHYDRELPRLERYLESNAQAHDPMALAIVRTIHGMGKVLGLSILYEIHDIGRFARVQQFLSYCRLVKPTKESGGKILGHSGRKIGNAHLKWAFSEAACLMLRAWPEAKKWLQRQERKRGKKKALSVLEAKIGRTVYHLWRKQQAFDPKRFFGH

SEQ ID NO: 218487 - protein, 336 aa, unidentified
MLYVGLDVHSRQSSLCILNSAGGTVNQLQLKGPRSAVVNRLRELNEPFSICYEASCGYGHLYEQLRPLAHHVAVAHPGKLRLIYGSKRKNDRVDAQKLAKLLLLDMVPPVHVPNVDVRAWRSLIVLRQRVLQQVVRAKNQVRGVLRENDLAGAKWLWSKKQLAWLESLELHPVAKLRLELAVEEFKALDARIKRIEKELQKYADRTPAVKLLMTIPGVGIRTAETFVAWVDDIGRFRNNRQLGSYFGLVPCQDASADRNRLGHITRDGPPVMRKLICEATWTAIKKCPAFKQFFERVMGGKSERRKIAVVATMHRMIRVMGAMLRSGAAYDVNYKT

SEQ ID NO: 218488 - protein, 474 aa, unidentified
MNLKSTKKKNQLITANIFEQQELLKKAKVIRENLKASTWHELEINGKFDKNEKLSFISDDMLILGCDVGSETHYLRAIDPRGRELSKSAYSFRNNCEGFQSAKEWAVELAAKNEKKQIVLGLEPTGHYWFNLGKFLQDNEMKPVLVNPHHVKKSKELDDNNPTKNDRKDPKVIAGLVREGRYMIPYLPDGVYADLRTASNIRFQLQAELTRIQNRISRWFNIYFPEYKTVYGKPDAKSGILILKAAPLPEDILTLGIDGVNQIWRDAKLRAVGKARAKTLIEAAEHSVGSKEGAVAARMEIRMLLEDYESRSIRLQEVMTLIEGLVKQIPMAEKLLEIKGVGIRTVSGFLAEVGDISRFNNPKELQKLAGLALVENSSGKHKGETTISRRGRKRLRYLLFEVAMSLVAKNPEFRELHNYYTTRRLNPLKKMQSLMAIAAKLIRVFYVMLTKGVNYDPKKMVNDIKRPAVYLQTA

SEQ ID NO: 218489 - protein, 428 aa, unidentified
MQSIQERIKRITDTTMIVGVDVAKEIHWARITDYRGVDLVKAFKFHNSIDGFENLLTKVEKIRKKHECDQVIIGMEPSGHYWRALGWYLKLHDSKPVLVGVNPFHVKQTKELVDNSQTKSDPKDALVIAHLIKNGSYFDTYLPESEYADLRQLNSERQRIMKQISRTNNQLIAHIDEYFPEYSTVWKDVTCPTSLKLLKVYAFPSDILSAKREKLLEDIKVASSGTEGLKLMEDMIKVSKRSIGVKEGRRIVRIRILNLIEDMAHFEKDKAAIESELDSTMKSLEIGYVLQSVPGVATIISSAFLGEVGDVSRFSSWKQVRSLAGLNLVEDSSGKRKGNTKVSKRGRPYLRHMLYMAGENGVRNNPEMNKYYRYLRDRKKNPLNANQAIVATGLKMMRMLFHIAKTGEKYNPEKALGEVRLQQIASLA

SEQ ID NO: 218490 - protein, 354 aa, unidentified
MAVYYIGMDLHKRFSQLTEMDKEGRVYRKFKLYNHPDLLKDYFSNLPCSSSVVIEATGNWYWVCDLIEELGHTVKLAHPKKVKIIAESTVKTDKIDSEVLAHLDRTSFLPLSYIPPKHIREERELLRYRMCLVRIRSGLKNRIHNILSKVGVIHTFSDLFGRGGVNFLREIDLPGIYKDELQGYLQVIETLDNLIKSCEKEIRRSVKENKDATLLMSVPGFSYFSALLMAAEIGDISRFSSYRKLCAYGGVVSSTKQSADKIYQGHIIKDSNKYIRWVLTEAVPKAIAKGQRLKVTYFKILRKKGKSKAKIAVARKMLISIYYMLKNKSQYKFFHLNARERRKTNMSGRIYSFR

SEQ ID NO: 218491 - protein, 343 aa, unidentified
MKLRTITIDLAKTVFQVCGVNEHMKPQFNTRLKRDQLLDFMRQQEPTMVVMEACYSSHYWGREMAKLGHDVKLIPAQHVTPFVRGNKNDHNDAFAIAEASQRQFIRFVPIKTEHQQEICCLHRIRERLGKNKVALSNQSRGLLSEFGVVFPCGHAVFLHGLTSIIDNPQYSHRLQDMVIDMLSEYKTTINRLKRIEKQLTEFVDGCESGRILLSIPGIGVINASAFLASIDKGQAFSSSKELAVWLGLTPKQHASGNISKMGAITKRGDRYLRKQLIHGARALVSRAPKSNDPLALWAMKLRVTKPINKVAVAMAHRLARLIWVLLTRQEHYRAMPASLEVSA

SEQ ID NO: 218492 - protein, 340 aa, unidentified
MHATTYGLDVAKRVFQMYWVDGDTGEIVNRRFGREDLIQYLSRRPPGRVALEACGSAHWWARKIKALGHEVVLLHAKFIRPFVQTNKTDAADARAIWTAVQQPGMRTVAAKTEEQQTMLSLHRIRSLLVKFRTMQVNQMRGLLYEFGASFRAGRVGGLAEVRARMVELDEALPGAMMCCLQDQLRRIDELQKEIDQLERRIGACQKQDAACSAIAGVPGIGKLTATALVATMGDAATFRSGREFAAYLGLVPRQSGTGGKVRLGSISKRGDPYLRTLLIHGARSVLCHTKVPTPWQSAIQERRPTNVAAVAVASKMARTAWAILAHGEAYRRDHVSLRPA

SEQ ID NO: 218493 - protein, 287 aa, unidentified
MASMTYIGLDIHKKTISYCVKDVSGKVLSDGKINATRQGLDDWMKRLTRPWTVAMEATMFTGWIYDYLRPHAAAVKVAHPLMLRAIAVAKKKNDRIDADKIADCLRCDFLPECYMAPMEIRQRRRTLRYRKLLVRQNVQLKNKIAQMLMESGVSYNKDKLHQQGYFHQVLPSNPEIDASLWPLLKLSREMIERTQKTERALLRSLEADPLLSARVERLMTIPAIGHVTALTWVLEVGEVERFHSIKQVISYCGLCSGEKTSAGNSGPRQQMDVWFCVPPQEPKTKAL

SEQ ID NO: 218494 - protein, 416 aa, unidentified
MNREYGVTAGIDVHKKWLYVVVGDPDAPERCWARCRVGSTTEEVDGLRKWLQQRKVTTVVMESTAHYWRPVWMALERQFTLWLAQAHSNAAPKGRKTDYADARRLVKRLWAGDLRLSFVPEADQRGWRELTRMRVQYTREIARLRNRVEGLLEDSRIKVSGLLSDLFGTTGRRILQALVVGDKIKPHELAALADPRVRATREELERALDGKVEPVQRLLLGQILKQVDLLEQQIEEIEVCLAQELKAQQEVTERLCAIPGIGVEAAQAIIAEMGPAAASFPSAAQAASWIGVCPGRQESAGKSTSDTSPKGNRQMRRILCQCAWAAIRSKNTIWEQQFRRMVPRMGAKPAVWAVAHRLLRVIWIVLRKGVPYVEYGPVAENPHQLQRRLTRVLRQLSLRGINYSLILASESPEGGA

SEQ ID NO: 218495 - protein, 324 aa, unidentified
MAKRSTICAGIDTGKRKLDVALDGSSEQLQVDNTSEGYKVLSDWFRRHRVKRIGIEASGGYEQAVVAELRRKEFIVVVFQPAQVRAYAKFHQQRAKNDKIDAALIATCTAAVKKIHAAPDPRLLPFAEQLTMIDQIGEDNARLKNRLESCRDPRIQKVWKQDITCLAKRERIEFKALVLAIREHRDLAVRLDLIHSVSGAGLPTAVTILVRMPEIGQITREQAAALAGLAPYDDDSGDQVGIRHIDGGRQRLRRALYTAALPASFRWNPQLIALYKRLIAAGKGHKRALIACARKLLIFVNTVVARGTPWQNQPPPRATMTATG

SEQ ID NO: 218496 - protein, 337 aa, unidentified
MIHVGVDLHQAFCYMTAVDSTGRSLKAGPVDNRPAALRSWFQGFSEPVEVAVEACSFWPAFKEAIENQVGQIHLVHPQRVKAIASAKLKNDRVDSATLAHLLRCNLLPPAWMADRQTRERRQRVRLRISLGQHRAGLKNQVHAILHQHGLRCEFSDVFGKKGRAWLEQVELPPAAGAAKDTYCALIDALGEHINEQQREIALMAKADPRAKWLASIPGIGVYSAMILLAEIGEVQRFSNAKALFSYAGLMPWVRESAGKKTRGGISRCGSPRLRWVMVEAAHTAVRSSPAAKSYFEKLRQRKHPHVARVALARKLLGAVYALLRDGVAFDESIFAAV

SEQ ID NO: 218497 - protein, 424 aa, unidentified
MREEGLSMAEEIEWFVGIDWASQSHQVCLVDARGECLGERAVAHGGLGIEELCDWLIARTGATPEVIGVAIEMTQGPVVEALLERGFCVYGINPKQLDRFRDRFTVAGAKDDRRDAHVLGDSLRTDRHAFRRLSNDEPVIVKLREWSRMADDLQQERARLASRMREQLWRYYPQMLELADDLAADWFLDLWNQAPTPAKAARLRQTTIERFVKAHRLRRWQAPEVLRILKQKPLSVAPGVVEAASDHIRTLTVRIRLVNQQLKAAHRKLDELCAQLVPSEEDEPGQQCEQRDVVILRSMPGLGRTILAVLLAEVWQPLRRRDYHALRSLSGVAPVTRRSGKTCVVVRRYACNKRLANALYHWARLATQHDAVSRRRYDALRQRGHSHGRSLRTVADRLLSVACTLLEQQTLFDPSYEVRDAAGA

SEQ ID NO: 218498 - protein, 339 aa, unidentified
MKLYAAIDLHSNQQTLVVLDEQDRQVHRRRLPNVLEVVLDELAPFQRELEGVVVESTYNWYWLVDGLMAAGYRVHLANTAALEPYEGLKHGDDDSDARWLAHCLRLGLLPEGYIYPRESRPVRDLLGKRAQLVRQRTADILSIENLTSRNTGVPINGNRVKQLTVEEVRQQYGQEDLALPVESTLAVIEVLDQQIHRLEKRVKGKAKLAAEFQPLLTVSGVGEILGLTIMLETGDIRRFARVGDYASYCRCVDSLRFSNGKKKGSGNRKCGNKYLGWAFMEAANFAIRYDPAVKRFYQRKKARSNVAVARKAVAHKLARASYYVMRDRIPFQVERGFGG

SEQ ID NO: 218499 - protein, 404 aa, unidentified
MIFVGIDWSERHHDVCVLDVDGDPLAQARVPDGIEGVAELHRLLATHAEEPEEAIVGIETDRGLLVGALVAAGYRVYAINPLSVDRYRDRHRTSGAKSDPGDAKVLADIVRTDRHNHRPVAGDSSLAEGVKLLARTHQSFIWERQRHANRLRSALREFYPAALEAFGTELASADAVAILTLAPTPEFGRRLSRSKIAAALRRAGRKRSVETRAEEIQAGLRSEQLRTSASLEQTYGVITSSLVGLIAGLNTQIAGLERDLHGAFEQHPDAKIILSLPGLGSTLGARVLGEFGDDPTRYADARARRNYAGTSPITKASGTHRVVLARFARNERLYDACHRWAFSSLTRSPGARRYYDVQRARGKTHHQALRTLGNRLVGILHGCLSRGELYREDLAWQVPEADAA

SEQ ID NO: 218500 - protein, 378 aa, unidentified
MKDIRYVGWDVDSEKIMVAVAEPGGEVRALGAIPYREESVRRLIRKLGPAKRLRVCYEAGPHGYGLYWLLTKLGVHCDVVAPTLVPVKSGDRVKTNRRDAEKLARCYRSGDLTAVWVPDAAHEALRDLVRAREVAKKDQLRARHRLGKFLLRRGLRAAEGVKNWTLKHLLWIKTLRFERPEQEATFLDYLHEVEHQAERVKRRDQAIDQAIESAPAGMRALIAALQALRGIQTVSAATLVAEVGPLSRFARPKQLMGYSGMVSSENSTGTSVRRGAITKTGNAHVRRILGEAAWAYQYRPAMSPELKKRQEGLSEEVKEIAWKAQHRLCSRYRRLTAKGKLRQKVMTAIGRELLGFIWAIGIQVEKELSHRKRPEKAA

SEQ ID NO: 218501 - protein, 348 aa, unidentified
MIIIGVDFHPEFQQIASVDTDTGEVQEKRLAHREEAEKFYRSLAGQKVRVGMEASGHARWFERLLAELNFELWIGDAAVIRTKRVRKQKTDRQDAQLILQLMLENRFPQIWVPSWENRDLRQLLWHRHRMVQARTRIMNQLQAVALNEGLRCKKRLWREHGREQLESFRLAPWASRRRRDLLELMDRLNPTIAELTQAIEQEVEKCPEAQRLRTHPGVGALTALAFVLIIGQAERFQCGKQVASYLGLVPLEDSSGSRRRLGHITKQGSSILRFLLVEAAQVTVRSLPEWRSKYLHLMMRRGRKIAKVAIARRLAVRLYWMMRQGWDYQQWIKFGSHAGESGNRHGVQ

SEQ ID NO: 218502 - protein, 455 aa, unidentified
MNYYLGIDVSKGYADFVMINQNKKIVETGFQLDDTFDGHQKLFNYFANFFKQHKDTTLHAAVESTGGYENNWFHSLHEFQEFFNLKVARLNPKGVNYLSKAGLNRTITDNISARTIAEYLVTHPEKVNYQTQDYYYPLRKKWKFIHSLTKEKTKYLNQLESLLYEANPDILFYCKGNVSQWVLKLLKKYPTAKRLSGASVSKLVQIPYISKERAQEIIERTKNTIASANDPLTQDTIKTLADQILRLEELIDRQVKLIVKHHPFPEIDLLKSIKAIGNFSAIGLLIEIGSVKRFPTVKKLASFFGVHPVFKSSGDGTTGVRMSKQGRKQPRAILFMIALSAISHNPIIKETYARNRAKGKCGMDAIGVCMHKILRIVYGVLKNNQPFDPEIDKMNQNKGTHNNQKKQTHRLRRYQNQDEYAPISRRQKIKRKEHETSQDGNSVIHEILSDAPSLN

SEQ ID NO: 218503 - protein, 578 aa, unidentified
MIYLDALVVKVKDGAHVRNKAAHIAVGVDVDGIKHVLGMWVQTSEGAKFLGRGMRRAGQPRRQGCADRVLRRAHRFPRGDRGDLAELDSPNLICPRLGWREGPAGHLRRLGQDLCKRVAFEVQRQTCPAGAVAGLVSASGSSADLSAEMRFRRGRSCEGGAGSEEAHIVMSNQDHLHVDQQFFGGVDWGGSFHQLCVLNTSGALVLQQRINHDVAGLRLLAARIADLGALVSVAIERGEGLLVEFLHTLPTVTLYCVSPKISARARERYRLSASKSDIFDAFVLADTLRHEHRRWRPLSRPSALTAELQAVSRDRQRVLHAKVACESRLRAVLETYYPAPLHLFSALDRDITLEFIRAYPTPDQARHIKTGRMAAFCDRQHYSGRTNPQVLVDRLIPHLLSATDGTTAGKSFAARLFAEELRLHTDHLRAFDRRIDQLLELHPDAPIFLSFPGIGPIVAATLISEMGEDRDRFPTVDVLLAETGLAPVTKASGRTRQVRFRYAANRRMRHVIDWWVFVASREDPWSQKVYQTARARGQGKYRVLRGLGARWMRILWRCWTSRTSYNPERHPRPELLSA

SEQ ID NO: 218504 - protein, 315 aa, unidentified
MDASQDLMVGIDVSKAYLDVAVDGLAVVPRWNNDAPGCAELAAAVAGAELVVVEATGGYETRLVRTLMAAGIAVAVVNPRQVRDFARASGRLAKTDRVDARVILHFAKAMRPAQIPHIDDGRVALAALVARRRQLIDMAIAEKNRLEHATAAIAPLINEMLLALKAQLARIDAAIALAITDDPDTAERRDLLLSVPGIGEVCAAVLIAELPELGSIDDKKLAALVGVAPIAHDSGMMRGQRHIGGGRATVRCALYMATISAIRCCPPIKAFHARLRNAGKPPKVAIVAAMRKFITMINTIIRRKTPWITQTQHGC

SEQ ID NO: 218505 - protein, 350 aa, unidentified
MKKNSRAAEWHPAETIGVDLGDKMSRYVILNEEGVAVEEGSFRNSVESIGKHFGNRGGARVALEVGTQSAWIAREFTKLGHEVIVANARELKWITSSDHKNDRNDALKLARLARADRNLLAPVEHRTAEQQAELAVIRARDALVRSRSLLVNTARSLAKGFGLRLPATITPTFGARALALLPESLHTTVGGLLEQIDSLGLQIRAYDERIAEVATQHPEVERLASVPGVGTLTATAFVLTLGRKERFARSRDVGSFLGLRPRQKQSGDRDPQLGISKSGDKYLRKLLVQCAHHVLGHWGKDSALRQWGLSKSDGSPAKKRAVVAVARKLAVLLHRMWMTGEMFKPFPKMA

SEQ ID NO: 218506 - protein, 361 aa, unidentified
MKSTTIIAFDQHAATTVAAVLLPGHRTPALHTLASDTATILRFVARVQRQGPITCCYEAGPCGFELQRALTAHRVPCDVIAPALIPRRPGDRIKTDRRDAGQLAVLYRAGALTAIHIPTEQEEAARDLLRCREDIRADLLRCRHRLSKFLLRHGRRFTGTKRAWSKRHDVWLRAQTWPIAALDQTHRAYLRAVEETVARLRAVEEDLRALLDLEPLRPRVQRLRCFRGIDDLTALTIAAELGDPRRFPTAPSTMAFVGLVPSEHSSGAKRAQGGITKTGNGHLRRVLVEAAWHYRHHPFVSATLRHRQRGAPDTVIAQAWTAQQRLHRRYQRFAARGKPKQHIVTAVARELTGFVWAALTQ

SEQ ID NO: 218507 - protein, 401 aa, unidentified
MPELWAGTDAGKAAHHCTVIDTDGAKVLSRRVPNNEPELLELIGDVLALAEDGPVTWAVDLNAGGGALLIALLTGHGQRLLYIPGRTVHHASRGYRGDGKTDAKDAYVIADQARMRRDLQPLQEWDEIAVDLKILTGRRYDLAADRTRAINRMRAQLLEYFPALERTFDYAASKSALILLTGYQTPAGLRRVGPSRLATWLKNRKVRGAQAIADAAVAAAQSQHTAVAGESTAAAVVNTLARAVLALDDEITGIDAQIAVRFREHRDADVVLSMPGMGPLLGAEFIACTGGDMDAFGSAGRLAGVAGLAPVPRDSGRISGNMRRPHRYHRRLLRVFYLSAQIAARFCPTSKTFYNRKRAEGKSHKQAILALARRRLDVLWALIRDQRRWTAQPPQPEPAAA

SEQ ID NO: 218508 - protein, 452 aa, unidentified
MVAVMEPQEIDDEEHEQVLERVAAVDVAKASGMVCTRVPHQSRPGKRRTRVWPVDATTNAVLELADHLVAEGVEKVTLESTSDYWRIWFYLLESAELDVQLVRAQDVKQAPGRPKSDKLDAVWLAKLTERGMLRPSFVPPAEIRRLRDYTRLRADLTCERTRHYSRLEKLLEDALIKVSAVASSLAAKSVRDMLEALIGGERDPKILASLARGRMRAKHDRLVQALAGRFDDHHGELARLLLDQIDTLSAQIGRLTTRIEELIAAIPPAQGIDADGTTGPAAGHGKNAPVLPAVDRLDEVTGIGRGGAQAIIAEIGLHMSVFPTAAHLVSWAKISPQTIQSGTRSRAGHTGKGNPYLRGLLGEAAAAAGKTDTFLGERYRRLVKRRGKLKALVAIARSILVIVWHLLDDPAARYHDLGAGYYASRVDKNRKMRNHVRQLEALGYTVTLTQAA

SEQ ID NO: 218509 - protein, 368 aa, unidentified
MTIGVDVSKDNLVHCTRDGHPSSLANSAKPVRRFLCRLPAGTIVAMEATGRFHRLLANMAYSMGFVVLVFNPKDVNRYAKSISPRAATDPIAARIIAEFASVRNHRPYVPPPAFVDVLRNLVRTRAGLVKQRVALENQASEHTGIADFLAQAVGCIAESIAKLEKQIVEAARCRPEYQLLMRIPGFGPLISSYMLATLASGEFRSSDAFVAFIGLDLRVRESGKLKGRRKLSKRGDPEARRLLYLAALVASQQPGPFSELRARYLEHGFSKTEAAVIIARKLARVAWAIYTKQQPYDAQRVLNQPSQNHNGSQTFQTPITYAAANPLDKQIANAVIALARTRPFLDNHNATNPNRGTNAQQPTLDSAA

SEQ ID NO: 218510 - protein, 433 aa, unidentified
MRKRLDSDAEEPEEIWFAGVDWGSQLHQVRVSDRCGRSLGDRGFAHGGEGLAELAAWILQKTGASPDAVHIAIEVPHGPVVESLMERGFQLYSINPKQLDRFRDRFSPSGSKDDSRDALVLADSLRTDRRSFRALRAVDPLVVELREWSRIAEELGQDQLRLANRIQNQLWRYFPQLLKLSDGTIEPWLLALWQLAPIPGKAARLRESTIARLLKNHRIRRVSAADIIQALRAPAIPMAPGAVESAVAHIKILIGQIEPIRRQIKQANAQLEARLEHFLSKEETAEGQQVEQRDVTILRSLPGVGKIVLATLLAEASDALRRRDYHALRCLSGVAPVTKRSGKSRQVLMRRAVLVRLRNAIYYWSRIAVRLDPRSRARYEALRANGHNYSRALRGVADRLLRVACTMLERQTTFDPNTVSRSASGQAPSASIA

SEQ ID NO: 218511 - protein, 352 aa, unidentified
MSIVAHCHPFVVGVDTHARNHVYAILDPTGILLDTREFPSTAAGNSRAIAWVARRTGADADTLWVIEGAASYGAILAGTVDAQGFAVAEAPRMDQKRRHGVGKSGGLDAQQIAATTLPLPVHKLRRPRTREGVRQGLRVLVTARESMTKDRTRCVNALNALVRANDLGIDARKALTAPQITQISRWRERNEELSLSIARTEAIRLSTRILELDEQLADNEKQLTDLVKVSEAAPLLEEIGFGAISAAKCLAAWPHHGRVRNEAAFASLAGVNPIPASSGNTIRHRLNRGGDRNLNSALHIVALTKMTHDPETRRYAEKRRAENKTDKDIRRCIKRYLARRVFRTLNASVTST

SEQ ID NO: 218512 - protein, 367 aa, unidentified
MKKVSIAATRQSRNISQQKLTIGLDLGDRNSWYCVLDEAGQIQLEQRVRTSAKELREVFGAMPRSRMAVEIGTHSPWISRLLSELGHEVIVANARKVRLIGESRKKDDRLDAQTLARLARIDPELLCPVKHRSAQAQADLMMIRARAGLVRARTGLVNTARGLAKSYGERLRGCNVRNMNAEKAEGLSSELQRALEPLLSAIEELSQQICEYNEGIEALAQASYPQVALLKQIKGVGTLIALTYLLTLEDAHRFGKSRDVGCYLGLQPGRRNSGQSEPQMHISKEGDPYLRTLLVQGAQHILGPFGADCDLRRWGLKLAERGGKNGKKRAIVATARKLAVLLHHLWVSGEVYEPLHNSSRMTVAAAA

SEQ ID NO: 218513 - protein, 272 aa, unidentified
MSVWVGLDIGSRTSVVGVRKDGRTAGQWDIAQTPAGRKAAVKKLQALKPTSIVMEATGIYYLDLAIELHAADLPVSVINPKSFHNFAKLMLVNSKTDAIDAQLLSEYGERMTPRLWTPPSTVQLELRGLGRHINRLVGHRIRAKNELHALQATATTASMLIEDQEEEIASLSNRIERFRKAGRELIAQCPRLTRQYEQLLAGPGIGEVSALAALAELTTLPETLKSSQVARHAGLDVRQTQSGTSIDKPGRLGKSGNAYLRAAMYMLSLIHI

SEQ ID NO: 218514 - protein, 343 aa, unidentified
MPHYVGLDVSQKTTAICIVDEQGRRLWRGVCATDPGAISARVLRHAGVDVKVGVETGSMTPWLVHGLRSAGLDVECLDARRVKAALQMRLNKTDENDAEGLAQIMRTGWYRPVHVKSFDAHRARALLGARAQLVGMTTRLSNMIRGVLKTFGLLPGAGRGLRFDRRVETLLEGVPEVGLIVRPLLATWRQLREQIAVFDKAVQQQVRADPICRLLMTVPGIGALSSLMYVSTVEDPSRFSRSRAVGAHLGLTPRRYQSGEIDRSGRISRCGDGLARTLMYEAAIVILHRVKRPLHLKDWAAAIEQRSGPGKARVALARKLSVILHSVWRSGEPFRWAPQAREA

SEQ ID NO: 218515 - protein, 419 aa, unidentified
MTSDFEWYAGIDWASEQHRVCLLDGGGGPAGEREFAHSGDGLAELCAWLIAMSGCEPQKIAVAIETPHGPVVEMLIEHGFAVHSINPKQLDRFRDRFTVAGAKDDSRDAHVLGHSLKTDAHGFRRLKVDDPVIVELREWSRLGDDLKQERNRLANRLRQQLWRYYPQMLELGGDDIAADWLLALWDEAPTPASAAEISTQAIASLLEAHRIRRFDAAEVLRILRQRPLTVAPGTIAAASAHIRILAERLRLVNRQVKEANRKLDRLCRKLGQAPESEAGNRPEQRDVAILRSLPGVGRINLAALLAEASEPLKRRDYHALRLMSGVAPVTRRSGKACLVIRRLACNARLARAVYHWTRVASQCDPISQKRYAALRQRGHSHGRALRTLGDRLLGLACTLLRRQVLFDPDYHCKEVAAAA

SEQ ID NO: 218516 - protein, 349 aa, unidentified
MKIVGCDLHARQQSIAMVDTETGEFTEKRLMHEGNAVRDFYASLEGPVVVGIEATGAMQWFLELLEELGIECRVGHPAKIRAAETRKQKHDRRDAEVILDLLVMKDRFPDIWMPSTEQRDLRTLLRDRHQWVKMRARLQHTLQAMALNHALRKGPSLWSGTGQEALRKLPLPRYTSQRRNELMSLYAQLQRRIQELDKQVEAQAQQRLQARRLMTHPGVGPVTALATDVFLGDASRFTTANEVASYIGMIPSEHSSGKRQRLGKMSKQGNSLLRYLWTEAGMHATGKDPELKRFYRRKLIQKGMGKARIAAARKLGIRLWIMMRDQIDYEEFCRRGKLRQIGGSPCGNA

SEQ ID NO: 218517 - protein, 509 aa, unidentified
MPGRVRKSLVPPQAWGPAAWGRARLKDYPLFSLDLGRLPPRAFTLTEKEAPMARRPRRTARPVTMPVLHPHAAGIDIGATEIYVCVPLDRDPQPIRRFGTFTEELHALADWLQQCGVTAVAMEATGVYWIPLYQILETRGVEVCLVNARHVKHVPGRKSDVQDCQWIQYLHSVGLLRASFRPPEAVCAVRSLLRHRDSLVQLAATHTQHMQKALTQMNLQLHHVLSDLTGVTGLAILDAILAGERDPQVLARHRDRRVKAAPETIAKALVGDYRSEHLFTLRQALDAYRHTQRLLGECDAEIQRRLGAFASTIDPAQHPLPPAQKSRRTGRGTPVTPHFDLRTELYRILGTDLTQVPGLQTPTVSTLFSELGADLAKFPTGKHFASWLGLCPDNRISGGEVLSVRTRSVKHRVAHALRLAAQTLSRSASVLGAYFRRMRAKLGAPEAITATAHKLARILYHLLTTHEAYDESRLAKAEADHRRRTESRLRAQARALGFHLVPATEQSVS

SEQ ID NO: 218518 - protein, 319 aa, unidentified
MQSKLTIGMDIGKAQVVVACHESAFAVLKMANAVPVLRRWLATLPAGSRLGLEATGGYHEPVAELAHSLGFTVYILNPKDVHHYARALGARGKTDRLDAQVIAAYVAEHNARLHAFVPLSADEKLLRELARRRATLVNAKSMLQQSLRVLPGFEREGRELLRAMGSFADRLERKLAEIAARSSERAALVKRLQTIDGVGTLTSIRCATLFTRVPLHGSDAAVAFFGLDPRPHDSGQHRGRRRLSKRGPSEDRRLLYNAAMSAIRTPTWRPLYQHLRNRGLASTEAIIIIARRMVRIAFAMYQNHSDFNPRLVPRPCCPA

SEQ ID NO: 218519 - protein, 326 aa, unidentified
MQGKEASEQEANVKSSAGVDVCKDWLDAHVWPCDKRLRVANTPEGIRKLKRWLQRFDLSVVIIEATGKWHRLLWRSLFQSNIPVAVIDPYKARMFAKALGILAKTDQIDASVLSRYGFMVRPAVRAPQPQTIEQLAELVTGRDTAVAEQTRLQNQLSAATVDFFRKQLRQRLARLDKSIDELEREIGARIAAEPELARRYEIVISIPGIGPIVAATLVVRLAELGGLPDKEITMLAGLAPIADSSGKHDGKRVIWGGRAAVRRMLYLAALSAKQWNPTLKPFFDRLIENGKETKVALIAVARKLVILANTLIAEDRTWQKIPPQNA

SEQ ID NO: 218520 - protein, 324 aa, unidentified
MSKRKLDVALLNDAGKVKSKALANDPAGFAALMAWMKERGADRASTHVCMESTGSYSDACATALADAGWLVSVVNPAQPKSFGQSELARNKTDEMDAALLARYCSKMAPAAWQPPSLEYRKLRSLVDRMQALKDMRQQEANRLEATADAAARQSINEHLTWLEARIAELDKDIDDHIDSNKETLGKDAKLLISIPGIGKTTAAKILGLLGDLRRFSSGKALAAFIGVTPRRCESGTSVRGRSSIGRAGHPRIRHALFMPTLVAVKYNPTLNSFRNRLVAAGKPKKSAALASMHKLVHLMHAVVCKGVAFDPGFGRLALDVQDGI

SEQ ID NO: 218521 - protein, 440 aa, unidentified
MRGLPEEILDAESEQVLARVCAIDVAKESGMACTRISGPSGRRVSRVWQVAATTNAVGDLAADLVAAGVEKVTVESTSDYWRIWFYQLEAAGLDVQLVNARDVKNVPGRPKTDKLDAVWLAKLTEKGLLRPSFVPPAPIRVLRDYTRMRVDLVRDRTRYWSRLEKLLEDALIKVSSVASTLRTVSTRDMIEALIAGERDPQALAELARGTLRGKRAALVEALTGRFDAHHGELARILLDQIDRLDTEIAKVTERIGVLLDDLDPPAPPPTPGDDASVIDARRRLAEIPGINTESAQLIIAEIGLDMTRFPTAAHLVSWAKLCPRTIQSGTSLTAGKAGKGNPYLKGALGIAAATAARGNGTFLSARYRRVVKRRGKGKALVAVARSILVIVWHLLADPTARFQDLGSDFYDRRVDTTRKINSLVRQLEALGHTVTLQPAA

SEQ ID NO: 218522 - protein, 389 aa, unidentified
MPTEVDRAETPIAIQTHFAAIFISLELSRSVWLITSLKPGSGERMSKHSVRAGDVAALLSRFSDLKQKALARTGKSFPIVTIQEAGLDGFWLHRVLKQEGIESHVVDPASIATSRRRRRAKTDKIDGEALLRALLAYKRGEPRVCAMVRAPTPEEEDRRRLSRERKVLIADRVEHVNRIKGLLFAQGIADYKPLRRDRRQRLENLTTGDGRPLPTHLKTQITRELDRLELLLDQIKLTEAERDALLAAQQTMSPAPAGRMLLDFKGIGSEFAVVLWLEGFFRQFDNRRQLAAYAGLAPTPWQSGSIDREQGVSKAGNARLRTTLIQLAWLWLRHQPHSALSRWFHERVKRDGGRGKKTTIVALARKLLVALWKYVTAGVVVEGAIMKAA

SEQ ID NO: 218523 - protein, 334 aa, unidentified
MKATRRFVNTPTGFKELEQWVKKHADASVTLVYTMEATGIYYEQIAWYLFTHAKVVSVILPNKARQYARSLGLKRKNDKIDSIGLARMGAEQNLPRWQPLSKQFYQLRTLTRELESLHQTKTALNNQLHSQSHAQLESKSTQKRLLAMIKLLDKQIESIQQEVHQLVEADSELKRKLEHITQIEGVGLMSAITVIAETNGFALIENGKQLVSYAGYDVVENQSGKRVGKTIISKKGNYRIRRILHLPSFNVVRYEGGLFKTFFDRLIDNGKKKMQAYVAVQKKLLVLIYTLWQNDIPYQPDYDLKPAFGNNEPGTSLFGSLPSRLSNISPVITA

SEQ ID NO: 218524 - protein, 433 aa, unidentified
MFLLPLFLSRGVVIMLKIVYPVCCGIDVHKKFIVATIASTNDCGITSYKTKRFSTFTKSLREFADWLRIYSCFHVCMESTGKYWIPVYNILENNFAVTLAHPKYVRAIRGKKTDKKDSVWIADLHKHGLVLASFIPPRSIRQLRDLLRYRYKLVCMKSSEKNRFHNSLTVSNIMLDNVVSDSFGKSASAIIKHLLDNPLDTDFDPVPLLHRSMLKKQDDIRLSIDGVVSDEQAEKISICLQHHDHIESCIARIDAYVENISSIFSKEIGLISSVPGIRTFSATVIISEIGVDMSVFHSAKHLCSWAGLTPQNNESAGKKKSVRVSRAGVYLKPLLVQCANAAIKDKNCSRFRNRYESIKRRRGHKRAIIAIARMLLTVIYHIIAKSVPFDSSIYEQPSSNHSPQSVTFSVEQAIKFLTDSGFSVLPRSVVTAA

SEQ ID NO: 218525 - protein, 476 aa, unidentified
MNVKTKRTKKQVNVENQAINLLSKEELNKKIEVVEKELRSYTWRELETNGKFAKNDKLSFITDDMLIVGCDIGSETHYIRAIDVRGRELSRGAFEFSNTSEGFENAKAWVLALAAKHDKKQIVLGLEPTGHYWLNLGAYLQEQRMKPVHVNPHHVKKSKELDDNNPNKNDRKDPKTIAALVNEGRFSYPYIPTGIYAEIRSLSNLRFQTQEELTRIRNRIARWFAIYFPEYKDVYGDLMAVSGRMILKEAPLPEDIRMLGVNGVNQIWRNAKLRGAGMKRAKTLVSAAEHSVGSKEAPETARIELKNLLDDMDVYATRLEEILQNIEGKLKTIPYVDKLMEIKGIGLVTVSGFIAEVGDIRRFDNPKQLQKLAGYAIVANDSGKYNGESRISYRGRKRLRYVLYEAAISLVGKNAEFKEIHEYYRTRKENPLKKMQSVVAVACKVLRVFYAILTKGVDYDPLKLISDIKRPQLQAA

SEQ ID NO: 218526 - protein, 410 aa, unidentified
MEVLYPHCAGLDVHKETVVACVRHMVNGAVTRDVTTFGTTTKDLLALSEWLASQGCTHVAMEATGVYWKPVWHILSDGDVTLVLANAAHVKNVPGRKTDVNDATWLADLLAHGLIRGSFVPDAQTQELRALLRTRKQFARERSSHVQRLQKTLEDANIKLDGVISDIIGLSGRRMIEALIAGESDPEALAALAHRRIKAPAAALREALRGRVTDHHRFLLQLHLQHIDALDAAITAIDREVGTHVEPFHTQVLLLTTIPGVSDLSAYVIRAEIGGDMSRFPTVGNLISWAGFCPRSDESAGKRRSNRMRKGAPWLKTTLTQCAWAAARKNGSYLQAQFHRLRARRGAKKAIGAVAASILTAAYHMLKDGTLYHDLGPDHFDRRAKTVQTKRLLTRLQKLGYAVQLTPLAA

SEQ ID NO: 218527 - protein, 298 aa, unidentified
MYKNFLGIDIGKDKFDVALLHIDKPNKVKTKVFTNNTKGFEKLSLWLKNKNIEFLHTCMESTGSYGTDLAEYLFNKNIKVSVVNPARIKSFGKVELSRNKTDQADAALIARFAHKIGPKDWKPAPAHVKELQALVGRLEDLYKIERQEKNRLQVTKDSSAIDSITAILDVTREQIKEIKSKIKDLIDNNPDFKNKKDLLETIPGVAEAIIMNILAYAGNIEDFNNAKQYAAFAGLNPKQHQSGNMKGRTVLSKTGNPAIRKVLYLPAITAKKWNPIIKVFIPILLSNRLYSTCPFSTT

SEQ ID NO: 218528 - protein, 356 aa, unidentified
MKPTTQTRLYTGESAYAGIDVHKRTYSVVVRVNQTEVKRWTTSAVPEKLGQQLHKFFPEAEIHSAYEAGFSGFGLHRQLQQQGIKNIVVHAAAIEIAANNRVKTDKRDARKIAEQLEAGRLRGIRIPSVEQEQARLLSRTRSQLVRQRTRSQNCIRMKAHQFGLIAPSDRRRMTHSMVAQLLEQCESEEFACSVKSHQQVWKALDQEISKLEARMTVQAAADPYEQTYRSAPGIGPISGRILANELGDLCQFANERQLFSYTGLTPAEYSSGENTRRGSITKQGNTQVRGILIEVAWRAIKQDPSLKAFFERVKARRGSKRAIVAVARKLIGRIRAAFREQVMYDIEEVEEVDTVA

SEQ ID NO: 218529 - protein, 385 aa, unidentified
MKILVGIDVAKSKHDVYAVNQETGEIIVSSMKIKNSLSGFNRLWDKIKTFIPSDVLIGMEETGHYHQNLACFFHGKGFEIGLLNPLATNRLRQTTLRKTKTDKVDCKVIVTAMGLGMHYAFKAPEPAFDDMKSLARHRFYLVGEQSKLKQKLHKAIDVAFPEYHGFFSKIHTKTSYALLKSFSTAEEILRGASETVQTVLDTYQRRYSAYKLQGLAETSIGSHSLSVSFEVKSLIRLIESLEEQIKTTENALEELLLASQKTILSIPGVSVVLGSMILGEIGDISRFGSPKKLLAFAGLDPTVYQSGQYLAPQSRQSKRGSKYLRYALLKVASIIVNHDPTFKVYYTSKKSQGKHHNVILGHVAKKLVSVLFKLLTENIEFESKN

SEQ ID NO: 218530 - protein, 314 aa, unidentified
MPKVNVYVGLDISKDHLDLHQLPQDRAARFESNPEGISKLITYLKRRKPTLIVIEATGGYETQLAAELVSAKLNVAVVNPFQVRSYAKALGKLAKTDAIDAQVLARFAQDIKPEPRTLPDEQELELKALIMRRRQLVEMLVAEKNRLHRASSTQVKQSLQRMLNTIQQQIDQLDKQIKNSVQNSPIWREKDNLLRSVPGISDKTAHTLLALLPELGKLNRRQIASLVGVAPMNRDSGLYRGKRKIYGGRKSVRNALYMATVAAIRCNPLIKPFYDRLRQNGKEFKVALTACMRKLLVIINSMIKKNIAFKQSFA

SEQ ID NO: 218531 - protein, 315 aa, unidentified
MEQSFFAGIDVSEDRLDVAFSHGDEILEFYSIPHTEDEISHLIEKFQKTSPSLIVVERSGGLERCLVACLAGAGLPVVANNPRQVRDFAKATGVLAKTDKIDARTMARFAAAVKPPQRPIKDAERQQLADRVARRRQLVHMLAQEKNRLSRSLGPVRADIQHHISYLQERLDKSNKDIDQIIKGTALYQDTLELLSSVPGIGPVTSASLIADCPELGSLNRRQIAALVGTAPFNRDSGKRSGTRCVWGGRRTVRAHLYMATISAIKCNHKIKSFYTRLIAAGKKPKVAITACMRKLITILNAMVKNQEPWQTSAA

SEQ ID NO: 218532 - protein, 345 aa, unidentified
MNKTIVGVDLAKKVIQVCIYTNRKVHSNTEMTPKEFTCWLVNSMPATIVYEACGTSNYWKQLASSHGHDARLISSRLVAVVRQNQKTDKNDALAIVQASLLPDVNFIQGKTAEQQQLQSIVRLRELSIRQKTASKNQLIALLSELNIQVSNRNGGLRATIDETLEDADNGFSPSFRQAISTAWDQYSSLVEAIDTYDDCLEKSLSYQPECKKLLKIEGVGTLNAVNLYIALGCADIGAFSKGKAAAACIGLTPIQHSSGGRAKIGSIGRGFKNTLFQSQLITGAMSIVSKVANRPPKTKKEEWLKNLIERRGKKCAAVALANKNVRAAFAILTQGTEYKAEPLVS

SEQ ID NO: 218533 - protein, 404 aa, unidentified
MFIEHKEGHYPVTGAPPSDRVVIAVDPHKASWTAAAVDSSLQPLDVIRVPVSPQGYRQLRGFAQRWSAPGWAIEGAAGLGAPLTLQLTADGIDVVDVPAKLAARIRVLSTGHGRKTDEADAVSVGVAALTATRLNTATIDAAITVLRALVEHRDDLVKIRTQTVNRLHVLLTLLTPAGAPRGLTAERAADMLRRIRPRDPAVKTLRGLAVDLVSEIRQLDRRIAKAARDIQTAVDTSGSTLAELCGIGTLNAAKILARVGSVHRFRSADAFASYTGTAPIAASSGDVTRHRLSRAGDRQLNCCLHTMAITQIARDTPGRTYYRKKRAAGKSHREALRCLKRRLSDAVYRQLLRDATTQAGAGPAGHAGATLASSAAGSHPFTSTSDKSLTGPANRNHTTGGHDA

SEQ ID NO: 218534 - protein, 389 aa, unidentified
MKIYVGIDIAKLNHFAAAISSDGEIIIEPFKFTNDADGFQLLVSKLESFDKNSIIIGLESTAHYGDNLVRYLVAEFYQVCVLNPIKTCQMRKNNVRKTKTDKVDTFVIAKTLMMQDDLRFITFFDLDMMDLKALGRFRQKTIKQRTRLKIQLTTYVDQVFPEIQYFFKSGLHQNAVYALLKEAPSPKEIASMHMTHLANLLKVNSHGHFTKEQAKELRVLAQKSVGANDSAISIQITQTIQQIELLDSQLEKIEAEMTDIMKFNDSVIMTIPGIGYINGGMILGEIGDIHRFSNPNKLLAFAGLDPTVYQSGNFQAKTTRMSKRGSRVLRYALVNAAWNVVRNNATFKAYYDAKRAEGRSHYNALGHCSGKLVRVIWKMLTDNVEFNLK

SEQ ID NO: 218535 - protein, 422 aa, unidentified
MNEQKPVVYSAYVGIDWADSKHDVCICPSDSDTREFGVILHHPEAIDAWVKGLYQQYGGPIAVAIELSKGPIVYALQKYDFIDLFPINPSTLAKYREAFQPSKAKDDPTDAELAVDMLLRHPEHFKVLKPQSTKMRALATMVEQRRRLVNERGRITNRLRSALKQYYPQVLEWYEHIDTPLFCAFVKRWPTLTQARHARANTLKQFFHEHHMYREDVVERRRRAIKAASPLTLDKAVIMPYRMQVLVLVEQLELMFKAIEQFDDEITKLASQHPDYALFRPLPGAGPSLTPRLMVAFGEQRERFSSAGDVQKLSGIAPVTERSGQKHWVHWRLQCPTFMRQTFVEWAAQTINKSYWAGAYYRQQRDKGSTYQAAVRSLAFKWIRILYRCWQTGVAYDESRYLKALERRGSPLVKRREMLDSA

SEQ ID NO: 218536 - protein, 380 aa, unidentified
MNNTYYIGLDVHKETIAIAYACGANREDAVYHGQCGGSVPTAEKALRKLAEKLGVEFRDLKVCYEAGPTGFVLARRLIRLGLDCVLMSPSKTERKPNEKIKTDKRDACKIAKIFRNGDITVVRIPPALDEAVRDVCRARTDATDDLSRSKQRLSAFLLRNGFNYTGKSKWAAPHMRYLRELVMPHDAHKIVLEEYMQAIDTGIARVARLVDKMKQLLAGWEWEPVVRALMACKGFQEVAAMTVISELGDLRRFKHPRALMAFLGLVPGEETSGAKRRQGSITKCGNSHCRWMLVECAQHFRKAPKVGSALTTRQEGQGKAVKDLSWKMQNRLHKRYVRLKARGISENKVIVAIARELSAFIWELQVKLNLPMPAAAPPGQ

SEQ ID NO: 218537 - protein, 394 aa, unidentified
MILIGIDIGKNQHTFSIVNKETGEILSSPSLFNNNQEGIQSLIRKLSSFAKSELLIGMEDTGHYHFPLLKYLLDRRYTVALINPTTTDLTRKLQGGITKNDPLDSLTICDVIGSNQRKKPYRITKVNRFDLYEQKQLTRHHHNLKEELNIYKNRLQKCIDIVFPEFNSLFRSKYGIVYMNVLKIFASAEKIANSDIRTIRKCFEYNGRGKRIQLSAEQLKTTAKGSVGIPSVAEEIQIRHLVSQIEMIEEQLSEIDKKIEEFSLQNNSPILSIPGISHFSGTSILAELGDICNYTKASQIIKFAGVAPYHYESSQFQAQHTAITKKGSRYLRKTLYQIILPVINHNKVFTAYYNKKLAEGKGHRCAQGHCVRKLLRIIYHLLSTGQSFDPALLI

SEQ ID NO: 218538 - protein, 494 aa, unidentified
MHGASAGNIRSYTEMIKSIFPRKNQSLIELFDSAGHPKKVACVALDYAKATHTALICDGSGRRLKAAFPVSNSREGVGFAIDRVENICRKHAIDLKHVFFGGEACGTFAVNFVHAIEQEGFLVLTVDPREAKQQRACFQASTDKLDLLGIAKTLIDQYGSTRTTCTNIERLLRNVTRHRNDLVTAKTAVSNRIHGLVDQLFPNFLDENQSGIPAFSETSLWLMEDRFSSKQVLARQLRTTVAQAKKKGLQKPEECIHKLKIHAASVLHPVPEWVGSLQTALHHEVQLYRNLLRCIAQADRQSALLLAKTPAAMLTTIKGIGITLAAGSGSEIGDPASQPSLRRLSSYAGIVPRVKQTGGPDGAPRHGTVSRRCNHLLKNAVVQIGNHFGQHGPEDLQEDHRRRGANGQHADFGMARRFLRVGMKLMRTGQCYIPAQLREHPDLDALKAYYLKSWPRLRDIWKKAGALEEAFDPHNPLGQWRECIQEFYQIELPL

SEQ ID NO: 218539 - protein, 335 aa, unidentified
MPTMTQPEPAPQRDPAVPSIVEITGGVDTHKDTHTAAALDSAGQLLGSRQFPTTAAGYTALLGWLRSLGTLVLVGIEGTGVYGVGLASHLRTAGVAMVEIDRPDRKTRRWQGKSDPVDAEAAARAAQAGRRTGVPKHRDGTVEALRVLRVARRSAIAGRADAQRRIKALVVTVPDTLRTVLRELGDLRLIAFCAARRPDRAAAGDPATAAVIALRSLARRHQQLTVEIDELDTLIARLTTTVNPTLCALFGVGPDVAGQLLVTAGQNPERLRSEAAFAMLCGAAPLPASSGRTHRHRLNRGGDRQANAALYRIVLCRLRWDPAPAPTPRNAPPKA

SEQ ID NO: 218540 - protein, 316 aa, unidentified
MDEILRFVGIDVSKDHLDVHVRPDDQQRRFEYDADGLTNLVKMQTELRPNLIVIEATGGYEQRVVATLAAQQLPVVVVNARRVRDFAKATGQLAKTDRLDAAVLSDFGEKLRPQLRTLPDESREELKALLVRRRQLVDMMTAEKNRQSTAPKRIRRHIQTHIDWLQKQLAGIDEDLAGTIQQSPMWKAKDEILQSTPGIGPTTSTTMLAALPELGSLNRHTIAALVGVAPMNQDSGKFRGRRAIQAGRHSVRTILFMSTLVATKHNPVIRAFYQRLLAAGKPKMVAITACMRKLLTILNAMLKTNSHWNSEHAKTC

SEQ ID NO: 218541 - protein, 344 aa, unidentified
MQMSKELYIGVDVSKNWLDLACYDGISVDWKQGHIRVDNKPSGYHQITRWLKKQETDKDHVLFCMEHTGLYGQDFRVWLEKEGLVYGMVNPRKMHRFEPDLGENDRALDRIKTDEMDSFRIAMYCEKHSRKIKASPSRLPGEAYFKLKRLMAERRQYTKQSVIYKQQLHDISAHDTEESRKRKQSGLDLLKSQIRQTDADILRIIDKDPCLKRNYDLLYSVKGVGLVVAVDTIVLTENFTLITNPRKYACYIGIAPAKKESGISIRGGNHVSRKGFTLAKADLTIVCLSAIKNDPNIKSYWQRKKAEGKHGGVVLNAIKFKIVLRMFAVIKRQTPFVEMDAYKR

SEQ ID NO: 218542 - protein, 344 aa, unidentified
MTYYAGLDVSLRTVNICVINDEGELLAEAKLASDVQDIVAFLDELELDITSVGLEAGTLTQYLTYGLQSAGYEVVCMEARQVKAALSAMRNKTDRHDARGIAQLLRSGWYSRVHVKSMQSHRIRALLSSRKAVLSKCVDLENEIRGLFKVFGLKLPAKLGHGAFDDAVRDIIEADEALSLSLLPMLDARWVLYQTFRELDNRTRKMANGDPVCQRLMSAPGVGFVTALTFKAGVDDPSRFKRSRTVAAHFGLTPRRFQSGEIDIDGRISRCGDRDVRCILYTAANVMLTRSSRWSSLKAWGMKVAKTRGHRRAVIAVARKLAVILHRMWIDETQFQWGTEAARS

SEQ ID NO: 218543 - protein, 369 aa, unidentified
MKKIVKYVGLDVHKDSITIAIADHGRNGEIRIYGKIPNTLSQIDKFVRKLTSKNAQLHCVYEAGPCGYILYRHLTNKGIDCAVVAPALIPKKSGDRVKNDRRDATKLATLHRAGELTAVYVPDQEDEAIRDLVRARADLRTAVRKVKQQINAFLLRHGIGYPGKTKWSKAHLTWLTTINMAHPAQQIALTEYLDAMENNEARVIRITKQLESFCHTWRLRPVVQALQSMRGISFVSAVTIVAELGDLNRFDKPSQLMAYLGLVPSEHSTGNSIKKGGITKTGNTHARKALIESAQAYRLPARKSISIRKRQQNVPEEVLAVSWDAQLRLCGRYRRLKARGKKHNVVITAIARELAGFVWSIARQVPVTV

SEQ ID NO: 218544 - protein, 315 aa, unidentified
MTKQVVGIDVGKEKLDVGVNGEKRVREWANDEAGREALREWVVERGVELVVVEASGGYEAAIVSELVEQGQAVAVVNPTRVRAFARAEGLLAKTDQIDARLIARFGATMKPKAQARRKQGQLELDQKVTRRRQLVQMLSAEKNRLQTATPAMQAHIGQHIAWLQSDIAALEEQISQAIAADPLWAETARRVATVPGVGPITATTLVADLPELGQLNRQEIAALVGVAPFNHDSGKRRGKRRIWGGRTAVRSGLYMPTLSAIRFNPVIKAFYQRLLDNGKPKKVAITACMRKLLVILNTMVKTGQDWNPPKTLPSI

SEQ ID NO: 218545 - protein, 346 aa, unidentified
MENIALDVHKHYTWARVENPEGKQLYENRLAHAHGTIKNFVRRWTPGSLVAVETVGNWYWVVDEIEAGGGKPQLVNARLAKLMMGSVNKSDKLDAKGMNRLQRTGTLPTVWIPSSSVRDARELPRTRMVLSEQRTQLKNRVHATLSKYGYVVDEVSDAFGKRGRQIIKELLTQLPPHTRQALQHVLDQLDHVRENLKAIEADMISTFAPCPQTTWLKTLPGVGEILAVVIGTEIGSIERFARAEQLASYSGLVAREHSSGGKFHYGAVRRDVNVYLKWAFVEAANSSILNRERCGYHHISRLYQRIKARRGHNRAKVAVARHLSEASFWMLKKGELYREPVLSTQR

SEQ ID NO: 218546 - protein, 330 aa, unidentified
MERNYIGVDLHKAFFQACAIDGTGGRLWEGRFPRTADGIAAFASRGIRGARVAVEAMGPTWAFVDALQALEVDVCVVDPRRTKLKAGFAAKTDTLDARRLADAVRRDSVAAIYIPSPAIRDLRERCRGRHHLVRVRAKLVQVIRALLLRQDAADPPVTCLYSPRGQQWLRTVGLPGAAGESLQRLAAALAAIDALARAAQAQVVAHATADPIADALTRLVGIGPVLALTLRAEIGIITRFATWPQLASYAGLVPRVEASAGRAWHGRITREGSPWLRWALVEAAIHAMRRQDATGRWARQLAVRKSVGRARVALARVLCRDVWRTWQTIG

SEQ ID NO: 218547 - protein, 409 aa, unidentified
MEQVFERCAGLDIHKATVSACVRVPRAGGRRHQEIRTFGTSTNDLLTMRDWLAGYAVTHIAMEATGVYWKPIYYVLEEGFTLLLVNAAHVKQVPGRKSDVADCAWLAQLLEHGLLRASFVLPRPIRELRDLTRLRKSLIQDRTRAANRLHKVLQDAGLKLSSVAANVLGVSGRAMLSALMGGNSDPNQLAELARGRMRNKMPALRQALTGRFRSHHAFLLGQVIAHVDYLDESIIDVSKRIEELLVAFAATLERLVTIPGVKRRTAEVIIAETGADMSRFASAQHLSSWAGICPGSDESAGKRRSGRSRQGNRWLRAALIESANPAGHTKATALAARYRRIRARRGHNRAIVAVGRSILEISYYVMSRATTYLEVGTNYLDQRHAERLKRRSLSQLQRLGYQVTLVTAA

SEQ ID NO: 218548 - protein, 418 aa, unidentified
MFKIFRKNCCGLDVHKTWIYACIGITDANSRTEYFQARFSSFSKGLQELSHWLDKYNCKEVCMESAGKFWIPVFNILEKTCLVTLAHPKYTKPQKGNKTDRKDAKWICDLFMCDMIKPSFIPPPAIRHLRDLVRYRGKLTNMLTGEKNRAQNCLTVSNLKLDDVFADVFGKSARSITEYILAHPGEPFDVAQFVDRRCKSPLSEIQAAVDGAVSPEQAVKLRQCLDHIDQLRLLRQRLEQEILRICEPFADILQLLRTVPGLGNDPMTAIAVLSEIGGDMSVFPTAKNLCSWAGCCPRNDQSGAKVKSTRISRAGSYLKPLLVQVANALIHSRKHPEFAERYRRIKARRGHKKAIIAVCKMLLTAIWNILSKLVPYSPAGFLSTSHDLPPSKSLTVAQGLSLLRRRGFILTDDPLSAP

SEQ ID NO: 218549 - protein, 480 aa, unidentified
MVKKNHSEFLVCDSETGEVLETGTEIQYTKDYGVGIDCHSKFLQISVLVKNGPSVFEYRSQFDTDWQSVVNARKWVVSVVETNSSPSVHIADNLHYCIESTSVYHVVVLKAWKGIPSVINPSIAGASKKKTDVLDAKMLAVQDLTGIWPSSFIPSAEVDQLRLLLAERNNFNVLSTRISNRINNSLLKFGYTVGRDGSVTKSVKVREMIEDQISDNPSDHYNVCPEGIPENVKCVFIEEYRQYDKYRELVHDYDKRIRSMVCSMNWETADSEIPGRQMLKILCSAPGIGEQTAILWLAKIVTPRRFRNEKALAAYCSLDPSLKVSAGKVTSTVKRGGCKELHSALCVAASNLVRRHNEPFGRWGYNIAVNSGRWKKGISAVARKLAVSLYFMSLRGEEFSYEKYRMMTEPDVIDISIEELANKEPAFKRYVRILISGNIHTTKQLVHSYYLCDLTNIKGLGKKFYGLLKEYIGNQEKYRS

SEQ ID NO: 218550 - protein, 331 aa, unidentified
MHQDFYTAVEQVDGSNPKPPQRFGKEAFLHWAAKLKSQGAEVHAVYEACGFGFGLQRELNALAIQCYVVCPQKLDEHNRRVKTDGLDAKALCLKLDRFVQGNGDALALVRVPSEQEEQLRAIHRQREQLVKTRKRLEAQGRSLMVNHGIEPVQQWWKRRAFAKLQVPAWMKELLGNSQPILLALEEKIRALSVQLQAAAPRQPRGLGLMTSVIIDREIGDWRRFNNRRQIASYTGLCPGEYSSGNTRLQSCVTKHGNPRLRAALVELAWRLVRFQPNYKPIVKWRATLAKGALATGAARKKAIVAVARQLAIDLWRIRTGRVSAQELGLIN

SEQ ID NO: 218551 - protein, 344 aa, unidentified
MQIARIGLDLAKYVFEFHGVDCHGKTVLRRTLRRGAVTTFFANLPPCLVGMEASNGAHFWAKAISELGHDIRLISPQFVTPYVKSNKNDRNDAEAICEAVGRPNMRFVPVKSAEQLAVQAVHRIRSRLVADRVRLVNQVRGLLGEHGIVIAKDIGNLRRALARIVDDNEDRALNHLVRGLMGELREELTELDVRIAGYDRKIRELYRNSEICQRLGKVEGIGPVTATALVAAVGDRGSFKNGRQFAAWLGLVPKQRSSGGRARLFGITKRGDRYLRTLLIHGARSALGRVRDKQDPRSLWLGKMRLRRHPNIVAVALANKNARIAWSLLTSDSVYDARLSVHAA

SEQ ID NO: 218552 - protein, 419 aa, unidentified
MSFKILKNNCCGLDVHKTWIYACIGITDSFKRTEYKQARFSSFTKGLQELCLWLAKYNCIDVCMESTGKYWIPVFNVLEKNNIFVTLSHPKYTKPQKGNKTDRKDAKWICDLYMCGMVKPSFIPPADIRQLRDLVRYRFKLTCMITGEKNRAHNCLTVSNLKLDDVFSNIFGKSSRSITEQILQHPGEVFDVAPFVDSRCKTPIEEIQAAVDGAISHEQAVKLRQCLKHIDELEMHKAEIEREIFRLSQKYESVLDLIRTIPGFDKNPLTAIQVLSEIGADMSVFPTAKNLVSWAGCCPRNDQSSRKIKSTRISRAGSYFKPVLVQIANALIKSKKHPEFTTRYRRIKARRGHKKAIIAICRMILTAIWHILTDLKPYTPEGFLESRPVNKEKVLTISQALNLIKQRGYIIKDDVGPVT

SEQ ID NO: 218553 - protein, 451 aa, unidentified
MEQATRFVGMDVHKDTIVVAVTATGEVGKAMAYGTFPNTTAALEKLVKRLRQAGSGPIKFCYEAGPCGYGVHRALTKMGEDCMVVAPSMIPRKSGDRQKTDKRDADGLAVLHRGGLLTAVWVPDAAHEAMRDLIRARLAAIRAVRAARQQLSAFLLRHERIYPEGRTAWTKAHRGWLVDQSFAHPAQQIVLEECIEAVRSGEQRRDRVDGYLHAQIPTWSLFPLVQNLCALRGLDTIASAGLAAAIGDPSRFASAPDFMAYLGLVPSEHSSGPKRHIGAITKAGDVHARTLLIEAAHSYRFPARITRHKLTAVEAVPEAVRTIAWKAQTRLCQRYRQMMAKGKPRQVVVTAIARELAGFVWSIACITSDPAATGDVVNGPCNEATTYLLGVEIDSDKVTAAREGAVKRGQQSPAEAGRFRAPRRQSRAGVPNRTGRSAQTKMAAAEASLTG

SEQ ID NO: 218554 - protein, 349 aa, unidentified
MREHLAGIEFVVGVDTHKASYTAAVVSRAGAELETLTVPSDAFGHKRLLAFAERAGAGARLWAIEGTGSFGRGLTTFLLEQGEAVAEIDRPARPARRNGAKTDDLDATRAAREALAREHLAQPRRRGLREALRVLARTRTTAVRAKAVAICHLKSLIVTAPGALRDQLRLLSDVRLVPKCARLRTTVAQSPEHRATIAAIRATARRILLLEAEAEDHASAIELLVQQLAPQLLAEPGVGALTAAELLIAWSHPGRVRSEAAFAQMAGVAPIPASSGQVTRHRLNRCGDRHLNCALHQIVLARSIHHAETTAYIARRTEEGKSPKEIKRCLKRFLARRLFRLLEATPILA

SEQ ID NO: 218555 - protein, 363 aa, unidentified
MALKARTLVGLDVHAAQTHAAVVDPATGEVRVVKLRMPPDEVVGFLAGLGSDVVAVYEAGPTGFGLARAARVLGVDVRVVAPGSIPKGSGDRVKTDRRDAIRLVRLLAAGELTFAFVPTIEDEHFRDLLRTIEDVRGDLMRARHRLGKFLLRRGERYPGPGRAWTAKHMNWLRALRFEDACSQATFVDYLASVELLVGRRSTLVSTLEDVVPESSHAPVIARLRCFRGIETLSAAGVCAEVGQFTRFPRPTLLSGFLGIVPSERTSDTRRRQGSITKAGPPHARRLLVEAAHHYRHRPVVAEVLARRQAGQDPRVIEISWRAQQRLNQRWEHLHHNRRKPSGIVAIAVARELSSFLWEAAVLD

SEQ ID NO: 218556 - protein, 395 aa, unidentified
MFIVGIDIAKRSHEAIIITEDGQVVRKAFSFRNNCTGYNLLLEQVRRLTLVKSQIVFAMESTVHYWLALYARLLKDGYTVMVLNPIQSHSLRELYIRKAKTDARDSLIIADLVRFGRCKASNVPQDKILALRELCRSRAYLVDMAADLKRKLIALLDRIFPEYESLFDSVFSKASIAVLSKYSTPQKVKNANLRKLTDILMESSNGHFGEWKAHQLKEAAYSSFGIDDSGGVYSTLLGMFLEQILSLTAQADSLEKQISVFFQEFNNPLTSIPGVGTVLAATILSEIGDITRFSSADKLLAYAGLDPSVKQSGEFKSNQNRMSKRGSPYLRRAIWLASTVAVHRDPMFQTYYEKKISEGLHYMNVIGHVSRKMTAVIFAVLRDGQPYQPILQSAG

SEQ ID NO: 218557 - protein, 344 aa, unidentified
MATYYIGADVHSNNTELAVEHKGKIVVRYSVPTSIPAISAILDSLQGKKILAMEEGSMAGWLYRNLHDKVDKLIVSEPRRNKLISSEGDRDDKIDSGKLAVLLRGNFLKAVHHTRDSHRAHLKHWINLYHDRVRDAVRDINKIRACCRMHGVRIPRTVVRNPVRRHAWLSELDNPVLKAQLHMLWIGYDATKEQVEIAKKQFSAYARKYPIIKSWCKIPGIGLIRATTIFTYLDTPWRFKNRAKLHRYCGVGLVRITSGKDKKGRPKPARLRLPWAVNRRIKNAVMGAAASAIQLRDNAFKEYYERMRSHGITPVNARHSVARKIISTMSAMWKTGNAYDETLV

SEQ ID NO: 218558 - protein, 441 aa, unidentified
MAMRKRDDDLVYPNAAGIDVGGSSHWVAVPRHSCGEPVREFGAMTDDLNAMADWLLACGVDTVALESTGVYWIPVFEVLEQRGLKVFLVDARQMKYVPGRKSDVQDCQWLQRLMSQGYLRAAFRPTDEVCVVRAVARQRDVLLVEQASWVQRMQKTLVQMNIQLTEVLSDVMGLTGQAIIRAIVAGERDPKALARHRHSRVKASEQDIAKALTGNWRDEHLFVLRQALAMYDDIARHLGECDAKLHGLLSKLGQSKVDLGKTPRAGSKTRAEFDARQILANWAGVDLTRINGLGLAAVMKILSEIGPDLSRFANVKHFCSWLGLCPGTKISGGKVLSSKTKRAGNRVRQALKMAAMSLSHSDSALGAFYRRLSGRMDKPRANTATAHKLARMVYFMLTRGEAYVDQGQQHYEEQQRQRSIAALKRRAAALGFAVTPTPVPA

SEQ ID NO: 218559 - protein, 408 aa, unidentified
MLEVKAERCAGIDVHKKFVMVCVMIGLAEQKPASEVRRFGTSVPELNRLKAWLLERGCREAVMESTGSYWKPVFNVLEGSIRVILANAEQVKALRGKKTDPKDCRWLAGLLRHGLVQPSFIPPRDIRELRDLTRRRRTLMREGASERNRVQKILEDANVKIGNVLTDVFGMSGQAMLEALLENKLKPEEMADLAQGRLRPKIPQIIEALEGHSMNDHHRLLLRQILKHMAFIEDMVSELDKKIGEKLRPYEKQVELACSVPGIGRDAAASILAEIGPDMSGDGPFGSCHQLASWSGICPGNNESGGKRKSGRTRKGNRWLRATLAQTALAGAAKKNSAFRDRYQRLKPRRGPQRAATAVAHAQLIALYWVLRNGKPYQESAREIDNQRRQVMIQHHLKRLTELGYKPA

SEQ ID NO: 218560 - protein, 418 aa, unidentified
MIPAVIERCAGIDVGKKFVMVCVMTGPAKEDGAAEVRKFGTVRAELVRLREWLQSEGCTHVVMESTGVYWKPVLNILEDAPEYKLEVVLANARQVKGVTGHKTDPNDARWLAHLLRHGMIRPSFIPPRAQRELRDLTRRRKQMVRAAAEERNRVQKVLEDANVKIGDVLSDVFGLSGQLMLEALVAGKSGALDVAQLARGNARKKITDLTAALEGHQMRDSHRFLITRAMRHMAFLADEVDALDQEIAKSIGNPDLGPPNELLQTIPGIRTQAAAAMLAEGGPNMKQYPSASHFSSWSGVAPGNNESAGKRKRSPTLRGNPHMKTALVESAWSASRTNGSEFQDRYRRLQPRIGHKRAIVAVAHALALRIHEVLESGIPYQKGRSAQSESSVKRLIRHHSRRLKHLHRWIKDLDSQEA

SEQ ID NO: 218561 - protein, 444 aa, unidentified
MAFSGMILIREVADAPVIMGISKPAGLKSPCGEVKIVNPLFVGIDVSSKNNVAYLMKPDGSKHSSFSVQNNLGGAKLLSERIVSALGSMQLERVVIGLEATSIYGDSLVYALREDGRLGRFQRKIHVLNPKQVRKFKEAYSDLPKNDWVDAFVIADHLRFGRINREVYMDDYRYKALQTLTRARFDVIQNLTREKQRFANYLFLKCSGMAQDKDIQNTSATTIALMEHFETVDDLANADLEELTAFITETGRGKFADPDATAKAVRAAAKGSYRLPKTVNDTVNQAMAVSIASMRALKGQVKVLDKAIEQQFEIIPNTLTSIPGIGKVYSAGIIAEIGDIHRFDSQASVAKYAGLVWNRSQSGDFEAEHSRMIKSGNRYLRYYLLEAANSVRRCDSEFRRYYDLKFKEVNKYQHNRALAFTATKLVRLVFRLLKDNRLYIPPEG

SEQ ID NO: 218562 - protein, 312 aa, unidentified
MAILSFCGIDVSKDRLDVVVLPEGRFCSVSNDAAGWAELVARLHPLTVSAIGLEPSGGYERGIIRALLAAGLSVRRINPNKLRQFARARGVLAKNDRLDARLIAEYVAIMPTRVVQRDDAVERLAEIVTMRRQLCDEHVAVENQAAHLEDAMLRRLSKRRLTRLEADIRLLDKRLAEMVATNAAFARLYDLLTSMPGVGAVLAFTLIALLPELGKLSRKQIAALVGLAPYDFDSGKLRGHRSIYGGRMPVRNVLYMAALSASRYNPALKAFSNRLAGADKKSKVIIVAVMRKMITTLNAMLRDNAAWQPQSA

SEQ ID NO: 218563 - protein, 423 aa, unidentified
MPGTVNTMETEREVVCGADIHKQFLLATILTKDGQKFQERFDSNFEGLLNFRQWLLDHDCQRLAVESTANYWQPIYFVVGKDVEFVLANAYQIKHIPGRKTDVLDSEWIAELCLKDLISPSRIFSEDDRDLRSMTRTRENYVKMRSQIKNRIHQELESACIKLSSVLSDIFGKSGIHIIRGILNGLSIDDILDRIPSKKLKAKRGEIQDAIQANISPVQIDLISLLLDSVDFLNREIESIDKQIQSLISTRQEDLKIAMSIPGMGFTSASTILAEIGNLKDFNNGEKLAAYCGLVPSVYQSAGKLITGHITKHGSPHVRRMLIEVAHAISRTKADSKLKRFYFRIKSRHGAKVAVVALARKVLCILHHLIVNREMFEDGISSKSKREKTGRSSSSTEMIIEDAIQILVRAGYLVQKRSEKEGG

SEQ ID NO: 218564 - protein, 403 aa, unidentified
MALVIIGVDPHKLSATIEVVDRREKLLGTGRFGTDQAGYTAMRAFAKTWPERVWAVEGSNGAGRPLAQRLLEAGEQVVDVPAKLAARVRLFDTGHNRKTDAHDAHSIAVVAVRTRTLRVLRPDGELEALRMLCDRRDELTRLRVQTVNRLQRLLAELVPGQAKKDLTALQAKAILASVRPRDIAGKTRRRIAVEELADLVAVEAKMKKATAELKVLVKARGSQLMDLPGVGPVVAARALADVGDIARFADRNRFASWTGTAPLDASSGEQNRHRLSRAGNRRMNHMIHIAAISQIRLDTDGRAYYRRKRAEGKKPLEAIRCLKRRISDALYRQLLADAQRAARAELGAGPGGHCGASQESSAAGLHPHTGTSDQPLPGPATTTLQPPRSTRKASQPRTLQTAT

SEQ ID NO: 218565 - protein, 392 aa, unidentified
MVVSVGIDVSKDKHDCFIVSSEGEVLADAFIIPNTMDGFHYLLQRIRHCTAPQDKIKVGLEATGHYSYNLLGFLLDNGLTTYVLNPLRTNLYRKSLSLRKTKTDRVDARTIASMLLSDAGLKPYTDTAYHNEELKSLTRYRFDKVKERAKLKSSIARLVCILFPELEKLVPSLHIASVYALLEEFPGAKQVANTHLTRLKALLETASNGHYKRDMALEIRNAAKNSIGSQMPAKSLELQHTIRLIRELDLEIDEIEEQIQSIMDELHSPITTIPGLGFRMAAMILAEVGDFTRFDSPDKLLAYAGMSPSTYQSGQLKNCYPHMEKRGSRYLRYALYNATKYVCHWDPAFADYLAKKRAEGKHYNIAISHAAKKLVRLIFAMEKSRQPYCSAA

SEQ ID NO: 218566 - protein, 471 aa, unidentified
MPRRKSPSLPPDPATAALLQTLHPHAAGIDVGATELWVCVPPSAVAAPAAPSVLAVLPPYVRRFGAFTADLHAIAAWLRQCQVTTVAMESTGVYWIPLYDLLESAGFQVLLVDPRQVQRAPNRPKTDVHDCQWIQRLHSLGLLTAAFRPEEPIRVWRAYQRHRATLIEDAGRHLQRIEKALEQMNVKLPEVVSDITGVTGMGIVRAIVRGERDPKALARLRDHRCKASAAMIARALQGTWQPEHLFALQQSLALYDYYHEQIQACDRVIEAHLQELALPEVPPLEPTRRVRRRRDNEVTFDARQRLHHMAGVDLTAIEGIEESTALVVLSEIGTDMSRWPSEKHFGSWLGLAPNPKKSGGKVKSSATRPGVNRAAQALRLAAKNVQRSTSALGAFFRRIAARRGLAKAITATAYKLARIVYALLKHGTAYVAQGLAAYETAYRERVVRQVKRKAAELGLVVVEPDTVGQPS

SEQ ID NO: 218567 - protein, 322 aa, unidentified
MYKSKEFIGIDVSKDTFDVWSPSFGHLCLDNTRNGFRKLKKQLKENSWCVMEATGSYNQLLAHYLYDSQVIVSVVNPMVIKRFIQMKLKHNKTDKSDAKMIALYAQEQPLKAWEPDPKYIEECKILNTNIALYFKQSTALKNKLHSLISKGAKGFAVQSLKRQIKQLQKEITILEGHVEILIEENEPKMLTNITSIKGIGKKTAMMLISNTFAFNPFDNYKQVSSFFGMAPMERTSGSSIRGRSRISKKGNPLVRNHLFLCSFTACEHNPQCKALYDRIVAKGKSKKLALIAVSNKLLKQAFAVAKSGIPYDPNYRSRLTIQ

SEQ ID NO: 218568 - protein, 365 aa, unidentified
MHTLNSAATLIPRTTTEAPRDHMYYIGLDVHKRTISYCVKDAAGHVHQEGKIGSTRCELDAWIKTVPQPRMIAMEATIFTGWIYDHLLQHAEKIKVAHPLMLRAIAAAKKKNDRIDASKIADCLRCDFLPECHMASTAIRDRRRTLRYRSLLVRQMVQMKNRVSGLLLETGVSYNKSRLHKVGYFADLMSTNEEVNESIRPLLKISREHIVRTQRLDYALVSSLERDPLLAERLKRLRTVPGVGPITALTWALEIGDFTRFRSIKQVISYCELCGDERSSADKVMRMPLSKQRNKHIQHVLIEAAKLAPRECHELAMVRERELQKGNPNRATLAVARKMVSYMLAVERRKQEFVPAENFKCTTAA

SEQ ID NO: 218569 - protein, 345 aa, unidentified
MQQITTIGLDLAKQVFQVHGAEADGSPVVSRKLRRADVLGFFKKLSPCLVGMEACGGAHFWAREIAKLGHDVRLIPPSYVKPFVKRGKTDAADAEAICEAVIRKTMRFVPVKSADQQAAAMVLKTRELLVRQRTQVINALRAHLSELGIIAGTGPAKTATLIEIVRDEEDARLPPAARFALSELANQIEWTKQRIDKLERAIVIEAKRDEDMRRLVTIPGVGVIIAASIKALVPDPNGFKSGRHFAAWLGLTPRSHSSGGRERLGRISKMGNSTLRSLLILGATSVLKHARHRTDASTWLAAILARRPFKVVATALANKMARIIWALLTKGGTYKSGLAIGTANA

SEQ ID NO: 218570 - protein, 421 aa, unidentified
MKFYTKPHRYYCGIDLHARRMYICVLDAEGQIRVHRNGPATPEHFLTTVAAYREDLVVAVECIFTWYWLADLCAQEGIAFVLGHALYMKAIHGGKAKNDKIDAHKIAVLVRGGMLPMAYVYPREMRATRDLLRRRCHFSRKRAELLTHIQNTASQYLLPTLGKIAYHGNRGGVAERFHDPAVRKSIETNLALVDEYDRLLSDLELHLTETAKVHDVHAFYRLRSVPGIGKILALVLLYEIQDIHRFPRVQDFVSYCRLVKCAKESAGKHYGYSGAKIGNAHLKWAFSEAAVLCLRKNPAAQRYVARLAHKHGKGKALTILAHKLARAVYHMLRRGQAFEATKFFAPTAGGGRPRRPEIDPVARGDSHDASRSGPPGDDLEGGGYLAPPEIKRREPRRRVHDRDGVTSEHAVGAAARVEEAS

SEQ ID NO: 218571 - protein, 392 aa, unidentified
MIFIGIDVAKDKHDCFITNSDGQVLFKPFTIPNNRDGFEALFQRILSVSDDLDKVKVGLEATGHYSYNLLGFLLDKGCHTFVINPLHTNLYRKSLSLRKTKTDKVDSRTIATMMMSDMNLKSYSDTSYHNEELKSLTRYRFDKVKERAKLKSSISRLVCILFPELEKLIPTLHMASVYALLSEFPSADAVANAHLTRLSNLLSKSSKGRYGKDTAVMFRNAARSSIGSYMPAKSLELKHTIKLIQELTVEIDEIEAAIKRIMDEEIQSPILTIPGISYRMGAMIIAEIGDFNRFDSADKILAYAEMSPSTYQSGQLDNCYSHMEKRGSRYLRYALYNATKYVCHWDRTFGAYLAKKRSEGKHYNVALSHATKKLVRLIFALEKSGQAYLPSA

SEQ ID NO: 218572 - protein, 429 aa, unidentified
MGRVIGLDLSKHTAEVAVLLPGAEAPQRWRFPAEPAAIRAFARQLGPEDRVALESCTNAFAFHRLLSQHSGRVVVSNPLKTRIIAEAKVKTDKIDAEVLARLLAADFLPAVWVPDSRTDHLRHLVFHRHGLVAQRTQVKNRIHAILHRNLIAPVMTDLLGTAGRAFLGKVNLPAPERELLDADLRTFDFLEGEITAAEKSFAHAALDDSEIRRLMTVPGLSMASAVGLKAAIGDVRRFKRPSNLVSYFGLNPSVYQSGLKAYTGHISRRGRSHARSICVEASHQLVRAPGPFHAFFLRLQRRKGYNVALTAVARKLVVLIWHMLTRGEDYRYAPPFRTREKLSRLRYLATGQRSARGTKPDPGLDKQAATKGEAEYLQFIKERFGVKGPEGVDHPNQKPGPRAVARSRSSGTGVRRSAKEKQRSLPKGS

SEQ ID NO: 218573 - protein, 391 aa, unidentified
MIYVGIDVAKDKHDCFITNSDGEVLFKPFTITNNLDGFNELYQKIESVTEDATKVKVGLEATGHYSYNLLGYLIDKGLAAYVINPLHTNLYRKSLSLRQTKTDKVDARTIASMLMSDVNLKSYSDISYHNEELKSLTRYRFDKVKERAKLKTSVSRLVCILFPELEKLVPTLHMASVYALLSEFPSAKHVATAHLTRLTNLLSESSKGRYGKDTAITFRDSARASIGSNMPAKSLELKHTIKLIQELDSEIDEIENEIKIIMDEINSPILSIPGINYRMGAMIIAEIGDFNRFDSPDKILAYAGFSPSTYQSGQLDGAYAHMEKRGSRYLRYALYNATKYVCHWDPTFAAYLAKKRAEGKHYNVAISHAVKKLVRVIYHLEKTKQQYIKAA

SEQ ID NO: 218574 - protein, 353 aa, unidentified
MIHLPEEREVILGVDTHLDVHVAVLIDVVGRIVATTSVPTTALGYEQLIEWARGFDRLTRAGIEGTGTYGAALARRMQAHGVQVLEINRPDRSRRRLRGKSDPTDAENAARAVLAGEANAIPKAQSGLVEAMRAVSMARRSAVKAKTQAINQLRALLVTAPESIRATLWKVKPEQCVARCARLQSLGDTPLLKALTSTLRLLARRWMSLAKELHQLDAALEELTKRAGRRLLTRFGVGPQTAATLLVTAGDNPNRLRSEAALAALCGASPLEASSGKTTRHRLNRGGDRAAHNALWTISMVRMRSDPRTRAYVTRRTAEGLSTKEIQRCLKRYIVRELYPLILADLAESIRKT

SEQ ID NO: 218575 - protein, 356 aa, unidentified
MSRDIKYIGMDVHKEAIVIAVLNSRGKLVMESIVETKASSILQFLHGLRGELHVTWEEGTWAAWLYDLLEPQVQQVLVCDPRRNALLKEGNKSDKIDAQKLANLLRTGMLRPVYHGEHGLRTLRELARSYQTISQDLNRVMNRIKALYRGWGIACGGTQVYAARYRQEWLGRIEHVGVRRRAELLYQQLDGLQALRRTLRPELLAESRKHRAAKLLRQIPCIGPIRAARLLALMQTPHRFRSKRQLWTYSGLGIETRDSAQYCFVRGQLQRAKKPQQIRGLNRNHNHEMKEIFKGAATRASCGVGPLRDFYVALLAKGMKPEMARLTVARKIAAIALTLWKKEERFDAEQLKAQAA

SEQ ID NO: 218576 - protein, 372 aa, unidentified
MQHDSAIFVGLDTSKMKVSVALAEDGRHGEVRFLGDIENTPEAVRRLVMKLARKSRWLMFCYEAGPTGYGLHRQITALGHDCAVIAPSLIPKRPGERVKTNRRDAVTLARLHRAGELTRIWVPDPGHEAVRELVRAREAAMEDLREKRQHLQSFLLRHGRVFTGRKPWTRAHARWLSELAFEHSAQHVVLREYRQAIEDAEVRLARLTQHVTEVVSSWSMAPVVEAYQALRGVAFLTAVIFVAEIGDVRRFETPRQLMAYLGLVPSERSTGERVWRGSITKAGNTRARRVLIEGAWTYRFPARLSRLLQERQEGLPRIVREIAWKAQVRLCGRYRRLRAAGKRQTVVTTAVAREMAAFLWAIGQQIEPRLAV

SEQ ID NO: 218577 - protein, 339 aa, unidentified
MTEIIRIGVDIAKNVFEVHGVNAQEQVVVRRSLRRNQVLAWFGKLPPCLIGMEACGTATHWARELSGLGHTVRLIPPAYAKAYVRRNKNDPADARAICEAVGRPSMRFVPIKTVEQQGEAVTHKARQLLIKQQTMTQNSLRGLIAEFGIVVPQGPQHISKLLVILADPEDPRIPAVARTALNAMADLLAALEQQVETLDKTIRAQVRANPIARRLDTIPGFGPILSGAIAAIVADPRHFDSGRDFAASLGLVPRQDGTGGKVKLGPISKRGNGYLRRLLVNGATAVLNGKNARNDAWRAKLLDSKPKKLAAVALANKMARIAWAVMTRQEDFRPRTAVA

SEQ ID NO: 218578 - protein, 355 aa, unidentified
MNDSKYIGLDVHQATISVAVLDSAGTLVMEAILETKAETILQFIHGLRGSLHVTFEEGTCAAWLHDLLRPPVAQVVVCDPRKNALMKAGNKNDRADARKLAELLYLNKLNPVYHGETGIRALKELARSYLALTRDTTRVMNRLKALYRSWAIPCAGQRVYAPRYRSEWLGKITEAGVHRRAEISYQQLDALRSLREQVRRDLLAEGRKHGAMKLLRQIPSIGPIRAALLIALMQTPHRFRTKRQLWAYCGLALKTSTSGEYRIVQGRLKRSKKFLAIRGLNANHNHDLKNIFKGAATRAAAVAGPFQEFHAGLVARGMKPTMARLTLARKIAAITLIVWKKGVCFDAEHLKQQAA

SEQ ID NO: 218579 - protein, 355 aa, unidentified
MTSTKYIGMDVHKESISIAVRNDAGKIVMECVVETKASMILQFIEGLRGDVHVTLEEGTWAAWLYDLLKPHVTKVVVCDPRRNALLQEGNQNDRVDARKLAELLHNNQLRSVYHGDHGLRTLKELVRSYLTITQDLSRVMTRVKAIYRSWAIPCTGKQVYAPRHRAEWLAKINEPGVRRRAEFYYQQLDALRSLRREVRRDLLAESKQHQAWKRLCGIPSIGPIRAAVLLGILQTPQRFRTKRQLWTYGGVGIETSSSADHQVVKGQLERKKKQVEIRGLNRNYNHDLKNLFKGAAIVAATKPGPFAEFYAELLAKGMRQEMARLTLARKIATIVLIVWKRGVCFDAQHLKPQTA

SEQ ID NO: 218580 - protein, 359 aa, unidentified
MFKNSTHSVGLDLGDRFSYLIILDQEGELIEESRLPTTKASFQRKFSTLQPSRVAMEVGAHSRWASHLIKDLSHDVLVANARKLRAIYHNPRKGDRADAEILARLARLDPALLSPIHHRSPQAQADLAVLRSRDAVVRSRTLLINHARSVVKSSGARLPSCSADSFAHKAAPDIPESLRPALAPILDTIASLSQQIRAFDRKIEQLCSERYPETKQLRRISGVGPLTALAFILTLENPDRFRRSREVGPALGLVPRRDQSGDKDPQLRITKTGDPYLRRLLAGSAQYILGPFGPDCDLRRWGLKLAERGGKNAKKRAVIAVARKLAVLLHSLWKTGEIYDPLHLAKKDDQAFEAIAAAA

SEQ ID NO: 218581 - protein, 395 aa, unidentified
MKANELQVAVDVGARMHRVAVGNGSGQLVAEFDLAHTAAGLAGFFTRIERLRGSRSAPVAVAMEGFNGWARPLDRQVLDRGWKLYNVNNLKLARYKEIFPAPAKTDAIDARRILELFRLRGDLAIARGVLQEIVATTEEAERLKRLTRRRRQLVNEKVRVLNRMHSDLQAVCPGLLAITAEADNLWFLSLLGAREDIRRLAGLRPTSLLALEGVGRAYCVKIQAWQREALFSHEAEWAGPMIVADARRVLALKREIAALDQLIEPLTEGCATARRLRTIPGFGPTCSGELAGEIGAIERFATEASLALYLGMAVLDHSSGTHTGTKRPRQVNARAKAAMMTAVARHMEQVPSSRAYYDKKRAQGKAHNQAIRALGRQLVRVIWSMLKHQRDYEVR

SEQ ID NO: 218582 - protein, 429 aa, unidentified
MRTESTPGARGPVFCGVDTHADSHWLYVLDWRGRRVLSRRFPADAAGYEALAGAIAAAGEPACVAMEGTSSYGAGLTRHLASLGMPVREALSPARTQRRRPGQGKCDEADAERAARAAMSGSRLGTPKSQDGWVDGVRCMLAARSGAVKARTSAINTARSLLTTAPEGLRSRFRGMGGPRLMEELPSVRSEGALGAALGALADLWAAARDAALDMERAIEASLEENCPALLAMYGCGPVSAAKLAVAAGDNPGRLRSEASFAAICGACPIPASSGKTVRHRLNRGGDRQANSALHEIARQRVMRDPETAEYAERARARGKSDREVMRCLKRYVAREAYRALMRPHEIRRPADASELVAARRAAKVSQVRAASILGTSEKYISMLERGQRELKPIRRAYEAWVEAGLPLDWDRQAFEAERKMDSKKHLAK

SEQ ID NO: 218583 - protein, 385 aa, unidentified
MRAVCGLDVHKDSVYLCILNEDGELIEKVFGVLTFQLQQMRDLLLAHHVDEVSMESTSIYWIPIWRILAPHFLLRLVNPYFIKQLPGHKSDVADAEWIAECTMKNLVSGSFVPPEDIQQLRQYDRRIFDLDEEIVRKLSKLDAVMQRCNIRLSNYVSNVDCKSYKDVVRKISEGVTDPEVLIDEIHGRIIKHHGRETILASLTGIISQAEIDVLRQLREELDLAEEHKQECLERMLKICQEKYPDELRRLQTIPGVKERTATSLIAEIGTDMSKFETANHLAAWSGLRPRNDESNKKFKSRRITHGNVYLRKNIIQCAWAASRTKSCFFSRFSYHQTQVRKKNKMKVIVAVARKLLVAVWHVIHDETDYVDFQQKQDRQLSATNG

SEQ ID NO: 218584 - protein, 339 aa, unidentified
MNEFTKKKYFVGIDISKDHLDVALLKAEELDVVKDKKVDNSFTGFAAIQNWLLKKRVKLEDCLFCMEHTGTYGLLLFAWFSQLGVDYCVEPGIKIKRSSGITRGKNDKVDARRIADYASTNKAKLKAFQMPSNLLLQIKQFLTYRDQQTKIKVSLKNSLKSHDQYQRVSGVQSISDEIQHQIEEYDQRIDMIDAQIIELIKNDESLEKNFDLATSVKGVGLVIAAFMLVTTNNFTSFENGRKYACYTGIAPFENSSGKYQGKTKVSHLANKRVKVLLSNGANSARKWDPELRAYYARKIGEGKEHQLVINSIRCKMINRVFAVVKRETPYVNTYQQKIA

SEQ ID NO: 218585 - protein, 329 aa, unidentified
MSFLGIDVSKAKIDCCVFPEEITGKKKSKIFANAESGFSALLAWLLKLDNDFKQSIVVLEATSIYHESLAYRLYDAGLKVCIVNPARVRRFAEGLSILNKTDKMDSEVLARFAALAEPEAWQPPSPKIRLIKALMARREVLLADLQRELNRQEKATATLTPDQVLRSIESSIRFIQAEIAKLDLEIKDHIDHDPDLKGDLNLLISIPAVGERTGLLMLGLLRSHEFNAASQVAAYVGLVPVQRQSGSSIRGRSSISKAGSAKVRAGLYMAAVVAVRYNPHIKAMYERLLLNGKSKMSAICAAMRKLVHLCFGVLKHQMPYQADYQPKLA

SEQ ID NO: 218586 - protein, 337 aa, unidentified
MDIVPVCVGLDYHQAAVQVCVVDEAGSVLANRSCHNDWLAIQSLAEVHGQVKGVAIEACTGAADLAEELMFHAGWSVDLAHPGYVRRMKQSPDKTDWGDARVLADLERVGYLPRVWLAPLEVRELRRVVRYRQQLANERRNIKLRVSALLRDQRVRGPRVSRWTQMWTGWLRDTTAVSPQSRWILDRHLKHLAVVVDEIEEVEAHLAEMTAHDVMVDHLLKYKGIGPVTAWTIRAEIGQFDRFRSGKQASRFCGLSPCNASSGQRQADAGLIKAGNRQLRAMLIEASHRLIRQDARWKGFAESLLRRGKPKSVVAAAVANRWIRWLYHQVQPSQLVA

SEQ ID NO: 218587 - protein, 428 aa, unidentified
MNCNTQNAKIASITEKTLIVGIDVGSETHYARAFDWRNYEYTKKPLEFSNTEAGFQTFKAWMEELAEKYGKTAVIPGMEPTGHYWFALGKFLQDSGMKPVHVNPHHVKKSKELDDNNPNKNDRKDPKTIAALVNEGRFSYPYIPTGIHAEIRSLSNLRFQTQEELTRVKNRLARWFAIYFPEYKDVYGDLKAVSGRMVLKEAPLPGDIRKLGAEGVNRIWREAKLRGAGMKRAKTLVTAAEHSVGSKEAPEAARIELKNLLDDMDVYTARQEELLRNIEEKLKEVPYTDNLLAIKGIGMATVSGFIAEVGDIGRFDNPKQLQKLAGYAIVANDSGKHNGEGRISYRGRKRLRYVLYEAAISLVGKNAEFREIHEYYRTRKENPLKKMQSVVAVACKILRIFYTILTKGVEYDPKKLLGDIRRPQVQAA

SEQ ID NO: 218588 - protein, 339 aa, unidentified
MPQPNDLSRSLAALEQDSTLIVVIEMSLSSWLVAGIVPGIERHPAKKLEPDEVALLQLLRRWSDEATKAGHVIARTVVAFEAGRDGFWLARWLRARGVEAHVIHPTSVAVSREHRRAKTDRLDTELLKRAFLGWLRGERDHCSMAAIPTLEEEDAKRPNRERESLVGERSRIVNRMKGTLARLGIRGFKPTLRKAPEQLERLHTPEDTLLPPNTLAELRRGMARLRFVADQIREIEETRLERLEQQPEEGAHAMVRLLARVIGVGIETADMLVHEVLSRNLRDRRAVARYAGLTGSPDESGIRRREKGLARSGNARVRRGMIQLAWRFLIFQKDSALAQ

SEQ ID NO: 218589 - protein, 353 aa, unidentified
MHTLGIDLHKRSSVWVLIDDQYHELFKENVACHPKYISTAIKKLPVETTDIKVALEPACGWRWISKQLLEAGMDVHIANPKKVRLIAESKQKHDLGDARVLANLLHSGYFPEAHMVSDDTYALRLLLRERAFLVGLRRSAKNRLHGIATTQGLHLIKGGNPLWKSGKKDIMSGQNMVLKEIHLLIEDLDRRIVPFDQELSLQVEKYPISSILMTMPGVGTLTALTVIAEVENFSRFPSAKHLASFAGLVPRQRSSGNKVRFGSITHQGSRMLRTAMVETAMRIRKSNAPELYSFVERLSPICGAKKARVALGRKLLCIIWKMATTHTPYKKEAVLSSSSCNTNLSNLDTASGV

SEQ ID NO: 218590 - protein, 402 aa, unidentified
MPMLSIGIDVSKGKSTVCGMKPGGEIVYAPFEVQHTREGMSELVLLLHNSGEEVRAVLESTGSYHCPVVAALLENGIFVSVVNSLRMKRFCSQSIRKVKTDRIDAMQIALYGLAYWQELQPTKLPEDTYRELQLLARQYYQMTSLLIKAKVDFNAICDQVLPGMQELMNDHAGRHKLSDFVLRYRHTTHILEMGETRFRKDYCKWAEKKGYRNCERMAVLIFATAQNGIPVLPNAPSTQIVITEAIRVLHTVEASRDAILTQMQALAKTLPEYSLVREMPCIGDTLAPRLIAEIGDVRRFHSKRALIAYAGIDAPPYQSGKFCANNRHISKRGNRYLRKTGYEVMQSYVMHKPANDPIFTFIEKKRGEGKSGKLAMVAGLNKFFRVYYGKVTELYRSLPAIE

SEQ ID NO: 218591 - protein, 326 aa, unidentified
MEHELHYIGIDTAKEKLDVDVLRPDGRHRTKKFANTTKGHDELVSWLKGHKIDHAHICIEATGTYMEPVAECLYDAGYIVSVINPALGKAFAQSEGLRNKTDTVDARMLAEFCRQKRPATWEAPHPLERALRALVVRHQALTDMHTQELNRTETAREVQRPSIDAHLLWLEAELKRLEKQIKDLTDDDPDMKHRRKLLESIPGIGEKTSAVLLAYIGLKDRFAHARQFAAFAGLTPRRYESGSSVIGASRLSKAGHVSLRRALYMPAMVATSKTEWGRAFRDRLAANGKKGKVILGAMMRKLAQVAYGVLKSGVPFDVSRHNPVAA

SEQ ID NO: 218592 - protein, 419 aa, unidentified
MDALNTSSFTAFIGIDWADAKHDVCIQGADSDDSEFAVIPHQVEKIDEWAQALRRRFGSPMAVAVELSKGPIVYALQKHDCFVIFPVNPSTLAKYREAFQPSRAKDDPTDAEIAVDLIMRHPERFKPLQPQSIEMRTLATLVEQRRRLVDDKIRITNRLRVALKQYYPQTLAWFDHIDTPLFCDFLTRWPTLLQAKRARKNTLKTFFHGHNMRFEQVLEQRLVAIKKASPLTLDEAVIVPYRLQALVFVEQLRVMLNAIKRFDTEIESVAKQHTDYALFSVLPGAGSTLAPRLLVAFGEQRERYKNAADVQKYSGVAPVTERSGKKHWVHWRWQCPTFLRQTFVEWAAQTINKSFWAGEYYQQQRAKGNTHQAAVRALAFKWIRILYRCWQTRTPYDEVTYLKALERRGSSLLTVRKIT

SEQ ID NO: 218593 - protein, 276 aa, unidentified
MNVIGFDVSKDTIDATLITTKGSKDYIKIANNTEGFENLINWIKTKRIRKIAISMEATGIYYEQAAEYLSALYTIFVINPLKIKEYAKSQFSHTKTDKADSKLIAEFANRHLDKLTPFRPSENPILYKLINLLQQLKEQQKETQNRLHTAKDIYIKSTHEAIIELLEEKIDQTSKRIEGMIKAFAGLSPKIEQSGTSVNKKGRLSRYGHRQLKRALFMPALVAYRMNVFPQLVRNLEAAKKPKMIIIVALMRKLAKIAFYIHKTKKPFDKARHQTV

SEQ ID NO: 218594 - protein, 315 aa, unidentified
MGTPSAQTLDDVGVRKMFQELEEVPMTMVGGLDVHRRQITFDYVDDDGLVHWGQIRPATRKTLRGWLGEHCPDGDGEFALEGCTGWRYVSEELAAAGLGVHLGDPAEIAVLRGPKKRAKTDRADAKLLRTLLLEGRFPQSWIPPAHVAEIRSLGRLYYTLMDERRAWQQRIHAQLFHQGCPPIKALLSAAGRDALARAQLSAAGRQYVDTALRRIDELSAEIEPLRTQLVNFARRQAGCQALQRHYGIGWLCAAIIWAEIGDARRFTSSDQLVRFAGLDITVYSSDSKRSPGHLSRQGSPELRWAAFEAAKSAAR

SEQ ID NO: 218595 - protein, 320 aa, unidentified
MTAFTPVGIDIASKKFDAAIWIEEKKYKNKVFANTPTGFHAFLLWLAPYGPCHICMEATGAYSLPLATYLYDAGYPVSVENAARIHAFGQSELIRNKTDKGDAKMIARYCHLHKPPEWKPVPVNERKLQVLINRLNTLKEMKRMEENRALTSETIVQDSIQKVIAALDEEIKEIEQAIKKHIDNDPDLKKNQALLESIPGVGEILSTTLLGYVGDMSRFSSNKALVAYAGLNPMLKESGCWKGSTKLSKKGNALLRKALYMPAITALKYNPVVAALCNRLKEKGKRGKCLVCAAMKKLLQLAYGVLKSGKPFAAEIPLAR

SEQ ID NO: 218596 - protein, 417 aa, unidentified
MKKDSNSAKQCEPSAKRGQSQVSVRQDSREVMMELVAKLTKQLDGKNSPGIEIQDEERSAACPNLNGLTVGVDLGDQWSNYCILGLSGETLAEGQLGTRREEVTEFFQGLAISRVVVEVGTHSAWVQEVIAGLGHEVLVANPRMMEGAKRRRRKNDRIDAGKLARLGRVDPKSLYPIRHRSSQVRKDLLVLRARDALVASRTELINTVRALVKTMGARLSSCSSEVFWKKADMEIPTELRETLQPLLRLIATLNDEIKSYDQKIEELASKKYRHTQLLRQVTGVGPITALAYVLTLETPLRFARSRDVGPYLGLVPKQEDSGDSQPQLGISKAGDQMVRKLLVGSAQYILGPFGPDTDLRRFGMKLCERGGKNAKKRAVVAVARKLAVLLHRLWANGEVYVPLGHVSPASPAHAVAA

SEQ ID NO: 218597 - protein, 510 aa, unidentified
MSKVIMIGCDLHDVCLVLKVADGPGPSLRKGFLTARREQLIEWIKAYAAERGASRIVLAYEASGQGFGFYDDLTEAGIECHVLAPTHLPHTAHRRKNKTDDKDAEMLLDEVRSHVLAGRKLPTVWVPIPQTRDDREVVRQRLELAEQRTRIKNQIRNLAKRWKLAFPEWFTTSGDWPRKSLHWLREVAAGTVAPLGEGVCVRMASLVNLYQALCEQRKLLDRAITRLSRSPRYRGAFRKLKLVPGVGTLSAMVFLTELGDLERFRNRRQLAAYLGLAPSAFESGERSDRKGHITRQGPSRVRHMLCQSAWAALRCSPEWRARYERIRGGSPKRTKVAIVAVMRQLGVVMWHTARSSELDELLREADRTLASAQARQKGAAPPALPSPRPSLSEAEATATRKGLAEAPLKNTKRRDRTGRSGTPSDPRFHQQTQQNPRREGASRRIENVLDQTTLHVRRSHTSTWESSQRKSARAIAKDHRKTRSFCAWDQPSQSVICLPSSDHRQREPTK

SEQ ID NO: 218598 - protein, 345 aa, unidentified
MTLFIGLDVSLKMTSICVVEDDGTLVWQGKALSEPVPLIEALSPYRDSIKLVGIEACPLSEWLYGALVESGIETVCIEVRHARRFLSSRPNKTDKSDARGIAEMMRLGHFRKVHVKSKASQMLRTVLAARDNFVHHMVAIEQSIRSLLKVHGLKVGAVHRCTFAARIESLLANAPDLRLAIEPLLEARNMMRKKTALLDRQLSQLARKDEVCKRLMTVSGVGPIISLAFKAAIDDPSRFPNSKAVAAHLGLTPRIYQSGEIDRSGHISKCGDKAMRHALYEAANSHMRVSKKLSSLRAWGVKLAKRAGAKKACVAVARKLAIIMHRMWVDEIDFRFGQTPDLATA

SEQ ID NO: 218599 - protein, 514 aa, unidentified
MARSRAPRRGKSRRCLILKPHGDLSPRVQNVGPEHFGIVAVDCAKARSRYLLADFFGRPLLEPTTVPHCRGDLQAAIDRVRQAVREHRLRDLVVAIELTGDYHRPVQRAFREAGFETRLVHPFTSKQYRQPADPGNKTDDTDLAAIFRAATQGFGLLEPNWPNLYRTIQLLRRHRRDLVEKTSLLCCQIREALHAVMPGYAECFARLWESPAPLVLARRTTSAQAVLNLGVAGLAQLARAAGLNCRRETFDKIFAWAQQAPPGQSHTAEWGLILGAREDDRLAKTQQILELERMLAGCVVQTPYVLLLAIPGINLVTVADLAGELGPMALYLNANAITGRAGLVPSRYQSDQVDRANGPLRRRGNRRLRAVLMQTADNLVQCNSYFRARADQWRRLGKDPRWVRVKVAKIFSRLGYAIVAGGRLLPHPCCQQRHYILGKLLEFHCEHHTEPAQLRRDLQTVVEQLPAKRRAEEAEPLRQQLQELTNRRRGPQPLADILPAVLARLLTRDTIDSA

SEQ ID NO: 218600 - protein, 408 aa, unidentified
MELTPLYKRVIGLDIHQGKIIACAIIEHEDGRVEVILCEFGTFKRDRRALAQWVREIAPEVVVMESTGVYWKSPYAALEQVGIQAWVVNARHVKTVPGRKTDISDARWLATLARAGLLKGSFVPPTQMRQLRLISRQRQKLGGQCSAEKNRLHKVLTDAGIRLNVLVSDIHGQGSRAMIKALIEGRPMHEVLDRKGRLRAGRDELFEALSTEQFSEAHRFVAAEILAHIEELEQRIARMDQYLLEGLKEHEDLLRLLQTVPGIDRQGAAMLLVEIGADMSVFGSAERIASWVGICPGNNESGGKRKSGRIRRGNPWVRRLLCEFAQAAARTRCGLRAKFESLMIRKGYKKAIVALAHKMLRIIYAMLSNRTHYQDSTIDYEALTVARNAPRWLKMLRKYGFITDAATA

SEQ ID NO: 218601 - protein, 362 aa, unidentified
MNYVGADLHKERTWFYVMDQNGIKISSKSIANSPDSLQRFLDTIPTPFTLAVEATYNWYFFIDIAEQYAEKVYLANSYELKAFAKRHKKTDKIDARLIADVLRKGYLPTVFIPNPEIRSLKELLRYRINLVRDRSRNIFRIKNMLDKLGMDSTGDFTTEKALRNIPLENIPEQYKYVISGYIDRIVSLSQKIHRMKIDLKLDLEQDMVIRNLITIDGLDYFSAALVKSEIVDIKRFASFNRLSAYAGLAPRVSQSGSKMACHGALLANRRKLLQWIILETVYHYIKASPSRQEKYEYLKERKGSNTAKIVMARQMLKIIYHVLKENRPYYQEKQKGLNIEKTKSSRRQPLRSMGSGVSLVRG

SEQ ID NO: 218602 - protein, 352 aa, unidentified
MRTVAEEYDRVVGVDTHAATHTMSLLIAATGAVVEHRNFPTSAAGLRRALTWIGNRTQDQACLVVVEGTGSYGAQLTEHFTQGGIVVAEAPTIPAVRLRGKDDVMESARIARAVLGLRLDQLCWPRAGGIRTAIRVLVSARGQMGTERTKIINALTALVRSVDLGVDARKALTSAQITTIAGWRTRDEDPATAACRREAIRLASRIHALGRDMATNMAELRQFTAAEVPELLDLPGVSPVVAGTILLAWSHPGRVRSEAAFAALAGTSPIPASSGNTIRYRLNRGGDRQLNRVLTTIVLVRMRHHPATRDYVARRRAEGRTTKEIMRILKRYIARQVFRLLATAHPIPAPAA

SEQ ID NO: 218603 - protein, 315 aa, unidentified
MTQINITTAGIDTSKAKLDIAVHGRTERWQVVNALPGWRALAANLAKAGVTRVGIEATGGYERGVVAHLCAAGFTVLVLQPIQVKAFGRVKLRRAKNDALDAELIAACSAAIDDPRIAPDPRLTELAGYLTFLEQLEEDIARFKTRLEHIDEPGLRRIVNSDIARLKARRAALIRDIAKRLRAYTDLARRLDLVLSIPGIGERTALALLIRMPELGRISREEAAALAGLAPFDDDSGQHKGQRRIAGGRGRLRRSLFAAALPAAFRWNKALVALYARLIAKGKAHNAALVACARKLLIYANTVVQRGTPWTEKAA

SEQ ID NO: 218604 - protein, 349 aa, unidentified
MGEVSTIGVDIAKSVFQVHGVDAEGTVVIRKRVGRARVLEFFADLPPCRVGLEACATAHQWAREFKKLGHDTRLMPPTYVKAYVKRGKNDAADAAAICEAVTRPSMRFVPIKSVEQQSVLMLHRTRDLLIRQRTQLINALRAHLAELGLVAAKGREGVQQLVAVVMECGDERLPSNARFACQAIVTQLHAAQIEISGLDKRITQIHRVNVDSRRLDTIPGFGVLLSTAVVATMTDPKAFKTGREFAAWIGLVPRQNSTGGKERLGSITKQGDRYLRRLLVVGATSVINSARARPYKYPWVIELLGRRPTKVVAVALANKMARIAWAVLAKGEPYRAPTRPWNAVVPAAA

SEQ ID NO: 218605 - protein, 421 aa, unidentified
MKKRRYRATNVKQANWGKIASLAAGQRIVFSVDVAKDDFFAALMTTDRSVIATIKWVHPQQTGEVGEHLLDLDTQNLEVVMEPSGTYGDALRGYLTGLGFAVYRVSPKRVHDAAEVYDGVPSLHDAKSAYLIGRVHLDGASAPWEELSAARRDHHALIAELDLYQGQHQDNLNRLEAALNRHWPEVVRILDLSTVSLHTLIGKYGDPSRVSQHREEAGQLLLRTGRGLLSAEKVQKVLDSSEASLGLPCTEGQRHFLQVLGQELLRTHQAMKAIEHRIVKVVEDDLVLRRMANVVGKTTSLVLETTQGTPLDYANPHSYLKGLGLNLKERSSGKHAGQLKITKRGPGKARKYLYFTALRWSNKDPVIAAWYQKKVKRDGGLKGKAIIAVMRKLALSLWYVARGEAFDSRKLFNTRALGIAA

SEQ ID NO: 218606 - protein, 398 aa, unidentified
MDQEGKTIGTQTFTNTLSGAQALEDWLLKTMNENNFSQLKIATEATSFFDLHLVDFLAQSPKLAPFQPTIYQFNPKLTRNFKRAYTEKEKTDKTDAFVIADRLRFGRLPAPYEDHQPYLPLRRLTRYRCHLVQNIAREKTYFLTHLYLKFSGFSCAQPFTSLFGATSLALITEFSPDELVNLPPEELTQFLITNSKNRFPHPDKLAQTINRAARESYRLRPALASSIDLILASILQTIRTLKEVLKEVDQAIANEFQAFPNTLQSIKGIGPVYSAGIFSEIGEINRFPKEDALAKFAGLTWRKHQSRNRVVPTGNFEAEETPMSKNGNQYLRYYLIEAANALRVHNAEYKAYYETKLKEVPKHQHKRALALTARKLVRLIYALLKKGQLYKNNYQQGA

SEQ ID NO: 218607 - protein, 353 aa, unidentified
MPSKADTAVARTIGIDTGKNTLHMIGLDEKGAIVLREKVSRTRIAARFVNVPPCLVGIEAGMASHHIARELVALGHEVKQVPPGYSKPFRQGHKNDFRDAHAVAEAVERHSTRCVPIKTDEQLDLQALHRVRSRLISNRTAVTNQIRGFLLEHGIPVRQGHHFLRRQLPQLLGTRTDVLSPRMIRVIGDLMSDWNYLDERIERVTDEIESLARADEGCQQLITVPGIGPIISSAMVAAIGTGAAFCKGRDFAAWLGLVPKQMSTGDRTILGRITRRGNRYLRTLFIQGARAILLRPTGWAKHSFGSWLAAAARRMHRNVLAVALANKLARIAWTVLAQARCYEARVEPRVEPA

SEQ ID NO: 218608 - protein, 343 aa, unidentified
MQIVSVGIDLGKTTFHLVALGVAGKVLARKKFTQRQLLTYTANMQTSLIGLEACSGAHFLGRALRKQGHDVRLIPAQFVKPFVKSNKNDFVDAEAIAEAVERKNMRFVPIKSDDQLDLQAIHRVRDRLISRRTAVINQLRAFLLERGLVFAKTPAKLRIALPDILENADLDLTTQMRNLIDLLWNEWKTVEGQIEGLSLELERISAADPGCTRIRQIPGIGPIVATAIVAAIGNGAAFRKGRDFAAWLGVVPRQYSTGGKARLLGISKRGNVYLRKILIHGAQAAVLRIKRDRAPIGAWLDGIDTRAPKNVVVVAMANKLARIAWAVLSSGEDYRPNSSMVTA

SEQ ID NO: 218609 - protein, 351 aa, unidentified
MRTSQKITGIVTTIGIDIGKNTFHLVGFDQRGAIILQQKVSRSQLERRVANIPRCLIGMEACSGSHHIGRQLAEIGHDVRLIPAQYVKPFLKGHKNDYRDAEAIAEAVQRPTMHFVTIKTPEQMDLLALHRVRSRLVGRRTGVINQIRGFLIERGITVRQGPMPLRKALSEILSSDTGALSPRMVGLIADLAQDWRRLDERIAAVSAEIEALAEQDDSCQRLMTVPGVGPIISSAVVAAIGNGTGFKQGRDFGAWLGLVPKQESTGDRTILGKISKRGNKYLRTLFVQAAHVVLERRPSAAMRGLWPWVEQASKRLHRNMLAIALANKLARIAWAVLARGGTYQPRITHAA

SEQ ID NO: 218610 - protein, 451 aa, unidentified
MTKSKRRHPERDFTPTHPNAAAIDIGSRMHVAAVPPDRDTEPVRAFGTCTGDLQQLADWFERCGVRTVAMESTGVYWIPAYEMLEQRGFEVVLVNARDAKHVPGRKTDVSDAQWLRRLHEYGLLRASFRPKGELAALRAYLRQGERLLDYSASHIQHMQKALMQMNVQLHHVVTDMTGETGMRIIRAIISGERDPAVLATHRDRRCHASEAEIAAALAGNWREEHVFALGQALELYDAYHAKVAECDLRIEVVLRRLRDAAAKPVGRLPPARHRDKTANAPAFDARGALHAVLGVDLTQIHGLGPSLALKLIGECGTDLSAWPNAKHFTSWLCLAPANKISGGKVLSTRTRRSGSRAAALLRLAAVTVGRTQTALGAFYRRLSARVGKAKAVTATARKIATLFYNTLRHGIAYADPGASYYEDKYRARVLANLRRRAKSLGYMLNEMPAPA

SEQ ID NO: 218611 - protein, 327 aa, unidentified
MTTVPHDEVRVTVGVDTHEDVHVAVAVDQLGRWLAETWIATNTGGFARLVGWASEFGVIDRFGVEGTGSWGAGLARWLRAEGLVVVEVDRPKRKHRRHGKSDAIDAEAAARAVLSGEATAVPKTGDGPVEMIRVLRLTRRSAVKNRTMTANQINALVITAPDALSQDLRPMSTRRRVAVAAKFRTGDEPTTVLDATRYALRELARRYQHLTEQITRLDTQLDRLVAETAPELVAKVGVGTHTAAALLVTAGDNPERLVREGSFAHLTGTAPLDASSGKQQRHRLNRGGDRDANCALYQIALTRSSVDEDTKLYLKRLRGQPVAATAS

SEQ ID NO: 218612 - protein, 342 aa, unidentified
MQVTTIGLDIAKNVFQVHGIDANEKVVVRKQLRRGKLIAFFEALSPCLIGIEACATAHHWARELTKLGHEVRLMPAKDVKAYVKRNKNDAADAEAICEAVRRPTMRFVRIKSPEQQGQLMQHRTRDLLMRQRTQLINALRAHLAELGIVAAKGEGGVKELLAIVADEEDTRLPIDARASVIVLATQLEAVQTVIGAIEKRIKMQHRANEASQRLETIPGIGVIGATAIAATVADPTVFKSGRDFAAWIGLVPRQDSTGGKQKLGPISKQGDRYMRRILIVGAHSVLRRAQQNPGKYPWLTQLLARRPFKVVAVALANKMARVAWALLAHGGTYRAPELAEAA

SEQ ID NO: 218613 - protein, 339 aa, unidentified
MNILFLGIDLAKNVFQLCGLNQAGKPVYTKRTGRKELLQTLANIPACLIGIEASTGAFYYWQREFEKLGHKVKVISPQYVKPFVRGQKNDGNDAQAIAVALMQPTMQFVPPKSPEQQDIQALHRARQRIVNHRTATVCQIRGLLLDRGIPIGSAVSRARRAIPLILEDAENGLSSRMRRTIAELYDLFNDLGRRIHFFDKEIETVFRQSEACQRIAKVKGIGPETATAVVAAIGKGTEFKNGRHFAAWLGLVPRQHSSGDRQVLMNMTKKGDKHLRTLFIYGARAVVRVATNNNDGHMNQWVNQLKERRGFNKTTVAVANKNARIIWSMLRNETGYQVV

SEQ ID NO: 218614 - protein, 485 aa, unidentified
MTTVYLGIDVSKGYADFVAMNEAGSELGGWGRFDDTRAGHDQVQARVAAVLARAPETQVVVGVESTGGYERNWLGLCHRLSRSGWALTAYRLNPLVVKRYHERQLHRTVTDRVSAAGIAAYLRAGRRRQDQLWVAGELEGALTLYRTVRRLVRLQADLQNQLQALLSRCHPELVAFLRGGLRQWVLALLRQYPTAAALAQADPAAVARIPYVTPAAATRLVAAAAASVADQTDPATGRAVMVLVDEIAHLRLQVRRLQTELAEQLRADPGVQIIDSIPGFGIWSAICLRLELGDIHRFPRPAELVAFAGLDPQHHQSGDTTINRGISHRGQAGVRAILYPVVRAAIRCNPAVGALYTRLRARGKTDAQAVVAGMRKLLHLVFACWVQGVAFDPSRWEQVAGKAQEMAQRAAMALTPAVAVPLATSLAAPVSKREAKRRKAAHSPQGPCGVAPQKRPEFERPPSAPIIPIRTPSCQGDHAPDFSSR

SEQ ID NO: 218615 - protein, 351 aa, unidentified
MEKAEAVVAFVGIDAHSEHCSLKAVGRQGESLLSAEVVTQERRVRAAVRRLPRPVWVMVESSSLAPLLKEWLDPMVDRVIVCETRENRWIARSDDKSDPADADRLARLLRMGEFKPVHVPERAGQERRELVRLHRKAVGDVTRLKNRLKAKYREHGVAVKGEKVYTVRHRASYAQQVKQPAVRAMLAVMSEQLDGAQAAQMKIWGQLFARLRTLPEYRLLKTIPGVGSRLGAILVAGIDDPGRFANKRKLWKYSGLGVRRQWSSHPEQARVSGSPSGNRMMKYAALSAATNALRGKNRFSRHEAAMLEQGIDPAMAKRTVARQILATALSMLKSGTVYREPEPGTKPGGGG

SEQ ID NO: 218616 - protein, 449 aa, unidentified
MKNSDLKTRGLPVINTRAAGIDIGSRFHVVAVPADLAQDPIQTFNAFTADLERMANWLVSLGISTVAMESTGVYWIPVYEILETHGLHVVLANARDARAVPGRKTDVNDAQWIQRLHSCGLLRASFRPDREISALRSYLRLRERHLDYAAAHIQHMQKALTHMNLQLHHVVADVTGVTGMRIIRAIVAGERSPSVLAAMSDTRCKAGIDVIKAALVGNYQPEHTFALSQALTMYDAYQAQLLICDQQIAQVLIKLSQEKVRPSEPLPKPRHKTRQPNALNFDVRTLLYQLVGVDLTQIHGIGPFLALRLVAECGTDLSRWRTCHHFTSWLTLAPGCRISGGKVLSAHTRKTKNRVTAHLRLAAVTVGRTSTALGAFYRRLAARIGKAKAVTATARKIAILFYNAMRFGMNYQDPGADQYEQRYRERVVKGLHRRAAEFGFTLQPTEGVS

SEQ ID NO: 218617 - protein, 367 aa, unidentified
MMGWMAPLRHRRAKLVFSRITRNREPSMSEITTIGLDLSKHVFQAHGIDAEGTTVLRKRLRRGQVLAFFSRIPRCVVGLEACATAHYWARELGALGHEVRLMPAQYVKAYIKRNKHDAADAEAICEAVQRPTMRFVPVKTTEQQATALLHRGREQLVRQRTMLVNALRAHLAEFGMVAAQGLRNVGELIAIVRDDGDTRLPDVARQVLQVLADQIEQIETAVAGLERQLLAWHKTNPVSQRLASIPGIGPIIATAIATTVADPKVFRSGREFAAWLGLVPRQNSTGGKTRLGGITKRGNRYLRRLLINGASANLLRSKATKADPWVIGLRRRRPPLVVAVALANKTARIAWAVMLRQKEYQPRAVAA

SEQ ID NO: 218618 - protein, 352 aa, unidentified
MNVNYFGKKVYIGMDVHKKTYAITAICDGVIVKKATLAANSETLRTFFTNHFLGAEITCAYEAGFSGFHLQREIASWGCACLVVNPGSLEVASRDRVKTDKRDSLKIAEHIAYNRVKSIRIPDIETEGSRKLSRSRSQFVEERSRVGVQIKSKLQQLGLMRYDDDRVMSKKYIGEIESLKVSSSVKFVFQEFCSLWRRLDDQISAFDERLAEQAQVDSKIEAVYRSVPGIGPVTSRVLANELGDMSQFENEDRLFSFVALTPTENSSGEATRKGHISRQGSPRVRHALIEIAWRAILKDEALRHIHERISCRAGAKRAIIAVARRIIGRIRACFRKGEIWKLNFEHKLLAAA

SEQ ID NO: 218619 - protein, 315 aa, unidentified
MTQIICGVDVSSTSLEASIGAQGAVSSFPNSQDGIAALAGFCRKHNVTLAAMEATGGYERQAFALLHAEGIGVAILNPRAVRQFASGMGRLEKTDSIDAGMIAWFAEVKRIRPMAPASSAQLQLRALVTRLRQLTAMRTAQLNQQRLIDEPRVLASFDELLGVLNRQIDTLAQEIAALIDQDPLWRELDRAFRSIKGVAGRTVARLFAEMPEIGAVSNKAASKLAGLAPLASDSGKHQGKRSVRGGRAAVRDILFIVASVAGRYEPDFIAFRQRLAQQGKPPKVVRIALAHKLLVRLNAKARDVRRKSQPALLYA

SEQ ID NO: 218620 - protein, 349 aa, unidentified
MNEYIALDVHKRYSLGEREEVRSGRAKQCRIKHERGAVVRYLCDAKPGTVVALEATGNWYWIVDEIEQAGMKPVLVNAHKAKLMFGCVNKTDKLDVHGLNVLQRVGTLPTVWIAPGEIGDLRDLPRTRMVLIQWRTRLKNRIGATLAKYGLEVGYSDKFGAGGRKELEGQLEFLPPQTRLVTEELLEQWDVVGMRIGEQERRMGQLVEQTPQIARLMTLPGVGKILGIVIALEIGDIRRFGRAEQLACYAGTVPRVRASGDRVRMGRLRADVNRYLKWAYIEAANSVCLHRASHPRRHVSRLYERVARKGHPKAIGAVARHLAEATFYMLTRQEDYCEPASRQKLCCGA

SEQ ID NO: 218621 - protein, 312 aa, unidentified
MDAIVVGIDVSKERLDVAVRPTGETFVVSRDAEGLDALIAKLTPLAPVAVAVEATGGYETVVAASLAAAGLAVVVVNPAQVRSFAQALGKRAKTDPLDAGVIAHFVEATRPQIRPLPDEETRLLADLVARRRQIVAMIVAERQRQKRLTNRRLQKSIARLLAALQKELSSLERDIDETVRGSPAWREKEDLLASVPGVGKTIARTLIAELPELGTLDRRKVAALVGLAPWTRQSGKWKGKSFIGGGRADVRSVLFLGAMVAARRNPDLKAFRDRLVAAGKPKLVALVATARKLLTILNAILRDQKPWRQQTA

SEQ ID NO: 218622 - protein, 349 aa, unidentified
MVTIGVDPHKKTHSAVAVDAVGAALAARTEPAKRDGFGGLLAWARGLCDAKRVWVIEDCRHVSGALERFLLDHGEIVVRLPPRLMAGARQSVRERGKSDPIDALAVARAALREGIDTLPAARLAGVELEIRQLAVHRQRLVDARTRLINELRWQLHDLWPEWEIPKRVLIGAGWQAQVARRLKRAEPTARVRIARDEIRRIRDLTRTINELHHELAALVAQVAPQLLTEHGLGALTAAKLLGEIAGIDRFTSDAQLARLAGCAPIPASSGRTDRHRLDRGGNRQLNHAIHTLALSKIRHDPQTAAYIAKQRHNGKTNREAIRCLKRHLIRRVYNLLRDPAHAPTTLCLT

SEQ ID NO: 218623 - protein, 464 aa, unidentified
MTKSSKKSQKIQSISNFKLAPMNPCVAGIDIGASSVFICIGFTDGHQEIREYLTFTEDLKNMLTWIQQNSIQSVAMESTGVYWIPVYDILAQAGVEVMLVNAYYLKTVPGRKTDVKDCQWIQQLHAYGLLRGSFRPDDEGVMLRGYVRQRSRLFELASQQVQLMHKALVQMNLQLNHVVSDITGATGMNIIRAIVSGERSPAVLAKYRDYRCKKEEREIAKALDGNYRQEHLLALEHALAAYDFFHRQAFECEEAIEQMLAKWEKQIESTPVQNPCQERSSKNGRGIQKKTKYNLSPYHFEAESSLEKILHVNLTDIPGLDVNGIMKILAEIGLDTSKWSSVKHFTSWLGLCPGNKISGGKILSGKTKPSANRAAQAFRLAANSLYSSKTALGAYFRRMRARLGAPKAITATAHKLAKILYTMLKERKSFIEVGQAVYEQAYKERQLLSLQKRARELGYGLVAC

SEQ ID NO: 218624 - protein, 343 aa, unidentified
MQDTTISVDIAKSIFEVAVSDRPGHVREQHRLSRARFLRFFAERTPVRVLLEACGSAHHWARQLQALGHEVVLLPPHAVRPYVSRSKTDRSDARALLEAARNEDIHPVPVKSCSQQAITALHRLRSCWLSARTARINIVRGLLREFGVTIPVGARQVTPQLCRVLDQDDSPVPSALHEPLMSLATEIGELEKRISDTELQLRRLSDQIPVISLLKTIPGVGPLSATALVAFVGDVHRFPTARHFASYLGLTPREHSSGLRRRLGAISKRGDVYLRMLLIQGARAVLWASHRSSRKDRLRLWAQRVHASRGPNKAAVALANKLARLVWAVWRFGTQFQEVPAAQ

SEQ ID NO: 218625 - protein, 495 aa, unidentified
MRGRSAGVLALAKRSKIQVELAFDERARGEAASRLAGGTEADAASAEFESPAAKAGPSMEAIVERDNLQEALARVKRNKIPWGVDSGRLWEQTEVVNPLNPWRRPMSLDHRCEEPTAIRSNVGAIFVSLELSRSTWLITSLSPASGEKISKHGVPAGDIAAMLARFSGLKQKAFARTGKSFSIVVIQEAGLDGFWIHRVLQSEGIESYVVDPASIATSRRRRRAKTDRIDGEALVRALLAYKRGEPRVCAIVSAPTPEAEDNRRLCRERKALTAERIQHVNRIKGLLFSQGVSDYEPLRRNRRQRLDELKTGDSRPLPMHLKAQIGRELDRLELLLEQIKAVEAERDALLASAKPTEETSALPAMLVGLKGIGPEFAAVLWSEGLYRIFANRKQVAAYAGLAPTPWQSGTVAREQGVSKAGNPRLRTTMIQLAWLWLRHQPHSALAQWFKERVKRNGGRLRKMTIVALARKLLVALWKYVNAGVVIEGAVMKVSS

SEQ ID NO: 218626 - protein, 318 aa, unidentified
MNTNTLQNINVGVDTGKSQLDIYVRPLDIYFTVPNTDKGISDAIKIIKKHKPQRVVIEATGRLEMPFILACDKAKLPYVVANPLRIKRFAEAIGQRAKNDRLDAALIAHYAERVQPELTKLKSENIRLMSDLVTRRNQLLTMQTMERNRLQILPKNISSTITPILTALKNQLEKVEAKIEKLIESCPEYQAKSTILQSMPGVGKILAASLISNVPELGFITNKQASSLIGVAPITRESGRLKGKRMIKGGRPQVRTVMYMAMMSAIQCNPVFKATYERLLAAGKPKKVAIVACMRKMVVTLNSMLRDGAMWDKDSVKN

SEQ ID NO: 218627 - protein, 366 aa, unidentified
MPSMPQRDLPAQTDTSNETVILGVDTHRDAHVAALLDVQGASLGHRSFPTTATGYRHLLQWAQQHGTLKRAGVEGTSSYGTALTRHLQAAGVQVLEVNQPDKAHRRRRGKTDAIDAETAARAVLSGRATAMAKSGDGPVEMVRMFKMAKDSATKSRAQAINQLKAVLVRADPTLRESLTGLSNPRLIGQCADLAPATPTAPSTAAAYTLRSLARRILQLTAEIDDLNAQITTAIAAHCPDLLNCYGVGPDTAAALLIAAGDNPERLRSEASFAALCGASPIQASSGKTQRHRLNRGGDRQANSALYTIAIARLRWNTRTRDYVARRQTQGKTRREAIRCLKRYIAREIYQLITNPSPPNRALPSTA

SEQ ID NO: 218628 - protein, 464 aa, unidentified
MEVLNIGVDLGVTAKHHAEVINSEGIKICSSVTFPGTKEGFDMVSKHALENVDKETKLRFICEPTSMSWFPLAVYAKRYGHEMTRVKAQKSYALRKYYSKHCKNDKLDAKALAMMPIVDRESIEQLYLPDKITNALDRRCRQREKIAKEIASIKTRIKSLYHWVMPGLTDCFEDPYGKRAKAFYKKYTNPFNVKHLGIFRLCRVLEKAGRQQASEGLAERVYEVAIKGCDLYDRSDEYIDFDELQKEVDCELELLDSHEKVQKKVDEAINRLYEGAHPTKNIETIPGIGETLGSVFLGIIGNSERFSSQSKARGYSGMIPKQKDSGESSKKGLNITKDGPARYRRALYLASDTARQWDPQLAKVYYDQMVYKGNCHNQAVCAVSTHMVGRIIRILKDKRPYELRNLEGTLITKKEAKTLITREFTVPEEVRKRTRSRRTKKGYKRDQNRGIAKMQSSGSAKYPS

SEQ ID NO: 218629 - protein, 310 aa, unidentified
MDAVFVGIDVSKEWLDVHVLPSGEAFLVARNEEGLAALNERLMGIGAAVIALEATGGYERVATAALAGAGLPVVVVNPAQVRAFAQALGKRAKTDPIDAAVIARFVAATRPEIRPLPDAQTQALADLVARRRQIVQMIAAERQREQRATVPRLQRSIERLLSALQKELSELDTAIDEAVRGSPLWRDKEDLLRSVPGVGPVIARTLLAELPELGTLDRRQIAALAGLAPWTRQSGKWKGKSFIGGGRSSVRAALFVGAWTAGRFNPALQAFRQRLLNAGKPRLVAVIAVARKLLTILNAIIREQKPWQPA

SEQ ID NO: 218630 - protein, 315 aa, unidentified
MTTKAEVHVGIDVSKDRLDLAVLEGKRIEQYANTAGGIKELVKEMMKLEPAIIVVEVTGGYERAVVNALFEAGLPVARVSGYRARQYARAKGLLAKTDELDALNLADYGKHVQLRLFEAKSEQGQWLSGKLARRRQLGEMVKAEKNRLRLVYGDTGPSIERVIEFLQGELKQLDEEIRAYVDNDAEWLEQEQLLRSVKAVGPVTAVTLLAELPELGKLDGKQIASLVGLAPINQDSGKRSRYRKTGKGRPSVRSVLYMAVLTGIRYNPVIKKHYDGLVARGKVKKVALTACMRKLLIILNAMMRDQQPFRAVVTV

SEQ ID NO: 218631 - protein, 360 aa, unidentified
MNNVTLLAIDLAKNVFQLYGTDVRGKTVFERRIRRDKFLDFVKTVNRCNIYMEGCGSANYWGREFIKLGHQVKLINPKYVKPFVKRNKNDRNDSYAIASAARDPKMTFGEVKTEAQQDVQSTHRIRSLLIGQRTALANQVRGFLAEYGIIIPKGVTHVRKQVPVILGNNETSLSRLTLNNLLELYQNLVQVDEKIERYNKIIENLFDGNEVCERLEKIPGIGKLGATILASVLGNGSGFKNGRHFAAFLGLTPKQHSSGEKESLLGISKGGDTYIRTLLIHGARSVLLYSSKKTDALSMWLKRIKERSGINVAAVALANKMARMALAMVKGNCDYKPNHKPRLQNALIGALPQTPEYLET

SEQ ID NO: 218632 - protein, 382 aa, unidentified
MTGTEPHAWGTGLMDDIIFVGLDVHKATVCIAVAEGTRGGEVRQLGAFENRPEILSKVVSRLSKGGRRLSFCYEAGPCGYGLHRLLTGYGHECVVVAPSLIPMKAGDRVKTDRRDALMLAKLHRAGELTAIWIPDAAHEAMRDLVRARATAVRVLVKARQHLQGFLLRHERIYRGARAWTLAYRRWLSTVHFEHPAQQIVLQDYIHAVQDAETRRDRLTQQIEELLPNWSMAPVVAALQSMRGVALIVAVTVVAEVGDFRRFANPRQLMAYLGLVPSEHSSGRSVRRGGITKAGNALARRVLIEGAWTYRMSARVSRKLYDRLEPLPAAVRDIAWKAQLRLCARYRRLAAIGKPKVVVTTAIAREMVGFIWAIARLAQPALV

SEQ ID NO: 218633 - protein, 362 aa, unidentified
MRIIGCDLHARQQTLAMLDTTTGEIVNTTLLHEGDGVREFYSQLPRPVRVGVEATGSMHWFLNLTGELGIECQVGHPAQIRAAEPRKQKHDRRDADLILKLLVENRFPGIWMPSPELRDLRALLLHRHQWVRMRTRIQNALQAIALANGLRRGSSLWSREGQNEIASLPLAPHTAYRRSALQAMYVKIEAEIEELNHRVAEQAGHRSGARLLMTHPGVGPVTALATEVFLGDPQRFADGKAVASYVGMIPREYSSGGRQRLGGLTKQGSPLLRFLWGEAGAHAARRDPELQRFYRRKLVQKGLGKASVAVARKLGIRLWIMLRDEIDYHEFCRRGQKQQKSGEACAGMPETRYGANRHRPVD

SEQ ID NO: 218634 - protein, 337 aa, unidentified
MIIIGCDFHPSFQQIAMLDTETGATEEHKLMHTSGEAESFYRKLASPAIVGIETVGNDQWFVQLLQKLGHEVRVGDAAQIRASYVRKQKTDRRDAKHILQLLVEGRFPRIWIPDAGMRDHRQLLMHRHKLVQIRTRVKNELQHLMLNQGMQKKQKLWSTEGRAALTSLPLEPWTDRRRKDLLNLLAMLDAQLESLDDAVTRVAKEYPGVPLLMSQPGVGAVTALAFVLTLGDVHRFPRGKQVASYLGLVPREHSSGGKQRMGGISKQGNRLLRFLLVEAANIAVRFDPELRKEYLHRCHQKHFTVAKVATARKLAVRMYWMLRTQTPYPQVLSSRVA

SEQ ID NO: 218635 - protein, 347 aa, unidentified
MLIIGCDFHPGFQQVAIFDNRTGEIQEKRLQHRAEAEQFYGWLAGQEVRVGMEACGHYPWFERLLAELGIELWFGDAARVRASVVRKQKTDRRDAEHLLDLLREDRFPRIWVPSLEVRDVRQLLVHRHKQVQARTRTKNQLQAMALSCGVQKKRKLWSKAGREELEQLPLLPYAAQRRKRLLEALDSLEAEIVELDQRVHEEARQRPEAVRLMTHPGVGPVTALAMVLTLGPAERFGSGKQVGSYFGLIPSEDSSGGKQRLGKISKQGSSFLRFLLVEAGQTAARYDPQLKRFYRRLAVRKNRGVAKVAVARKLATRLYLMLREDWTYAQLCQAVMQVSPSHSVAGE

SEQ ID NO: 218636 - protein, 398 aa, unidentified
MDLPVYYELETNNGNRDYRIQIGGHYMNYNTVYVGMDVHKESFTLCSCKYEDEKASHYQRTPASYKNVLRYLAFLRTIYGEDTRFVCGYEAGCLGYSLYHQLENFNVECVILAPTTMLEQRSKRRIKTDKRDAEIIARSLAQHNYSPVHIPTETDNQTKEFIRMRDDHKAELKKIKQQILAFCLRQGYQYDGSGNWTAKHVKWLRSLKTEGLYKEILDEYLLTYTILTDKLNRLDQRIEELASKEEYKESVSKLTCFLGIKIHTALSVIVEVGDFQRFVSARKFAGYLGLVPGQHSSGDDRNGLGITKAGNTHVRRLLVESAQSYTRGKIGYKSRVLRSRQAGNSPQIINYADRANERLRRRYYQMVLKDGKKYNIAKIAVARELACFIWGMMTDNIY

SEQ ID NO: 218637 - protein, 398 aa, unidentified
MKERQNYIYIGADVHKEQHTAVVINCWTEVLGDFTFASKISEYPKVMEEIEKIIPKGLIPIWGLEDVGGNGRSLAVFLKENGYIVKEVNPSYSSSERKNHPTTKKNDTWDAECIANVLVKKVNELPDANPSDLYWTLKQYVYRRESMVKALTTTKIQLHEQLVKNYTSYKKFFSEIDGNTVLAFWEKYPSPSKISGVEAKDLRLFLLKVSNNACSMKKAESILEFIEGDGDTFREYQKDRDELVKSYVRNIKFYKKEIENLNKGIKTILSKLNYKLETLTGVGTVTAGQLIAEIGDINRFKNPDKLAQYSGIAPTRFSSAGKGKDKKSKQGNRNLNGVLYFLAMQQIQITKCTKQPRNPILYEYYQKKLTEGKTKVQALICIMRRLVNIIFGMMKNKT

SEQ ID NO: 218638 - protein, 337 aa, unidentified
MEYFAGLDVSLEETHVCVLDHEGCVVHEAKTASTPEAIVDELAKAPACRGVVFETGRMAPMLYHGLREYGVPVVCVESRQAYQALKSLATHKSDRNDARGLAHLARTGFFKPVHVKSLPAHAVRSLIIARKKLVSQRVMLENQIRGLAVVFGVRLPRGLSPAFIEQALRASEGIDGLSAAMRGLAAVRAAVLSAVAAIDRDMKKIANACDACRRLMTIPGVGVLTALAFTAAVDDYQRFRRSRDIGAYFGLVPRRYQSGEVDYTGSISKCGDRRVRTLLYEAANVMLTRYKGPLKLKDWALAIAKRSTMRKARIALARRLAIIMHAMLRHGTEFRAA

SEQ ID NO: 218639 - protein, 344 aa, unidentified
MTIIRIGLDTSKSVFQVHGVDERERPVLRRQLPRGQMEKFFAKLPPTRIGLEACGASHHWGRVLRDLGHEVVLIPPQYIKPYVKRGKNDAIDAEAICEAMSRPGMRFVPIKSREEQAALMLLKVRDLLTKQSTMLSNAIRGHAAEFGVTGAKGPQKIKELLERIADEANIPEPARELLNNLASQLAAIEVRLAALAAKLMAHHKADPRSQLLATVPGVGPITAVSIALKVPDATVFRSGRHFAAWLGITPREHSTAGRQRLGKISREGDEGLRRLLVLGATSVIQQVERRRKANKTSGSDAPWLLQLLARKPKKLVAIALANKMARIIRAMLVSGELYRRPQTV

SEQ ID NO: 218640 - protein, 391 aa, unidentified
MSMYFVGIDISKYKHDCCIISAADQKVVSKFTFKNDKAGFEELLTVLNSLSNPEDIKIGFESTAHYALNLELFLENAHHSFMEVNPVLIKEYKKSTTLRRTKTDSVDCESIARWLMTVEYKPHSKGFYHSYSLKSLTRLRDRLIRQRSFYLVKITNVLDHTFPEFKPFFNERLSKTALYLLENYGSAEKMARMNSASYDKLRCISRGKFSIQQFLRLKELAANTVGVNNSIFDIELNSLLTLYKSLVKEIDTLESEIHKLIEEVHPHYLTIPGIGPISAAVIYAEYGDISNFSNPGQMLAFAGIEPGINDSGTESHGGRMVKHGSSQLRYVLLNACLPLIRFDLTFATYYAKKRAEGKKHRVAITHVAKKLIRVIYALERQDIDFNTQKLR

SEQ ID NO: 218641 - protein, 346 aa, unidentified
MTHSTTVGVDLAKNVIQVSVVSGRGKELSNRSLTRKKFAEFLGKQKPALVAFEACATSHHWARAAERHGHVARIIPAKFVAPFRQGHKTDSNDALAVAEAARRPSIKEAPMKTVEQQGLQAIHRSRQLLIQESTALSNHLRGLLMEFGVVIPRGFASLLRAVPEVLEDGENELPDLYRPTLHRMYTRLLELRGHIEAMTREVEVLVKQHPICSRLTALEGVGPIGALLLYATLGSGNVFSSSREFAAYLGLAPRQYSSGGKTNIVGLSKKIGNSRLRSILILGARAYTYRLKEPKSSKDRWLKDVIERNGHSRAAIALANKNVRTAWAMVTQGTEYQRRGQLKVAA

SEQ ID NO: 218642 - protein, 317 aa, unidentified
MKRVQSTTKVAGVDVSKRVLDAAVHGHETLIQAANTDAGFAELIGWLRGHAVTRVGMEASGGYERGVRAALQAAGFEVVVHQPLEVRLFARLKRLRAKNDRLDAQLIAAATAQVDAVKAAADPLLNELAERLTAYEQITDQLAQTKTFREHVVLPDLKAMMEGQIIALLRLKRQLLKDLIDRIKARPELLRRWRLLQSLPGVGPLVAAALVVRMPELGAMEHGQAAALLGVAPYDRDSGAFKGQRFIGGGRSRPRRLVYLAALAAKRCDPSLKAFADRLLNHGKAAKLVTTAVMRKLIEAANLVLKRNQPWLPHPAN

SEQ ID NO: 218643 - protein, 349 aa, unidentified
MRFYTGQHRFYCGIDLHVRTMYVCILDAAGQVLVHQNLPAKPEALLEAVSPYRDDLVVACECIYTWYWLADLCAKEGICFVLGHALFMKAIHGGKAKNDRIDAHKIAVLLRGGMLPQAYVYPAGMRATRDLLRRRLHLVRKRGQLLAHIQMTNQAYNLPGFEKRLAYPSNRQGVAEHFEDRGVQKSIAVDLGLLERYDALLRDLELYLVRQAKQHAPHGFQLLRTIPGIGKVLALTLLYEIHDIRRFDRVQEFASYARLVKCAKESAGKKHGTSGAKMGNVHLKWAFSEAAVLFVRHCPEAKPLLARWEKQHGKGKALSILAHKLGRAAYYVLLREKAFDQERFLRSIH

SEQ ID NO: 218644 - protein, 346 aa, unidentified
MSYSTTVGVDLAKNVIQVSVVSGAGKELLNRSLTRRKFAEFLCKQKPALVAFEACATSHYWARAAQRHGHTARIIPAKAVTPFRQGHKTDSNDALAVAEAARRPNIKEAPMKTLDQQGLQAIQRSRDLLVQESTALSNHLRGLLMEFGEVIPKGFAALQRKLPEILEDGGNEVPDMYRPALHRLYCRFLELRSDIRAMDAEVKALVKQHPGCSRLTALEGVGPISAVLLYASLGTGEAFSGSREFAAYLGLTPRQLSSGGKTNIVGLSKKIGNRQLRSVLIQGARSYVNKLKEPKTPKDRWLMALIERAGPGKATVALANKNVRTAWALLTQGTEYQRHAQPKVVA

SEQ ID NO: 218645 - protein, 434 aa, unidentified
MGHRFRTDPDELDTLWARLPKDAQRIEVVMEPTRNAWVALAAWFRRHGATVVMVPPEQSADLRDYYNKHTKTDRLDSKVLARLPLLHPEGLHREDSLGPGDELKRAVKIRSGLVHRRTACMARLDALPEILGPAWIAALGSDMTLTALRFLARYANPVQVKRLGKARLAAFFRRSSRQAWADERADAVIEAAATTLRLWGADGGELDFDALGADIAAEARLALTLTDEIDGFDKRIGALYDKADPAGIVRSVPGAGRVCAPQILGRLGDPTRFANLAAVRSFAGLVPAADSSGQADGHRGPTKAGDCCLREALFIAADHARKVDPTLAVRYRRLMLAGKHHDSAVCTLAAVLLTRIAACLRAGTHYLLRDTDGRVITEAQGRAIVAERYTVPPEVRAARRKVTPHRHPRRNERNERAKTGVATRSKASPVPQPA

SEQ ID NO: 218646 - protein, 338 aa, unidentified
MALYCGIDLHSRDSWLAILDDRLKVVREAKVGNDLEAILEVLEPYREDLEGIAVESTFNWYWLVDGLAGAGYRMHLTNTWAVQQWEGLKYSDDRHDARWLAHLLALGILPEGYIYPKQERSVRDLLRRRAFLVRKRTSFLLAMRGAFECRTGLRTTSGEVKQWTAEEIESYLDDPAEALGITCLLEPMKALDSQIRIIEKEVLSRARLRDEFAPLLSVWGIGKILALTMMYEVGEISRFRKVGNFASYCRLVKSDRLSAGKRKGSGNARNGNPYLSWAFSEAAHFAVRYHPPAKKYFQRKRSKTNGIVAIRALAHKLARASYWVMKDQADFDSERVFG

SEQ ID NO: 218647 - protein, 341 aa, unidentified
MYYTGLDAHPKRSQLQHMDETGALGLTMNVPTTREGLNTFLDKLDGPTRITFEASCCYWWLHEFLTSHPKISHINVVDPRRSRQLSEELSVQQGYGRAKNDRIDTEMMAHEDRLGLAPIIHVPTAKQLETRTLNRHRFILVLEKTMAANRIYGLLCMHGVLCQAAQLVDDAAFRQQLLQPLPNYVKVIADNFIGQINLYQKQMQWCEEQLELALPLGHPDLQLLMSAPGFGPVLSRIVQTEILDIHYFKAPGHLISYSGLAPIANESAGKKGVFKLNRHCNYYLKYAFVEAAHHACTHSHYQSKYKYDVKHYGKIIAKLNLARRLVKSVYWMLIRQQPYKF

SEQ ID NO: 218648 - protein, 344 aa, unidentified
MTNIQFKDIDPEAKPVLFAGIDVGAEELILVIRKNGKPFDPQKFTNTPADRTRLVKKLVKLPGIIVCLEATGVYHFDLSLALHDAGVLLMVVNPKAAHNFAKVLMKNSKTDVVDANTLAEYAARMDFVAWTRPSDESIALRSFARRINALTSQKAAAKNHLHALTATSETPKAVIKDAKLAITQLEKRIDRLTAEALILIGKHPELTRILQLLIGIKGIGNTSAIALMGELLLLPPDLSHREWVKFAGLDPRAFDSGKSVHKKTRISKAGNRHIRSALYMPALSAKQHDPHVKAYFQHLVANGKKPLQAVCAVMRKLLHAIHGMLKNNEPFDNTRFYAIPECNG

SEQ ID NO: 218649 - protein, 388 aa, unidentified
MYLVGIDISKYKHNCFIATKSGVPLKEFVFENDSEGFKLFHKVLSELNQDQEIRIGLESTGHYGTNLKQFIVASGYTYLEFNPYLTHQFSKAMSLRRTKTDKVDAKTISNMLGSVDYKTLHTQFYHISELKQLVRDRDDILTNRSKTLVKLTNLLDIIFPEFKPFFSNKLGVTARFILKKYKSPTRISKFVMQDYECLRTVSNGRLTYPKFSRLKSLAKDTIGVQSEIYNKRMQALIGAYEYFDKSLDEIDQDIIDLFSAAKTKLRTIPGLGIIQAATIYAEIGDIHLFSNPQKLIAYVGFDVSINQSGMSEHRGRIVKRGSPLLRKAIWIYALPSLRFIPTLNDYYHKKKAEGKHHKVALTHVCRKLIRMIYHIEYNQIDFNHTQIK

SEQ ID NO: 218650 - protein, 356 aa, unidentified
MSHELNSAVAVVGIDIGKNSFHIVGQDKRGEIVLRQKWSRGQVEARLANLSPCLIGMEACVGAHHLSRKLQAFGHDARLMPAKYVRPYSKGQKNDFRDAEAIAEAVQRPTMRFVATKTSDQLDLQALHRVRERLVGQRTSIINQIRAFLLERGIAVRQGLRFLRAELPTILAKRSDVLSPRMSRIVEDLAGDWRHLDERIEGVSSEITALAEQDAACQRLMTVPGVGPIISSAMVAAIGSGDVFSKGRDFGAWLGLVPKQISTGDRTILGSISKRGNRYLRALFVQAAWVVLVKIGPKHWHRYGLETWIAAARKRLHHNVLAIALANKLARIAWAVLHKGRAFECVKTDAMASRPA

SEQ ID NO: 218651 - protein, 411 aa, unidentified
MALEDVSRMLYVGIDLHKDHHTAVLLDCWNEKLGELQFLNKPTAFPKLLALLQPYRENGFTVVYGLEDTGGYGWALGLYLIQQGQWVKSINPAFSAAKRQSYATVHKSDSWDAECVARVLKDDLKHLPDFMPDEHFWVMRQLVTRRRGIAKNLTGLVKQLHIQLSYVYPSYNRFFSQVDGKTALAFWEAYPLPSYVTDTTPKQLTQFLQKHSNFSCSTKKAELILHCVQEDGNTCLTYAEEKELVIRGQVRQIRFYQDELKKVEAKLKQMLEQTGCLLHTMTGVDVVTSAELSAEIGDIRRFPTANKLARYAGVAPIFAGSGGKGRYFKSKQGDRSLHDIFLGMAVRQIAVHRTTKTPRNPAFYAYYQRKMAEGKTKKQALVCIMRRLVNIVYSILKHQKPYALPIAENSD

SEQ ID NO: 218652 - protein, 395 aa, unidentified
MHRDLLVATILNGSTKETKRFVNDANDINNLKNWLKTHECKRAVMESTSIYWVPLYLALEESGFEAVLANAHQVKGIPGRKTDQSSSEWLAHLLRGGQIKPSYVPDKRLRELRELTRLRVKYVQNRTAFKNRCQKVLNRVNIRLRSKLSDVFGKAGMEILNGLMAGKSVEYILEHTESKRLKSRCDEIKSVAKGALSENDIFVLKHLTETIKHLDEQIHQLEARIEMVVNKEDIEIVSSVPGVGSRSAAAIVAEVGDAKRFSSGKQIASWTGLVPSVYQSAGTFVLGSITKQGSKWLRRVMVEVAHVIVRVRGSKLRSFYLRVKAKKGEKTAIVAVARKMLTLIWHLLVNGEKYVEDGFEKPIRGSKVAYGGHVPLEEMAEVLRSAGYIVSRPNG

SEQ ID NO: 218653 - protein, 342 aa, unidentified
MKIIGCDFHPSFQQIAMVDTETGEHTDRRLNREEAIVFYRSLNGKVLVGMEACGNTLWMERLLTELGHELRMGDASKIRAMEVRKQKTDRKDAELLLRLLLEERFPQVWVPSPQQRDSRQLLLHRQKLVSARRQFKNQLQHLALNQGLQQKQKLWTKSGRELLEELPLTGWTAQRRADDLELLDQLERRIAELDVSVQQEAASDPIAVLLQTHPGVGPVTSLAFVLTLGTIDRFASSKKVVSYLGLNPAEHSSGGRQKLGSISKQGNPMVRSLLVEAGQSAARLVPELKRAYQRLKHRKHSGVAKVMIARKLAVRLYWIWRTQQPYTATRMQGSPSHLVGVR

SEQ ID NO: 218654 - protein, 321 aa, unidentified
MNAPIYCGIDVAKRNFVIGFSHQKKTKTETNNAKGIQHTLDYLSQFNVALITLEATGGLEIPVAKALARAGYRVFIANPLKASEFAKSQTRAKTDAKDAVNLAFYGLTCELKGEVEHQLYVPLSEQEEQLEALVVRRRQLVDMRVAELNRLQQSHETQLDNIQQHIEMLDKLIAELDKDIDDQSKHFSDKADLISDIKGVGKNCVAVMMSSLPELGKLSSKRIASLVGVIPHSQESGQWKGKSFCYGGRAIVRNALYMAALSAIRFEPVFKAFYTRLVAKGKAKKVAIMACMRKLLTIMNALVRRNEKWDATRYLSTESVG

SEQ ID NO: 218655 - protein, 406 aa, unidentified
MEGPIITVDVSKGSCHYQPFIENGHPMRKPKQLSATIDGFQKLGQTIKDLEAKTEREDIPVIFEATGVYHRPLQKYLEDHKIRYYIISPLLSATYRKTDLHSNKTDALDCAHIAKAYYCEKELRQYQAQPQEYKRLYQLSRIYESELVHLRKRKVSLRSMLDIIYPRIDKTFKGNQNLYDPIPMEILKRYPHPSLLLSHREDTIVKTVGHRTGHLKGYTERIVHKIYEKAKECYSGCDIDDIEVVKLPSLIENVQEQKKKCDSLLKEMIEIARTCPYFASVVSIVGIGENLAARIIAELGDVNRFDNRAAIVAYAGLNPKIQQSGDIDGLHLKISKKGNKHLRCLLYLGAQCNYRLRKEDPLYEFTKKKRQQTQCPLSSKAAYTASAHKLLVIIYSLCKNGTLYHS

SEQ ID NO: 218656 - protein, 316 aa, unidentified
MQSILDLGADVDSRFVVVACAVDSFRPHQVANERKALLAWLRTVPGGSRLAMESTGGYHELLAELAHKAGLQVFVLNPRNVRRYAEGVGCRGKTDRMDAEVIARYVAREHRELHAYVPPTKPQRELMQLLRRRAKLVQTKGQLVQSLRGLPIVRAEAKRLLAEFDRLIARLELMMRRCLEQTPAAREAAERIATIPGFGALSSMCLGHSFARTPYGTSDAVVAANGLDPRPADSGQKHGRRRLSKRGPAEHRRILFNCARSASRTKLWRPYYEAQVRKGLSSTAASVVLARKMLRVAFAIYKNGQPFDPSQIAGRA

SEQ ID NO: 218657 - protein, 354 aa, unidentified
MSITMIGLDTAKATFQVHGVGEEGRAEIKRKLSRSELVAFFAAQPACTVVLEACGAAHHWGRVLGTLGHAVKLVAPEAVRPFVKRGRKNDAADAAALCEAARRPEVKFVPVKSVEQQATLALHAARALLVKQQTMLSNALRGLAAEFGLTVPQGLVKLEQLMELAEAQEQATLPEAARRALRALYGRFCALEEEAAMLEKAIVAHARRDETARRLATIPGVGPITASLIAATVTDVGLFKSARHFAAWLGLVPRQHSTGGKARLGRITKAGSSAIRTSLVLGATAMVHRAGQWNSAAGAWVRGVLERRPVRLATVALANKMARIAWALMTRKEDYRPHAGRLVAAVAPGMIAAA

SEQ ID NO: 218658 - protein, 405 aa, unidentified
MDIQPIFRCAVGMDVHLALICVCIIVAQPGLEPEVHRREFGGFQRDRRAMADWIASFNPEIVVMESTGIYWKSPYAALEKVGIQAQVVNAQQVKKVPGRKTDTSDAEWLAMLARAGLLRGSFIPPEQLRNLRQVSRHHQKITAMRAMEKNRLLKVLSDAGIRITAVVSDAHGVAATAIIDCLLAGGTPEQALTHAGRLQAAPETLLASLQGELSAEHRFVAQTIRHHIHYLDSQLADLERHLLEALQPHEAAMQFLMTIPGIDRLAAAKLIVEIGVDMAAFGTAGRLCKWAGVCPGNDESAGKRRRGDTAPGNRYVRALLCQIAWAAVRTTSQFKGRFQSLVGRRGTKRAIIAIGHKVLKTVFVLLSRQVPYQDSTVDYEALAVQRHAPRWIRQLRKFGYLPKMA

SEQ ID NO: 218659 - protein, 310 aa, unidentified
MGEVNVAIDVGKHQLDVALGSEGDLFSTPDEPGTIARLCKRLAGIGCARVLIEGGSYQNLLVAGLRGAELPVVIINPRRVREFAKSIGRLAKTDRIDARVLALYGERVEPPLRELPEEQTQVLRALWVRREQLIEMLVMEQNRLEHAPKALHRSLRAHIDYLRKQMKQADDDLDREVRNSALWDKYELLSSVPGVGRVLCAALLSDLPELGRLNRREIAALAGVAPFNHDSGTLHGQRKIEGGRPRLRRVLYAATVAAARCNPVLKPFYQRLRAAGKKPKVARVAVMRKLLTILNVMLKTHSAWRPPCPA

SEQ ID NO: 218660 - protein, 399 aa, unidentified
MIRDHETVDIFVGLDVGKGEHHAVAVDRAGKKLLDKALPNDEARIREILAGLEHHGRVLVVVDQPATIGALPVAVAQAAGMLVGYLPGLAMRRIADLHPGEAKTDARDAFIIAEAARTMPHALRSVQLADEQIAELNMLCGFDEDLTKQVTAAANRIRGLLTQIHPALERVLGPRLDHPAVLDLLRTWPTPAALRHAGRRRIANRLTKLAPRMGERLADEIIEALGKQTVIVVGTNAATIVLPQLAAMLAGLHESRLTVYAQVEALVEAHPLHAVLTSLPAVGVRTAARILTEVAGKDFPTAGHLASYAGLAPVTWRSGSSIRGDHSSRKGNKVLKRALFLSAFAALKDPISRAYYDRKRAAGKRHNQALIALARRRCDTLYAMLRDGTLYQAKTLTTA

SEQ ID NO: 218661 - protein, 469 aa, unidentified
MGFEPEHAQWPPLRLARVSRELVSVVVVSPLLLREFNNQEEDEVRSVGRSIGLDVHRDFCEVAIAQDGEVRSSGRVDTTPERLELFGASLHPQDRVALEVSGSAWEVARILERHVARVVVVSPADTGIRQARAKTDRLDARTLARLMAAGELDAVFSPDEGCRVMRRRLSRREQLVRARSRAKNEIHAVLVRRLVGRPPVSDLFGVKGRRWLAELDLPLEESETIDACLRHIEFLDSEIATVERQIASEALRSAEIRRLMSVPGVNVICAASFMAAVGEIRRFQNPRALTGYLGLDPRVYQSGSAPATGGHISKQGSASARWALVEGAWSVVRQPGPLHAFYARIRARRGHGIAIVASARKLACLFWFLLTRGEDYAHQQPSLTAKKLRLLEIRAGAPTLKGTPTGVWATRQAMREGERRLAEQAEASYQQTVRDWQAAAPKKVGASVTPGRASQKPSKGKVTRQTTSP

SEQ ID NO: 218662 - protein, 306 aa, unidentified
MPNLIIGLDIAKNVFQVYGTDHRGVATIQRTLRRNSVLRFFATLEHALIGIEACHSAHYWGRELTKLGHTVHLLPTQYVKPFVVGGKNDAAAICMAVTRRDIHCVPIKSAEQQSLQSLHRMREGAIQERTAKSNQIRSLFSEEGVIFPTGLSSLKKGLLEFIENGESAITPILRKLGMMYLEQLSCLQAWISELNAMIDRYFKESDACQRLATIPGIEPVIATAIVSRVSDPGLFKNGRHFAAWLGLTPRQYSSGGKNRLAGITKRGDGYIRKLLVQGARAVIYPINRRHDNYGEWVKKLMLRSSG

SEQ ID NO: 218663 - protein, 338 aa, unidentified
MAIHTVGIDIAKTVFHLVALDEKGAMLTKRKFSRSQLLAYTANLKADVIGMEACCGAHFLARALVGQGHNVRLMPAEYVRPYVKSNKNDFIDAEAIAEAVLRPTMRFVPLKTEEQLDLQALHRVRERWIQRRVALTNQIRGFLLERGFPVRVGSEYLWKTLPPLLEDGDNGLSGRFRTIVSALREEWGELEKKISTVTEEIGRVSRSNEGCKRLRGIPGIGPIISTALVAAVGNAAAFRTGRDMASWLGLVPRQHSSGGKTKLLGISKRGNQYLRKLLVEGARAAFARLNRSQHSFGSWMDALEARKHSHVAVVALANKIARIAWAVLTTGQQYRAAT

SEQ ID NO: 218664 - protein, 344 aa, unidentified
MNDGISVGRRCVGVDLHLHRSVIAGLDEVGEQLGWVRIDNDPKALVAECRKAGRGVPVAIEATYGWYWAVDALLAAGFEVHLAHPLGMKALRKRKRVKTDPADAYELANLLRLGSLPEAYISPPELRELVRHRRQLVKLSTAVKAGIRALLAKHNIRLSATQLESDTATGLLDALALPGTYAVRLASQRRLMLVLADEIAATEVELHRRLRHHPGYRNLLTVKGIGPVLAATFVAEIGEIARFPTSGALCCWAGLTPRHYESDKTVHRGHISKEGDTLIRWAAVEAIQRQCEPAVKAVKDGIVARRGKNARNIAKVAAARRMLEVVYYVLRDGQARCLAPAAAA

SEQ ID NO: 218665 - protein, 326 aa, unidentified
MKVTYQTCCGVDVHKSFLVATIIKTTAGIEPSYQKKRFSTFNNSILDFKSWLLENECHDVCMESTGKYWVPVFNLLEDQINVTIANPKWVKAVKGNKDDTKDSKWIGDLFRLGLVKSSYIPCRLIRILREYTRYRYKIVSCRSSEKNRYQNALTVCNIALDSVVSDIFGKSSSSIIDYLLEQSGTTINHEEIASKLLKSLKSKEDAVIESIEGYQMTDAQKYRMRLIRAHMDYITAEINDIDKQIESLISSDPDYDKAIRLLTTIPGVKCDSAITIISEIGIDMSQFCNSKRLCCWAGLTPSNNESAGKKKSVRITRAGVSPQTLH

SEQ ID NO: 218666 - protein, 317 aa, unidentified
MERLEERTWVGVDVSKASWDVAIHDRKHVERYASDADGCRQLLAAMAALPAVHVCVEATGGYERALVAALREQAVVVSIVNPRQIRDFARAAGQLAKTDAIDARMIARYGAVMQPAASETLGENQEKLRALRTRRQQVSEALVQEKNRLSTSIDRDARQSIEEAVEFYRRQLQSLDEQLAQLMQADPTFRKKLDLLVSVPGVGPTTAAALTAELPELGRLNRRQAARLVGLAPINRDSGTLRGKRMIGGGRATVRKGLYMATLVAAKHNPVIHAFYQRLLQQGKAKMVALTACMRKLLLILNAIVKTNQPWKDAKNT

SEQ ID NO: 218667 - protein, 354 aa, unidentified
MKYFAGMDVSLEETAICVVDEAGRMIKEVRAASEPEALHTALAGFDLPIERVGLEACSLTAWLHGELAAAGWPTICIESRHAKAAMGAMPNKTDRNDARAIAQIMRTGWFRAVHVKTPMCRSWRSLLVARRTVLNEMRTIENVVRAILRETGLKLGTPLRKDFIVRVREMTSGEKGLTMMIEPLLQILGTMLHEFTGLTKQALVIVRAEPICRRLMSAPGVGPLTALAFRATIDQPERFKKSRDVGAHLGLTPRRHQSGETDIQGRISRCGDELTRTALYEAAHSLLIRSKKWSALRAWGMKIAKHRGMARARVAVARKLATILHRMWIDDVDFRFSREQTTNPDVKAIVFTRA

SEQ ID NO: 218668 - protein, 382 aa, unidentified
MDTALPPGMKGEAKKKGPSRTERHRCAKVELRHNHLRNGGPEMNATTYGLDVAKRVFQMYWVDAQTGEIVNRRFGRDELIRFLAQRPAGRVALEACGSGHWWARKIKAVGHEVVLLHAKFIRPFVQTNKTDAADARAIWTAVQQPEMRTVAAKTEDQQAMLSLHRMRALLVKFRTMQVNQLRGLLYEFGATFRAGRVAGLAEIRARMVELEEALPGTLIGSLQDQLQRIEALEQDINRLEQQIGAWQKQEAACRAIAAVPGIGKLTATALVATMGDAKTFKSGREFASFLGLVPRQSGTGGKIRLGSISKRGDPYLRTLLIHGARSVLYHAKVPTPWQREIRARRPANVAAVALAHKMARTAWAILAYGREYQRDYASVKAA

SEQ ID NO: 218669 - protein, 362 aa, unidentified
MISVGLDVHVRNSFACAKDAEGRVLARGRCGNTLLEFAELLAPVERAAKARGEPVRVVLETTTNSRAIKRLCDEYGRQAGIELHAEVLDARKLRIIAESVVKCDRRDAAVLCDLARTNLKLPDSFVPDDEVFQLRERLRARADFVRVRTTFKNRVQAALHRRGILRPARLDVFTKQGREYLASLALDDAGRRGLDGCLACIERLDEQVKEATKGLLVEGKRARWAKPFAVLQSIPGVGPITALTILAELGDAARFRSRAAVANYAGLAPIVRESNESRGRGGISHRGSAHLRAALVEAAWAAVGRAPQYADLFTRVAQRRGKQVAITAVARRILEDAWTLWRKEEPFRFLTPTPRSAASAAG

SEQ ID NO: 218670 - protein, 367 aa, unidentified
MKDSSTVVGLDVHKNSIQIVTADTDGAMEVRHFGRIGGTMDELDRAVRKLVSQGSTLRFVYEAGPCGYEIYRHLTGKGFSCKVVAPSKTPKKSGDRIKNDRRDAETLARLERAGELTAIYVPREEDEAMRDLTRAREDAGKALRTARHQLNAFLLRYGKRYPGKASWTPSHMRWLSDIALPHPSQQIVLQESILAVTGCTERTTRLTDQILKLLPEWRMYPVVKALQALRGVAPIVAATTVAEIGDLSRFENPRQLMAYLGLVPSEDSSGESTHRGSITKTGNGHVRRVLIEAAHAYGFPARVSRHLLKRHEGLPQPVLAIAWKAQVRLCGRFRRLMARGKLKTKVVTAIARELCGFMWAIAREVKV

SEQ ID NO: 218671 - protein, 343 aa, unidentified
MQTITTIGLDIAKSVFQVHGVDATGQVVIRRQLKRRYVVAFFQKLSPCLVGIEACASSHHWSRELHALGHKVRLIPPAYVKPYVKRQKNDATDAEAICEAVTRTNMRFVPTKTPEQQSGLVLHRTRHLFIRQQTAVINAIRAHLAEFGVVAPVGRHGVEELLNVVADPSDKRVPEIARACLSAFGAQLCRIKEQILEFDRLIRTWHRSNEMSMRLDEAPGVGPVLATAVVATVADPKSFRSGRNFSAWIGIVPKQHSSGGKNRLGNISKQGDRYLRGLFVAGALAVIRYAKVHGTEHRPWLTALLARRPTKVAAIALANKIARMVWAMMVKGERYKEPVALAA

SEQ ID NO: 218672 - protein, 344 aa, unidentified
MDHFGGLDVSVKETSICIVDDTGRIVKEVKVASEPAALLKVLGNPTYRFKRIGLEAGPLSQWLFSALAEAELPVICVETRHMQAVLKAQINKTDRNDARGIAQMIRVGLYRPVHVKTLRSQKLRMLLTHRKLLQSKAIAIENDLRGTLRNFGLKVGMVGKVRFEARIQELVENTPDLAVLVEPLLIVRRVLREQIVILHRRLLAIVREDEVCRRLMTTPGVGPVVALTYRATVDVPARFRKSKSVGAVFGLTCSRYQSGEINWSGKISRCGDEMMRTMLYEAAQSMMHSKKWSWLKAWAMQIARRRGMKKAIVALARRLAVIMHRIWVDGTEFCWTREQATAAA

SEQ ID NO: 218673 - protein, 351 aa, unidentified
MRYCGMDVHATSTVWCVLDERGEVAREGRVATAAATLEALMRELGTQDEVLVGQEVGTMTYLVHDAVTAAGATLLSFNAQQLRMIAASRKKTDRRDAYWLAKALHAGMYPHPVYIPPAEIRAVRVVLSRRRLLKAEHNRWICRTRAALRAAGHRVPAGATALRATVTSVLTTPTTASIVRDTLALCQRQETTLRSELRQVEAALAACTGSIPAIERLMTVPAIGPLAAATIYATVGDVHRFPTAKTLAAYAGLVPTVRQSGGVAHLGAITKQGAPALRATLIQAAHVLLSRCRGAEATPLQAIGQRIHTSRGRRKIAIVALARHLLRIAYYILRDGTRYEPQRLGIMIDAA

SEQ ID NO: 218674 - protein, 323 aa, unidentified
MTYSLGIDVAKATLACALRLPSAKYKNKTFDNTPQGFIKLNSWLTEHGVDTLHGCMEATGIYWEAVAEFLADAGHTVSVVNPAQIKAFGQAQWGRTKTDKVDARLIAEFCLAQRPEPWHAPSASVRDLRALVARREALIGMRTQESNRLEVARERVRENIQQHLGHLDQAIAEVEAAIRQRVDDDPSLKQQHALLESIPGLGRVTIPVILAFYGGTPRFKTSKQAVAFAGLDPRQHESGSSVRGKPRLSKVGHSALRKALYMPAMVATTRTAWGQAFKTRLAAAGKPPMLILGAMMRKLLHVAYGVLKSAQPFNPALHGACVG

SEQ ID NO: 218675 - protein, 338 aa, unidentified
MKTYAGIDLHSSNNYIGVIDAKDKRLYSKRHDNRIEDVLKVLGKFKASLQGVVVESTYNWYWLVDGLMDQGYKVHLANPNAIQSYDGLKQTDDKWDSFWLAHMLRLGILPVGYIYPKQQRSVRDLLRRRLMFVRQRTSQILSLQSMITRNHGLNFSGAQIKRFRDEFIDKLFSDRHLVFTAKRNIATIRFLDQIVSEIEVEVACQIKLKKEFISLLTTPGIGNILGLTIMLEVGNIGRFPKAGNYSSYCRCVESKKISNGKKKGKNNQKNGNRYLAWAYVEAANHAIRCCPKAQKFFQRKMAKSERVLATKALANKLTKATYFIMRDQVAFDVDKLFR

SEQ ID NO: 218676 - protein, 416 aa, unidentified
MDMEREVVCGADIHKQFLIATVLSNDGKKFQDRFDANFEGLLNFRQWLLDLGCQKLAVESTASYWLPIYLVVGKDVEFILANAYQIKHVPGRKTDVLDSEWIAELCLKDLIAPSRIFSEDERDLRSMTRTRESYVKMRTQNKNRIHQELESACIKLSSVLSDIFGKSGIHIIRGILKGSSIEDILDSIPSKKLKAKRKEIQDAIRMNMSPAQVDLISLLLDSVDILNREIESIDKQIQDLISKRQDDLKIAMSIPGMGFTTASAILAEIGDFKDFRTGDKLAAYCGLVPSVYQSAGKLITGHITKHGSPHVRRMLIEVAHAISRTKADSNLKRFYFRIKGRHGAKVAIVALARKVICILHHLIVNREMFEDVGTNKSKRNKPGRSFSSPEPTITDAIQILVRAGYAIQKRSEREGG

SEQ ID NO: 218677 - protein, 398 aa, unidentified
MISVGIDVSKGKSTICILKPYGEIVSSPFDVEHTDNSLLELSKMLLRLDGETKVVMEATGAYHMPILSYLKDQGLFVSVINPLVMKEYRCKGLRKAKTDQLDAKMIANYGIDHWFHLVDYTPDSEVYQTLRLLGRQYAHYMRMKIESIQVLSNMMDYTMPGIRTLLKGYSDCNGKNKVADFMEYYWHYDNITKKTESQFVKSYISWAKKRGYHQSESKALKIYALAKNGVPTLRSTSPSTKMLVVEAARVLKEIENTLRTILTQMQELARDLPEYPVVRAMNGVGDVIAPRLIAEIGDVRRFYSRKALIAYAGIDAPPYQSGQFTGSNRHITKRGSATLRKIGYEIMQCLKSFKPPEDAVYLFMMKKESEGKAPKVAKMAALNKFLRIYYARVTEVYT

SEQ ID NO: 218678 - protein, 414 aa, unidentified
MPKSYNLIQRLARNSQRSGTWQTLQEGSALYLYSIAMKKRILMVEHPATLDVTDRVSLGPVRPRNSTGRHVHLCTSPNSCVGDLSPYPQGRATGEEDPMSSAAVFVGIDVSKDQLDVALRPSAERAAVANNDAGIARLVKRLQAVHPTLIVLEATGGLELPVTSALAAAALPVVVVNPRQVRDFAKATGRLAKTDTLDASILAQFAEAVRPALRPLPDAETQALSALLTRRRQLIEMCTAEKNRLGTAPTPVRKGIRAHITWIEGRLADLDEELAHAIRESPLWRDKDDLLQGTPGVGPVLARTLLASLPELGTLTRQQIAALVGVAPLNRDSGTFRGKRRVWGGRAHVRAALYMSALVATRFNPVIRVFYQRLCAAGKAKKVALTACMRKLLTILNAMLKHQTPWTITFAHGS

SEQ ID NO: 218679 - protein, 343 aa, unidentified
MTFVGCDLHTRQQQVAVLDTTTGEIREQQLLHEGTTVEDFYAALPRPVTVGIESTGYAIWFHALLQRLGHTVLVGDAAKIRAMVVRKTKTDRRDALHILDLLRHDRFPSIWIPDPATRELRALLMHRLRLVRIQTMLKNGVHALALNQGLARGSKLLRRAGLAQLQALPLPPYTAQRRDQSLDLLATLRTHLDHLDDAIAAAALTHPDAPRLLTHPGVGPVTALATVVVLGTVSRFPDSKHVVSYVGLAPALSASADKYRLGKITTQGSALLRFVLGQAAAHASRLDPELTRTYRTLAQRRGRAKAKVAVARKLLVRLFIMLRDHIDYDEFRRRGRAPVVAPG

SEQ ID NO: 218680 - protein, 406 aa, unidentified
MFIGWDWATETHDVTVMDHLGARVDRWELAHTEEGITKTLARLARYGAPADLPVAIETTRGLVVDRLLAAGHPVVPVHPNAFHAMRPRWGAAKAKTDAGDSMKLADYLRTDGHFLPRLEPTDQATLDLQALTRQRADHIEAKVAAVNQLAASLDAHWPGGKAVFYELDSDIALAFLERYPTPAAASKLTAGRLQAWCKRHGYSGNKPGSFLIERLRSAPSAASRLSPAAVEQLIRIQVQLVQGTRATLRALDKAITEAVKAHPYAPLFATMPRIGKINLAQIIGELGPILERSQTCEQFIAEAGVVPVTKASGKSRTVAFRYATNRRARLAVTTFADNSRHGSDWAAKIYTDARTRKKRHPHAIRILARAWLRVIWACWRDGACYDPATHQANGKINTSADTPVAA

SEQ ID NO: 218681 - protein, 345 aa, unidentified
MNKISVIGLDLAKNVFQVHGVDSAGEVVVRRQLKRSQVRRFFANVEPSLVGMEACGGAHYWSRELAGLGHTVRMMAPVFVKPYLKTNKNDRKDAEAICEAVQRPSMRFVQPKTPEQQSVLHLHRARRLLVRQRVALGNHLRGILSEYGIVLPQGVKALSGRLPGLLEDAENDLPMLTRDLLAECKEEYDQLMERIERLEGRIKAWHAAHSVSQRLASIPGIGVLTASALAATVGEGQDFSNGRQLAAYLGLVPRQASSGGKVRLLGISKRGDGYLRGLLIHGARNVIYHIRRRLRAGQPGGNAWVERLLQRAHPNAVAVALANKMARIAWVLLVRNQTWCPARPV

SEQ ID NO: 218682 - protein, 407 aa, unidentified
MNAVGIDVSKGKSMVAALRPMGEVALLPQEFLHTGVGLEQMAYAILALGEDTRVVMEATGRYHEPVAAALHEYGIYVCVLNPLYIKQSGGGSIRKVKTDKADAMKIAKYGLDNWVDLREYTPMDTVRQQLKLCSRQYNLYMKTVISLQNNLISLTDKTFPGVNELFSSPERADGHQKWVDFVRTFWHCDCICRVSEKAFTERYQKWCKRKGYHFSVEKALEVYAGSCGHFTTLPKNDNTKLLIISAAQQLLAGKMTLAALRAEMTRLARQLPEYDTVRTMYGVGDKTAPALMAEIGDVRRFPRRSSIVGFAGIDPGVDESGKHSAKSVPTTKRGSAHLRKTLYQIVCTYLKKSPADEPVYQFLDKKRSEGKPYFVYMTAAQNKFLRIYYARVKECLEAFDAQTTEQK

SEQ ID NO: 218683 - protein, 407 aa, unidentified
MFFLGIDIAKLNHIASLVSDNGNIVFSNFMFKNTLEGFLSLIDKVKSIPKDDIVIALEFTGHYSDNFVNFFFNRKFNVTLVNPANVANFRKSYGRDSKNDRIDSINIAKMLLSREYSLVTQSDIEYLSLKKLNRIRDSLVKQKSKCKILLTRNLDSIFPELQYLLPSGIHSKAVYALLKKYPSSEEIAALGIDVLTNILKTNSRGHFCEKTACIIKSQAKSSVGFEDISLSFHISQLISSIELLEEQIRNTEKQINAIIEKLKPVILSIPGISNVACACILGEIGNISRFRSPSKLLAFAGLDPKVRQSGQFRALSCRMSKRGSKYLRYSLIYTAWNAVRNNEVFSNYYALKRSQGKNHYKALGHVAHKLVRVIYRLMKDNIPFDAEQLIKKNYTKYLRKSIFNRLI

SEQ ID NO: 218684 - protein, 346 aa, unidentified
MGTIKVKRYTYFIGIDISRNKLDYAIMQGKSFIFHREAENNGQSINAIIEEIKTLPKFTMTKAVFAMEQTGIYANHLLTTLKKVKANIVIESALHIRSSLGVLRGKYDKIDAIRIANYAYINRDNLKLWTAKRPVIEQLAYLSSLRLRLLETQLKLKTPLGEQKLFVKSKLYKIGTLLCSKSIQAIQSDLLDIESTMSDIVTSDEELNWLMKIITSVPSIGPVTALQIIITTNEFKDIKGPKQFACYAGVAPFVRDSGTVKVRAKISPIANKRMKSLLHICALNALRYDQELKRYYQRKVIDEGKAKMSVINALRYKLILRMFACVAQQRLYQKDYERPFHNMLSK

SEQ ID NO: 218685 - protein, 404 aa, unidentified
MFAAFGGSSLVMLVEGWTDWRSRASSMGGRAVVEHTTTYVAFDNSKETLAVAIADGDARGEVRFWGTIANRVEAVRKLVARLAAKHPALSFCYEAGPCGYGLYRQILSLGHPCTVVAPSLVPTKPGGHIKTDRRDAITLASLFRAGELQAVWVPDADHEAMRELIRARLTAMQEVRRSRQLLLSFLLRHDRATPTRHHWTRAHRSWLARQSFAHPAEQIVFEELIQRIEVACARQGRHEDAIRNLLSAWSMAPVVTAIQALRGVAQMSAVTLAAEVGDFGRFATPRQLMAWLGLVPKEHSSGSKVARGNITKAGNTRARRVLVEGAWTYRLPARMGEDITRRNDGLPEVIRAAAWKAQVRLCARYRRMQNTGKPQKIIVVAIARELAAFVWAISRMVQPAATQA

SEQ ID NO: 218686 - protein, 442 aa, unidentified
MEINRSLTKGDFEIVHPNAAGIDVASQMHYVAVPASRDQPSVRKFGSFTQDLHDLAKWLKKCQIDTVAMESTGIYWIQLYLILEEYGFDVFLVNARHIKNVSGRKSDVQDCQWIQQLHSFGLLNASFQPDLYGRELRTYMRHRKNLTEQYSMQIQLMQKAFEQMNIKLSNVLSDITGKSGIAIIEAILRGERNASTLAMLADARVKASREDIVKSLQGCWRNEHLFELRQAYDLYLIFKQKIKECDHQIEHTLQQHNNSSSNDDQVKRKAQSNNKFDFNATSYLKKILGVDITEIFGISEISAMQIISEIGIDLTKWPTPKHFVSWLNLAPNNRVSGGKLLRPKKDRKKNKAGQSFLMAAYTLQRSSHWLGATYRRIAAKHGAPVAIKATARKIAIILYQMIKKQIEFNPLPIDAYNQLFKERKLKYIKNQASMLGFQLTPS

SEQ ID NO: 218687 - protein, 419 aa, unidentified
MRIIKTKKHEIVNGRTLLVAVDLGKSKHMGYYRCPDGTDIKPFEFSNNRPGHQKFYDRICQAKAVYHLEEVVVGFESTGVYGEPLIHFLNDKGIKLVQVNPMHTKRIKELEGNSPGKTDRKDPKVIADIMALGHFLTVVIPEGVSAELRRLTQARERSVERRTAFYNQLQDLVFIIFPEFLEVMKDIKTRSAQYLLRHYPTPQAILQCGVDGLSLVLRRVSRGKLGRQRAEALYEATVRSVGIKEGQRSIVLEIEEILLGIERCECFIAKLEREMRRLLDQIPYSRSILSVKGIKAVTAAGLIGEVGDFRKFRTISELLKLAGLDLYEISSGNHTGNRHITKRGRSLLRKLLFFASLNMIRKGGVMHEPYQRYIGRGMPTHKALVAISRKLLGILFALVRDHTEYVVNYSERENLKLAA

SEQ ID NO: 218688 - protein, 421 aa, unidentified
MKGLRAKRVKMVKEGTLIATVDIGVANNTGYCTTLDGRSTKSFRFDNTKEGFEKFWCMTIASKNRFGCEEVLVGYESTGPYAEPLVHYLANKQVNIVQVNPMHTKKMKEVNDNSPLKTDEKDPRVIADIIRLGRALSIVVPEGDAASLRRLNNARERHVGEQTALLNQLQQLVFLIFPEFKTVLKNMKGKTAQHLLKRYTIPERIGTLSKEALGEEMRKRSMGKFGIKEAESLIGLARETVGIKEGLAGIFMDIRHILMQLEAEVRFISEIEAEMGVTLERIPCSVKLLSIKGLGTVSVAGLIGEVGDFSKFTTQSEIMKLAGLDLYEISSGKRKGQRRISKRGRSLLRKILFYAAIQMIRKNGIMYDYYARLTGRGMERMRALIAVSRKLLRIIHAIVRDNRDYVGEYQAPERMVIKKAA

SEQ ID NO: 218689 - protein, 360 aa, unidentified
MSSMPHPQPSDADEVILGVDTHKDVHVAAVLTALGVLLATSSFPTTAKGYRQLLAWARGFGALHRAGVECTGSYGAALSRHLSSEAVTVIEINRADRGDRRRRGKTDTIDAETAARAVLSGRATAIAKSGDGPVEMVRMFKLVKASAIKSRGQAINQLKAVLVGTDPALRDSMTGLSNPALFRRCAELNHSNPTDTPSAAAFTLRLLARRILELSSEIDELNAQIATTIEARAPQLLQRYGVGPDTAAALLLAAGDNPERLHSEASFAALCGVSPIEASSGKMHRRRLNRGGDRQANSALYTITIARLRWDKRTQDYVQRRVAEGKTRREAIRCLKRYIAREVYHDITSTRAAPTARSAA

SEQ ID NO: 218690 - protein, 344 aa, unidentified
MQPMYYIGLDVHKRKISYCVKDSSGQLHSEGSLPATRFDLDRWMKKLPQPWSAAMEATMFTGWIYDHLKPHAAALKVAHPLMLRAIAAAKKKNDRIDANKICDCLRCDFLPECYMASTAIRERRRTLRYRNLLVRQMVQMKIKISTLLMEAGVSYNKQRLHKAGYFRELLATNPHIDEGLRLLLRQCREMVVRLAKTESALIRSLRNEGLLAERVERLMSIPAIGPITALTWALEIGEVQRFSSIKKAVSYCGLCGAQQSSADHVQRTPLSKQRNKHLQTTLIEAAKMAPRNSPELAMIYDKEKQKGNANRATLAVARKLVAYLMAVDRGQRNFQVVEKNCIAA

SEQ ID NO: 218691 - protein, 378 aa, unidentified
MNRIIKIGMDVHTTNYTLCIFEPSFEHDGTVHCITQVKPEIKKIIHVIETFKKKHENEELNIVCGYEAGCLGYSLYHELKEKGVECVILAPTTMKTEKGGRKLKNDYRDAKMIAECLAYGGYSAVHVPTELDNSVKEFIRMRDDIKENLKSIKQQIIAFLTRNGKQFEGKSYWTRKHIDWINTVSFSEPLLQDTLKEYMIEYNHLSDRVETLDRQIEEISLKEEYVEKVQQLQCLIGIKTHTALSLIVETSDFNRFKKGNMYSAYLGLIPGDDSSGGHEKKLGITKAGNNHLRRLLVEAAQGYTRGRVGFKSKDLKSRQEKCSSEVVAYADKANERLRRKYYRMILRGKKYNVAKTAIARELACFIWGIMTDHIDLCS

SEQ ID NO: 218692 - protein, 349 aa, unidentified
MRFYTGQHRYYCGIDLHTRTMYVCILDAAGQVLVHQNLPAEPGALLAAIAPYREDLVVAAECIFTWYWLADLCAKEGIAFVLGHALFMKAIHGGKAKNDKIDSHKIAVLLRGGMLPQAYVYPAGMRATRDLLRRRLHLVRKRGQLLAHIQMTNHAYNLPAFAKRIAYPSNRAGVVEHFEDRVVRKSIAVDLGLLERYDALITDLELYLVHQAKQHEPQGFQLLRSIPGVGKVLAMTILYEIHDIHRFDRVQEFASYARLVKCAKESAGKKHGTSGAKMGNVHLKWAFSEAAVLFVRHCPEGKKLLARLEKKHGKGKALSILAHKLGRAAYYVLLREKAFDVERFMTTIH

SEQ ID NO: 218693 - protein, 404 aa, unidentified
MYYVGIDVAKEKHYVCILDNTKEMATKPFWIHSDILGLRELIKRIADLSWDADDFIIAVESTGAFSENIYEYITDSGYKCTLLNSYQTAKYRDFSTMKKVKNDAIDAYVIAELLATGRYKESYISSGDFHSLKVLGRLKRSLADKIKTIKREISTVMATVNPEITRVFPNIFTKTALAVIKVYPTSIQMSKATPKKLTKLFRHIKGNNFSEDKAKFLIDLALTSVYAGRACEARALMITTNIKILELLSQEKDEIESQIKVLIETTMDKALEEPIDNLRTIPGVSDKTITAVIGECGDLKRFTSAKAFIGYLGLYPTQYQSGNSFSTGRLAQRGIPIAKHALYMAAVASVRHNEQLRKVFMDKVSSGKSKKEALIIVAKKLAVMMYSIVKYNKPYEPKRVLVSR

SEQ ID NO: 218694 - protein, 337 aa, unidentified
MYAAIDHHKAVFQAAMLDPQTGVAADERFEGSRDGLASWVERWQGRVTDVAIEASTGWRWITQELEAHGIQVHLADPAEARAKRGRTKKAKTDKLDARWLVLLLAKQDLPEAWIPPEEIQQLRAQTRLRKALADDRTRWAQRLHAVLHHEGWPCRRSQLLTKKGRQWVAALRLGGAARQQVTAYLFLIETLEAQLQPLENELRHFAEGDPRCQALRTLFGVGPIIACHLLAEIGSALRFRRSRQLVRLSGLDPIVEESGERRRRGKLAKQGPPLLRWAAVEAAQHGRRYNSPDRHLWAVSNRRSGPTRATLTVARKLLRRSYHVLRRIELGQQEVAA

SEQ ID NO: 218695 - protein, 355 aa, unidentified
MNAIKYIGMDVHLATISIAVLDAHGKLIMEVTIATQAGALLDFIRGLSGTLYVTFEEGTSAHWLYTLLEPQVAKVLVCDPRQNPRRLGEKKSDRLDARKLAEWLRLGTLKPVYHGNALGLALKELARSYRTLVSDTARVMNRLKALYRARGIRCAGTRVYSPRFRDQWREQWREPGARGRAERLYKQLDLLLPLRQEARAAMLAESRQHPAHKILCSIPALGPVRVALLLALLQTPHRFRGKRQLWTYAGLALVTRTSADYQRVDGQVTRARKPALVLGLNANHNHTLKGLFKDAAASALAHPGPFKDFYATRVAQGMKPELARLTLARKIAAIVLTLWKKGEGFNAEHVKAQAA

SEQ ID NO: 218696 - protein, 387 aa, unidentified
MPQPNDLSRSLVALDQNSTIIAVVELSQSSWLVGGVVPGIERQPRKKLEPSPERLLAVLHRWRDEAVGAGRTITRIALAFEAGRDGFWLARWLEARGVEAHVIHPSSVAVSREHRRAKTDRLDTELLKRGFLGWLRGERGHCSMVRVPTIAEEDAKRPNRERECLVGERTRIVNRIKSTLARLGIRNFKPTLRKAAERLATVHTPEGMPLPPNVLAELQRDMARLGVVVSQIREIEDARQKGLEQRPDTGPHAMVRLLARIVGVGVETADMLVHEVLSRPLRDRRAVARYAGLTGSPDESGAQRREQGLARAGNARVRRGMIQLAWRFLMFQKDSALARWYRARTADSRSGTRKTMIVALARKLVIALWRFVTTGEPLEGVVLRPAA

SEQ ID NO: 218697 - protein, 315 aa, unidentified
MAMLVAQTKPVVGVDVAKNELVIYQDQSDRLEAIPNNKASISKWLRTLAGTVSIAVEATNTYHVLFADMAYEAGCTIYMIDGYQLSHYRKGVNVRAKTDALDARLLARYLKKEADELHPWVPPCPLYRQLLSLFRRRAALVQARTGLVQSWSNEPLLKTAFAAQINSMKRLEALVEKKIKDVLQRAELMGQVSRCMKVEGIGFLTAARLVTTFQRGEFSNANAFIAFLGLDLRVSKSGQSDGPRRLTKRGDPEARRLLHNAAMSGSRTGAWKPFYEEQRKRGFSTTQTLVMLARKMARVVFALLKTQSEYQSKAA

SEQ ID NO: 218698 - protein, 410 aa, unidentified
MSKLYVGIDVSLRKNNVHCMAAGGDTLKKFKVPNTFDGALALVDNIVELSTRHSLQEVILGMEATSNYSYHLAQLFRSSEKLAPLSPKIHVLNAKTVHNFKNSYSDLPKNDDLDAWVIADKLRFGRLPQEVFMDERFLALQRLTRNRFHLVNMIKREKTYFLNSLFLKFSSLRQEKIFSNNFGATAVAVVEEFLSPDEIAAMPLEELVSFLQQKSKNHLVDTDGIAKALQKAARSSYRLNKSLADPVNACLASSISVIKFLQSEVKKLDKLIEEHMKAIPQTLTSLKGIGPVYSAGILAEVGDVKRFKNHKALAKFSGLVWNEQQSGEWKAEDIKRVRSGNKYLRYYLVEAANLIRLHDREYADFYKAKYDDAHTHKHKRALVLTARKLVRLVYALLRTNQLYTPRKRGG

SEQ ID NO: 218699 - protein, 363 aa, unidentified
MVKVIIQIMEEIEIIKECIGIDISKLDFVCVHAKETSKGDLIYSKSIKFPNSKTGFNQLMKWYRKNCSKNLDVLFLMEATGVYYESLAYHLYRLGKTTCVVLPNKSKHFTKSLNVKTKTDAVDAKVLSQFGIERKQQEWKPPLPILKTLREYTRLLNSLKRQKMAVENQNEAYRNSEGVDSFLLKTNTQLVHYLKKQIIKCEEEIKKLIGSEDWLDNKVKQLMTIKGVGLITVAIIIGETQGFSMIKNRKQLTSYAGYDVVQRQSGTSLKGKTRISKKGNSNIRAALHMPSFVYIKYNKLVKVNYERINERKPSKMIGVIATQRKLLTLMYTLWKTDQDYIENYQQIKIDTSQKKMPIQNECI

SEQ ID NO: 218700 - protein, 340 aa, unidentified
MTITTIGIDIAKSVFQLHGVDEAGAVIIRKKLRRSAVLDTLRKLEPCLVGMEACATAHYWAREISAPGHEVKLMPPAYVKPYVKRGKNDMADAEAICEAVTRPTMRFVPVKSAERQGVLVLHRTRDLLMRQRTMLLNAVRGHLAEFGIIAPQGPSKALELIAQLREGAHEDLPDVARTVLLGIGVQLDALGTQIHDLERQLLAWHRQDEVSRRLETIPGVGILTATALAASVPDTSVFRSGRQFAAFLGLTPRQNSLGGKDKLGRISKMGDGYLRRLLVIGATSVIRRAYTNPSATGAWVRSLLTHKSKRLTTVAMANKTARIAWAVMARGETYRAPVMA

SEQ ID NO: 218701 - protein, 396 aa, unidentified
MLKPITSTSQMETDVGKLAERSVASFPTAAGDRSFIPRSNKTVEKLDRRRFHEISPNSRKSRRGAGRRASSHSQGRDIVMDVAFTSFVGIDIAKRTLDVHVLPERRSLQHSNDSKGRRQLREQLPPPGLCLIVVEATGGYERALVAELIDAGYHVAVVNPRQARDFAKACGHLAKTDRIDAAVLAQFGETIKPRTQAKIPEKQLELQDLVARRRQLVALRAGEMNRKEKATSKLVRKSLQETIDLLTKQIRRFEKQIAALVQSDDEWKQKTQIVQSVPGVGSQVSACLLADVPELGQLNRQQIAALVGIAPFNCDSGQFRGRRTIRGGRISVRCALYMAALTARRANPVIRAFADRLAALGKKPKVILTACMRKLLVILNTMVKNKTFWNPEISIT

SEQ ID NO: 218702 - protein, 334 aa, unidentified
MKELKSCVGIDISKDSFEVCIRQLKDERSVIKATHSFQNEFSGFESLLNWTLRKVSNPIFVMETTGVYHEDLTHFLYENGQKVSVVLANKMKHFAKSLNMKTKTDKADAQMIAQYGLERQLEWWEPMMPQMKNLRDLCRERLSLKKDLVRCKCQIHGLKHAHSTLDVVLQVKEQQIGFLESNIQIIENEIIRLTKEDKEFSQRVKNIEPVKGLRLLTIVTVLCETNGFAQFNNIRQVVSYAGLDIAERQSGLFKGKTRISKKGNSRIRECLYMPALSATNYNEQIKALYQRVVERNPTIKRKGVIAGMRKLLILIFVLWKKNEAYNAAYQWDAH

SEQ ID NO: 218703 - protein, 350 aa, unidentified
MVVVGADVHKRTHTFVAVDQAGRKLAEKTVKAITVGHAEVVMWAREQFGADVVWAIEDCRHLSARLERDLLALGQKVVRVPPKLMAQTRASARTRGKSDPIDALAVARGLLREPDLPVAAHDEVSRELKLLVDRREVLVAQRTATINRLLWRVHEIDPEHAPKPRSLDLAKHRNILGRWLDTQSGIVAELARDELADVTRLTETINALAKRIGERVRKVAPVLLAMPGCGELTAAKLVGETAGVVRFKSEAAFARHAGVAPVPVWSGNTRGRVRLTRSGNRQLNAALHRIAVTQIRLDGLGQTYYRRRLAEGDSTPEALRCLKRRLARVVFNHLHSDHNNRQKPCQLAAA

SEQ ID NO: 218704 - protein, 343 aa, unidentified
MGKVYVGLDVGSSTCHLVAMDKDKSVVADRKFDTGESNLIKAVEELKGEVHLHLEASELAGWVRRVLKGRVDRIVVGHPKSNAWIAKDPLKRDRLDAYKLADLLRMDQVHEVYYADDDHRTVFKQIVQHYDDVTGQEIRLKFKIKAALREQGVIAKGLDVYTGEGREKFIAAVPSAAAREAVRPLYGLMDVTLKAQKDARTLMRRESLRYPEIARFEEVPGLGLVTSCRFSAYVQTPHRFSTKRKLWRYCRLGITDRQSDGKPLGRKALDWNGNGRLKDMSRKAFQGAMKARDDNMFKRTYRQVVQTTHNESHARLTTQRKILAVLLAMWKGGTAYEESLGKG

SEQ ID NO: 218705 - protein, 438 aa, unidentified
MSNSSRRLSRGDRRRNDRLARLRAVVTRETAVLAFDLAADKQVCALTDQDSRVLARRTVKAKAWQLREAVEWGLAQAAAAGFSSVVVACEPTGHRWRVLDQIAAEAGVQLVCVQPLLVHRAREGEDFTHNKSDETDAMIIARLVTELRCYLPERAEPAWARLRHLGARRVALVTDATAARQQVRDLLECAWPAALQASGDLSLIRRWGWTRFAAAVRRELPRHGATRWYSKIVRAVFDAAADPAWAEAGVASQRAGALERTRFALADLAHARAETAVVEARMVEVLDELGLTKLVTSIPGLSAVGAAAILAETGDPTRFSSARALVKHAGLCPRDNASGAYQGKTGISGRGRPQLRLAAWRAVWAALRNNPVLAARYAHLTGRADNKLTKTQARVAVAGSLLRQLHAVITTGTAWDPAIAGGLKPQSRECAKGAAAAA

SEQ ID NO: 218706 - protein, 375 aa, unidentified
MHMMQHREIRYIGLDVHKLSISVAIAEEGGAPTSYGKIPNDPVAIRTLMTRLGDPNVELRVAYEAGPTGYALHRQLTGVHIQCLVAAPSLIPKQPGNKVKTDRRDALKLARLLRSGDLTPVWVPDEAHEALRNLVRARADAKADLLRAKHRLSKFLLRQGCWAPIGVRAWSKRYFTWLHQLEFEHLPDRVVFADYLTEVNAAGERVKRLEAALHECAQSSSQVALIRALQAFRGIGFLSAVTLVAEAGDLRRFRTAPQFMAYAGIVPSESSSGGKQQRGSITKTGNSLLRHVLGEAAHHARRAPRVTSTVKQRQKDVPPEIIDLAWRAQVRLHTRYRHLSARIGALKALTAIARELAGFIWAAGHVIQEEVPVAA

SEQ ID NO: 218707 - protein, 410 aa, unidentified
MGYETLIRRAHVMTRKNTLKFLPTDTEFRVVGLDLAKSDVSVAAIPVDDNTPSLVDRMTYADLLDWAGKISPTLFAMEPCNGYSLLCLQLENLGHEIKVISGSTVSMWINTHLSGQKTDLNDAIALARLAVSDAELTPIRHKSITEIRIQTVQAVRQQLMSQRSKSIVSFKALAQQWGIPCAAGHRNLKKLRESIEAKVDLITRPVANAMLFLLDAVKSLDRQIGQLNQTLQELVMSDERGRLLQSVLGVGTQISARVITVVGNVERFNSPRSLVAYVGVAPRNFITGHKNLTKKKHGNCPDLSHKGQGKISRRGDKLLRSLFIQGAACLYMQFCKDQLPECQLKRWILKQLASQKPYGKLIVSLAAKLIRIVWAVLTYGEKFNIQKAGMTRSMWSEMALETPLNKEVPA

SEQ ID NO: 218708 - protein, 423 aa, unidentified
MIAVDPHKASNTAAVLDPVTKTVIESARFANSADGYGQLARFAARWEQRRWAVEGCHGAGRSLAQRLVADGEKVLDVPAKLAARVRVYSRGHGRKTDKDDAVSVGLAALDGTGITPVTRDDALVSLRLLCDRREELTAQRTQAVCRLHRLLAELTPGGMRRELSANKAQALLGRIRPADDVSQVRVHIARDHLADIRALDARIKYIGTQIAALVTASGTGLTRLYGIGPVIAGRIVAEVGDVARFATKDTFASYNGTAPIDVSSGDQIRHRLSRAGNRRINHALHMMAVTQIRNRGSQGRAYYERKRLEGKTGKEALRCLKRRLSDLVYYQLIADRQGTIGKCGSPTTGRPTPPTCTSPTSRRQPARPQPAPRPRPASTPSSRSTGTAASSPASRSSTPAPSCPPTYSTRPKSPAKAPPAPHS

SEQ ID NO: 218709 - protein, 431 aa, unidentified
MEQKRHPYLSVGIDIGADFSLMAIALPTQEIIGKPYKILHSNNRSVQGAVERILSMEQAYELPARVYMESTGIYHLPLYHRLKNAGLDVYVLNPLVTHANQNINIRNIHNDKLDARRIALLGLRPDLKTSIVPADDVAAVKALLREYHAMKKETSMYICRLKNQLRQIFPQYLPLFSKVNGKASLEVLSHYPSPSAVLSAGADALAKLIQEASGKGRTMAEKKAEAILSAARESLSFGHGNSGITFLIGHYVEMIRILDEKTAAILKQIKRSVQEQPDSLLARQTRLLESIPGAGFLTAVTIVCEIGDFRAFRRPKQLYSYFGLDPVVRQSGNSAGANLRISKRGSPYARRCFYILALQSVSLRKNGEPKNHVLRTYYLEKCKSKAKMTALGAIMHKLCNIVFAVLRDERPFVLISPQEHRQNYLSLPKAA

SEQ ID NO: 218710 - protein, 333 aa, unidentified
MSEFWCGTDVSKKSLDSAVPGSKKGKHQTVNSENKTLGFQKILSWALKAAGPDREVRFCMESTGDYGVDFGLWLTEQGYHVSVVNPAWIKFYGQSKGRLNKTDKADARLIADYASENNPEAWELADPTRRELFRLNRRKEQLLKMETAESNRKECPNAIGDKCLGSINRVLKVIRAELLEIEEEMLKIVASDPDLKSSLELIVSIPVLAQGSAFRILSEMPSVDKRESAHSWVAAAGGQPNQRESGTSLGKTKMNRGGRKRVRSALWMPALKGLGQMPELRSLYDRLVGRGKTHRQALLACVRKLLSIVYGILKSKKPYEPRLPQTAVEAVAA

SEQ ID NO: 218711 - protein, 426 aa, unidentified
MNCTQNYKIDQVTEQTLVVGIDIAKRTHYACFVDDRGRVLRKSFPIFQSKEGFRQLYEAIQEAMQAFGKSEVIVAVEPTGHYWLNLAYFLEEHGIPLVMVNPAHVCRSKELDDNLPTKHDAKDALVIARLAKDGRFLVPRLLHEIEADLRVGSTLKEKLRKEQTAVKNAIVRWTDRYFPEFWTVFRDLGKTALSVLEWTPLPADMAGRSAEELIEVYRQSEGLKCPQKAKIQALINAAKDSIGVTEGTTMARFEIAALVRRYRQLEAEIAALDAELKALVQTTMEYQWLKTVDGLGDATIIDLLAEIGSFAHYRDPRQLVKLAGLTLKENSSGQRKGQKHISKRGRKRLRSVLFRAMIPLIRHNEAFRELHEYYTTRPVNPLTGKQSIVALCRKLLNVLFAICTKKQAFDAERMKQDVLSQVQRAA

SEQ ID NO: 218712 - protein, 445 aa, unidentified
MKSLPVINPKAAAIDVGSEQFHLSIAGDEPVIFGTVTDEVYRLRDYLKEHSANSVAMEATGVYWLYAYSVLEAAGLQVVVVNGRHVRNLPGRKTDMADCQWLATLHAHGLLRGGFVPSAEIRQLQDYQRLRSDHIIGSGSQLQKMQQALERMNIKFHDVISDLDGVSGLKVVRAILAGERNAYVLLSLCDPQIQKKKGERVVQSLRGTWAPEHLFALKQALQAWEFYQKLLSECDQQIEAVLKAMAGPEPESGEPPAKGKPPGKNAPQIDQLHQMLMRICGGRDVTAIAGIGDNLLLQLLAETGPDLKAWPTEKHFTAWAGLAPGSQQSGKRKGNVKRQRNRAGRLFCAGARSLVNSVDKALGGFYRRMAARKGGLAAMKALARKLAELYYRVLRHGLTYAEKGLHAYEAKYAESQRRLLAKLAAKHGFRLVSIASETLMQRTSA

SEQ ID NO: 218713 - protein, 341 aa, unidentified
MDYYAGIDVSLKSSSVCVVDASGRIVREGKVASEPEAVIGWFASLELSPARIGLEAGPLSQWLYAAMREAGLAVELIETRHARNAFKTMPVKTDRKDAQGIAELMRLGWFRPVHCKSMAAQETRANLTARKLIQSKLHDVEMSLRGILRGFGLKVGAPARRQFEARIRDLVSGHPTLEPIAESLLAVRAVLLREFNSFERRIRDIARCNPRARLLMSAPGVGAIVALTYASAIDDPQRFKSSKQVGAHFGLTPRRHQSGEKDVIGRISKIGDRLVRTALYEAAHVMLTRAIKGSTLKSWAARLARRSGMKKAKVALARKLAVILHRMLADATPFDAAAAAA

SEQ ID NO: 218714 - protein, 357 aa, unidentified
MNFIGIDLHKKTISVCVVNQERKVLRRKSLDCVEPDKIVSFFEECGGFAAVVEATASYEWLWQLLEPLAQRLVLAHPKKLRVIAESKNKSDRLDAQVLAEFLALGMIPQAYRPTLRQRQHRTLVRQRCFVQKNLTRVRNKIRRVLSDYNADRRDLFTAAGLKYLKGITQKVSAADRFVLNQLLTEWHYHRQQFQAVSRQLKAFAQKASAKEREIRTVLGSMPAVGPTTIEVVLSEIGDIERFRSQKRVVAYAGLAPGHRESAGHKKDLGITKQGSGLLRWVLIQTAWRTVRCSLRWRSVYENLKKRRGSKRAIVAVARRLLTVMAALWRTGQLYRRADEGGGQAVLPTRKATVAAQA

SEQ ID NO: 218715 - protein, 359 aa, unidentified
MLYLGIDQHRKQLTVCIRNEKGDVVFRRQVSTQWEPVRAFLAETRETAAEAGFVAIVEVCGFNDWLVKLLNEYGCGRVLLIQPEKRSKKKTDRRDANALCEILWVNRQRLLEGKRAQGVRCIPWPTEEEAQDRQLTEQRKRLGQLRTRSVNRVKHLLRKHNLQQECPTKGIDTITARKWLQKLPLGRMDRLEMDLLLTQWKQWDEQIKTLEAEIARRQAENKTAAVMATIPGCGAYSSLALASRIGSIERFPRPSSLANYWGLTPGCRNSGEATDRLGSITKQGSATARFILGQLVLHVLRKDASMRAWYARIKKRRGSKIARVAVMRRLATILWHMLKNHQPYLLGGPPRLKLGKRTA

SEQ ID NO: 218716 - protein, 343 aa, unidentified
MDQHIGLDVSLKDTSISVRENGKRVWRGKCASDPKLLADLIRKRAPRVKRVVFETGPLAVWFYHALTAEGLPAICIDARHAKAALDMAANKTDANDADGLAHLAEVGFYREVRVKGFDSMLMRTLISARRQLMKMRVQMSNQIRGLLKTFGLVVPKGAGSVFERNVISLLDGEDNLASIILPLLKAWSDIRLRVAELTKQLVVMAGADQRCRLLTSVPGVGTVTATAFAAAVEDSINFKNSRAVGAWVGLTPKRYQSGEVDYEGHISRRGDGRLRTLLYEAASVILNRSSETNALRTWALALKERLGFKRAAVALARKLAVIMHSMLKTGELFNPNAGTAVPA

SEQ ID NO: 218717 - protein, 388 aa, unidentified
MLYVGIDIAKLNHYASAISSDGEVLIEPFEFTNDNDGFRMLLSKLDQFEKESIIIGLESTAHYGYNLVNFLVSRSFRVCVINPLQTSAMRKNNVRKTKTDKIDTFVIAKTVMMIDRPRFVTLYDIGLMQLKNLGRFRQNVVKQRTRLKIQLTAYMDQVFPELQYFFKSGFHHKTCYALLKEAPSSDMIASMHLTHLTHLLKSNSHGHFKKETALELRVLAQKSVGTSDKSLSIQVTHTISQIELLNDQLMDIENEMTDIVRSLDSPIMTIPGIGYVNGGMILGEIGDIHRFSRPNQLLAYAGLDPTVYQSGNFQAKKTRMSKRGSRALRYALINAAHNVVKCNDTFRNYYDSKRATGRSHYSALGHCAGKLVRIIFKLLTDEVAFDLD

SEQ ID NO: 218718 - protein, 344 aa, unidentified
MNISRVGVDIAKSVFHVHGVDRHEKPQWRGKYTRAKWLEAVCRRVPQGATIGMEACAAAHYWARELQARGYHVKLIAAQFVKPYVKTNKNDRADAEAICEALGRPTMRFVAVKTVDQQDSQATHRIREELISQRTAKANQIRGLISEYGFIAPTGIQQLRRALPLWLEDATNGLSDRFRRLLADLADDLRYLDERVAQLTSAIETHANTDPVAKRLMTLRGIGPITASALSGVLGDGAIYKRGRDFAASLGLTPRQHSTGGRERLLGISKRGNSYLRKLLVHGARAVLRYAVKKDDGLSQWIKHLAVRKHRNVAIVALANKTARMAWAVTRYEVPYNPELSAAA

SEQ ID NO: 218719 - protein, 335 aa, unidentified
MYKYIGIDVAKSTLQVFIPQDDLDLELENNPKSLNKFYGKLKKIYKKEIDSIVFIYESTGSYSTILESYAEEKSIKCFKVGAYQSSSFSKVIKNRSKTDKIDARMLSRMHILAKDDDIKIPSRDIEAHKIRSFIKYYQSLVKEHVRISNYLEAAIFNLEDEYVLKQVKKRIANIDQEQELIIVKVMDIINVNKAYKEAYDNIISIKGLGQKSTIVLLYLFLRYPNASRQHITALCGLDPTQRSSGTSVQHKQRISKQGLSLVRAMLFMPTMIAVRYNEEMKLIYDGLLERGKPKMLAQIAVMRKIILLAHSLYKNNEKYDDKKYLKFKQKKEMEL

SEQ ID NO: 218720 - protein, 396 aa, unidentified
MAQIWAGTDIGKTHHHCVVLNAEGDRLLSRRVLNDEPELLTLLADVLAIDEDVVWAVDVADGMAALWINVLLNHGQHLVYIPGLAVNRASAGYRGMGKTDAKDATVIADQARMRRDLTVLRPDDEHAIELRVLTNRRSDLTADRTRRVNRLRGQLTSMFPALERSLELGNVGPLILLTGYQTPAALRRTGGKRLVTWLRNRGVRSPEALSQVALEAAERQHTAVPGEKITAQVIHTLAKEVMDLSEQITGIDKLIAARFREHELAEVISSMPRIGPLMGAEFLAATAGDMSRYGTADRLASLAGLAPVPRDSGNISGNLHRPRRYHRGLQRVFYTSALISIRSCDDSRRFYERKRAEGKRHIQAVLALARRRVNVLWALIRDGQCYQSNLPVTTLA

SEQ ID NO: 218721 - protein, 394 aa, unidentified
MLYLGIDIAKNNHVATLINEQAKPLFKGFSFANTVDGGESLIAKLNNHAQTVDGVEVGMEATGHYWLSLYSFLVEKGFNVHVINPIQTDGWRKGVEIRKRKTDQIDSFLIADLIRYGNFVETSLSDENVLSLRNLSRFRHYLVGSIGDLKRKAICVLDQTFPEYQSVFSDIFGQTSGELLLNFQTADDFQNITAEQLESALENMSRKTFAKNKLTQISELAAKSFGLKFCRDSFSLQLKLLLEQIRFIEAQVSDVETEIAKILQSLESPITTIPGIGPVTGATILGEIGDINRFSNPSKLVAFSGIDASVSQSGENAGTGRKMSKRGSPYLRKALFQAALVASTCDPVFKAFYQKKRSEGKHHLTALGAVARKLCYTIHAILKNNTPYEIQDHN

SEQ ID NO: 218722 - protein, 349 aa, unidentified
MTLYIGVDFHPHQQTTAWCDTRTGETRTSDLVNEPEIVREFYSSLPEPATVGIEASARATWFENMLFETGHKLFVGNPVLIRKRATSRHKNDRRDAELILELLLRGEFPAIWRRPPESESVLEILRLRQTLVRQRTQSYTRLQALAHDVGLRKGRIRTIGFQKLVKAAEMTEVASIRRTHLFSLVGKLSEQIAELDQWLQKMADNDHSVQLLLSQKGVGYLTALVTVHTLGDVSRFPRLSKQIASFAGLDPVEKSSAGKTRFGSISKSGSRLLRYHLGLAAQIASRTDPKLKSFYKRLAKKKPKAVAKTAAARKLLVKLSIMLRDRITAEEFDRRGRTVGNARGTTDLK

SEQ ID NO: 218723 - protein, 403 aa, unidentified
MRYFVGIDWASQEHTVCVIDEQAWVIWRAIIPHTAQGMTALRAKLTKLAEPGALPIAVERPSGLLVDTLVDAGFPVIPIHPNVLKASRPRYSAAQGKSDPGDAFILADLLRTDGHRFRPLLPLSDETRALRALVRTRDDLVAQRIALANQLRALLERFWPGAAVIFADIDSPIALAFLQRYPTPQSAQYLGERRLQAFLAHHAYCGRRSAKELLERLHSAPVGLVGEAEMEANGELVRALVSVLEPLVAQIQRLTAAIEHAVAAHVDGPVFTSFPRAGQLNAAQIFAEIGDDRRRFTSAERLAAEAGVVPVTYESGKHRGVAFRWACNKRFRKAVTIFADNSRHESPWAAAVYERARVRGCDHPHAVRILARAWIRVLWRCWQDRTPYNPASHGALARIVGAA

SEQ ID NO: 218724 - protein, 363 aa, unidentified
MHSINNTELSSLEETRCQFNGGNADIKLGIDVHQDFYVVVMQEGGGNPKPPQRFHKEAFVHWAAKLKSRATEVYAVYEACGFGFALQRQLSALSIQCYVVCPQKLDEHNKRVKTDGLDAKALCLRLDRFVQGNRWALALVRVPSEEEERSRAIHRQREQLVKGRKQLEAHGRSLMVNHGIEPVKSWWKQGNFGALQVPKWMKELLGNSQPILLALQEKIGALTLQLQAAAAPEQPRGLGQMTSVIIDREIGDWNRFNNRRQIASYTGLCPGEYSSGNSRLQSCVTKHGNPRLRAALVELAWRLVRFQPSYKPVLKWRAILAKGALATGAARKKAIVAVARQLAVDLWRIKTGRLRAEELGLIS

SEQ ID NO: 218725 - protein, 338 aa, unidentified
MKKRYNSKPDDNICMFVGLDVHKKYTEVAIVDEDGVVTEQERIENEPGLIEEFSDRLNNADMVMESSSTWYWLYEILSRKHRVVLSNPAKTKAIASAKLKTDKVDALMLANLLRGGYIAESYVPSRRVMGLRELVRYRANLVRIRGTIKNRVHAYLLMNNIKIDYSPFTKGFLEELGKVEDGRVQGYLRIIERLNLEIHEASKRICSEALSDEAARLLMTIPGISFYSALLLVSEIGDVSRFPDSAHLVSYAGLVSSTHSSGGTTYHGRITKAGSPYLRWVLNQCVWVHMRSEPEGNVAGFYGRLRKKKGHAKAVVAASAKLLKIVYWVLKEKRPYQG

SEQ ID NO: 218726 - protein, 338 aa, unidentified
MKVTTVGLDLAKSVFTLHGVDERGHTVLRKTVRRAKLLEVFAQLPSCVVGMEACSGAQHWARELRKLGHAPRIMAAEFVEPYRQGGKNDANDAAAICEAVSRPKMHFVAVKSAEQQAVLAVHRLRQGLVEERTALANRLRGLLAEYGVVVSMGLDRLRRALPEILEDGANPIPGLAREVFGDSQQHLRELDDRIAAYDRRIAALARASAPVQRLMRIPGVGPVTATALVASVGDAKVFDNGRQFAAWLGLTPRQHSTGGKQRLGVMTKHGDVYLRTLLIHGARAVLRVTPKQRDAKSRWAESLRRRRPDNVVAVALAAKHARISWALLARDKDYEIAA

SEQ ID NO: 218727 - protein, 423 aa, unidentified
MNSSAKDVPFQEQYRVFVGFDWASDHHDVVAVNASGQVMLELTFEDTSEGWASLRQQLLEHVGLGLSKVAVAVETCNGPAIERLLEMGCHVYPLNPKAAQRYRDRKAPVGGKSDRLDAWSFGDALRTDGHGWRCLVSDDPLTQELRILCRDEVQLIQQRTALVAQLRAALHEYYPAALEAFEDWLSDGSWAFVEAFPTPQALVKAGKRRWEKFLHTHKLYRPETYAQRLEIFARADQFAGSPAVTHAKSHLALALAAQLRVLAKQLRRYRQVIQELFARHPDHDIFGSLPGTGAKLAPRLLSEVGDNRQRFEDPQAIQCYAGSAPVTEQSGKKRWVHFRMGCNKHLRTAVHLWANLSREKCPWAQTYYQHKREQGMGHACALRCLAQRWLKILWKMWQTRTTYDESLHTRNQIKHGSWVMSLT

SEQ ID NO: 218728 - protein, 479 aa, unidentified
MDCRRLVGIDLGIASAHTVRVLDESGQTILKRKAWPTVESLTEVESAALAGCADSMCLEVVVEPTGPAWLPVAVFFANRGHIVHRVSSAKAADLRRFLARHTKTNGIDADTLARLPLFDPAGLRPLRLPGAERAALDRRVRACDRLTRAAAEHKVRIKDLVRQLLPVTPLIGDLGVADLAVLERWADPNALLEAGAKRVRTLIVKASNNHQGAERASEWIAAAEASVALYAGHSAVAFADLAAEVATEVRLLRAIQGELAGHATERETCYRRVDPATLARSLPGVAQVGGPALVAAMGDPARFARGKQFRAFTGLTPRAAETGDTDRKGQPMSKAGSSLLRTTLVRAADTARKLDPQLARIYHVQMVERGKDHLGAVCVVAANLGERCWAVMHRQMPYVIYDTDGRPVTPDQAKTIIAEHWTVPAEVRARRRSKKMGKAPQQVLTAQAKPSARGAGKRGDLPQPASSPATNDHVNRRTA

SEQ ID NO: 218729 - protein, 416 aa, unidentified
MKGTEKAREAQDRYIALDIHKEYVLAGGQNAAQEWMMQPRRISMERFQEWAIANLREGDAVVLETTTNVWDIYDIVAPLVSRTVVAHAGAVRQIAEARVKTDKEDVKRLIRLLIADIVPEVWVPPVEVRELRGMISYRNRLVKTSTMIRNRLQSLLHRHNLILPKGGLTDKAWWEMQKISAMEKIQIRQELAMLDEINQHKAEVDAELGRQSLGETWGKQAVRLLQLPGFGVVLSMTVLSAIGDITRFESAKKLVGYAGLGAGVHDSGKEHIEKRITKSGRKELRWALVEAAWCAIRISPYWKEQYEKFLHRMRKPNLAIVAIARKLLVAVWQVMTKKETDIHASEEDLAYKMLVLAWDLGEDERMGLTYKQFAKYALMKLGIETDITRFVRKDVPRRIASREEVLARLDELSLNC

SEQ ID NO: 218730 - protein, 354 aa, unidentified
MPKRVCMPSVRVPAPQYQLFVGVDIAATSFAATWTMGGAVRERARTFDQTPEGFTALQRWLATTQVAPAATLLVLEATGSYWVTLAVAMQQAGYAVSIVNPAHAHAFARSLPRRAKTDALDAQVLAQFAAERQPPCWTPPEQVYHELRQRLVVRDGLLQMRQQARNQRHALAQWPVTVAGAQEALDTVITELDTQLQTLEEAIATVLRDGAWAESATLLASIPGIGLVTTAWLLVGTLNFTACASAEAAAAYAGLVPLARESGTSVRGRAQIGHGGHARLRTALYMATLTAARFNPLIRTQYERLRAAGKPPKVARCAAARKLIHLAFAVVTKKRPFDPAYRVRDHHATMDAAA

SEQ ID NO: 218731 - protein, 417 aa, unidentified
MDTDCKTNFKESTMNAIGIDVSKGKSTVAVIKPFGEIVKMPFDVTHTTKDLAELTSFILSLDGESRVVMEHTGKYSEPVVTALCNAGIFVCVVNAKLVHDYGGNTIRRVKTDKVDALKIAGYCLDKWVNLKTFIPACEHRKMLKTYNRQLSTYAKIKSVLKNNLISLLDQAFPFANELFTSPARSSDGHEKWIDFIAQFYHCECVSSLSQPVFTKTYEKWCRKNGYKFSQSKAEKVFAVANEHSATLPKNDFTKTLIAQTVRQLNSLCETVAIVKSEMEQIASLLPEYETVLDMHGVGKTLAPQLIAEIGDIGNFPKRSSLARFAGIEPPENQSGSYNQHSRRISKQGSPHLRRALFQVMCCVLQLSHENEPTFQFLDRKRSEGKPYKVYMIAGANKFLRIYYARVKECFNNLEKSA

SEQ ID NO: 218732 - protein, 416 aa, unidentified
MDVLHPRCAGLDVHKRTVVAAARLVEDGKVNKEVRTFETTTAGLMALAEWLSSRAVTSVAMEATGVYWKPVWHILSSVGGFELVLANALHVKAVPGRKRDVSDAAWIADLQAHGLIRASFVPPREVGELRSLMRTRKQLVRERTSHTQRIQKTLEEANIKLDSVISDVLGQSGRAMLEAMIAGESDAKRLARLASPRIKAAPETLERALDGRLAEVQRLLLRVHLAQIDAVEASIATIDRHVETHLDPFRTAVEQVVTVPGMGVRSAMAVLAETGIDMSRFPSQGQFLSWACMVPRSDESAGKRRSSRLRPGGNWLKTMMVQCAWAAVRKKGSRFAALFERLSAKRGARRAICAVAAEMLRTIYHMLKDGTCYEHKCLSLHRQATPQEEAKRLIRRLARIGYVADIKPIPTPAPSV

SEQ ID NO: 218733 - protein, 343 aa, unidentified
MQTIATIGLDIAKSVFQVHGVGADGQVVVRRQLKRRYVLAFFQKLPPCLVGIEACASAHHWSRELQALGHTVKLMPPAYVKPYVKRHKNDAADAEAICEAVTRANMRFVATKTPEQQSCLTLHRTRHLLMRQQTSVINAIRSHLAEFGIVAPVGRNGVEQLLGVVADLNDKRLPEVARTCVAALGAQLRVLKVQILEFDRMIRTWHRSSEASKRLDQVPGVGPVLATALVASVADPRAFRSGRDFSAWIGLVPKQNSSGGKERLGNISKRGDRYLRSLFTTGALAVIRYAKIHGTKHRPWLTALLARRPTKVAAIALANKIARMAWAMMAKGERYKEPAALAA

SEQ ID NO: 218734 - protein, 404 aa, unidentified
MKKHNKTDKTESAKKQIVATQSNNEKQYVKKEVRGLVEKLNGAMRENKSQPVVPVVTRDGFHVGIDLGDKKSNYCFLDAAAKIVAEGKLATTRAQMAAYFSALPKCRIAVEVGTHSPWVSALLESYGHEVFVANPRKMESIHKNKRKNDKVDARTLARLVRADPELLYPIRHRGVEARHDLVLLRARDALVSARTKLINCVRGLAKSVGGRVPTCSAESFHKVAEEALPEDVREALLPLVVQIEVMTARIRKYDEKVELMAEQKYPETGALRQPKGVGPVTSLAYVLTLEKPERFQKSRDVGAYLGLVPKQDDSGESSKQLRITKEGDNMVRRLLVGSAHYILGPFGEDCDLRRFGMKLAARGGKNAKKRAVVAVARKLAVLLHRLWLTGEEYEPLRQARLQEG

SEQ ID NO: 218735 - protein, 338 aa, unidentified
MSLYGGIDLHANNSVMVLLNEQDQVLYQQRLANHLPTILEALAPYQADLIGVVVESTYNWYWLVDGLMEADYRVHLANPAAMQQYSGLKYTDDHSDARWLAHLLRLGVLPEGFIYPKAERAVRDVLRKRAHLVRQHTANVLSVQNILVRNTGARFSAKRIHALTREELERLLPEADQVLAVTSSLALLHCLGQQIKTLEQAVTKRLKHTPAYKQLLSVDGIGEILAQTIVLETGHIGRFPTVGNYASYCRCVKSTKISNGKRKGQGNVKNGNPYLEWAYMEAAQFAIRFSPTVQRFYQRKQAKSHLMVARKAVAHKLSRACYYIMRDLVPFDVQKAFG

SEQ ID NO: 218736 - protein, 427 aa, unidentified
MNSTQNDKISQITENTMVVGIDIGCFTHYARAFDWRGREISHLYHFLNCRDQFERFLRWMREVAHENGMKNILVGLEPTGHYWFALGQFLEEHHVTLCMVNPYHVKQTKELDDNNQTKNDQKDPKVIAKLVLAGRYSYPYVPKGVYADLRILSSMHLGLNKSLIQYKNQIARWFTIWFPEYREVFKDIRAKSSLLVLEKACTPDAILALGADGINAIWRGARIRAVGMKRANHLIEAAHRSIGQKEGRETAAFQMKMLLADYRKAKEQEDEVIEKLEQLCKRIPATEQMLSIQGIGIKTVAGFLAEVGDIGRFQTPKQIQKLAGLALKENSSGKHKGATTISRRGRARLRTLLFNAAIALIGKNDAYRKLHQHYTQRSKNPLKKKQSVVAISCKLIRIFYALLSKDIAYDEEKMLKDIVWESENTVA

SEQ ID NO: 218737 - protein, 429 aa, unidentified
MQNESTPGARGPVFCGVDTHADSHWLCVLDWRGRKVLSRRFPADAAGYEALAGAIAAAGEPACVAMEGTSSYGAGLTRHLASLGMPVREALSPARMQRRRPGQGKCDESDAERAARAAMSGSKLGTPKSQDGWVDGVRCMLAARSGAVKARTSAINTARSLLTTAPEGLRSRFRGMAGPRLMEELPSVRAEGALGAALGALADLWAAARDAALDMERAIEASLEENCPALLAMYGCGPVSAAKLAVAAGDNPGRLRSEASFAAICGACPIPASSGKTVRHRLNRGGDRQANSALHEIARQRVMRDPETAEYAERARARGKSDREVMRCLKRYVAREAYRALMRPHEIRRPEDASELVAARRAARVSQVRAASILGTSEKYISMLERGQRELKPIRRAYEAWVEAGLPLDWDRQAFEAERKMNSKKHLAK

SEQ ID NO: 218738 - protein, 345 aa, unidentified
MPIVGGLDIHRKQITFDYLDTGTGQVQRGQIAPADREHVRAWLARFAGREDVAFAAEGCTGWRYVTEELAAAGIAAHLAEPADTAFARGRKRHAKTDKTDCRHLRQLLAEGRLPECWIPPSHILECRALLETYHDLRAEHTAWVQRIHAVLFHQGAPALGEGTLRTEQGVAALRTAAAAHLSPAGQLQVATALDMTDMLESRLHELRHQLLDAARHLTGAKVLAARLYGVGPVTALAMTCWLGGEGRFSSSRKAVRFAGLDVTVHSSDRKGPPGRLSRQGPPVLRWAVYEAGKTHARSSAPDHRYYAQVKDRCNGKRAALSEARKILRQACHILTELGDDALSAA

SEQ ID NO: 218739 - protein, 307 aa, unidentified
MSEKIYFGVDVCKESLAFCGPGVAGQMANNAPGARRLLARLPKGAHLIIEASGGYERELVRVAQQSAVPLSVVNPRQVRDFSRGVGRLAKTDPIDAEMLARFGAEVNPPPDAVPTAAEVALQELVSASQQLVEERTVLLHQQAQHLNSIVRRLDCARLKLLQRQIAQLELAIGSILEEQSALKQKVERLQQVKGVGLITAVTCVALCPELGSLSRGQTAALVGVAPYDDDSGARKGSRHIAGGRSRLRRALYMASISAVRSNPILRRFYQQLRQRNKPPKVALVAVIRKLAILLNQLLRNPSFLPAS

SEQ ID NO: 218740 - protein, 347 aa, unidentified
MEQITRIGMDTSKNVFQLHGVDAAEKPVLRKKLTRREMIRFFEKLPPTLVAIEACGSSHHWARLLGSLGHDVRLIAPQLAKPYVKRGKNDAADAEALCEAVSRPTMRFVPVKTAEQQAALMLVGVRERLIQKRTQLVNAIRGYGAEFGITAATGACRVVPLLECIAEDETIPELARELFALQGKEYAQLQCEIERIDAKLMEWHRNDECSQRLAKIPGVGPIGATLLMMKTPDPHLFKSGRDFAAWMGLTPKDHSTAGKTRHGVITRAGDELLRSTLVVGATAVVQHARNGRGRNLTPWLIGLIARKSPKLVAVAVANKAARVAWKLMVSGERYQCVAPPALTAVAA

SEQ ID NO: 218741 - protein, 324 aa, unidentified
MYKYIGIDISKQTFDVYSLNEKGESLVLSFANNKKGFSKLVSRYGKTGIYVMEATGPYYVQLATYLYEKQIKVSVVNPLIIKRFSQMQLSRAKTDKKDAQMIYQYAKINDYKLWEPEPDEIKDMQQIISAIELLNKQKSSVTNQLNSFIDSGFISKETKKTLNQILKKIKKSILKLEKQLENIVEENFKETKELLESIPGIGPKASSKLIAITNNFEKFENYKQLIAYVGLSPRIYSSGTSVKGKGHICKMGKSSIRKQMYICSWSAKFYNKACVELYTRLKEKGKPERVIKIAIANKLLKQAFAVVKNKRMYDENYVSKFVAA

SEQ ID NO: 218742 - protein, 319 aa, unidentified
MNVVGFDVGKDSLFGARIDRSGVVKERYELSNKRAALLPVLKLLKKKYRHLLVASEATAEYHRPLAEACIELGIQFRLLNPITTKQFTRSTVRKRKTDKTDAEVIARVALQGEGTVITADSFRDTQPMLRTAVKLVQLSHMLRLMQHHMDAILPAETLLKDELAACQERLELAVKTFRGRATEETPQELEALLISIPGVGHVTAAVLIAEIGDITRFKDAQRLVAYAGLDPRVRQSGTSLNRNSHLTKRGSPYLRRALYLAAASAQRHDPELKATYDKKRAEGKRYSEATIVVARKVLARVYAVWKRNQAYEVRTELVA

SEQ ID NO: 218743 - protein, 358 aa, unidentified
MGQCNVLEKNGKRIPVTADDEVYVGLDVHKRSIEVTVRFNGQEVANWKHGGALQGLIGSLMPLQPAMKKVAYEAGPTGYGLCRVLQEAGLPGEVWPPGKVPKKANQGNKTDLLDSRDIAKYAEKDMVEPIVIPSEQEEAERQVMRTRDQLIKDIRGVKQQIKSFLLVHGVEEPEGLGGWAKKAVNKLLRLPLREELALCLQVKVQQLLHLQSLMKKIEKKVRELARSERHAEDEKILRSHPGVGRLTAMNFILEIYQPERFEVHRQVSTFVGLAPRVSQSGDRRQEGPLIKAGRESLRSMLVQAAWQWVGRDHRAYETYRRLCGNTGCSQKAIVGMARRLCVNLWCMLTRGEYYRPGG

SEQ ID NO: 218744 - protein, 357 aa, unidentified
MRSSNVKYIGLDVHQEAIAIAVLNSAGKLVMESIVETKAATLLEFLHGLRGELHVTLEEGTWAAWLYDVLKPHVSEIVVCNPRRNALLKEGSKSDKVDARKLAELLRAGLLRAVYHGENGLRTLQELARSYLTISKDQARVMSRLKALYRSWGIPCSGRQVYTPRHRGQWLSRIAHPGVRRRAELFYQQMDGLSAVRHTVRGELLAESRKHEAVKILRQIPLIGPLRAALLLALMQTPYRFRTKRQLWTYSGLAVVTHDSAQHRYVDGQLQRSKKPQQIRGLNQNHNHEMKSIFKGTALSASQCAGPLQDFYAGLLTKGMKPEMARLTLARKIAAIALTLWKKGGRFDAEHLKSQAA

SEQ ID NO: 218745 - protein, 308 aa, unidentified
MIAQNYVGCDISKQWLDFFDETSGRLRRIDNQADAIAAYVAGLEPSRDFVVMEATGVHDRLLRHALAKAGVPFSRHNPAHTHHYAKSTRRRAKTDPLDARMLSDYGRRYQPEAEPAPSEDVEQLQSLARHRDHLVEMRATAKKHLAEAFNEIVIADLEETIAGLDTRIKAFEGRIAEVIRQNQDTARDHALMVSVPGISKVGALSLLALLPELGKRSPKAIAALVGLAPFDNKSGKLNRRSQIQGGRSRVRRALYMAALTAIRTCDRFKTFYTALAARSASKKLAIIAVARKLLVVLNAIMRDKTAFA

SEQ ID NO: 218746 - protein, 428 aa, unidentified
MDESHRNRLEEFRQLRKEVRHSEEYLIVGMDIAKDRHYAFFGTATGRTLLRRLVFSNDHEGFRKLLDQTEALRVQHGLKKVVYGMEPTANYHKPLGEYLINLGRTVVLVSGVTVGRNRESLDGRWDKHDGKDSANVADLISQGKCLYYEHPSAELRGLRGLLSLKRRLKKQEHGYRVRIRNQLIAQYFPEMDRYYERLGAEGLSIVKWCLAASEIAQLDVDPFIQRVTCRRIGMEKRRRLEEVWEKAGESIGCEGVPGVDHEAKVMVEGLRQIREMIKETEDKIEELCQQFPHYQYLLTIPGFGPDVSAKVLGAIGEPDRFENGKQVLKLGGLDLSADRSGKDSDKAIPEISKRGKADLRYALYQAAFIASTKNRDFMLYYTSKLQGREKEKGIHTKMLVKLSAKMLLIAWTVMKKKEAFDPAYLNAE

SEQ ID NO: 218747 - protein, 386 aa, unidentified
MQVVYARCAGLDVHKKTVSACLSVCEPGGDKQQQMRVFGTFTSDLLALGGWLKDHEVTHVAMEATGVYWRPVRAVLEGQFQLMLVNPQHIKAVPGPKADAKDCEWIADWPPHGLLRGSFVPPAPIQDLRDLMRYRAELRLSQKRVADRIQKFLEQANLKLSLVAFNAPGVSGRWILKAIIAGQDSPEQPATLVREKLKNKVLQLGQALEGRVRDHHRFFLAEFPDEREALGQRIRRQLPTTQHLASWAALCPGHHENTGKRRSGKTWDGNKWLRWSFCQAAWTVIRKKNCCLPARFKRLAVRRGAKRAVIPGAHTMLIICYHVLKTGGGYHELGGNYLGQINKDQLQRYFVKRLQRLGLKLTVEPVAEAAWGGHFRRRRLPCAFWR

SEQ ID NO: 218748 - protein, 404 aa, unidentified
MYNAVGIDVSKGKSTIAVLQPGGTVIRKPFDVSHTSQNLNELADYLGSLEGPSKIVMECTGRYHEPMLKVLYEAGLFVSVVNPHLIKNFGNNSLRKVKSDPADARKIARYTLDNWAELRQYSDMDDTRTQLKTLNSQFSFFMKQKVAAKANLIALLDNTYPGVNKLFDSPTREDGSKKWVDYAYSFWHVDCVRKIGLKTFTERYKAFCKKHHYIFQQDKPEKLFNASKELVAVFPKEKTYKLLIQQSIQQLNLASGHVERLRQEMNALASTLPEYNTVMGIYGVGKTYGPLLIAEIGNVSRFTHREALTAFAGVDPGVDESGQHKSKSNRASKVGSARLRKTLFQIMTTLLQNAPEDDPVYRFLDKKRAQGKPYYVYMTAGANKFLRIYYGKVKECLRNLEQAE

SEQ ID NO: 218749 - protein, 324 aa, unidentified
MAKRITICAGIDTGKRKLDVAIDGSSLQLQVENTAEGHEVLLVWLRRHKVKRIGIEASGGYELPVVTELRRKRFVVVVFQPAQVRAYAKFHLQLAKNDKIDAALIAACTAAVKKIHAAPDPRLQPFAEHLTLIDQIGEDIQLHKNRLETCRDPRIQKLWEEEISRLAKRQRVELKALAAAIRQHPDLAQRLNLIYSVSGAGMSTAVAILVRMPEIGTLNREQVAALAGLAPYDDDSGERSGARHIDGGRKRLRRALYTAALPASFFWNPHLIALYKRLKAAGKGHKRALIACARKLLIFVNTVVARGTPWQEQQPARATNPAAA

SEQ ID NO: 218750 - protein, 389 aa, unidentified
MYFVGIDVSKYKHDCFILNDLNEVIVSDLVIPNSHEGFSILLSTLEALSSPQNMRIGFEATGHYASNLKRFLENAHYSFMESNPALISKYIHSQTLRKTKNDSIDSLSIAHWLMTVDYKPYPNGFYHIYSLKSLTRLRDTIVRQRSLYMVKLTNVLDHIFPEFKPFFKERFSQTALYLLEKYHTPQKIAHMNAASYDSIRSISRGKFSMQRFLALKELAANTIGDSNEIFEIQLISILNLYRLADEEVKRLETEIIVLIMELNPRTLTIPGVGPISAAIIISEYGDIKNFSSPSQMLSFAGLEPGYFQSGTMEFKGKMVKRGSSQLRYTLMNCTMPLIMYNMVFAEYYHKKRGEGKPHRVALSHVAKKLIRVIYTLETTNVSFDTSKLR

SEQ ID NO: 218751 - protein, 457 aa, unidentified
MEDTLAQRNRISPPRSGKTRAALSLTHPNAAGIDIGSASHYVAVPADRDDEPVREFQSFTADLHRLADWLAACGVDTVAMESTGVYWIPLFELLDARGFTVLLVNARHVKNVSGRKSDVLDCQWLQQLMSFGLLRGAFRPADEVCALRALSRQREMLLRSQSRHVQHMQKALTQMNLQLANVISDVVGATGQKILRAIVAGERDGRTLAALKDARIKASTNEIAQSLQGSWRAEHLFALKQALALFDFYATQLAECDAAIEAQLQVLAAHSADPQPGKKRSRSRNAPKFDLRSRLFRMCGVDLTRIDGIDVTTALVVVSEIGTDMSRFPTVKHFTSWLGLCPGTKITGGKLLSGKTKRCANRAAQALRLAAAALRSSKSALGAYFRRMCSHMDKPKAVTAAAHKLARLIYTLLTKGEEYTDQGQDYFEERYRERVIRQISQRAAKLGLSVVPTPQAT

SEQ ID NO: 218752 - protein, 418 aa, unidentified
MNEELIARLSRRYLALDIHKHYSVVAGVNFEGQVVQEPVRIEHADLEGWLAKNIQSTNYVVIESTTNAWHIYDLLEPLAEKVLVANPIKVKQIASARVKTDIRDTLILARLLAANMIPAIWVPPVHVRNLRYLLSQRRQLVGMHTQTVNRMHSVAHRHHLSHARGKRFNEKNTKWQQDDELSDSEKFQLELDMSTRKHLAEQRDKITKKLAKMSHQKPWAESMMYLMQLPGFGVITGMTVLAAIGDITRFESPRHLASYSGLVPGLEQSGVKLKGKKITKEGRKDLRWAMVEVAQRAVKSDPLWKHRFIELCRRMHKNQAIVVIAHRLLALVWYVLSRRQPYRHFSHERIAYKYLTWSWQLSEKDRDGLTRQQFTRYYMMRLGIGQDLKQIALNPRYKRNLASEAEVLALRPELNQTE

SEQ ID NO: 218753 - protein, 370 aa, unidentified
MLENVAVRGSRYREPLTRRAAPVSPLASTAGELWDRCRSHARPNSRQTSIARTRQVTVAQIICGVDVSSISLEACIGPTGPARAFSNTAEGIAELLAFCRQQGVDLVAMEASGGYEKQPFALLWAQGLPVALLNPRAVRRFAEGMGLLEKTDRIDARVIAWFAAVKDSRPCDPASAQQQRLKALVTRLRQLTELQVAQRNQRLLVREETVLTSFSALLALVAAQIRILEADIAALIAADPLWQKLDQAFRSIKGVADRTVARLMAELPEIGMAPNKAVSKLAGLAPLARDSGKHQGKRPVRGGRREVRAILFVVAGVVRRYDLDFAAFHQRLSAAGKPKKVIRVALAHKLLVRLNAKARQVRNEFVPLPA

SEQ ID NO: 218754 - protein, 310 aa, unidentified
MDAIVIGIDVSKDKLDVHVLPAAQAFAVARNGAGIEELAARLAALAPAVVAIEATGGFETIVAAGLAGAGLPVVVVNPAQIRAYAKAIKQRAKTDPIDAAVIAKFARATRPEVRPLPDEVTRQLADLVARRRQIVEMMAAEGQRGRRVDHKRVARSIARVKKTLEAELAELDQEIGDQVRGSPLWREKEDLLVSVPGVGPVVARTLLAELPELGRLERREIAALAGLAPFTRQSGRWRGRSFIGGGRATVRTVLFLAAMTAARHNPTLKAFRDRLVAAGKPKMVALIATARKLLTILNAIIRDNRPWQNA

SEQ ID NO: 218755 - protein, 340 aa, unidentified
MRIIGCDLHASQQTVAMLDRETGELSEQVLQHEGDTVRAFYRTLPAPVVVGIEATGSMGWFLRLMEELGITCRVGHPAGIRKAETRRQKHDRRDAHLLLTLLAEERFPAIWMPAPELRDLRALLLHRHQWVRMRTRVQNALQAIALGQGLRRGATLWSRDGQAALASLPLMAHTAHRRDALQALHRHLDGQVHQLDTRVADVVAQRSQATLLMTHPGVGPVTALATEVFLGDPARFGDGKALASYVGMIPSEYSSGTRQRLGGLSKQGNPLLRFLWGEAAIHAVRSDRERRRFYRRKLAQKGLGKARVAAARKLGIRLWIMLRDRIDYPEFCRRGSAWQS

SEQ ID NO: 218756 - protein, 477 aa, unidentified
MDKEDGQPAGRRLVGIDLGIASRHSVRVLEADGQVVCRSSCVPTVESLTLVESAALAGAPDGTKLAVVFEPTGPAWMPVAVFFARRGHSVYRVSSAKAADLRKFLHRHAKSNGIDAETLARIPLADPAGLQQLELPGPDAAALGRRVRACERLTRAASEHKVRIKDLVRQLMPMTPLTGDLGKADLAVLERYADPRALLAAGTADLTRLITSASGSQQGQERAGQWRAAAAAAVELYGDHPAVPYDELAAEVATEVRLLRAIQGELAVHAAAREQRYRQVDSGQLARSLPGFAEISAPVLVAVMGRPGRFRDGTRFKSYAGLAPRASETGDTDRKGQPMSKAGPSVLRATLFRAADTARRHDPQLARIYYLQMTERGATHLKACCVVAGHLAERAWTVLHRGTPYVICDNNGGPVTPAEAKRIIAEKWTVPEDVRKRRRSRKMAGKAPQAATRPDRRGDPPRPRSSRPRTQAVKTVT

SEQ ID NO: 218757 - protein, 401 aa, unidentified
MECIFGIDVSKATANVAVLVDETFIKEFKITSDIPGYQALEDELNSFTEPQLIFESTGIYSRSLRAYLQRNKWQYTEINPLRAKIDMEGFRHDKTDALDARGLALAMKKHHYKPAYQQAPVYSELHDLERTYQDYNEDVVRTKNRLHKALQLTFPELEHVLSTQDGGLYWHLVQRFAHPDFVLKYGVSDLADQILDATPKNMGVKRALKIANKLLDLAERCAPSVSSNAHAVRAVVYLAQEVERLDGLKNEIIDEMTQLSQGLDEVKYLLSFPGIGIKTVMCLIGELGDIRRFHSANAINRYIGIDLIRYESGDHVMKSGISKRGNAYARKILYRAIMNIVSAARYNPSNVSDYYQNKKRSSSTKRTKMITIGAMSRLIRTLYHLVINNDYFDPKTSLAGQ

SEQ ID NO: 218758 - protein, 400 aa, unidentified
MTAVWAGIDSGKRAHHCAVIDTTGRLVLSRRVVNDEAALLELITAVLALAGGDQVVWATDLNAGGAALLIALLVERGQRVLYIPGRIVHHAAATYRGDGKTDAKDARIIADQARMRTDLQLVRSADQISIDLRLLTSRRTDLIYDRVRAINRLRALMLEYFPALEAAFDYSKKAPLILVSSYQTPEAIRRIGVTRLAAWLKKRGCRGSANVARKAVDAANAQRTMLRTEPVAAQLVAKLAEQITAIDVEIARLDEQISERFDQHRDAPILLSMPGFGPVLGATFLANTGGDLTAFETVDRLASVAGLAPAPRDSGRISGNHHRPKRFNRRLMRTCYLAALSSLKNSPASRAFYERKRAEGKSHKQALIALARRRINTLWAMLRDRTTYQEPPRPALAPAA

SEQ ID NO: 218759 - protein, 387 aa, unidentified
MSVIIGMDPHKRSATIEVVDERGRVLAVGRFGTDKAGYADMLAAGRKYADRVWAVEGCNGIGKHIAHRLVHDGETVLDVPAKLSAQVRVFATGNGRKTDPVDAHSVAMVALRSPNLVQVQVDPDLQVMGMLADRRDELGRARTQTINRLHRLLLELLPGGAKKFLSAPQARALIATVKPRDIVGKTRRRLAVELISELEGIDKKIKSADKDLKALVLARGSTLMELHGIGPSGAARLLADVADISRFADRDRFASWNGTAPLDASSGDQKRHRLSRAGNRRINRTLHIMAVVQLRNRTEGRAYFDAKKGAGKTSMEAMRALKRRLSNVVYARMVADQKRRQAADPGGHPGTTLQSSVTDLTPDIGPSDKPLPGPATSQPKPALRAVS

SEQ ID NO: 218760 - protein, 456 aa, unidentified
MKTMNMNFKHNQLTLCFVADVHSQKHHFLISIKETRTILKEFIVENSTTGFIQFITLVKLFSAKFRTQNVIFAFEPTSVYWMNFAYAFYQDISTSFLNKQILFVSPEIVAYQRKVDDPAGNKDDHKDPLTISKLVWDNKTSKAILLPEKIFNLRELTRQRNSLVKIRSSLKTQLRNKIIIIFPELLNIFSDILGASARYIISNFTTPENITKLPIQTFTQFLLKISKKKLSTHKIELLYSYAQSSLGIKGNKNGLISNIKYILEQIELYDKLISQIENEIEYYLKSIPQTLTQIKGISTILAASIIAEIFPISRFSNSSQLVKYAGIDPTHSTFGISLKKLSYIAKKGDVYLRLLIIQTAFSCINHNQYIKRYYTNLINYGHKPKRVAIVAVANKLLRIIFNLLKYNIKFDPSKIGMGPKKIVEVVPFKFKQNNFHSLEKAKTKFLLKEKASEKLF

SEQ ID NO: 218761 - protein, 369 aa, unidentified
MADRITYVGLDVHKESIVVAVASGGLRGEVREYGRIANTATALDRLLRKLGDAGMALRFCYEAGPCGYGIQRHVSARGHECVVVAPSLIPKRAGDRVKTDRRDAASLAKLHRAGELTAVWVPDPQHEAMRDLVRARLDAVHSLRRARQQLSGFLLRQGCHYGRPAWTKLHRRWLAGLIFEQAIHHIVLEDYIAAVEAAEARRDRLTAQIGTMLPDWTLAPVVAALQTMRGMAMVNAATLIAELGDLSRFADPRQLMAYLGLTPSEYSSGSSVRRGGITKAGNGAARRLLIEAAWSYRFPARLSRELLLRQESQPKPIRDIAWKGQVRLCARYRRLARTAKPANVVTTAIARELTGFVWAIARQVTVTPG

SEQ ID NO: 218762 - protein, 344 aa, unidentified
MKVTTVGVDLAKNVFQVHVVNEHGKTVIKKQLKRDQVAHFFVNLPSCLIGMEACGSAHYWARKLQDFGHTVKLMAPQFVKPYVKTNKHDAADAEAICEAVARPNMRFVPIKNVEQQAVLALHRVRQSFVKARTAQANQIRGLLGEFGLIVPQGICYIETRVPELIEDASNELPGSFRVLVQRLLDHLKDLDRQVGELELQIQTWHRQSDVSRKLAQIPGIGPITASALVASIGDAKNVDSGRQVAAWLGLVPRQHSSGGKQNLLGMSKRGDTYLRTLLIHGARSVIYRAGQKPETCSWINGVVNRRNKNVAAVALANKNARIVWALLANGREFRSDYATAKAAT

SEQ ID NO: 218763 - protein, 422 aa, unidentified
MMGKERRWFVGVDWGSQEHVVSLYDDEGEKISQRRFAHSGTGLTDMIAWLLKASGGKPGDIHVAIETPHGPIVEAVLERGFNAYSINPKQLDRFRDRFTVSGAKDDSRDADVLADSLRTDMRAFRKLSIADPIVVELREWSRIDEELKVEHVRLTNRLKHQLWRYYPQMLELADDVGANWFLDLFEVVPTPEKAANVREKTIARILKNHRIRRFDATHVLSELRKPALSVAPGTIEAATARIRGLIERIRIINNQIKDAGRQLDRLCKNLSEPVADKDEETSPGQKTEQRDAAILDSLPGVARTVLATLLAEASDTLQRRDYHALRALCGSAPVTRRSGKSCIVVRRYACNQRLRNATYHWAQNAIQHDATSRAKYDALRAKGHGHARALRSVIDRLLNVACAMLNSGTLFNPEFASKQTTG

SEQ ID NO: 218764 - protein, 481 aa, unidentified
MKPKPQEKTEKVTERRTRRGWHEMNRKQRRETMRKMRSEDLSLDVVHPDAAGTDIGNESHYVAVPPDRDSQPVRSFGCTTAELRAMANWLKQRGIQTVAMQSTGVYWIAVYDTLEEAGLEVYLVNARDTKNLPGRKSDVQESQWLMKLHTYGLLRNSFRPPQEIRTMRTYWRQRHDLVQSAGRHIQRMQKVLTQMNIQLANVLSDVSGVTGQAIIKAILAGERDPHRLAALRDPRVKASEEQIAGYLEGHWQDDLLFVLKQEQEGYEFCQRQMAACDQQLEPYLHQREDRSAGTYLPEETRKGRLHKYGHQPQFDLRAELFRMTGTDLTQIDGVNVMTAMTILSEAGWDMSRWEDEGHFVSWLRLCPDNRISGNKIIGKGRLPTNNGASIALRMAASTLRTSQTYLGAQFRRLRTKLGAPIAIKAMAAKLARLVDRMLRHGMKYVDQGTEFYEAQQRKRDIGHLKRKAAALGFQIIKAPAA

SEQ ID NO: 218765 - protein, 349 aa, unidentified
MLAEKVDYVIGVDTHRDQHTLAIVVAPTGAVVTQQSVGTSTRGYREAVAFAERYAAGVRVWAIEGAGHYGAGFTRYLSGHGESVIEVGRTARAERRLRGKDDPIDALRAARSALASETPTLPRAGQRQEALRVLLLARRSAVDVRRLALVQLRSVIVTAPENLREELRHLPVGQLIRRCSRFRRSSSRTPDELAIVLVLRSLARRIEAATDEANDLEREIFDHVRALVPELLNEPGVGPIVAAQLIVTWSHRDRVRSEAAFARLAGVAPLPASSGQTIRHRLSRGGDRQLNRALHTVVLHRRHHDPATKDYIARRIAEGKSARDATRILKRYLARHLYRVMQNATPLTT

SEQ ID NO: 218766 - protein, 316 aa, unidentified
MTQISTTAGIDTSKAKLDVAVHGRADCWQVENTSAGWRRLAADLSEAGVVRVGIEASGGYESGVVDYLRDNGFCVLVLQPIQVRAYARVHLRRAKNDKLDAALIAACAATIDRPRLEPDHRLAKLAHHLTFVEQIEEDIARLKVRLEHVGEPRLRRLVVADVARLKRRRSAELARIVTALRAYDDLARRLDLIRSIPGLGERTAVALIVRMPELGRISREEATALAGLAPYDDDSGKHKGQRHIAGGRGRLRRALYAAALPAAFRWNKALTELYARLTARGKAHTAALIACARKLLIYANTVVSRGTPWIQKAVST

SEQ ID NO: 218767 - protein, 384 aa, unidentified
MSIPSHAAVSTQLNAIFVSLELSRSTWLVTSLSPGRGERISRHQVKGSDVPALLERFAQLQAKAQERTGEQYPLVVIQEAGLDGFWIHRCLVREGIESHIVDAASIAASRRSRRAKTDKLDGEALVRTLLAYKRGEPRVCAMVTVPSVEDEDRRRVCRERRSLVVERIRHVNRIKGLLFAQGIGDYEPLRTNRRARLMELVTGDGRPLPCHVKREIERELDRLELVMRQIKEVERERDAMLEAATDEAPEPASARLLQLRGIGPEFAGVLHAEAFFRSFSNRRQVACYAGLAPSPWQSGNMDRERGVSKAGNKRLRTTMIQVAWLWLRHQPESELTRWYAERVQANGGRIRRVMIVALARKLLIALWQFSSAGVVPKGALLKAA

SEQ ID NO: 218768 - protein, 355 aa, unidentified
MNQEKYIGMDVHDASISVAVKNAQGRLLMECVLETKAATILEFIQGLRGTLALTFEEGTLAAWLHDLLKPHVSRLVVCDPRKNALMRDGNQNDRADACNLAELLRTNQVHAVYHEKHGIRTLKELGRSYLALTQDSTRVMNRIKSVYRSWAIPCAGTNVYSRRHRGEWLAKLVEPGVRMRAEHLYQELDSLEPLRQAARRELLRESRKHAAVKLLRQIPAIGPIRSALLVAILQTPHRFRTKRQLWAYSGFAVQTYDSGEYRFVRGKRQRNRERITVRGLNRNHNHDLKNLLKGAAISAIERPGPLQDFYVALVEQGMRPSMARLTLARKIAAIILIMWKKGVSFDPKQLQRPAA

SEQ ID NO: 218769 - protein, 411 aa, unidentified
MRKIFCGIDWAERHHDIALVDHDGQLIAKRRIEESSAGWSELLAMLTDAGDHCQDPIPVAIETPRGLLVAMLRATGRPVYSINPMAVARYRERHAVSRRKSDHADAVILANILRTDAHMHRPLPKDSELVRCIAVLARAHQDATWRRTKASNELRSALREYYPGFLDAFVNKSDFLVSNDARAALAIAPTPATAAKLTKTRIATTLRKAGRQRGADAQAAQLHEALRRPQLRQPTLIEEAMGIQALALLSTLDIECRNVDQLGQACTAAFERHPDYEIITSFPGLGDTTGARVLAELGDDRDRFTDARAVKAYAGAAPVTRASGKSISVTHRRVKNDRFAAAGWIWAFCAHAHSPAARQHYRQRRDIHADQHAAALRHLFNRLLGCLFHCLQSGQTYDEQKAFTTLQPAAT

SEQ ID NO: 218770 - protein, 387 aa, unidentified
MAQVNDLSRSLTAFDPISTLVVVVEMSKASWLVSGVVPGIERQPLKKLEPDATALLRLIERWRNEAMRAGRPISRIALAYEAGRDGFWLARWLITRGIEAHVIHSASVAVSRERKRAKTDRLDAAMLMRVFLGWLRGERGHCGMVVIPTMEEEAARRPSRERESLVNERSRITNRMKSALARLGIRGFKPHLRKAPERLAGLRTAEGTGLPTNVIEEFRRDMARLALVREQISSIEKTRAERLDRAPDTGPHAMVRLLARVIGIGIETADMLVREILSRKLRDRRAVARYAGLTGSPDESGLKRREKGLAKAGNARVRRGLIQLAWRFLMFQKDSALARWYRTRTEGPSGARKTTMIVALARKLLIALWRLVTTGEVPDGVELRPAA

SEQ ID NO: 218771 - protein, 369 aa, unidentified
MILFEERPPALNVEAEEYPRARQEPVYKAGRRWCRVGGPDWMVKPMSSHEIVGIDVAARKLVVIGERLTLAEYENTAAGRSKLVNALCRNQRPVRVVLEATGIYFLDLACELAAAGIAVMVANPKATHHFAEAILQRRKNDPVDAAMLREFGRRMDFVSWQPPRHELFGFRALTREVQALSKTVAAARNRLHAITATQLAPTAVIGALERQIAHNQTLIDELVAAAVAQTESDPELARLLARTDSVPGFAAKAAVLVIGELAVLPPMTARQWVAQAGLDVREECSGTSLARRPRLSKRGNKRLRVALFYPALTAARCCPAAQAFVERLVTHGKTRLQAIVALMRKLLHGLHAMWRNDEDFDAEKLFAPA

SEQ ID NO: 218772 - protein, 315 aa, unidentified
MAMPVVTTQSIIGVDVAKDELVIYHAESDQLETISNTKAAIKKWLKTAAKPVAIAIEATNIYHQEFADLAYADGCVIYMVGGYELSHYRKGVNVRAKTDALDARLLARYLTNEGDHLRPWTPPSPLYCRLISLFRRRAALVQARVSLKQSWENEPLLKTAFKNQINAMQRLEILLEKTILAQIDEAGLGAQLKRCMKVEGIGTLTGARLLASFQRGDFRNADAFIAFLGLDLRISDSGKKKGRRCLTKRGDSEARRLLHNAAMAASRTSAWKGFYEALRERGLSTTQALVALARKLARVVFALLKNQSEYSPKAV

SEQ ID NO: 218773 - protein, 342 aa, unidentified
MLYVGIDIAKNKHDVTALNVPGKTVLKPLTFSNNKAGFELLDLSIRQINQDCLIALEDTGHYAFNLLNFLHEQGYKVYTYNPLLIKEFAKSLSLRKTKTDKKDAHGIALKLLSDPNREQFQHDNRQVDLKILARHIHRLKKNSLIGKYNTLVVLISSFLSWIKSLESIQNIPTNLLTRYPNPQKRLEARFDKLIEIKRLTASKIQDILSIAPRSIGTTSPAREFEIIEIIKHYKRLIDKAETCVNDLMAEFNSVITTVTGIGGRLGAVILAEIRNIHAFDNPAQLQAFAGLDSSIYQSGQIDLAGRMIKRGSPHLRWALIQAAKACPRFSPAFKAYLKTKLE

SEQ ID NO: 218774 - protein, 340 aa, unidentified
MPTLSCPSPTPPVPPAPAPVPVFVGIDVAKAHLDLAVQPAVRPPWQIAYDAASLAALAGDLTALAPQLVVLEATGGLERPLVRTLRDAGWPVVVANPRQVHHFARATGRLAKTDRLDAELLACYAATLQPAPRPQPTAAQALLQAQLTRRQQLVEMQTAERQRRPSLPAAVQEGVDAHLVWLATEIAALAEAIHTAVAADPVWQERARLLQTAPGVGKVVAWTLLVELPELGTLPGKQLAALAGVAPLNRDSGRLRGRRQVWGGRARARRVLYLAVLPVTRCPGGVRQTARLAQFYWRLRDAGKPAKVALVACMHKLLLWLNAMLRHGTPCTPQPAPHGP

SEQ ID NO: 218775 - protein, 351 aa, unidentified
MQVSTLGIDLAKNVFQLHGIDHTGHTVLRKKLNRDKLVPFIMQLSPCLIGMEACASSHHFARLFSQYGHQVKLMPPQYVKPYVKTNKTDAADAEAICEAVTRPNMRFVQVKTAEQQAILALHSERDILVRERVACVNSLRAMLAEFGLIMPTGHCAFHQGIPDILENGDITLSPFVRRSVARQFEHILALEDQVTLIEQELSQWAKSQPACQRVMKVPGVGLMTATYLVASVGNGQQFHCAKQFAAWLGLTPREHSSGGKQRLGRISKRGDRYFRYLLMHGARAVAAVIERHKETMPWLFALLQKKNYNVAVVAQASKTARILWSMLVKGTEYRPAAPIEASSMSASGQQA

SEQ ID NO: 218776 - protein, 456 aa, unidentified
MSPVKTQPKPKTKAKSAAAARRRDGGQPRFVGVDLHKEIATFHVVSHDGTSLLSGQFLVNPDAIGEFVRAHLLPTDSLAVEVTSNTWAFVRLVRPHVAKIVVSNPMKTKAIAEANIKTDKVDALVLAQLLRCDYLPSVWVPTAAVEDSRALAARRTAMVNQRTAIRNRIHAVLARRLVKAPAGGLFTERGLAWLKAVELDPLDRALVDADLALLEALDQQSLAIDLMIVDESYADPDIQLLMTMPGIDYTTAHALKGALGDVRRFSDPDKAASYLGLVPSVKQSAGKCYHGPITKAGSSQARWLLIQGAQRVGQHPGPLGAFFRKLARRKNRNIAVVSTARKMVTIAWHMLMNKEPYRYAVPQSTEAKLAGLRVKATGAKRKTGPKKGSERIPKASGEKSRTVPSLDEVYSREGLPGRRPRSQGEARMIHESGTKAYVASLDEPKVVPRKSRAREE

SEQ ID NO: 218777 - protein, 338 aa, unidentified
MAILMGLDQHRAQITTEWLDADTGEVSRGRVAPADRAGVRRFLARFSGWQLEVALEATTGWRFVVEELQRIGAVVHLAEPADTAALKGTKKHAKNDRADARHLRELLIAGRVPESWIAPAHILDLRARVRLRHALSEDRGEWQQRIQSVLYHHGCPRRGDLINRAGLAWLAGQSLPACAREQVTVALAMIDALDRQLAPLDKELGGYARRQPGAKALMRHYGIGKLTSVTILAELGDASRFSSSREAVRFAGLDITVHASDKRRAPGHLSRQGPPALRWALFEAAQCARRPNSPDHAYYAQAAAKLGGNRACLSVARKLLKRSYHTLRQLGEEAMQPA

SEQ ID NO: 218778 - protein, 389 aa, unidentified
MLLDHPSDGPTAIRTQFGAIFVSLELSRSTWLITSLSPGKGEKMSKHSLTAGDVAELMKLFADLKRKAAARTGQTYPIITIQEAGLDGFWLHRVLQQEGIESHVVDPASIATSRRRRRAKTDRLDGETLLRALLAYKRGEPRVCAMVVAPSPEEEDRRRLCRERQALITERITHVNRIKGLLFSQGISDYAPLRRDRRARLGALRTGDGRALPSHLKTQISRELDRLELLLEQIKAVEAEQDALLAAARKPAGETAAPDPVPMLLALKAMGPNFAAVLWSEAFYRHFANRRQLAAYAGLAPTPWRSGSIEREQGVSKAGNPRLRSMMIQLAWLWLRHQPQSALARWFKAHSQRGRKTAIVALARKLLVALWKYVTSGVVIEGAVMKPAA

SEQ ID NO: 218779 - protein, 352 aa, unidentified
MRHYAGLDVSLEETAICIVDETGKVVRELRSASEPDALIETLAATGLGLERIGLEACSLSAWLHQGLTHAGLAALCIETRAAKAAMGAMPNKTDRNDARGLAQIIRTGWYRAVHVKSMPSRSARALLGARRTMLNKQRDIENAVRAVLREVGLKLGTPSRKLFAGRARELASADAAISDIVGPLLAVLDVMACQIARLTKHALDAVKVEPICRRLMTVPGVGPLTALAFRATVDQPERFRRSRDVGAHLGLTPRRYQSGETDIQGRISRCGDELARTALYEAAHTLLTRCQKWSTLKAWGMRVAQRRGMAKARVAVARKLAVILHRMWSDQAEFRWGKPASSLPNVALACAA

SEQ ID NO: 218780 - protein, 365 aa, unidentified
MKTSIADRQRKATPETCAETRPNVAIGIDLGDRFSEVCVLDEQGTVASQTRLRTTKAALQEYFSSRAPARVALETGTHSGWTSRLIAACGHEVIVANARELRKIYQSDRKNDRADAEILVRFDPQLLAPVQHRSEQMQADISLIRARDVLVGARTKLVNAARGLTKSLGGRLPRSSTPCFAQRVREQAPKEFEPILSPLATAIDSLTEQIRCYDKQIEALAHQRYPETEVLRQVSGVGALTSLAFVLTLFDKNRFARSRDVGPYLGLVPRQDDSGERSPQLPITKAGNGYMRRLLIGSAHYILGPFGPDCDLRRSGIHLAERGGKNAKKRAVVAVARKLAVLLHRLWVTAEIYDPLRAGGLKSGS

SEQ ID NO: 218781 - protein, 367 aa, unidentified
MNNTIVHHEGAAALTAASHDSTTAPTTIKLGVDVHQARYVSVAQHDHATPQPPRRCRSEEFVPWVERLLARGHRVYVVYEACGFGFGLCRQLTALGATCYVIAPRKLDELGKRVKTDALDAGALCQRLSRYVDGNTKELAVIRVPSEEEEQLRHIHRQRERLVRARTKLQAQGRSLLLNHGQPPLARWWRQAGWRALERAVPAWLLERLAVYRPLLEVLDEQVATLTAQLEAAAPAALPSGLGKLTNTIIAREVCDWHRFGNRRQVSSYTGLCPGEYSSGNKRVPGAVTKHGNPRLRAALVELAWRLVRFQPHYPPIRKRLFILGKGVQATGAARKKAIVAVARQLAVDLWRWHTGQCSAEQLGLQS

SEQ ID NO: 218782 - protein, 293 aa, unidentified
MDNHTQYLGFAGVDLAKKVMQIHFVTADGEITDKSAKRAEFLDFFRNRGKCLIGMEACGSSQDWARKLEAMGHEVHLLPPKAVKPFVSGQKNDHNDAIGIYKAMFNGVRRVPVKSTEIRDLQTLRRIRSQVTKDKVKEINHVRGLLAEYGIVMGKSLNAFNKDISSALEILTERGDVSPLVAEELRTTVEAIKAKIERQKKLDQEIEQLARGCKNYENFLKTPGVGPFTAGMLCVLLCDPSIFANGRQFAAYIGLAPRSRGSGGKNYVTGIPSKFNCDSESRAVLVECAQAIA

SEQ ID NO: 218783 - protein, 351 aa, unidentified
MHATTKFAGNESSVAVTLAVDLAKDVFELAFADAVGRIVERKRLKRGPFAQCLVNRAPLSIVMEACGSAHAWARRFMRLGHSVKLLPAQHVRPYVRRNKTDRADAAGLLEAARCGDIRPVPVKTTAQQGTQGLHRIREHHKAERTAAINTVRGLLREFGLAIPAGAGSVRPAVLQALEDGDNDIPMDLRHALAGMLERIASCQQAMADIEKQLADITKCDLRSQRLMAASGVGLITATAMSAGIGDFTRFPSGRHLASALGLTPREYSSGGSRKLGRISKRGDVYLRTLLIHGARSALISACLARKRGLPLDRTQQWALALAERKGHNKAVVALANKTVRSYGPPSPRREL

SEQ ID NO: 218784 - protein, 355 aa, unidentified
MTHGEYALFAGLDVSMNRTSLCLVDASGDVIWRGACATDPESLAATICRAGDGRRTRVGLETGSLSPWLVQGLRAEGFETICLDARHVRGALSSRPNKSDDTDAEGIAQILRSGWYREVHVKSLATHHLRALLAARRLMVNQRTMLNNQMRGLLKVFGVKLGSGVAGSFARRVMEVADADEHLAQITHPLLTAWRTLHEQIAVLDRTLRTTARDHPACRLMMSVPGVGALVALTYLSAIEDPTRFTSSRRVAAHLGLVPRRWQSGEVDRQGRISRCGDGMARTMLFEAANVILTRVRAPSHLKAWGEALIPRIGKKKARVAVARKLAVLLHRIWVTGRAFQASGVEPEIGSLAAA

SEQ ID NO: 218785 - protein, 402 aa, unidentified
MGVDWADREHAVWVEDEQGAKVAELTVPHTAEGLSEFGRWLYERRAQGSELWAAIEKPDGRVVDFLLDHGVVVYPVNPKALDRARDRFRMSGAKSDPFDARVLAAFVRTDHPHLRPLRPNSEPAQELKLLTRDYQRMVRQQTRLVNQLTATLKEYYPRPLELFEELTTSLARAFLETYPTPEALTALTPKPWQRWAREHRLSAGRTQALWEALKQPHLPVPPHVVRAKARLVRVLVAQLGATVDAVNEYRKAVEDFFATLPAAEWARTLPAGQSGITVPTLWAELGDADGRWQSVQHLQGHAGAVPVTERSGKQEFVKFRFACNTHLRHAVHQLAWLSLPHSEWAHAYYTQYRKRGHDHHEALRALGAKWLKIIFVLWTRHIPYDENYHLATMARQQLRRAA

SEQ ID NO: 218786 - protein, 314 aa, unidentified
MDSIVVGIDVAKDRLDVALRPSGEVFVVERNAGGLELLVQRLKPLAPSLVVLEATGGFETVAAAALAAAGLPVVVVNPAQVRAFAKAIGQRAKTDAIDAAVIAHFAEATKPEPRPLADEATRLFADLVARRRQIVEMIGAERQREKRATTRIKKSIARLIKALEKELASVNSDIDDAVRGSPAWRETEDLLASVPGVGSTIARTLIAELPELGRLDRKQIAALAGLAPHTRQSGQWKGRSFIGGGRANVRTALFMGAMVAKKHNPVLKAFFDRLVAAGKPKMLALIAVARKLLTILNAIIRDHRPWQGTVVAAS

SEQ ID NO: 218787 - protein, 391 aa, unidentified
MAILMGLDQHRAQVTTEWIDTLTGEVSRARVAPADRAGVRRFLARFRGQQLEVALEATTGWRFVVEELQRVRAVVHLAEPADTAALKGHKKHAKNDRADARHLRELLMAGRVPESWIAPARILDLRARVRLRHTISEDRGEWQQRIQSVLYHHGCPKRGDLINRAGLTWLATLPLPAVAREQVTVALAMIDALDRQLAPLDKELGGYARRQPGCKALMRHYGIGKLTSVTILAELGDAGRFSSSREAVRFAGLDITVYASDRRRAPGHLSRQGPPALRWIVPAPSAQPLVIANAGGGGVGAIACKSARLVSPANARTACRQPARSQADEPTDALVEGSRRAGLKACRWRRDTQPSANIPCGSQSHPRRHVIAFLRGPRRRVRQGRVRERFT

SEQ ID NO: 218788 - protein, 404 aa, unidentified
MNAIGIDVSKGKSTVAVLRPYGEVVVSPFDVAHTGSDLRALADLIKKLPGETKVVMEATGNYFESIARYLHEQNIFVSVVNPVLISDFGGNTLRKPKTDKKDSVKIASYALTYWLDLKEYTPQEDLRKSLKLMNRQYQQSIKLKTMMNNNLISLLDLTFPGINKLFTSPSRESDGHEKWVDFVLEFSHCDMISKLTIKAFAKKYKKWSDKNSYHFTESSCEKIYAFAKYCVSSVSSDKAIVFSVVQAAKMLISATENCHAIQSEMNRVASKLPEYDTVMNMYGVGKAVGPQLMAEIGDPRRFHSRKAITAYFGYDSENNDSGQKTTRSNPMTKKGSGALRRTLFIIMQVLLQTKPQDNPVYDFLIKKKSEGKHYYSYINAAANKFLRIYYARVKEVLNVSEQMT

SEQ ID NO: 218789 - protein, 392 aa, unidentified
MTTSVGIDVAKEVHWVCAIDSGGKVVLNRKLLNTPEDLQQLVVELLALPAPQRVGIDVLGGIASLAQAVLLQAGVALVHVPGLAVNRARQGTVGGESKSDPRDARVIAEQVRTRTDLRAVTAQTELDIELRLLVSRRGDLSIEQTRRLARMHDLLVGIFPELEHAVDLTSKTALTLLSRFVTPLELRQASDAQLRAALGALANRSFARKLITTARAVAARQTIAVPGEALTARLIKELAAEALRTIEQLATLDRELEQRLASHPDAALIRSLPGMGALMTAEFIAEAGTIERFRSPDALAAAAGLAPVLKQSGKSRRLQRPHGGNKGLKRVFYQSAFASLHSPDSRAFYTRKRQEGKRHHQAVIALARRRINVLWAVLRNRQPFHTHVTTNA

SEQ ID NO: 218790 - protein, 325 aa, unidentified
MHIVGIDISKAKLDCCWLREAEKSKIKTKVFRNTSMDHDVLVHWLLHQTGTSAEGIQIVMEATGVYHEPLAYALHERGFRVCVVNPARVREFANSLGNTHKTDAKDSQILALYGHRMQPEQWQPEAPEVRELKALISRLEALEADLQRESNRHEKAEFNRSSERVIASLELMMTQLRQEKQRLEEDIDDHIDRYPHLKKDRVLLLSIPGIGPVMSRLMLSVIRSRSFEQAGQLAAYLGLVPRIQESGQWKGRSRLSKQGPARVRAKLYMAAVTSIRSNPDIRRQYERLTQNGKSKMQALGAAMRKLVQICFGVVKHQNEYCPQVA

SEQ ID NO: 218791 - protein, 340 aa, unidentified
MQVTTIGVDLAKNVFQVHGITASEEVVFNKPLRRAQFLPFFAKLDPCLIGMESCSSAHHWARELTALGHEVRLIPPMYVKPYVKRGKSDAIDAEAICEAVTRPTMRFVATKTVEQQSLLSLHRARDLLVRQRTQLINNLRGLVAEFGIFIPKGLARVIGFAEDITLGEVLDLPDIANEVIRNLSEQLMALHKQVRWYEERLKQVAKEDARVRLLRTIPGVGAVTASAIIASIGDGHQFKNGREFAAWLGLTPANKSSGGKEKLGRITKMGDQYLRSLLVVGMTSLVRQTRSHPERASKWLTSLLDRKPARVATVAMANKTARIVWAVLTRNEPYSPRTVA

SEQ ID NO: 218792 - protein, 329 aa, unidentified
MTIIRIGLDTSKHVFQIHGVGENEKPVLRRQLRRSEVEKFFAKLPPTRIGIEACGASHHWARLLRGLGHEVVLMPPQYIKAYVKRGKSDAIDAAAICEAMSRPTMRFVPVKTAEQQAALAMLGVRDLLVKQRTMLINAIRGHAAEFGVTVAKGPQQMRELLRRLATGEGVPVLAREMLGVLAGQLEAIETRLMAWHRQDQTSQCLATAPGIGPIGGVSFTLKVPDAKAFRSGRHFAAWVGITPRENSTAGKHRPGKISREGDESLRRLLVLGATAVIQQAKSGRAAPWLLGLLARKPKKLVAVALANKMARIIWAMMVSGETYRRPQEA

SEQ ID NO: 218793 - protein, 414 aa, unidentified
MDVVHTHCAGLDVHKKTVVAAVSVPDPAGGWHQETHTFATMTRDLLALSDWLTKYSVTHVAMESTGEYWKPVFNILETTFEVVLVNAQHIKAVPGRKTDVNDAEWLADLLKHGLLKASFVPPEGQRELRELTRSRTTFVRERATLVNRIHKVLESANIKLASVATDVTGASGRAILAELIQGRASPATMADLAKGRLRAKREQLIKALEGRVKAHHRFILTELLCQIDNLDEAIERFDQQIQEYCRPFEEAVRHLDTIPGVARETAEIIVAEIGTDMSRFPSAAHLASWAGVAPGNHESAGKRRSGKTRKGDRPLGVALNQAAHGASHTKNTYLAAQYHRLVARRGKKKAIGAVAHSILVIAYHLIARKEDYRELGGDYFDQRRPEATANHLVKRLEALGYTVNIQAQTASVAA

SEQ ID NO: 218794 - protein, 401 aa, unidentified
MREFSPEQHWIETESALERVGNAGQEERHAAYVGLDVHKETITVAVAEPGRGEPVYWGEIANKPKTVEKLLGKLSEAYGGGLLRLCYEAGPCGYVLYRQILASGHDCQVVAPSKIPKAPGERIKTDRRDALKLARLLRSGDLTAVWVPDQEQELMRDLSRARDDMKSQERKARQQLNAFLLRHGHHWPRGKSRWTPAHANWLAGLKMDHPWQQVVLQEYIDAERAAGERVAQLSDHLMRALPEWSLAPVVDALIALRGVDKLAAIVLLAELGDISRFESPRQLMGFLGLVPSEHSSGGRRRQGAITLTGNGHARRMLVESAWSYRFPARQTKHLKGKARNASPEAKKIAWKAQTRLCGRYRTLTRAGKNTKLVCVAIARELAGFIWDIVRQEMPHLALQEG

SEQ ID NO: 218795 - protein, 412 aa, unidentified
MFNKSSEPQLAEQLVFVENQAQDSIKPTVKEAARPSSSGPAADRFTKGALQDAVGQQDRRRSCGTNPNRRQSGRGAQTTSSYPQDGVASMDGCKLNPVPTFVGIDVSKSTWDVHVSPQGRRFSVAADENGLPQMLKELGSAGACLIVLEATGGLERRLAAELIDAGLVVAVVNPRQVRDFARALGRLAKTDRIDAETLALFAEKVQPRPTQKRPEKQAELEALVTRRRQLVGLRTMELARQQQCQTKTTRNSIAKLLKVLDRQIADLDKAITKLIESDEDFRSKRQLLQTVPGVGAGTSATLIAELPELGRLNRQEVSSLAGLAPFNQDSGQFRGQRRIRGGRASIRTALYMAALTAKRCNPTLQRFAERLERAGKPFKVVITACMRKLLVILNQLVREGKGWIASPATVHG

SEQ ID NO: 218796 - protein, 343 aa, unidentified
MPDYVGLDVSLDQTSLCVLDAAGQIVRETKLDTDPDAIAEYLGQAALVIERVGLEAGPLSQWLHAGLVAHGLPAVCIETRHTKAALGAMPVKTDRGDARGIAQLMRTGWFKAVHVKTQQAQEWRLLLTQRRLLVNKLIDVEAEIRGTLRGFGLKMGRVGRAGFAGRVRELLADRPSLLRVVEPVLLVQAMLLSQREALHRMVLQAVREEEVCRRMMTVPGVGPITALAFRATVDKAERFAHSRDVGAHFGLTPRRYQSGETDRSGTITKTGDALMRHALYEAATSMLVHATKPSALRNWALVVAKRRGLQKARVALARRLAVVLHRMWRDGSVFQPQGRLTTI

SEQ ID NO: 218797 - protein, 451 aa, unidentified
MAKSKRRRPERDFTPTHPNAAAIDIGSRMHVAAVPPDRDPEPVRAFGTCTGDLQQLADWFERCGVRTVAMESTGVYWIPAYEMLEQRGFEVVLVNARDAKHVPGRKTDVSDAQWLRRLHEYGLLRASFKPKGELAALRAYLRQRERLLDYSASHIQHMQKALMQMNVQLHHVVTDMTGETGMRIIRAVVAGERDPAVLATHRDRRCHALQAEIAAALAGHGREEHGFALGQALALYDAYHAKVVECDLRIEAVLRRLRDAAAKPAGKLPRARHRDKTANAPAFDARAALHAALGVDLTQIHGLGPSLALKLIGECGTDLSAWPNAKHFTSWLCLAPGNKISGGKVLSTRTRRSGSRAAALLRLAAVTVGRTETALGAFYRRLSARVGKAKAVTATARKIATLFYNTVRHGMDYADPGASYYEERYRARVLANLQRRAKSLGYTLHEMPALA

SEQ ID NO: 218798 - protein, 474 aa, unidentified
MVMTREPEEILDEPHEQIMQRVCAIDVAKDSGKVCVRWPAESGSGRRVSKVWDVPARTKAVIELGDHLACQGIEKVTVESTSDYWRIWFYLLEARGLDVQLVNARDVKNVPGRPKTDKLDSVWLAKLTEKGLLRPSFVPPKQIRVLRDYTRLRVDLTAERTRHWQRLEKLLEDALIKISAVASRIDLRSVRDMVEALIDGQRSPRLLAGLARGRMKLKHADLVEALTGQFDEHHAELARMLLDQIDALTAQIDTLTARIDTRLAAILDSRNPDPDHPGPRPADPAEPLPATGNGPGDIAQPSPAQRSAVPSTPDLVDILDEIPGVGPHIAQVIIAEVGLDMSRFRTAGHLVSWAKLCPRTIQSGAKSTSGKTGKGNRYLRAVLGDAAASAGKTNTFLGERYRRIIKRRGKLKALVAVARSILVIIWQLLSHPGLRYHDLGADYHTSRIDTERRTRNHVRQLEALGYTVTLTAAA

SEQ ID NO: 218799 - protein, 359 aa, unidentified
MMDDTEIATRRVIGGVDTHKDVHVAAVLDEQGRLLETTSFATNAFGYRDCYRWITSFGEVLAVGVEGTGSWGAGLCRFLRARDLNVVEVNRPNRQTRRRKGKSDTVDAEMAARAVLAGDATVTPKAGDGPVEALRQLRLARRGAIKARTAAANQMHSLTDTAPDELRAKLRGLTTLQRARLCTRFRAGDLLTPAGAAKRALRSVAARYLTLHDEIRDLDAAIRQLLNTIAKPVVDRYGFGYETVGTLLCAAGDNPERITTEAGFAALCGSNPVKVSSGKTKRHRLNRAGDRHANAALWTVVMTRLAAKHPPTVAYIARRTTEGLSKREAIRCLKRYVAREIYNDIRAIVLTPEAARTAA

SEQ ID NO: 218800 - protein, 326 aa, unidentified
MEHELHYIGIDTAKEKLDVDVLRPDGRHRTKKFANTTKGHDELVSWLKGHKIDHAHICIEATGTYMEPVAECLYDAGYIVSVINPALGKAFAQSEGLRNKTDTVDARMLAEFCRQKRPAAWEAPHPLERALRALVVRHHALTDMHTQELNRTETAREVQRPSIDAHLLWLEAELKRLEKQIKDLTDDDPDMKHRRKLLESIPGIGEKTSAVLLAYIGLKDRFAHARQFAAFAGLTPRRYESGSSVRGASRMSKAGHVSLRRALYMPAMVATSKTEWGRAFRDRLAANGKKGKVILGAMMRKLAQVAYGVLKSGVPFDASRHNPVVA

SEQ ID NO: 218801 - protein, 363 aa, unidentified
MTSITTTTGPVTGGVDTHGETHHAAVLDRVGRELGDREFPTNPSGYRALLAWLVGHGQLDRVGVEGTGAYGAALARHLRAGGVTVVEVDRPDRKARRASGKSDPLDAYAAARAALSRRATGAGKSRDGRVEAIRALRVARCGAVKARAAATNQLKSLLVSGPAELREQLRHLSTTVLITTCANLRPTGELADPVQATKAALRRLARRHQNLSKEITEADVDLKNLVTAAAPCLLALRGVGIEVAGQLLTTVGDNPDRLHSEAAFAHLCGVAPVPASSGRTHRHRLNRGGDRAANNALYIVVLGRLRYDSRTRAYAARRTTEGLSKPEIIRCLKRYVAREIFSVLTARTVKAQSRRVHAMSTAA

SEQ ID NO: 218802 - protein, 343 aa, unidentified
MELNAIGIDLGKTLFHLVGLDASGNVVVRKRCSRAQLLKYTANLRVQRIGMEACSGSHFQGRALREQGHGARLMPAQYVKPYVKTNKSDYIDAEAIAEAVQRPTMRLVPIKTEEQLDLQAVHRLRERWVMRRTAVVNQIRGLLLERGVTLPKGRSHVDEALPEILQDADLKLSGSFRLLLSELQLELEQLAEHIQQMDSAIQHTVKENEACQRLTTIPGVGPVTATALIAAIGNGSGFRKGRDLAAWVGMVPREYSTGGKQKLLGISKRGNNYLRTLFVQGARAVMRYRAKQAPGLNHWLTQLLARTHQNVVIVALANKLIRIAWAVLCKNEVYRAPALAASH

SEQ ID NO: 218803 - protein, 373 aa, unidentified
MTTMAQPEAYRAPASMAGIPTGLMATGGVDTHKDTHTAAVLDGTGQLLGHQQFPATPDGYAALLGWLRGHGSLVRVGVEGTGVYGAGLAAHLQQAGVEVVEVDRPDRKTRRWQGKSDPVDAEAAARAAQAGRATGIPKTRGGRVDALRALRVARRSAIGARADAQRQIKALIVTAPSELRARLHALDVRALIAHCASRRPDPTQAAQPAAATVLALRALARRHQQLSAEIAELDALLGPLVAALNPALLTLHGVATDIAGQLLVTAGDNPERLRSEAAFAMLVGVAPLPASSGRTHRHRLNRGGDRQANAALYRIVCCRLRWDARTRAYAERRTTQGMSKKEIIRCLKRYIAREVYTALLNPHPTAKDQRPAD

SEQ ID NO: 218804 - protein, 468 aa, unidentified
MPTAKKLWQNRKEKKEWTRRLQAADPGLEVVHPHAAGIDVGNSAHYVAVRPDRDPQPVRRFECFTADLYRLADWLKSCGVNTVAMQSTGVYWVPLYDILEERGFEVYLVNARHTKNLPGRKSDVQESQWLLKLHTYGLLNNSFHPPSAIRTLRTYWRQRAVHVEGAATCILRMQKALTQMNLQLANVISDLSGVTGQKIVRAIVAGERDPQQLAKLRDARIQASPAEIAKSLEGNWRPELVFVLQQEVDLYDAYQQRIAECDQQMQKHLATFADNTTAGQPPSPKGGIKKKKKKPTQNAPAFDLRHELERISGVDLTHSDGMEVMVAQTVLSEVGVDMSRWKTEAHFSSWLGLCPDNRSSGDRVLRRGTRRVINRAATALRMAATTLIRSQSYLGAQYRRLRTKLGAPKAITAMAHRLARLVYRMLKYGQKYVDKGAAYYEQRNRQQQIQFLRKKAEQLGLRVTLTQA

SEQ ID NO: 218805 - protein, 411 aa, unidentified
MGRVVIGMDPHKSSATIEIINDREKILDIGRYSTDTAGYRAMLAAGRKHRDRVWAVEGCNGIGRHLAQRLVADGEPVVDVPAKLSARARVFSTGQGRKTDPVDAHSVALVGLRSQGLRTISADDATVALRLLIDRRDQLGVTRVQVIKRIHRLLLELLAGGAKKHLSAAQAKALLGKVRPRDIAGKTRRRLVAELIVDLTSLDAKIKAADKELHQLISTTGSTLRDLHGIGPANAARLLGDVGDITRFADKARFASWNGTAPLDASSGDQHRHRLSRAGNRRINRVLHIMAVVQLRTDTEGRRYYDRKVAAGKTTMEAMRCLKRRLSDIVYKQMRDDAQRVATGPGGHVGATTDSSAVNSNPDVDASEKSCPGPATTNATRVKSSRPDRSSARSRHPKTAPARSRRQAQSA

SEQ ID NO: 218806 - protein, 330 aa, unidentified
MNYSHFVGLDVGKKSFDACLFSLDKELSHHTFPNTPGGIEELLHRVKQHGVEVETALFCAENMGSHVIDLCLSSYQFHFPLALECPLTIKRSIGLQRGKNDRIDARRIARYACLHYRKLRLYELPDKDLVRLRNWMVIRDNLVKQKVSSRKLLELTRETSGLADLVTAMTFLEKQLSLVKEKISYVEQEMEKIISSNIALLTNYQLLTSIKGIGPINAIVLLCVTGNFHRFSDPRKFVCYCGVAPFEHSSGTSIRGKTKTSNLANREVKVYLTRAAITAISWDPQIKAYYKRKTGEGKHKASVINAVRAKIIARCFAVIKRKTPFVTLRA

SEQ ID NO: 218807 - protein, 366 aa, unidentified
MKKIGTVQTFSNEILKEQKLTVGLDLGDRCSFYCVLDEAGKILLEQKVATTPEAMKQTFGKIPRSLIALETGTHSPWVSRLLTELGHEVIVAHAQKVELITQSNRKDDRHDARTLARRARIDPELWGPVRHRSAQVQIHLTVIRARAELVSARTALVNAARGLVKSFGPRLPKCGTYQVNQKLAEGVSAELRDVLVPLLREVESRSERIKEYEERMEKIATEVYPEVSLLKQVKGVGTQIALTSILTIEDRYRFEKSREVGCFLGLKPGRRNSGKSQPQKKISKEGDRYLRTMMVQGAHYILGPLGEDSDLRRWGWKLAERGGKNAKKRAVVAVARKLAVLLHRLWVSGEVYEPLRNSQKAMRAAA

SEQ ID NO: 218808 - protein, 338 aa, unidentified
MFYCGLDVALKSSYLYITDAQGRKKAAGQVATEKAALTERLKPYLRGGLAVALEAGNQSAWLHDLLVELGAQVTVVHPAKVKLIAESRRKTDKIDAQILCELLRLGGLPHPVHIPPPETRALRGLLVARRQLVTARVRLANVARGLLRQEGVRLKAGVLMTFVGWQRLWAQEYTLSHLKPVLAAYFESFKTLTRSLQALDRQLAQRERTDARAARLKTIPKVGRIAALTFLAAVDQVDRFPSSRKLVGYSGLAPTVRSSGERTQYGAISRQGRAELRGVWVQIAHLVARDTGRATAPLRKWYSRVAYQRGKKTAIVALARSPRRPDDRVPAVAGRDGV

SEQ ID NO: 218809 - protein, 339 aa, unidentified
MDKFIRVGVDLGKGYFQIHALTGSAAINRKLSRTKVRTFFARLAPCRIGMEACGSAHYWARELAAMGHEVVLMPPAYIKPYVKRGKNDALDAAAICEAMSRPDMRLVPIKSADQQAVLMLHKARELLVKQRTMSVNALRGHLAEFGLVVAKGISRVGELLELADSDGTLPEEAREMAKLLASHLEGLDRSIDAAEKRIAAANRRSPTGQLLDRVPGVGPLIASVIAASVPDPGVFKSGRDFAAWLGLTPKQNSSGGKAKLGAITKQGNRYIRKMLVVGCTSALRVAGKRKGALADWIAALRARKPERLVAVAVANKLARICWAIMTTGEDFRQEMFVRA

SEQ ID NO: 218810 - protein, 349 aa, unidentified
MLYMGIDLHKRFMFATVIDEAGKEVERARVENKKCSILAYIEQIKKIDEEISAVVEATSNSSKLYDELESELKSISLANPLKTKAIASARIKTDKIDSRILALLLRSDLIPKAHMPAKATREIREITRYHVSLTRVMTSLKNRVHAILAKYEINSPILSSASDIFGKIGTKELRSLSLSPNHSRSLNGYLDLIEFIKNLLAILKKEIARIANSDEVCIRLKSIPGIGDFLAVLIKHEIDDIERFPSHHKLASYTGLIPSTYQSGDKTRHGRITKQGNSNLRWALIEATQVAIVNSPYFRAHYEQIKRRAGVKSAIVATSRRLLEIIYLVWTQKREYVEINRSRSLAVAL

SEQ ID NO: 218811 - protein, 476 aa, unidentified
MKEHKKAKAKTKSEALKPIGEQERDSAGIDIGAKEIWVAVPPERAENAVRKFGAFTRDLNAIVQWLVQCGVRSVAMESTGLYWIALYQLLEDAGLKVCLVNARHVKNVPGRKSDVRDCQWLQYLLSVGLLLGSFRPAQAICASRSIYRYRQNLLSMAGQHVQHMQAALDQMNIKLHHVIDDLTGATGQAIIAAILSGQRDPLQLAKLRHQRIQAAESTIVKALEGDWRKEHLFVLQKAWDQYQQLQQQLQDCDKELWQYTRELEACIRVVKAAKVVRLRPELVGVEPVNNHSGSKARKMRKKTSKNQPEGPWQQELERFFGVDLTAIPGISVLTGLTLMTELGNDLSTFKTEHHFASWLCLCPDNETSAGKVLRRRTRRSQNRVRYALRMAAYSLHRDKSYLGDKYRRLRTRLGAPKAITAMAHQLARILWTLITRQVPFDLSVFAHQQKLNEHRRLKHLVANARQMGYQFTPIAA

SEQ ID NO: 218812 - protein, 331 aa, unidentified
MSNIIGIDVSKASLDCAYLRDPDQKRARRLRCKNEVSSFASLVSWAETKSDLSVKSLAFVIEPTHVYHEPLVQFLHNSGATVYLVNPGRVRKFAEGIGILSKNDLVDADLLARYGLLARNLIAYEPVAQEINDLRSLLNRLDVLERNLRSELNRQEKVGKTTVFHRLEQQSIARAVKRLKAEVITFKRAIRECIKSTPSLQQSFNLLCTIPGVGAKTAWIMIVILASRPFMSAPEVASFIGLNPIEKRSGNSQYRRPRLSKSGSGHYRQKLYFPAMVATRKNPDIKALYERLLAADKTKMCALGAAMRKLVHICYGVVKNQTPYQAQTISS

SEQ ID NO: 218813 - protein, 320 aa, unidentified
MNSIIVGIDISKETFDAAVLINNKVQTRKFNNNSEGFNKLVTWLKSSRTGHVCMEATGIYWKNLAKYLYDYGYKVSVVNPARIKGFAMSKLSRTKTDKADSVLIADFCKAMKPEAWYPQPLYIQELQQLVNRLNVLIKHKTQETNRLEVASKAIANNIQMHIEFLETQIKEIEQLINDHIKNNKDLHNKAMLLESIPGIGAKTQAVVLAFLADIEKFSSAKQVVAFVGLNPKHRQSGSSVRGASRISRTGNSDLRKSFYMPAMSALRHNCIIKQFSQRLSDTGKPKMLILIAAMRKLLHIIYGVLKHNSPFNPNVSIIQK

SEQ ID NO: 218814 - protein, 412 aa, unidentified
MSPMLIGIDVSLKSHHVQFMDGEGTSLASFAVPNDRTGADTLIQKMLTTASKANLPQLRIGMEATSNLGWHLAHYLKTELQGYEPDVQSQIYVLNARKVARFKKGYEALPKNDRVDAWVIADHLRFGRLPYAMKETIQYEALQRLTRTRFFLMNNIKRDKTYFLNQVFLKFSGMRQDSPFSDTFGSTSLAVIQELEPEQIMTMSMEELVAFLQDKGKNRFEKPEEIAAYLQKIARSSYRLDKAMADPVNISLATTLSVIQHLESEVKKLDKAIAKIMKGLPQTLISVKGIGPVFAAGILAEIGGIERFHDHHALAKYAGLVWSQNQSGEFEADETSRMRTGNKYLRYYLVQAADSIRKHDAEYAAFYKKKYDEVPKHKHKRALVLSARKLVRLVFMLLKTNTLYTPPERRQP

SEQ ID NO: 218815 - protein, 479 aa, unidentified
MNVKARRTKKQVNVENQAINLLSKEELNKKIEVVEKELRSYTWRELETNGKFAKNDKLSFITDDMLIAGCDIGSETHYIRAIDVRGRELSSGAFEFGNTSEGFANARAWVLALAAKNDKKQIVLGLEPTGHYWFALAAWMISNGISVVQVNPYAVKQSKEIEDNSQLKDDRKDPKIIANLVKDGNYGMPYLPEDIYADMRRLSMFRDQLTEDRIRNINRLHREMKIYFPEYMDAFGKIDGAFTLEILKVAPIPSDIVELDEEGLKSLWHEAKLRGRGYANASSILEYARKSVGIKDGSDAGRQAVKWFVSRIIELDEQLSDIENQLNQRCNEIPYAKNILAISGIGENILSGILAEMGDISRFDNVKEIQKLSGLGLVACSSGKHTGETKISHRGRKRLRYWLFQAAKSAVTHSEEFKELHVYYTTRKQNPLKKMQSLIVIACKILRVIFTILTKGTAYDPKKLLGDIVRPDQSIPQAA

SEQ ID NO: 218816 - protein, 450 aa, unidentified
MKKKEDRLSGLPVLHTHAAGIDIGSRFHVVAIPGELDPEPVRTFQAFTTDIERLADWLISVGIQTVAMESTGVYWVPVYEVLETRGLNVILANARETKSVPGRKSDVNDAQWLQRLHSCGLLRASFRPGRDITALRTYIRLRERHLDYGAAHIQHMQKALTFMNIQLHHVVSNITGVTGMNIIRAIVDGERDADKLAQFRDMRCKADLATIRSSLVGNYQPEHIFALKQALAAYDFYQDRIKDIDVEIESILGKLSCEMPHPVTPLPAPKHKTKAPNAPDFDVRPQLYQLTGVDLTQIHGVGPYLALRVISECGTDLSRWPSAKHFTSWLALSPGCKISGGKVLSSHTRKTSRRLTAHLRLAAVTVGRTDTALGAFYRRLAARIGKAKAVTATARKIAVHLYNAMRFGTSYQDPGSDYYEARYRERVLRQLHKRATEFGFELQPIAVNVS

SEQ ID NO: 218817 - protein, 451 aa, unidentified
MPTKRQKRVQDLPVLHRDAAGIDIGANEVFVAVPADRDPEPVRSFATFTRDLHALADWLQRCHIESVAMESTSVYWIPLYQILENRGIEVFLVNAQHVKNVPGRKTDVSDCQWLQYLHSVGLLRASFRPPATICALRSLWRHRGSLIQMAAEHVLHIQKALDQMNLQVHRVLSDITGLSGLRILDAILGGERDPVVLARLCHSRVRSSRDIVAKSLDGDYRAEHVFELRQSLAGYRYYQGLISEVDEEIQRHLSEFKTAADIDSNPPVRTKKRALQRQHYDPRNFDLRSELYRIFGVDLTDVPGISAVTAHTILCEIGTDVSQFRNASAFASWMGLCPERQISGGRVLYTHSRHVRNRVALALRMGAHSLHHANNYLGEFFRRISRRLGKPQAVTATAHKLARIVFHLLSTREPYNESVFHSFDEQALKRAEARLRKHAAQLGFQVLPANT

SEQ ID NO: 218818 - protein, 404 aa, unidentified
MKGPIVSIDVSKGKSDYQAFKDLNVKFTDVRSIKHTKEGFDKIVNLVKDMERKLETEVCVVYEATGVYHRVLKKVLEDNNIKQFIINPLLSAKTRKNDSLRSPKTDKLDPKSIAKTYYSHSLHNSHKPETIYHELRELSRYYEDILVHLRKDKVAFRAQLDVVFPGYDTLYDDLYGPVALAVIEKYPHPELLQKKSINTVSKIIQKKTRHRQAVSNKMAFKAIEYSKTIYSGCGKDDIDVLILERLIKKLNEDLNEAERTINEMIRLVQELPDFIIIKSIPGIGDNLAARIIAELGDMTRFKKKNELVAYAGLDPRIYESGQKDGAHMHITKKGNKRLRCLLYLAVTCSIRLKRDDNSIKDFYIKKKQQSNPMCSKAAKTACASKLVRIIYSMCKTGELYQYNK

SEQ ID NO: 218819 - protein, 394 aa, unidentified
MFFIGIDVAKRSHQAAVTDISGNVIVKPFNFKNSSDGFTKFLSAVESNAIEKNDCIIGLESTGHYWYPLYFFLIENGFGVKVFNPIQTAAFREITIRKVKNDNLDSLLIADFTRFGRYSETYIPDENMLALKNLTRFRLSISDICGSLKKKVIAILDQVFPEYTGVFSDVFGKTSKQLLEQFSTPDEFMDISTTKLTNLLLKVSRGRNGREKAELIKTAAQSSIGISYALDAFSFELKQLLAQIEFMENQLSDVDAEMEKLLSQSEYGVITTISGIGPMLGSVIVSEIGDINRFENSSKLVAYAGLDASVKQSGEFNSSKNKISKRGSPYLRRALWMAAFMSLQCDPALYDYYSRLRARGKTHRCATTAVARKLCIIVWAIMKSKKPYSPVLKN

SEQ ID NO: 218820 - protein, 343 aa, unidentified
MYIGLDVHKKNSYYAMVDESGKEVKKGRFLTACGDLDEFAGDLTGDAKVAIEASTSGIFVYEYLAERGIEVHLAHPTLVKPFAKKHVKTDKVDSKVLAQLLRMDYLPESYVPGKERRDLRTIVRHRASLVRLRTSIKNRVHALLTREGIQLPELSDIFGKKGTEFLKGVKLQQQRRMALDNYLKVLEVLNGVIKEVESILEGKAEVTEEAKWLMSTPGRGFHNALLILSELGEIERFENPTNLVCYAGLAPKVEQSGEQVRYGHINKHSNGFLRWAFIQSARAAVRSPTSNRFKRIYQKIKVRRGEKVAIVGTARHMAESVYWVLTKREPYKENKAIRASYFS

SEQ ID NO: 218821 - protein, 344 aa, unidentified
MVVLGTDTHKRSHTVVAVDEAGAEIASMTVAATPEGHLRLVKWAAKWPQRRWAIEDCRTLSRRLESDLLRAGELAVRVPPKLMAGARRSARTRGKSDPIDALAVARAALREPDLPVAQLDGPSREVRLLVDYRESLVKDRTAAQNRLRWRLHELEPGYDPPPGSLNRYKTLDHIDQLLTVHTSMVATLGRREVTRIRELTREANQLERDITHRVTQLVPSLLEIPGCGALSAAKLVGEAADITRFKSRDAYAMWAGVAPIPVWSANNQRFRLNRGGNRQTNAALHRIAITQLRIHPDAQAFIKRRLETGSTKREALRLLKRKLANVVYRTLLTDTQQPALTNAA

SEQ ID NO: 218822 - protein, 350 aa, unidentified
MIFIGMDVHVRNSFLHITDEGGQLLKRGRCANTLSDFAAFLAPLDAETGYVALESTTNSRAIARMIRQAATHSHLELAVEVLDARKLRIIAESVSKCDRRDAAMLNELSRANLKLPACYMPDDEVFALREHLRARSDLVRIRTSVKNRVHAVLHRRGVLTPLGGLFTQAGRTFLAQAQLDDAGSTIMQLYLRTIDQLNGLITESNDSLKQLTRRPRWAKPAALLQTMPGVGLITAMTILAELGDPKRFRRRAAVANYAGLVPVVRDSNDKRYRGGITKRGSTHLRAVLIEAAWIAIKRVPTYNHLFERVTRRSNKLTAIVAVARRMLEDAWTMLKREEAFRYSAMPSVAG

SEQ ID NO: 218823 - protein, 326 aa, unidentified
MQGKDASEQDTAVKCNAGIDVCKSYLDVHVLPCGQSVRVCNTDDGIRKLKRWLMQFDLALVVVEATGKWHRRLQRSLHASGFTVAMVDPYRVRMFAKAQGIFAKTDRLDARVLALFATVMSPTVRPPASEALHNLAELVTARDSAVAEGTALKNQLSATNGKFLQRHLKRRIARNTKDVATIEREIMAGIKADEGLARRYEILISIPSFGPVVAATLIACLAELGSCSRKQIALLAGLAPIADDSGERQGVRVIWGGRPIVRRVLYLAAVSAARFNPGLKPFFERLIANGKPPKAAIIAVARKLVVLANVLVSENRIWQLHAPKHA

SEQ ID NO: 218824 - protein, 309 aa, unidentified
MSVVAGGKPLGKQFANNEQGFGLLIGWLAHRKLGQLHACLEATGRYSLDVALALHAAGHVVSIVNPAQIRDFARTKLGRNKSDKVDAGHIREYGAVFRPPAWRPPSPALRRLCELQTMRAGFLASRIEWQNRAGSLGSDAAGRALAEATIAHFRAQIAAVDQVIAETIDQDDDLRGKRDLLLSIDGVGQTFAALVLAELPPPEVIASSAAAVAYAGLNPRDFRSGTSVNRPPRISKIGNAVLRAGLYMPAMVAMRHNPAVAALAARLRAQGRLKPKQILIAAMRKLLVICFGVMKTGRPFDAALAMPPP

SEQ ID NO: 218825 - protein, 349 aa, unidentified
MLYMGIDLHKRFMFATVIDEAGKEVERARVENKKSSILTYIEQIKKIDEEISAVVEATSNSSKLYDELESELKSISLANPLKTKAIASARIKTDKIDSRILALLLRSDLIPKAHMPAKATREIREITRYHVSLTRVMTSLKNRVHAILAKYDIDSPILSSVSDIFGKIGTKELRSLTLSPNHSRSLNGYLDLIEFIKNLLAMVKKEIAGIANEDETCTLLKSIPGIGDFLAVLIKHEIDDIERFPSHHKLASYAGLIPSTYQSGDKTRHGRITKQGNSHLRWALVEATQVAIVNSPYFRAHYEQIKRRAGIKSAIVATSRRLLEIIYLVWTQKREYVEINRSRSLAVAL

SEQ ID NO: 218826 - protein, 360 aa, unidentified
MPSIALGRSDVIVGVDTHKDEHVAVAIDGLGGTLGDPLFVPASPDGYADLLAWADSLGAIYAFGVEGCGSYGCGLARFLRRQDQKVFEVARPRRTDRRLSGKSDTLDAERAARSVLSGTGNATPKLADGKIEAIRLIKIARDTAVKAHTATLITLKAVLVTASDELRGRLEALTDHKLVVASAAFETQESVSDPEAAMRHALSHLARRWLDLHEEIKVHSSHLKILTKAVAPQMLERFGIGFDTAAELLITAGDNSERIRSEAAFAKMCGVCPIPTGSGKSSGRHRLNRGGNRQANAALHRVVIARMQWHAPTIAYFARRTADGLSKKDVIRCLKRFVAREIYRLLPETSNSSESGELAA

SEQ ID NO: 218827 - protein, 342 aa, unidentified
MLYVGIDIAKNKHDVTALNVPGKTVLKPLTFSNNKAGFELLDLSIRQLNQDCLIALEDTGHYAFNLLNFLHEQGYKVYTYTPLLIKEFAKSLSLRKTKTDKKDAHGIALKLLSDPNREQFQHDNRQVELKILARHIHRLKKKQSDWKVQYTRCLDIIFPELDKIVGKHSEYTYQLLTCYPNPQKRLEAGFDKLIEIKRLTASKIQDILSVAPRSIGTTSPAREFEIIEIIKHYKRLIDKAETCVNDLMAEFNSVITTVTGIGGRLGAVILAEIRNIHAFNNPAQLQAFAGLDSSIYQSGQIDLAGRMVKRGSPHLQWALIQAAKACARFSPAFKAYLKTTLE

SEQ ID NO: 218828 - protein, 325 aa, unidentified
MSDPLYSIGIDVCKRFLDIHVCPTGKCWRVPNSIVGLLSVQSQFPEPDGVKRVVLESTGGYEREAALWLSQAGYPVGVINARQGRNFARAMNQQAKTDQVDAQVLALFGDKITPAVRPLASEAQQQLDDLVTRRRQLVDILTAERNRMALLRGKAQANVEGHIEWLTEQIKELDGEIEAQIQACQAWRHTQELVLSVPGVGKVMASTLVSALPELGKLSHKQIAALVGVAPFNDDSGQMRGKRRVSGGRANVRQLLFMSAMVAVRYNPVLKEFYSRLLQRGKEKKVALVAYMHKLLTTLNAIVKQGKAWVSPIAEAETEKVALSA

SEQ ID NO: 218829 - protein, 344 aa, unidentified
MQKISTMRTSGKNIFQGQLTIGVDLGDRSSAYCVLNEAGEIVLEHKLATTTEAMKQVFGSMPRCRIAMETGTHSPWVSRLLTALGHEVIVGHAQKVRLITKSRRKDDRLDARTLARLARIDPELLSPVKHRSAQAQLHLTEIRARAELVSARTALVNAARGLVKSYGERLRKCGTQQFCRDTANGLSAELREALEPLLREVESLNERIKEYDQRIAKMAKQRYPETALLKQVKGVGDLIATAYVLTIEDPHRFRKSRDAGCFVGLQPGRRNSGESEPQMHISKEGDEYLRTLLVQGAHYILGLFGQDSDLRRWGQKLSARRGKIAKKRAVVAVARKLAVLLHRL

SEQ ID NO: 218830 - protein, 317 aa, unidentified
MPTTPIYIGVDVAKAELVVATPDQALCRVANEPDGIRTLLKHLESLTIAAVVMESTGCYGREALAMLTAAGHQVAIVQPGRVRAFAASLGIRAKTDPIDARVIARFAEATKPRSTQPPTKEVARLRALVDRRDQLIEMRKQEANRLESTADPLITKDMRASIKRLEKAEETYSKHIHTCIQAHEGMRALSERLQEESGVGLQTAATLLAYFPELGRLNRQRAAALAGLAPYDRASGTNDGKRSTYGGRRRLRRALYLAATTAARWSPWLKEIYAKLRAKGKCAKVAIIACARKLLVRLNSIAAQVLDQEQQAVSMSP

SEQ ID NO: 218831 - protein, 420 aa, unidentified
MTKEYLKVIAGIDTHADTHHVGVITDTGQHLADREFPASGTGYQGIIDFITGFGPVLAAGVEGTGSYGAELSRVLTRRGIPVVEVMRPNRQARRLQGKSDPLDAYQAAESVLSGRSGVIPKSRDGAVESLRVLRAERATAMRARVAVMAQVKTLLITAPETIRAKYRAMTSPALMAALEKTRPTGAPTEPLTSTATVLKRLAVRYRHLHQELALIDAELDTILTLHAPMLRDLAGVGTDVASQLLVTVGDNPERVTTEAKFAALVGVAPVPASSGKMTRHRLSRAGDRQANKAIHRVVLVRMRYDSRTRSYVARRRQEGKSTKEIMRCLKRYVAREIYDQLLHPQPAPDRGSLRTRRTAKRLTLQQAADALHVWPTTLSRLERGLAHDNDVHHRYETWLNRQSPATMQTPHPVLARVLPA

SEQ ID NO: 218832 - protein, 479 aa, unidentified
MAAHDRRQAEDCAKIAAVPVQHEHAAGIDAGDASHWVCVDAAPDGADTVREFAAHTAGLRQLVAWLQLCGVTTVALEATGAYGHVLFLTLLEAGLTTIMIPPQFARQIRGRPKTDRRDCQWIQRLHKLGLLPAVFRPDEATHTLRDYVRQRANLVRLSAQHIQRLQKALELMNLKLTKVLGDITGVTGLKVLRAILAGERDPLKLAQRRDRRCKHTAAEIALALDGRYRPEHLLELRCNLTLWEKYQEVIATVDVAIAAQLRAMRRHTELPPLEPRTRVRGRKPHDPGFDVRTALYYVTGVDLIAIEGIDEVHALTLVSELGTDLSKWPTLKQFCCWLGLCPNWKKTGGKVQSSHTRRGKNRAARALRLAAWALMRSQSYLGAYLRRQRSRLGAPKAITALAHKLARIVYNLLRYGVAYMKQTEEAYAEQVRARLEKQLRRRAVELGYELRPIEPKLETLIVGGEELTVTADGEIVAAK

SEQ ID NO: 218833 - protein, 365 aa, unidentified
MVYVGVDLHRKSSYVAVLADDGELLASRRIASQPDEFLRVFGELEAEPTGVAFEATYGWGWFADLLSDIGIPAHMAHPLATKAISSARVKNDRVDAKTLAHLLRTNLLPEAWAAPPEVRDARKLARTRVSLARISSRLKCQTHALLADQAIEVPVTDVFGLAGRAFLEEEVLLRPVPQARLQANLRLIDLLAPELAQAERELRELFQADPRIPRLTPIPGIGFTTAALIVAEVWDVSRFPSPQYLCSWAGLTPTERSSADHTRRGHISKQGSRWLRWAMVESASRPYLKDPTLRRFRDGIARRRGAKIAKVALARRLLTLCYYALRDEDGCRAFPVPPTRTKRPNRGRARSPQVMASSGTAAPSD

SEQ ID NO: 218834 - protein, 349 aa, unidentified
MTLVGCDLHTRKQQVAVLDTETGAMDERQLSHAGDAVEQFYRALPGPVTVGIESTGYALWFHELMQRLGHTLLVGEAAKIRAMVVRKTKTDRRDALHLLDLLKHERFPLVWIPDPATRDLRALVTHRMRLVRMRTMVKNGLHAIAMNRRLTLGPSLWSQRGLAQLQGLALAPHTTQRRDESLQRLTWLTARIEALDDRVAAAAQADPGARLLLTHPGVGPLTALTTVLVLGPVARFPDSKHVVSYTGLAPAVHASADTCRLGQITKQGSPLLRFVLGQAGLIAAHAEVDLTRHYRTLLRRRGRPKAIVAIARKLLVRLYIMLRDQIDYEEFRRRGRTPRGQEVPPPAFA

SEQ ID NO: 218835 - protein, 330 aa, unidentified
MYDHYIAVDWAQSNMAIGRMTKESSQVKVIDVPADLKELKLYLSRLHGKKILTFEETTTSQWLYVELRGCVDEIVICDPYRNHLLSEGAKTDRLDAERLVQLLRAGLLKPVFHSVDQLIAHRKLASGYEDLVKTGVRLQNQRSALFRARGKAKKEKDLEDAGEVFVLRGLDQQIEAYETAKKRYENEIQRLGRKHPMIRHLDQLPGIGSIGAFKIAARVVDAERFKDKGSWLSYCGLVRHEKLSGGQSYGWRGSRYCRTLKSVFKTAALSVIRAAGNSSFKDYHRFLLEKKRYAEHQARHALARRIAVVAWGVMKSGKKFEAERILKKRA

SEQ ID NO: 218836 - protein, 337 aa, unidentified
MLYVGIDLHKEKVYGIVMNENGELIKKEKFENEPEKFHKFLKNMEKEKAIVAIESTGFATPIYDFLKENGCETKVAHPLKTRAIAEAKIKTDKIDARILADLLRSDLLPSSYIPSKEIRKIRDMTRHRAYMVRFRTRLKNKIHAELAKRWIKTKGNIFTKKGIEWLRGLGIESINRYLDVMEILNEKIREISLEIKEIAKENEDAKLLMTIPGINYYSAMLILAEIGNVKRFSDSHKLCAYAGLIPSTYQSGNKMYHGHITKQGNKWLRWILIQCVHIHIKYDTHLTRFYKRIAARRGKKIAVVATASKMLRVIYQMLINKEEFKPFPLKSRKISVG

SEQ ID NO: 218837 - protein, 334 aa, unidentified
MALELLAIDLGKRSFHLYGIDTNGEILSRKVSRTKLAEVVNNLAPKAIAMEACASAHYWARCWLAAGREVRLINPRFVKPFVKGSKNDAVDAEAIFEAAMRPTMRFVPVKSRDQQDLQSLHRARDRLICQRTALINHTRGLLAEYGVVLPQGPWRFTAQAPAAVAGAELSDLARSIFGELMDQLDELDRRVKKLDATMVALCRTNETCRRLAKLPGVGPVIATAIVAAVNDGRQFRSGREMAAWIGLVPRQYTTGGKPRLGGIGRRANHYLRRQLIHGARAVVSRVPKHDDRRSTWVKALVARRGFNRTIVAVANKTARIAWALLNRKEDYAIA

SEQ ID NO: 218838 - protein, 337 aa, unidentified
MEYFAGLDVSMEETHICILDREGVLIREGKASSVPKAIAAFLAAGPTCSKVVFETGRMAPMLFHGLTELGIPVVCIESRQAYQALKSLTGHKTDRNDAWGLAHLARTGFYKPTHFKSLSAHAIRALIAARKKLVGQRVTIDNQIRGLVVVFGVRLPRALSPAFKDAALKVSDGVPGLHAALRGLFAAREAILTAVAAIDGDIKVMTRRSEVCARLMTVPGVGPITALAFAAAIDDPKRFKRSRDVGAYLGLVPRRHQSGEVDYTGSISKRGDVRVRALLYEAANVMLTRYAAPLKLKSWALAIGQRGTMRKARVALARRLAIILHAMMRDQTEFQVA

SEQ ID NO: 218839 - protein, 348 aa, unidentified
MDHIGIDVHKRDSQIYILAEGGEVVEQRIRTEPERFTAVLGARPRARMLIEASTDSEWVARCLEALGHEVIVADPNFAPMYATRSRKVKTDRRDARALAEACLLGAYRPAHRLSDPQRHVRGRLGVRDALVQTRTRYISLIRALLRQQGYRVPSGSAEGFIQRVRALPLPGRLRSVIAPLLAVMCHLNRQLAFSDATIEHLAVQDPRVPRLRSVPNIGPVTAAAFLATVDDAQRFRHAHHLEAYLGLVPREYSSGETQRRGPITKAGHSHTRWLLIQAALSILRRRSPAAEALWTWALRIAARRGKQVAIVALARRLAGILYALLRDGTVYAPRRPAALPDSVAALHA

SEQ ID NO: 218840 - protein, 358 aa, unidentified
MTSMPTMPLSRRVVIGVDTHKDVHAAAVLDERGALLGTSVFDADSAGYRALIGWSVQFGTPLRFGIEGTGSYGRGLASSVRRSGHDVVEVARPNRADRHRRGKSDLIDAENAARAVLAGQAEAIPKDAEGTVEMIRHIKVAKDAAVKARTIAMQTLKAILITAPAELRETLQPLSDTVLLRRCAALRPGELTSVTAAAKHSLRAIAQRWQSLNDEIVAHEHILKNLVDHVAPQLTAGVGIGPDNASELLLTLGDNAARVHSEAAFAKLCGACPIPASSGKTIRHRLNRGGHRRANAALHRIVVVRMKYHEPTRAYVARRITEGRTKPEIMRCLKRFITREIWARTQHLRQQLDQNTAT

SEQ ID NO: 218841 - protein, 320 aa, unidentified
MARRREATVWIGIDVAKQAIDVARGSAGPLEHIERALGPLQQWAQTLPRQARVVLEATGGLERVVTTVLRARGIAVCVVNPRQVRDFAKATEQLAKTDRVDARVLAHFGAALLPRVTLARAGDVDALRALLDRRRQLVETRTAEKNRRHTAPAAVIGSIDDHIAWLDQQIERLDQAIEAAATACRALAEPLGRLHAIPGVGRIVGLTVLTHLPELGTLDRKRITALAGLAPFARESGLQRGRRAIWGGRGDARAMLFLAAQSAARWNPPLRLFYERLVSRGKSKKAALAAVARKLLIAINAMMRDQRPWQPAIVAEPSCC

SEQ ID NO: 218842 - protein, 426 aa, unidentified
MNYKQNEKILQVTEKTLVVGIDIAKEVHYARAFNYRRIELDKVIPFTNNKEGFKSFRNWLLEVMKKNDLDNIIIGFEPTGHYWYNFAEFCRNNDFKYVMVNPYHVKISKEMDDNSQTKNDRKDPKTIAKLVIDGRYFETYVATGVYAELRNIVKMYEHVIGCKSVVENKIIQWLDNYFPEFTTVFGNWECKSGMITLKQFPLPSMIVELGETKVLETWKKEIKQGVGMKRAQSLLAAASRSVGCTEGLRMGQKELEYLIKEYEMYLEQLEEIKAEMEILLVQVPGAKEILKIKGIGLVTATAIIAEIGDISRFEDARQIQKYAGLNLIENSSGKHKGQTTISKRGRKRLRGFLFKVIMPLVGKNTEFKKLHEYYTTRKDNPLKKKQSLILLCCKLIRVLFAILKKGISYDGKRLMEDIRRPSVVAA

SEQ ID NO: 218843 - protein, 453 aa, unidentified
MTKHKTGDHPDLKLVNPQAAAIDIGSTMHMAAVNPDADIMPVRAFGTFTQDLHDLADWFRSCGVTSVAMESTGVYWIPAFEILEAHGFEVILVNARYAKNVPGRKTDVSDAGWLRQLHSYGLLRGSFRPEAEITTLRAYMRQRERLTEYAAAHIQHMQKALMEMNLQLHHVVSDITGATGMRIIRAIVAVERDPEVLAAHRDLRCKASTETIKAALVGNDREEHVFALTQSLELYDFYKAQIEVCDRRLEAAVGALTVRADDDLAPLPKARIRGRQQNAPSFDVRAALYGVLGTDLTQIHGLGPSLALKLVAECGTDLCAWKSAKHFTSWLCLAPGNKISGGKLLSSRTRRSSSRAAALLRLAAVTIGRSDTALGAFYRRLSSRIGKQKAVTATARKIAVLFYNAVRHGMTYQDQGAAAYDERHRQRVLSNLQRRARILGYALAPMPEQQAVS

SEQ ID NO: 218844 - protein, 419 aa, unidentified
MPFKIFRKNCCGLDVHKTWIYACIGITDPNGRTEYKQTRFSAFTKGLQELADWLAKYNCKEVCMESAGKFWIPVFNVLEKSCLVTLAHPKYTKPQKGNKTDRKDAKWICDLFMCDMIKPSFIPPPDIRQLRDLMRYRMKLTNMLTGEKNRALNCLTVSNLKLDDVFSDVFGKSSRSIIAYILEHPGEKFDVAPFIDKRCKHPLDEIQAAVDGAVSREQAAKLRECLQHIDEIGAHKENIEREIFRLAEPYAYQLSLIQTVPGLSGNPMTAIALLSEIGADMSAFPSAKHLVSWAGCCPRNDQSNGKVKSTRISRAGSYLKPILVQVANAVIKSDKYPECKERYRKLKARRGHKKAIIAICRMFLTAIWNILSKLEPYSADGYLADKISDHSVVITKAQGLALLRQRGYIFKDELPVESG

SEQ ID NO: 218845 - protein, 422 aa, unidentified
MNQSNPFKATIGLDWADQKHDLWIRPADGSKSEHVRLEQSPEALHEWAAKLRKRFDTGPVAIGVETSRGPVISALMTYDFIVLFPINPKALKDYRAAFSVSGAKNDRTDAQLIEEFIRLHSEKLKPLQPDTELTRKLSGFVQDRRHLVDERTRIVNQMHSKLKTYYPLAETLIGSEMNSLMAAEFLSRWPDLESLRAATAPKIRAFFYQHNSRSAKKMEQRLEAIETAKALTTDPGIIEPARELVLALAGMLKCLHKSVARLEQAIKLAMDQHPDAPIFRSLPGAGPALAPRLLVAFGTQRDRFQSAQEVAQFYGVAPVVIQSGNSELVRLRRRCPKFGRQTFHENASCVSKTEPWGRAYYEQQKKKHDDKHHQACRALAYKLIRIYFSCWKTSTPYKSNIYLNALQKHGSPLHNRLNRIGE

SEQ ID NO: 218846 - protein, 350 aa, unidentified
MLAELVHHVVGVDPDRDWVTLAVVDARTSGVIAEGRFPATGDGYRDAVELVDGHSVDTERAWTIEGSAGYGRGLAVMLSHLGEWVIEFDRPTRKTKDGAKSDALDAIRAARETLGRDRFSTPRAHDGVREAIRVHTVTRVAAVRARTGAINELKAIVVTADETIRSPLRGLRTNQQVAACARFRDRSSADIAQRCTRACLRALARRIEHLDAEVDDHDRVLKELLDQAAPQLLAERGIGYVTAAAFYIAWSHPGRCHSEAAFARLGGTSPVEATSGQNQSRHRLNRGGDRQLNRALYLVAITKQRCDPATKAYIARRTADGKTNREAIRCIKRFIARRVWRLLEHPPITT

SEQ ID NO: 218847 - protein, 401 aa, unidentified
MQQDQQHDSVDVFVGVDVGKGQHHAVALDRNGKRLYNKAMPNDEAKLRALISELRAHGRLLFVVDQPATIGALPVAIARDEGVMVAYLPGLAMRRIADLHAGEAKTDARDAAIIAEAARSMPHTLRSLRLADEPLAELTMLCGFDDDLAAQITQTSNRIRGLLTQIHPALERVLGPRLDHPAVLDLLERYPSPATLAAASEKTLANRLTKLAPRMGKNLAAEIVQALNEQAVIVPGTQAATIVMPRLAQQLAALRKQRDEVASEVERLVLAHPLWPVLTSMPGVGVRTAARLLTEVAHKAFASAAHLAAYAGLAPVTRRSGSSIRGEHPSRRGNKVLKRALFLSAFAALRDPISRAYYTRKVEQGKRHNQALIALARRRCDLLFAMLRDGTIYQPKAAANA

SEQ ID NO: 218848 - protein, 320 aa, unidentified
MQAKTNATCPVYAGIDVSKARLDIYLLPVDKYFHVTNDKTGHRKLKCELAKYDIHCIALEATGKLHRCVHRTLHEAGLPVCALNPALPHSFAGSIGQLAKTDMLDAKLLAMQAQWHQLKATPIKPKALEDLGEVVSAWHKAKAGKTALSNRRQNSENTFLKAELRHPLKAMEGHIKRLEEEIMQRIEADELLMRRFGILLSVPGIGSVTAITLIVCLDELGDCTDKQIAALAGVAPMNRDSGTKQGQKYIRGGRKGVRNALYMAALSASRSCNPPMKIFYDRLIANGKTAKLALTAVMRKLVILANALIAQNREWQSIAP

SEQ ID NO: 218849 - protein, 344 aa, unidentified
MQIAVIGLDLAKSVFQVHGIDDAGQAVLKRKLRRSEVLPFFAGLDAALVGIEACHTAHYWGREIAALGHDVRLMPPQFVKPYVKSQKNDAADAEAIAEAVQRPTMRFVPIKSADQQAVLMLHRTRDLLIRQRSSLISAIRAHFAEFGIVVGQGIRNVERLLALLETAGDQRLPALAAEMLGILAAQLRCVAEQVKEVEVKLLAWHRADETSRRLQSVPGLRPITASAIVATVGDPKQFKSGRQFAAWLGLVPQQRSSGGKERLGGISKRGDGYIRRLLVHGARAIVGWRKRSATHKTPWIERLLARRPTNVATVAYANKLARIAWAIMMHGNRYNPALAFATIP

SEQ ID NO: 218850 - protein, 362 aa, unidentified
MFKIFRKNCCGLDVHKTWIYACIGITDVNGRTDYKEARFSTFSRGMRELADWLAKYECKEVCMESAGRYWFPVFNILEKTCWVTLAHPKYTKPQKGNKTDWKDAKWICDLFMCDMIKPSFIPPPDIRHLRDLVRYRFKLTNILTGEKNCAQNCLTISNLKLDDVFSDVFGKSASSITTYILDHPGEQFDIAPFVDGRCKTPIEEIQVAVDGSISPEHAIKLRTVLSHIDEIKAHKQTIEAEILRLAAPYETLLELIRTVPGLSAAPMTAIALISEIGVDMSVFPTAKNLSSWAGCCPHNDSSGGKRKSTRISRTGVYLKPILVQVANAVVKSNKYPGCKERYRRLKAHCVHKKPSLPSAVCS

SEQ ID NO: 218851 - protein, 356 aa, unidentified
MTNLQRADFSGKTIYVGMDVHLKSWDISIFFDQQHLRSFHQPPDASKLVGTLQKEYPNAILCCAYEAGFSGYWIQRQLQGMGISCMVVNPADVPQTDKGRKTKTDRADSKRIGKALQAGLLHPIYIPDRFTDSNRKLVRYRQQLLADLKRCKARIKHFLLYQGIHLPDQYNNSNWSSKFISWLKELKHEHETSRMALHKMVAQVESMKHEVSVLNKDIQKMMTHPVYEACAKLIQSVPGIGPIITASLLVEIADIKRFPTFAQFNSFIGLCPGEHSSGDEERKGKIISRHHSTLRALLIEAAWTVVKKDPAMTLVFSDLKTKMTAKRAIIRIARKLLNRLYHVWIKNEIYENGIVK

SEQ ID NO: 218852 - protein, 461 aa, unidentified
MSQKNLSLKKKQHFLHLIEGIPRQKILFCPVDVSKHFHISFFHDFDGNPVVDFFAFSSSQVGFTDFITRLQLALQARAPQLVIIGMEPTNVYYEGLLYNLHLKFANSTSPRVELALVDPAAVNHNRQQNSLRFQKSDFIDTASIGDLLTRGLFHQAHLASPLSIHIKELSRSLNYYRRQQLRLWNQLLTTLDRVFPNLLLDYGLEQPLCKQPNKSKLLDDLLHLCPNPYQLVEFDTDQLIDLFHQHQRQLGPQRALKILEAAQRALLLPQPYQQIHQQTLENQLRTFDFFSQQIAQLDTQLQSLITQTPARHLIGIKGNSQQLTAAFVASLEDWDRYTCVQQIWAAAGLNPTIKQSGGQSSKPRISKDGSLRLRNAIYKMTSSVIWHEPTFGIVCFQRLLQGAQFVPTILHVGRKLTNTALALLKSDRPFQPRFDDYQEAEKKLRQLKEQYLKEKKQTKRS

SEQ ID NO: 218853 - protein, 366 aa, unidentified
MKQGTTYVGIDAHQKDLFVAMLIGTQTVPVTWTVPNEPKAVRRLVRKLERETPGAVRVFYEAGPCGYALQRQVTTSRVRCDVIAPALIPRKPGDRVKTNRRDARKLAELGRAGLLTAVQPPTPEDEAVRDLARARDDAREDLQRCRHRLAKLLLRRGLHFSGRNWTRAHRQWIDGLTWTQAAERAVVEDYRLAIDHTEARLLALDARLAEIAAHEPYCEPVGWLRCFRGIDTLTAMLILAELHDFRRFASAPALMAYLGLVPGEDSSGEKHRRGRITRAGNALVRRVLVETAWHYQHRPGIGVALRQRRNGQPARVIAIAEKAQQRLCRRFRKLAAEHKPPRKSPWRSRASLPASSGPRSSRSRRR

SEQ ID NO: 218854 - protein, 344 aa, unidentified
MQIVRIGLDLAKYVFEIHGVDAHGKTVVRKTLRRHAVSTFFANLPPCLVGMEASNGAHFWAKALSDLGHDVRLISPQFVTPYVKSNKNDRNDAEAICEAVGRPNMRFVPVKSAEQLAVQAVHRIRSRLVADRVRLVNQVRGLLGEHGIVVAKDIGNLRQALARIVGDDEDRVLNPLVRALMAELREELTELDARIAGYDRKIRELYRNSEICQRLGKVEGIGPVTATALVAAVGDRSSFKNGRQFAAWLGLVPKQRSSGGRARLFSISKRGDRYLRTLLIHGARSALGRVRDKQDPRSLWLGRMRQRRHPNIVAVALANKNARIAWSLLANDSAYDASLSVGAA

SEQ ID NO: 218855 - protein, 351 aa, unidentified
MDYRVYCGVDFHARQQTISCLTTEDGVVSTHELKHQNKAELKAFYAQFRGPVLVALEASGYSPWFEQMLEELGHEVWLGDAIEIRRRARRRQKNDRRDAELILDLLLHDEFPRIHRPSVKSREILRMLRYRHKLVQMRTIIKNSLQALSIQSGLSLRARLFTGAGLDQLRSLTMSPVMQYQRDQWLVALESLNQHIVAATNWLGEQATDDAHVQRLRTHPGIGLLTGLAVVHTLEPVLRFRNQRKVAAYVGFDPQERSSGEKKRYLGISKAGSRVLRYLLVEATHTAIKSDPELKRFYLRLLHRHGKAKAKVAAARKLLIRSYILLRDHIDYTEFGRRAVAARLARLASKA

SEQ ID NO: 218856 - protein, 429 aa, unidentified
MNYTQNEKIEQVTDSTMVVGIDIGSQIHYARAFDNRGRELTKRIFSFHNDLEGFNSFNLWAETLKTENKKTAVLIGCEPTGHYWFAFAKYVNDHQKRLVMVNPFSVKKIKELDDNSPKKTDSKDPKTIAKLVVDGRYSIPYMPEGIYAEIRDLVYSRDRIMKQHNISANRIQRWLAIHFPEYLGLYTRFDAISGLAVLEKAPLPKDVIALGVNGIRKIWHDKKMRGRGVTEDRAKTLVEAAHNSVGLDGGIGTKSELYMLLEEHRLWTSQLEAVNKVLEEMILKVPHVEKLLAIKGVGSITIAGFIAEIGDIRRFDSPKQIQKYAGLELVENSSGKHKGRTRISKRGRRKLRKILYQVMVPLLARNKEFRGIYDYYVTRVKNPLKRRQAMVAVSCKLIRVFYAVLTKGVEYDRFKMMSDIHRKSDIIAA

SEQ ID NO: 218857 - protein, 445 aa, unidentified
MKQKKSLKKVGMTLPKHLQHINVHAAGIDIGSRSHFVAVPEGADEKPVREFSGFTGDLERMVEWLISCGVTTVAMESTGIYWIPVFEILESRGLEVKLVNARHVKNVPGRKSDVLDCQWLQQLHTYGLLRGAFLPVEQVCTLRAYVRQRAMLVRSAASYIQRMQKALAQMNLQLHNVVTDITGMTGMRIIKAILGGERTPDVLAAMRDRRCKNSATTIARSLQGSYRPEHLFSLRQAVELYEFHQEKIADCDRQILEQLKSFDAQNAPNDAPPSSVDEALQRMSGVDLTSINGIDTNTALKILAEIGTDMTRWKTAKHFASWLGLSPGTKVSGGKVLSSATKPVANKAASAFRMAAFTLFNSNSALGAYLRRQRARLGAPKAITATAHKLARLVYAMIKQGTAYVDAGQEYYEKRYRSRVIQNMKRKAQELGFELVAIQGATIPA

SEQ ID NO: 218858 - protein, 409 aa, unidentified
MLFAGDDWAEDHHDVELMDASGRVLARARLPEGAAGMARLHAMIGEQLGQDAGDAEVAVGIETDRGLWVQALVAAGYLVFGINPLQTARYRDRHGVSGAKSDTGDAHVLADMVRTDSHQLRPVAGDSPAAQAVKVVARAHKTLIWERTRHVQRLRHQLRDFFPAALAAFEDLDAPDALELLARAPDPASAAKLTTAQISAALRRARRRDISEKTAVIRAALRSQQLAQPPPVTAASAAVVRSLIAVITTLSEQVKVLQGQVDAHFSQHPDAEIIMSQPGLGPVLGARVLAEFGDDPRRYASARARKNYAATSPITRQSGKRKTVMARYVHNDRLRDALDAQAFTALNASPGARACYDAHRARGAGHRAALRTLANRLTGILHGCLKSRTLYDEATAWPLTASKEIKTAA

SEQ ID NO: 218859 - protein, 383 aa, unidentified
MSDHSEAFVAFDTSKLRNAVAIADGGRGDEVRFLGEFDNTPAATAKLVRKLAAKYEKLTFCYEAGPTGYGLYRQIKSLGHECIVGAPSLIPKKAGDRVKTNRRDAISLAKLLRSGDLSAVWVPDRQHEAMRELTRARETAMNDLRAKRQQISAFLLRRGVHYPPDKKTWGKMHINWLMSQKLEFTEERIVFEELMEAMRQAQGRLDRLEAAIRAAVPNWSLCRLVTALMAMRGLDMISAATIVAEVGDLSRFRTPRELMAYVGIVPSEDSTGDKVKRGPITKTGNRRVRRMLVECAWSYQFPPRLSKDKQVKVEAVPQAVGEIAWKAQSRLNQRYRALLRKGKLKNVAITAVAREFVGFIWAVAQAVGAAPAVATTKAPAVAS

SEQ ID NO: 218860 - protein, 387 aa, unidentified
MPQPNDLSRSLVALDQNSTIIAVIELSQSSWLVAGMLPGIERQPRKKLEPSPERLLGLLHRWRDEAVRAGRTITRIALAFEAGRDGFWLARWLAARGIEAYVIHASSVAVSREHRRAKTDRLDTELLKRGFLGWLRGERGHCSMARVPTIAEEDAKRPNRERDCLVGERTRIVNRIKSTLTRLGIRNFKPTLRKAAERLATVHTPEGMPLPPNTLAELQRDMARLGFVVSQIRQIEDARQQRLEQQPETGPHAMVRLLARIVGVGVETADMLVHEVLSRPMRDRRAVARYAGLTGSPDESGAQRREQGLARAGNARVRRGMIQLAWRFLMFQKESALALWYRARTADSRSGTRKTMIVALARKLVIALWRFVTTGETLEGVVLRPAS

SEQ ID NO: 218861 - protein, 400 aa, unidentified
MTYYVGIDVGKRQHEVGILDDHGKKIGKTCRFANSREGGQVFLDFLTQHGVTADNCLCGMEATGHYWLSLFSFLHEKAFQTTVFNPLQSDALRHLNIRKVKNDKVDAYLIAKLMRMETPEPTPFLDEDLIQIKQLARLRYSLVDQSSDLKRKVIAVLDQVFPEYEEVFSNAFNVSSKKLLKQHTIPEDFLNIDTEELANLLHEVSRKSYGIDEARDKASRLKACAENSFGIKLGADAFRLHIRLLLDQIMLIERQVKDVESLLSELSDRQQHHLTSIVGISDFIASVIIGEVGSIKRFDRAEQLVAYAGLDVSVFQSGEFEGRKNRLSKRGSPYLRRAIWQAALVASFHDPVLSEHYKQLRARGKAHGTACGAVARKLTHIIFAILRDQKPYEPRIPPKS

SEQ ID NO: 218862 - protein, 348 aa, unidentified
MIVAEAFEQVVGVDTHARTHTFCVIDARTGAVIAGATFPNTRPGLSRALSWVRRHSLAMNVLAAVEGTSSYGAGVTAALEAAGIEVTEARPVGRHRDRAGKSDVIDAEVAARSVLGIERDRIPVPRQSAEHEDLRILLAARRILDQQRTANRNALTALLRTVGLAIDARKPLHDNQIRAIAAWRINHRPAATNTHTVARSEAHRLAKAVLEHTKQLQDNHQQLRTVAAHAAPGLQELSGVGPVTAAIIICAYSHRGRIRSEAAFAALGGVAPLPASSGNTTRHRLSRAGDRQLNRAFDIIVRSRMISDPTTRTYVARRTAEGMSSRETRRCLKRYVCRSVFRHLQAAA

SEQ ID NO: 218863 - protein, 354 aa, unidentified
MTGTTILAIDLGKYKCVSCTYDKVTAAAEFRTITTSRAEVERLIRATGPAVVVIEACTLAGWVSDLCGELGIPCKVANTAAEAWKYKHTKRKSDRDDALRLAQLEALGQLPTVVVPAKRVREWRALIAHRQALVAQRVAAQNRIRAVLVGQGLPAPRGAKAWTAAGLAGIAQFARPLAECEPDDLWRGLLDLALTAYRQADELVAVAEAKLDTIGKADARVRLLDTVPGLGPRTAEAVVAHLDDPTRFRNGRQVGAYGGLVPRQFQSGEDDRRGRITKRGPAVLRKLLVQCAWCMLRYNRWARAVFDRLSRGKARRKQAVVALARRVLVRCWAMLRDNQPWRADPDPAPAATAA

SEQ ID NO: 218864 - protein, 421 aa, unidentified
MKNSAARKMKQVPERYLIVGIDPHKKKHAAVAITQDFTLRDRFKFDNTHEGLESMINRVRDKMTDLDCRGAMFAIETGGHYWRNIAYFLDEKGIPLRFINQYTLKRRREGKDLNRSKNDYRDSEVAAQLLCTGEFTETRLPQGVYAELRTAHNSYRRLVKERTRVTNLIKSLLDGLFPEFVKVFKDPCGLTAATVLSTCAIPSVIAAMSEQEFVALIKATNRPQLRRNKLRAIHSVAKTSIGITAGARSLAFEISFLIDKIELIKQQITIIERRLIRLVDGAEEGKYLLSIRGLNYISVGGLLAELGCFKAYRSAKQMIKMAGSNPTESESGGKKKSRTPMSKQGRPVLRYCAWTAVVPMLRFNEDFRAWAKQLRERPVHANPLGGREIVGAALNRLLRLAFTLVKNRTYYRLPVAAPVIR

SEQ ID NO: 218865 - protein, 337 aa, unidentified
MDHFAGLDISMDETHICVVDREGVVVYESKTASTAEAIADKLSDAPSCHRIVFETGRMAPILFHGLSQLGLPAVCVESRQAYQALRSLATHKTDRNDARGLAHLARTGFFKPVHVKSLSAHALRSLILARKKLVGQRVTLENQIRGLAVVFGIRLPRALTAAFIDQALKASEGVAGLSAAMRGLIAARTAVMSAVAAIDADMRRMTRASEACRRLMTIPGVGQLTALAFVAAIDDPSRIRRSRDVGAYLGLVPKRYQSGEVDYVGGISKCGDRRVRTLLYEAANVMLTRYNGQLKLKEWAFAIARRSSMRKARIALARRLAIIMHAMLRNGTEFVVA

SEQ ID NO: 218866 - protein, 344 aa, unidentified
MEHYAGLDVSLEQTSVCVVDAQGQVVREVKVASEPEALIHFLCAQDLEIARVGLEAGPLSQWLHAGLVTAGYEAVLLETRHVKAALSAMTVKTDRRDARGIAQLLRLGWYRPVHAKSASAQEVRSLLTARKLIQSKLLDIESGIRGVLRGFGLKVGPISRGRFEARICDLVEGQSMLETVVGSMLAARAALQSEFARLHQALLALARADPVCRQLMSVPGVGAVVAITFKSGVDDPTRFRRSRDVGPHFGLTPRKYQSGELDVTGSISKVGDRMVRTALYEAASVMLTRTVRMSPLKSWAMGVAKRRGTKKARVALARKLGVILHRMWIDGTSFRWTGEGAAMA

SEQ ID NO: 218867 - protein, 406 aa, unidentified
MRLFVGDDWAEDHHDVELMDATGQVLARRRLPEGVAGMARLHELTGQQLGEAGEDAEVVIGIETDRGPWVAALVAAGYTVYAVNPLQASRFRERLGVSGAKSDPGDPHMLADMVRTDSRQLRAVAAGSAEAGGIKVVARTHKTLIWERTRQVQRLRHQLREYLPAALEAFEDLAAPDALELPGKAPDPARAARLTRAQVSAALKRARRRAIADQTTQIIAALRSQQLARPAALTAAYAVTVRALAAVITTLNEQVKALESQVEAHFGQHPDAEIYLSQPGLGRILGARVPGEPGDDPHRYPGGRARKNYAATSPLTRASGKKKTVTARFIHNDRLIDALMAQAFSALNVSPGARALYDDLRARGIEHNDALRRVANRLAGILHGCLKTRTLYDEATAWSHRQNLAA

SEQ ID NO: 218868 - protein, 399 aa, unidentified
MLYVGIDVHRRTHEVVILDAVGKPHGKSFKIGNTHHDLAGLFERIAKSNPEGEVLRFGMEATGHYWLALYSHLNAAGHEVIILNPLRTHAYRARSVRPAKNDRIAARCIAEIIRTEPKSDYYLTDEDQFALRQLTRLRVELVDMVSDQKRRLLTLLDQAFPEFETFFREKYCKSALAVLQAYPTPEAILAADIDELTLLLEKSSRKRYGREKAEEITRAARQSFGVPFGQRANGLQIQLLAGQITYLEAQQKQLDREINVYLDAIPNCLTTISGIGRILAAVFLGEIGDIRRFRNAKALVAYAGMDPSVIQSGEFTAKKAHLSKRGSTHLRRAIWLAAAAAVRNDEALKALHEKKLAEGKPFHVALGAVANKLLHIIYAVLRDNKPYYSPSLARAVVAA

SEQ ID NO: 218869 - protein, 413 aa, unidentified
MSKHTYRSKKVNEIDWGQLRGKWAGQSLVFAVDVAKEMQYALLTNQGQTESVLLRWNHLEESAALIGELVRFGTPVAVVMEPSGTYGDSLRYQCRQAGFEVYLASAKRVHDAQEVYDGVPSLHDPKSAFLIAKLHLEGLTKPWPELDDKEKEMNALRREYEMHQGQYERCQNRLEAGLSRHWPEVLQLLPLDSVALEQALKCYGSPAQIAAHGEEAADEMRRTGGHFLAEEKIRAVIASAKATLGEPCNGAECRYLAALAGELEHSRMHMRKAQRALESMVEADGKLSEMAQTVGYLTTAILLSLHLDPRHFANPRAFQKALGLNLKEKSSGQHKGQLKLTKRGSSMARKFLYFAALRLIRNDPVVARWYEGKKDPKAKLKAVIAFVRKLALALWHVARGEKFDASRLLSVKA

SEQ ID NO: 218870 - protein, 331 aa, unidentified
MFPVGIDVSKNTLDLCMLYDGIKGRIKTRNIQNNRHSVENILRWLRLQHCGPEDVHVVMEATGVYHERLATELHDAGFRVSLANPHRSREFARGMGIMTKTDKVDAYMLACYAFLKKPHCWEPPTPEIRYLGALLRRRDVLLGDALREENRLEKYLSTDTPAEIISSCRRMAQLLREEVSNIERQIKAHIKACPALRRDYTLLTSIKSVGPQLGMHMLVVLRSHNFASAEQAAAFLGVVPIDKRSGTSVRSRPRMSKIGPPQLRAKLYMSALCGKIYNKRMRNIYDEMCLRGKPKMVAIGALMRKLVHWCYGVLKTGTVFNDEGLKQILST

SEQ ID NO: 218871 - protein, 402 aa, unidentified
MNCVGIDVSKGKSMIAVMRPFGEVVVSPFEVRHTANELSELAGLLKSLDGETRVVMESTGNYHTPVAWLLHDAGFYVSVVNAMLVHDYGNNSLRRGKTDKKDAVKLANYGLDHWLTLPRYVPEEDTRLMLKTCYRQYQQYSKVQTMLKNNLISLLDTAFPDANRLFTSPPRTDGSEKWVDFVATFWHCECVCGLSKKAFTAKYQKWCRKHGYNFSQDKALDIYASACGRFGVMPKTNTAKLLVEQAISQLQTTSAALAALKQEMQSLAASLPEYPVVMGMFGVGPTLGPQLIAEIGDVRRFHSKKALVAFAGIDAPPYQSGQIDVRSRSISKRGSASLRRTLFLVMGVLLQCAPMDEPVYQFMNKKRSEGKPYRVYMMASANKFLRIYYASVKAYLDSLEHD

SEQ ID NO: 218872 - protein, 354 aa, unidentified
MSQKLNTAIAVIGIDIGKNSFHVVGLDKRGAIVLRQKWSRGQVETRLANMPPCLIGMEACVGAHHLSRKLKGLGHDARLMPAKYVRPYSKGQKNDFRDAEAIAEAVQRPTMRFVATKTAEQLDLQALHRVRERLVSQRTGVINQIRAFLLERGVAVRQGLRFLRAELPDLLATRTEALSPRMTRVIEDLAGDWRRLDERIESLSTEIAALAHQDAACNRLMTVPGVGPIISSAMVAAIGTGDVFSKGRDFGAWLGLVPKQISTGDRTILGKISRRGNRYLRVLFVQAAWVVLIRPKSWERYGLKPWIEAAKKRLHHNVLAIALANKLARIAWAVLNKERNFECNGMDKMASRPA

SEQ ID NO: 218873 - protein, 344 aa, unidentified
MEITTIGLDLAKNVFQVHAVNGASEVVVKKTLRRVQMRRFFEQLDPCLVGIEACGTSHYWAREITRLGHEVRLMPPAYVKPYVKRGKTDASDAEAICEAVTRPTMRFVAIKSPEQQAALALHRTRDLFVKQRTQLVNMIRGLLAEFGIEIPRGIGQALMLAKRIAAHDVPNIPPLAAKVIAGLAGQVLDLQARLGEIELELLAWLRSNDLAKRLATIPGIGTVGATALAASVTDPHQFRSGRQFAAWLGLTPLQHSSGGKERLGRISKMGDKYLRRLLVVGMTSLIRRAKYKPEAVDPWLADLLSRKPARLVTVALANKAARVVWAIMVRGGVYRRPAGVMTPV

SEQ ID NO: 218874 - protein, 404 aa, unidentified
MWYAGIDWADNHHDAVVVDDGGRVVLTLRIAHTPAGLAQLTIALEQICGTEAKEQLVCIVETNRGLLIAALLEASFPVYPVNPKTVDRRRNAAGVKTDQIDAYLLAKTGRSDLADLRRLRPDSPLIQELKALTRDQDGLIQTQTRLVNQLIACLKSYYPIALELFSKLHQKTTIAFLRAYPTPHNAKAAPEDALAATLKHAGHTRATQAAATIYQTLHQPHLLADDVTTRTKARLMLALLAQLEPVMEQIAAYDAEIERLFLSHADSALFASLPRAGKRLAPRLLAEIGDDRARYADAAGLQALAGTAPVCFESGNYARAHRRTACLKPLRNAMQHFAWQSTLQEGWALAYYQRKRSEGKSHTVAIRALANVWLRIIYAIWRDRTPYMSATFEAAQQQKLRKAA

SEQ ID NO: 218875 - protein, 346 aa, unidentified
MMIIGCDFHPSWQQVSWLETETGETGEQKLVQASGDAERFYRQLAVPALIGMEATGNCHWLVDLLADLGHELWVGDAAQIRASYVRQQKTDKRDAAHILKLLVEGRFPRIWMPSSEVRDLRQLLLHRYKLVIIRARVKNELQHLCLNKGVQRKRKLWTKAGQQVLRELPLKAWASRRRDDLLGLLAMLDQQIEPLDEAVKAEAQRDKMALLLQTQPGVGPITALAYVLTMGDVRRFPRGKQVASYLGLIPREHSSGGRQHLGAISKQGNRMLRMLLVEAATTAVRLDPEFRKEYLHRCHQKPKAVAKVAAARKLAVRLYWMLRTQKPYPDVVRIESSPRVPLVGAS

SEQ ID NO: 218876 - protein, 408 aa, unidentified
MGRASARILHPSTLSEPMESNPMQKLNDLSRSLTPLKPDGTLIAVIEMSLSSWLVAGIVPGIERQPLKKLEVDESTLLKLLIRWREEAKKSGHRIERIAVAFEAGRDGFWLARWLRARDIEAHIIHASSVAVSREHRRAKTDRLDTELLKRAFLGWLRGERDHCKMVAIPTIKDEDAKRPNRERESLVGEQSRIVNRMKAALVRLGIRGFNPKLKKAVERLDGLRTPEGEPIPPNTLAELRRDMARRRLVSDQIRQIEDTRLERLEQAPSDGPHAMVRLLARVIGVGIETADMLVQEVLSRNMRDRRAIARYAGLTGSPDESGRKRREKGLARSGNARVRRGMIQLAWRFLMFQKDSTLAQWFRARTENARSTRKTMIVALARKLLIGLWRFVREGVVPDGVVLRPVS

SEQ ID NO: 218877 - protein, 355 aa, unidentified
MINQQPEKEVFAGVDTHTDTHHAAVVDPLGRPLGDREFPTTTQGYRALLIWLITFGHVQVVGVECTGSYGAGLTTVLSAADLTVVEVNAPDRGTRHTRGKSDPIDAYAAARAAASGRATAIPKSHTGTVEALRQLRVARASAIKARTQAINQLIGLRVTAPEPLRASLTGLTRTTLVNRCLRLRPGADLTCPTEAARYALRQLARRIRMLTEEIDELTERLTMLTTSAGPELVALFGVGTETAGQLLVTAGDNPERLRTEAAFAALCGAAPVPASSGRTDRHRLSRGGDRQANRALHMIAVVRMRYCPRTRAYVARRTQQGLSKKDIIRCLKRFIAREVYHALTRTHNGSTTPST

SEQ ID NO: 218878 - protein, 347 aa, unidentified
MVTIGIDPHKASHTAVALDPNGEMLGELRVVADASMLRRLRKWASSWPQRVWAIEGAAGLGRLLAHQLVAAGERFVDVPSALAARARVLASGHGRKSDGIDARSVAVVAQHRGDLLAVAADNHTAVLRLLSDRRDELTGERRRTINRLHRVLRDMHPGGAPRQLSADRAARLLTSIRPASAVDLERKAIARQLIADVRRIDRALLENRRRCEQAIAASGSTLTEIFGISDVLAAKILGHTGDITRFASADHYASYTGTAPVEASSGEQTRHRLSRAGNRSLNHALHIAARVQTMHPGPGRTYYQRKRAEHKTSTEALRSLKRQLAKIVYRQLRHDHLGRPFIDSELT

SEQ ID NO: 218879 - protein, 373 aa, unidentified
MRTTITFVALDSHKKQHSVAVVYPRTGELDQWTVLNTQKDVAKMAKKIKQKAGGEVRFCYEAGVCGFVLKRWIEAQGCSCSVIAPSLIPVKPGDRIKTDRRDARKLVTLFMAGQLTEVYPPNLEQEAARELTRCREVAHEDVQRNRHRLVKFLTRHGYLYTGGHPWSIPHEKWLRSLVLENGYLRCVFDEYYTELEHSRQRLQSLEGQVEQLAQSQPYRQIVELLCCFRGIEKLTAVSLITELIEFGRFESPRALMNYLGLVPSESSSGNKERRGRITKTGNRRIRRLLIQAAWHSRHGYGVSRTLQKRRTGQPQWAIALADRAGLRLRRRYRALAERGKEACKVTVAIARELAGFIWAMMREYQIREAPKAG

SEQ ID NO: 218880 - protein, 341 aa, unidentified
MDQYVGLDVSMEETSVCILDKEGTVVFEGEVASRPAAIAQTLRRHGPAAVRIAFEAGALSSWLWHELKAWGFPVVCLDARHAKAALSMRINKTDRNDARGLAELVRMGWYREAKVKSMESRQMRAVLAARAKLVDVRRDIENQMRGLLKSMGIVLGRAGSRTLPGKILAVLRQAPHLRPLIDPMMIAHSALASQVLKYDAQVRTLAKTDQTVRRLMTVPGVGPVTALAYVSTIDDPKRFAHACDVGAYLGLTPRRYQSGELDRTGRISKRGDRLMRSYLFEAANVLLTVVRKASPLKTWGLKLVKRIGAKKAKVAIARKLAVILHCIWTDGTEFQWEKADA

SEQ ID NO: 218881 - protein, 343 aa, unidentified
MDHFAGLDVSVKETSLCIVDEAGRIVREVRVASEPEALLAVLANHACHFKRIGLEAGPLSQWLFNALAEAGLPVICVETRHMRGVLKAQINKTDRNDARGIAQMMRAGLYRPVHVKTLRSQKLRMLLTHRKLLQSKAIAIENDLRATLRNFGLKVGVVGTVKFEVRIKELVENVPDLALLVEPLLVVRRVLREQIGVLHRRLLAIVRDDPVCRRLMTIPGVGPVVALTYRTTVDVPSRFRNAKAVGAAFGLTPSKHQSGESNRTGGISRCGDEMMRTMLYEAAQILLVRSTRWSWLKAWAMQIARRRGVKKAIVALARRLAVIMHRIWIDGTEFRWSQEAMAA

SEQ ID NO: 218882 - protein, 368 aa, unidentified
MSSVQQKGGVIHLGLDVHKNTISVGVLEPDREEPMVSRISSDPQAVAQFIERLGDPARLSACYEAGPTGYELARQLAGLGVGCEVIAPSMIPVAPGDRIKTDARDCRRLARLHRAGQLVAIRIPTPAEEGVRDLCRARADMIIDQTRARHRLAKFLLRHGRVWRGGDNWTGKHMAWIAAQSFDDPAAAATFAHYRATLAVRESAVAAIEAEAARWFTRDPFADDVARLGAYRGITSMGALTLASEVGDWRRFPTAGSFMAFCGLVPSEHSSGDRTRRGHITHAGNQHLRTQLVESAWAYKSRPSLGVAIRRRQEGLDPAVTARAWVAQQRLCRRFAALDARKSHRNIVVTAIARELAGFVWAEMTTPD

SEQ ID NO: 218883 - protein, 316 aa, unidentified
MSATPYFVGIDVAKAQLDMALRPTGERWTVANDDAGIAALVERLQALPPTLIVLEATGGYQRAVVAALAAARLPVAVVNPRQARDVAKATGQLAKTDALDARALAHVAEAVRPTPRPLPDAQADELRALLARRRQLVAMRTAEQNRLGSAPPRLQTDIQAHITGLNTRLAALDADLDTTLRTSPVWREREELLRSVPGIGPVCARTLLLDLPELGTLSRQRLAALVGVAPLNRDSGTLRGSRTIWGGRAPVRATLYMSTLVAVRYNPVLKVFYERLRAAGKAAKVALTACMRKLLTILNAMLKHHTLWQPEEIAIA

SEQ ID NO: 218884 - protein, 348 aa, unidentified
MKSCFENKDIYVGLDVHKKRWVVSVRTYDLELKTFSMIAVAEELDRFFVENYKDALLHIVYECCFSGFWIYDYFHNKGYDIIVTPTNRIYRDGSIVKTDKIDSRKLAFQHSRGLLRAVKVPTEKIREYRSIFRIYDKEKMREGQILRQIRCILEVRNHPLKWERWNKEFIENLKSIKFQEEIFNRKFEQLLREYEYVKQQIKDSEQRIKEIGEDQELRSKIKRIEKINGIGIVSAVRLVVFLFDVKGRFETGEKLAHYVGLTPGEHSSGEEIIRSRTGLIGNKQLRSIIIQLAWVAVRKDGSLLDKFERVYKKNGSKQKAIVAVARKLMMKVYAITEKEEEYEINKAA

SEQ ID NO: 218885 - protein, 392 aa, unidentified
MFYLGIDIAKVNHVASLIAEDGSILVKAIKFTNSNEGLQKLIDSIKDYDQSQIYCAMEATGSYWLSLFSSLTDKGFNVSVFNPYQIKSFRGAYSNRKQKNDVIDSIIIANFLSFNGINQTALPNDDLLALKNLTRYRSNLVDNVSRAKTQIQGILNKVFPEYSDVFSDTFGEASKQILLNCPTPNEVVTFNTRKLANLLKKASKGRHGTDTVRKVKDLAKNSFGIKFTGDACSFEIKQLINQIIFLENQVDELEHKIKEIYSKLDSHLESIPGVGKATAPVILAEIGDINNFSSPSKLTAFAGIDPSENQSGNKKSTDEKTSKRGSPYLRHAIYQAAFIASNNDPIMHAYYVKKRAEGKHHYVALAGVERKLLGIIFHVLKENRDYRPSKLS

SEQ ID NO: 218886 - protein, 343 aa, unidentified
MNISRIGIDLAKNVFQLHAVDRHGKAVWKRRLKRNHWLRAVFNQAEPGCEIGMEACAGAHHWARVLESRGYIVKLIAPQFVKPYVKSNKNDANDAEAICEAMSRPSMRFVTVKSVAQQDIQATHRVRSELMSQRTAKANQIRGLVAEYGLVAPQTMCALRAAIPCWLEDAENGLTDHFRSLLHGIWTDLLTLDDRVSELDRGIKKLANSNEVTRRLQQLRGVGPLVATALVATVGDARQYHRGRQMAAAIGLTPRQHSSGGKDRLLGISKRGDVYLRSMLIHGARAVVSQAKHRDDRLSRWVIAIAKRRHPNVAAVALANKTVRMAWAMLRNETDYDPDFAIS

SEQ ID NO: 218887 - protein, 402 aa, unidentified
MKKVCGLDVHKDSIFCAIYNGENYSQVKEFSTMTPNIYSMGEYLQSEDVEDVALESTGIYWIAVWDLLYEMGFNLTLVNPYFIKQMPGRKSDVKDAQWIATLLHKGMMRGSFVPPPVIQELRVYSRKQGKLKQQVTRVLTIMDGILVKSGIRASSCLSSISSKSFLCIVEALIAGWTDPGYLVSLVYGNRKNKQSGKLKEALTGDLKAYHRQELSWAKQEYEMYQVQISECLSEMRRICDEHFSVMVKLLQTIPGISQVAAMTIIAETGGDMSVFESSDKIVGWAGLRPRNDESAGKYKSTATTKGNKYLRSILVQVSWAASRMKGSFFKDKFQRLAMRKPRKKALIAIARKLLVVIWNVLQYAKEYNPRLVPVQDPVKMKARLAYHKKEYEKAANLLNITV

SEQ ID NO: 218888 - protein, 343 aa, unidentified
MSTITIGLDLGDRYSRFCELRPEGVVLTEGRLPTTRTALARQFEAHPACRIVCEVGTHSPWVSRLLASWGHEVLVANARQVRLIYAAHRKSDRIDAATLARLGRLDPELLRPIRHRGAGAQAALAQLRARDALVRVRTVLINHVRGAVERLPASSAVAFARTAGPAVPLALQPALTPALTPLLPMIETLTNQIRAVDRELETLALTRYPETARLRQVSGVGLLIALAFVLTVEDPGRFAKSREIGPYLGLCPRQADSGRSQPQLRISKRGDALLRRLLVNGAQYILGPFGPECTLRRKGLALAAHGGKNAKKRAVVATARRLAVLLHRLWVSGAAYEPDRQAA

SEQ ID NO: 218889 - protein, 361 aa, unidentified
MANSMRFVGLDVHASETQAAVLELGSGELSYRRLRGRPHEVLAFLEGLDRPFRAVYEAGPTGYGLVRRARERGLDVGVCAPGHILRRRQDRIKTDKRDAERLARLLLAGELRPVLVPEPWQEELRDVVRCREDLRVDLMRARHRISKLLLRRERYFPGPGRAWTGRHRDWLCSLSFDDRATQLTLSDYLHAHDVLIARRERIEAELYELALASPYAKTVRHLRCLKGIDTLSAVGLCCEVLDFERFRAKQLSAFLGLVPAEDSTGQERRQGSITKAGSKHARRLLVEAAWHYRHRPYVSEKLRRRQEGCDPRAVDIAWRAQRRLNRRWSRLAGERGKLETKVAVAVARELACFCWEVATLR

SEQ ID NO: 218890 - protein, 411 aa, unidentified
MMEVLHPHCAGLDVHKDTVVAAVRHMVGGTVRREVRTFKTTTKDLMALSEWLSAEGCTHIAMEATGIYWKPVWHVLGDGEFELVLANAAHVKNVPGRKTDVNDATWLADLMAHGLIRGSFVPDAHTQELRALLRTRKQFVRERSSHVQRLQKTLEDANIKLDSALSDVMGLSGRAMIEALIAGESDPDTLAGLAHRRVKAPPQELREALRGRVTKHHRFLLQLHLQQVDAIDAAISEIDREVDANVEPFRAAITLLTTIPGVSDLSARVIIAEIGNDMSRFPTEGHLISWAGLCPKNDESAGKRRSTRMRKGAPWLKTTLIQCAWAGARKKASYLQAQFHRLRSRRGVKKAIGAVAASILTAAYHMLADGTLYHDLGPDHFDRTAKATQTRRLVTRLHNLGYAVQITPLAP

SEQ ID NO: 218891 - protein, 336 aa, unidentified
MDIIKQAVGIDISKDDFVVRFGSITKSQETNISKDETFRNDSKGFKKFDKWLEKNKVDDNTPLWIVMEATGVYYENLAYYLSDQGFNLCVLLPNKAKNYARTLENKSKTDSIDSKVLTQLGLERKLVHWEIPNPLYRELKSLTRERTSLLSMSLQLKNQLHAKKHSFSPGKTTVKRINSLLKKYKNLIKAVEEEIESLLQSDNDLAAKVKKIKTIKGVGLITIASILAETNGFALIKNRKQLASYAGLDVVLNESGKRRGKTRISKKGNSNLRHSVYMPALTAVRYNVEFKNLYVRIIEQKSIKKIGLIAVARKILLLVYTLWKNNKEYIYNYQMA

SEQ ID NO: 218892 - protein, 461 aa, unidentified
MKAFLGTDVSKGYADFVLLNHKGQKLEDTIQLDDTHAGHNLLLGWINELCHQHGIEELYCGLESTGGLENNWLATLKSKPANVPINVARLNPSVVVNASKAELRSNVTDSESAYNIASYLYRFTNKVDFNQQDNLYAGFRSLHNQILMQLKQKTQLSNELKQLIYSAFPELQRYCNKGMPGWVLKLLSIYPTAANLAKAKVDRLVKIKSITKEKATKLIDSAKNSVASRSGETEGYLIKTLVEEIQFKEVKIQQLKAYLEEHCQGEETKLLTTIKGIGAYSAAALMAQIEEVHRFESPQKLASYFGLHPVIRQSGDHKGVSRMSKRGRPGVRTILYMCACSAVMHDMHMKSIYHRHRENGKTHRQAIGVIMHKLIRVVWGVLTKKQPYNPETDKQNQQKRQETKEQKDRKSTERVRRLQSFDQNAPISRLASKKRKVHSLSQSGMAEKARDPEIEPIKTNI

SEQ ID NO: 218893 - protein, 319 aa, unidentified
MVDTGTGKLTERRLEHENGEAERFYVSLPKGTLVGIEATGCTQWFERLMAECGHELWVGDPAEIRARRVRQQKTDERDARHLLELLLTNRFPRVWVPSPAERDARQLLQHRHKLVQLRTSVKNQLHALAMGQGLCRKRQLWSQSGRQQLEALQLGPWASERRKELLALLDQLNPQIAALDQAVEAEGARRPEVVRLRGEKGVGALVGLAFVLTLGPVKRFQRSRQVVSYLGLNPREESSNDRQRFGHISKQGHLMMRWLLVEAGQTAARLDPELRRVYRRLRYRRGANVAKVAIARRWAVRMYWILRQAAEGAAGSHVR

SEQ ID NO: 218894 - protein, 343 aa, unidentified
MGEVSTIGLDIAKSVFQIHGVDAGGAVVIRKRITRAKLLEFFASLPACLVGIEACPSAHYWSRRLQALGHTVRLLPPSYVKAYLKRSKNDANDAAAICEAVTRPSMRFVATKSAQQQSGLMLHRSRQLLVCQRTMLSNAIRGHMAELGIISAKGRNGTAKLLEMIADEQDDRIPAAARFSLAILARQYAAIRAEIVAIEKRIHAWHRSCEESRRLEEIPGVGPIVATALVAEVGDWKTFSSGRSLAAWIGLVPRQHSTGGKERLGSISKQGNRHLRWLLVAGAMAVIRYARQHGTKRLWLARLMERRPIKVAAVALANKIARMAWAMMVRRERFKEPKLLPAA

SEQ ID NO: 218895 - protein, 307 aa, unidentified
MIAVGVDVGKAALDVVIEGRSAVLRLANTATGIRKLVRLLAKLDQARLVLEATGGYEDAVLEACCDAGVWVARVNPRQARHFARALGDAAKTDAIDARMLCLMARMFADRLQCYKAPLPWQRQLRDWLRRRGQVVTALQAHRQQMAMCPASIRSLAARTISALRRELAAIDQQIRTLLDTHASPALGSCKGLGPVFQATSLALLPELGMLSRRQIARLVGVAPMNRDSGLSSGARRIRGGRAPVRVALYMATLSAVRWDPVMRAHYQQLRARGKQAKVALVACMRKLLTIINARRRDELTQEAAMAC

SEQ ID NO: 218896 - protein, 473 aa, unidentified
MSSDRKVGLCYKPFAVATSPPLKEYALKETNSKMDAGNAERLTEPDWAAFIAIDWADQKHDWAMEVPGQSKRERGQMAHTPEAIDTWVTQLRQRFADRPIAVTLEQSRGALLFVLSKYANLVLYPLHPGTVSSFRQAMYPSGSKNDPLDADVQIELLVKHRDRLQVWKPDTQETRLLQFLVEDRRRRVDQRTGLLNQLTGRLKLYFPQILGWFPTSDSILMWQFLEHWPDLLSAQKASRQKLKAFLVKDARSGPADVDEFIRQVREGIPATNDRAVVTSAGIFVQELVRQLQVLRATIQKYDKQIEAITRQHPDFPIVSSFPGIGKALAPRLIAALGTRRERFPDARSLQSYSGIAPVREASGRREWVHARWACPKFLKQTFQEWAQHSIARCAWARAHYDAQRARGKGHQAAIRSIAFKWIRILVRCWHDHKPYDEVRYTQSLTRRSSSPSSAVTIVCKSVAGFSKLTGLSA

SEQ ID NO: 218897 - protein, 350 aa, unidentified
MAETKAEARFFIGLDVRKESTTYAVRNRKGELVCEGACATQYCDLQEQLEPYISFGEIGLEASTSYYALYQEFLRNKYNIRVANTIQMRQLISKSDRLDARRLADMLRFGTFPCSYIPGEKVQHMRSLVQLRHALIEDKTGCMENRIEALLDRNGILMPSKTAFCKTWQNALMQHLGAENAPPDLRHAFEHYVFLETKVEQLDQELAGYARVNWETEFELVQSIPGFGQILSCYIIAEVFPVERFASKRKLRRYAGVVPTFLESGGKTSRGRIPKVSSRKLLRWALVQAANAGVRNKDTRLAKYYKMKKKQKKSSAIAKVAVASSLCDILYNVLKSRRPYTTTTVQTEKK

SEQ ID NO: 218898 - protein, 446 aa, unidentified
MSPKSPRPIGAAESTLRKLVLGWASTLAELPSEGATVQILYPRCAGIDVHQKTATVCVRILDQSRRAPSETRTFRTMTADLLDMKGWLAEHGCTHVAIESTGVYWKPVFNVLEDQFTVVLANARHVKAVPGRKTDVRDAEWLADLLQHGLIRGSFIPPAPIRELRELTRYRTTLVQDRTREVNRIQKALETCNIKLGAVASDVLGVSGRAMIEAIIAGTEDPVQLADLAKRKLRAKLPQLEAALAGRVQPHHRVLLRQSLDHVDFLDRSIAELDRQIEERMAPFEWALKLLDEIPGIGRRVAETIIAEVGLDMSQFPSAKHLCSWAAICPGNRESAGKRLSGRIRHGNRYLRAMLVQAAWAASHVKDSYLGAQLRRLAHTCGLKRALVAVAHSILTIIYHVLAKRTPYTDLGPTYFQRVDPDKLTDYHTRRLRDLGFTVTLTPNAA

SEQ ID NO: 218899 - protein, 369 aa, unidentified
MAKPITYAGLDVHKDTIAVALAEAGLRGEVREHGKVPNTPAALKALTVKLATARRELRFCYEAGPCGYGIQRQLTEAGHECAVVAPSLIPRKPGERIKTDRRDAINLAKLHRAGELTAVWVPDQAHEAIRDLVRARQAAVRTLRQARQQLSGFLLRHRCHYHRPAWTQLHRRWLASLKFDQAVHHIVLEDCIAAVEAAMARRDRLEAHIEAVLPEWSLAPVVEALQALRGVRLVAAATLVAELGDITRFTNPRQLMAYLGLVPSEHSSGRTRRQGGITKAGNGAARRMLIEAAWSYRFPARISREQLLRQERLAKPICDVAWKAQERLCRRYRKLARAGKLPTVITAAIARELAGFIWAIAKQVQPTAT

SEQ ID NO: 218900 - protein, 423 aa, unidentified
MKLACEHRFTALVGIDWSDRKHDFCLQAAGSEQRESGVLTHSPEAIARWATGLYSRFGGPIAVCLEIAKGPLVNALQRHGFIVLFPVNPATLAKYREAFVPSRAKDDPSDAEIALELLLRHRDKLQMLQPQSADMRTLATLVEQRRDLVGDKTRITNRLSSTLKEHFPQAPDGFEDRERLLFCDFLQRWPSLKHVKRARQTTLRSFFSAHNLRRARLVEERIHGIRSASALTDDPAVIRPRQLLVQALVAQLRVTLQAIDDFDAAISEVAERLPDYSLFAALPGAGSILAPRLLVAFGEQRERYGSAAEIQKYAGVAPVLERSGNKSWVHWRLACPTFLRQTFVEWAGSTIPRSFWAGAYYQRQRAKGCSHQAALRALAYKWIRIVYRCWQMRTPYDESVYLKALKRRGSPLIADLATTAQIA

SEQ ID NO: 218901 - protein, 353 aa, unidentified
MSKRIVSIGKPAVSTPKIASPQPANVFCGIDVSAETLAVAVIEPDQAVQQREFANTPSGHKALLTWLGKRKVLVRVSLEATGIYSMDLALALDAAGEIEVAVLNPKQVHDFARSIRRSKTDSADAQVLAEFGMRMKFVAWQRPSQSALALRAISRHIEALGLEHTRAFNRLHAAQGSIATPRCVVDDLKRSLATLERRMKKLRREARAQIDSQDRLREQFQLLTSVPGIAEISALQILGELVLLAPDLKARQWVARSGLDPVHQDSGTSVHKPARISRAGSRHLRRALYMPALAAVRWDPHLKAFYESLLARHKRKMQALVAVARKLLHAIYGIFKSRTPYDGSKLFPELLTA

SEQ ID NO: 218902 - protein, 326 aa, unidentified
MEHELHYIGIDTAKEKLDVDVLRPDGRHRTKKFANTTKGHDELVSWLKGHKIDNAHICIEATGTYMEPVAECLYDAGYIVSVINPALGKAFAQSEGLRNKTDTVDARMLAEFCRQKRPAAWEAPHPLERALRALVVRHQALTDMHTQELNRTETAREVQRPSIDAHLLWLEAELKRLEKQIKDLTDDDPDMKHRRKLLESIPGIGEKTSAVLLAYIGLKDRFAHARQFAAFAGLTPRRYESGSSVRGASRMSKAGHVSLRRALYMPAMVATSKTEWGRAFRDRLAANGKKGKVILGAMMRKLAQVAYGVLKSGVPFDASRHNPVAA

SEQ ID NO: 218903 - protein, 385 aa, unidentified
MGKSSTTVYVGLDVHKDSIDIAVAEAGRDGEVRHVGSIGGDLASLDKSLRKLISRGSPLHIVYEAGPCGFVIWRHLSAQGLACEVVAPSSIPKRSGDRVKTDRRDAILLARLARAGELTAVRVPDAADEAVRDLVRAREDAVRECRNARHRLKALLLRNGISYTGKTAWTAAHLRWLATLKLAHSAQQIGFQEYLHAITEATARIARLEQAMRDALPEWTLRPLVQALHALRGVQLIASMTLVAELQDFVRFANPRQLMSYVGLVPGEYSSGPKRRQGSITKAGNSAARRMLVEVAWHYQHSPRVSPIIAKRQDDLPKAVTDIAWKAQLRLNAKFKRLVARRVMKTKAVVAVARELAGFVWAIGREVQTSGWQGIDTDVAAAVSH

SEQ ID NO: 218904 - protein, 355 aa, unidentified
MDSTKYVGLDVHKEATTIAVMNSAGKLIMESIIETKAITIRQFIQGLRGDLHVTFEEGTWAAWLYDLLKPYVTKVVVCDPRKNTLLKVGNKSDRIDPKKLAELLRNGSLSEVYHGENGVRTLKELARSYLTISKDLGRVMNRVKALYRSWAIPCAGTQVYALCHRSEWLSKITEAGVRRRAEHYYQQLDALQTLRREVRKDLLLESRKHNATKLLRQVPCIGPIRAAQLVALMQTPHRFRTKRQLWTYSGLGLETRDSAQYCYIEGQLQRSKKPQQLRGLNSNHNHDLKNIFKGAATTASVSAGPFHDFYQALLTKGMRPTMARLTLARKIAAITLIVWKKGARFDPQHLKQQAA

SEQ ID NO: 218905 - protein, 340 aa, unidentified
MGEQYVGIDLHRRRSVIVRMTPQGEVLETIRIDNDPVALSLELAKAGPDPEVVLEATYGWYWAADLLQACGARVHLAHPLGVKMFGYQRVKTDARDSTNLAELLRMHRLPEAWLAPPLVRELRELVRYRAKLVALRSGLKAQVHAVLAKEGVRVPMSDLFGVGGTRLLDQLRLARAYALRIASLRSLITAYDQEIAMLGREISTALAGDAGYLAIQTIPGVGPVLAAVFVAEIGDVGRFAGAPPLCSWAGLTPRHRESDTTVRRGPITKQGPRLVRWAAVEAVQRLPGGSKQATDFHRIADRRGIGIGRVAAARKLLTLVYYGLRDGQVRCLAPAPREAM

SEQ ID NO: 218906 - protein, 350 aa, unidentified
MIIIGCDFHPSYQQLAMVDTGTGEWVERRLEHAGEEVKKFYAGLPGPVRVGMEATGYAQWFERLLGELGHELWVGDPAEIRARVVRKQKTDARDAQHLLDLLVKGDFPRIWVPRPEERDTRQLVLHRDRLVRLRTQVKNQLQALALGQGVRAKSRLWSAVGRRELEALALARWADRRRADLLTMLDELDPKIAELDGAVATVAAQRSDARRLMAQVGVGPVTALAFVLTVGPVSRFRRARHLVSYLGLNPREDSSGGKQRLGAISKQGNGLVRWLLVEAAQTAARRDAELGRFYRRLAVRRGRGIAKVAVARKLAVKLYWRLREEPESQAQPARMQGSSDTSLVDASPSS

SEQ ID NO: 218907 - protein, 345 aa, unidentified
MYNMLTGVDLAKKEIQVCVAKSNKIVRNMPMTPTAFSNWLATQKPMTVVFEACATSNYWYQCAREYGHDARLISAKLVSNIRQNQKTDKNDAKAVLQASQLSNVNFISGKSKEQQELQSLVRMHQLSVKHKVAYGNQLCSLLLEFNIKLSPTDAGLNSAIQSILEDAENGFSAIFREALHTAWHQYLKSIELVKHYEKSVARASSASEACKNLMKIEGVGPTNAVNLYIALGCCELGVFKKARDAAACIGLTPIQHSSGGKVRLGSIGKNIRNSSLRANLVAGAMSAVNQAVKRDSRTKKDEWIKGLVERRGKRCAAVALANKTVRTAFSLLRNGTDYKAELLSA

SEQ ID NO: 218908 - protein, 395 aa, unidentified
MISVGIDVSKGKSTVCILKPYGEIVSKPFNITHTQKDLSELSSMLFRLNDEVKIVMEATGIYHLPVLTYLQEKGFFVSVINPYLMKSYRNESLRKAKTDKIDSRIIANYGIDHWFKMKEFQTSGEIYEELKLLGQQYRHYMKLHLLSLAELTHLLDLTMPGIKNLLASWNETNRKDKRSDFVERFWHYDVITSMSEQEFTEEYILWAKEKKYVPSQEKAKVIYTLAQESIPTLPSETSSIKMLVTEAVRVLKEVDATLGLILSRMQEIAKTLPEYSVVREMGGVGNTLAPKLIAEIGDVRRFRNGKALVAFAGIDPPPYESGQFVGCNRKISKRGSASLRKVGYETMRSLKMRSRPEDPVYRYVVKKESEGKSKKAAKIAGLNKFLRIYLSLIHI

SEQ ID NO: 218909 - protein, 312 aa, unidentified
MDEQFVGIDVNKTWLDCDELPLAHVIRHRNDAPGIAALVARMQALKPALIVLEATGGFETAAASALAGAGLPVAVVNPKQVRDFAKAMGILAKTDRIDARVLALFAQRIRPQVRALPSEDQRGLAELLGRRSQLVTMRAQEQTRLATAQAVARDSLAEHIKWLNERIGKLDLELTHRLRTSSVWKVKADLLKAVPGVGKVTVFTLLSRLPELGTLSRRAIAALVGVAPFAADSGKRKGQRFVWGGRADVRNVLYMATLSAKRHNPLIKPFFERLIAAGKPFKLAMTACMRKLLTILNVMLKTNKPWNPAQNC

SEQ ID NO: 218910 - protein, 365 aa, unidentified
MSSVTPAAGAIHLGMDTSKNTIVVGILMPGHEVPVTDRIWNEEGSVRHLVSRLGDPAALRACYEAGPCGFELHRLLSSMGVACDVVAPSLIPRRAGDRVKTDKRDASRLARLHRAGELTAIRVPSEAEEAVRDLVRVRAALLADRKRAQQRVTAMLLRHGRVWRGSYWTQAHEQWIAAQRFDEPAQAAALAHYRAALDTRWAEVRAIESEIMPWAGRQPLAPAVARLGCYRGIAELHGLTLAAEVVDWRRFGSARAFMGFTGLVPAEYSSGDKTRRGSITKAGSEPVRTALVEAAWAYRFKPAIGVVLRRRQHDASPETLARSWQAQRRLHAKYKTMTSHGKPPGIAVTAVARELAGFVWAEMTS

SEQ ID NO: 218911 - protein, 320 aa, unidentified
MSAISVVAGIDIAKAHVDVDVVGAKFAPQRFDNEADGHSAVASALKALGVGLVVMEATGGYETSLACALQGAGLAVAVVNPKQPRKFAESQGYLAKTDRIDAHVLAEFGQTLIRRPDLSRFLRPVEAADQQWLAALVTRRRQLIAMMTSERQRLQITPKKLHPSIEAIIQAIKAQLDDIEAQMVGHVKKHFSELDAILQSLTGIGPVASATLIAELPELGKLNRRQIASLVGVAPFAKDSGTAKGRRRVQGGRFDVRRVLYMATLTAAFRNPVFKAYYQRLTAAGKLPKVALVACMRKLLTTLNAMVKAGSKWDPEHCRA

SEQ ID NO: 218912 - protein, 387 aa, unidentified
MPQPNDLSRSLVALDQNSTIIAVVELSQSSWLVGGVVPGIERQPRKKLEPSPERLLAVLHRWRDEAVRAGRTITRIALAFEAGRDGFWLARWLDVRGVEAHVIHPSSVAVSREHRRAKTDRLDTELLKRGFLGWLRGERGHCSMARVPTIAEEDAKRPNRERDCLVGERTRIVNRIKSTLARLGIRNFKPTLRKAAERLATVHTPEGMPLPPNTLAELQRDMARLGFVVSQIRQIEDARQKRLEQEPETGSHAMVRRLARIVGVGVETADMLVHEVLSRPMRDRRAVARYAGLTGSPDESGAQRREQGLARAGNARVRRSMVQLAWRFLRFQKESALALWYRVRTADRRMGTRKTMIVALARKLVIALWRFVTTGEPREGVVLRPAS

SEQ ID NO: 218913 - protein, 421 aa, unidentified
MIEEIAEEPAELLQRAAALDIGKASLVCCVRVPHESRPGARRQEVRTYDTVTPALLELRDWLICQGVTRVVMEATSAYWKPPFYLLEDDIECWVVNARDVKNVPGRPKTDKLDAVWLAKLAERGMLRPSFIPGRPQRQLRDLTRYRRTLTQERSREKQRAEKLLEDAQVKLSSVISDIFGVSGRDMLAALIAGQRDPYALADLARKSMRAKMSVLRQALTGHFTDHHAFLLGMMLDRTDALTAQIDALTARIEEAIAPFAAQVAQLDEIPGVGITTAQEIIAETGTDMSRFPTPGHLVSWAKFAPKARESAGRAKAAATGKGSPWLGGTIGEAAVSAARTQTFLAARYKRIVRRRGKKRALVAVGNSILTITWHLLSDPGAHFTDLGPDWHDRLAPQRRKRQLIAELERLSGKKVTLHDAA

SEQ ID NO: 218914 - protein, 318 aa, unidentified
MNNIILGIDISKTSFDIALLFNNKIKTKKFNNNVKGFSELKQWLQNKGIDAAYACMEATGSYGLKLAEYLYDNNFKVSIVNPARIKGFAMSKLSRVKTDKSDSELIANFCQAMKPDLWQPVPKYIQELQQWVRRLDCLIANKNQESNRLEGANDTVTISIYNHVEFLNKQIKEVEELISNYIKNHEDLNDKSKLLNSIPGIGAKTIAVVLAFLANIEDFDSAKQVVAFVGLNPKQRQSGSSVHGMTRISKTGDANLRKAFYMPAIVSLRFNPIIKDFSERLSNAGKSKMVIVIASMRKLLHIIYGVLKNKTLFNVNIN

SEQ ID NO: 218915 - protein, 376 aa, unidentified
MGDHSEAFVGFDTSKLRNAVAIADADRGGELRFLGEIDNTPAATAKLVRKLATKYKRLTFCYEAGPTGYGLHRQIKGLGFECVVVAPSLIPKRPGDKVKTNRRDALSLAKLLRANELTPVWVPDGRHEAMRDLTRARETAMLDLRTKRQHVSAFLLRLGRPYPESKKTWTKAHVSWIASQRLEHPQQRLVLEEMMLAIRQAQERLQRLEQAIAAAVPEWSLSQVVSALMAMRGMDLIAATTLLAEIGDLSRFRTPTELMAYLGLVPSEDSTGDTIKRGSITKAGNRRARRMLVECSWSYQHPPRVGQAKQPKVDAAPPAVREIAWKAQCRLYRRYRMLIRNGKRKTVAIVAIARELAGFIWAVARAVTTARVAAVA

SEQ ID NO: 218916 - protein, 412 aa, unidentified
MNVVYERCCGLDVHKKMLVACLILLGADGQRHKELRTFRTMMADLLALRDWLTAAGCTHVAMESTGVYWKPIYNVLDGQVEVLVVNAQHLKAVPGRKTDVHDAEWLADLLQHGLLRASYIPSAAQRQVRELTRTRTRLVQQRSQTINRLQKVLEESNIKLASVVSDIMGMSAQAILKALLEGQTDPSLLADLAQGRLRAKREQLEHALVGSFQPHHRFLIQEHLTHIDYLDEAIARLSREIAEQLRPYERLLGLLDTIVGINRRLAEVVLAEIGTDVKRFATAKHLASWAGMCPGNDQSAGKRLSGRTRKGNRWLRTALMEAAHAAARTKNSYFSAQYRRLGSRRGKQKALVAVAHSILVIIYVVMSRQEDYRELGGNYFDERDRQAVEKRLVRRLEHLGYQVALHPNDPAA

SEQ ID NO: 218917 - protein, 341 aa, unidentified
MRKTLYCGVDLHSNNAMYVIADGRDKQRLARRLPNQLPLVLDALEPFRPQLRVVAVESTFNWYWLVDGLLDHGYPVVLANPSEMEQYNGIKEADDLTDAAFLARLARLNILPTGYIYPRQDRPVRDLLRRRMLLVQQRTAIVLSLQNLAVRQSGRAVGWRDLRRLGETDRADLLGRHDCLAFVADQQIDLIEQLNEKIKRFEKKVLEHAQLKPAYEHLQTMPGVGVILALTILLETGDIGRFPTVGDYTSYCRCVRATHSSNGKKKADNNSRNGNAYLAWAFVEAVHHALRVCPKAKSFYDRKRAKRNGTLATKALAAKWSKAAYYIMKRQEPFDLARVFG

SEQ ID NO: 218918 - protein, 411 aa, unidentified
MKFTGLDWKDKGYTTRIINEEGNDLSGSFEVKKDREGFSEFIHKVRKYCGNDNDIIFGIERERDPIVEYLIALGYKVYLVCPNMMKSLRKRYSSTGKYNDDFDSYIIANTLRTDRNRLTQIKPRNYKIRKIEFLLRHRDKAVDDKRRLTNRLTCYIKECFPAFLDFFSDINCPTALSLLKAYPTYEDIKEISKEDIRAFLKKHYCHKESGILRIYKAIKKGQVKIDPIVIQERSKSIIHLIKRIELLDKEIEEYENDLKETTKGDKDKEVFKSLPGSGDTLAPGLMAIFGKDKSRYKNAQEINSLSGIVPFTKQSGNWESHLFRFGCNLFYRNIITRLAYCSLTKSEWARDYYNEKRAEGKSHYHALRCLGRIWINIAFSLWKKGEKYNEDKHMAAVHRHNIRNRLSQKSA

SEQ ID NO: 218919 - protein, 366 aa, unidentified
MKKISTVRVNGNMIFKGHKLTIGVDLGDRWSCYCVLDEAGEILLEQKVATTPEAMKQIFEKIPRGLIAMETGTHSPWVSRLLTELGHQVLVAHAQKVQLITKSNRKDDRHDARTLARLARIDPELLGPVRHRSAQAQIHLTVIRARAELVSARTSLVNAARGLVKSYGQRLPKCGTQQVSRELAAGLNAELREILEPLLKEIESLNERIKEYEVRMEKIARESYPQVELLKQVKGVGTQIALTYVLTLEDPHRFPKSREVGCFLGLRPGRRDSGESQPQMHISKEGDPYLRTMLVQGAHYILGPFGADSDLRRWGLKLAARGGKTAKKRAVVAVARKLAVLLHRLWVSGEVYEPLRNSDKALRAAA

SEQ ID NO: 218920 - protein, 334 aa, unidentified
MENIALIGIDLGKNSFHIHCQDHRGKAVYRKKFTRPKLIEFLATCPATTIAMEACGGSHFMARKLAELGHFPKLISPQFVRPFVKSNKNDFVDAEAICEAASRPSMRFVQPRTESQQAMRALHRVRESLVQDKVKTTNQMHAFLLKFGISVPRGAAVISRLSTLLEDSSLPLYLSQLLLKLQQHYHYLVEQIKDLESQLKRKLDEDEVGQRLLSIPCVGTLTASTISTEIGDGKQYASSRDFAAATGLVPRQYSTGGRTTLLGISKRGNKKIRTLLVQCARVFIQKLEHQSGKLADWVRELLCRKSNFVVTCALANKLARIAWALTARQQTYEA

SEQ ID NO: 218921 - protein, 444 aa, unidentified
MQYQKVLKMLKCIPYLSVGLDVGADFTWMSIMLPNGTLAGKPFKIVHSDPQSRELAVTKIKEAQEAYSLESRCFLESTGIYHIPLLCFLRDKGFDCSVINPIITKNSTNMNVRKLHNDKFDSKKAAKVGLDASLKTSIIPDDEVIDLRNLVRDYYYFKDLQSAIVLKLHAELKVSFPAYQKVFSKITTQTSLKLLEAYPLAADMLAAPKDRIVETIRKTARFGEKYALAKYDAICTAAKDAAVFGRALPSNALRIRLYIKTYREYQEHLDGILEELHKAVDKLEGTPAYDRIALLQSLRGVGFLSAVVLIAEMGSFDLFSSPKKLYAYFGLDPAVKQSGKFNGDKVHMSKRGSSLARRILHMVALNNLKIDKGTKTPVNPVIHSYYANKCKSKKKNVAVGAVMHKICNIIFAMLRDHKPFKIITPQEHCEQYLAAHPGKTHNAA

SEQ ID NO: 218922 - protein, 430 aa, unidentified
MKSNTQNAKIEAITEKTLVLGIDVGSETHYARAFDYRGIEYSKKPFKFSNTEAGFATFKEWILDLKERHEKDKVVPGMEPTGHYWFNLGKFLQDNEMKPVLVNPHHVKKSKELDDNNPTKNDRKDPKVIAGLVREGRYMIPYLPEGVYADLRTASNIRFQLQAELTRIQNRISRWFNIYFPEYKTVYGKPDAKSGMLILKAAPLPEDILTLGIDGVNQIWRDAKLRAVGKARAKTLIEAAEHSVGSKEGAVSARMEIRMLLEDYESRNMRLQEVMVLIEELVRKIPMAEKLLEIKGVGIRTVSGFLAEVGDISRFNNPKELQKLAGLALVENSSGKHKGETTISRRGRKRLRYLLFEVAMSLVAKNPEFRELHNYYTTRRLNPLKKMQSLMAIAAKLIRVFFAMLTKGVDYDPKKMVSDIKRPAVYLQAA

SEQ ID NO: 218923 - protein, 363 aa, unidentified
MQNSITWVGMDVHAENIVLAALRDSSDAILFRAEFPNTPKGRERLAGRLAENAPARCVYEAGPCGYELRRFLEEKSIDCQVAAPALIPRKPGDRVKTDRKDAEKLARLHRLGELATVFVPTPAQEALRDLLRTREDAREDLLRRRHRLSKFLLRQGRRYTEGVRWTTRHWDWIRAQTFTDHNTETVFREYIVAIEQEVERIRRIEQQIIEESRSPEVGKAIARLRALRGVDTITAMTIITEVIDLNRFRSPRELMAFIGVVPRERSSGGRERRGSITKTGNAHIRRVLIESAWHYQRLPAGTPKTILVRREGQPPDVIETARKAELRLHRKFMKLLGRGKPKGIAAVAVARELAGFIWALGRG

SEQ ID NO: 218924 - protein, 381 aa, unidentified
MRTVCGLDIHKDSIFMCIMDEQGKKSEKKFGVSTREVKSLSMTLKSHHVSEVCMESTGIYWKPIWHLLENDFRLYLVNPQFIKQLPGRKSDVKDAEWIATVLLKNLVRNSFVPDNMIQQLRLYGRRVNELNKDIVRCEQRVDMILQSCNIRISNHVSNINGKSYKKVVHAIIEGERSADELVKLIHGRTVNKHGRESVRDSLEGNIGQADVDLLRQYMEVLRMYQAQKETCLAEMIKLCEKHYHRAFSLLLSMPGIKEQTAAIIISEIGADMSLFVTAAALISWAGLRPRNDESAGKIKSRKITHGNKYLRKALMEAAWGASRTRGSIFYDKFWRLRQRGKNQNKCTVAIARHLLGIIWSLLSKDEYFDSEYRLDVNPRRA

SEQ ID NO: 218925 - protein, 343 aa, unidentified
MSEVSIIGLDLAKHVFQAHGASKDGRMVFSKRLRRHEVMAFFSRQPLCRVVMEACGGSHYWAREIQQLGHDVKLIPPAHVKPFVKRNKTDAADAEAICEAAVRPNARFVPIKSEASQAGATLLRTRQLLERQRTQAINALRGHMAEYGFIAPQGRWQVDRLIAMIEDKEVALREEARVGLSALASTIASLTQHLDRLDSQIKASVKQNETARRLMTIPGVGPMTAASIVALVSDPSVFRCGRDLSAWVGLTPREHSSGGKQRLGHISKQGDKTLRRLFLLGATAVVRQALIKPPAQTSWLGSMLARKPRMLVITAVANKIARVAWALMAKGGVYGEKAEVLAG

SEQ ID NO: 218926 - protein, 351 aa, unidentified
MPRATSSTNIIATIGIDIGKNTFHVIGLDDKGAIILRHKLSRGQVYARLANIPPCLIGMEACVGAHHLGRHLSALGHNTRLMPARYVRPYSKGQKNDFRDAEAIAEAVQRPTMKFVAIKTVEQLDLQGLHRIRERLVCQRTSVINQIRAFLLERGIAVRQGLRALRTEIPIVLAKTDKLSQRMIHMIEDLCTDWRHLDRRIATVSKEIETLSEQDDGAKRLMTVPGIGPIISTAMVAAIGTGEVFSKGRDFGAWLGLVPKQMSTGGRTILGSISKRGNRYLRMLFVQAARAVLLRPQSWEKHGLKLWIEAAARRLNRFKFAIALANKIARIAWGVLHGGRNFEVRPMNQAA

SEQ ID NO: 218927 - protein, 315 aa, unidentified
MSQNNPAIIYAGLDVAKDSLALDFQGRAHALANDAKGHARLLALLGQAQNVHVVLEATGGYEQPAVAALHTAGIALSVLQPARVRAFARAKGLRAKTDPIDAAVLRAFGEAIRPPATAAPTAPQQRLGELVLRRRQLLEFTTAEANRSAHYRDPLPRRQAAAALKMLRRQIAQCEQAIAALLAADPQMSARAARLQEVPGVATITASTLLAEMPELGTLSDQSAAALAGVAPYNRDSGPWAGSRRIGGGRAPVRCALYMASLSAARHDPILRAFHQRLLAAGKKPKVALTAVMRKLIVLLNRLLKNPAFHLRATA

SEQ ID NO: 218928 - protein, 333 aa, unidentified
MGKSITDLSSVTTVGLDLAKHVFQVHGVDASGRVIVAKALRRKDVLAFFAQLPECLVGMEACSSAHHWARELIKLGHDARMMPPAYVKPFVRRQKNDAADAAGICEAVTRPSMRFIGVRTLENQAALMHHKAREMLVAQRTQLINALRGHLAEMGVIAAQGLKNARELARLILAEGDETIPACVRMALVPLVRQLHVVDQEIACSHRTIAAMARDDEMARRLMTIPGLGPVTASAMASSVQDISAFSGPREFAAFLGLTPRQHSSGGKERLGRVSKMGNRYLRRLLVVGAHAVLYHRKPHEDALRSWAKKLMQIPEHIGTQSTIGPNIGSGIH

SEQ ID NO: 218929 - protein, 337 aa, unidentified
MTVTNQFAAHVGLDWADKKHDVCVQFKNGERVFDVIEHTAEALDAWLTELHQKVKGRIAIALELKKGPVVYALQKYPFITVFPVHALSLARYRQAFSPSGAKDDPQDAELALELMLRYPQKIKAIEPDNADIRLLQQLVEQRRQLVEDKRRFVNRIINTLKQYYPQPLEWFSHRGSLLLCELIIRWPSLQQLKRARRDTIRNFLNAKGGRAMALTEQRVASIDNAIPLTTDPSVIEANALMAAALATQIKVVSEIIKTYDERIETLFDTLPDAGLFKSLPGMGPCMGPRMLAALGDNRDRFNSAEEIQNYAGIAPVTERSGQKSWVHWRWQCESPQV

SEQ ID NO: 218930 - protein, 371 aa, unidentified
MRADRKRMKKVGRMNSIVAGIDLGDRESLATVLSPMGDVADRFTFPMNEEGYTLFAGRVPKDARVAFESTIMAYPISRALRTRGYMDVTVAHPKTLAWIVRSKKKNDRVDSLKIAKLHMAGMLPESHLMDRDEQIVRDLLVQRVKLGVEIGRLKNSVIGYLKREGVYDSLPKTGDNFSIKRRRAIRLLKFNDGRDLVLGTMMGRLEFLDGQCLPLEESVRANAKLSDDVRLLMSITGVDYYLASLTSSFVGDVNRFPSDDHLASFLGIVPTSRDSADVKRRGKMTKDGSSIARWALSVMVDTVMRHNQPIKEYYDGVKKRTGSGKLAHVLTMRKLTRMLYHMLKTRENWKWENPLLTERKMTRLEVGGDVP

SEQ ID NO: 218931 - protein, 487 aa, unidentified
MGKTLNSEDLLIDSETGEVLNGKHGDEIQCLKDYGCGLDCHSKFLQISVLVRRVQSIFEYRKQFDTDWDSVVMARDWVLSVLETCVSPPADVSEGLHYCLESTSSYHVVVCKAWGGKPSVINPSIARAGRKKTDVLDALQLARADISGLWPESYIPSTEVDELRILIGERTNFNRLATRISNRINNMLLKLGYTNGRSGSVTKKDKVREIIENEISDNPVKIEGVCPLGIPEDMKPLFREEYRQYYMYKELVSQYDLKILKKIKSMEWETRKGKVDGKQMLKLLCSAPGIGEQTATLWLARIVTSTRFPNEKALAAYCGLDPSLKVSAGKVTSTVRRGGCKDLHSALCMAASNLVRRHNEPFGRWGYNIAVKTGRWKKGISAVARKLAVSLYFMSLRTEKFSYEKDKIMTEPDVIEISIERLAELDPDYKRYVRILISNNIKDTKTLVHEYYLCNLNNIKGLGKKFFGQLAEFINNQNYYKKLLEEL

SEQ ID NO: 218932 - protein, 345 aa, unidentified
MTLYCGVDFHARQQTIAFCNSEDGEIRFTQIRHDDRDALQRFYTQFQTTVIVGLEAGGYSEWFERFLSELGIETWFGNPTEVRRRARSRQKNDWRDAELLLDLMIKNEFPRVFRQTAESRAVLAQLRYRHKLVQARTRATNSLHALAIREGLSLRATILTKAGRARLNALSLTALQARQREEWLALIDQLSENIKRVEEELIQLAAQDEQVIRLRTHPGIGLLTGLALVHTLAPISRFSNSRKVTAYVGLEPREFSSDTRQRWGGISKAGSPLLRFLLVEAAQQAARADTELKNTYQHLSARRGRPKAKVAVARRLLVRAYILLRDEIDYSTYLRRTVAVRSARD

SEQ ID NO: 218933 - protein, 482 aa, unidentified
MKPKPQQKNKKAAEDLTPRHWREMNRKQRRETMRKMESQDLSLEVVHPDAAGIDIGNEFHYVAVPPSRDGQPVRRFGCTTAELKAMADWLKQCRIRTIAMQSTGVYWIAGFDILEQAGLEVYLVNARDTKNLPGRKSDVQESQWLMKLHTYGLLRNSFRPSQEIRTMRTYWRQRNDLVQSAGRHIQRMQKAMTQMNIQLANMLSEVSGVTGQAIIKAILGGERDPHKLAELRDVRVKASEEQIAQSLEGNWQQDLLFVLKQEQDGYEFCQKQMAECDRQLAQYLQEREDRSHGAPLPEEKRKGRLKKKKGNAPQFDLREGLFRMSGTDLTRIDSIDVMTATTIVSEAGYDMNKWETEHHFVSWLRLCPDNRISGNKIIGKGRLPTNNPISIALKMAASSLRLSNTYLGAQFRRLRTKLGAPVAIKAMAAKLARLVYRMLRYGMKYADKGAAFYELQHRQLKVKQLKWKAASLGYQLIPIPAA

SEQ ID NO: 218934 - protein, 338 aa, unidentified
MEHQQEYVGIDLHRRRSVIVRMAEAGQVLGVDQVVNDPVELSMAVAKAGPEPEVALEATYGWYWAVDLLEANGAQVHLVHPLGLHWDSRRVKNDVRDSTELANRLRRGDLPEAYIAPPEQRELRELVRYRAKLTALRTSAKAQIHAVMAKEGILPCLDDMFGPGGQQLLDQMPFEGAYAMRVASLRKLLDVYAGELTIVEAELAARLAGHKGYTAIQAITGVGPIMAAIFVAEIGDVGRFPSARHLCSWAGLTPSHRESDTKVQRGHITKQGNHLVRWAAIEAVARYKGGDPIAPTYTRVARRRGRMIGRVAAARKLLTLVYYGLRDGEIRCLAADAA

SEQ ID NO: 218935 - protein, 387 aa, unidentified
MSQTIAAPIPAAVDYERTLVLAIEVSNKSWVLAAQVPGLPHTKAKRTINPEAEALLAAITGYRTRAAATGRSIERVIAVYEAGWSGFWLARWLMRRGVEVHVVQPSSVPVDRRMRRAKSDGIDSELLLRTLLAWLRGEPRVCSMVPVPDEADEDARRCVRERTELISERIGLTNRIGAVLATLGVSDYNPLLRNRCRRLAELRTGLGEPLPANAHAKIKRLLARLELVLMQIAELERERDAVVETEAPDKASKMIQQLTGLRGIGVQSATVLVREAFVRRFANGKALGSYAGLASSPYSSGGIDREQGIGKAGNRRVRTVMVELAWLWTRYQPDAAQVCWFRERVGSTGPRVRKIMVVALARKLLIALWRFVIDGVVPEGAVLKPAA

SEQ ID NO: 218936 - protein, 400 aa, unidentified
MLSIGIDVSKGKSTVCGMKPGGEIVYAPFEVQHTREGMSELVSLLRGSGEEVRAVLESTGSYHCPVVAALLENGIFVSVVNSLRMKRFCSQSIRKVKTDRIDAMQIALYGLAYWQELQPARLPEDTYRELQLLARQYYQMTSLLIKAKVDFNAICDQVLPGMQELMSDHAGRHKLSDFVLRYCHTTHILEMGETRFRKDYCKWAEKKGYRNCERMAALIFATAQNGIPVLPNAPSTQIVITEAIRVLHTVEASRDAILTQMQALAKTLPEYSLVREMPCIGDTLAPRLIAEIGDVRRFHSKRALIAYAGIDAPPYQSGKFCANNRHISKRGNRYLRKTGYEVMQSYVMHKPANDPIFTFIEKKRGEGKSGKLAMVAGLNKFLRVYYGKVTELYRSLPAIE

SEQ ID NO: 218937 - protein, 413 aa, unidentified
MDVLYQRCAGLDVSKRDAKACVRITGDRGKTSQEITTWGAMTNEVNRLADYLLAQDVGLVVIEATGDYWRQFYFLLEDKGLNVQLVHAKEARNVPGRKTDVSDAAWLAQLGAHGLLHACLVPPENIRRLRDLTRARTAITDERSREVQRLEKMLEDSGIKLSSIATDITGVSGRAMLQALIEGQNDPAVLADLAKRGMRRKIPALTEALTGRFNEHHAFMARLFLDRVDAHTKDLQRLDARIEEQMKPFSAARELLATVPGISTRTAEVIIAETGADMTVFPTAGHFASWGGTAPGANESAGRVKSTKTRPGNRYLKRALGTAALTVSRSQTTYLGAKYRRIKSRRGLMKALVAVEHSMLISIWHMLTTGECYVDPGPDYYTRRQPLRSKERAVQQLENLGYQVILEPLQRTG

SEQ ID NO: 218938 - protein, 412 aa, unidentified
MEVLYRCCCGLDVHAQTVVACLIKDGKKQTRTFATMTDELLVLLDWLSAEGCTHVAIESTGVYWKPVFNLLEGVLEVVLVNARHVKAVPGRKTDVRDCEWLADLLRHGLLKASFIPPLEIRELRELTRYRQTLVREQASVANRVQRIIESGNIKLGQVASNALGVSGRLMLRALCEGETDGAKLAALARGQLKKKESELQRALTGRLSPAQRFVLRELLDRYDELEAAFSRASEQLKREVAKCDDPFVSEAVELLQTIPGVGLRVAEVIVSEIGVDMRRFPSDGHLASWAGVCPGSNESGGKRRSGRTTKGSIYLRNALVQAAWAATHTKETYLAAQYKRLVKHKGKNRALVAVGHSILVIIYHVLLRKESYGELGGDYFDKRNVEVQRNRLVRQLERLGMKVTLEALPVAA

SEQ ID NO: 218939 - protein, 389 aa, unidentified
MSQAFDASRSLTALEQHNTITAVVEMGQSKWLVAAVVPGIKRQPLKKLDADQESLLKLLHRWRKEAEQAGHPIKRVVVAYEAGRDGFWLARWLRMHDVEAYVIHPTSIAVSREHRRAKTDRLDTELLLRALLGWLRGEKRHCSMVAIPTAEEEDAKRPNRERDSLVTEQTRIVNQIKAILIRFGIRSFRPKLRKAEQLLRDLRTAEGSPLPDNTRAEMYRHLVRLRMVREQIRAVEKERLQKLKAEHGRKKGPHAMVRLIARVVGIGVETADMLVNEVFSRQFRDRRAVARYAGLTGSPDESGKRRREKGLARAGNARVRTGMIQLAWRFLRFQEDSALAQWFQTRAADGRGSTRKTMIVALARKLLIALWRLATTGELSDDIVLRPAS

SEQ ID NO: 218940 - protein, 317 aa, unidentified
MIWIGIDIAKRSFTACQPEGHPPQTFSMDQVGWQAFRAWAPESGFRVCLEATGPYWLQLADWLEEAAIACAVVNPRRVRRFAQASEHRSKTDSIDAEILRRYAETFNPECGTSLKGPSRILRVLSRRILQLQNQLDIERDRLEKTSADPATPEVVLTSFAVITNELSRLICELEHRCKALVLAHPQLHQEWQLLCSIPGIGPKTARTLMAEYGSRLASASVKQITSFAGLDVVRFESGSSVHRRPRISKQGNWRVRRALYLAALSACRHNPTLAPYYRRKCKQGLENKQALVAVMRKLLHIAHGVLKHQQPFQPQNP

SEQ ID NO: 218941 - protein, 381 aa, unidentified
MKNVYTKRTGQAARPSVVGDRSVARVVPSLLPKSSNSCLGYPSPHVLQGRPTLEQIKIIKEDCLLEVPLIFVGIDVCKAQLDVAIRPTAQILSVPNDKASIKTLVKHLEKLRPTLVVLESTGGLERQVMLALVGAEISVVMANPRQVRDFAKSTGQLAKTDRIDAAVLAHYAEAIRPQPRPLPDELTLELRALTVRRRQIIDMIVAEKNHLATASKAIKKRITAHITYLEQELDDADQDLDRFIGKNPLWKQNQEILCSTPSIGPVSSRTMLAELPELGTLGRKQISALVGVAPFPRDSGTLKGRRTIWGGRASVRGALFMATLVATRFNPVIRDFYKRLRAKGKPSKVALVACMHKLLIILNAMIKNKTRWSENFSLKTA

SEQ ID NO: 218942 - protein, 346 aa, unidentified
MEHYVGLDVSLKLTAICIVDRTGKIEREGVVPSDPEAIAVFVKSHAPHVVRIGLETGATSTWLWTELRELGLPVICIDARHAKAALKMQINKSDRNDAVGIARIMQCGWYKEVRVKDLDSHAVKALLVSRALLVKIKRDLENQIRGLLKNLGLVIGRAKMNVFAVRTAELIDNRPALATAVVPLVKAREAIERQIADLDRKVLLLARKNAQVRQFMTAPGIGPVTALCFLATIDDPTRFKRSRSVGAYLGLTTRRFASGEIDWTGRISKCGDKMLRSYLYEAANVLLTRVAKWSALKAWGVRVAKRCGLRKAKVAVARKLAVILHRMWIDGTEFKWSSKEASNQPA

SEQ ID NO: 218943 - protein, 377 aa, unidentified
MKKVRFIGLDVHADTIAAAVAEPSGEVRSLGIIPNRPESIRRLVKRLGPAEHLRVCYEAGPTGYVVYWQLTALGVRCEVVAPTLVPVKAGDRVKTDRRDATKLARSYRAGDLTPVWVPDAAHEALRDLVRAREAAKKDQLRARHRLGKFLLRHGRRPPTGVKAWTQAHLTWVKSAVHFEQPAQEATLLDYLHEVDHVAGRIERLERAIDEAVKTAPPRMRAVIEALQGLRGVALVSAVTIVAEVGELARFARAPQLMGYSGLGASEHSSGERTRRGRITKTGNAHLRRVVIEAAWAYRHRPSVGGALRKRQARLSEEVKAIAWKAQHRLHARSRKLLGRGKCPQQVVTAVGRELLGFIWAIGVIVEAEQRQAQSVAA

SEQ ID NO: 218944 - protein, 387 aa, unidentified
MSVPFDPRNPATAFDHTITVVTVLELSGKSWELGASVPGVLRRPLRKIAVRDVCGVTRAIGQWKTEASKAGHTVSRVVLGYEAGRDGFWLARALREQGIEVYVMHPASIAVERRGRRAKTDRIDVDMLLGALLGWLRGEPRRCTMAPIPTEAEEDMREPGREREALVTARLKVENQIGSQLIRFGIEGFNPRLKKAAQRVEELRTFDGRPLPPKTLEKLRRLLAQHRLLSEQMKEIEAARQRVATATDPDRIERTIQLLAHIVGLGIETATVLVHEVFSRRFRDRKALAAFVGLTGTPFDSGGSRREQGISKNGNPRVRRIITQLMWRWLKFQPDSALACWFAERTGGAKGRIRKIMAIALARKLLVALWRYVEDGVLPQGVRLAAA

SEQ ID NO: 218945 - protein, 405 aa, unidentified
MHEPIRWPAFAGIDWGGDHHQLCVLDPIGVQQRELRVTHDVAGLRQLDDELARFASVMPVAIERAEGLLVEHLQALGHVVFAVPPRIAARARERYRVASVKDDRFDAFVLADTLRHEHAHWRAVAVPSPLLAEVRALTRDRDRLLETQQATEAQLRSILQAYHPAPTKLFSSIDRQITLAFVQEYPTPHSASRLRATRVGGFCRRNHYSGRVPPEVLADRLRANLLSASEGTVAGKSFAARSFAQLLSLLNEQLAEFDDAIAAAVAEHPDAAILASFPGVGPVLTGVLLAEIGEDRARFPTASVLLSEAGLAPVTRASGRSSSVRFRYAANRHLREASMWWAFNSLKVSPWASAAFQQARTERGQRYHRALRGLAARWMRVMWRCWTDGTTYDPAKHTAASSHAA

SEQ ID NO: 218946 - protein, 406 aa, unidentified
MDVVYTHVCGLDVHKKNVVACVITPETKEIRTFSTMTDDLILLVDWIKSKGCTHVAMESTASFWKPIYNLLELENIQTLVVNAKSIKNVPGRKTDVKDAEWIASLLRHGLLQGSFIPNRDQRELRELIRYRRSLIDERAREVNRIQKVLEGANIKLSSVASDVLGKSGRAMIEAMIAGEENPELLSELAQGRLKNKKAELQRALNGLIGNHQKLMLAAQLRHIDYLDEEIGRLDEEIKRRMLPFEEDLELLDTIPGVARRTAETIAAEIGTNMDQFPSAAHLCSWAGLCPGQNESAGKRKSGKTRKGNKKLRSALVEAARAAGRTKNTYLSSQYHRIAARRGANRAAVAVAHSILMIAYYILKRRQPYIELGPTYYEERKRDTIIRQSIKKLESLGLKVTVESVAS

SEQ ID NO: 218947 - protein, 353 aa, unidentified
MKRENAIKQSVGIDCGKIELVCSIGVMNHEFEEEIISNKAFKNTPDGFKKLKEWAKKLSDNSVEMIYVIEATGVYHERVSLYLYNEGCKICVMLPNKVKAFSQTLSVKTVNDKTSAQAIAYMGLEKKLDLWQPPHEVFNKLKQLTREREQLIEERTICKNQLHAEESGAWPNKGSIKRIKQRIWLLDKQVNEVESEIKEIVCQHQWLQEKLEYVCSIKGVALITAVTIVAETNGFNLIRNKKQLVSYAGLDVISKESGISVKGRSKISRKGNKYLRKALHFPALVAVRHNEQMKALYSRLVSKHGIKMKAAVAVQKKILELVYILWKKEELFDLEYFKNKGQQTSVAPLCELA

SEQ ID NO: 218948 - protein, 349 aa, unidentified
MAMLADTADAVIGVDTHTDTHTACLLDRLGRQLAVITIPADDRGCRMLLAWAQQNAPGPRLAWSVEGTRSHGLGLTRYLHAHGQLVAEAGRPARASRRPGGKSDPADAVRAARDALSAQRLAQPRSDGSREALRILLTARAQATTARTAAVNTLKALILGAPDDLRRQLRGLSTPRQASRCRSLRVHASQPIAERVLRAELRRLATHIGGWDKELRANKAQLRQLVAQAMPVLLEQPGVGPMSAAQLLVSWSHKGRCRSEAAFAALAGVSPLEASSGRITRHRLNRFGDRQLNRALHVIINWRMLHHTKTQDYTTQRRAGQKTDPEIRRCLKRYAARQLFRLMETAATT

SEQ ID NO: 218949 - protein, 367 aa, unidentified
MTTRKFVGLDVHKETIAVAVADDGRGGEVRFYGTIPNTAEAVRRLVDRLLDPDIALQFCYEAGCCGYGIHRQLLELGVECSVIAPSVMPRKPADRVKTDRRDAQMLARLLRSGELTAIWVPDEAHEAIRDLIRGRRQAKRDMVASRQMLLSFLLRHGRKFAGRSNWSKAHWRWLSEQAFATPHQQFVFGECIRRIEEAQQRCDRLDVMLLEALRHWSLAPLVQALQALRGVGLVVAATLAAEIGDLGRFDTPKQLMGWLGLVPSEASSGTRTRRGAITRTGNREARAMLVEAAWSYRLPAREARNYRTRVEGLPDEIRAIAWKAQVRLCQRYRTLAASGKSLPKVITAIARELVGFIWDIGRRMRPA

SEQ ID NO: 218950 - protein, 397 aa, unidentified
MAKYINHQTLDVNTEYSVIGLDLAKHDLSLAAISTDGEVFIVDQMTYADFLELAHGLSPTLFSMEPCCGFSYLSAELQSLGHEVRVISGQAVSNWVKTYRSGQKTDANDAYALARLAENPDITSIRSKTLNEKRIMTIQGVRRQLVGQRTKTIVSFKGLIQEWGIQVKVGRRNLNQMQQFVDDRAEVFTEPVVKALTHMIEQIRSLDARIKELDSDLENMVMSDHQGRQLKQVLGIGTQIAARFISVVGDISNFKSARSLVAYLGCIPRNNITGHRNKPKIKNGLAPDMSSKGQGKISRHGDKYLRSLLIQGAGTIYMNYSKGALDDCPLRRWLEKQLEVRKPYGKIMVSLAAKLIRIMWAVLTHGEKFDISKVSVSRSVLAAASGRKADLEVAAAT

SEQ ID NO: 218951 - protein, 507 aa, unidentified
MMAAVMIGVDPHKGSHTAVAIGADEVPVGLVRVRACAAQAERLLTWAKSWPERIWAVEGAAGLGHLLAQQLVAAGERVLDVQPKLAARVRLLATGAVNKNDPNDARSVAVAALRSAACLPVRPDDHAAVLKIWAKRHRDLSRARTQVACRLHAVLCELVPGGLGKEICAAQAAAILDQAEPGGAVRQARPELAAEFTADLRRIDVQLRETRKKLAVAVRASGSTVTEVFGVGPFIAATVIGDVRDVSRFASRDRFAAYDGTAPIEVSSGNRKVHRLSLRGNRRLNHAIHMAAITQIRYQHSDGRAYYDKKIAEGKTPKEALRALKRQISDAIYKHLKADAARAAAAGAQGPGGQPGNDSVASAASSHPERQLFGQATPGPVTTLRHPADQQERASSHARKRPHEPLDTKRHRSVVCFCVSEGCGIGAQIRTLCYGLPSARGCAEPSSDRAILSPMTAVGMLVFPEMTAGISDASATYRPSIPCTRPSGSTTESGSLAGPILQLPAGW

SEQ ID NO: 218952 - protein, 343 aa, unidentified
MKYVGIDLHKRFSVASVVDEKGKLIEQRKLPNGIEIKEFLEGHSSPLQVAVEATGNWQWLYELLEGEGIEVKLSHPLKTKAIASARVKNDRVDSLTLAQLLRADLLPLSYIPEKPVRMLRELLRYRMSLVKIQTSLKNRIHSILAKNNIRHEFSDLFGRKGTAFLSSLNLADVYHISLRGYLSLLERVREEIWAMDGMIRDFSLEDEGARILMSIPGVGYYSALLIKAEIGDVRRFPCAKKLCAYAGLVPSTYASGNFCYHGHITKQGSKHLRWILLEMVLQAIRRPGPLQSFYLRVAKRKGEKVARVAAARKLLEWIYYMLKEGKMYSEMERRGEPALSHSR

SEQ ID NO: 218953 - protein, 337 aa, unidentified
MKHTVIAMDIAKRVFQLHAVDAQTGEIERVKLRREAVREFFARRTPSLVAMEACGSAHYWARELRGLGHEVRLLAPKSVRPFVRSNKTDAADAQAIWTAVQQPEARLVAIKSEAQQAILTLHRMRAQLLKFRVMQSNALRGFLYEFGQVLPEGHRALAKAWPTALAALAEQLPAMLLDSLREQWVRVQQVDAEMAALERRLASALRANGSCQQIAAIPGVGLLTATAAVAAMGDPTTFKSGRQFAAWVGLVPRQTGTGGRVRQLGLSKRGDTYLRTLLIHGARSILARGKPSPWMEALLRRRPYSVAVAALANKLARTIWAVLARGRPFDPAAFGVA

SEQ ID NO: 218954 - protein, 462 aa, unidentified
MPGREDSETGESSRRQLQGLPVIRRNVAGIDLGSERHWVCAPTRDGSGREIASFGATTAELLRLAGWLKARQVESVAMESTGVYWIAPHEVLEAQALQVLLVDTRQLARVPGRDKKSDPSDCEWIQRLHSCGLLRGSFRPEEAVCMLRTLVRDKANLVAESGDWLRRMQKSLDQMNVRVHRAVSDIDGVTGMAMLRAIAAGERDAQKLAQLRDRRCSKTQQEIAEQLTGHWREDHLFSLQQALKMYDAVQERIAAYEQEILRQLGEMEEPGQQGQAAPPLHNANKTKAIKKRGQESKRQALYRMSGVDITQIDALGVETVEVVLSEYGPDLSRFPTEKEFVAHVTLAPRVPSSGGKPLKKKKRNSASTRVAAALRMAALSLRHSQTALGAYYRKLAQRLGGDVAVFATARKLATLIYRLLRWGQPYVDEGAAAYENRYLQQRIKSLTAKAKQLGYELTAVNA

SEQ ID NO: 218955 - protein, 556 aa, unidentified
MEKIIGINPVLEILRSDKTVEKIEVYKGTKKDTIKEILNLASKRNIKIFYTELFELYEHQILKFMGLYFKDLGTESLLEVVFGMYQKHIEDEYNIKYTPVQSKIVDETHSNKYFSFSAPTSTGKSFVFRKLIEESDKDVVIVVPSRALINEYFDILNEHFTSSDINILTFVDKINTNYATRNIFILTPERCKDLFKFKNDFKGFSALLNKIKSFDAKNLIIGLESTSHYGENLINFLFIHDFKVALINPLQTSHLRKANIRDAKNDNLDSLNIAKSLVFTKLNFVSKKNIECFSLKKLTRFRSNLIKQRSKAKIQLISLLDLLFPELQYLFKSKIHSKAIYSLLKKYPSAEEIAALKDDEISNLLYASSKGHFKKEKSVELKSLAKTTVGIKDTSISLHLIQLIELIELYTKQIKDIEIKITDIVNNLDTTLLSVPGISVIACAIILGETNNFENFSSSKKLLAFAGLDPKIRQSGNFNASSCRMSKKGSPYLRYALIFTAWNIVRHSEKFNKYYSLKRSQGKSHYNALGHVAHKLVRILFTLIKKDISYQEEKLE

SEQ ID NO: 218956 - protein, 371 aa, unidentified
MRNNSKKASAAVTGKMTMGLDLGDQYSYYYSLDEAGQNVESGRVKTNREAMEKRFGGGEPMRVVIEAGTHSPWVSRVLAGRGHEVIVANPRKVRLISDNEGKDDPVDAELLARLGRVDVRLLSPIEHRGEGAQADLAVIRARDALVAARTQLVNHVRGAVKSLGSRLEKSSARSFADRVGDQVPEALRAALEPVLEVIAEISNQIGGYDQQIRRCCQEKYPEAQLLTAVPGVGALTALGYVLTLEDPHRFAHSRSVGSFLGLRPGKDKSGQQDPELRITKAGSPLLRRLLVGSAQYLLGPFGPDTDLRRWGLKLAGRGRKNAKKRAVVAVARKLAVLLHRLWVHGEIYEPLYQSQRTAARSAQACSVQSGV

SEQ ID NO: 218957 - protein, 353 aa, unidentified
MIVVGVDPHKKTHTGVAAAQTGKAVGEVTVKARLKGFERLLAWARELDDERVFALEDCRHVSGNLERFLVTRGERVVRIPPKLMAGARRSARTPGKSDGVDALAVAHAYLRQPDLPEAHLAGIERDIKQLLDHREDQVWERTRIQQRLRWHLHDLDPHLEIPDRALDRFCWLDWIEQRFAASPPSTTLRIALELIDDCRRITCRVNELEREITTLISDHFPKLIAIPGCGALTAAKLVGEIAGIERFSSDSKLAMHAGVGPLEASSGNRQRHRLNRKGNRQLNSAFHRIAVTQCRIHEPAKLFMTKKMREGKSKREALRCLKRHLARSIFRTLTERNTSPRFDAAQEMHQTAA

SEQ ID NO: 218958 - protein, 350 aa, unidentified
MIILGVDAHKRTHTFVVVDEGGRKLAERTVSATEEGHVEALAWARRWDDRRFAVADCRPVTRRLEADLLAAGETVVRVPTKLMAGARRSGRTPGKSDPIDALAVARAAIREPDLPIAHLDCATRELRLLVDHREDLVAERTRLQSRLRWHVHELFPGLEIAPASLGRHRHIAALEARLVDATGTVAEIARELLKRCRELTLRANELERQIGRLVRVLAPTLLGLPGCGGLSAAKIVGEVAGVLRFRSKATFARWNATAPIPVWSGNADRHRLNRGGNRQVNAALHRIAITQQRGVGSGRDYVQRRLRAGNTKTEALRVLRRTISDEVFRRLSVDEQRRATTTPNAIPLAA

SEQ ID NO: 218959 - protein, 336 aa, unidentified
MMLYCAIDLHSDNNVPVIIDSNDNILFQRRLPNDLGTVLSALGPYKQRIVGVAVESTFNWYWLVDGLNEAGYTTNLVNTAKVKQYSGLKHTEDKYDAYWLAHLMRLGILPTGYIYPREQRAVRDLLRKRGQLVMHRTTHVLSIQNQYWRNTGIKLKVDYIKRNNDYLEEFENENIHLALVSNYHVMQALEEQIRKIEKQVKRQIKLRPEYELLLGVDGIGYILALTVMLETGEISRFKEVGNYASYCRCVESRHTSNSKKKGEGNGKNGNRYLAWAFIEAANCAKRFSEKARRFHQKKMAKTNNVVATKALAHKLARACYYIIRDRVPFDENKLFG

SEQ ID NO: 218960 - protein, 403 aa, unidentified
MKSVLSIDVANGKSEVLLITEHGEVLIEPYEVNHCLSEFNLLKNKIDNYKLDDLTIFMESTSTYHLPIQRFFTNNNYNVQVINPILGKNNTRNLRKTKTDIEDCYNLADLFFKNTVKIHTKNMNDIYSSMIELSRQEKHLTESLVRSKNRFKQIIANAFPEYIKCFTANDIFGKTSLNFIKEFPHADIIKEKRIDALTNNLYKSSKNGCSYNKCLSKAKKIKELANNSYPGINVDSCEVNNLINIVDVISYNGSKLNDVKQDIVKLAKQTPYFNIINSIYGIGETSTAQIIAELGDINRFENIKQLNAFCGLDPTIIQSGKSINYHGPISKRGNRNARKILFITCCSIIRASVLHNMDNEILLYYRKKQAENKHFKECIIACSTKLLRTIFAMCKNNSLYVQK

SEQ ID NO: 218961 - protein, 433 aa, unidentified
MNDNEIIRHQQFCQLKEVIRGSDQHLIIGIDVAKEKHHAFMGTATGKSLLRRLIFENNFEGFGKLMTHVEAVKVQNGLPLSVFGMEPTGNYHKALGSYLINGGHQVVLVAGQAVKNNRILLDGRWDKHDTKCAANVADLISQGKCLFYDSPPEAIVQLRSLLSFRKRLKKEEHSLRMRIRNSLLAKHFPEMDRYFGQCLSENLSIVYWCLDPKKIAAMDFGRFFQLVTTRERGLAQQRRLKAIWQVAAASIGCAVDRASQFEAQVLVEKILQVQKEIKDTQQLIETISQQFMEYHLLLTIPGFGPYVASLVLAVIGDAWRFDSARQVLKMAGFDLSAERSGKSSKKAVPVISKKGNAALRYGVYQAAFIASTRNIDFVEYYTNTLRGREQERGIKTKMRVKLAAKMLVIVYPVKSLLHLFNWGLDFNEKTRGV

SEQ ID NO: 218962 - protein, 328 aa, unidentified
METINILLPWLGIDVAKKTFNVVLLRGEKKKHKQFANAAPGFAALRDWLTKQGVPQVWACLEATGSYSAALAHDLQQAGHQVSLVNPARIKAYGQSQLQRTKNDRADADLIARFCQATRPQLWTPPPPQQHELQALVRHLDDLLDTRQQLQNRLTDGPQVPSVLVSLRQVIAHFNEQIAQVEAQIQQHVQRHPDLQEAHDLLVSIKSLGSRTATVLLGEIERLRSFRHAGEAVAYAGLNPKERQSGTSLKGKTCLSKIGNARVRKALYLPAINAIKYNPIIKRLAARLEKRGLCKMAIIGAAMRKLLQLAFGVLKTGKPFDEKHAFAS

SEQ ID NO: 218963 - protein, 361 aa, unidentified
MLQQSNNISFEGQNIFAGFDVHLKSWQVTLLSDTVPLKTFVMKPNPDELSNYLHRNYPGASYHSAYEAGFCGLWAHHRLRSLGIDNMVVNAADIPGTQKDKMQKEDKRDSRKIAIALRAGTLTPIYTPLESTLNDRSLIRSRKTLTQDMGRFKTRIKSFLYFFGIELPDEFKDPNKHWTKRFMSWLEEIEMMELSGKQALMALVQEAQAQRELLKRVTKDIKSLADSDKYNEQVRLLRTIPGIGLINAMFILTEVEDINRFPNADKFASYIGLIPMSHSSGEKDKIGSITFRSHDYLRSAFIESAWVTLRMDPAMLLSYQNLVKRMEPNNAIVRIARKMSNRTFHVLKQKEDYQLSITGNP

SEQ ID NO: 218964 - protein, 457 aa, unidentified
MRHRGRRTKGIEEAHPFAGMSQVNKDAAGVDIGAEEIVVCVAGDETTQIVKAFGNYTVDLQAIGKWMHDHRVKTVAMESTGVYWIPLFEVLEGMGFECLLISSRSLRRVSGRKSDIQDAQWIQTLHSYGLLESSFRPQAELVALRTLLRHRNQLVEHRSPHIQHMQKALLQMNVQLSQALSDITGETGLRIIRAIVAGERDPQKLAGMRDRNCKKSEEEIGQALTGTWRDEHLFIVKQSLEMYDFYTKQVEECDAEIDRLYALTRPDWGGKEVKPLPQKKRNSHSKNAPQKQEEIRGHLKRISGVDLSVVDGFGVSLAQTVIMEVGTDMTKFPSEKHFCSWLGLAPKHEISGAKVLKNKTLKTKNRAGQAFRMAAQSVKKADCVFGSFYRRLKSRLDKAQATVATAHAIARVVYRMLKYQVEYEQIDVEEYEQKYKQQQIKYMKKKAAKFGFQLIPA

SEQ ID NO: 218965 - protein, 452 aa, unidentified
MSKTKSKSLEVALPIIHPQAAGLDIGATEIWACAPTDPATLTVRSFGTFTPDLHGLADWLKVAGVQTVAMESTGVYWIPVFEILEACGLEVYLVNARHIKNVPGRKSDVQDCQWIQRLHRHGLLSASFRPEAEMRALRAYLRHRAMLLEYRAAHIQHMQKALQQMNVQLTQVLSDITGVTGLEIIRAIVAGGRDPVTLSRFRNPRCKSSSDDIAKALTGNYRAEHVFALQQALALYDFYSQQLQACDQQLEHQYSAIKPTFDGDLPPLPPDPKVNSHGKNAPTFDVRGHLYRLTGVDLTVVDGLDDSSAQTILAEIGTDMSKWPTVKHFCSWLGLAPHNDITGGKVIKSRTMPVHNRAAQALRMAAQSLNRSQSALGAFYRRMRARLGGEQAIVATAHKLARIIYYLLKHHVPYQPVTAQVYDQRQRDRELKSLQRKATQLGYSLVQLPAPS

SEQ ID NO: 218966 - protein, 458 aa, unidentified
MKIRLGVDVACRAAHQASAADERGEMLFVGHRFRTDPDELDKLWARLPEGCQVMVVMEPTRNAWVALAAWFRRHGAEVVMVPPEQSADLRAYYNKHAKTDRLDSRVLARLPLLHPEGLHMETTLGPGDALKRAVKIRSGLVHRRSTSMARLDALLEIMGPAWIAALGSDMTMTALRFLSRYGHPRKVKRLGTTRLAEFLSRSSRRAWGPERAAALMEAAETTLRLWGEDGMDFDELAADIATEARMALAADEEIKSLDKRITALYEQVDPDGIVRSAPGVGAVGAPQIAGRLGDATRFANLAAVRSFAGLVPHQDASGVAARVGGPTKAGDACLREALFMAADHARKTDPTLAARYHRLMVQNGKHHTSALCTVAAVLLTRIAACLRNNTPYQLHDTDGTLITEAQGRAIVKERYTIPPETRASRRQILAQTRQPRRNERAKTGVAKRSEAPLVPQPA

SEQ ID NO: 218967 - protein, 468 aa, unidentified
MTPHEGQYQFDASKSQPTQLTNAEQYQQLLQPTESNPNMSNNNNNTLPNWNQRKAFAGFDWAKETHQVVIIDNNANVLLKFKFKHTPDGWAQFREKIAPWPGLAIVSELTSGLIVEQLITSGLTVYGLNPACTAALRQCQKPSGNKDDEVDARALANGLRQNGQHWPVLSLPAEEHHALQQELHLLTRDEIALIEQRTALINQLQTTLLDYFPTLLEVFTDWTVPSTWDFVHQFSTPEKLLKAGPNKWKAFLCKHRMWREELGPKRIESLKKADKLCGSNPIISAKSFLALKLISMLKLIEAQLKDYRHQIQVLFDKHPDQPIFNSLPGAGPKLAPRLLAETSGKLDPDGPQSLKCRAGTSPVRFQSGKINKTQIRRACDHTLRATVHLWSDLSRQSCPWADAYYQHHRNKGKTHAWALRCLGQRWLNILYKMLQTHTTYDETFHTNNQIKHGSWVPQPQSNPVKPTT

SEQ ID NO: 218968 - protein, 344 aa, unidentified
MSNLDTCGIEISAKELVVRLRRGEGLQPLRNFTNTPEGHLIILRYLRRAGRVVRVCMESTGLYGLDLALALSGQEGIEVMVANPRAVRHFAHALMKRSKDDQIDAGVLEQFAVHMPFKPWQRPSVAMLALHALARRLRELVEMQTAEKNRQHAAGLSQATPPVVRRDLARSLRAQKRALERLTRQARKLIAQDPQLTERFARLDSVPGIGETSAVQLLGELGVLAPDREARQWVAYAGLDPRPCRSGTSLHKKPRISKAGNKHLRHALFMPALVAVQHDPHLGAFYQHLLAQGKLKMQALVAVMRKILHALHAMFQTHQPYDGSKLFRLNPAPAQEVTHALVAS

SEQ ID NO: 218969 - protein, 371 aa, unidentified
MPDVSSNAPTDVRLWVALDVHKLSIVAASLPPTGGQPEVCQIETTRLAVRRFIERLGGPHGLAVCYEAGPGGFDLLRLLTELGVACDVVAPSLVPVRAGDRIKTDRRDAKKLVRLYRAGQLSYVAPPTPETEGLRDLMRCREDLRRARTAARHRISKQLLRHGRIYRDGRSQWTKMHRAWIARQRLADELAQAALDQMLLHLDGLDRQLDALDRDLERIAASERWGAAVEILTRFRGISTRTALGLIAEIGDFARFSHPRELCAWLGIVPCEYSSGQQRHRGHITKTGNDHARRLLIEAAWAYRHRPRRPDRGRQPDARAWQAQIRLHRRYRHLTEHGKRSTVATVAVARELAGFLWAAATDQPLLLGSGA

SEQ ID NO: 218970 - protein, 349 aa, unidentified
MDYRVYCGVDFHARQQTICSLTTEDGVMSTHELKHQNKAELKEFYAQFSGPVLVGLEASGYSPWFEQLLEELGHEVWLGDATEIRRRARRRQKNDRRDAELILDLLIHNEFPRIHRPTPTSREILRMLRYRHKLVKIRTIIKNSLQALSIQSGLSLRARLFTRTGLEQLRATTMSPMMEYQREQWLAALEPLNQRIAETVNWLEQQAAGDQRIERLRTHPGIGLLTGLGLVHTLAPISRFSNQRKVAAYVGFDPKERSSGEKKRYLGISKAGSRVLRFLLVEAAQTACKGDPELKRFYLRLLHRQGKAKAKIAVARKLLVRSYILLRDEIDYAEFNRRAVAARFAREVA

SEQ ID NO: 218971 - protein, 458 aa, unidentified
MQNKQLNGPDQSQRPEFLQINLNAAGIDVGSRNHYVAVRQDRDKQPVRMFDAFTADLYDLADWLEACGVETVAMESTGVYWIPLFDVLEQRGFEVKLVDPRRLKSVPGRKTDVVDCQWLQQLHTYGLLSGAFRPPECIRQLRSYLRHRSMLIEYAAHHIQHMQKALTQMNMKLQHVLSDITGKTGMDIIRAIIAGERDPLKLAELRNYRVRADKETIAKALQGHWQDEHLLELTHAVELYDAYHEKVAECDQRIEAHLNTFEDRSDGEDVERDPRKRTQQHNAPKFDLQTYMYQMTGVDLTKIDGIDGYTVLKLISEIGLDMNQWPTAKHFASWLGLCPGSKITGGKQKSSRSKVSASRAAAALRLSAGSLHSSKTALGAYLRRKKAKMGSPEAITATAHKLARLVYAMLKYGRDYMGAGQDYYERQYRERVLRNMTRTAEQLGYKLVMIADPDLEPA

SEQ ID NO: 218972 - protein, 347 aa, unidentified
MNFYTQQHKHYCGIDLHARAMYVCILDEQGTKLVHKNLPTTPEAFLRLIAPYREDLVVGVECMFTWYWLADLCSQEGIAFVLGHALYMKAIHGGKAKNDKIEAHKIAVLLRGGMFPQAYVYPSEMRATRDLLRRRCHLARKRAELLAHIHNTNSQYNLPEIGKRLANKSNREDVADHFPDPSVRKAIEVDVALIDQYDQLLGEVELYLTRSAKAPDVQPFARLQSVPGIGQILALVILSEIQDIARFPRVQDFVSYCRLVKCAKESNGKRFGTSGKKIGNVHLRWAFAEAAVLFIRQSQPGKEYFAKLEHKHGKAKALTVLAHKLGRAVYYMLSREHAFDLKRFVTA

SEQ ID NO: 218973 - protein, 372 aa, unidentified
MRKNSSNQQSWKAGRKMLKVAMTIGIDLGDKTSRYCRLEGNGGEVVEEGSVVTTTKAMTQVFGRMGRCRIAIEVGTHSPWVSRLLKSLGHEVMVANARQVKLISASSRKDDRLDAQTLARLARVDGQLLRPIQHRSEKAQQHLLKIRVRATLVEMRTSLVNAARGFTKAAGERLPACDADAMGVEQMEELPAGLQETLKPLLEQVESLTEKIKESDAQIEQIARTEYPETYVLRQVSGVGNLIALTFVLTVEDRQRFQKSRDVGCYVGLRPRRSDSGESQPQLGITKEGDNYLRKMLVQGAHYILGWRGPDTDLRRWGMKLAARGGKNAKKRAVVAVARKLAVLLHALWVSGEVYEPLRNSNAKQRSKRRAA

SEQ ID NO: 218974 - protein, 400 aa, unidentified
MYDISDVDVFFALDVGKTAHHGHGLTPAGKKVFDKPLPNSEPKLRAVFDKLTAKFGTVLLIVDQPASIGALPLTVARDAGCKVAYLPGLAMRRIADLYPGETKTDAKDAAVIADAARTMPHTLRSLELTDEITAELTVLTGFDQDLAAEATRTSNRIRGLLTQFHPSLERVLGPRLDHPAVTWLLERYGSPQALRKAGRRRLVEVVRPKAPRMAQRLIDEVFDALDEQTVVVPGTGTLDIVVPSLARSLGAVHEQRRALEAQIEALLEEHPLSQVLTSMPGIAVRTAATLLVTVGDGTSFPTAAHLASYAGLAPTTKSSGTSIHSEHAPRGGNRQLKRAMFLSAFAALHDPASRTYYDKCRARGKTHTQALLRLARHRISVLFAMLRDGTFCEHRTPSLA

SEQ ID NO: 218975 - protein, 344 aa, unidentified
MQITTIGLDLAKNVFQVHGVDATGQVAVRKSLRRAQMLPFFAKLPPCLVGIEACGTSHHWARELIKLGHEVRLMPPAYVKPYVKRGKTDAADAEAVCEAVTRPTMRFVPVKSPEQQAALSMHRTRDLLVKQRTQLINMIRGLLAEFGVDIPKGLERALLMARQIVDGKAPDVPLEAAKIVGTLSQQALDTHVRLREIDRDLAVWLRGNDVARRLTTIPGIGPVTATALAASVTDPHQFRSGRQFAAWLGLTPLQKSSGGKERLGRITKMGDKYLRKLLIVGMTSLVRRAKYNPGKIDPRLADLLARKPARVATVAMANKTARVIWAIMARGETYRTGHQPALVA

SEQ ID NO: 218976 - protein, 340 aa, unidentified
MKVMIGVDPHKGSHTAVAISEGEVELAKLKVRATRRQVDQLLDWAAPFDTRTWAIESAGGLGYLLSQQLVGAGEEVLDVPATLAARVRVLGTGRSNKNDPNDALSVAVAALRAPRLASVERADHVGVLRLLAKRNIDLGRSRNRTACRLHALLAELVAGGIAKEINAPSAQRLLETVKPAGPVERARHALALEHLEDLRRLDEQMKASKQRIIAAVDAAGTSLVQLFGIGPVIASMLIGYSGDVRRFASRNHYAAYNGSAPVEVSSGGRVVHRLSRRGNRQLNHALHMAAISQIRHAHSDGRAFFDRKVAEGKTKKEALRALKRRISDAVYRHLLLDAAG

SEQ ID NO: 218977 - protein, 392 aa, unidentified
MIYVGIDVASDKHDFFVMNDQGEIYTKHSVTIPNTDVGYKKLHNSIQEFCGEANDSEVRIGLESTGFYHRNILAFLLSKNYSIMVINPMLVNLYKKSRKVHIAKNDNLDAMYICNYIMEPSVEFKPYTFISYHTEALKALSRERFAYVENMRLAKINLYKLLQQTFPEYLKLFSNVYQGSALDILEKYPAPSLLAKAHISTVAKMLHGKCKASASELIHAAKTSVGIKSEHLYFLISQGIKRLKSVSFGIGEYNEQIKRYVDTICPVILSIPGISYINAGLILGEIGDINNFKNSDRLVSFAGLDLIVYESGKYKAIHTSISKKGSNFLRYALYQVARVCWIHDPMFNKYYLKKQSENKHYYVILGHIQKKMVKVIYSVLKNNKPYSPQITI

SEQ ID NO: 218978 - protein, 336 aa, unidentified
MDHSTVFAGIDYATAFVQVCVLDPKGRQLGNRRCPNDWRSIADYVETFGTQVRASIEACNGAASLAEELLQHAGWSIDLAHPGYVERMKQNPDKTDFTDARMLADLVRVGYLPRVWLAPPKIRELRRLVRYRQRLVDQRRAVKLRIGALLRDHRIKLPAGRPWTLCWRAWVRALELPEQSRWVLDRMQEELHITEKRVVIAEERLHRVTKSDVIVQRMQDIAGIGLVTACTLRAEIGDVRRFRNGKQLARFCGLTPRNASSGTRQADAGLIPACNRQLRATLMEAAHRLKRLHPRWQTLASELRRHGKPGSVIAAAVANRWVRGLFHELMEIRAAA

SEQ ID NO: 218979 - protein, 407 aa, unidentified
MYNAVGIDVSKGKSTVAVLQPGGTVVRKPFDVAHSSCELKSLIDYIQTLDGETKVVMECTGRYHEPILRALSAVGIFVSAVNPHLIKNFGNNTIRKVKSDPADSRKIARYTLDNWANLRQYSSMDTTRAQLKTLNAQMDFFTKQKVAAKTNLISLLDMTYPGVNDLFDTPVRDDGSEKWVDYATSFWHVDCVRKIGLKAFTKRYQAFCKRHGYNYQKDKPEELFNASKELVAVFPKEQEYRDMIQMSIQQFNIISANVEHIRQKMNRLASTLPEYNTVMSMRGVGATFGPQLIAEIGDISRFNHREALTAFAGVDPGVNESGKFKSTSNNASKCGPSRLRKTLFLIMSCLLQTKPVDDPVYRFLDKKRSEGKPYQVYMTAGANKFLRIYYGKVKECLKNQTQAEVDK

SEQ ID NO: 218980 - protein, 343 aa, unidentified
MQTITTIGLDIAKSVFQVHGVDAGGQVVVRRQLKRRYVLAFFQKLTPCLVGMEACASSHHWSRELQALGHTVRLIPPAYVKPYVKRQKNDAADAEAICEAVTRANMRFVPTKTLEQQSGLVLHRARHLFIRQQTAVINAIRAHLAEFGIVATVGRHGVEELLNVVADPNDKRIPEIARACLSALGAQLRGIKEQILEFDRLIRAWHRSNEISMRLDEAPGVGPVLATAVVAAVADPKSFRSGRNFSAWIGIVPRQHSSGGKNRLGNISKQGDRYLRGLFVAGALSVIRYAKIHGTKHRPWLTALLARRPTKVAAIALANKIARMVWAMMARGERYKEPVAIAR

SEQ ID NO: 218981 - protein, 415 aa, unidentified
MEILYSHCAGLDVHKKTVVACRLRVDERGHKVKEIETFGTTTVEILRLSDWLLAGACTHVTMESTGEYWKPIWNLLEGNFELLLVNAQHIKRVPGRKTDVQDAEWLADLLQHGLLKASFIPPLEQRDRRDLTRQRTQLVRDRTRVLNRIQKVLEGANIKLSSVVSEISGVSSRAILRELVKDQLNPAQLESLVHGRLRQKVSELKQALTGRVRAHHRFLLAQHLAHLDFLEEQIAAYTQEIEQVTAPFEELIALLDTIPGVARTTAELILAEVGADLSRFPTADHLASWAGLVPGNNESAGKRLSGTMRKGSQWLRIGLTQAAQSAARHKNGYLSALYHRLASRRGKKRATMAVAHAILVIAYYMIQRREPYHDLGANYFDERQKVSTANRLTRRLEKLGYQVVITPPATAPLTL

SEQ ID NO: 218982 - protein, 352 aa, unidentified
MPIVADNYEIVIGVDTHAAAHALCVVAAATGAVQDKASFPASPAGLDRARTWIAHRVGQQAALVVIEGIGSYGAGLSDRVLAAGFPVAEPSVMGSADRRGVGKTDDLDAARIARSVLSVDIDRLRRPRADGSRVAMRVLVVAREQMTCERTRTINALTALVRTVELGVDARKSLTYSQLKEIATWRARSEDATTATCRAEAVRLAKRIRALDAELVDNRKSLDALVKTNAPELTAAVGVGAVVAATVLIAWSHAGRVRSEAAFASLAGTCPVPASSGNTVRYRLNRGGDRRLNRALTTVVIVRMRVDPQTRTYVERRRGEGRTTKEIMRSLKRYVTRQLYRTLATAHPILES

SEQ ID NO: 218983 - protein, 366 aa, unidentified
MKKITTRTVCRISKLQDRKLTIGLDVGDRSSFYCVIDGKGEVILEAKVATRPEALKGVFSRMPRSRIALETGTHSPWISRLLSELGHEAIVAHARDVRLIGESRRKDDKIDAQTLARLARIDPQLLSPIQHRSAEAQADLSVIRARYALVRARTALICAARGLTKSFGERIRGRNPKAFRPEMGETLSRQLRIALTPLLNALETLTERIREYDGQIEQLAEEKYPEVALLKQVKGIGTLIALTYILTLDDPRRFAKSRDAGCYVGLQPGRRNSGQSEPQLHITREGDSYLRMVLVQGAQHILGPFGEDSDLRRWGLKLAERGGKNAKKRAIVAVARKLAVLLHHLWITCEAYEPLHNTRKHRLAAA

SEQ ID NO: 218984 - protein, 334 aa, unidentified
MTTWILGIDISKRKFDVALSMGEKFKTKAFPNTPTGHRALLDWLARHDVDHIHACMEATGSYWETLATFLHDEGHWVSVVNPAQIHAFAKGLLTRTKTDRQDAQLIARFCEAMKPGFWQPRPDEERALFALIRRLDALKGMRDQERARLQEAHEAVAEEIEGHIEGLDRAIRELEERIRDHIERHPDLRDKRDLLASIPGVGEATAHQILSRLSVLSLLGSAKQWVAYAGLSPGERSSGQRQANSSGMVRLGDARLRKALYFPAMVAKKHNPVFQRFAERLRMNGKRPKQIVVACMRKLLHIIYGVLKSGQQFDSSCYGMPARAISELVVTRHG

SEQ ID NO: 218985 - protein, 429 aa, unidentified
MNCTQNKKIEQVKETTMIVGIDVGSEKHYFRAFNWRGIELTRKPVAFSNSMEGFNSFYNTIVELMQKSELEEALVGIEPTGHYWFDLGQFMGEKDIKFVMVNPHHVHKTKELDDNSPSKNDRKDPRVIAGLVRDGRYFYSYMPTGAYAELRNASNRRFVLVEEQTRAKNRLQKWIAVYFPEYKGIYTHIDAKGGMLVLKKAPTPEEIVRLGVEGIIKIWKDAKLRGNGHKKAMLILAAAMRSIGLKAGLTEARMEIQDLIEDYELQTKRLERVNDLIKGLCQQVRYADKLLEIKGIGITTVAGFIAEVGDITRFDSTKELQKLAGLELVADSSGKHNGKTKIRKRGRKRLRYLLFEAAISVVGKNEEFKEIHRYYTTREKNPLKKMQSLIVVACKLIRVFHAILTKGIRYDASKMLKDIRHPGEQLKAA

SEQ ID NO: 218986 - protein, 342 aa, unidentified
MLLIGCDYHPSVQQIAMLDTETGDYGEHRLRHSDGEAERFYRNLKLQTPQIRVGLEATGHRRWFERLLTELDCELWVGDAARNATMRVRKQKTDRQDAQLLLKLMIEDRFPRVWISSQEDRDLQQLLWHRHRTVQMRTRVLNQLQSIAMNEGIQRRGGLRSVQGRKRLEQIPLGPWGARRRNDLLVLLDRMNERVNELTTAVQQEAEKRPEARLLMTHPGVGPVTALAFVLIIGNPERFQCGKQIGSYVGLIPTESSSGVHQRLGHISKQGNVLLRLLLVEAAQAAARFDPEWHKKFSHLAIRRERKIAKVAMARKLAVSLYWMWRRQRSSQMASKVGSYAG

SEQ ID NO: 218987 - protein, 440 aa, unidentified
MEEVTDEPLYRDRVCGIDIGKAELYATIRVPSEKDPARRASETRSFATTRRGVLALADWLRCWQVPAVVMEATGDYWKGPFYRLEAEGLDCVLADAKQVRHLPGRPKRDSSDSSWLAACFERGSVRPCFVATPEFRIIRLHTRYRRDLTEERSREKQRAEKLLESAAIKLSSVVTDLHGVTGRDIMNHLIAGERNPRALAQLARARARRKITELEHALEGAEFFTADLAALLKAMLDRIDRVNAEIARLTEVIETLLAPHEEQLQQAESMPGWGRRSAEDALAETGPDMTRFPTGAHLASWAGRTPLDNQSGKRTGRSKHKKGNRYLGAITGETAVSAGKTATREGARYRKIARSRGKAKACVAVGNTQMRVYHKLLSNPGTRYDDLGPDYYERQAATRRKIAYHVREIQAEGFEVTLCRPVPQPEPGPGQDSPPGSQAA

SEQ ID NO: 218988 - protein, 341 aa, unidentified
MAKIYVGLDVGSSSCHLVALNKDGEVLADRKFGTGEMNLLAAIEPLNGQVHVHLEASELAGWIRRVLRPHVAGVVVGHAKSSAWIAKDPLKRDQLDAYKLATLLRMGQVHEVFYADEDERTIFKQIVQHYDDVTEQEVRIKLKIKSRLRAQGVIVRGDSAYTPEGRAEYVAKVPSEAARDSIGQLYELLNHTLHAQSEARKLMRRESRKYPEIELFEEVPGIALVGACRFSAYIQTPFRFRSKRKLWRYCRLGITNRRSDGKPLGRQALDWNGNPRLKAFSRFAFIGAIKSKQDNAFKRAYQGTLETTHNKDHARLSTQRKILTVLWTMWRKKENYRDEKG

SEQ ID NO: 218989 - protein, 388 aa, unidentified
MPAAETPVAYLGIDVGKSSHSACALDAGGGVAFRAELANRPDDIDRLLERAGSGALVVVDQKRNIGALVLARAHAHGNPCAYLPGYAEKQARGMLPGIAKTDAIDAEVIARTALGVPRALRPAPEEPEGAASLRILSSQREFASSARTRAKNRLRATLLEADPALEGAVDPSSRWQVSMLAEFGGAAGCSAAGWRSFSNAARRAGAPAAGARRLWEALLASSRSGRRLPAGEDVAVRMLAREIASLDADIEELDSLVADSLAGDEVYECLLTVPGIGPKTAAALVTSIDISAFRGHDELASYCGVAPSDRRSGSSIRSTSPQHGGNRQLKNLLIFSCNSLIGTDNRFGRYYGECRARGMRHSKALKAVARKRLKVIYAIMRDAVPYAA

SEQ ID NO: 218990 - protein, 370 aa, unidentified
MNITHAVAGIDPHKRTATVAVVDVLGVLVISLSFAVTESGVAELLALLKSNCLNIDRIGVEGSGGLGRPVMLALAAAGYDVREVQANRTADRRRRRRRAKTDDEDAEAIARETLADPDLPPAGKDAAPSPASNELDVVRDWRESLVLQRVRLLTEAEPVLLSLPLALREQLPSTSRVLASLNRLTELENIDAGLSAGDRLKLDRLAASRADIVAISARIKDLDAQIPALLKALGCTLTAIHGIGVVTAMTLLTEIGDPHRFSTEGRFARWCGVAPVAMSSGEGDGPPRNHRLDLGGNRRANSVLHIVHVTQARCHPEAQAYMTRRAAEHKSKRAAWRAHKRQLANVIIRRMWNDADNLARANSTPSSAAA

SEQ ID NO: 218991 - protein, 360 aa, unidentified
MEVGQTMADHGVVGGVDTHKDLHVAAVVDELDRVLESRCFATTRHGYQQMLTWMRSFGQLRRIGVEATGTYGAGLLRYMQNAGVEVLEVTTPDTHDRRKRGKNDDLDAQNAAHAAVAGRRTVTPKSRDGMVESLRVLKACRKTAVAARRVALQMIHNTIVCAPDELRETLRRMTRMQLIRTLAAWRPDLTDYRSVVSAYRITLKSLGRRYLELHDEIADLDTMIVAIVDELAPALVARNSIGHGSAAQLLVTAGDNAERLQSEASFAALCGASPVPASSGKTTRHRLNRGGDRAANSALHIIAIGRLRTDPRTKAYIAKRVAEGHSKLEAIRCLKRYIAREVFSLISQRKREINQGRNAA

SEQ ID NO: 218992 - protein, 350 aa, unidentified
MMIIGVDFHPEFQEIASVDTDTGEYQEKRLTHPGEAEQFYRSLACLGQPVRVGMEASGHGRWFEGLLEGLRIELWRGDATVIRAKRGRKQKTDREDARHILKLLTKDDFPRIWVPSWENRDLRQLLWHRHRMVQARTRVMNQLQAVAINEGLRCKKRLWREGGRQKLESFQLGPWASRRRRELLELLDRLTPTIEELSQAVEQEAEKCPEAKRLMTHPGVGALTALAFVLIIGNTERFRCGKQVASYLGLVPLEESSGNRRRLGHITKQGSSIVRFLLVEASQVTVRKLPEWRSKYVHLMMRRGRKTAKVAMARKLAVHLYWMWRKGWDYEPWKKFGSHVGQPGHRDGVR

SEQ ID NO: 218993 - protein, 406 aa, unidentified
MPLWFAGLDWADQHHDLVVIDEAGRQVGSRRVAHSPEGFTELQTFLLSITGPDRKKDLACIIETNHGLLISWLLETGYPVFPVNPKTVDRRRSASGAKTDLIDAYLLAKYGRSEFADLRQLEPDSPLIAELKALTRDQDSLIQMQTRLVNQLTACLKAYFPAALCLFTKLQQRSTLTFLQAYPTLEAAQAATVEHFITLLKQAGHPTPQKAAAKLFEILHQPQLRADAVTTRTKSRLMLALLRQLLPVVEEIAAYDQEIERLFLTHEDNEVFRSLPRAGKRLAPRLLAEIGDDPSRYADAMSLQALAGTAPVLYESGKYSKPHRRHACVKPLRNAMHQFAWQSTQAEAWAKDYYDRKRREGKSHSVAVRALSNVWARILFALRRDGTSYQTTTFEKAQSLHAPIAA

SEQ ID NO: 218994 - protein, 337 aa, unidentified
MNVTLIGIDLAKNIFQVCGVNQAGKSVFNRAVKRSQLLVTLRHYPDAVIAMEACSGSNYWGRELLKLGYEVKLIPPQHVKPFVKGNKNDRNDAFAICEAAQRPNIVFVKPRTLEQVDLILVHRIRERRIRERTALSNQIRGLLNEYGIVFRQGKTPFITELPEILATENNGLTVTARRYIRELLDELRTIDAAIKTTEKEVQAQAKNHPDAKRLTGIRGVAEMIATAVVSFAGDGSGYKNGRHFAANLGLVPQEFSSGGKQKLGSITKRGNSHLRRLLIQGAWSVIRYADKSNDRISQWALKLIERRGKHKAVVAVANKLARIIWAMLFYRTEYRPN

SEQ ID NO: 218995 - protein, 373 aa, unidentified
MYYSTVYVGMDVHKENFSLCCYTNEKEEAEYPQKVEAHYSKVLNYLEAMRFHYGDDVLFVCGYEAGCLGFTLYHELVAHNVKCVILAPTTMPVAGGKKKIKTDKRDAAHIARCLAHRDYSPVHIPTEQDEQVKEYLRMRDDHKLALKKVKQQILAFCLRHGYHYDGTKNHWTQAHLNWLRTLKVSGLYQEILEEYLLTYDYLTAKLERIDKRIEELASDEAYRENVGKLQCFLGIKTQTALSVITETGDFKRFPDACHYAAYLGLVPGEDSSGGDQHRLGITKAGNRHLRMLLVEAAQSYSRGRVGHKSKLLSTRQEGNAPAVIQYADKANERLRRKYYRLTLSKGKNANVAKTAIARELACFIWGMMTEHYA

SEQ ID NO: 218996 - protein, 346 aa, unidentified
MALFVGLDVSLRTISICIIEAKGKVVWEGKVLCEGPALVAALAPYRKKIKRVGIEAGPLSEWLFGILTECHFKAVCIEARHAHRFLSSRPNKTDRNDARGIAEMMRLGHFKAVHVKSRASQLLRTLLAARKTFVDHMLEIEQAIRGFLKVYGLKLGQVHRYNFSAKVKTLVADTPELSVAIAPLLEARDMMRKKKKEIDRELEKRARQDAVCKRLMTIPGVGPIISLAYKATIDDPARFRSSRAVPAHLGLTPRVYQSGEMDRSGHISKCGDGLLRHCLYEAANAHLRVTRKWSALRAWGVKLAKRVGSKKACVAVARKLAIIMHRMWRDDIDFQYGTAPQRLAKA

SEQ ID NO: 218997 - protein, 420 aa, unidentified
MITTQFTPPQAVLVAIDIAKNRHEVLIDPGAGMRRRRLSVLNNRAEHDRLVATLRDLGRPVIVGFEPTGNYHRVLAYRLISAGFETRLISSMALARTREALHNGWDKNDPKDAQVILHMLRIGATTVYSDPGYGRLNDLQELSKTHDMVSRAKTELWHRLLTHYLPLYFPEAERFHGNSRSDWFLALLEQFPTPASITVLSKEAFIEAAWDLVGRKVSKTRLLADIYETARSSTALPVWLGSPAIAMFRMVLAEGRSLLRQRDQIEAQAEALLLDDPDSARLRQLPGIGPIIALTILAEAGNLRRFGHHRQFLKFCGFDLATHQSGTFRGQTKLSKFGNARLRRSFWLAAQVAIRQRDNSFREHYGRYVAKDPENKHLRRKALTAVAAKMARVAHAIVRSGADYRPFFEQPVPSGRTSLC

SEQ ID NO: 218998 - protein, 343 aa, unidentified
MKLRVLGIDLGKTVFHLVGLDSTGRVVIRKKCSPTQLLAFTANLQVQLIGMESRSGSHFLGRALREQGHEVRLMPAQYVKPYVQTNKSDFLDAEAIAEAVQRPRMRFVPIKTEEQLDLQALHRVRERWVMRRTAVVNQIRSLLLERGLTLPKGRGYVDRQLPRILEDGELRLSGSFRVLLAQLKIELEQLTARIEEMDRVIQKTAKENEACQRLTEIPGVGPVTATALIAAVGNGSTFQKGRNLAAWMGIVPGEYSTGGKQKLLGISKRGNKYLRTLFIQGARSVLQQRDKQAPGLSSWLAQLLARAHQNVVIVALANKLVRMAWAVLCKNERYRAPVLAVTT

SEQ ID NO: 218999 - protein, 386 aa, unidentified
MQKGEVQMNATTIGVDLAKRVFAVCEGDSRGHGARSTVMKRDELLKWLSTLPAGTVVAMEACSEAHSWGRTMRALGLDPRLIAAEFVRPYRKNQRVKNDARDAEAVLTALHAPGMRFVALKTGEQQQRLAWHRLREGWKAERTALFNRIRGLLTEFGIVVEIGASKIRRKLALEGDEACPQSIRLMAHSVREQVAVLDQRLAECERQIARQSRNDPVVSRLRTRPGIGLLSADALVATVGDARQYKNGRQFAASLGITPRQHGSGGKTHLGAITRRGDSYLRSLLVQGARCVLLAALRLYKNKPDTLNRLQQWMVKLNDRVGYHKAAVAIANKHARQVWAMLARGEAYNPDAYKDREAAHANVRPGDIREASDYDLSTATLAAAGV

SEQ ID NO: 219000 - protein, 468 aa, unidentified
MGEIGIAGQNRCPRLAEDLETHGKFVLVNEVEGAGAGWPRVIAHPDSMKEGSPGAIHGVVTFTHPKHRQENPRMLYLAIDQHRKQLTVNLRNDAGDVILKRQVSTEWKRVREFMEEMQKRSVPEGGFVAIVEVCGFNDWFLKMLTEYGCRETVLVQPEKRSKNKTDRRDANALGELLWTNRERLLAGKRVQNVRQVVSPSERDAEDRQLTALRQRVGRLRTRAINKVQHLLLKHNLQQECPTKGIQAKKARKWLETLPLGTIDRLEMDQLLAQWELMDKQLEHLDRTIVERQAKNETAQIIASIPGAGSYGSLAIASRIGSIDRFPHARSLAHYFGLTPSSNNSGDATRRLGSITKEGSALVRFILAQIVVHVLRRDAVMKEWYRRIKKRRGAKIARVAVMRRLATIIWCMVKRQQHYQRGGAPATGNGSECVIVPNRNAFLEEIQGRSRNSKEKGRQGLETVAAARP

SEQ ID NO: 219001 - protein, 340 aa, unidentified
MNIVFMGIDLAKNVFQLCGLNQAGKPVYTRRVERKILLQTLVNIPACLIGIEACTGAFYWQREFEKLGHKVKIISPQYVKPFIRGQKNDGNDAQAIAVALMQPTMQFVPPKSPEQQDIQALHRARQRIVNHRTATICQIRGLLLDRGISIGAAISRARRAVPLILEDAENGLSIRMRRTIAELYELFIDLEKRINFFDKEIETVFRQSSECQRIAKVKGIGPKTATAVVAAIGNGQEFKNGRHFAAWLGLVPRQHSSGDRQVLMNITKKGDKHLRTLLIHGARAVVRVATNNNDGSLNQWVNQLKERRGFNKTTVAVANKNARIIWSILRHETEYQPALN

SEQ ID NO: 219002 - protein, 445 aa, unidentified
MAKQRGKRKKDAKADATEGLPPLNLHAAGIDVGSAEHYVAVPSDRDAEPVRKFGSFTADLHRMARWLKDCRITTVVMQSTGVYWIALHDVLESHGFEVNVANARHTKTLPGRKTDVQECQWLQKLHTFGLLNNSFRPPEEIRTLRGYLRQRENLVAAAATCIQHMQKALTEMNIQLANVISDISGTTGLAILSDIVRGERDPYKLAMHKHSRIRASRQEIARSLEGTWRQELLFVLEQSLDLYQTYQQKIQTCDERIDGQLRSMEPRIDPMSEPIPEPRRGKDARGHQSGFDLRGQLYRITGVDLTRIDGIEVQNAQTIVSEVGVDMSRWKTEKHFASWLGLCPDNRISGGKVLKRGTRHVVNRASTALRLAALTLLRSQSALGAKFRQLRSKLGAPRAITAMAHMLARLVYRMLKFGHDYVDRGVEFYEAKYQQHQLARKSHED

SEQ ID NO: 219003 - protein, 457 aa, unidentified
MPARRKKPRSGAASPAHTIDPNSAGIDIGATEIYIAVPADRDPHPVRKFATFTEDLLAAADWLKQCGIKTVAMESTGVYWIPLFQILEAGGMKVCLVNARHVKNVPGRKSDVCDCQWLQHLHSAGLLRASFRPEQQICAVRSLVRYRDSLVQLSAMHLQHMQKALDQMNLQLHHVISDLGGKTGMAIVEAILAGERDPHQLATLRDPRTKASKETIAKSLVGDYRREHLFTLRQSLTGFRQNGQLIADCDVEIESLLKEFSSGDGPGAEAVPEPQAELKRKPRRNEMNFDLRTQLHRIFAVDLTEIPGIDTLTAHTLFTEVGRDLSKFANVAAFTSWMGVCPDNRVSGGKILHAQTRRVNNRVAKALRMAAQALSRSHGWMGQYYRRMRAKLGGPKAITATAHKLARIIYHLLTTGQAYDESVFAQQEAQNNQRNESRLRHQARKLGFELTLIPTEV

SEQ ID NO: 219004 - protein, 427 aa, unidentified
MNCTQNEKLNQVSEQSIVVGVDIASETHYARAFDWRGVELGKVFKFGNSMEGFQSFSKWVDILKKKTKKNAVLVGAEPTGHYWFGLASYLKEQEIKLVLVNPFHVKRSKELDDNHPSKTDFKDPKTIAKLVIEGRYNEPYIPEGVYADLRIATACRLRITKELNGVKNRIQRWLKIYFPEYCKVYAKFEAVSSMIVLRTVPLPADIVALGAEGINKLWRDAKVRAVGMKRAKSLYEAAKNTIGCTNGSAAAKLEIDLLIEDYQNKKDQYESVMAVLEELCMQIPEVAKLLEIKGVGIVTVAGFVSEVGDIRRFQSPKQIQKLAGLALKENSSGKCKGQTTISKRGRSRLRAVLFQAVMPLVSKNAEFAEIHRYYTTRAKNPLKKKQSLIALSCKLIRVFYVILSKGITYDPVKLISDIQRPQEMLAA

SEQ ID NO: 219005 - protein, 342 aa, unidentified
MNTLYVGIDVSSKSNVVYLMLPNGDKHSNFSVANSHEGSTQLVKRILSALTSHSLDTVLIGLEATSIYGYNLVYFLREDATLAPFNRKIHVLNPKQVKKFHDAYNDLPKNDYVDSFVIADCLRFGRINKEVYMGDYRYKALQNLTRARFFAVQNLVKEKQRFMNVLFKKYSTMTQEKVFSDTFSTTALAVYDEFESAEALANMDLHELTDFIIEKGKNRFPDPDAVAKAIQKAARSSYRLPKTVNDSVNQVLSISITSMKALESQIKEFDKAIIALMELLPNVLISIPGIGPVYSAGIMAEIGDINRFDNQASLAKYAGLAWKQHQSGGFEAEVTRLIPSGN

SEQ ID NO: 219006 - protein, 424 aa, unidentified
MNKLLSTLFVGIDVSSKTNSFCALDFSANSLIYKTISNNQPGARILIDSVIKCLKDNNLKFVIFALESTSIYSTHIANMLSTDEQLMPFHPFAYCLNPKTIKNFRKSFVDMDKTDTNDAYVIADFARCNKITSKPWRGPQLLALQRLTRYRLHLAQSLTREKTFTVSNIFIKFSELAILEKDTRPFSSNFGATAKAVLTEFLSLDQIIYSSLDDLVNFIISKSKNRFANPELTAKLIQKAARDSYRLDKVLYEPINVTLASSFNIISALEKERDIIDKSIAKNLKGFSENQVLSLQSIPGVGPVYAAGIIAEIGSIDSFRSHDALAKFAGITWRKNQSGNFNSSNTRMTKTGSKYLRYYLFEATQSVIRHIPEYKLFYQKKCSEVPNHMHKRALALTTRKFIRLIYALLSKNLLYSSSKVGERQ

SEQ ID NO: 219007 - protein, 357 aa, unidentified
MGKSIRNLSTVTRVGLDLAKRVFQVHAVDPKGEIVVARKLTRSQLIPFFAELPPCVVAMEACSSAHHWGRALIELGHEVRLIPPAHVKPYVRRNKSDQVDAAAIYEAMSRPSQRFVPVRSIDNQAELMRHRARELLAGQRTAALNALRGHLAEIGLIAPQGAHHAYGLKRMAADGFNENGEIVVPDCVRGALRSLVGQIDALDEAIGAIDRELAASVKADETAKRLMTIPGVGPVTASAIRATIQDASAFASGREFAAFLGLTPRQKSTGGKTRLGRITKMGDRYLRKLLVVGACATLRHRRGHSDALRLWASGMLERKTVKYKFNLTAVALANKVARIVFVLMTRGGQYDGRPVAA

SEQ ID NO: 219008 - protein, 346 aa, unidentified
MEHYVGLDVSLKLTAVCIVDRTGRIEREGVVPSEPEAIAAFIKSHAPHVARIGLETGATATWLWTELKELGLPVICIDARHAKAALKMQINKSDRNDAVGIARIMQCGWYKEVRVKDLDSHAVKALLVSRALLVKIKRDVENQIRGLLKNLGLVIGRAKMNVFAVRAAELIEDRPELAAAVIPLLNTREVIERQIADLDRKVIRLARDHAQVRRFMTVPGVGPITALCYLATIDDPTRFKKSRSVGAYAGLTTRRYRSGETDWTGRISKCGDAMLRTYLYEAANVLLTRIAKWSALKSWGMRVAKRSSLRKAKVAVARKLAVILHRMWVDGTEFNWSSKEVAAHAA

SEQ ID NO: 219009 - protein, 404 aa, unidentified
MNAIGIDVSKGKSTVAVLRPYGEVVFSPFDVAHTGSDLRALADLIKKLPGETKVVMEATGNYFESIARYLHEQNIFVSVVNPVLISDFGGNTLRKPKTDKKDSIKIASYALTYWLDLKEYTPQEDLRKSLKLLNRQYQQSIKLKTMMNNNLISLLDLTFPGINKLFTSPSRESDGHEKWVDFVLEFSHCDMISKLTIKAFAKKYKKWSDKNSYHFTESSCEKIYAFAKDCVSSVSSDKAIVFSVVQAAKMLISATENCHAIQSEMNRVASKLPEYDTVMNMYGVGKAVGPQLMAEIGDPRRFHSRKAITAYFGYDSENNDSGQKTTRSNPMTKKGSGALRRTLFIIMQVLLQTKPQDNPVYDFLIKKKSEGKHYYSYINAAANKFLRIYYARVKEVLNVSEQMT

SEQ ID NO: 219010 - protein, 343 aa, unidentified
MQAVTTIGLDIAKSVFQVHGIDAEGKVLIRRQLKRRYVLAFFQKLSPCLVGIEACATSHHWSRELKALGHNVRLMPPAYVKPYVKRQKNDATDAEAICEAVTRANMRFVETKTPEQQSCLMLHRTRQLFIRQQTSVINAIRAHLAEFGIVAPVGRKGVEHLLAIGTDGSDQRVPEVTQACLAALGAQLRMLKAQILEFDRRILAWHRSNETSRRLDAIPGIGPALATALVASVANPKAFRSGRNFSAWIGLVPKQHSSGGKDKLGSISKQGDRYLRSLFTAGALAVIRYAKIHDTQHRPWLTALLARRPTKVAAIALANKIARMAWAMMARGERYREPVALAA

SEQ ID NO: 219011 - protein, 433 aa, unidentified
MQDVEDEPLFAERVAGIDIAKAGVEVTIRVPSDTRAGGRQQETRSFGTTRRELMALADWLRSWGVAKAGMEATGDYWKPVYFVLESQGLDCELYHAAQVRALPGRPKTDRADSVWLARITERGSLPSSFVPPEPIRRLRTHTRYRRHLTQARTAEKQRVEKLLEDGHLKLSSVISDIHGVSGRAMLEALIAGERNPKVLAQLARGSMRSKIARLEEALDCSFLTEQHAAVLAMMLATIDYYTAQIDELTAKIEVLAEPYLHQIEQLDAVHGTGRISAQDVIAEIGVDMTVFPTASHLVSWAKWCPQVAQSGGKRKGSNASGRGNPYLSAALGEISISTARTQSFLGAKYRRLVKRMPKKKALVATGNSVLTIFHALLSDPAATYHDLGPGYYEQRMNVRRQARNHVRSLERLGYQVTIQAINPDTGELLPATA

SEQ ID NO: 219012 - protein, 353 aa, unidentified
MEYIAFDAHKHYTLASVARPDGQLIREQRIAHERGALQQFLERCERGSPVAVETVGNWYWIVDEIEAAGCVPRLVHARKAKLMMGQINKTDKLDVRGLNQLQRNGTLPTVWIPPGELRDQRDLPRTRMVLVRPRTQLKNRIHATLAKYALHDLEVSDLFGARGRVLLRQRLELLPPCTAYTTQHLLEQVERLDHQVREFEQRLRALFKPTPPIQRLLTLPGVGLTLAVVIALEVGDVARFPTAEKLAAYAGTTPRVHASGGKTRFGPSRPDVNRYLKWAFVEAANAICLNRGRAPHRHVTRLYERVARRKGHQKAIGAVARHLAEATYWVLTKQAFYREPQPTTVSSTGDKRG

SEQ ID NO: 219013 - protein, 448 aa, unidentified
MKKRNIFQNRSQQLLRLFEKAGNRLKMMCVPIDYAKKDHMVMFCNGYGDILRKPFSVKNTLEGVKYLIDQVMRSCRQRRIKKQHVFFGGEDVNSYAENFANALRAKGFLVANVNAHDAKRQRETLQASTDRIDLMGIATMLLNLRAKCSPAQDGIYRNLRTLVRHRKKLVGMKTEVKNRVHTLVDRPFPGFLNEKNTGINPFSKSSLVLMEDRFSAQQIRRRQVTTLIKILKRCATPDAQSVAAKLHSYAAQVITTPNEYAATLQLSLQHHIKHYRCLQENIDQLLSEIALLLAQTQAAFLTSIKGIGIVLPAGVSSEIGNPFEQKPLNNLTSYCGIIPRVKQSGGIEGHTHTGRVSKRSNHLLKDYVVQSAFHIGIRGPQPLLQDYKRREAAGQHADFGIGRRFLRMAMCLMRSSQVYLPPKLRSPKTQMHERAGYYLTTLPLLRDK

SEQ ID NO: 219014 - protein, 386 aa, unidentified
MQKLNDLSRSLAPLEPDGTLIAVIEMSQSSWLVAGIVPGVERQPLKKLAADEIALLKLLHRWREEAEKAGRKIERTAVAFEAGRDGFWLARWLRTRSIEAHVIHASSVAVSREHRRAKTDRLDTELLKRAFLGWLRGERDHCKMVAVPTSKDEDAKRPNRERESLVGEQTRIINRMKATLIRLGIRGFNPKLKKAAGRLEDLRTPEDEPIPPNTMAELRRDMDRRRLVSDQIRQIEEARLDRLKQAPDDGPHAMLRLLARVIGVGIETADMLVQEVLARNMRDRRAIARYAGLTGSPDESGTKRREKGLARSGNARVRRGMIQLAWRFLIFQKNSTLAQWFRARTENARGTRKLMIVALARKLLIALWRLVREGVVPDGVVLRPTQ

SEQ ID NO: 219015 - protein, 294 aa, unidentified
MHPSGATRQVTNDKAGHKALLRWFSRLRVERIVFEATGPYHRLFERALTAAGLTFAKINPRQARRFAEATGRLAKTDRVDAAMLARLGALLQPEASVPKSDVLDELTELVAARRALVKDRTACLNRAKVLRIQLLKSQTSQRLRQIEAQMAAVDRLCLELVTSDQTLAERLVILPSIAGLGEARAVAILADMPELGEIEPKQAASLAGLAPMARESGQWRGKSFIRGGRAHVRQALYMPALLAMRFNEPLKTRYEALIQAGKPPKIAITAIMRKLIVLANALLRDAQPWTPAAP

SEQ ID NO: 219016 - protein, 331 aa, unidentified
MSNIIGIDVSKASLDCAYLRDLDQDKAKRKNCHNKVRCFASLIAWAEAKSELPVQALAFIIEPTHVYHEQLVQFLHNTGATVYLVNPGRVRKFAEGIGILSKNDLIDADLLTRYGLLARNLIAYAPVAQEVNDLRSLLNRLDVLERNLRSELNRQEKVGKTMVFHRLEQQSIARAVKRLKVEIITFKRAIRECVKSTPSLQQNFDLLHTIPGVGAKTAWIMMVILGSRAFRSAPEVASFLGLNPIEKRSGKSQYRRPRLSKSGSGNYRQKLYFPAMVATRKNPDIQALYERLLAADKTKMCALGAAMRKLVHICYGVVKNQTPYQAQTIPS

SEQ ID NO: 219017 - protein, 320 aa, unidentified
MPVDYLGIDISKSDFHAHLLQSGSSAKRTFPNSSAGYGQLQRWLSNRKASGVHACMEATGAYWIGLAAYLYDHSACVSVVNPARIKNFARSQMRRTKTDGVDAQIIAQFCQTQTPVLWKPPAKEILEIRAILAYRNQLIAERHRVRQLASTIYEARVVQDRTSSHIAALNDLIDGVDGQLHALIKQTPAIADAVQRLAGIPGVGQLSAAAIFAQLPLDQLRNSKAAAAYAGLCPSDRQSGTSIHGKSRLSKMGNADLRKALYMPAVSVLRTTSSLAQFAARLRSRGKPGKVIVAALMRKILTIAYAVLKSGKPYVEALNA

SEQ ID NO: 219018 - protein, 344 aa, unidentified
MTYYAGIDVSLRTVNICVVDGEGEQVAETKLSSDVQEIIAYLDELEFNIDLIGLEAGTLAQYLTYGLQAAEFDVVCMEAQQVKAALSAMRNKTDKHDARGIAQLLRSGWYSQVHIKSMESHHIRMLLTSRRAVLDKCIDLENEVRGLFKIFGIKLPPKLGHGSFDKTVRAVIEADEKLSHALLPMLDARLVLYETFRVLDNRTRHLAWGDEICERLMTAPGVGYVTALTFKSGVDDPTRFKRSRTVAAHFGLTPRRSQSGEFDFDGHISKAGDAEVRRTLYVAANSVLTRSSRWSSLKAWGMKLKKNRGHKKAVVAVARKLAVILHRLWIEETQFRWGTEGVRS

SEQ ID NO: 219019 - protein, 411 aa, unidentified
MEVMYPKSSGLDVHLKFVIACVYVVNAKGQSKAVKRRFGTTTSGLRELVSWLQGHGIEQVAMESTGIYWKPVYNVLHAHFDVWVVNAQHVSRVPGRKTDESDAEWLTKLMQYGLLNRSFIPDEWQRDLRDLTRYRTRLIQEKSSGVNRLHKILEDANIKLSSVVTDIQGVSARSMIEALIDDEMDVQQMANLALGTMRPKIPLLVEALTGFMRPHHRYMLQEILQHLDELRNRIASLDRQIQVVCAPYASLVERLDEIPGVGGRTAEIILAEVGPSVEKWPTSGHLASWACVCPGNHESGGKRYSGKRRKGQKWLVSALVEAAQAASRTKNTYLSAQFHRLRARRGAKRATVAVAHSILTIAYHLIQKPEERFAELGGDFFLNKNKEQEQRRAVKMLETLGFHVALIPAPA

SEQ ID NO: 219020 - protein, 323 aa, unidentified
MTRTICGVDISSTSLEARIGPHGALASFSNNPEGIAALAAFGLAHQVELVAMEATGGYEQRALALLSEQGLPVAILNPRAVRRFAQSMGLEEKTDAIDAGVIAWYAETRRPQPVCLSSASQQQLRALVIRLRQLTEVRTAQLNQSRLVTDPAVVALIDELLAVIARQIRELETSIAQLVAQDPLWRQFDQVFRSIKGVADRTVARLMAEMPEIGTLSNKKISKLAGVAPLARDSGKHQGQRAVRGGRASVREILFIVASVVGRYEPDFIAFQQRLSAAGKPRKVIRIALAHKLLVRLNAKAREVRQQHAAANCTMPVPVLVKS

SEQ ID NO: 219021 - protein, 347 aa, unidentified
MSQTLGTVAVIGIDIGKNSFHVVGLDGRGAIVLRQKWSRGQIEARLANTRPCLIGMEACVGAHHLSRKLKALGHDARLMPAKYVRPYSKGQKNDFRDAEAIAEAVQRPTMKFVATKTADQLDLQALHRVRERLVSQRTGIINQIRAFLLERGIAVRQGLRFLRSELPRILGAPPGVLSSRIVRLMEGLAEDWRRLDERIDCLSDEITALARQDAGCERLVSVPGIGPIISSAMVAAIGTGEAFSKGRDFAAWLGLVPKQISTGDRTILGKISKRGNRYLRVLFVQAAWVVLIKPQSWQRHGLKRWIEAAKKRLHRNVLAIALANKLARIAWSVLARGGRFEMRSAAA

SEQ ID NO: 219022 - protein, 460 aa, unidentified
MAKHQRKKSPAEQQLPAQLHAVNLHAAGIDVGAEAHWVAVPVEADPQPVRVFLAHTANLHALAAWLTLCGITTVALESTGVYWIPLFELLETQGFEVILVDPGTMPKNGRPKTDVHDCQWLQRLHTLGLLSAAFRPDDPVVVLRSYLRLRLTLLADAARAIQHMQKALTQMNIKLQHVVSDITGVTGLRIITAILNGERDPLRLAVLRDWRCKEDEATIAQALHGTWREEHLFALHQAVAAYEFCHQQIAECDAKINAQLLTFEDHSQGECLPPRPRKRHRNRLSFETRPLLHRMTGVDLTKIEGIDETTALIVLGEIGLDMSRWPSEKHFTSWMGLCPRMRVSGGRVLSSRTRPTANRAAAALRLAAASLHHSQSALGAFFRRMKARLGTPKAITATAHKLARLIYAMLKHGTAYVAESMDTYEQKYRQRVVNNLSRRARDLGYDLVAKREAVTQVGLG

SEQ ID NO: 219023 - protein, 410 aa, unidentified
MRVLHRRCAGLDVHKDEVVVGVRLVERRKIAREVRRFGTTTRELIALGDWLEELGVTHVAMEATGVYWKPVWHMLEGRFALILANAQQVRNVPGRKSDVSDATWIADLLAHGLISASFVPPRPLRELRDLTRTRRQVVGEVVRHQHRIEKTLQDANIKLSSVLSDPMGISGRRMLKAIIAGESDAGKIAELASSRLACPRGVLIEALSGRLSEHHRYLLGWHLRLIEEIEARIDEIDQRIAQQIAPFHAAVERVMGVPGIKATAAPAIIAEIGVDMSIFPSAGHLLSWARIVPRLDESAGKKRSRRVKQGGAWLKPVLVQCARAAVRTRASYYGAQYRRLKPRIGDKKAIIAVAASMLTAIYHMLRNATEHRDLGAAYLSRRQLDKAAIAQRLARRLRALGYQVDLRAAA

SEQ ID NO: 219024 - protein, 343 aa, unidentified
MYYIGLDVHKRTISYCVKDAAGHVHQEGKIGSTRRELDAWIKTLPQPRTIAMEATIFTGWIYDHLLPHAEKVKVAHPLMLRAIAAAKKKNDKIDAGKIADCLRCDFLPECHMTSTAIRDRRRTLRYRNLVLKQMVQMKNRISGLLMETGVSYNKQRLHKLSYFTELMSGNEEVNESIQPLLKLSRETIVRSQRLDYALVSSLERDPLLAERLERLRTIPGVGPITALTWALEIGDVSRFQSIKQAISYCGLCSAERSSADKLIRMPISKQRNKHIQQVLVEAAKLAPRYNHELALVYEREQKRGNKNRATLAVARKMVAYMLAVERRKQDFVPAEQLGGTAAA

SEQ ID NO: 219025 - protein, 345 aa, unidentified
MEITTVGLDIAKRVFQLHGVDAAGKAVLRRKLQRSEVLAFFKALPPCLVGIEACGTAHYWAREIRELGHEVRLMPPSYVAPYVKRGKTDAADAAAICEAVTRPTMRFVPIKTAEQQAVLMLHRTRDLLVRQRTMLVNALRGHMAELGIIAPQGIARVADLMAVLLGEDTTNVPALAREALRGLAAELEALDRRVKEIEVAIVRWHKDNEASRRLATIPGVGPITASAIVATITDPFQFHSARHLAAWIGLVPRQHSSGGKQRQGGISKQGDRYLRRLLVLGATAVIRHSRSKSTAEAGWLKSLLERRPARLVSVAQANKTARIVWALLVRGEAYRRPAAVPSGAA

SEQ ID NO: 219026 - protein, 344 aa, unidentified
MTYYAGLDVSLRSVNICVIDDQGTFVVETKLTSDVQEIIAYLDSLELDITSVGLEAGTLAQYLTYGLQSAGFEVVCMEARQVKAALSAMRNKTDRNDARGIAQLLRSGWYRRVHVKSLQSHHIRMLLASRKAVLSKCIDLENEIRGLFKVFGIKLPPKLGHGAFDNTVRDIIEVDETLSHALLPMLDARLALYRTFRELDNRTRKLAHTDPICQRLMSAPGVGFVTALTYKAGVDDPSRFNRSRTVAAHFGLTPRRFQSGELDIDGHISKCGDADVRCTLYTAANAMLTRSSRWSSLKAWGMKLARTRGHRRAVIAVARKLAVILHRMWIDDTQFQWGTEAARS

SEQ ID NO: 219027 - protein, 400 aa, unidentified
MMVMIGVDPHKGSHTAVAIDGAEVELAAIQVRSSSRQVEELLGWAAVFVERTWAVESAGGVGYLLAQQLVAAGERVLDVPATLPARARLLGSGRSNKNDPNDAYSVAVAALRAPVLPVVAPADHAAVLRLLAKRNKQLGSQRTRTACRLHALLVELVPGGISKEITLNRAARLLESIMPTNPVEATRHELALEHLDDLRRLEEQTRALHKRMDDAVKASQTTVSDLFGFGPVNSAIAIGYTRDVRRFASRDRFAAYNGTAPIEVSSGGRLTHRLSRRGNRQLNHAIHMAAITQIRHPHSPGHAYYQRRLAEGKTNKEAIRALKRRISDALFERLVADNKRHAGPGGQAGTTTHADAASLEPRQPALQVSHSRTRSERRGRRPNTRATRTARTRKPARTST

SEQ ID NO: 219028 - protein, 330 aa, unidentified
MTIIGIDVSKDKLDCAWLSDGVASKVKNKVFPNTPAGHQQLLAWAVKQSQAPLEALHVVMEATGIYHEAVAYALHQAGARVAIVNPAKIHAYSKSLGVRSKTDKKDSVIIARYGDSHQPRQWQPEPEAIRSLKALISRLEALDKDIQREKNRLEKAQIAQSSVEVLDSIQTVLQQLQSERQRIEDLINRHIDQHPTLKQDRQLLESIPGIGPILSRLMITLLRSHAFESAPQCAAFVGLVPCQHESGSSVRGRSRLSKTGNPMFRAKLYMAAVVSIQHNPDIKRHYERLLKKGKARMCALGAAMRKLVHICFGVIKHQQPYRPQAACVQA

SEQ ID NO: 219029 - protein, 342 aa, unidentified
MEKVTIIGVDLAKKVFQLHGAAADGSVVFRKKLSRLQFCKFMASQPACVVAMEACGSSHYWARQMARLGHEPRLIAPAYVKPFVKRQKNDVADAEAIVEAAQRPTMRFVEPKTKEQQSRAIVFRTREQFVNQRTELVNALRAHLYEFGYVAPQGIGHLPRLAEIVEDESADLPDLVRDICSALLDQIDQLSSRLAALKKTMDTLSKQAATSRRLQTMPGVGPIAALAIETFAPPMEAFKCGRDFAAWLGLVPRQKSSGGKQRLGKVSKMGQRDIRRLLIIGAMAVVRWASRRRAPDGSWLARLMLKKPRMLVAIALANKMARGIWAMLTKQEDYRNPATLPA

SEQ ID NO: 219030 - protein, 408 aa, unidentified
MNAVGIDVSKGKSMVAALRPMGEVALLPQEFLHTGVGLEQMAYAILALGEDTRVVMEATGRYHEPVAAALHEYGIYVCVLNPLYIKQSGGGSIRKVKTDKADAMKIAKYGLDNWMDLREYTPMDTVRQQLKLCSRQYNLYMKTVVSLQNNLISLTDKTFPGVSELFSSPERTDGHQKWVDFVMTFWHCDCICRVSEKAFTERYQKWCKRKGYHCSVEKALDIYASSCGHFTTLPKNDNTKLLIVTAAQQLLAGKTTLAALRAEMTRLASQLPEYETVRAMYGVGETTAAQLMAEIGDVRRFPRRSSIVGFAGVDPAVDQSGKHETQSTHTTKRGSPHLRKTLYQIVCTYLRKAPADEPVYQFLDKKHAEGKPYFVYMTAAQNKFLRIYYARVKECLEAFDAQQGTSQG

SEQ ID NO: 219031 - protein, 340 aa, unidentified
MQVNTIGLDIAKNVFQVHGIDGEGRAVLCRKVRRHRLVKLFESVEPCLIGMEACATAHHWARQLTALGHQVKLMPPAYVKAYVKRNKNDAADAEAICEAVRRPTMRFVPVKSADAQSALMLHRARHLLVRQRTAQVSAMRAHLAEYGVIAPKGIAHVRDLLTVLEDGASMLPDLARQTLMIIAQMIDALSQQIRKIEVELLGWHRASAVSQRLESIPGIGFITASALAATVGDARAFRSGRQFAAWLGLVPRQNSSGGKDRMGGISKMGDRYLRHLLVVGATAIVRYTKRKATAVSIWANRLLGRKPARLVTVAVANKMARIAWAVMARQEAYRVAPIAA

SEQ ID NO: 219032 - protein, 343 aa, unidentified
MVTYVAMDVHLNLIAAVWGRAKEKPRSLIVDNSPKGWEKLVRAVGPGELWGVYEASSCGFEVYDHFTKIGWKMSVVAPTHIHKSAHSRKRKTDLRDAKRLWDVLVAHGELGTELPDVWIPTQRIREEREIIRRRLSLAEHLTRVKNSIHGVLRMHKLKRPPALKSLWSQKYVAWLKGLMVSPSLGIHVRGVLGSLVRELEFLDEEICRLQAQVEELSLTEQYRGAVANMTQLDGVGILTAMTFLAELGDVRRFNNRRQLASYLGLVPSSYESGDDDDHKGHVTRMGPARVRKVLNQAAWTIIRKDPRWKDKYAPLAERRGALKAIVAIMRKLGIELWHRAQAA

SEQ ID NO: 219033 - protein, 337 aa, unidentified
MTIVGGLDLHRRQITFDYLDTATGELHRGRIAPADREHLRVWLDRVAGESGDLAVEGCTGWRFVVEELAAAGLRPHLAEPAETATARGRKRRAKTDKGDASWQRELLMAGTLPESWIPPTHVLEVRALVRLYVDLLGEYIGWRQRLHATLFHHGAPATAQLTAELLDRVELSPAGRDAAATALRQLQRLTAELDSLRRRLHRIAGRQPGCLALQSHYGIGPLTAIAIWEELGDTRRFSSSRAAVRHAGLDVTVYSSDTTRAPGYLSRQGPAVLRWALFEAALRAGNDKSPDHAYYLQVKQRLGTQRATLSVARKLARRCHHTLRALGDKAWAPAPLD

SEQ ID NO: 219034 - protein, 340 aa, unidentified
MKANSKFFIGIDVSKPFFDVSLMPVFEHKKQAIESAQFKNTDDGLKSFGRWLKNLKVTMDENTLVVIENTGIYHRLIWCFCNKKGLPLHIGNAAHIKWSFGIARGKNDKIDSVRLCKYACKEADTLKASPALNPVLMQLKDLMSSRTRLLSQVNSNKQYIREAKTSNDPKVQDAIEQAHLAAINGLTLSIKAIEALINGIIAENPALKNNYDLLITIPGIGHLTAIYLICCTTNFIAKITGKQLACYAGVVPFEHSSGISIKGRSRVSQMANKDLKKMLHLSALTVVKNYPEFRSYYDRKKAEGKHSMSILNAIRNKIALRVVAVVNNQKPYESNQLVAA

SEQ ID NO: 219035 - protein, 418 aa, unidentified
MDVVYTHVCGLDVHKKNVVACVITPEIKEIRTFSTMTDDLILLVDWIKSNGCTHVAMESTASFWKPIYNLLELEDIQTLVVNAKSIKNVPGRKTDVKDAEWIANLLRHGLLQGSFIPNRDQRELRELIRYRRSLIDERAREVNRVQKVLEGANIKLSSVASDVLGKSGRAMIEAMITGEENPELLSELAQRRLKNKKADLQRALKGLMGNHQKLMLAAQLRHIDYLDEEIGRLDEEIKRRMLPFEEDLELLDTIPGVARRTAETIVAEIGTNMDQFPSAAHLCSWAGLCPGQNESAGKRKSGKTRKGNKKLRSALVEAARAAGRTKNTYLSGQYHRIAARRGANRAAVAVAHSILMIAYYILKRRQPYMELGPTYYEERKRDTIIRQSLKKLESLGLKVTVEPRSLLIQRRHITVLQP

SEQ ID NO: 219036 - protein, 396 aa, unidentified
METLIVGVDVSKESFSVTGLDSGGARCFAEAFSMDADGFSKFLKTMTAQQADISAIVVGMESTACYHINLFSYLTAQGIRAIVINPLLIANFAKLTLRKTKTDKKDASTIAQFLFVHRDTINQMSISQDMQDMRDLARERESIAQLISATKTDIKRVLQTTFPELERLCGVYTGIMLAFLQDFPSARLIRMSKRQTIVKALEPRGQGNRISTFTADDVINLAKNSVGLVSPAKEVILRGKISTLLHLEERQVELTHMLTDYCNSLLVEDLKIVTSVEGISNGTGTTFLAELGNIKNFENHKKLIAYAGIDPTVYQSGKYQGTSKISKRGNKHLRRVLWLMTVNVIHHNNIFKGYYQKKKQAGLPYKKAVLATMHKLIRMLFAMLSHKQEYAKSLAS

SEQ ID NO: 219037 - protein, 474 aa, unidentified
MKKKNIFQNQSQEILSIFEMAGDRSKVMCVPMDYAKKDHVVMFCNGNGKIIRKPFSVKNSPEGKSYLIEQVTKSCRHHGIKPEHVFYGGEDCGSYADNFISTLRSENCLVAGVNACDAKKHRDNKQASTDILDLMGICKMLLSCKGNCSPAQTGIYWNLRMLVRQRRKLVQMMTGVRRRIHFIVDQIFPGFLDEKKSGIFPFSRGSLALMGNRFSVHQIRRRNRSTLSRFLARNLVHHADHCAQHLQKYTSQVLQPPEKYIATLQLALQQQVKLFACLQESIQQMEKEIAEHLAQTPGAFLTSIRGIGIVLAAGVCAEIGDPDKQKSLSQLVSYAGIVPRIKQTGGVQGKTQVKKVGKRCNRILKDYVVRSGCHIGINGPEELKLDHKRRGAQGQHADFGMSRRYLRMAMCLMRTSQTYLPKSLRDTRTPKKERAQYYILTWSTLREKWKRKNVLAHLFERKLIRQVITGSYAF

SEQ ID NO: 219038 - protein, 354 aa, unidentified
MLFVGVDVHKDTHTAVALSPFGEKVFEMKIGNEAEDFISLVKKTKVEAKKSGLIPSFGLEDVHSWGERLSSFLVEVGLPVRAVSPILVDHRRSKTTHPEKSDSLDAQGVAEVMIQKIDTLPIYTLSEEAKKAKQIRELSLEREWLVKERARLKNQLHILLHRIHNSGYCIKFKDPFSKKALRYWMRGVPKDTDVILEQRMKRAVRRLLDLREEIQEIEEELETIMKENNQTITTASGCGVVIAAEIIGEIGDINRFHSPGALAKYAGCAPREHSSGKTIRWRKTRSGNRRLNRSFHRMALSQISRSGNDAARTYFKRKISEGKTKAQALVCLRRQLVSVVWMMMKHGTEYRRSC

SEQ ID NO: 219039 - protein, 412 aa, unidentified
MSMSPSLFVGIDVSHKHNVVCALDDQAQQVKKMASFPNNLPGTEQLEQWIVEKMHIAQAENLIVGTEATSFYDFHVMEHLAQSPLLAHLPPSLFRFNAKMIRDFKKALRAPHVKNDYRDAFAIAMRLRVGDLPAAFRPQLEHLPLQRLTRFRAHTAKSLAREKNYFLSQLFLKFSAYTQIKPFSDPFGATSQAILAEYLSTDELMAMPIEDLLEFIIKKGRNRFPDPQEVVEKLKKVARESYRIRPALAQSVHLVLTLSYKNIRTLTSTIKELDEAIAKELEGFTTTLKTIPGIGPVYAAGILAEIGNIDYFPGHPKLAKYAGLTWTEHQSGDFRAEETRIIKAANAYLRYYLVEAANLVRLHDPTFRAFYQKKHQETLKHKHKRALVLTARKLVRVIFAMEKNGTIYRPRA

SEQ ID NO: 219040 - protein, 378 aa, unidentified
MSKNKYVAFDVHLATIAFCILDASGKILWEGVFANTAETIRDFLCGIRGRIHLTFEQGTQAAWLHDLVKPLVASVLVCNPRYNRVVLCGNKSDRIDARKLAEQLRLGGLRAVYQTEYSLRPLKQLVLGYEALITDSVRTMTRIRSLFQGRGIPCQGKALYNPANHDFWLAKIPEPGLRFRLQILFRQLDSLMPLREEGKKQLLLECRKYPAVRLLKRIPCLGPVRSAQIVAVVATPHRFRTKRQYWPYCGLAVVNRTTSDYEILNGRVQKKIRKASTRGLNRDYSRILKRVYKSAALQATTHKLLGPLYQSLLQQGLEPAMARLTIARRLSSTSLAIWKKEAKFDPNAFFTNRFDSSNRKEEKRKNKLSLNKGKETAQ

SEQ ID NO: 219041 - protein, 346 aa, unidentified
MKIIGCDFHPSFQQIAVFDTETGEITEHKLVNGNGEAERFYRSLPVGSRIGIEACGNSHWFIDLLGRLGHQVWVGDAAKIRASYVRKQKTDRRDAAHILTLLLENRFPKLWTPSRQERDQRQLLIHRHKLVQIRTRIKNSLQHLALNQGVQKKQKLWSKEGQKLLIQLPLQGWTAVRRQDCRELLAQLDERIARLDKAAEQAAEAHPQASLLMQQKGVGPITALAFALTIGDVSRFPHSNQVASYLGLIPSEHTSSSKRRLGSITKQGNSFLRMLLVESAQSVTRCDPQFRKHYLHLCRNKHKAVAKVAAARKLAVRLYWVLRTDQNSQNAVHIESSPRVPLVGAS

SEQ ID NO: 219042 - protein, 348 aa, unidentified
MNIQHYIGFDIHKKSISFCAKAAGGEIIDEGKLAARRQTIEQWARKRTAPWHGAMEATLFSAWIYDVLKPYAAKLEMGNPAMMKAISAGKKKNDRVDARKIADMVRCNLLPSCFVAPPEMRDLRRMLRYRNLVVQQSVQMKNRMSGLLMEVGAEYNKQRLHGAQYFSELLDQLQETPESVKDLLRLSRSALETFTAAQRQILARLQKDPLLAQRVQRLRTIPGVGEVTALTWALEVCTPSRFSSIRDAVSYCGLTAADRSSAEKSQRGPISKQRNAHLQTVLVEAAKLAPRWNAQLAAVHDRERNKGHRNRATLEVARKLVAYLLAVDRSGKPFQARSPAREESTVAA

SEQ ID NO: 219043 - protein, 418 aa, unidentified
MGKRKNRVCGADVHKDIIVATILNSDNTEFQGKFGTTSIELGRFRDWLIAHNCEQVAFEATGVYWFPVYDALSPSVDTIVANPWMIKGIPRNKSDTLDSKWIADNCLDGKIKRSRVLPKDDRDLRTLTRARSAYTKTRTQLRNRIHKYLALCGITLSSYISDIFGKSGRHILDGLIESKDIDTILDSIPSGKVKKKRELIKASLGKGLDDVSRMLIKDTLELLHHLEEKVNDTSLVILGRLQERAKDLAIVMSVPGIGFVSASIILAEIGDYHDFQTSEQLVKWCGLAPGLNESAGKKRPCGITKQGSKSLRTILVEIAQVVAKMSNNKLSRFFHRLRARKNYNLAITALARKLISIIFHLLINQELYQENNCTTVKTKPIKKDLLCLSKEEQLKDGVAAIVDAFYHLKKKSSLEGGG

SEQ ID NO: 219044 - protein, 346 aa, unidentified
MEVLIGVDPHKGTNAVAVLNGREELLEYALFATNRAGLRSLRRWAKRFGERCWAVEGAGGVGRPVAQHLVAAGETVVDVPAKLSSRIRLLSMGNERKNDRVDAVCVAVAALRGKRLTEVGDEEGQATVLKMLSERRKDLIKERTRTLNRLHGLLRDLVPGGAPKNLSAHKAALLLRGVRPRVDPALTRRRLAADLISDVRRLDRGLSDLERHLREAVEKASTSLTGLFGVGPILAAKIIGEVGTIARFPTKAHFASYTGSAPIEASSGEVVRHRLSRAGNRQLNHALHLIAICQVRHDTEGRTYYRRKLAEGKSEKEALRCLKRRISDAVFKKLYADLEGEISTAA

SEQ ID NO: 219045 - protein, 384 aa, unidentified
MHFIGIDMSKDTFHVAFDDQTVKVFPNISSGVATFIETLILTGAKKETTTIGVEATGVYHLLLAETLRCKGWCLKVINPLIPSRMIKTNSLRRVKTDRTDALAIRKCLLTGAGYEYTDTPEILALKALVQERQTLCGLRATLKQRQHAHSYKARVTKLKLHDSFSKTIITITKEITVLEKKMDNYAKPTQQLLRTIPGVGKTSAAALVAYVSDINRFASAKKLTAYIGIDCRVQQSGTSIHGKGYISKRGNSYLRTLLFNAAFIAQRRNPILRAYFEKKKKEGKHYFSALCAVERKLIHLRRSGTSRIPQNPANAGFCVDNLFDFNIPSFLFLQFYLLVILPNMLLWQCVPYKLERLLLRVIQRHPIFLIILSFSYRISFIISF

SEQ ID NO: 219046 - protein, 454 aa, unidentified
MGTPGCRLFERESQTLDVQRAPRVDALLGRFGKGPTVEIIYERVAGIDVGKKIIAVAVRTPGERPGKRRQQLRKFNTYYQTLTEMVAWLIAEGVTHVSMEATGVYWRPVFHALCEAERALEVLLVNARHVKNVPGRKSDALDAVWLAELTECGLLRGSFIPPREIAAIRELTRYRKKLIEQRTSELQRLAKVLEDGGIKIDSVASALTTLSARDMIEALINGERDPGVLAEFARGKMRRKISDLRLACAGRFGAQHALMCTLHLEHIDHLADMIARLDTRIDEASLPFVRQTTSLATIPGISERAAQVIISEIGIDMARFPTAAHLASWAGLCPGNNESAGKHRSGRTRKGSKELRALLTECAWSAGRTSTYVGAQFRRFHRRFGSKGGKKAATATAHTLIVIIWHVLAEATAYRDLGSDYFTRRLDSPEARKRRLIHELEALGHKVTIEPAAA

SEQ ID NO: 219047 - protein, 329 aa, unidentified
MEDVMIHIGIDLHSRNMTLVAINDNGKMLAEAKHPTAPANLSLFFQQFDGPVHAVVECTSYWYWVADWCSGHGAPLSLAHAKMLKAISYAKVKTGSVDARTLAGLLRVGLIPEAHQCRRDQRDLRDLTRGRLRMIVRRSRLQSSLWQLAGKYNVIVQDVGWRYLGSLEEFLTKRLPSVALVEAKLLLEQIRLTQHHVIDMEQAIEEQTGFHGQVQRLKALPGFGLVCAWTVVAEIGDITRFPTAKQFTSYCRLVPGSKDSGGKHRHRSKNKDGNRYLRIAFNQAAIIAYTHYPVVKAFYKKVTRRSGKHVARTMSQPKSGRHRRRIQRI

SEQ ID NO: 219048 - protein, 343 aa, unidentified
MDYFAGLDVSVKDTSVCIVDDAGKIVREVKVASEPDALLQVLRNPAYCFKRIGLEAGPLSQWLFSALGEANLPVICGETRHMRAVLKAQINKTDRNDARGIAQMMRVGLYRPVHVKTLRSQKLRMLLTHRKLLQSKAIAIENDLRGTLRNFGLKVGIVGRTKFEARIEELVEEIPDLAVLVEPLLVVRRVLREQIAILHRRLLTIVRDDEVCRRLMTIPGVGSVVALTYRATVDVPARFRRSKSVGAVFGLTCSRDQSGERDRPGAISRCGDEMMRSMLYEAAQSMLVRSTRWSWLKAWAMQIAKRRGMKRAIVALARRLAVVMHRLWVDGTEFRWTREAAAV

SEQ ID NO: 219049 - protein, 359 aa, unidentified
MDTVARSAIIGIDVSRDWLDIHCLPDNQRLRLPNTAEGHERLSEMALSQSALVCFEATGGQKWRLWAILDAAGIVTRQLPPAQIKAFAASRGTRAKTDRIDAELIAHFMAFRPDAGRTLPHTKLRLLRALTSKRGQLVETRKRLLAQIKAHGKLGSAEMFADMDEDLKGLLDCQIAGLEAQIEQIIAKDECMAKTADILQSVPGIGPVASTMLIAEMPELGQITGEQAAALTGLAPIAHDSGAMRGKRAIAGGRRLLRHVMFQAALVASHHNPVLKVFADRLRAAGKPHKVVITTVARKLVTIANALCKARQKWAFQPALEIQLLDTTKRTRPSRNVCRNIAGPTEGLPSGLAVGDINA

SEQ ID NO: 219050 - protein, 358 aa, unidentified
MQRNKISFKGQKIFIGIDVHKKNWDVAIAPKVGNVKRHTQKASAKALFDFLKKHYPDGDYLAVYESGFSGFSTYYALKEVGIDSIVIHAADVPTTQYEEVMKTDRVDSVKLVRSLKAGLLKGIYIREKENIDDRSVVRIRKTIQKQLSGYKARVKHMLHFNGVQLPERFEKPGSHWSKAFIKWLKEDVMLLSSTRNSLDLLIRQVETIRMTLLEATKMMRKLSQTERYKHKFDLLQTVPGIGVAVSMCILTEVFDVKRFHNEKEFAAYLGLIPTSHSSGDKVAHGEMTFRGNKQLGPMIIEAAWITICKDAGLGSLYLRYKERMKPQEAIVRIARKLSNIIFAILKNEKEYVPYHTGK

SEQ ID NO: 219051 - protein, 298 aa, unidentified
MSSIAAARGLTFLGLDVHRDTISVAVLGPGREEAPTVDRIANDEPSVRRLVARFADPRRLRACYEAGPTGYELARLLHRLDVRCQVIAPALIPKAPGDRIKTDSRDCRRLARLHRAGELVAIRVPTIAEEAVRDLCRARADMLADRSRARLRLGGFLLRHGRIWRGGSSTWTFAHERWLLAQRFDDPALQTTYAHYRATLPARDAARDAIEADLATWYGQPPFEDAVARLAAYRGVTRLGALTLASEVGDWRRFATAPQFMGFCGLVPSEYSSGSSTHRGRITKTGNSHLRAQLVESA

SEQ ID NO: 219052 - protein, 321 aa, unidentified
MSEIGFTQVVSRGCGIDVHKKTVVATIKGEGLKSQTREFSTFTSSLTSLKEWLLSEGVTHVAMESTGVYWKPVYNVLEPSGLTVWLVNARHIKYVPGHKTDKKDSAWLCKLLLAGLLKPSYIPKKEQRLLRDLTRYRKRLIQQNASEQNRIIRILESCNIKLSSVLSSVQGVAGTKLIDKLCQGKSITMSDIDLVYNKRMLSTREELYEACQGLIDPIQIYLLQTIRSNIAHTERVILGVTQQVGELLAPYQNKIEQLREIPGLDRKTVEDLIAEIGLDMSVFPTEKHFASWIGICPGNNESAGKKKAHESHTATNKQNLP

SEQ ID NO: 219053 - protein, 458 aa, unidentified
MSIVHRCCAALDVHKQSVTVCVRTGISRREQTLETAKFGTFTEDLEQLAEWLKQRKVRHVAMESTGVYWKPVWNVLELTRRHFRLLLVNPAQVKALPGKKTDRRDAKRICGYLQQGLLRGSLVPGRQQREWRELTRRRAHVQGDRNRVINRIRRLLETVNVKLGSVISNVVGKTGLAILRDLAAGHTDPERLASNMFGRLKCTRAQMIASLRGRFTDHFRWELKHLLEQLDFLDRQVAEYEARISQSMAGHEDLLARLCTIPTVDLITAWTLLAEIGTDMSRFPTAAHLCSWAGLCPGNNESAGKRFSGKTRKGDRYLRRTLVQNAWAVSHMKKGRLKQMFFGVARRRGMPKAAMAVAHRILQIAYFIIRDGTMYREVGVEMDERKRQRTAKRLARRLEEIGFEVSIKPRSGPPGAHARIPNAPGPLPGQTCKMCNAWGRACIHARNAVKTPPPTPST

SEQ ID NO: 219054 - protein, 401 aa, unidentified
MKRLSGGIDVGSGSHHILILDDEDNVLYNKKISHRINEFAENINLFKQMEKRERGKISFALEGKNGYSAPLDRILLDQGFTLYNVDNLKLKRFREAFAGEWRDDERDSLMLSKMLKLKDYINSEREKVFIKIEKPSLLTESLKLLSRHQQTLIDEKVRLINRLRKKLLEVCPQILELGKLKNKKIIAVLTKYPDFSKYKRITLKSLLKIKGTGKKGAPFLLKRLNNIEYMPGLTDIYKTIILSYAQRILELQREIKDIDKSLDEIGEKNKEVNHLKTIPGVATKLASRLIGEIGDINRFPSGKQLAIYSGVACVNNNSGKVTKAKAVYKANKICKQTLITMAGCSIRSIHQCKAYYLKKRAEGKTHNHTLRCLARQMIKVIYKMLTEDRDYIIRKELKKVA

SEQ ID NO: 219055 - protein, 406 aa, unidentified
MEGPIITVDVSKGSCHYQPFIENGHPMRKPKQLSATNDGFQKLGQTIKDLEAKTEREDIPVIFEATGVYHRLLQKYLEDHKIRYYIISPLLSATYRKTDLHSNKTDALDCSHIAKAYYCEKELRQYQAQPQEYKRLYQLSRIYESELVHLRKRKVSLRSMLDIIYPRIDKTFKGNQNLYDPIPMEILKRYPHPSLLLSHRKDTIVKNVGHRTGHLKGYTERIVHKIYEKAKECYSGCDIDDIEVVKLPSLIENVQEQKKKCGSLLKEMIEIARTCPYFASIVSIVGIGENLAARIIAELGDVNRFDNRAAIVAYAGLNPKIQQSGDIDGLHLKISKKGNKHLRCLLYLGAQCNYRLRKEDPLYEFTKKKRQQTQCPLSSKAAYTASAHKLLVIIYSLCKNGTLYHS

SEQ ID NO: 219056 - protein, 449 aa, unidentified
MKEPQEVEDEEYEQILERVCAIDVAKASGKVCTRVPHPSRPGARQTRVWDVDATTNAILELGGHLAGEGIEKVTLESTSDYWRIWFYLLESYGLDVQLVNAGDIKNVPGRPKTDKIDSVWQAKLTERGMLRPSFVPPAEIRRLRDYTRLRTDLTRERARHWQRLEKLLEDALIKVSAVASTMDTLSVRDMLEALIAGERNPKVLAGLARGRMKAKRAALIEALTGRFDDHHAELARMLLDQIDHLTAQIGTLTTRIGELIAAIPAAQGIGADGTTGPDAGAGPDAALPDALTRLDEIPGISALGAQIILAEVGLDMTRFPTAGHLVSWARLCPRTIQSGAKNRSGKAGKGNPYLKGILGEIAAAAAKTDTFLGERYRRLVKRRGKLKALVAVARSILVIIWHLLADPTARFRDLGAGYYASRTDTDRKTRNHIRQLEALGFTVTLAPAA

SEQ ID NO: 219057 - protein, 336 aa, unidentified
MEREYVGIDLHRRRSVIVRMSASGEKLSCVRLANDPVALSLEVAKAGPDPDVVIEACYGWYWLVDLLQAQGAKVHLAHPAGLGWEGRRVKNDEIDATDLVDRLRMGRLPEAWIAPPAVRELRELVRYRAKLVALRSGLKAQVHAVMAKQGILPGLDDMFGPGGQRLLDEMPFDPVYRVRVESLRHMIGRYDDEVAALEREIHTWLRDDKGYWAIQAIDGVGKTMAAIFVAEIGDVSRFATPDKLCCWAGLTPRHRESDTKVSRGAITKMGSTLVRWAAVEAVARYRGGEPIRDAYERIAARRGRRVARVAAARRLLTLVYFGLRDGEIRCLAERAG

SEQ ID NO: 219058 - protein, 424 aa, unidentified
MSQIFVGIDWGSRKHQVCVLGNDGARLRDGTVTHGETGLRQLLDWLRQLGGQDLSCIAVAIETPHGAIVDALVEAGAQVYHLNPKQLDRFRDRYNVAGAKDDRLDAFVLATSLRTDLAAYRRVHPEDPRIVELREASRLERHLLEQQHAAACRLVAQLNRFWPQLLELVPGANEPWLWALLRLAPRPQEARRLTRSKLVKLLRDHRIRRFDVDRLMSLLDQLPLSVAAGTVTAATGHMAVLIEQLQLLHRQHRDCTAWITRTLAQLRDKASEPSEQPRQHRDAEILLSMPGVGKLVAATVLSEATHAVATRDYQLIRALSGVAPVTRASGKRRQVLMRRACNPRLRYALHHWSLNSLQRDPASRAGYDVLRERGRSVGHAMRILGDRHLRVLMAMLRHGTTYVPHPPATRCVEDEANQKETRTA

SEQ ID NO: 219059 - protein, 337 aa, unidentified
MSPPQLVVGVDIAAASFMAAWARPGHAPSTPQPFDQTPAGFASFQKQLATAGVAPDATLVVLEATGSYWVALAVELHSAGYRVAVANPAHVHNYAKSLPRRGKTDGLDARLLTQFGLERQLASWTPPPAVYHELRQRLVARDGLLTMRQQARNQLHALEQWPVRVAAVQQQMTAVIASLDEQVRTLEQAITAVLADGAWAASAAHLQSIPGLGMVTAAWLLVGTVNFTTCASAQAAANSAGLVPLERQSGTSIRGRPSIGHGGNGRVRTALYMATLSAARYNPVIKTFYTRLREAGKPAKVARCAAARKLLHLAFAVVTKAQDFDPSYQKTPVVSLG

SEQ ID NO: 219060 - protein, 343 aa, unidentified
MSEISMIGLDVAKNVFQVHGVDGSGKEVLRKQLRRNAVEKFFAKLPPCTVGMEACGSAHHWARVIGHYGHDVKLMPPAYVKPYVKRNKNDGRDAEAICEAVSRPTMRFVAVKSVEQQAMLSVHTTRALLVKQRTMVANALRAQLSELGIVAAQGHEGLHELMTRLEAPSDEIPETMRSALLMLVEQWQALDARERVLERQIAKAARCDQDARRLMEVPSVGPIIASAMLAKVPDARVFRSGRDFAAWIGLTGKDHGTGGKHRPGRISKQGDRTLRTLLINGASAHLRQQKRRGVSDPWLRELLERRPYKVAMVAFAAKTARIIWAMLAKGEAYRDRASAPAAA

SEQ ID NO: 219061 - protein, 412 aa, unidentified
MQDILTCAMGLDVHRDIIVACLVKGAVDAEPEAETRTFSTLIPEMQKLRDWVIESECRNIAMESTGIYWQPIYEMLESCFDGEISILVVNARHMKNVPGRKTDMKDAQWIATLLRAGLLKGSFIPDKAFRELRHLTRYRKSVVHDITAQKNRIDKFLQSSGFRFTAFLSDTFGASGRNIVRHLIEHGSIDREALDKCLKTKTRNRIDEILVALNGSLSEHQCRFLNMVFRHLEDLEAHKHTVEDEITEEVLKHTDALNLLCSIPGIDVTAAAAIIAEIGTDMSSFPDSQHICSWVGLSPGNNESAGKRKSVHINKGNPYLKNMLCEVAWIMASHRKLYLSGWYWKVKQRKGAKRATIALARKILSIIYTMLKTGTPYNEECFEQRKLRCERKRANRLVNELQKLGYVVVAPD

SEQ ID NO: 219062 - protein, 402 aa, unidentified
MPMLSIGIDVSKGKSTVCGMKPGGEIVYTPFEVQHTREGMSELVSLLRGSGEEVRVVLESTGSYHCPVVAALLENGIFVSVVNSLRMKRFCSQSIRRVKTDQIDAMQIALYGLAYWQELQPTRLPENTYRELQLLARQYYQMTSLLIKAKVDFNALCDQVLPGMQELMSDHAGRHKLSDFVLRYRHTTHILEMGETRFRKDYCKWAEKKGYRNRERMAALIFATAQNGIPVLPDAPSTQIVITEAIRVLHTVEASRDAILTQMQALAKTLLEYSLVREMPCIGDTLAPRLIAEIGDVRRFHSKRALIAYAGIDAPPYQSGKFCANNRHISKRGNRYLRKTGYEVMQSYVMHKPANDPIFTFIEKKRGEGKSGKLAMVAGLNKFLRVYYGKVTELYRSLPTIE

SEQ ID NO: 219063 - protein, 340 aa, unidentified
MNVSTIGLDIAKSVFQVHGIDNAGAAVVRRRLRRAEVLRFFSQLEQPCLVGLEACASAHYWARELRALGHTVKLIPPVYVKPHAHRGKSDAIDAAAICAAVVNPNTRFVPIKTPEQQASLSLHRVRQQLVSQRTRYGNLLRSQMAEFGFVAKTGPRHVADLTAIIADEADARLPAQARIALAEVAATLKELNLRIAAIDQAIVAGHKTDATSQRLATQPGVGPIIATAFAASVPDPRHFRSARHFAASLGITPRNHSTGGKERLGKISKMGDRYLRMLLVLGATSRLAQAQCHRRPEDAWILRLLARKRTPRVVITAIANKMARIMWVLLARGETYRAVA

SEQ ID NO: 219064 - protein, 350 aa, unidentified
MMIIGCDLHTRYQQIAMLDTDTGELVERRLEHENGEARAFYSALLGPVRVGIEATGYTHWFEDLLAELGHELWMGDAAKIRASVIRKQKTDARDAAHLLDLLRQDRFPQIWRPSPAERDLRQLVWHRQKLVWMRGAVKNQLHALAMGEGVCRKKKLFTAKGRKELEGLALGPWASYRRQELLRMFDELAAATAQLDLAVEQAAKSQPLAVRLMTHPGVGPVTSLAFVLIIGPVERFERSKQVVSYLGLNPQEHSSGGKQRLGAISKQGNPMMRSLLVEAGHTAARFDPALKRMYQRLKFRRGASVAKVAVARKLAVRMYWMLRSTADYAQLVRMQGSPWATLVEDSPSLG

SEQ ID NO: 219065 - protein, 342 aa, unidentified
MSEVTIIGIDLAKRVFHLHGARDDGSVMFRKKLSRAQLLAFIAQHPRCIVAMEACATAHGWGREFEKLGHDVRLIPPNYVKPFVKRQKNDVADAEAIVEAALRPTMRFVPVKTEDQQTRAMLFRTRQMFVGQRTQMINALRGHLAEHGLVAARGPAHLKRLADALDDSNAVLPDDVRDLGRIYLEQIEGLNALVAELDGKMRRAAREADLARRAQTMPGVGPVTALAIETFAPDLASFRRGRDFAAWLGLVPRQHSTGGKARLGKTSKMGQRDIRTLLVSGAMAVLQAVERFDTPNNGWLKRLLTRKPRMVAAIALANKMARGLWAMMTKQEDYRNPVAAMA

SEQ ID NO: 219066 - protein, 431 aa, unidentified
MPLTLPARPKEPQPIPPMPTHSELTHFAGFDWASDHHDVIIVDTSGKLVADFKFDHSAAGWLLWKEKIAAYPKLGVAIETSFGAVVEQLIDSAVRVYPVNPASAKRYRERKFPSGTKTDRHDAWSLADALRTDGHGWRVLSPKDPIIEELRMLCRDEVALIEERTALINQARQAARDYYPSVLEAFDDWTVPSTWAFVERFPDAAALLKAGKRQWQNFMHAHRLYRPEMAEKRIAIFEAAAQWRISDYMVKAKRLYLLTKIKQLRALQLQLEEYRRRIAALFASHPDSGTFGSLPGAGAKIAPRLLAEIGSDRALYESAQSLQSISGTAPVSFQTGKINKVLMRRGCNMHLRHTMHLLSDLSRAQCRWAKVYYEQVKARGKTHAQALRCLGQRWLNIIYRMWQERTRYDGERHAKNQLKHGSWVLQITPGK

SEQ ID NO: 219067 - protein, 351 aa, unidentified
MVTQITALPKLYIGIDIHKRSWKIHCSTDLFSGKSISMEPEPEFLRKYVERHFPEYEVWSAYEAGCCGYYAHRCFESYGWSSMVVNPADIHRKGKEKHTKTDRIDAQLISRELKDGRLESIHIPSIEREELRSLFRRRNDLVKDFRRIKSYIKMQLLYFGIKEPLGFDNDHWSHSYRKWLDEMMFKYPTAKATLESRMRFFRFVDKELRDVSSQIRAYCRKYHKKDYYLLRSIPGIGGIVACGIISELGDLRRFNSVKHLAGYVGLAPGVHQSGGNFKTMGITMRAHRLIRSYFVEASWQAIRADPVMQAYYRKHQGKNVKSVIIKVARKLLSRTLAVIKTETPYTIGVVE

SEQ ID NO: 219068 - protein, 469 aa, unidentified
MRTDKKLWRNRKARKELARRLQSENPGLEVLHPHAAGIDVGNSAHYVAVRPDRDPQPVRRFECFTADLHRLANWLQSCGVKTVALQSTGVYWIPLYDILEERGFEVYLVNARHTKNLPGRKSDVQESQWLLKLHTYGLLNNSFQPPSKIRILRTYWRQRLQHVTGAATCVQRMQKALTQMNIQLANVISDLSGVTGQMIVRAIVGGERDPLKLAELSHPRIQASRGEIAKSLEGNWRQELIFVLQQEIEMYDTYQRRVAECDQQLQKQLTSFADTVLPPVNEALPPKKKKKQNKNNPHFHLADELQRITGVDLTRIDGVDVIVAQTLVSEVGLDMSRWKTEAHFASWLGLCPDNRISGDKVLARGTRHVLNRAANALRLGASTLLRSQTYLGAQYRRLRSKLGAPKAITAMAHRLARLVYRMLKHGQHYVDKGAEYYEQRNRQQQIDFLKKKAAQLGLQVTPAHAETIN

SEQ ID NO: 219069 - protein, 356 aa, unidentified
MEHVNKLDFSGQTIYVGLDVHKKSWSVSIFSEQCEHKTFTQPPDVDKLVHYLKRNFPGADYRAVYEAGFCGFWVHDQLRDQGVNCIVANPADVPTTNKERTNKRDRIDCRKLSRNLRSGAIQGIYVPSRPKLEDRSLVRTRQSMMKKQTRCKNQMKSLLFFYGIDLPEELVRSSWSQKFLRWIEGIRMERDSGDMVLKAHLEELKHLKPIIASLNRAIIILSREAEYRDGVRLLRTVPGVSTLTAMILLTELCELARFATLDHLASYVGLIPDTKASGETEHIGNLTHRRNAQLRAVLIEAAWTASRKDPMLLLAFNEYCKRMRKTRAIVKIARKLLNRIRYVLKNQTEYVPGVVQ

SEQ ID NO: 219070 - protein, 378 aa, unidentified
MRRRSPHGKKVVVREVNKNNNNKQTMRRPDDKLFAGIDLHSNNLMIGVINQDGTRVAHRKLECDFGAVLRFLDPFKPQLRSLAVESTFNWYWLLDGLRTQNYPIDLANPTKIEQYSGIKHVDDKDDAYYLAELQRLKILPKAHVYDPQLRPVRDLLRRRSSLVHQRTALLLSFKSLFARTTGQQLDLREVKKMEPQEAPKLYQHPANQLIAQVQAEHMQALDKSIQRLEKAVLGCAREIPMYEKLLTIPGIGRILGMTITMEVGDIGRFKSDGDFASYCRMVDARRLSNGKQKAENNQKCGNKYLSWVFVEASNFSRRYDERCRRWYDRKAAKTSKVIATKALGCKLSKAAWHVMAGQCDYDERRMFPELAGQKLKAS

SEQ ID NO: 219071 - protein, 387 aa, unidentified
MISVGIDIGKRSHEVCLMDAEGHQIGKFFRFQHSRQGMTTLIELLRRQPEPCIIALEATGHYWLALYHNLLQEGFKLVTLNPLQSHAYRRSTIRKVKNDRRDAWVIADLLRIGRVRPGYVPGPDVQPLRDLARFRMELVDQVGDTKRRILGVLDKVFPEYESFFSNVFIATSKELLKRAATAEEFAALDLKEITRVVTKASRGRLGLERAELIHQAARTSLGLPYLRDAATLELRCLLAQMEFLESQVKATEDAINKLFSQVSQHLTSIKGIGTISAAAIYAEIGDIHRFTIPESLVAYAGIDPTIFSSGEFEGTKRHMSKRGSPYLRKALWMAATGARRWNPDLDAFFTKKLQEGKPYGVAMGALCHKLLGRIYVILKENRPYEMR

SEQ ID NO: 219072 - protein, 345 aa, unidentified
MEHFAGLDVSVKQTSVCIVDGTGRLVREVRVASEPEALLPVLTNPLYRFKRIGLEAGPLSQWLFSALAEADLPVICVETRHMRAVLQAQINKTDRNDARGIAQMMRAGLYRPVHVKTLRSQKLRMLLTHRKLLQSKAIAIENDLRATLRNFGLKVGVVGTVKFEARIRELVETLPDLAELVEPLLIVRRTLREQIGILHGRLLAIVRHDDVCRRLMTVPGVGPVVALTYRATVDVPARFRNSKAVGAVFGLTPSRYQSGEVNRTGAISRCGDEMMRAMLYEAAHIMLVRLAKWSWLKAWAMKIARHRGIKKAIVALARRLAVIMHRIWVDGTEFRWTREQAAAAA

SEQ ID NO: 219073 - protein, 330 aa, unidentified
MAYKWFVGTDVSKKTLDVTLFFRTEGEKSPHKQFCNDDKGYQAIIKWMEKQSVNSQEALFCMEHTGMYSVGMAMFLEQAGLAYSLVSPLHIKRSLGLVRGKNDKVDSFQISRFCYLHREELPLTTLPLASIQQLRWLINERERLVKIQTTEKVVLGELMNANTKNTLKRIEARISMFSLDISCVEQEIEQLINSEPSIAENYKLIRSIVGIGLVNAALFIVYTCNFHAFTDARKYACYGGIAPFENTSGTSIRGKTRVSHLANKRIKVNLSNAARSAIQHDPELRLYYDRKTKEGKAHGVIMNAVKFKLIMRVFAVVKRGTPFVKMRLAG

SEQ ID NO: 219074 - protein, 346 aa, unidentified
MLYAGLDLSRKRLDFHLLDADGATVEVGAAPPDADGLHRLTQRLDRYRTPICAAIESMNGARFVHDRLELAGWQVEIADAHKVKGLAPLACKTDRIDAWVLAELSRRELVPAIWLPDPAVRGERERARWRLHLVRHRSSLKQRVHAVLLTHGKPCPVSDLFGVRGRQLLARLALPEPWQGTIEASLRLIDELDREISGCERELRRLGADHRSVPLLCTVPGIGWVLAYTIAAELGDINRFPTPRKLTGYTGLCPRVYQSGERDRRGPLAKQGPRYLRWALVEAATHACTHPAYRDRYQQTKARIGKQRGAKVAQIDLARRLTEAIWHMLTRDQPFAPKGATDPLAA

SEQ ID NO: 219075 - protein, 346 aa, unidentified
MQNNTLVAVDIAKEVFEVAVSDRPGRVAMRKRLLRDRFVAFFAQQPKATLVMEACGTAHYWGRRLEELGHVVVLLPPQYVRPYVVRNKTDRTDVDALLEASRNQQIRPVPIKTLTQQVIASLHRLRSGWLADRVRSINTLRGLLRELGFFIPEGRRHVLPEAWEIIHDHHRGLPDALRPGLAALCEEIASLSTRIEDVETQLEALARQIPTIARLRSVPGIGLLSATALYAFIGHPARFPSGRHLASFLGLTPREYSTGLRRRLGRISKRGDSYLRLLLIHGARSVLYHAKRMKDRDRLRSWALRLEQKVGHNKAAVALANKLSRITWAVWKHDRSFEPLPEPQAA

SEQ ID NO: 219076 - protein, 398 aa, unidentified
MLYLAIDQHRKQLTVNLRNEAGDVIVKRQVSTEWKRVREFLDELRNQSVPEGGVAIILEVCGFNDWLLKLLAEYGYQQIVLVQAEKRDRHKTDRRDANALGELLWTSRHRLAAGKNVLNVRQVVPASPRDAEDRQLTTLRHRLCRLRTRTLNRVQHLLLKHNLQRDCPTKGIKTKAARKWLSELTLGPIDRLELDQLLAHWELADKQLAELEPELAERQALNATARLIATIPGAGAFGSLTLASRIGAIERFPHAGSLAKYWGLTPRSNNSGDSKQRLGSITKEGSALARFILGQMVLHVLRRDAATKEWYRRIKKRRGAKIARVAVMRRLATILWYMIKRQQPYKLSAANDPAAACATVPPDVNAFFKASQGRSKEEKKKAAATRKAPAAKASLTRP
